United States Patent Application Publication US 2005/0244851 A1 - sequence listing, part 21

SEQ ID NO: 798691 - DNA, 25 bp, Homo sapien
gccacagattagcagcagggaagcc

SEQ ID NO: 798692 - DNA, 25 bp, Homo sapien
acagattagcagcagggaagcctga

SEQ ID NO: 798693 - DNA, 25 bp, Homo sapien
gacttaaattgccatcccagcacat

SEQ ID NO: 798694 - DNA, 25 bp, Homo sapien
cttagccccacaatcagagctttca

SEQ ID NO: 798695 - DNA, 25 bp, Homo sapien
tatcctgacttaaattgccatccca

SEQ ID NO: 798696 - DNA, 25 bp, Homo sapien
tcctgacttaaattgccatcccagc

SEQ ID NO: 798697 - DNA, 25 bp, Homo sapien
aaacatctgcggcaccacgtaacat

SEQ ID NO: 798698 - DNA, 25 bp, Homo sapien
aacatttcttgagctgtagatattt

SEQ ID NO: 798699 - DNA, 25 bp, Homo sapien
gcggcaccacgtaacatttcttgag

SEQ ID NO: 798700 - DNA, 25 bp, Homo sapien
cctgaaaacatctgcggcaccacgt

SEQ ID NO: 798701 - DNA, 25 bp, Homo sapien
tttctcttatgacttgcttgcaaag

SEQ ID NO: 798702 - DNA, 25 bp, Homo sapien
gacttgcttgcaaagctttattaaa

SEQ ID NO: 798703 - DNA, 25 bp, Homo sapien
gacaagaggctgacctcgtttccta

SEQ ID NO: 798704 - DNA, 25 bp, Homo sapien
gaggctgacctcgtttcctaagcat

SEQ ID NO: 798705 - DNA, 25 bp, Homo sapien
tgaaggaagaacatgtattgccagg

SEQ ID NO: 798706 - DNA, 25 bp, Homo sapien
taccttgagtgtactatgacgatga

SEQ ID NO: 798707 - DNA, 25 bp, Homo sapien
aaatcgagctctgggtattctgatg

SEQ ID NO: 798708 - DNA, 25 bp, Homo sapien
catcagatgatgctatgcagctctg

SEQ ID NO: 798709 - DNA, 25 bp, Homo sapien
aagtgtgtacctatacacaccttta

SEQ ID NO: 798710 - DNA, 25 bp, Homo sapien
gtgtgtacctatacacacctttacc

SEQ ID NO: 798711 - DNA, 25 bp, Homo sapien
agtgtgtacctatacacacctttac

SEQ ID NO: 798712 - DNA, 25 bp, Homo sapien
tgtgtacctatacacacctttacct

SEQ ID NO: 798713 - DNA, 25 bp, Homo sapien
ttcctggacttggtttcagttccca

SEQ ID NO: 798714 - DNA, 25 bp, Homo sapien
ctgttttcctggacttggtttcagt

SEQ ID NO: 798715 - DNA, 25 bp, Homo sapien
tcctggacttggtttcagttcccat

SEQ ID NO: 798716 - DNA, 25 bp, Homo sapien
tctgttttcctggacttggtttcag

SEQ ID NO: 798717 - DNA, 25 bp, Homo sapien
tggtggaatcctgcttaggaatgct

SEQ ID NO: 798718 - DNA, 25 bp, Homo sapien
gctacgccgaattgttttctggtct

SEQ ID NO: 798719 - DNA, 25 bp, Homo sapien
gttctggtggaatcctgcttaggaa

SEQ ID NO: 798720 - DNA, 25 bp, Homo sapien
tgcttaggaatgctacgccgaattg

SEQ ID NO: 798721 - DNA, 25 bp, Homo sapien
cttatgatggatttctgaggtagca

SEQ ID NO: 798722 - DNA, 25 bp, Homo sapien
ctgccgtttctgctaccttcacaag

SEQ ID NO: 798723 - DNA, 25 bp, Homo sapien
tcagcgatatccaaataattcagcg

SEQ ID NO: 798724 - DNA, 25 bp, Homo sapien
tatccaaataattcagcgcctgccg

SEQ ID NO: 798725 - DNA, 25 bp, Homo sapien
agtggatgaagctgtggactcttgt

SEQ ID NO: 798726 - DNA, 25 bp, Homo sapien
tatgagtggatgaagctgtggactc

SEQ ID NO: 798727 - DNA, 25 bp, Homo sapien
cattcccaattgtatgagtggatga

SEQ ID NO: 798728 - DNA, 25 bp, Homo sapien
gtaacattcccaattgtatgagtgg

SEQ ID NO: 798729 - DNA, 25 bp, Homo sapien
ctagagtatcattggtgtctatatt

SEQ ID NO: 798730 - DNA, 25 bp, Homo sapien
tagagtatcattggtgtctatatta

SEQ ID NO: 798731 - DNA, 25 bp, Homo sapien
attttgtactcctagccaaagtgcc

SEQ ID NO: 798732 - DNA, 25 bp, Homo sapien
tagccaaagtgccaaaaattgctct

SEQ ID NO: 798733 - DNA, 25 bp, Homo sapien
gccaaaaattgctctctcctcatgt

SEQ ID NO: 798734 - DNA, 25 bp, Homo sapien
tgtactcctagccaaagtgccaaaa

SEQ ID NO: 798735 - DNA, 25 bp, Homo sapien
ttcacagcaaccttcttgactaatg

SEQ ID NO: 798736 - DNA, 25 bp, Homo sapien
cacagcaaccttcttgactaatgta

SEQ ID NO: 798737 - DNA, 25 bp, Homo sapien
tcacagcaaccttcttgactaatgt

SEQ ID NO: 798738 - DNA, 25 bp, Homo sapien
acagcaaccttcttgactaatgtat

SEQ ID NO: 798739 - DNA, 25 bp, Homo sapien
gtacctgccaccatagaattgttgt

SEQ ID NO: 798740 - DNA, 25 bp, Homo sapien
gttcacagactcttcaatgcatgct

SEQ ID NO: 798741 - DNA, 25 bp, Homo sapien
caacagattgtgctagtgtgtcaac

SEQ ID NO: 798742 - DNA, 25 bp, Homo sapien
aaaatggagatcatagtacctgcca

SEQ ID NO: 798743 - DNA, 25 bp, Homo sapien
ttacaatgggcttgtgtccctacaa

SEQ ID NO: 798744 - DNA, 25 bp, Homo sapien
acagttatattagcctacagatggg

SEQ ID NO: 798745 - DNA, 25 bp, Homo sapien
aaattatctggcaactcactggtag

SEQ ID NO: 798746 - DNA, 25 bp, Homo sapien
taccctaccttaagtgtgcacagaa

SEQ ID NO: 798747 - DNA, 25 bp, Homo sapien
agagcaatcaatcatttctggtcaa

SEQ ID NO: 798748 - DNA, 25 bp, Homo sapien
tcatttctggtcaactactggcctg

SEQ ID NO: 798749 - DNA, 25 bp, Homo sapien
gagcaatcaatcatttctggtcaac

SEQ ID NO: 798750 - DNA, 25 bp, Homo sapien
caatcatttctggtcaactactggc

SEQ ID NO: 798751 - DNA, 25 bp, Homo sapien
tagtctctggtacccttaatctctg

SEQ ID NO: 798752 - DNA, 25 bp, Homo sapien
caacaatggcaatggaagtctatgg

SEQ ID NO: 798753 - DNA, 25 bp, Homo sapien
taatctctggtacctctgctctcac

SEQ ID NO: 798754 - DNA, 25 bp, Homo sapien
gtttgcacaaccacacaacaatggc

SEQ ID NO: 798755 - DNA, 25 bp, Homo sapien
cagactggactgagcctatggaggc

SEQ ID NO: 798756 - DNA, 25 bp, Homo sapien
gacatgctccccattccttactgga

SEQ ID NO: 798757 - DNA, 25 bp, Homo sapien
aaacggacaccagagagatcaggca

SEQ ID NO: 798758 - DNA, 25 bp, Homo sapien
caggcagtaggcatgaggactccaa

SEQ ID NO: 798759 - DNA, 25 bp, Homo sapien
agagggatgtccaaccagagagctg

SEQ ID NO: 798760 - DNA, 25 bp, Homo sapien
tttggaaagctagagggatgtccaa

SEQ ID NO: 798761 - DNA, 25 bp, Homo sapien
gatagtacctctgggatttggaaag

SEQ ID NO: 798762 - DNA, 25 bp, Homo sapien
tgggaggctaggatcaagctgcctt

SEQ ID NO: 798763 - DNA, 25 bp, Homo sapien
taattcccttctctcgattatcttc

SEQ ID NO: 798764 - DNA, 25 bp, Homo sapien
ttaacaagcttgatgtcgggagacc

SEQ ID NO: 798765 - DNA, 25 bp, Homo sapien
catttagagacgactcctgagaagc

SEQ ID NO: 798766 - DNA, 25 bp, Homo sapien
cctgggcctcttagggctgtgaagc

SEQ ID NO: 798767 - DNA, 25 bp, Homo sapien
tgacatcaggatgataaaaacacat

SEQ ID NO: 798768 - DNA, 25 bp, Homo sapien
tatttgacatcaggatgataaaaac

SEQ ID NO: 798769 - DNA, 25 bp, Homo sapien
tggtatttgacatcaggatgataaa

SEQ ID NO: 798770 - DNA, 25 bp, Homo sapien
aattggtatttgacatcaggatgat

SEQ ID NO: 798771 - DNA, 25 bp, Homo sapien
tggagaaatttctggataagacagt

SEQ ID NO: 798772 - DNA, 25 bp, Homo sapien
gcagacaacagactggtgatcccct

SEQ ID NO: 798773 - DNA, 25 bp, Homo sapien
ggtgatcccctaatgctgccagcat

SEQ ID NO: 798774 - DNA, 25 bp, Homo sapien
atgatgggaatctgtctgttgaggc

SEQ ID NO: 798775 - DNA, 25 bp, Homo sapien
aggtgtgaggcaccatgtcagcata

SEQ ID NO: 798776 - DNA, 25 bp, Homo sapien
ggtgtgaggcaccatgtcagcatag

SEQ ID NO: 798777 - DNA, 25 bp, Homo sapien
caggtgtgaggcaccatgtcagcat

SEQ ID NO: 798778 - DNA, 25 bp, Homo sapien
gaggagccaccgtgagtctggaccc

SEQ ID NO: 798779 - DNA, 25 bp, Homo sapien
aggagccaccgtgagtctggaccca

SEQ ID NO: 798780 - DNA, 25 bp, Homo sapien
tggtgaggcccaatggcttcggctt

SEQ ID NO: 798781 - DNA, 25 bp, Homo sapien
gaggcccaatggcttcggcttcctc

SEQ ID NO: 798782 - DNA, 25 bp, Homo sapien
gaagacgacgagtttgaagagttcc

SEQ ID NO: 798783 - DNA, 25 bp, Homo sapien
tccctgccgaaggtaaccgctgggc

SEQ ID NO: 798784 - DNA, 25 bp, Homo sapien
ttgaagagttccctgccgaaggtaa

SEQ ID NO: 798785 - DNA, 25 bp, Homo sapien
ctgttagaggaagacgacgagtttg

SEQ ID NO: 798786 - DNA, 25 bp, Homo sapien
cgcggacagtcgagatgtcagagaa

SEQ ID NO: 798787 - DNA, 25 bp, Homo sapien
ctctatggtagcgtcagcgtcggag

SEQ ID NO: 798788 - DNA, 25 bp, Homo sapien
caacttttctgcttatctgggaggt

SEQ ID NO: 798789 - DNA, 25 bp, Homo sapien
agagaaaaagcagccggtagactta

SEQ ID NO: 798790 - DNA, 25 bp, Homo sapien
gtcattcccaccaaatcttaacatt

SEQ ID NO: 798791 - DNA, 25 bp, Homo sapien
tcttggaggacacaactgaaaactt

SEQ ID NO: 798792 - DNA, 25 bp, Homo sapien
agaatcttttcctcggtgacccttg

SEQ ID NO: 798793 - DNA, 25 bp, Homo sapien
agttagccacgcatgctccaatcga

SEQ ID NO: 798794 - DNA, 25 bp, Homo sapien
ctttggaacatccagccgattggac

SEQ ID NO: 798795 - DNA, 25 bp, Homo sapien
ccagccgattggactttttatttga

SEQ ID NO: 798796 - DNA, 25 bp, Homo sapien
gggggctctgtctttggaacatcca

SEQ ID NO: 798797 - DNA, 25 bp, Homo sapien
tgatttcggttgaaatggaatttca

SEQ ID NO: 798798 - DNA, 25 bp, Homo sapien
aattagtaagactggtgtttctggg

SEQ ID NO: 798799 - DNA, 25 bp, Homo sapien
cactgtgattacaagccgctgggca

SEQ ID NO: 798800 - DNA, 25 bp, Homo sapien
tgctgacacaagttagacacgacct

SEQ ID NO: 798801 - DNA, 25 bp, Homo sapien
tatcctctgatgagggtatttctgt

SEQ ID NO: 798802 - DNA, 25 bp, Homo sapien
gccaagcctggaagcataattcaat

SEQ ID NO: 798803 - DNA, 25 bp, Homo sapien
cttgattctgtatgccaagcctgga

SEQ ID NO: 798804 - DNA, 25 bp, Homo sapien
tgaagcaaccacttaaactcagctg

SEQ ID NO: 798805 - DNA, 25 bp, Homo sapien
tctttgacttctgtagcctgaagca

SEQ ID NO: 798806 - DNA, 25 bp, Homo sapien
cagtatgagtttctcatttacttgg

SEQ ID NO: 798807 - DNA, 25 bp, Homo sapien
taccagtatgagtttctcatttact

SEQ ID NO: 798808 - DNA, 25 bp, Homo sapien
ccagtatgagtttctcatttacttg

SEQ ID NO: 798809 - DNA, 25 bp, Homo sapien
accagtatgagtttctcatttactt

SEQ ID NO: 798810 - DNA, 25 bp, Homo sapien
taaattataatgaagcccccagctg

SEQ ID NO: 798811 - DNA, 25 bp, Homo sapien
ccacatcttgaagggttgaaaccat

SEQ ID NO: 798812 - DNA, 25 bp, Homo sapien
cgtgttaccggcaagaatcttccca

SEQ ID NO: 798813 - DNA, 25 bp, Homo sapien
ccagctgcagaaacaaccacatctt

SEQ ID NO: 798814 - DNA, 25 bp, Homo sapien
catgttcgcatctgtaaggcccctg

SEQ ID NO: 798815 - DNA, 25 bp, Homo sapien
tgttcgcatctgtaaggcccctgag

SEQ ID NO: 798816 - DNA, 25 bp, Homo sapien
tcatgttcgcatctgtaaggcccct

SEQ ID NO: 798817 - DNA, 25 bp, Homo sapien
atgttcgcatctgtaaggcccctga

SEQ ID NO: 798818 - DNA, 25 bp, Homo sapien
taaccaaagagagagcattcaagtc

SEQ ID NO: 798819 - DNA, 25 bp, Homo sapien
tcctggcaacggagagagcctccga

SEQ ID NO: 798820 - DNA, 25 bp, Homo sapien
gactcccagttgacaatttcctcag

SEQ ID NO: 798821 - DNA, 25 bp, Homo sapien
gaatctcattgcctcagttagggtc

SEQ ID NO: 798822 - DNA, 25 bp, Homo sapien
gaattctagctgagactttgcccat

SEQ ID NO: 798823 - DNA, 25 bp, Homo sapien
cctggaagggcgaatctctgagaca

SEQ ID NO: 798824 - DNA, 25 bp, Homo sapien
tgtgcagataacacaagccttctgg

SEQ ID NO: 798825 - DNA, 25 bp, Homo sapien
catggaaactagagctgccctgtgc

SEQ ID NO: 798826 - DNA, 25 bp, Homo sapien
caggagtgctggaaggagctctgtg

SEQ ID NO: 798827 - DNA, 25 bp, Homo sapien
gactccacacgtagtacatccattc

SEQ ID NO: 798828 - DNA, 25 bp, Homo sapien
ctgtgctttaaggagcattgactcc

SEQ ID NO: 798829 - DNA, 25 bp, Homo sapien
tagacaatgtagacttgagacagga

SEQ ID NO: 798830 - DNA, 25 bp, Homo sapien
ctgtagatatatttgccttacatac

SEQ ID NO: 798831 - DNA, 25 bp, Homo sapien
tccccagtgagctgcatgaggactg

SEQ ID NO: 798832 - DNA, 25 bp, Homo sapien
agtgagctgcatgaggactgaaaat

SEQ ID NO: 798833 - DNA, 25 bp, Homo sapien
agcatgtcccactacaattctgctc

SEQ ID NO: 798834 - DNA, 25 bp, Homo sapien
tcagcatgtcccactacaattctgc

SEQ ID NO: 798835 - DNA, 25 bp, Homo sapien
cttagcacttatcagtgtcttgtaa

SEQ ID NO: 798836 - DNA, 25 bp, Homo sapien
tttcctgagattatactcttcttga

SEQ ID NO: 798837 - DNA, 25 bp, Homo sapien
ttagcacttatcagtgtcttgtaat

SEQ ID NO: 798838 - DNA, 25 bp, Homo sapien
tcctgagattatactcttcttgagg

SEQ ID NO: 798839 - DNA, 25 bp, Homo sapien
tagtcactggcaggactcacccatt

SEQ ID NO: 798840 - DNA, 25 bp, Homo sapien
cctttgtggggatcttggttccagt

SEQ ID NO: 798841 - DNA, 25 bp, Homo sapien
tgtctcctgtatggtgaagcctttg

SEQ ID NO: 798842 - DNA, 25 bp, Homo sapien
ccagtttatgctgaatctgtgtggc

SEQ ID NO: 798843 - DNA, 25 bp, Homo sapien
attataagagcatgggtctccctag

SEQ ID NO: 798844 - DNA, 25 bp, Homo sapien
gagcatgggtctccctagctgtgtt

SEQ ID NO: 798845 - DNA, 25 bp, Homo sapien
aagagcatgggtctccctagctgtg

SEQ ID NO: 798846 - DNA, 25 bp, Homo sapien
ataagagcatgggtctccctagctg

SEQ ID NO: 798847 - DNA, 25 bp, Homo sapien
tcaagtcccatagagtcttcctgga

SEQ ID NO: 798848 - DNA, 25 bp, Homo sapien
acagtcatcaagtcccatagagtct

SEQ ID NO: 798849 - DNA, 25 bp, Homo sapien
gtcatcaagtcccatagagtcttcc

SEQ ID NO: 798850 - DNA, 25 bp, Homo sapien
catcaagtcccatagagtcttcctg

SEQ ID NO: 798851 - DNA, 25 bp, Homo sapien
cctgtcctccagttgctgtgtagaa

SEQ ID NO: 798852 - DNA, 25 bp, Homo sapien
tgatctgaggccctgtcctccagtt

SEQ ID NO: 798853 - DNA, 25 bp, Homo sapien
gatataaaaacgtacctcgaggatg

SEQ ID NO: 798854 - DNA, 25 bp, Homo sapien
cgaggatgtagatccatcccataat

SEQ ID NO: 798855 - DNA, 25 bp, Homo sapien
aggatacggactgtgaaaatctgct

SEQ ID NO: 798856 - DNA, 25 bp, Homo sapien
gacatggattgaggatacggactgt

SEQ ID NO: 798857 - DNA, 25 bp, Homo sapien
aacctggctccactaggggatgcgt

SEQ ID NO: 798858 - DNA, 25 bp, Homo sapien
tgggatcgagggttgaggcttgagg

SEQ ID NO: 798859 - DNA, 25 bp, Homo sapien
tcttgactatcagcatttatgagca

SEQ ID NO: 798860 - DNA, 25 bp, Homo sapien
tcttgtgactcgttcattttgttct

SEQ ID NO: 798861 - DNA, 25 bp, Homo sapien
ttgttttcaatatcttgtgactcgt

SEQ ID NO: 798862 - DNA, 25 bp, Homo sapien
cattttgttcttgactatcagcatt

SEQ ID NO: 798863 - DNA, 25 bp, Homo sapien
cagaaagaggtggtagcaaacgtgc

SEQ ID NO: 798864 - DNA, 25 bp, Homo sapien
ccagaaattgcaaatgggatctgca

SEQ ID NO: 798865 - DNA, 25 bp, Homo sapien
ctagtgcggatgttccaactgagca

SEQ ID NO: 798866 - DNA, 25 bp, Homo sapien
caaacgtgctaatgtggcaggctag

SEQ ID NO: 798867 - DNA, 25 bp, Homo sapien
ttgcctccgggtttggagaaacaca

SEQ ID NO: 798868 - DNA, 25 bp, Homo sapien
tgttttgactggatagaaacagggt

SEQ ID NO: 798869 - DNA, 25 bp, Homo sapien
cagccttctgcgtttggtggggaat

SEQ ID NO: 798870 - DNA, 25 bp, Homo sapien
cagtatcagccttctgcgtttggtg

SEQ ID NO: 798871 - DNA, 25 bp, Homo sapien
gggcaacaatccctggcagttgtgg

SEQ ID NO: 798872 - DNA, 25 bp, Homo sapien
agacaggctccaggtatcaggtaga

SEQ ID NO: 798873 - DNA, 25 bp, Homo sapien
gttccattgttgccctcagtcctcg

SEQ ID NO: 798874 - DNA, 25 bp, Homo sapien
tagctgcggaattgtgtcagcaggg

SEQ ID NO: 798875 - DNA, 25 bp, Homo sapien
attgttgccctcagtcctcgccggg

SEQ ID NO: 798876 - DNA, 25 bp, Homo sapien
cctggggtagctgcggaattgtgtc

SEQ ID NO: 798877 - DNA, 25 bp, Homo sapien
gataaacttaatcttataaacgata

SEQ ID NO: 798878 - DNA, 25 bp, Homo sapien
tctatctacagtgtaaatctgaagg

SEQ ID NO: 798879 - DNA, 25 bp, Homo sapien
ttagaattgccatgtgctgggaaca

SEQ ID NO: 798880 - DNA, 25 bp, Homo sapien
caaggttacttgtaatcatgacacc

SEQ ID NO: 798881 - DNA, 25 bp, Homo sapien
gctcttatacttggcacatcttagg

SEQ ID NO: 798882 - DNA, 25 bp, Homo sapien
ttgagataatagtttagtgagaaac

SEQ ID NO: 798883 - DNA, 25 bp, Homo sapien
acattgagataatagtttagtgaga

SEQ ID NO: 798884 - DNA, 25 bp, Homo sapien
taacattgagataatagtttagtga

SEQ ID NO: 798885 - DNA, 25 bp, Homo sapien
cattgagataatagtttagtgagaa

SEQ ID NO: 798886 - DNA, 25 bp, Homo sapien
agtcctcagtgacctacaaagagac

SEQ ID NO: 798887 - DNA, 25 bp, Homo sapien
aagcaagtcctcagtgacctacaaa

SEQ ID NO: 798888 - DNA, 25 bp, Homo sapien
cataaagcaagtcctcagtgaccta

SEQ ID NO: 798889 - DNA, 25 bp, Homo sapien
aagtcctcagtgacctacaaagaga

SEQ ID NO: 798890 - DNA, 25 bp, Homo sapien
cagagtaaccaggtcttccatgaca

SEQ ID NO: 798891 - DNA, 25 bp, Homo sapien
gagcatgcacacagttccagtttaa

SEQ ID NO: 798892 - DNA, 25 bp, Homo sapien
acacagttccagtttaaggctctgc

SEQ ID NO: 798893 - DNA, 25 bp, Homo sapien
ctgcagagtaaccaggtcttccatg

SEQ ID NO: 798894 - DNA, 25 bp, Homo sapien
aacattaaagtaatttgccattgga

SEQ ID NO: 798895 - DNA, 25 bp, Homo sapien
ttgccattggaatctttgccaaggc

SEQ ID NO: 798896 - DNA, 25 bp, Homo sapien
cacaatgtaagagtggtgtttgcaa

SEQ ID NO: 798897 - DNA, 25 bp, Homo sapien
gtaagagtggtgtttgcaacattaa

SEQ ID NO: 798898 - DNA, 25 bp, Homo sapien
tgctgtcaggatgatcatgtcaaca

SEQ ID NO: 798899 - DNA, 25 bp, Homo sapien
caaggtgccacacatccgctgtggg

SEQ ID NO: 798900 - DNA, 25 bp, Homo sapien
tgtcaacatccagagcaggttttat

SEQ ID NO: 798901 - DNA, 25 bp, Homo sapien
gaaggagtccagcttgttgtcaagg

SEQ ID NO: 798902 - DNA, 25 bp, Homo sapien
aaggaatatggtatattctgcttag

SEQ ID NO: 798903 - DNA, 25 bp, Homo sapien
tgtccatcaaaaggcggggcctact

SEQ ID NO: 798904 - DNA, 25 bp, Homo sapien
ggaatatggtatattctgcttagtt

SEQ ID NO: 798905 - DNA, 25 bp, Homo sapien
atatggtatattctgcttagttcct

SEQ ID NO: 798906 - DNA, 25 bp, Homo sapien
ccactcctgctaaggttgaagatga

SEQ ID NO: 798907 - DNA, 25 bp, Homo sapien
atttttctctaaagtgccactcctg

SEQ ID NO: 798908 - DNA, 25 bp, Homo sapien
tctctaatgtgcctctcctgctaat

SEQ ID NO: 798909 - DNA, 25 bp, Homo sapien
tgtgtaagccatggaaaccaccaac

SEQ ID NO: 798910 - DNA, 25 bp, Homo sapien
cacttgtacttctggttcatcaatg

SEQ ID NO: 798911 - DNA, 25 bp, Homo sapien
ttctggttcatcaatgagccccgga

SEQ ID NO: 798912 - DNA, 25 bp, Homo sapien
tgtacttctggttcatcaatgagcc

SEQ ID NO: 798913 - DNA, 25 bp, Homo sapien
tggttcatcaatgagccccggatct

SEQ ID NO: 798914 - DNA, 25 bp, Homo sapien
tcagggtgattgtgtagccctccag

SEQ ID NO: 798915 - DNA, 25 bp, Homo sapien
cagctcatatctcttgtagcccaag

SEQ ID NO: 798916 - DNA, 25 bp, Homo sapien
gtagcccaagagtagataggtggcc

SEQ ID NO: 798917 - DNA, 25 bp, Homo sapien
ctatcggtgggatcagctgaaggca

SEQ ID NO: 798918 - DNA, 25 bp, Homo sapien
cactaccactgcttctggttgtggg

SEQ ID NO: 798919 - DNA, 25 bp, Homo sapien
gagttgttacctagactatccttag

SEQ ID NO: 798920 - DNA, 25 bp, Homo sapien
tcctggtcctcctcagtacgctgat

SEQ ID NO: 798921 - DNA, 25 bp, Homo sapien
gctatattgtatctcgcagaatggg

SEQ ID NO: 798922 - DNA, 25 bp, Homo sapien
cctgttcaggttgcctagggcgaag

SEQ ID NO: 798923 - DNA, 25 bp, Homo sapien
aggcacctgttcaggttgcctaggg

SEQ ID NO: 798924 - DNA, 25 bp, Homo sapien
gcacctgttcaggttgcctagggcg

SEQ ID NO: 798925 - DNA, 25 bp, Homo sapien
acctgttcaggttgcctagggcgaa

SEQ ID NO: 798926 - DNA, 25 bp, Homo sapien
tatgccatggattcccagtgtttgc

SEQ ID NO: 798927 - DNA, 25 bp, Homo sapien
ttgtcaccatagcaattaagagcca

SEQ ID NO: 798928 - DNA, 25 bp, Homo sapien
tctgagtgacctatatacctgagtg

SEQ ID NO: 798929 - DNA, 25 bp, Homo sapien
tacctgagtgctactgtatgccatg

SEQ ID NO: 798930 - DNA, 25 bp, Homo sapien
ctctccaacagtagaatgtccttgc

SEQ ID NO: 798931 - DNA, 25 bp, Homo sapien
tttctctccaacagtagaatgtcct

SEQ ID NO: 798932 - DNA, 25 bp, Homo sapien
ctttctctccaacagtagaatgtcc

SEQ ID NO: 798933 - DNA, 25 bp, Homo sapien
tctctccaacagtagaatgtccttg

SEQ ID NO: 798934 - DNA, 25 bp, Homo sapien
cattagtactgattcctttggcgaa

SEQ ID NO: 798935 - DNA, 25 bp, Homo sapien
gattcctttggcgaaatgtataagg

SEQ ID NO: 798936 - DNA, 25 bp, Homo sapien
agaacaaccaagttacagatgctcc

SEQ ID NO: 798937 - DNA, 25 bp, Homo sapien
gttacagatgctcccattagtactg

SEQ ID NO: 798938 - DNA, 25 bp, Homo sapien
cccaagtgagactagattataagac

SEQ ID NO: 798939 - DNA, 25 bp, Homo sapien
cagtaccaatttcagcagtgatggc

SEQ ID NO: 798940 - DNA, 25 bp, Homo sapien
tggcctaaaaggttctggtgcccca

SEQ ID NO: 798941 - DNA, 25 bp, Homo sapien
gacttttctaagagatattattccc

SEQ ID NO: 798942 - DNA, 25 bp, Homo sapien
caggtctgaagagggctgtcagcat

SEQ ID NO: 798943 - DNA, 25 bp, Homo sapien
gcaggtctgaagagggctgtcagca

SEQ ID NO: 798944 - DNA, 25 bp, Homo sapien
taactggattggctagttttctttc

SEQ ID NO: 798945 - DNA, 25 bp, Homo sapien
ctggcttaacgggtgtgtctctgtg

SEQ ID NO: 798946 - DNA, 25 bp, Homo sapien
tctttcattgaaaccctggcttaac

SEQ ID NO: 798947 - DNA, 25 bp, Homo sapien
tattaacaccaccagtgacgatatc

SEQ ID NO: 798948 - DNA, 25 bp, Homo sapien
gccagattcagaagggctcaattgt

SEQ ID NO: 798949 - DNA, 25 bp, Homo sapien
atgtcatcataaactgctctgcaaa

SEQ ID NO: 798950 - DNA, 25 bp, Homo sapien
gtatgtctcaacgtctgtgatgcca

SEQ ID NO: 798951 - DNA, 25 bp, Homo sapien
gagatgactgtgaggcatagctcat

SEQ ID NO: 798952 - DNA, 25 bp, Homo sapien
tgtgaagggctttcatcatagcact

SEQ ID NO: 798953 - DNA, 25 bp, Homo sapien
tgctggcccacccaactcggcattg

SEQ ID NO: 798954 - DNA, 25 bp, Homo sapien
acccaactcggcattgcatcagcgg

SEQ ID NO: 798955 - DNA, 25 bp, Homo sapien
ggcattgcatcagcggaatttctgc

SEQ ID NO: 798956 - DNA, 25 bp, Homo sapien
gcagatttttccataggggctcatc

SEQ ID NO: 798957 - DNA, 25 bp, Homo sapien
tttccataggggctcatcgctggaa

SEQ ID NO: 798958 - DNA, 25 bp, Homo sapien
ttgctgctctgtgaaagtatgactt

SEQ ID NO: 798959 - DNA, 25 bp, Homo sapien
tgtgcttggggccttgaagccaggg

SEQ ID NO: 798960 - DNA, 25 bp, Homo sapien
ggattatctcctctatctctcctgt

SEQ ID NO: 798961 - DNA, 25 bp, Homo sapien
tctctcctgtccttgcctgaccatg

SEQ ID NO: 798962 - DNA, 25 bp, Homo sapien
tctcctgtccttgcctgaccatgca

SEQ ID NO: 798963 - DNA, 25 bp, Homo sapien
ctggattatctcctctatctctcct

SEQ ID NO: 798964 - DNA, 25 bp, Homo sapien
gctctagtggggatgaaagtcctcg

SEQ ID NO: 798965 - DNA, 25 bp, Homo sapien
tctgcaaaatacaactcatggattt

SEQ ID NO: 798966 - DNA, 25 bp, Homo sapien
ttgagcacaatttctgagctctagt

SEQ ID NO: 798967 - DNA, 25 bp, Homo sapien
tgaaagtcctcgtaccctcctcttg

SEQ ID NO: 798968 - DNA, 25 bp, Homo sapien
caacccagaggtgtaattttgtaat

SEQ ID NO: 798969 - DNA, 25 bp, Homo sapien
cttcgttgtggcccttacctgagct

SEQ ID NO: 798970 - DNA, 25 bp, Homo sapien
ctggttacccagagtcccttcgttg

SEQ ID NO: 798971 - DNA, 25 bp, Homo sapien
ctgagctgatacgctgtggaccttg

SEQ ID NO: 798972 - DNA, 25 bp, Homo sapien
ccacagcaactgtaagccttctgta

SEQ ID NO: 798973 - DNA, 25 bp, Homo sapien
cttttgttccatgagtggttcgtgg

SEQ ID NO: 798974 - DNA, 25 bp, Homo sapien
caactgtaagccttctgtatgggaa

SEQ ID NO: 798975 - DNA, 25 bp, Homo sapien
tgagtggttcgtggaaaaatttaga

SEQ ID NO: 798976 - DNA, 25 bp, Homo sapien
tattcaacaccaacatcaaatttct

SEQ ID NO: 798977 - DNA, 25 bp, Homo sapien
aacaccaacatcaaatttcttctcc

SEQ ID NO: 798978 - DNA, 25 bp, Homo sapien
ttcaacaccaacatcaaatttcttc

SEQ ID NO: 798979 - DNA, 25 bp, Homo sapien
ttattcaacaccaacatcaaatttc

SEQ ID NO: 798980 - DNA, 25 bp, Homo sapien
tccatggccaagagttttaattttc

SEQ ID NO: 798981 - DNA, 25 bp, Homo sapien
taattttctcgtcttcaattttgta

SEQ ID NO: 798982 - DNA, 25 bp, Homo sapien
ctcgtcttcaattttgtagatgttc

SEQ ID NO: 798983 - DNA, 25 bp, Homo sapien
ctctccatggccaagagttttaatt

SEQ ID NO: 798984 - DNA, 25 bp, Homo sapien
tgtgtgctctgaggacggatttgtc

SEQ ID NO: 798985 - DNA, 25 bp, Homo sapien
cagtcatcggttctaaaggacccag

SEQ ID NO: 798986 - DNA, 25 bp, Homo sapien
gcttctctataaatccagtcatcgg

SEQ ID NO: 798987 - DNA, 25 bp, Homo sapien
cagctgtttagtatcattggaggcc

SEQ ID NO: 798988 - DNA, 25 bp, Homo sapien
cagggctccatcctgagtccagggc

SEQ ID NO: 798989 - DNA, 25 bp, Homo sapien
ccagggcgatttgtatggtacacta

SEQ ID NO: 798990 - DNA, 25 bp, Homo sapien
tggtacactaatgacctgctgattg

SEQ ID NO: 798991 - DNA, 25 bp, Homo sapien
ctattacagcttcagttccccaggg

SEQ ID NO: 798992 - DNA, 25 bp, Homo sapien
ctggcccctcccttgaatgtccagc

SEQ ID NO: 798993 - DNA, 25 bp, Homo sapien
gaatgtccagcttctggtttaactg

SEQ ID NO: 798994 - DNA, 25 bp, Homo sapien
tccagcttctggtttaactggaagt

SEQ ID NO: 798995 - DNA, 25 bp, Homo sapien
ggcccctcccttgaatgtccagctt

SEQ ID NO: 798996 - DNA, 25 bp, Homo sapien
caaatgagaataaatcgagttcccc

SEQ ID NO: 798997 - DNA, 25 bp, Homo sapien
cgctgaaatagagggcaggagccac

SEQ ID NO: 798998 - DNA, 25 bp, Homo sapien
ggaaatctggcgataaacaaatgag

SEQ ID NO: 798999 - DNA, 25 bp, Homo sapien
gaaaattgcgctgttgccaggacgc

SEQ ID NO: 799000 - DNA, 25 bp, Homo sapien
ctgcagggcgaaccgatttgtattt

SEQ ID NO: 799001 - DNA, 25 bp, Homo sapien
tgcagggcgaaccgatttgtatttt

SEQ ID NO: 799002 - DNA, 25 bp, Homo sapien
accgctgtgggtccctgttcctccg

SEQ ID NO: 799003 - DNA, 25 bp, Homo sapien
ctaacgagttagtcacatcatcaag

SEQ ID NO: 799004 - DNA, 25 bp, Homo sapien
gcaacagcgcgcagacgctttaatt

SEQ ID NO: 799005 - DNA, 25 bp, Homo sapien
taggacgcaaattctctaacgagtt

SEQ ID NO: 799006 - DNA, 25 bp, Homo sapien
acgagctgccgtctgcagggaacca

SEQ ID NO: 799007 - DNA, 25 bp, Homo sapien
ctccaagaaccagccactgtcttgt

SEQ ID NO: 799008 - DNA, 25 bp, Homo sapien
caggggcccgataatggaattcagg

SEQ ID NO: 799009 - DNA, 25 bp, Homo sapien
gtacagatttgtagagaaaccctca

SEQ ID NO: 799010 - DNA, 25 bp, Homo sapien
ccgggactggaggaggtcgccggca

SEQ ID NO: 799011 - DNA, 25 bp, Homo sapien
tccagaggcttgagattgggtggac

SEQ ID NO: 799012 - DNA, 25 bp, Homo sapien
ttgggtggacgagacctgaagatcc

SEQ ID NO: 799013 - DNA, 25 bp, Homo sapien
tctcggtctggaccccgactttcga

SEQ ID NO: 799014 - DNA, 25 bp, Homo sapien
cagcccaaggctgcggatctagcct

SEQ ID NO: 799015 - DNA, 25 bp, Homo sapien
caagcagagacagcggagccccggt

SEQ ID NO: 799016 - DNA, 25 bp, Homo sapien
gtctccagacccacgcaggttaagg

SEQ ID NO: 799017 - DNA, 25 bp, Homo sapien
acattaagttcggagcagcccaagg

SEQ ID NO: 799018 - DNA, 25 bp, Homo sapien
gggctgctctctttcaatccctttg

SEQ ID NO: 799019 - DNA, 25 bp, Homo sapien
cagccttgaaacagccaactggggg

SEQ ID NO: 799020 - DNA, 25 bp, Homo sapien
aatccctttgcacccttgtaggttg

SEQ ID NO: 799021 - DNA, 25 bp, Homo sapien
cggccgccgatgcttcccgccgcag

SEQ ID NO: 799022 - DNA, 25 bp, Homo sapien
cgtcagccatcgtagtcatggtcat

SEQ ID NO: 799023 - DNA, 25 bp, Homo sapien
gagtcctggccttccaagccgtcag

SEQ ID NO: 799024 - DNA, 25 bp, Homo sapien
aatataaagagatatagtgagcggg

SEQ ID NO: 799025 - DNA, 25 bp, Homo sapien
catgaaggcggatttggacgagtcc

SEQ ID NO: 799026 - DNA, 25 bp, Homo sapien
gccgccgccgagtgcaggcagtgca

SEQ ID NO: 799027 - DNA, 25 bp, Homo sapien
aggcagtgcagagggtagtgcgcgc

SEQ ID NO: 799028 - DNA, 25 bp, Homo sapien
tggtggtggtgcgagccggccgctg

SEQ ID NO: 799029 - DNA, 25 bp, Homo sapien
gcagagggtagtgcgcgcctgccat

SEQ ID NO: 799030 - DNA, 25 bp, Homo sapien
cgcgtagggcgagccgtggtggtgg

SEQ ID NO: 799031 - DNA, 25 bp, Homo sapien
gcgagcgagcggtggttgtaggagt

SEQ ID NO: 799032 - DNA, 25 bp, Homo sapien
gggtaggcggcgagcgagcggtggt

SEQ ID NO: 799033 - DNA, 25 bp, Homo sapien
tccctccgcccgacgcgtagggcga

SEQ ID NO: 799034 - DNA, 25 bp, Homo sapien
ggtaagggctgtgctgcgagtggct

SEQ ID NO: 799035 - DNA, 25 bp, Homo sapien
tggaggtaagggctgtgctgcgagt

SEQ ID NO: 799036 - DNA, 25 bp, Homo sapien
gaggtaagggctgtgctgcgagtgg

SEQ ID NO: 799037 - DNA, 25 bp, Homo sapien
aagggctgtgctgcgagtggctcat

SEQ ID NO: 799038 - DNA, 25 bp, Homo sapien
cggctgcgctgctgttgtggtagga

SEQ ID NO: 799039 - DNA, 25 bp, Homo sapien
tcccctcgcgtctgggcggctgcgc

SEQ ID NO: 799040 - DNA, 25 bp, Homo sapien
cccctcgcgtctgggcggctgcgct

SEQ ID NO: 799041 - DNA, 25 bp, Homo sapien
gccaacactgtagcgaaaagctaga

SEQ ID NO: 799042 - DNA, 25 bp, Homo sapien
gcccactggaaagagcctgactgtt

SEQ ID NO: 799043 - DNA, 25 bp, Homo sapien
tgagggacactttaaagcccactgg

SEQ ID NO: 799044 - DNA, 25 bp, Homo sapien
tactagtttaaccagagcgaaagcc

SEQ ID NO: 799045 - DNA, 25 bp, Homo sapien
catcctcggcatgttttgaaatgac

SEQ ID NO: 799046 - DNA, 25 bp, Homo sapien
ggccagttgacttgatgtcaccagc

SEQ ID NO: 799047 - DNA, 25 bp, Homo sapien
cagctccaagctcagtgcatcaagc

SEQ ID NO: 799048 - DNA, 25 bp, Homo sapien
gaaatgactctcctgaggaggacca

SEQ ID NO: 799049 - DNA, 25 bp, Homo sapien
tgtgcccggcttaacagtacctgaa

SEQ ID NO: 799050 - DNA, 25 bp, Homo sapien
gcccggcttaacagtacctgaagct

SEQ ID NO: 799051 - DNA, 25 bp, Homo sapien
ccggcttaacagtacctgaagctgt

SEQ ID NO: 799052 - DNA, 25 bp, Homo sapien
cctgtgcccggcttaacagtacctg

SEQ ID NO: 799053 - DNA, 25 bp, Homo sapien
gggtgcgcagcgcagcaaggcggca

SEQ ID NO: 799054 - DNA, 25 bp, Homo sapien
tggggtgcgcagcgcagcaaggcgg

SEQ ID NO: 799055 - DNA, 25 bp, Homo sapien
ctggggtgcgcagcgcagcaaggcg

SEQ ID NO: 799056 - DNA, 25 bp, Homo sapien
ggtgcgcagcgcagcaaggcggcag

SEQ ID NO: 799057 - DNA, 25 bp, Homo sapien
gtgctcccagcgtctgcgtaatctc

SEQ ID NO: 799058 - DNA, 25 bp, Homo sapien
tcttggtccactctgcccgtgtgct

SEQ ID NO: 799059 - DNA, 25 bp, Homo sapien
agtccctggcccgaacaatgtgcag

SEQ ID NO: 799060 - DNA, 25 bp, Homo sapien
aaacagcccgctttgccgcagcgga

SEQ ID NO: 799061 - DNA, 25 bp, Homo sapien
cgaaaaatccctatgatgccccgac

SEQ ID NO: 799062 - DNA, 25 bp, Homo sapien
ctcgaaaaatccctatgatgccccg

SEQ ID NO: 799063 - DNA, 25 bp, Homo sapien
tcgaaaaatccctatgatgccccga

SEQ ID NO: 799064 - DNA, 25 bp, Homo sapien
gcaaataatacagaggagcggtcac

SEQ ID NO: 799065 - DNA, 25 bp, Homo sapien
ataatacagaggagcggtcacccgg

SEQ ID NO: 799066 - DNA, 25 bp, Homo sapien
tgtaagcaaataatacagaggagcg

SEQ ID NO: 799067 - DNA, 25 bp, Homo sapien
taagcaaataatacagaggagcggt

SEQ ID NO: 799068 - DNA, 25 bp, Homo sapien
gatttccccgttttcaatcactgta

SEQ ID NO: 799069 - DNA, 25 bp, Homo sapien
aaagcgatggtttaaagcctggagc

SEQ ID NO: 799070 - DNA, 25 bp, Homo sapien
cagtcctaaggaagctgccagttcg

SEQ ID NO: 799071 - DNA, 25 bp, Homo sapien
taaatggtccgaggcttccgaatct

SEQ ID NO: 799072 - DNA, 25 bp, Homo sapien
cttggccgaggcagaaacgtcccag

SEQ ID NO: 799073 - DNA, 25 bp, Homo sapien
gccgagccctggagggggtcgctct

SEQ ID NO: 799074 - DNA, 25 bp, Homo sapien
ggcagcgctggcgagcgtggcgaca

SEQ ID NO: 799075 - DNA, 25 bp, Homo sapien
ggggtcgctctcatgaggattactg

SEQ ID NO: 799076 - DNA, 25 bp, Homo sapien
gagaggagtaccagtgagaatagcc

SEQ ID NO: 799077 - DNA, 25 bp, Homo sapien
gagtaccagtgagaatagccaggca

SEQ ID NO: 799078 - DNA, 25 bp, Homo sapien
ccaggcatgtagctgttggggggca

SEQ ID NO: 799079 - DNA, 25 bp, Homo sapien
tggtgtggagaggagtaccagtgag

SEQ ID NO: 799080 - DNA, 25 bp, Homo sapien
atcatctgtggtctctgcatcgtgt

SEQ ID NO: 799081 - DNA, 25 bp, Homo sapien
tcatctgtggtctctgcatcgtgtc

SEQ ID NO: 799082 - DNA, 25 bp, Homo sapien
tttcgcagatacaagcaggtcccgg

SEQ ID NO: 799083 - DNA, 25 bp, Homo sapien
ttcaggagtgctggcatagaaacca

SEQ ID NO: 799084 - DNA, 25 bp, Homo sapien
tactgacgttgctcaagagagaagg

SEQ ID NO: 799085 - DNA, 25 bp, Homo sapien
cttgttcagacgtttccctagggtg

SEQ ID NO: 799086 - DNA, 25 bp, Homo sapien
caagatatcaaacggagctcgcgac

SEQ ID NO: 799087 - DNA, 25 bp, Homo sapien
aaccacaggtatgcggacatttgca

SEQ ID NO: 799088 - DNA, 25 bp, Homo sapien
ctggacggtgaagccccttcgacat

SEQ ID NO: 799089 - DNA, 25 bp, Homo sapien
tgatgaatctctggacggtgaagcc

SEQ ID NO: 799090 - DNA, 25 bp, Homo sapien
ggcctcaggcccgagagcgttgatc

SEQ ID NO: 799091 - DNA, 25 bp, Homo sapien
gcccgagagcgttgatccgcacaaa

SEQ ID NO: 799092 - DNA, 25 bp, Homo sapien
cagggcacggcctcaggcccgagag

SEQ ID NO: 799093 - DNA, 25 bp, Homo sapien
gcctgtccactcacactcggatcca

SEQ ID NO: 799094 - DNA, 25 bp, Homo sapien
ctgtgggtgccaggcggctccagtg

SEQ ID NO: 799095 - DNA, 25 bp, Homo sapien
tgccaggcggctccagtgctgagcc

SEQ ID NO: 799096 - DNA, 25 bp, Homo sapien
tgggtgccaggcggctccagtgctg

SEQ ID NO: 799097 - DNA, 25 bp, Homo sapien
ggtgccaggcggctccagtgctgag

SEQ ID NO: 799098 - DNA, 25 bp, Homo sapien
tcctgggccatcctgtaagagatca

SEQ ID NO: 799099 - DNA, 25 bp, Homo sapien
aattggcctttgtttgaggctcggg

SEQ ID NO: 799100 - DNA, 25 bp, Homo sapien
cagggccagcgcgattcttcggtgc

SEQ ID NO: 799101 - DNA, 25 bp, Homo sapien
ctcgggttgagctaggcggatttct

SEQ ID NO: 799102 - DNA, 25 bp, Homo sapien
tagctctcagtatagtgctcccaag

SEQ ID NO: 799103 - DNA, 25 bp, Homo sapien
cggtttccacttgcctagctctcag

SEQ ID NO: 799104 - DNA, 25 bp, Homo sapien
cactcttgacatcgcactgggtgac

SEQ ID NO: 799105 - DNA, 25 bp, Homo sapien
cctacgtcgaatataaacgtgctcc

SEQ ID NO: 799106 - DNA, 25 bp, Homo sapien
attttttagcttggtctgggagccg

SEQ ID NO: 799107 - DNA, 25 bp, Homo sapien
gggagccgtggacaaaaatattctg

SEQ ID NO: 799108 - DNA, 25 bp, Homo sapien
tcttccactcgcaaaggccttttct

SEQ ID NO: 799109 - DNA, 25 bp, Homo sapien
aaccagtctgcagcgggctttccct

SEQ ID NO: 799110 - DNA, 25 bp, Homo sapien
ttagacatatcccgcagcctggctc

SEQ ID NO: 799111 - DNA, 25 bp, Homo sapien
gaggcagaactacgcccggcagcct

SEQ ID NO: 799112 - DNA, 25 bp, Homo sapien
cagccgtactttctcggaaggagca

SEQ ID NO: 799113 - DNA, 25 bp, Homo sapien
cagcggccgcgactcaatatttccg

SEQ ID NO: 799114 - DNA, 25 bp, Homo sapien
gaggaatcagtattttgaccgctct

SEQ ID NO: 799115 - DNA, 25 bp, Homo sapien
cttcttggaggaatcagtattttga

SEQ ID NO: 799116 - DNA, 25 bp, Homo sapien
ttgcttcttggaggaatcagtattt

SEQ ID NO: 799117 - DNA, 25 bp, Homo sapien
ggcccgccagtgtggaacagcttgc

SEQ ID NO: 799118 - DNA, 25 bp, Homo sapien
gattctgactactacagccctacgg

SEQ ID NO: 799119 - DNA, 25 bp, Homo sapien
tatgcaccatccgtctcaggaatcg

SEQ ID NO: 799120 - DNA, 25 bp, Homo sapien
ccagtatcagtatcacggcgtgaac

SEQ ID NO: 799121 - DNA, 25 bp, Homo sapien
tcaggaatcgccaactttgcccgag

SEQ ID NO: 799122 - DNA, 25 bp, Homo sapien
agctcacagtgtttgaataatctgg

SEQ ID NO: 799123 - DNA, 25 bp, Homo sapien
tacgttgtgggccaagttttacgca

SEQ ID NO: 799124 - DNA, 25 bp, Homo sapien
gcccttgtgcatgtacgttgtgggc

SEQ ID NO: 799125 - DNA, 25 bp, Homo sapien
ggccaagttttacgcagctcacagt

SEQ ID NO: 799126 - DNA, 25 bp, Homo sapien
cacttggaaagctattgacttttcc

SEQ ID NO: 799127 - DNA, 25 bp, Homo sapien
tcacttggaaagctattgacttttc

SEQ ID NO: 799128 - DNA, 25 bp, Homo sapien
ctacacttcacttggaaagctattg

SEQ ID NO: 799129 - DNA, 25 bp, Homo sapien
cacttcacttggaaagctattgact

SEQ ID NO: 799130 - DNA, 25 bp, Homo sapien
ggtatgtgcgcagcggtcacactca

SEQ ID NO: 799131 - DNA, 25 bp, Homo sapien
cctttggtgctgagttggtatgtgc

SEQ ID NO: 799132 - DNA, 25 bp, Homo sapien
ttggtatgtgcgcagcggtcacact

SEQ ID NO: 799133 - DNA, 25 bp, Homo sapien
ttccctttggtgctgagttggtatg

SEQ ID NO: 799134 - DNA, 25 bp, Homo sapien
tatcacttgcaccatttttgtcagt

SEQ ID NO: 799135 - DNA, 25 bp, Homo sapien
aaacctgagttttagtatcagattc

SEQ ID NO: 799136 - DNA, 25 bp, Homo sapien
tcagattcttggaaacaattgttcc

SEQ ID NO: 799137 - DNA, 25 bp, Homo sapien
gaaacaattgttccactatcacttg

SEQ ID NO: 799138 - DNA, 25 bp, Homo sapien
tgtgccacccacgtagaactccaaa

SEQ ID NO: 799139 - DNA, 25 bp, Homo sapien
ctctatttgtgtaattctgccagtg

SEQ ID NO: 799140 - DNA, 25 bp, Homo sapien
gaacactctatttgtgtaattctgc

SEQ ID NO: 799141 - DNA, 25 bp, Homo sapien
ccaaatgtggatccaaggattgctg

SEQ ID NO: 799142 - DNA, 25 bp, Homo sapien
ggatcgtttcttccagcaccacaga

SEQ ID NO: 799143 - DNA, 25 bp, Homo sapien
catatgtggttaggatcgtttcttc

SEQ ID NO: 799144 - DNA, 25 bp, Homo sapien
aagtctcttataatccctctggaaa

SEQ ID NO: 799145 - DNA, 25 bp, Homo sapien
cctttggcagccagcaagtctctta

SEQ ID NO: 799146 - DNA, 25 bp, Homo sapien
tgagggtcaacaggatgtcatagga

SEQ ID NO: 799147 - DNA, 25 bp, Homo sapien
cataggaacaatcctcccaaggcag

SEQ ID NO: 799148 - DNA, 25 bp, Homo sapien
tcttaagaaggctgtgagggtcaac

SEQ ID NO: 799149 - DNA, 25 bp, Homo sapien
tgtaacctgtgacttgatttcctca

SEQ ID NO: 799150 - DNA, 25 bp, Homo sapien
cttcctgagaggacttcaaccccca

SEQ ID NO: 799151 - DNA, 25 bp, Homo sapien
ctgagaggacttcaacccccagcat

SEQ ID NO: 799152 - DNA, 25 bp, Homo sapien
ttcctgagaggacttcaacccccag

SEQ ID NO: 799153 - DNA, 25 bp, Homo sapien
agaggacttcaacccccagcatgtc

SEQ ID NO: 799154 - DNA, 25 bp, Homo sapien
tgatctggccattgcgactacccat

SEQ ID NO: 799155 - DNA, 25 bp, Homo sapien
ctgatctggccattgcgactaccca

SEQ ID NO: 799156 - DNA, 25 bp, Homo sapien
tgtcagatgcctcatattcctgctg

SEQ ID NO: 799157 - DNA, 25 bp, Homo sapien
aatgttgaaatttgtgtgattgtct

SEQ ID NO: 799158 - DNA, 25 bp, Homo sapien
tgtgtgattgtctcacagaccccag

SEQ ID NO: 799159 - DNA, 25 bp, Homo sapien
cagaaatgttgaaatttgtgtgatt

SEQ ID NO: 799160 - DNA, 25 bp, Homo sapien
tgctatgtagggaactgcaacctaa

SEQ ID NO: 799161 - DNA, 25 bp, Homo sapien
cagagctggcggactccttagccaa

SEQ ID NO: 799162 - DNA, 25 bp, Homo sapien
caaagtcaagttggctgctgaagga

SEQ ID NO: 799163 - DNA, 25 bp, Homo sapien
tgtcacacgtttggttcttcagcaa

SEQ ID NO: 799164 - DNA, 25 bp, Homo sapien
ctgctttagggatcagagtgagatt

SEQ ID NO: 799165 - DNA, 25 bp, Homo sapien
attaatctcgccatccactagctca

SEQ ID NO: 799166 - DNA, 25 bp, Homo sapien
tgttctcccaatttatactctgggc

SEQ ID NO: 799167 - DNA, 25 bp, Homo sapien
cacgctctttgcacagcgctgttct

SEQ ID NO: 799168 - DNA, 25 bp, Homo sapien
caacccatttgaggcatttagagta

SEQ ID NO: 799169 - DNA, 25 bp, Homo sapien
gttcccaacccatttgaggcattta

SEQ ID NO: 799170 - DNA, 25 bp, Homo sapien
tcccaacccatttgaggcatttaga

SEQ ID NO: 799171 - DNA, 25 bp, Homo sapien
cccaacccatttgaggcatttagag

SEQ ID NO: 799172 - DNA, 25 bp, Homo sapien
aaggcctgagaaaagcttcgttaag

SEQ ID NO: 799173 - DNA, 25 bp, Homo sapien
gcttcgttaagatcgggctcctccg

SEQ ID NO: 799174 - DNA, 25 bp, Homo sapien
gatcgggctcctccgggattccttc

SEQ ID NO: 799175 - DNA, 25 bp, Homo sapien
gagaaaagcttcgttaagatcgggc

SEQ ID NO: 799176 - DNA, 25 bp, Homo sapien
tgcgtattagtgaaccggaaggcag

SEQ ID NO: 799177 - DNA, 25 bp, Homo sapien
ttgcacaatcaggtcctcccggaaa

SEQ ID NO: 799178 - DNA, 25 bp, Homo sapien
ggtgggccgttgtcatttctcagtc

SEQ ID NO: 799179 - DNA, 25 bp, Homo sapien
tatccggtttggtcccttgcacaat

SEQ ID NO: 799180 - DNA, 25 bp, Homo sapien
gggacggcgcgttcccgcacttctg

SEQ ID NO: 799181 - DNA, 25 bp, Homo sapien
gccccacgccgaccgccgactgcgc

SEQ ID NO: 799182 - DNA, 25 bp, Homo sapien
cgcctgcgcagagggacggcgcgtt

SEQ ID NO: 799183 - DNA, 25 bp, Homo sapien
tgcgcagagggacggcgcgttcccg

SEQ ID NO: 799184 - DNA, 25 bp, Homo sapien
cattcttgcaagaaacgctgtgcct

SEQ ID NO: 799185 - DNA, 25 bp, Homo sapien
gctgtgcctcgtcagaaccaacggt

SEQ ID NO: 799186 - DNA, 25 bp, Homo sapien
tacaatgcccggactcgagaaacgt

SEQ ID NO: 799187 - DNA, 25 bp, Homo sapien
gtctttcacgtactggtcgcccagg

SEQ ID NO: 799188 - DNA, 25 bp, Homo sapien
tcttgggcaaagagaagggagcgtc

SEQ ID NO: 799189 - DNA, 25 bp, Homo sapien
aaggtcttgggcaaagagaagggag

SEQ ID NO: 799190 - DNA, 25 bp, Homo sapien
cccaaaggtcttgggcaaagagaag

SEQ ID NO: 799191 - DNA, 25 bp, Homo sapien
ttgggcaaagagaagggagcgtcac

SEQ ID NO: 799192 - DNA, 25 bp, Homo sapien
aaagtgttacctgaacagcattacg

SEQ ID NO: 799193 - DNA, 25 bp, Homo sapien
gggacgctgaagtaacaggatctgc

SEQ ID NO: 799194 - DNA, 25 bp, Homo sapien
atctgcaggagctcaaaagttgaac

SEQ ID NO: 799195 - DNA, 25 bp, Homo sapien
tctagtgagaaacccgtgggagaaa

SEQ ID NO: 799196 - DNA, 25 bp, Homo sapien
tcaaatatctgagctgtcattccaa

SEQ ID NO: 799197 - DNA, 25 bp, Homo sapien
tgcaaatgaaaactaggggcaatcc

SEQ ID NO: 799198 - DNA, 25 bp, Homo sapien
aaactaggggcaatcctgcagggcc

SEQ ID NO: 799199 - DNA, 25 bp, Homo sapien
gagccccacgaaatactctgaatat

SEQ ID NO: 799200 - DNA, 25 bp, Homo sapien
tcgaccagggatgacacagcttggt

SEQ ID NO: 799201 - DNA, 25 bp, Homo sapien
tcaacgtaacgcagcaaagcagctg

SEQ ID NO: 799202 - DNA, 25 bp, Homo sapien
tgggaggaactcaacgtaacgcagc

SEQ ID NO: 799203 - DNA, 25 bp, Homo sapien
cagcacaagtctgaagtcgaccagg

SEQ ID NO: 799204 - DNA, 25 bp, Homo sapien
ggcaaccttctaaacactaattcag

SEQ ID NO: 799205 - DNA, 25 bp, Homo sapien
taaagggatgttttctactgcagac

SEQ ID NO: 799206 - DNA, 25 bp, Homo sapien
tagaggtccacaatcccctgaagtc

SEQ ID NO: 799207 - DNA, 25 bp, Homo sapien
cgaagctgtaggacccacaaaaata

SEQ ID NO: 799208 - DNA, 25 bp, Homo sapien
ttcgtcagtaaagagttattgcacc

SEQ ID NO: 799209 - DNA, 25 bp, Homo sapien
taaagagttattgcaccaaagtcca

SEQ ID NO: 799210 - DNA, 25 bp, Homo sapien
tatagacctcttcgtcagtaaagag

SEQ ID NO: 799211 - DNA, 25 bp, Homo sapien
taaacaaactatagacctcttcgtc

SEQ ID NO: 799212 - DNA, 25 bp, Homo sapien
ggaaaggggggagggagtcagctgc

SEQ ID NO: 799213 - DNA, 25 bp, Homo sapien
tggaaaggggggagggagtcagctg

SEQ ID NO: 799214 - DNA, 25 bp, Homo sapien
tttgcagtaacgtgtttgctgtatc

SEQ ID NO: 799215 - DNA, 25 bp, Homo sapien
tgtttttgcagtaacgtgtttgctg

SEQ ID NO: 799216 - DNA, 25 bp, Homo sapien
tgcagtaacgtgtttgctgtatcat

SEQ ID NO: 799217 - DNA, 25 bp, Homo sapien
agctgtttttgcagtaacgtgtttg

SEQ ID NO: 799218 - DNA, 25 bp, Homo sapien
gaagccagattcactgaggctgcag

SEQ ID NO: 799219 - DNA, 25 bp, Homo sapien
catgtggtgtgaagccagattcact

SEQ ID NO: 799220 - DNA, 25 bp, Homo sapien
ttggaagtgtgaggcaataaacatg

SEQ ID NO: 799221 - DNA, 25 bp, Homo sapien
taaatcacaaactcttgaggcccat

SEQ ID NO: 799222 - DNA, 25 bp, Homo sapien
agtaccaaatcggaattcttcacat

SEQ ID NO: 799223 - DNA, 25 bp, Homo sapien
cttttcagatacatgcatcaagatt

SEQ ID NO: 799224 - DNA, 25 bp, Homo sapien
caaatcggaattcttcacatgaaac

SEQ ID NO: 799225 - DNA, 25 bp, Homo sapien
taccaaatcggaattcttcacatga

SEQ ID NO: 799226 - DNA, 25 bp, Homo sapien
gactcagcagttatggctcttctag

SEQ ID NO: 799227 - DNA, 25 bp, Homo sapien
ctcagcagttatggctcttctaggc

SEQ ID NO: 799228 - DNA, 25 bp, Homo sapien
aagactcagcagttatggctcttct

SEQ ID NO: 799229 - DNA, 25 bp, Homo sapien
ccaagactcagcagttatggctctt

SEQ ID NO: 799230 - DNA, 25 bp, Homo sapien
ttgtttgtcaggaaatagaagggaa

SEQ ID NO: 799231 - DNA, 25 bp, Homo sapien
cttgtttgtcaggaaatagaaggga

SEQ ID NO: 799232 - DNA, 25 bp, Homo sapien
ggggatttgaagcacatctgcccaa

SEQ ID NO: 799233 - DNA, 25 bp, Homo sapien
cactttggggatttgaagcacatct

SEQ ID NO: 799234 - DNA, 25 bp, Homo sapien
tttggggatttgaagcacatctgcc

SEQ ID NO: 799235 - DNA, 25 bp, Homo sapien
acactttggggatttgaagcacatc

SEQ ID NO: 799236 - DNA, 25 bp, Homo sapien
tgtctgttttcgttagcctgttgca

SEQ ID NO: 799237 - DNA, 25 bp, Homo sapien
gttgcaataacgctgttgcatacac

SEQ ID NO: 799238 - DNA, 25 bp, Homo sapien
cctgcaactgtccaatttgttcatc

SEQ ID NO: 799239 - DNA, 25 bp, Homo sapien
tgttcatcacgaaagtcattaagtt

SEQ ID NO: 799240 - DNA, 25 bp, Homo sapien
aaattgcctattgggttttgtggct

SEQ ID NO: 799241 - DNA, 25 bp, Homo sapien
taaattgcctattgggttttgtggc

SEQ ID NO: 799242 - DNA, 25 bp, Homo sapien
ttttggtttcatagactcagaaata

SEQ ID NO: 799243 - DNA, 25 bp, Homo sapien
tttggtttcatagactcagaaatac

SEQ ID NO: 799244 - DNA, 25 bp, Homo sapien
ctaaaattttggtttcatagactca

SEQ ID NO: 799245 - DNA, 25 bp, Homo sapien
aaattttggtttcatagactcagaa

SEQ ID NO: 799246 - DNA, 25 bp, Homo sapien
tttgctgtttagttccaaaactgaa

SEQ ID NO: 799247 - DNA, 25 bp, Homo sapien
taaccttgttggaattgtacatcta

SEQ ID NO: 799248 - DNA, 25 bp, Homo sapien
tgatcttgatccatatactgcaatc

SEQ ID NO: 799249 - DNA, 25 bp, Homo sapien
actaatatggctggatgagaatagc

SEQ ID NO: 799250 - DNA, 25 bp, Homo sapien
cccattgtatcaggttgcagcacca

SEQ ID NO: 799251 - DNA, 25 bp, Homo sapien
ccatcctctgtaagtggctgaaagc

SEQ ID NO: 799252 - DNA, 25 bp, Homo sapien
ctactttatgaaatggccccattgt

SEQ ID NO: 799253 - DNA, 25 bp, Homo sapien
tgtaagtggctgaaagcgcctccgg

SEQ ID NO: 799254 - DNA, 25 bp, Homo sapien
aacactgtgttgctctttcggtaca

SEQ ID NO: 799255 - DNA, 25 bp, Homo sapien
taaattcttgcacctaaatgccatc

SEQ ID NO: 799256 - DNA, 25 bp, Homo sapien
tactacggagacaatggcactgcag

SEQ ID NO: 799257 - DNA, 25 bp, Homo sapien
tgctcattgctgcttatactacgga

SEQ ID NO: 799258 - DNA, 25 bp, Homo sapien
tttcagcatgccaccaaaagagata

SEQ ID NO: 799259 - DNA, 25 bp, Homo sapien
ttcagcatgccaccaaaagagatac

SEQ ID NO: 799260 - DNA, 25 bp, Homo sapien
cattcttgttgtccgaaagaggaaa

SEQ ID NO: 799261 - DNA, 25 bp, Homo sapien
aattcaatgtggcattcccatttgg

SEQ ID NO: 799262 - DNA, 25 bp, Homo sapien
ggcattcttgttgtccgaaagagga

SEQ ID NO: 799263 - DNA, 25 bp, Homo sapien
tcaatgtggcattcccatttggcat

SEQ ID NO: 799264 - DNA, 25 bp, Homo sapien
tggttgttcctccaatgttaatgtt

SEQ ID NO: 799265 - DNA, 25 bp, Homo sapien
cgtattattttctctcacgtcattc

SEQ ID NO: 799266 - DNA, 25 bp, Homo sapien
attattttctctcacgtcattctcc

SEQ ID NO: 799267 - DNA, 25 bp, Homo sapien
tatcttatcgtattattttctctca

SEQ ID NO: 799268 - DNA, 25 bp, Homo sapien
tatcgtattattttctctcacgtca

SEQ ID NO: 799269 - DNA, 25 bp, Homo sapien
cttccagaagggagggagtcctcca

SEQ ID NO: 799270 - DNA, 25 bp, Homo sapien
ttgagagccttccagaagggaggga

SEQ ID NO: 799271 - DNA, 25 bp, Homo sapien
agccttccagaagggagggagtcct

SEQ ID NO: 799272 - DNA, 25 bp, Homo sapien
cagaagggagggagtcctccatagt

SEQ ID NO: 799273 - DNA, 25 bp, Homo sapien
gcattgcaagcccaggaggtatcat

SEQ ID NO: 799274 - DNA, 25 bp, Homo sapien
cctaagggcattgcaagcccaggag

SEQ ID NO: 799275 - DNA, 25 bp, Homo sapien
tcatcaataggcctaagggcattgc

SEQ ID NO: 799276 - DNA, 25 bp, Homo sapien
ccagaaaatcatcaataggcctaag

SEQ ID NO: 799277 - DNA, 25 bp, Homo sapien
tgttgcatcttctgcaccaggaacg

SEQ ID NO: 799278 - DNA, 25 bp, Homo sapien
ttctgcaccaggaacgtgctctggt

SEQ ID NO: 799279 - DNA, 25 bp, Homo sapien
accaggaacgtgctctggtactttg

SEQ ID NO: 799280 - DNA, 25 bp, Homo sapien
tgcaccaggaacgtgctctggtact

SEQ ID NO: 799281 - DNA, 25 bp, Homo sapien
gagcccacattggtacattggtgaa

SEQ ID NO: 799282 - DNA, 25 bp, Homo sapien
tgaagtgttggaccaaaagccacat

SEQ ID NO: 799283 - DNA, 25 bp, Homo sapien
ttgagcccacattggtacattggtg

SEQ ID NO: 799284 - DNA, 25 bp, Homo sapien
tggtacattggtgaagtgttggacc

SEQ ID NO: 799285 - DNA, 25 bp, Homo sapien
ccttgaagtggtaacctatttccat

SEQ ID NO: 799286 - DNA, 25 bp, Homo sapien
catccagagaccagtaaccttgaag

SEQ ID NO: 799287 - DNA, 25 bp, Homo sapien
taacctatttccatggagaacacct

SEQ ID NO: 799288 - DNA, 25 bp, Homo sapien
ttattcaacatccagagaccagtaa

SEQ ID NO: 799289 - DNA, 25 bp, Homo sapien
gctctctcaacccagccatacagga

SEQ ID NO: 799290 - DNA, 25 bp, Homo sapien
ggcccatactaactgtcctgtcatc

SEQ ID NO: 799291 - DNA, 25 bp, Homo sapien
cagccatacaggacaggctattcat

SEQ ID NO: 799292 - DNA, 25 bp, Homo sapien
tcaacccagccatacaggacaggct

SEQ ID NO: 799293 - DNA, 25 bp, Homo sapien
cacttgatcgaattgtctgttgaag

SEQ ID NO: 799294 - DNA, 25 bp, Homo sapien
acttgatcgaattgtctgttgaagc

SEQ ID NO: 799295 - DNA, 25 bp, Homo sapien
cgcatgttcttgtagtggctggtac

SEQ ID NO: 799296 - DNA, 25 bp, Homo sapien
tctttacaatttcgcatgttcttgt

SEQ ID NO: 799297 - DNA, 25 bp, Homo sapien
tttcgcatgttcttgtagtggctgg

SEQ ID NO: 799298 - DNA, 25 bp, Homo sapien
tacaatttcgcatgttcttgtagtg

SEQ ID NO: 799299 - DNA, 25 bp, Homo sapien
gttatctgcaggactaaaagtgcac

SEQ ID NO: 799300 - DNA, 25 bp, Homo sapien
tggtcttggtgaatcagcttgtgac

SEQ ID NO: 799301 - DNA, 25 bp, Homo sapien
taaaagtgcactcaatttcatgccc

SEQ ID NO: 799302 - DNA, 25 bp, Homo sapien
gcttgtgaccagtcaaagttatctg

SEQ ID NO: 799303 - DNA, 25 bp, Homo sapien
gtcgccatattctaggtcttcttcc

SEQ ID NO: 799304 - DNA, 25 bp, Homo sapien
tcgccatattctaggtcttcttcct

SEQ ID NO: 799305 - DNA, 25 bp, Homo sapien
caaaggtatctacaatccaaagtag

SEQ ID NO: 799306 - DNA, 25 bp, Homo sapien
tctgttccttctgtaagttgtcaag

SEQ ID NO: 799307 - DNA, 25 bp, Homo sapien
agtaggtttaaaactatggcctctg

SEQ ID NO: 799308 - DNA, 25 bp, Homo sapien
ttctgtaagttgtcaagggcatagt

SEQ ID NO: 799309 - DNA, 25 bp, Homo sapien
tgtggaggattttcacacttgtcct

SEQ ID NO: 799310 - DNA, 25 bp, Homo sapien
tgtccatagaaattatctccagtgc

SEQ ID NO: 799311 - DNA, 25 bp, Homo sapien
tcagtgcaatagaatatgtccatag

SEQ ID NO: 799312 - DNA, 25 bp, Homo sapien
tactcataaccttggttttgggcag

SEQ ID NO: 799313 - DNA, 25 bp, Homo sapien
tggaagaattattcgtgtatgtctc

SEQ ID NO: 799314 - DNA, 25 bp, Homo sapien
gaattattcgtgtatgtctcttggc

SEQ ID NO: 799315 - DNA, 25 bp, Homo sapien
tattcgtgtatgtctcttggccatg

SEQ ID NO: 799316 - DNA, 25 bp, Homo sapien
cgtgtatgtctcttggccatggagc

SEQ ID NO: 799317 - DNA, 25 bp, Homo sapien
cctcggatgacatctgagccataat

SEQ ID NO: 799318 - DNA, 25 bp, Homo sapien
ggatgacatctgagccataattggg

SEQ ID NO: 799319 - DNA, 25 bp, Homo sapien
tgtcttttcttacctcggatgacat

SEQ ID NO: 799320 - DNA, 25 bp, Homo sapien
gtcttttcttacctcggatgacatc

SEQ ID NO: 799321 - DNA, 25 bp, Homo sapien
cattcacacactaactcagctgatg

SEQ ID NO: 799322 - DNA, 25 bp, Homo sapien
gttggtgatgctagagctcttgcta

SEQ ID NO: 799323 - DNA, 25 bp, Homo sapien
ggtgatgctagagctcttgctaccc

SEQ ID NO: 799324 - DNA, 25 bp, Homo sapien
ctaactcagctgatgatgaaacttc

SEQ ID NO: 799325 - DNA, 25 bp, Homo sapien
caaaaactgaatccagtcgtttgga

SEQ ID NO: 799326 - DNA, 25 bp, Homo sapien
tgaatccagtcgtttggaagatgaa

SEQ ID NO: 799327 - DNA, 25 bp, Homo sapien
tgttaagatgcccaaaatgtattat

SEQ ID NO: 799328 - DNA, 25 bp, Homo sapien
ccctgttaagatgcccaaaatgtat

SEQ ID NO: 799329 - DNA, 25 bp, Homo sapien
tcacgctttctccagctaaggaaat

SEQ ID NO: 799330 - DNA, 25 bp, Homo sapien
tagtagagaatcttcaacaatctgg

SEQ ID NO: 799331 - DNA, 25 bp, Homo sapien
tgcctccagagggaatcacattcat

SEQ ID NO: 799332 - DNA, 25 bp, Homo sapien
gacatttccgccttttgcctccaga

SEQ ID NO: 799333 - DNA, 25 bp, Homo sapien
tcttctggtcgtgctgtatatgtct

SEQ ID NO: 799334 - DNA, 25 bp, Homo sapien
cttctggtcgtgctgtatatgtctt

SEQ ID NO: 799335 - DNA, 25 bp, Homo sapien
tctggtcgtgctgtatatgtctttg

SEQ ID NO: 799336 - DNA, 25 bp, Homo sapien
ctcttctggtcgtgctgtatatgtc

SEQ ID NO: 799337 - DNA, 25 bp, Homo sapien
tttctccatgactctcgatgagagt

SEQ ID NO: 799338 - DNA, 25 bp, Homo sapien
ttgctctttggatttaagataatac

SEQ ID NO: 799339 - DNA, 25 bp, Homo sapien
gataataccacaaataaggttttca

SEQ ID NO: 799340 - DNA, 25 bp, Homo sapien
agagttggtctttctaccatttcca

SEQ ID NO: 799341 - DNA, 25 bp, Homo sapien
aagggtggtgacaaattagactcaa

SEQ ID NO: 799342 - DNA, 25 bp, Homo sapien
gggtggtgacaaattagactcaatt

SEQ ID NO: 799343 - DNA, 25 bp, Homo sapien
tcaaagggtggtgacaaattagact

SEQ ID NO: 799344 - DNA, 25 bp, Homo sapien
ctgaatcaaagggtggtgacaaatt

SEQ ID NO: 799345 - DNA, 25 bp, Homo sapien
ttagcaaagcaccatgacaccatgt

SEQ ID NO: 799346 - DNA, 25 bp, Homo sapien
ctgtccctcgtgaagagggtgttga

SEQ ID NO: 799347 - DNA, 25 bp, Homo sapien
catgacaccatgtaaatgactctca

SEQ ID NO: 799348 - DNA, 25 bp, Homo sapien
caccatgtaaatgactctcatggcc

SEQ ID NO: 799349 - DNA, 25 bp, Homo sapien
caaatttaggcaagtgcatatgcat

SEQ ID NO: 799350 - DNA, 25 bp, Homo sapien
taaagtttcgaaaggctcttctaga

SEQ ID NO: 799351 - DNA, 25 bp, Homo sapien
tgctagaaatacaggaataattaca

SEQ ID NO: 799352 - DNA, 25 bp, Homo sapien
gtcacccagtgagttaaagtttcga

SEQ ID NO: 799353 - DNA, 25 bp, Homo sapien
ttttaggtttctctgctaaagtgaa

SEQ ID NO: 799354 - DNA, 25 bp, Homo sapien
tttaggtttctctgctaaagtgaac

SEQ ID NO: 799355 - DNA, 25 bp, Homo sapien
ctcctgcagttgaggcttttcctga

SEQ ID NO: 799356 - DNA, 25 bp, Homo sapien
cctgcagttgaggcttttcctgaca

SEQ ID NO: 799357 - DNA, 25 bp, Homo sapien
taatgatgaattgtttctagggcag

SEQ ID NO: 799358 - DNA, 25 bp, Homo sapien
aaatacttgttaagtaattccatgt

SEQ ID NO: 799359 - DNA, 25 bp, Homo sapien
tttctagggcagttagttcattgcc

SEQ ID NO: 799360 - DNA, 25 bp, Homo sapien
tcctcctgaggtagatcagcctgtg

SEQ ID NO: 799361 - DNA, 25 bp, Homo sapien
agtccaatttcttggagaactctgt

SEQ ID NO: 799362 - DNA, 25 bp, Homo sapien
tcagtccaatttcttggagaactct

SEQ ID NO: 799363 - DNA, 25 bp, Homo sapien
aatttcttggagaactctgtgtggg

SEQ ID NO: 799364 - DNA, 25 bp, Homo sapien
tgtcagtccaatttcttggagaact

SEQ ID NO: 799365 - DNA, 25 bp, Homo sapien
tttctgtccagattgtctagagtca

SEQ ID NO: 799366 - DNA, 25 bp, Homo sapien
tatttctgtccagattgtctagagt

SEQ ID NO: 799367 - DNA, 25 bp, Homo sapien
atttctgtccagattgtctagagtc

SEQ ID NO: 799368 - DNA, 25 bp, Homo sapien
ttctgtccagattgtctagagtcaa

SEQ ID NO: 799369 - DNA, 25 bp, Homo sapien
tccctgctgttgttaagtaatttaa

SEQ ID NO: 799370 - DNA, 25 bp, Homo sapien
aatgtttgggcactagctcggcagg

SEQ ID NO: 799371 - DNA, 25 bp, Homo sapien
ctcctcttaatgtttgggcactagc

SEQ ID NO: 799372 - DNA, 25 bp, Homo sapien
tttgggcactagctcggcaggcagc

SEQ ID NO: 799373 - DNA, 25 bp, Homo sapien
tgtatcatggttctctgacctctct

SEQ ID NO: 799374 - DNA, 25 bp, Homo sapien
gctgactgtgtatcatggttctctg

SEQ ID NO: 799375 - DNA, 25 bp, Homo sapien
ctgggctgactgtgtatcatggttc

SEQ ID NO: 799376 - DNA, 25 bp, Homo sapien
gactgtgtatcatggttctctgacc

SEQ ID NO: 799377 - DNA, 25 bp, Homo sapien
aggaagaattgcttgctgcagatct

SEQ ID NO: 799378 - DNA, 25 bp, Homo sapien
gaggctgggaataagatcagaagac

SEQ ID NO: 799379 - DNA, 25 bp, Homo sapien
aaggtatctcaagccccggtgtttg

SEQ ID NO: 799380 - DNA, 25 bp, Homo sapien
taatcagataaggtatctcaagccc

SEQ ID NO: 799381 - DNA, 25 bp, Homo sapien
gataccagggcacttggctgtgtct

SEQ ID NO: 799382 - DNA, 25 bp, Homo sapien
ctgtgtctctatgggtgtatacaca

SEQ ID NO: 799383 - DNA, 25 bp, Homo sapien
ttctccactgctatgataccagggc

SEQ ID NO: 799384 - DNA, 25 bp, Homo sapien
actgctatgataccagggcacttgg

SEQ ID NO: 799385 - DNA, 25 bp, Homo sapien
tcaaacttgggtacagttgaggata

SEQ ID NO: 799386 - DNA, 25 bp, Homo sapien
agcctgactgtctgaaattttgaga

SEQ ID NO: 799387 - DNA, 25 bp, Homo sapien
aattttgagactccaaagctggctg

SEQ ID NO: 799388 - DNA, 25 bp, Homo sapien
ctttggatcaatgtagggcagtttt

SEQ ID NO: 799389 - DNA, 25 bp, Homo sapien
tcggctgttggtgtcccttctcatt

SEQ ID NO: 799390 - DNA, 25 bp, Homo sapien
ttggatgagccacaatatgggccat

SEQ ID NO: 799391 - DNA, 25 bp, Homo sapien
atttaaggttggatgagccacaata

SEQ ID NO: 799392 - DNA, 25 bp, Homo sapien
tacattcggctgttggtgtcccttc

SEQ ID NO: 799393 - DNA, 25 bp, Homo sapien
atcttcatctggctgataggtcagg

SEQ ID NO: 799394 - DNA, 25 bp, Homo sapien
cttcatctggctgataggtcaggaa

SEQ ID NO: 799395 - DNA, 25 bp, Homo sapien
tcttggtaccatgagagagattggg

SEQ ID NO: 799396 - DNA, 25 bp, Homo sapien
aaatcagcattcttggtaccatgag

SEQ ID NO: 799397 - DNA, 25 bp, Homo sapien
tcttcatagtctgcaaggagagccg

SEQ ID NO: 799398 - DNA, 25 bp, Homo sapien
tagtcttgtaccactggattgatcc

SEQ ID NO: 799399 - DNA, 25 bp, Homo sapien
tgtaccactggattgatccccatct

SEQ ID NO: 799400 - DNA, 25 bp, Homo sapien
gagcatcttaacagtgacaaccaga

SEQ ID NO: 799401 - DNA, 25 bp, Homo sapien
aatgatgtagcatttagatttcttt

SEQ ID NO: 799402 - DNA, 25 bp, Homo sapien
cacaaacggtgcgtccggagactta

SEQ ID NO: 799403 - DNA, 25 bp, Homo sapien
tccctagtgcttcatctatataatc

SEQ ID NO: 799404 - DNA, 25 bp, Homo sapien
catgacccttcctggatccatccct

SEQ ID NO: 799405 - DNA, 25 bp, Homo sapien
atctatataatcagctcctatcctg

SEQ ID NO: 799406 - DNA, 25 bp, Homo sapien
caacagaggccaaagattatccttt

SEQ ID NO: 799407 - DNA, 25 bp, Homo sapien
gatgccatgttcacatccagtgtag

SEQ ID NO: 799408 - DNA, 25 bp, Homo sapien
tcttaaccatgggagattaaaaaca

SEQ ID NO: 799409 - DNA, 25 bp, Homo sapien
tagtttgcctgttctctgtacccaa

SEQ ID NO: 799410 - DNA, 25 bp, Homo sapien
tgcttgtgccatgctcttgtatcca

SEQ ID NO: 799411 - DNA, 25 bp, Homo sapien
tgtgccatgctcttgtatccaagtt

SEQ ID NO: 799412 - DNA, 25 bp, Homo sapien
agtacttcatttgttatctcaagca

SEQ ID NO: 799413 - DNA, 25 bp, Homo sapien
ctagtacttcatttgttatctcaag

SEQ ID NO: 799414 - DNA, 25 bp, Homo sapien
ttgcaacccattgcttagatttatc

SEQ ID NO: 799415 - DNA, 25 bp, Homo sapien
tctcacgacagagctggttaagctt

SEQ ID NO: 799416 - DNA, 25 bp, Homo sapien
tcagtttctcacgacagagctggtt

SEQ ID NO: 799417 - DNA, 25 bp, Homo sapien
agcctcagttgcaacccattgctta

SEQ ID NO: 799418 - DNA, 25 bp, Homo sapien
caaattgagagcttgccagagtttt

SEQ ID NO: 799419 - DNA, 25 bp, Homo sapien
taaggattcaagaacaccagatctt

SEQ ID NO: 799420 - DNA, 25 bp, Homo sapien
ggcttttgaacagtcttgttactat

SEQ ID NO: 799421 - DNA, 25 bp, Homo sapien
tcttggtcacttcgcaatattgtgg

SEQ ID NO: 799422 - DNA, 25 bp, Homo sapien
tcgcgcacggtgcgcacacacactg

SEQ ID NO: 799423 - DNA, 25 bp, Homo sapien
gcgcacggtgcgcacacacactgtc

SEQ ID NO: 799424 - DNA, 25 bp, Homo sapien
ggctcgcgcacggtgcgcacacaca

SEQ ID NO: 799425 - DNA, 25 bp, Homo sapien
ctcgcgcacggtgcgcacacacact

SEQ ID NO: 799426 - DNA, 25 bp, Homo sapien
taattactcttgacccacaggctgc

SEQ ID NO: 799427 - DNA, 25 bp, Homo sapien
aaatacaagtgttcttagtggcatc

SEQ ID NO: 799428 - DNA, 25 bp, Homo sapien
cagaggaatagctatgtatggcagc

SEQ ID NO: 799429 - DNA, 25 bp, Homo sapien
cagcctgtccttagaagctctggaa

SEQ ID NO: 799430 - DNA, 25 bp, Homo sapien
gcttattgagtgtctcaatctcagc

SEQ ID NO: 799431 - DNA, 25 bp, Homo sapien
ctcttgaaggcggtggatttatctc

SEQ ID NO: 799432 - DNA, 25 bp, Homo sapien
ttgaaggcggtggatttatctcttg

SEQ ID NO: 799433 - DNA, 25 bp, Homo sapien
ttattgagtgtctcaatctcagcca

SEQ ID NO: 799434 - DNA, 25 bp, Homo sapien
gatcataaattccattacagtaacc

SEQ ID NO: 799435 - DNA, 25 bp, Homo sapien
ggtaggcaactctataaagttctgg

SEQ ID NO: 799436 - DNA, 25 bp, Homo sapien
tccattacagtaaccctggtaggca

SEQ ID NO: 799437 - DNA, 25 bp, Homo sapien
taatacaactagtaatttcttaaga

SEQ ID NO: 799438 - DNA, 25 bp, Homo sapien
gggttgctataccaactgtttcagc

SEQ ID NO: 799439 - DNA, 25 bp, Homo sapien
cctaacaaacagagtgacatttacc

SEQ ID NO: 799440 - DNA, 25 bp, Homo sapien
tggaaaagcagacatctcctaacaa

SEQ ID NO: 799441 - DNA, 25 bp, Homo sapien
tcagcccattgtagtcttgcctctt

SEQ ID NO: 799442 - DNA, 25 bp, Homo sapien
ttcattcttggaatagcctgttttc

SEQ ID NO: 799443 - DNA, 25 bp, Homo sapien
cattcttggaatagcctgttttcat

SEQ ID NO: 799444 - DNA, 25 bp, Homo sapien
tcattcttggaatagcctgttttca

SEQ ID NO: 799445 - DNA, 25 bp, Homo sapien
aatatttaattagccgcctcctctc

SEQ ID NO: 799446 - DNA, 25 bp, Homo sapien
cctctcctttcgcttgcgtgattga

SEQ ID NO: 799447 - DNA, 25 bp, Homo sapien
tgattgagagtttccgagacggtaa

SEQ ID NO: 799448 - DNA, 25 bp, Homo sapien
tcaatatttaattagccgcctcctc

SEQ ID NO: 799449 - DNA, 25 bp, Homo sapien
tgctcagtgccttgcggtatttatc

SEQ ID NO: 799450 - DNA, 25 bp, Homo sapien
gaaggaggtccgagcgcgctctttc

SEQ ID NO: 799451 - DNA, 25 bp, Homo sapien
agcgcgctctttcgcctgctcagtg

SEQ ID NO: 799452 - DNA, 25 bp, Homo sapien
ttgagcctccagacccacgtgacat

SEQ ID NO: 799453 - DNA, 25 bp, Homo sapien
gctggtcgctccgcactctcggtag

SEQ ID NO: 799454 - DNA, 25 bp, Homo sapien
cagtcccgcggggtgctgagtttct

SEQ ID NO: 799455 - DNA, 25 bp, Homo sapien
tccgagcgcacgctggtcgctccgc

SEQ ID NO: 799456 - DNA, 25 bp, Homo sapien
agtcccgcggggtgctgagtttctc

SEQ ID NO: 799457 - DNA, 25 bp, Homo sapien
tgatctggtcgctgtcgtaccagtc

SEQ ID NO: 799458 - DNA, 25 bp, Homo sapien
aaagactgccaaggccacgaggatt

SEQ ID NO: 799459 - DNA, 25 bp, Homo sapien
gtcggaccagtaattcagatcatca

SEQ ID NO: 799460 - DNA, 25 bp, Homo sapien
caaacagctgagtggagacaagaaa

SEQ ID NO: 799461 - DNA, 25 bp, Homo sapien
atctcgggctcatccgggagggcat

SEQ ID NO: 799462 - DNA, 25 bp, Homo sapien
gatttcccgccttgtgaggatctcg

SEQ ID NO: 799463 - DNA, 25 bp, Homo sapien
gcagccctcgggaagaaacttgaat

SEQ ID NO: 799464 - DNA, 25 bp, Homo sapien
tgcgtgccacgttaactagggtgct

SEQ ID NO: 799465 - DNA, 25 bp, Homo sapien
tgcgccgccacctgactttgtcttg

SEQ ID NO: 799466 - DNA, 25 bp, Homo sapien
tctcggtgccggctttgtagagtcc

SEQ ID NO: 799467 - DNA, 25 bp, Homo sapien
gacaaagggcgtgtaaggcaaccag

SEQ ID NO: 799468 - DNA, 25 bp, Homo sapien
gttagcagctggctcggcgtcttca

SEQ ID NO: 799469 - DNA, 25 bp, Homo sapien
gtttgcccattaatccaaagaactg

SEQ ID NO: 799470 - DNA, 25 bp, Homo sapien
taatccaaagaactgctgaggcttg

SEQ ID NO: 799471 - DNA, 25 bp, Homo sapien
ctgaggcttgggtctccgggcgatt

SEQ ID NO: 799472 - DNA, 25 bp, Homo sapien
agcatcccgtttgcccattaatcca

SEQ ID NO: 799473 - DNA, 25 bp, Homo sapien
taactacatgttccactgaccgtgc

SEQ ID NO: 799474 - DNA, 25 bp, Homo sapien
cgaatacagtgaggcatgcgaacca

SEQ ID NO: 799475 - DNA, 25 bp, Homo sapien
aagggagcgcttcactcgaatacag

SEQ ID NO: 799476 - DNA, 25 bp, Homo sapien
tttggatctttagtcaagggagcgc

SEQ ID NO: 799477 - DNA, 25 bp, Homo sapien
aacagggccacttgtttttcaattg

SEQ ID NO: 799478 - DNA, 25 bp, Homo sapien
cataaagagcctttaacagggccac

SEQ ID NO: 799479 - DNA, 25 bp, Homo sapien
aaagagcctttaacagggccacttg

SEQ ID NO: 799480 - DNA, 25 bp, Homo sapien
agagcctttaacagggccacttgtt

SEQ ID NO: 799481 - DNA, 25 bp, Homo sapien
taagtgccttctatgggattcaaac

SEQ ID NO: 799482 - DNA, 25 bp, Homo sapien
gacttctgaggcctcttattaacta

SEQ ID NO: 799483 - DNA, 25 bp, Homo sapien
aacctaggactatgagacttctgag

SEQ ID NO: 799484 - DNA, 25 bp, Homo sapien
tctatctatatattatcctgaggaa

SEQ ID NO: 799485 - DNA, 25 bp, Homo sapien
caattgaagggacttaaaagacatt

SEQ ID NO: 799486 - DNA, 25 bp, Homo sapien
ttctggatgtaatatgaatctcccc

SEQ ID NO: 799487 - DNA, 25 bp, Homo sapien
gctgctggatgaccctaataaatga

SEQ ID NO: 799488 - DNA, 25 bp, Homo sapien
tattaagccctagagtcatgacaga

SEQ ID NO: 799489 - DNA, 25 bp, Homo sapien
attagtccaacaaaggaatctgttt

SEQ ID NO: 799490 - DNA, 25 bp, Homo sapien
ccattagtccaacaaaggaatctgt

SEQ ID NO: 799491 - DNA, 25 bp, Homo sapien
cccattagtccaacaaaggaatctg

SEQ ID NO: 799492 - DNA, 25 bp, Homo sapien
tttgcccattagtccaacaaaggaa

SEQ ID NO: 799493 - DNA, 25 bp, Homo sapien
ccctctgaagcctgatataaatttt

SEQ ID NO: 799494 - DNA, 25 bp, Homo sapien
gtgtatgagctgatgagggtttctc

SEQ ID NO: 799495 - DNA, 25 bp, Homo sapien
tgaaccctctgaagcctgatataaa

SEQ ID NO: 799496 - DNA, 25 bp, Homo sapien
tttttgagtgtatgagctgatgagg

SEQ ID NO: 799497 - DNA, 25 bp, Homo sapien
tgcattgcactcctttcataagcca

SEQ ID NO: 799498 - DNA, 25 bp, Homo sapien
cataattctgcattgcactcctttc

SEQ ID NO: 799499 - DNA, 25 bp, Homo sapien
aattctgcattgcactcctttcata

SEQ ID NO: 799500 - DNA, 25 bp, Homo sapien
tttcataattctgcattgcactcct

SEQ ID NO: 799501 - DNA, 25 bp, Homo sapien
tcattgcccattgacacaaatgaag

SEQ ID NO: 799502 - DNA, 25 bp, Homo sapien
gcccattgacacaaatgaagctgaa

SEQ ID NO: 799503 - DNA, 25 bp, Homo sapien
ttgcccattgacacaaatgaagctg

SEQ ID NO: 799504 - DNA, 25 bp, Homo sapien
ctgtcattgcccattgacacaaatg

SEQ ID NO: 799505 - DNA, 25 bp, Homo sapien
caaataggaaaagcacaagactgtc

SEQ ID NO: 799506 - DNA, 25 bp, Homo sapien
tccttttccgcagtagctgacacaa

SEQ ID NO: 799507 - DNA, 25 bp, Homo sapien
catgcttcagagatacaaatacagt

SEQ ID NO: 799508 - DNA, 25 bp, Homo sapien
tgtgctttgttgagaaataaccact

SEQ ID NO: 799509 - DNA, 25 bp, Homo sapien
aagggactcgcccatctttacaagg

SEQ ID NO: 799510 - DNA, 25 bp, Homo sapien
catgtctttatgtagcactgtggga

SEQ ID NO: 799511 - DNA, 25 bp, Homo sapien
aaagcaggcatgagtgaagttccgc

SEQ ID NO: 799512 - DNA, 25 bp, Homo sapien
caaccctcagctgaatgccatgtag

SEQ ID NO: 799513 - DNA, 25 bp, Homo sapien
tttcctatttgtgttgctactgggt

SEQ ID NO: 799514 - DNA, 25 bp, Homo sapien
tatttgtgttgctactgggtttctg

SEQ ID NO: 799515 - DNA, 25 bp, Homo sapien
cctatttgtgttgctactgggtttc

SEQ ID NO: 799516 - DNA, 25 bp, Homo sapien
ttttcctatttgtgttgctactggg

SEQ ID NO: 799517 - DNA, 25 bp, Homo sapien
caaggacatagcatggagaaccata

SEQ ID NO: 799518 - DNA, 25 bp, Homo sapien
ggatatttattacctggtcacccca

SEQ ID NO: 799519 - DNA, 25 bp, Homo sapien
tttggctccactcttttactgaagg

SEQ ID NO: 799520 - DNA, 25 bp, Homo sapien
taccgacaggagatcagacagctgg

SEQ ID NO: 799521 - DNA, 25 bp, Homo sapien
taatagagcacacgtgttgaatatc

SEQ ID NO: 799522 - DNA, 25 bp, Homo sapien
tttgtctgtttggatggatccatgt

SEQ ID NO: 799523 - DNA, 25 bp, Homo sapien
tagagaaggacttttattgttactg

SEQ ID NO: 799524 - DNA, 25 bp, Homo sapien
tgctcaaattgagacaagatgctct

SEQ ID NO: 799525 - DNA, 25 bp, Homo sapien
tattgctagcaagtctgttgtctgc

SEQ ID NO: 799526 - DNA, 25 bp, Homo sapien
ccttccactgtagcctctgcaattt

SEQ ID NO: 799527 - DNA, 25 bp, Homo sapien
gttgtctgcagtggtcaattcctta

SEQ ID NO: 799528 - DNA, 25 bp, Homo sapien
cctgctagggctatggcttactatt

SEQ ID NO: 799529 - DNA, 25 bp, Homo sapien
cctcactgttacatgatagtttggt

SEQ ID NO: 799530 - DNA, 25 bp, Homo sapien
cactgttacatgatagtttggttaa

SEQ ID NO: 799531 - DNA, 25 bp, Homo sapien
ctgttacatgatagtttggttaaat

SEQ ID NO: 799532 - DNA, 25 bp, Homo sapien
gttacatgatagtttggttaaatac

SEQ ID NO: 799533 - DNA, 25 bp, Homo sapien
ccactgagtgctgcatggtcccaag

SEQ ID NO: 799534 - DNA, 25 bp, Homo sapien
tggattgctgcctaattggttctgc

SEQ ID NO: 799535 - DNA, 25 bp, Homo sapien
caaggttctgtagcactggattgct

SEQ ID NO: 799536 - DNA, 25 bp, Homo sapien
ggaactggcttctcgtagccccact

SEQ ID NO: 799537 - DNA, 25 bp, Homo sapien
tgccacactcatgagatagacattg

SEQ ID NO: 799538 - DNA, 25 bp, Homo sapien
cattagtacctgtacaaatggtttg

SEQ ID NO: 799539 - DNA, 25 bp, Homo sapien
tagggccagtactctgagcaaacat

SEQ ID NO: 799540 - DNA, 25 bp, Homo sapien
gacattgaaacctatagggccagta

SEQ ID NO: 799541 - DNA, 25 bp, Homo sapien
agcctcgatggtctttactttttgg

SEQ ID NO: 799542 - DNA, 25 bp, Homo sapien
gcctcgatggtctttactttttggc

SEQ ID NO: 799543 - DNA, 25 bp, Homo sapien
tagcctcgatggtctttactttttg

SEQ ID NO: 799544 - DNA, 25 bp, Homo sapien
cagctccaacagtgggtgtagcgaa

SEQ ID NO: 799545 - DNA, 25 bp, Homo sapien
gcctgggaaaattgtggagcagctc

SEQ ID NO: 799546 - DNA, 25 bp, Homo sapien
ccaacagtgggtgtagcgaatgaga

SEQ ID NO: 799547 - DNA, 25 bp, Homo sapien
tgccctggggctagaccagacttgg

SEQ ID NO: 799548 - DNA, 25 bp, Homo sapien
acacattttgtttgacagcaaccat

SEQ ID NO: 799549 - DNA, 25 bp, Homo sapien
gatcaagccttaagcagtagcagtg

SEQ ID NO: 799550 - DNA, 25 bp, Homo sapien
cttcacaagtgaggatggatacata

SEQ ID NO: 799551 - DNA, 25 bp, Homo sapien
ggcaatacagagaccagtaacattt

SEQ ID NO: 799552 - DNA, 25 bp, Homo sapien
ttcctggataatatactgaagagtg

SEQ ID NO: 799553 - DNA, 25 bp, Homo sapien
ttttcctggataatatactgaagag

SEQ ID NO: 799554 - DNA, 25 bp, Homo sapien
aatcaaatgtagatttggtcttttc

SEQ ID NO: 799555 - DNA, 25 bp, Homo sapien
caatcaaatgtagatttggtctttt

SEQ ID NO: 799556 - DNA, 25 bp, Homo sapien
tatctctttctggtaaaacggctta

SEQ ID NO: 799557 - DNA, 25 bp, Homo sapien
ctggtacccactgataatctggaac

SEQ ID NO: 799558 - DNA, 25 bp, Homo sapien
ggaactttgagttcaagctgttccc

SEQ ID NO: 799559 - DNA, 25 bp, Homo sapien
tggtacccactgataatctggaact

SEQ ID NO: 799560 - DNA, 25 bp, Homo sapien
aatctggaactttgagttcaagctg

SEQ ID NO: 799561 - DNA, 25 bp, Homo sapien
taatgtgaaagcaaatatttcttcg

SEQ ID NO: 799562 - DNA, 25 bp, Homo sapien
gcttaggtggtctttatgctgtaat

SEQ ID NO: 799563 - DNA, 25 bp, Homo sapien
gagagtcaactcaggctaacttggg

SEQ ID NO: 799564 - DNA, 25 bp, Homo sapien
gacccactacaagtcagctgtcaaa

SEQ ID NO: 799565 - DNA, 25 bp, Homo sapien
ctgagagagacgtttgaggattcca

SEQ ID NO: 799566 - DNA, 25 bp, Homo sapien
ggattccaatctgatacccaaagag

SEQ ID NO: 799567 - DNA, 25 bp, Homo sapien
ggtaaaactgtccattgccatcaga

SEQ ID NO: 799568 - DNA, 25 bp, Homo sapien
gattctctggcgaccaaaagaagcc

SEQ ID NO: 799569 - DNA, 25 bp, Homo sapien
ctctgtgtacaatcttcgtagcact

SEQ ID NO: 799570 - DNA, 25 bp, Homo sapien
tgtgtacaatcttcgtagcactcag

SEQ ID NO: 799571 - DNA, 25 bp, Homo sapien
tgtacaatcttcgtagcactcagac

SEQ ID NO: 799572 - DNA, 25 bp, Homo sapien
acaatcttcgtagcactcagacact

SEQ ID NO: 799573 - DNA, 25 bp, Homo sapien
cattgacattctcaaaacggaatgt

SEQ ID NO: 799574 - DNA, 25 bp, Homo sapien
catcttgtttttggtgtatccattg

SEQ ID NO: 799575 - DNA, 25 bp, Homo sapien
aacatcttgtttttggtgtatccat

SEQ ID NO: 799576 - DNA, 25 bp, Homo sapien
ttctcaaaacggaatgtatctggac

SEQ ID NO: 799577 - DNA, 25 bp, Homo sapien
ggcagcggcagtttgagcccctgta

SEQ ID NO: 799578 - DNA, 25 bp, Homo sapien
tgacagctagcggaaggacctttct

SEQ ID NO: 799579 - DNA, 25 bp, Homo sapien
ccctgaagcatcgagagggaaccgc

SEQ ID NO: 799580 - DNA, 25 bp, Homo sapien
ttttttactatgtggcgtcgaagcc

SEQ ID NO: 799581 - DNA, 25 bp, Homo sapien
gagaagttgctcatgactctgtgat

SEQ ID NO: 799582 - DNA, 25 bp, Homo sapien
taactgtgtttaaatgaggccttct

SEQ ID NO: 799583 - DNA, 25 bp, Homo sapien
gatccgttttgtccaatgaaccatg

SEQ ID NO: 799584 - DNA, 25 bp, Homo sapien
gggaaaatcaatgtggctattcaaa

SEQ ID NO: 799585 - DNA, 25 bp, Homo sapien
cagaagttgcagcgatccatgatca

SEQ ID NO: 799586 - DNA, 25 bp, Homo sapien
atgagccttaagttgagggtgaccc

SEQ ID NO: 799587 - DNA, 25 bp, Homo sapien
gagccttaagttgagggtgacccag

SEQ ID NO: 799588 - DNA, 25 bp, Homo sapien
tgagccttaagttgagggtgaccca

SEQ ID NO: 799589 - DNA, 25 bp, Homo sapien
ctgtctggttgagtcattctgggct

SEQ ID NO: 799590 - DNA, 25 bp, Homo sapien
tggttgagtcattctgggctgactg

SEQ ID NO: 799591 - DNA, 25 bp, Homo sapien
tctggttgagtcattctgggctgac

SEQ ID NO: 799592 - DNA, 25 bp, Homo sapien
gggctgactgggcaccatcatgaga

SEQ ID NO: 799593 - DNA, 25 bp, Homo sapien
acaacaaaacaacactgatgcaatg

SEQ ID NO: 799594 - DNA, 25 bp, Homo sapien
caaaacaacactgatgcaatgaggc

SEQ ID NO: 799595 - DNA, 25 bp, Homo sapien
aacaaaacaacactgatgcaatgag

SEQ ID NO: 799596 - DNA, 25 bp, Homo sapien
aaaacaacactgatgcaatgaggcc

SEQ ID NO: 799597 - DNA, 25 bp, Homo sapien
ttctctttgatagggcaagggggca

SEQ ID NO: 799598 - DNA, 25 bp, Homo sapien
tcctggtgaagggagcaggtaaata

SEQ ID NO: 799599 - DNA, 25 bp, Homo sapien
gctgttaagaaaacccgatatcaca

SEQ ID NO: 799600 - DNA, 25 bp, Homo sapien
taagaaaacccgatatcacagcagc

SEQ ID NO: 799601 - DNA, 25 bp, Homo sapien
gactatcggcacgtacaaccatgcg

SEQ ID NO: 799602 - DNA, 25 bp, Homo sapien
ctacagagataaaggatggtgaccc

SEQ ID NO: 799603 - DNA, 25 bp, Homo sapien
tatacagtcagagggccagatttgg

SEQ ID NO: 799604 - DNA, 25 bp, Homo sapien
gggaattccctcagtagaacagtca

SEQ ID NO: 799605 - DNA, 25 bp, Homo sapien
tcatgtagccttgcttcattctttt

SEQ ID NO: 799606 - DNA, 25 bp, Homo sapien
tcccatatgtcatgtagccttgctt

SEQ ID NO: 799607 - DNA, 25 bp, Homo sapien
ccatatgtcatgtagccttgcttca

SEQ ID NO: 799608 - DNA, 25 bp, Homo sapien
gtgtcccatatgtcatgtagccttg

SEQ ID NO: 799609 - DNA, 25 bp, Homo sapien
tgacccaatgattattcaatagcat

SEQ ID NO: 799610 - DNA, 25 bp, Homo sapien
gacccaatgattattcaatagcatg

SEQ ID NO: 799611 - DNA, 25 bp, Homo sapien
attgacccaatgattattcaatagc

SEQ ID NO: 799612 - DNA, 25 bp, Homo sapien
ttgacccaatgattattcaatagca

SEQ ID NO: 799613 - DNA, 25 bp, Homo sapien
cttttaagtgttagcgatacaatct

SEQ ID NO: 799614 - DNA, 25 bp, Homo sapien
tcttcagcgtttttatagttatggg

SEQ ID NO: 799615 - DNA, 25 bp, Homo sapien
tgttttctttgatacgcagaaggta

SEQ ID NO: 799616 - DNA, 25 bp, Homo sapien
cactacgtaccggatggtattgcct

SEQ ID NO: 799617 - DNA, 25 bp, Homo sapien
aacttcctggtccaggtagttactg

SEQ ID NO: 799618 - DNA, 25 bp, Homo sapien
tggagcggtcgattggtcatgaact

SEQ ID NO: 799619 - DNA, 25 bp, Homo sapien
cttcctggtccaggtagttactgtg

SEQ ID NO: 799620 - DNA, 25 bp, Homo sapien
catttgtttcctctggagcggtcga

SEQ ID NO: 799621 - DNA, 25 bp, Homo sapien
caccaaaatgggttctgagtccaac

SEQ ID NO: 799622 - DNA, 25 bp, Homo sapien
caaaatgggttctgagtccaactat

SEQ ID NO: 799623 - DNA, 25 bp, Homo sapien
accaccaccaaaatgggttctgagt

SEQ ID NO: 799624 - DNA, 25 bp, Homo sapien
tgggttctgagtccaactattaata

SEQ ID NO: 799625 - DNA, 25 bp, Homo sapien
tccaccagatctgggaatgtccagt

SEQ ID NO: 799626 - DNA, 25 bp, Homo sapien
acaatgatcatgaccttcacctgtc

SEQ ID NO: 799627 - DNA, 25 bp, Homo sapien
accagatctgggaatgtccagttgg

SEQ ID NO: 799628 - DNA, 25 bp, Homo sapien
aatgatcatgaccttcacctgtcct

SEQ ID NO: 799629 - DNA, 25 bp, Homo sapien
gctgtgctgtgtgttctaggcccga

SEQ ID NO: 799630 - DNA, 25 bp, Homo sapien
ctgtgtgttctaggcccgagactgg

SEQ ID NO: 799631 - DNA, 25 bp, Homo sapien
taggcccgagactggaagctaggcc

SEQ ID NO: 799632 - DNA, 25 bp, Homo sapien
tgttctaggcccgagactggaagct

SEQ ID NO: 799633 - DNA, 25 bp, Homo sapien
gctcctggtcttgcaaactgtggtt

SEQ ID NO: 799634 - DNA, 25 bp, Homo sapien
tgctcctggtcttgcaaactgtggt

SEQ ID NO: 799635 - DNA, 25 bp, Homo sapien
gcaggtttgggctggagacttgggc

SEQ ID NO: 799636 - DNA, 25 bp, Homo sapien
aatgaccgtgattgcctgggatgag

SEQ ID NO: 799637 - DNA, 25 bp, Homo sapien
ggcatcccaggtagacagtggttga

SEQ ID NO: 799638 - DNA, 25 bp, Homo sapien
aggctgtggaaatgaccgtgattgc

SEQ ID NO: 799639 - DNA, 25 bp, Homo sapien
gtactggaggtgaatggtcaagtct

SEQ ID NO: 799640 - DNA, 25 bp, Homo sapien
actggaggtgaatggtcaagtctga

SEQ ID NO: 799641 - DNA, 25 bp, Homo sapien
tcaggtactggaggtgaatggtcaa

SEQ ID NO: 799642 - DNA, 25 bp, Homo sapien
gaggtgaatggtcaagtctgatctc

SEQ ID NO: 799643 - DNA, 25 bp, Homo sapien
tacctgcgcatgttggtggacagtc

SEQ ID NO: 799644 - DNA, 25 bp, Homo sapien
ggcagggtacacactggacatttca

SEQ ID NO: 799645 - DNA, 25 bp, Homo sapien
tcaggaacatttaaccgcagggttg

SEQ ID NO: 799646 - DNA, 25 bp, Homo sapien
catttcaagcccctccagagaagca

SEQ ID NO: 799647 - DNA, 25 bp, Homo sapien
atacaaagtgccctgcggagggtgc

SEQ ID NO: 799648 - DNA, 25 bp, Homo sapien
gccctgcggagggtgctcagcagaa

SEQ ID NO: 799649 - DNA, 25 bp, Homo sapien
cctgcggagggtgctcagcagaaca

SEQ ID NO: 799650 - DNA, 25 bp, Homo sapien
gctcagcagaacagtcgaatttcat

SEQ ID NO: 799651 - DNA, 25 bp, Homo sapien
cagtgatgtatgctgcggtcactcc

SEQ ID NO: 799652 - DNA, 25 bp, Homo sapien
agtgatgtatgctgcggtcactccc

SEQ ID NO: 799653 - DNA, 25 bp, Homo sapien
tgatgtatgctgcggtcactcccat

SEQ ID NO: 799654 - DNA, 25 bp, Homo sapien
gtgatgtatgctgcggtcactccca

SEQ ID NO: 799655 - DNA, 25 bp, Homo sapien
acacagagccacagaatctcacaga

SEQ ID NO: 799656 - DNA, 25 bp, Homo sapien
tgtctgacgcagatgtctttcttca

SEQ ID NO: 799657 - DNA, 25 bp, Homo sapien
cctccacacccccacctgtgctggg

SEQ ID NO: 799658 - DNA, 25 bp, Homo sapien
ctctttccttctcaaggtgtccaag

SEQ ID NO: 799659 - DNA, 25 bp, Homo sapien
ccgtgtttctgtgcctttctagttt

SEQ ID NO: 799660 - DNA, 25 bp, Homo sapien
tgtcacccgctatatcattcaccat

SEQ ID NO: 799661 - DNA, 25 bp, Homo sapien
tcaccatcatgaacccgtgtttctg

SEQ ID NO: 799662 - DNA, 25 bp, Homo sapien
agccatctgtcacccgctatatcat

SEQ ID NO: 799663 - DNA, 25 bp, Homo sapien
caagtaaatcattcagcttcttcct

SEQ ID NO: 799664 - DNA, 25 bp, Homo sapien
tgaattccttctatgcacaagtaaa

SEQ ID NO: 799665 - DNA, 25 bp, Homo sapien
ctctctactctcgtggtcttgaggg

SEQ ID NO: 799666 - DNA, 25 bp, Homo sapien
cctgaacaataaggatatctcgtcc

SEQ ID NO: 799667 - DNA, 25 bp, Homo sapien
tgcggctattgtcccaggtattcag

SEQ ID NO: 799668 - DNA, 25 bp, Homo sapien
ggatgatagaccaacaacctagcta

SEQ ID NO: 799669 - DNA, 25 bp, Homo sapien
ttcagaaggccaagattcaaggatc

SEQ ID NO: 799670 - DNA, 25 bp, Homo sapien
tagattgcaacgtaggtcacagagt

SEQ ID NO: 799671 - DNA, 25 bp, Homo sapien
aatcggcagagcgaactgcagccca

SEQ ID NO: 799672 - DNA, 25 bp, Homo sapien
tcggccgacgagtagtgtgatttgc

SEQ ID NO: 799673 - DNA, 25 bp, Homo sapien
ccagtgtcggccgacgagtagtgtg

SEQ ID NO: 799674 - DNA, 25 bp, Homo sapien
agtagtgtgatttgcaaatgcctgc

SEQ ID NO: 799675 - DNA, 25 bp, Homo sapien
ccgacgagtagtgtgatttgcaaat

SEQ ID NO: 799676 - DNA, 25 bp, Homo sapien
ttcccattaaccaaatttggtgtca

SEQ ID NO: 799677 - DNA, 25 bp, Homo sapien
atgacccagtcacccgatctagtca

SEQ ID NO: 799678 - DNA, 25 bp, Homo sapien
ctgggattcccattaaccaaatttg

SEQ ID NO: 799679 - DNA, 25 bp, Homo sapien
aatttggtgtcatcatgacccagtc

SEQ ID NO: 799680 - DNA, 25 bp, Homo sapien
taaatggcgcaaggtatgggctgaa

SEQ ID NO: 799681 - DNA, 25 bp, Homo sapien
cataggtcatgggacaaggtgatgt

SEQ ID NO: 799682 - DNA, 25 bp, Homo sapien
atcctgggtgaaagtaaggacgtag

SEQ ID NO: 799683 - DNA, 25 bp, Homo sapien
gtgacatgagaaagtggaggcccgg

SEQ ID NO: 799684 - DNA, 25 bp, Homo sapien
tgggattgagcgatctcctcacctc

SEQ ID NO: 799685 - DNA, 25 bp, Homo sapien
cttctgggaggtcaccaatgaatgc

SEQ ID NO: 799686 - DNA, 25 bp, Homo sapien
ccaatgaatgccaaactcctgggat

SEQ ID NO: 799687 - DNA, 25 bp, Homo sapien
actcctgggattgagcgatctcctc

SEQ ID NO: 799688 - DNA, 25 bp, Homo sapien
gggcgtccaggactttccagcccaa

SEQ ID NO: 799689 - DNA, 25 bp, Homo sapien
caaccccgcagggtctttcttcttg

SEQ ID NO: 799690 - DNA, 25 bp, Homo sapien
tgtcacgccatccacatgcagtgtg

SEQ ID NO: 799691 - DNA, 25 bp, Homo sapien
gcttctgttgacgtagctgcgagga

SEQ ID NO: 799692 - DNA, 25 bp, Homo sapien
cacacagcaggaacgagttagcact

SEQ ID NO: 799693 - DNA, 25 bp, Homo sapien
aggattcatccctcgcctagacgct

SEQ ID NO: 799694 - DNA, 25 bp, Homo sapien
gagttagcacttgcaaatgctcgct

SEQ ID NO: 799695 - DNA, 25 bp, Homo sapien
cctggtctgtctgcgggtgctgtct

SEQ ID NO: 799696 - DNA, 25 bp, Homo sapien
tcatgatgagataccccttcacacc

SEQ ID NO: 799697 - DNA, 25 bp, Homo sapien
aaatggttcaggttagctgggcaca

SEQ ID NO: 799698 - DNA, 25 bp, Homo sapien
actcattgcccatcagaatacaaaa

SEQ ID NO: 799699 - DNA, 25 bp, Homo sapien
ttagaccagtaaggtggtgcacacc

SEQ ID NO: 799700 - DNA, 25 bp, Homo sapien
gcagccctgcggagcggcgggcctg

SEQ ID NO: 799701 - DNA, 25 bp, Homo sapien
cgcgccggttgctcccgagcacacg

SEQ ID NO: 799702 - DNA, 25 bp, Homo sapien
gttgcttctgccaaacctcggtccg

SEQ ID NO: 799703 - DNA, 25 bp, Homo sapien
gttcgcccgtcagtcgatcctgcct

SEQ ID NO: 799704 - DNA, 25 bp, Homo sapien
gtttgcggaagtggcgcggccccag

SEQ ID NO: 799705 - DNA, 25 bp, Homo sapien
cccagcactgccggcgatcaggagg

SEQ ID NO: 799706 - DNA, 25 bp, Homo sapien
ctgccggcgatcaggaggaccagca

SEQ ID NO: 799707 - DNA, 25 bp, Homo sapien
ctgcacctgtttgcggaagtggcgc

SEQ ID NO: 799708 - DNA, 25 bp, Homo sapien
cacccttaagccagtttgtcaatag

SEQ ID NO: 799709 - DNA, 25 bp, Homo sapien
caaataaaaacgatgttgagaaaat

SEQ ID NO: 799710 - DNA, 25 bp, Homo sapien
tgtcaatagttattcaacgcctgct

SEQ ID NO: 799711 - DNA, 25 bp, Homo sapien
tacactgacgttagctaaaatagaa

SEQ ID NO: 799712 - DNA, 25 bp, Homo sapien
ggtttggaccttcacaagactgtaa

SEQ ID NO: 799713 - DNA, 25 bp, Homo sapien
tatcaagcccttaacttgtggccag

SEQ ID NO: 799714 - DNA, 25 bp, Homo sapien
catttaagcatccacagggagctag

SEQ ID NO: 799715 - DNA, 25 bp, Homo sapien
gcctagatttgggagttcacgaaga

SEQ ID NO: 799716 - DNA, 25 bp, Homo sapien
aaatatccatgcatccacactgaca

SEQ ID NO: 799717 - DNA, 25 bp, Homo sapien
gaacctgtagcttcttgaaatgcca

SEQ ID NO: 799718 - DNA, 25 bp, Homo sapien
aataaacagaggatcgcatgggccc

SEQ ID NO: 799719 - DNA, 25 bp, Homo sapien
caacactgtggaatcaactcgaagt

SEQ ID NO: 799720 - DNA, 25 bp, Homo sapien
gggaggcatactaccatggaaggca

SEQ ID NO: 799721 - DNA, 25 bp, Homo sapien
gaaccaaggagataagaaacaacat

SEQ ID NO: 799722 - DNA, 25 bp, Homo sapien
aggcaacagggaggcatactaccat

SEQ ID NO: 799723 - DNA, 25 bp, Homo sapien
aagagaaccaaggagataagaaaca

SEQ ID NO: 799724 - DNA, 25 bp, Homo sapien
gtctttaacagctttgaatggtggt

SEQ ID NO: 799725 - DNA, 25 bp, Homo sapien
ttccacactccggaagccgatgcag

SEQ ID NO: 799726 - DNA, 25 bp, Homo sapien
tatggcgtcatccacggcacttcca

SEQ ID NO: 799727 - DNA, 25 bp, Homo sapien
cacggcacttccatgtctttaacag

SEQ ID NO: 799728 - DNA, 25 bp, Homo sapien
tactatgagctatgatgaccctctc

SEQ ID NO: 799729 - DNA, 25 bp, Homo sapien
tccagatggatcttctgccaattca

SEQ ID NO: 799730 - DNA, 25 bp, Homo sapien
taaggcttcagcatccaacgttgcc

SEQ ID NO: 799731 - DNA, 25 bp, Homo sapien
cccagagacgctaacatgacatgct

SEQ ID NO: 799732 - DNA, 25 bp, Homo sapien
taggaaacattatgaatagcgagac

SEQ ID NO: 799733 - DNA, 25 bp, Homo sapien
tgtgaaataccaccacaagaatgta

SEQ ID NO: 799734 - DNA, 25 bp, Homo sapien
tcaaccacctagatccaaatgtcaa

SEQ ID NO: 799735 - DNA, 25 bp, Homo sapien
tgcaacagtactgcccaaaacaagc

SEQ ID NO: 799736 - DNA, 25 bp, Homo sapien
gacgcatttggattgtaagggagaa

SEQ ID NO: 799737 - DNA, 25 bp, Homo sapien
gcaaagcgctttcacgtacactgtt

SEQ ID NO: 799738 - DNA, 25 bp, Homo sapien
gaagaactgtgcttcactcccgatg

SEQ ID NO: 799739 - DNA, 25 bp, Homo sapien
gccactgcgccagactgctggaatt

SEQ ID NO: 799740 - DNA, 25 bp, Homo sapien
gatacacagtttgcaattaacacta

SEQ ID NO: 799741 - DNA, 25 bp, Homo sapien
tctgggtccttacagcaggatacac

SEQ ID NO: 799742 - DNA, 25 bp, Homo sapien
tccttacagcaggatacacagtttg

SEQ ID NO: 799743 - DNA, 25 bp, Homo sapien
tatttctgggtccttacagcaggat

SEQ ID NO: 799744 - DNA, 25 bp, Homo sapien
aaataatgccattcaaaatttggca

SEQ ID NO: 799745 - DNA, 25 bp, Homo sapien
gaattgcgagggagctgggagtgaa

SEQ ID NO: 799746 - DNA, 25 bp, Homo sapien
gaaggctggaattgcgagggagctg

SEQ ID NO: 799747 - DNA, 25 bp, Homo sapien
tgctggtggtgtgaaatctatctca

SEQ ID NO: 799748 - DNA, 25 bp, Homo sapien
gtactgaaagtgtgaagacctctgc

SEQ ID NO: 799749 - DNA, 25 bp, Homo sapien
gaaataaaccaaagaggagatgggc

SEQ ID NO: 799750 - DNA, 25 bp, Homo sapien
agagaaataaaccaaagaggagatg

SEQ ID NO: 799751 - DNA, 25 bp, Homo sapien
caaagaggagatgggcagtccaata

SEQ ID NO: 799752 - DNA, 25 bp, Homo sapien
taaaccaaagaggagatgggcagtc

SEQ ID NO: 799753 - DNA, 25 bp, Homo sapien
gcctgaccactagaattcagcttca

SEQ ID NO: 799754 - DNA, 25 bp, Homo sapien
tgcaggaatacaatgggcctgacca

SEQ ID NO: 799755 - DNA, 25 bp, Homo sapien
caatgggcctgaccactagaattca

SEQ ID NO: 799756 - DNA, 25 bp, Homo sapien
agacaaagctattgcaggaatacaa

SEQ ID NO: 799757 - DNA, 25 bp, Homo sapien
cgtggccagaactagcagagaaacc

SEQ ID NO: 799758 - DNA, 25 bp, Homo sapien
gccaggtgttcaatgtcaatgaatc

SEQ ID NO: 799759 - DNA, 25 bp, Homo sapien
caaggagattcgttttattctcata

SEQ ID NO: 799760 - DNA, 25 bp, Homo sapien
catcaactaacacagaaccaaacct

SEQ ID NO: 799761 - DNA, 25 bp, Homo sapien
tcctgtatgtagtttagactgtggc

SEQ ID NO: 799762 - DNA, 25 bp, Homo sapien
ggcgggcaacttgagacttcaatcc

SEQ ID NO: 799763 - DNA, 25 bp, Homo sapien
ctttccaaaccagccatttccaatt

SEQ ID NO: 799764 - DNA, 25 bp, Homo sapien
tgtagtttagactgtggcgggcaac

SEQ ID NO: 799765 - DNA, 25 bp, Homo sapien
tgactcttgctacgctagtgcccgt

SEQ ID NO: 799766 - DNA, 25 bp, Homo sapien
tgttcctttgggttggcacttgctt

SEQ ID NO: 799767 - DNA, 25 bp, Homo sapien
gtgcccgtgtaaatctctcccaaga

SEQ ID NO: 799768 - DNA, 25 bp, Homo sapien
tttaactccttcacgatgactcttg

SEQ ID NO: 799769 - DNA, 25 bp, Homo sapien
actacaacatcgactattccctggg

SEQ ID NO: 799770 - DNA, 25 bp, Homo sapien
gactatttaaatcggtggacttgga

SEQ ID NO: 799771 - DNA, 25 bp, Homo sapien
gacttggagtaaagcagatcctgca

SEQ ID NO: 799772 - DNA, 25 bp, Homo sapien
gatcctgcaacaatggtgggcctca

SEQ ID NO: 799773 - DNA, 25 bp, Homo sapien
gaaatgtgtactgctttgctgaacc

SEQ ID NO: 799774 - DNA, 25 bp, Homo sapien
tcatgcaagggtttttgtacggaaa

SEQ ID NO: 799775 - DNA, 25 bp, Homo sapien
ctgggctgtatgatgtgacggttaa

SEQ ID NO: 799776 - DNA, 25 bp, Homo sapien
tgctgaaccactcacctactgacgg

SEQ ID NO: 799777 - DNA, 25 bp, Homo sapien
aacaccaggaggtagggaatcgctt

SEQ ID NO: 799778 - DNA, 25 bp, Homo sapien
tagggaatcgcttctacgcactgtc

SEQ ID NO: 799779 - DNA, 25 bp, Homo sapien
ggaggtagggaatcgcttctacgca

SEQ ID NO: 799780 - DNA, 25 bp, Homo sapien
gaatcgcttctacgcactgtccaac

SEQ ID NO: 799781 - DNA, 25 bp, Homo sapien
gacagcacctaggagcagtgtggcc

SEQ ID NO: 799782 - DNA, 25 bp, Homo sapien
caggtgcacaccttggttataagca

SEQ ID NO: 799783 - DNA, 25 bp, Homo sapien
aagcaccatcggagggcgccagaga

SEQ ID NO: 799784 - DNA, 25 bp, Homo sapien
tataagcagcgatgacctgtcactg

SEQ ID NO: 799785 - DNA, 25 bp, Homo sapien
caatgctgacatgaatggccaggga

SEQ ID NO: 799786 - DNA, 25 bp, Homo sapien
gtaaataggttcctcgcaagcccgc

SEQ ID NO: 799787 - DNA, 25 bp, Homo sapien
agtcattcaaacacctgtaaatagg

SEQ ID NO: 799788 - DNA, 25 bp, Homo sapien
cgctcctcaatgctgacatgaatgg

SEQ ID NO: 799789 - DNA, 25 bp, Homo sapien
cgttaacaagcctactcttcaaagg

SEQ ID NO: 799790 - DNA, 25 bp, Homo sapien
taacaagcctactcttcaaagggga

SEQ ID NO: 799791 - DNA, 25 bp, Homo sapien
cacgttaacaagcctactcttcaaa

SEQ ID NO: 799792 - DNA, 25 bp, Homo sapien
acaagcctactcttcaaaggggagc

SEQ ID NO: 799793 - DNA, 25 bp, Homo sapien
tgctcgctgcgcagatacgccttca

SEQ ID NO: 799794 - DNA, 25 bp, Homo sapien
tcgctgcgcagatacgccttcaggt

SEQ ID NO: 799795 - DNA, 25 bp, Homo sapien
ctcgctgcgcagatacgccttcagg

SEQ ID NO: 799796 - DNA, 25 bp, Homo sapien
gctgcgcagatacgccttcaggtca

SEQ ID NO: 799797 - DNA, 25 bp, Homo sapien
cccgcggcgacctcgcacgccatcc

SEQ ID NO: 799798 - DNA, 25 bp, Homo sapien
gcatggtctgtgagtccccccgcat

SEQ ID NO: 799799 - DNA, 25 bp, Homo sapien
gcggcgacctcgcacgccatcctct

SEQ ID NO: 799800 - DNA, 25 bp, Homo sapien
ggcgacctcgcacgccatcctctgc

SEQ ID NO: 799801 - DNA, 25 bp, Homo sapien
ttaagtttcacaaactcggcagcct

SEQ ID NO: 799802 - DNA, 25 bp, Homo sapien
ggcgtgcaccgctgacgcaggtacc

SEQ ID NO: 799803 - DNA, 25 bp, Homo sapien
gcctctctggactgtcccgccggtg

SEQ ID NO: 799804 - DNA, 25 bp, Homo sapien
tcacaaactcggcagcctctctgga

SEQ ID NO: 799805 - DNA, 25 bp, Homo sapien
aattatgctagataacagcctgtta

SEQ ID NO: 799806 - DNA, 25 bp, Homo sapien
ttaagaattcctataccagtattag

SEQ ID NO: 799807 - DNA, 25 bp, Homo sapien
taaagcttcatataagggattctgc

SEQ ID NO: 799808 - DNA, 25 bp, Homo sapien
gtaggctttctccattacgaaatct

SEQ ID NO: 799809 - DNA, 25 bp, Homo sapien
tgcccggcctcaaggattttcttta

SEQ ID NO: 799810 - DNA, 25 bp, Homo sapien
ccgtgcccggcctcaaggattttct

SEQ ID NO: 799811 - DNA, 25 bp, Homo sapien
taacttgagttttagaacttgaata

SEQ ID NO: 799812 - DNA, 25 bp, Homo sapien
cctcaaggattttctttaacttgag

SEQ ID NO: 799813 - DNA, 25 bp, Homo sapien
ggttttgccaacagaggctccgtca

SEQ ID NO: 799814 - DNA, 25 bp, Homo sapien
gaggattccgataaagcacacagag

SEQ ID NO: 799815 - DNA, 25 bp, Homo sapien
taaccatgagactcagggccgcatg

SEQ ID NO: 799816 - DNA, 25 bp, Homo sapien
gaagtgacttcgctagggccacaaa

SEQ ID NO: 799817 - DNA, 25 bp, Homo sapien
gaaattccatataagggagtgtctg

SEQ ID NO: 799818 - DNA, 25 bp, Homo sapien
cacgagaatcatgtgacccccagag

SEQ ID NO: 799819 - DNA, 25 bp, Homo sapien
aggcacgagaatcatgtgaccccca

SEQ ID NO: 799820 - DNA, 25 bp, Homo sapien
aattccatataagggagtgtctggg

SEQ ID NO: 799821 - DNA, 25 bp, Homo sapien
tagttaggcagatatggacagggca

SEQ ID NO: 799822 - DNA, 25 bp, Homo sapien
caatggctcagtcaaaaaaggcaga

SEQ ID NO: 799823 - DNA, 25 bp, Homo sapien
caagtcaagggttgaacagggcact

SEQ ID NO: 799824 - DNA, 25 bp, Homo sapien
ccactgggaacgctcgacaggttaa

SEQ ID NO: 799825 - DNA, 25 bp, Homo sapien
gaatcctattccgtaatctcccact

SEQ ID NO: 799826 - DNA, 25 bp, Homo sapien
tgagaaaacaattccgcagggctaa

SEQ ID NO: 799827 - DNA, 25 bp, Homo sapien
catttaagtcggaggtgagaaaaca

SEQ ID NO: 799828 - DNA, 25 bp, Homo sapien
tacctgctgaatcctattccgtaat

SEQ ID NO: 799829 - DNA, 25 bp, Homo sapien
cagtccatcgcagagggaaaacttt

SEQ ID NO: 799830 - DNA, 25 bp, Homo sapien
tgcagttagcagtctgtcttgaaag

SEQ ID NO: 799831 - DNA, 25 bp, Homo sapien
aaagctggttactaattctggagca

SEQ ID NO: 799832 - DNA, 25 bp, Homo sapien
tattactatacttagtctgatctgc

SEQ ID NO: 799833 - DNA, 25 bp, Homo sapien
tctttacatgggcaagacgatatcc

SEQ ID NO: 799834 - DNA, 25 bp, Homo sapien
tgagttactcctcagtatcgtgggt

SEQ ID NO: 799835 - DNA, 25 bp, Homo sapien
tatttactgcaatgttcccgaacgt

SEQ ID NO: 799836 - DNA, 25 bp, Homo sapien
tcccgaacgtgactctcatctgtgt

SEQ ID NO: 799837 - DNA, 25 bp, Homo sapien
tgtgcggcattgtcaaaaagctccc

SEQ ID NO: 799838 - DNA, 25 bp, Homo sapien
catctatcagagtagggctgctcca

SEQ ID NO: 799839 - DNA, 25 bp, Homo sapien
aaaggtttgaatacggctgtgcggc

SEQ ID NO: 799840 - DNA, 25 bp, Homo sapien
aaagctcccaaagtgtcacacccag

SEQ ID NO: 799841 - DNA, 25 bp, Homo sapien
cagcacacgacaagcaatcagtgga

SEQ ID NO: 799842 - DNA, 25 bp, Homo sapien
gagcagcacacgacaagcaatcagt

SEQ ID NO: 799843 - DNA, 25 bp, Homo sapien
cacgacaagcaatcagtggaaccat

SEQ ID NO: 799844 - DNA, 25 bp, Homo sapien
ctgagcagcacacgacaagcaatca

SEQ ID NO: 799845 - DNA, 25 bp, Homo sapien
taagtcccctggtaagctagagtct

SEQ ID NO: 799846 - DNA, 25 bp, Homo sapien
tatccatgtcggttgtgagcagcgc

SEQ ID NO: 799847 - DNA, 25 bp, Homo sapien
caaagtggcctgttatgactgactc

SEQ ID NO: 799848 - DNA, 25 bp, Homo sapien
tcaaagtggtcgtgcttagcggcct

SEQ ID NO: 799849 - DNA, 25 bp, Homo sapien
taaagagtttctacatgacgtttct

SEQ ID NO: 799850 - DNA, 25 bp, Homo sapien
tctacatgacgtttctaacatagct

SEQ ID NO: 799851 - DNA, 25 bp, Homo sapien
tgaagctcagtatctaaagagtttc

SEQ ID NO: 799852 - DNA, 25 bp, Homo sapien
agctcagtatctaaagagtttctac

SEQ ID NO: 799853 - DNA, 25 bp, Homo sapien
tctgtatcgtcaccctttgtgctta

SEQ ID NO: 799854 - DNA, 25 bp, Homo sapien
gagcatgacatctgtatcgtcaccc

SEQ ID NO: 799855 - DNA, 25 bp, Homo sapien
tgacatctgtatcgtcaccctttgt

SEQ ID NO: 799856 - DNA, 25 bp, Homo sapien
catctgtatcgtcaccctttgtgct

SEQ ID NO: 799857 - DNA, 25 bp, Homo sapien
acttccggggaagactgcaatgagg

SEQ ID NO: 799858 - DNA, 25 bp, Homo sapien
ttcgaaggaggtaggaggtacctgc

SEQ ID NO: 799859 - DNA, 25 bp, Homo sapien
gaggtaggaggtacctgcacttccg

SEQ ID NO: 799860 - DNA, 25 bp, Homo sapien
tgcaatgaggtgctcaaagtgtcac

SEQ ID NO: 799861 - DNA, 25 bp, Homo sapien
tttctccctgtgttgggagtgagtc

SEQ ID NO: 799862 - DNA, 25 bp, Homo sapien
ctggtggagacagtcctccgggaca

SEQ ID NO: 799863 - DNA, 25 bp, Homo sapien
gtcctccgggacaataacatctaaa

SEQ ID NO: 799864 - DNA, 25 bp, Homo sapien
ataacatctaaacacgtgggctggg

SEQ ID NO: 799865 - DNA, 25 bp, Homo sapien
gagagtcctgggacctgttatccag

SEQ ID NO: 799866 - DNA, 25 bp, Homo sapien
tgagagaatttcaaccgggacagtc

SEQ ID NO: 799867 - DNA, 25 bp, Homo sapien
tcactttcggtgagtcgcagggtct

SEQ ID NO: 799868 - DNA, 25 bp, Homo sapien
tctagccggcgatgactgtgatggt

SEQ ID NO: 799869 - DNA, 25 bp, Homo sapien
tcggtatgaaccctgggagccagct

SEQ ID NO: 799870 - DNA, 25 bp, Homo sapien
ctgtttcgtagccactgtctgccgg

SEQ ID NO: 799871 - DNA, 25 bp, Homo sapien
taaagagtccagtagcgcttcgtgg

SEQ ID NO: 799872 - DNA, 25 bp, Homo sapien
tggttctgagtctgcggtgccctcg

SEQ ID NO: 799873 - DNA, 25 bp, Homo sapien
tggctccggcgtggctcttaattcc

SEQ ID NO: 799874 - DNA, 25 bp, Homo sapien
tcttccgtgggatgcacctgctggg

SEQ ID NO: 799875 - DNA, 25 bp, Homo sapien
ggactgctggcctcgtcttccgtgg

SEQ ID NO: 799876 - DNA, 25 bp, Homo sapien
caggcagctatcctgggcagcagga

SEQ ID NO: 799877 - DNA, 25 bp, Homo sapien
gctgtgggcttcaacagactccgca

SEQ ID NO: 799878 - DNA, 25 bp, Homo sapien
tctgagaggtcgagcatccctgaca

SEQ ID NO: 799879 - DNA, 25 bp, Homo sapien
tgtgacatcatcgaaaaacgtgact

SEQ ID NO: 799880 - DNA, 25 bp, Homo sapien
gatgtccggctccttcaacttcggg

SEQ ID NO: 799881 - DNA, 25 bp, Homo sapien
tttggaatccttatatggatgtgta

SEQ ID NO: 799882 - DNA, 25 bp, Homo sapien
aaaatgatttagagggaacagatac

SEQ ID NO: 799883 - DNA, 25 bp, Homo sapien
acattttggaatccttatatggatg

SEQ ID NO: 799884 - DNA, 25 bp, Homo sapien
gtgtatagaaaatgatttagaggga

SEQ ID NO: 799885 - DNA, 25 bp, Homo sapien
agtcctcggcctgaacgcttggtgg

SEQ ID NO: 799886 - DNA, 25 bp, Homo sapien
gcagcgataatccaagttcacagag

SEQ ID NO: 799887 - DNA, 25 bp, Homo sapien
caaagcctcgcgtccattaagcatg

SEQ ID NO: 799888 - DNA, 25 bp, Homo sapien
tttggagccaagatacttcaactgc

SEQ ID NO: 799889 - DNA, 25 bp, Homo sapien
tggagctttcggagttgatgcacct

SEQ ID NO: 799890 - DNA, 25 bp, Homo sapien
tgatgcacctgctcaggtagggaga

SEQ ID NO: 799891 - DNA, 25 bp, Homo sapien
cggagttgatgcacctgctcaggta

SEQ ID NO: 799892 - DNA, 25 bp, Homo sapien
cttcttcgtcggtggagctttcgga

SEQ ID NO: 799893 - DNA, 25 bp, Homo sapien
aaggcttggagctgagcaggttact

SEQ ID NO: 799894 - DNA, 25 bp, Homo sapien
gcttggagctgagcaggttacttgt

SEQ ID NO: 799895 - DNA, 25 bp, Homo sapien
cttggagctgagcaggttacttgtt

SEQ ID NO: 799896 - DNA, 25 bp, Homo sapien
aggcttggagctgagcaggttactt

SEQ ID NO: 799897 - DNA, 25 bp, Homo sapien
atggagaaccgggagtaaggcgccg

SEQ ID NO: 799898 - DNA, 25 bp, Homo sapien
aaccgggagtaaggcgccgagtgcg

SEQ ID NO: 799899 - DNA, 25 bp, Homo sapien
tctgctccgtgctccgggccggtgg

SEQ ID NO: 799900 - DNA, 25 bp, Homo sapien
cggtggcggcggagaaaagtacttg

SEQ ID NO: 799901 - DNA, 25 bp, Homo sapien
caggtgtgtgagggaaaagctggca

SEQ ID NO: 799902 - DNA, 25 bp, Homo sapien
tcaggtgtgtgagggaaaagctggc

SEQ ID NO: 799903 - DNA, 25 bp, Homo sapien
cgaccctgcactcccaatccccagc

SEQ ID NO: 799904 - DNA, 25 bp, Homo sapien
tgcactcccaatccccagcacgcag

SEQ ID NO: 799905 - DNA, 25 bp, Homo sapien
cccgaccctgcactcccaatcccca

SEQ ID NO: 799906 - DNA, 25 bp, Homo sapien
tcccaatccccagcacgcagcgcct

SEQ ID NO: 799907 - DNA, 25 bp, Homo sapien
taatcggcacaaatgaagcctagcg

SEQ ID NO: 799908 - DNA, 25 bp, Homo sapien
ctgcaccacaggaacggaagcgggt

SEQ ID NO: 799909 - DNA, 25 bp, Homo sapien
tctgctaggctcaaatgcccgctgg

SEQ ID NO: 799910 - DNA, 25 bp, Homo sapien
gaagcgggtgttttgagcccagcac

SEQ ID NO: 799911 - DNA, 25 bp, Homo sapien
ctagtccttttctccgtcttcgctg

SEQ ID NO: 799912 - DNA, 25 bp, Homo sapien
tcccaatctcatgtcagcaaatggc

SEQ ID NO: 799913 - DNA, 25 bp, Homo sapien
agcctcggacccgagcgtgcgcgtt

SEQ ID NO: 799914 - DNA, 25 bp, Homo sapien
gatgtcgctgctcgggctgagggcg

SEQ ID NO: 799915 - DNA, 25 bp, Homo sapien
caaatggcgagtggatgtcgctgct

SEQ ID NO: 799916 - DNA, 25 bp, Homo sapien
tatgctctgcggagatgagtctgcc

SEQ ID NO: 799917 - DNA, 25 bp, Homo sapien
gagaagcctcatttgctgcggcaaa

SEQ ID NO: 799918 - DNA, 25 bp, Homo sapien
aaattcgcgcatcccgagacagtgg

SEQ ID NO: 799919 - DNA, 25 bp, Homo sapien
ctgtacaacaatggagactctcgga

SEQ ID NO: 799920 - DNA, 25 bp, Homo sapien
ggtgaatggcttctcgtccacacac

SEQ ID NO: 799921 - DNA, 25 bp, Homo sapien
cgttgtttgcaattcggcttggtcg

SEQ ID NO: 799922 - DNA, 25 bp, Homo sapien
aattcggcttggtcgagctttctgc

SEQ ID NO: 799923 - DNA, 25 bp, Homo sapien
ggcttggtcgagctttctgcaccct

SEQ ID NO: 799924 - DNA, 25 bp, Homo sapien
aaatagaacgaacgttgtttgcaat

SEQ ID NO: 799925 - DNA, 25 bp, Homo sapien
tggaaaggccttttacagcagcaag

SEQ ID NO: 799926 - DNA, 25 bp, Homo sapien
aaggccttttacagcagcaagacaa

SEQ ID NO: 799927 - DNA, 25 bp, Homo sapien
tttacagcagcaagacaaaccaaga

SEQ ID NO: 799928 - DNA, 25 bp, Homo sapien
gtttggaaaggccttttacagcagc

SEQ ID NO: 799929 - DNA, 25 bp, Homo sapien
gatttccatcggaagtcactgcgta

SEQ ID NO: 799930 - DNA, 25 bp, Homo sapien
cgtaggcctgagtgcttaaccagca

SEQ ID NO: 799931 - DNA, 25 bp, Homo sapien
gagccaaccccattgctacttagga

SEQ ID NO: 799932 - DNA, 25 bp, Homo sapien
ttaaggctacttcccataaggctca

SEQ ID NO: 799933 - DNA, 25 bp, Homo sapien
ccatatccgtgcccgagacagcctc

SEQ ID NO: 799934 - DNA, 25 bp, Homo sapien
atatccgtgcccgagacagcctccc

SEQ ID NO: 799935 - DNA, 25 bp, Homo sapien
cccatatccgtgcccgagacagcct

SEQ ID NO: 799936 - DNA, 25 bp, Homo sapien
atccgtgcccgagacagcctccccc

SEQ ID NO: 799937 - DNA, 25 bp, Homo sapien
aaccgctgcggacatgggacagcac

SEQ ID NO: 799938 - DNA, 25 bp, Homo sapien
tgccccgctggacgtgacacgtgca

SEQ ID NO: 799939 - DNA, 25 bp, Homo sapien
aggctctcactgtcctgccccgctg

SEQ ID NO: 799940 - DNA, 25 bp, Homo sapien
gccagaaccgctgcggacatgggac

SEQ ID NO: 799941 - DNA, 25 bp, Homo sapien
taggaggtggcggcaggaaggtgag

SEQ ID NO: 799942 - DNA, 25 bp, Homo sapien
ggtggcggcaggaaggtgaggccct

SEQ ID NO: 799943 - DNA, 25 bp, Homo sapien
ggaggtggcggcaggaaggtgaggc

SEQ ID NO: 799944 - DNA, 25 bp, Homo sapien
tggcggcaggaaggtgaggcccttg

SEQ ID NO: 799945 - DNA, 25 bp, Homo sapien
tgtggatctgcgtggagtacctctg

SEQ ID NO: 799946 - DNA, 25 bp, Homo sapien
ctaggtgccctctcggaagctgtgg

SEQ ID NO: 799947 - DNA, 25 bp, Homo sapien
tatttagcttgtgcatccgctgccg

SEQ ID NO: 799948 - DNA, 25 bp, Homo sapien
tagttcttggccagcgtgagcgtct

SEQ ID NO: 799949 - DNA, 25 bp, Homo sapien
taaggaggcctttcaactcgggctg

SEQ ID NO: 799950 - DNA, 25 bp, Homo sapien
tcgtcggtccattcagcaagttcag

SEQ ID NO: 799951 - DNA, 25 bp, Homo sapien
gaaatgaaaccaatgtgcccgggcc

SEQ ID NO: 799952 - DNA, 25 bp, Homo sapien
gagagtccagtagccaagtccggca

SEQ ID NO: 799953 - DNA, 25 bp, Homo sapien
tatcgatacgttgattaaaacgcgt

SEQ ID NO: 799954 - DNA, 25 bp, Homo sapien
gtgttttttatcgatacgttgatta

SEQ ID NO: 799955 - DNA, 25 bp, Homo sapien
tttatcgatacgttgattaaaacgc

SEQ ID NO: 799956 - DNA, 25 bp, Homo sapien
cgatacgttgattaaaacgcgtggt

SEQ ID NO: 799957 - DNA, 25 bp, Homo sapien
tggtgaattcgaggctgctgatttg

SEQ ID NO: 799958 - DNA, 25 bp, Homo sapien
gaaggttcaactcaaattcatcttg

SEQ ID NO: 799959 - DNA, 25 bp, Homo sapien
aaagactgaaggttcaactcaaatt

SEQ ID NO: 799960 - DNA, 25 bp, Homo sapien
tcatcttgtagaaattcttggtgaa

SEQ ID NO: 799961 - DNA, 25 bp, Homo sapien
cgccagagagaacgcggcaactcgc

SEQ ID NO: 799962 - DNA, 25 bp, Homo sapien
ggcggtgtccacaccgccctctccg

SEQ ID NO: 799963 - DNA, 25 bp, Homo sapien
cgctcctgcagaccgggtcctggag

SEQ ID NO: 799964 - DNA, 25 bp, Homo sapien
gtgtcgcgccgccagagagaacgcg

SEQ ID NO: 799965 - DNA, 25 bp, Homo sapien
cctctccgccaccccttctcctcgc

SEQ ID NO: 799966 - DNA, 25 bp, Homo sapien
ccctctccgccaccccttctcctcg

SEQ ID NO: 799967 - DNA, 25 bp, Homo sapien
cccgggaggactcgcatattactat

SEQ ID NO: 799968 - DNA, 25 bp, Homo sapien
aatccagggcctgttactgacacca

SEQ ID NO: 799969 - DNA, 25 bp, Homo sapien
taaagcacttacgtcagtgcccgcc

SEQ ID NO: 799970 - DNA, 25 bp, Homo sapien
caggactcctcctcgaaagagtaaa

SEQ ID NO: 799971 - DNA, 25 bp, Homo sapien
taaaatgggaatgacgccgccagct

SEQ ID NO: 799972 - DNA, 25 bp, Homo sapien
tgagcccgtgttcgcatttgtaaaa

SEQ ID NO: 799973 - DNA, 25 bp, Homo sapien
tgccaggcgggatacagtgttttca

SEQ ID NO: 799974 - DNA, 25 bp, Homo sapien
catcgcttacaacgtgagtcgctcc

SEQ ID NO: 799975 - DNA, 25 bp, Homo sapien
ggcccactcatcgtccttctgctaa

SEQ ID NO: 799976 - DNA, 25 bp, Homo sapien
ctcatcgtccttctgctaatagcac

SEQ ID NO: 799977 - DNA, 25 bp, Homo sapien
ccactcatcgtccttctgctaatag

SEQ ID NO: 799978 - DNA, 25 bp, Homo sapien
gcccggcccactcatcgtccttctg

SEQ ID NO: 799979 - DNA, 25 bp, Homo sapien
catcaccatcgtggttttggctggc

SEQ ID NO: 799980 - DNA, 25 bp, Homo sapien
tgagcggtgaggacaaccagaagtc

SEQ ID NO: 799981 - DNA, 25 bp, Homo sapien
tcacagcaccggtaggagtgtcttt

SEQ ID NO: 799982 - DNA, 25 bp, Homo sapien
agcatgagctgctggactgagtata

SEQ ID NO: 799983 - DNA, 25 bp, Homo sapien
tccagccgctggtaaatacagagac

SEQ ID NO: 799984 - DNA, 25 bp, Homo sapien
catatggatgcctactgggacttcc

SEQ ID NO: 799985 - DNA, 25 bp, Homo sapien
tgcaagtttaccatcaccagaagct

SEQ ID NO: 799986 - DNA, 25 bp, Homo sapien
tgcagagtaacgtacaaagcgagct

SEQ ID NO: 799987 - DNA, 25 bp, Homo sapien
tgcctttggcgatggttagcggaat

SEQ ID NO: 799988 - DNA, 25 bp, Homo sapien
gagatgcttcagctgttcacaggtc

SEQ ID NO: 799989 - DNA, 25 bp, Homo sapien
tggcgatggttagcggaatctgttt

SEQ ID NO: 799990 - DNA, 25 bp, Homo sapien
cagctgttcacaggtcctgcctttg

SEQ ID NO: 799991 - DNA, 25 bp, Homo sapien
caccaaggtcaagcatgagaatctt

SEQ ID NO: 799992 - DNA, 25 bp, Homo sapien
caggctggaccatatgtgctttgta

SEQ ID NO: 799993 - DNA, 25 bp, Homo sapien
tattgtaaagcaaaacctgacacca

SEQ ID NO: 799994 - DNA, 25 bp, Homo sapien
caaaggcatccacatcctggttgtt

SEQ ID NO: 799995 - DNA, 25 bp, Homo sapien
ggagcatcacttgaactcaagaggc

SEQ ID NO: 799996 - DNA, 25 bp, Homo sapien
gagcatcacttgaactcaagaggca

SEQ ID NO: 799997 - DNA, 25 bp, Homo sapien
caggagcatcacttgaactcaagag

SEQ ID NO: 799998 - DNA, 25 bp, Homo sapien
ggcaggagcatcacttgaactcaag

SEQ ID NO: 799999 - DNA, 25 bp, Homo sapien
cacagattacgatccctacagaggg

SEQ ID NO: 800000 - DNA, 25 bp, Homo sapien
aataattaggacgactaggctgggt

SEQ ID NO: 800001 - DNA, 25 bp, Homo sapien
ctgggctcgtatggaaaatgtaatc

SEQ ID NO: 800002 - DNA, 25 bp, Homo sapien
catgcctatacccactgctttggga

SEQ ID NO: 800003 - DNA, 25 bp, Homo sapien
gccccaccgccaagattctcaggtt

SEQ ID NO: 800004 - DNA, 25 bp, Homo sapien
ctggagtccgactgctagccagcga

SEQ ID NO: 800005 - DNA, 25 bp, Homo sapien
ggagtccgactgctagccagcgact

SEQ ID NO: 800006 - DNA, 25 bp, Homo sapien
ctgccccaccgccaagattctcagg

SEQ ID NO: 800007 - DNA, 25 bp, Homo sapien
actcggttctgcttcaagccgcaga

SEQ ID NO: 800008 - DNA, 25 bp, Homo sapien
tcattcagactgttctatctcctcc

SEQ ID NO: 800009 - DNA, 25 bp, Homo sapien
gaccgggtggctcgggcccctctga

SEQ ID NO: 800010 - DNA, 25 bp, Homo sapien
cggctcggctcggtcggccccggcg

SEQ ID NO: 800011 - DNA, 25 bp, Homo sapien
ctcgggcccctctgaggcagacgcg

SEQ ID NO: 800012 - DNA, 25 bp, Homo sapien
cctctgaggcagacgcggggcgggg

SEQ ID NO: 800013 - DNA, 25 bp, Homo sapien
ccctggccggcctccaggttgtagg

SEQ ID NO: 800014 - DNA, 25 bp, Homo sapien
tcctgcagcagcggcttgtggtcca

SEQ ID NO: 800015 - DNA, 25 bp, Homo sapien
ccaggttgtaggcgggcggccgctc

SEQ ID NO: 800016 - DNA, 25 bp, Homo sapien
gcgtagtcgccctggccggcctcca

SEQ ID NO: 800017 - DNA, 25 bp, Homo sapien
ggggatggcgccgtagccgtgcggg

SEQ ID NO: 800018 - DNA, 25 bp, Homo sapien
cgcggcggggatggcgccgtagccg

SEQ ID NO: 800019 - DNA, 25 bp, Homo sapien
gggcgcggcggggatggcgccgtag

SEQ ID NO: 800020 - DNA, 25 bp, Homo sapien
gggatggcgccgtagccgtgcgggc

SEQ ID NO: 800021 - DNA, 25 bp, Homo sapien
tgccacctcggaagccgccggcggg

SEQ ID NO: 800022 - DNA, 25 bp, Homo sapien
cttgccacctcggaagccgccggcg

SEQ ID NO: 800023 - DNA, 25 bp, Homo sapien
gggcttgccacctcggaagccgccg

SEQ ID NO: 800024 - DNA, 25 bp, Homo sapien
ccgaccgggcttgccacctcggaag

SEQ ID NO: 800025 - DNA, 25 bp, Homo sapien
cagggaggagaaatcggaccgccac

SEQ ID NO: 800026 - DNA, 25 bp, Homo sapien
atcggaccgccacggggactactca

SEQ ID NO: 800027 - DNA, 25 bp, Homo sapien
agggaggagaaatcggaccgccacg

SEQ ID NO: 800028 - DNA, 25 bp, Homo sapien
tgcagggaggagaaatcggaccgcc

SEQ ID NO: 800029 - DNA, 25 bp, Homo sapien
gcaggatagcgggtgacggtccggc

SEQ ID NO: 800030 - DNA, 25 bp, Homo sapien
ggcaggatagcgggtgacggtccgg

SEQ ID NO: 800031 - DNA, 25 bp, Homo sapien
tggcaggatagcgggtgacggtccg

SEQ ID NO: 800032 - DNA, 25 bp, Homo sapien
caggatagcgggtgacggtccggct

SEQ ID NO: 800033 - DNA, 25 bp, Homo sapien
ccctcccataaagggctctggtcaa

SEQ ID NO: 800034 - DNA, 25 bp, Homo sapien
gtcaagatccaagtcaagccggacc

SEQ ID NO: 800035 - DNA, 25 bp, Homo sapien
acaccgcattcgggcagcctgtctg

SEQ ID NO: 800036 - DNA, 25 bp, Homo sapien
agccaagggtgagcggacccgcact

SEQ ID NO: 800037 - DNA, 25 bp, Homo sapien
accttccaccaccttcgacgatcaa

SEQ ID NO: 800038 - DNA, 25 bp, Homo sapien
aaccttccaccaccttcgacgatca

SEQ ID NO: 800039 - DNA, 25 bp, Homo sapien
tgaaaccttccaccaccttcgacga

SEQ ID NO: 800040 - DNA, 25 bp, Homo sapien
atgaaaccttccaccaccttcgacg

SEQ ID NO: 800041 - DNA, 25 bp, Homo sapien
cagctcgtggaagagcgtttcaagc

SEQ ID NO: 800042 - DNA, 25 bp, Homo sapien
caagccaactttggataaagcagct

SEQ ID NO: 800043 - DNA, 25 bp, Homo sapien
acacggggtttccatcctggtccag

SEQ ID NO: 800044 - DNA, 25 bp, Homo sapien
gataaagcagctcttacggccgtcg

SEQ ID NO: 800045 - DNA, 25 bp, Homo sapien
atggacaatgacacgcaggcagacc

SEQ ID NO: 800046 - DNA, 25 bp, Homo sapien
gggatggcagggcatggacaatgac

SEQ ID NO: 800047 - DNA, 25 bp, Homo sapien
gttctgagtcccctccatgtgcctt

SEQ ID NO: 800048 - DNA, 25 bp, Homo sapien
ctctccaagttcaggggtttgggca

SEQ ID NO: 800049 - DNA, 25 bp, Homo sapien
caggttagcggaagccatgggcctc

SEQ ID NO: 800050 - DNA, 25 bp, Homo sapien
acctccaggttagcggaagccatgg

SEQ ID NO: 800051 - DNA, 25 bp, Homo sapien
ggagagcacctccaggttagcggaa

SEQ ID NO: 800052 - DNA, 25 bp, Homo sapien
catgggcctccgcagggacacagtt

SEQ ID NO: 800053 - DNA, 25 bp, Homo sapien
tctgagcgacatccgccctccacag

SEQ ID NO: 800054 - DNA, 25 bp, Homo sapien
cctggacctctgagcgacatccgcc

SEQ ID NO: 800055 - DNA, 25 bp, Homo sapien
acgctggccactgagccgcaccctg

SEQ ID NO: 800056 - DNA, 25 bp, Homo sapien
cactgagccgcaccctggacctctg

SEQ ID NO: 800057 - DNA, 25 bp, Homo sapien
agcctacagcaaggcagtgcagccg

SEQ ID NO: 800058 - DNA, 25 bp, Homo sapien
gcctgcctgcgacagggaagcatga

SEQ ID NO: 800059 - DNA, 25 bp, Homo sapien
tctgatagatgatgggacctggtgc

SEQ ID NO: 800060 - DNA, 25 bp, Homo sapien
gtctggactcatgagggccactgcc

SEQ ID NO: 800061 - DNA, 25 bp, Homo sapien
gacctctggcgagtgacagaaaaca

SEQ ID NO: 800062 - DNA, 25 bp, Homo sapien
tgcattcaataaccaaccagtggcc

SEQ ID NO: 800063 - DNA, 25 bp, Homo sapien
cacgtacccgttcatggaatggcca

SEQ ID NO: 800064 - DNA, 25 bp, Homo sapien
tcagttaaccttgaaaggcaaggca

SEQ ID NO: 800065 - DNA, 25 bp, Homo sapien
ttaagcgaaggtggctccacagttg

SEQ ID NO: 800066 - DNA, 25 bp, Homo sapien
tggctccacagttggggcatcgtcg

SEQ ID NO: 800067 - DNA, 25 bp, Homo sapien
ggcatcgtcgcttcctcaaggcaaa

SEQ ID NO: 800068 - DNA, 25 bp, Homo sapien
tcgcttcctcaaggcaaaacagcaa

SEQ ID NO: 800069 - DNA, 25 bp, Homo sapien
tacattagaaaaagagagctgggtg

SEQ ID NO: 800070 - DNA, 25 bp, Homo sapien
ctgggtgtaggaaagccgggcctgg

SEQ ID NO: 800071 - DNA, 25 bp, Homo sapien
tattgtacacaacatttacattaga

SEQ ID NO: 800072 - DNA, 25 bp, Homo sapien
taaaattattgtacacaacatttac

SEQ ID NO: 800073 - DNA, 25 bp, Homo sapien
ggcgtgtgccacatcggtcccacct

SEQ ID NO: 800074 - DNA, 25 bp, Homo sapien
tgccacatcggtcccacctcgcttt

SEQ ID NO: 800075 - DNA, 25 bp, Homo sapien
ctggcgtgtgccacatcggtcccac

SEQ ID NO: 800076 - DNA, 25 bp, Homo sapien
catcggtcccacctcgctttacaaa

SEQ ID NO: 800077 - DNA, 25 bp, Homo sapien
agcactgcctctccacgctccggga

SEQ ID NO: 800078 - DNA, 25 bp, Homo sapien
agcagcactgcctctccacgctccg

SEQ ID NO: 800079 - DNA, 25 bp, Homo sapien
gagcagcagcactgcctctccacgc

SEQ ID NO: 800080 - DNA, 25 bp, Homo sapien
agcagcagcactgcctctccacgct

SEQ ID NO: 800081 - DNA, 25 bp, Homo sapien
agtgctttattgagttgtcatgagc

SEQ ID NO: 800082 - DNA, 25 bp, Homo sapien
gtgctttattgagttgtcatgagcc

SEQ ID NO: 800083 - DNA, 25 bp, Homo sapien
cagtgctttattgagttgtcatgag

SEQ ID NO: 800084 - DNA, 25 bp, Homo sapien
tatgaatctcatttattgaaaacat

SEQ ID NO: 800085 - DNA, 25 bp, Homo sapien
gaatctcatttattgaaaacattat

SEQ ID NO: 800086 - DNA, 25 bp, Homo sapien
ggtatgaatctcatttattgaaaac

SEQ ID NO: 800087 - DNA, 25 bp, Homo sapien
tggtatgaatctcatttattgaaaa

SEQ ID NO: 800088 - DNA, 25 bp, Homo sapien
agctgtaagcgcctgctgaatacaa

SEQ ID NO: 800089 - DNA, 25 bp, Homo sapien
tgaaagcaccgagtaagcagcacca

SEQ ID NO: 800090 - DNA, 25 bp, Homo sapien
tctgaaagcaccgagtaagcagcac

SEQ ID NO: 800091 - DNA, 25 bp, Homo sapien
gctgaatacaactgtggtcaggact

SEQ ID NO: 800092 - DNA, 25 bp, Homo sapien
tacatgcaggtaagccagtggacgt

SEQ ID NO: 800093 - DNA, 25 bp, Homo sapien
tggacgtggccgatgcttcaggctc

SEQ ID NO: 800094 - DNA, 25 bp, Homo sapien
tcctttagccttgccataagtgtag

SEQ ID NO: 800095 - DNA, 25 bp, Homo sapien
taagtgtagtatcctatgaggctga

SEQ ID NO: 800096 - DNA, 25 bp, Homo sapien
tgaatcaggtacagactctcaaagg

SEQ ID NO: 800097 - DNA, 25 bp, Homo sapien
tagagtgctaagacgctttgcctgc

SEQ ID NO: 800098 - DNA, 25 bp, Homo sapien
caaaggatacgtgtaaagccaggat

SEQ ID NO: 800099 - DNA, 25 bp, Homo sapien
ttaggagtcgccaacggattcgctg

SEQ ID NO: 800100 - DNA, 25 bp, Homo sapien
tgtacacccaacatgcagtggaggc

SEQ ID NO: 800101 - DNA, 25 bp, Homo sapien
actgccttccgtctccacagcctgt

SEQ ID NO: 800102 - DNA, 25 bp, Homo sapien
catgtccaggaacggcctgcgctct

SEQ ID NO: 800103 - DNA, 25 bp, Homo sapien
gcctgcgctctagcgctggcatcgg

SEQ ID NO: 800104 - DNA, 25 bp, Homo sapien
gcaggtcagtggctttgtgctccag

SEQ ID NO: 800105 - DNA, 25 bp, Homo sapien
ggaagtcacttttgcggccatttaa

SEQ ID NO: 800106 - DNA, 25 bp, Homo sapien
tcctctgaggcctgctagggaagcg

SEQ ID NO: 800107 - DNA, 25 bp, Homo sapien
taaagccctgtaggatgtgcaaggc

SEQ ID NO: 800108 - DNA, 25 bp, Homo sapien
tctcggtgcccatgggtgtgtgccc

SEQ ID NO: 800109 - DNA, 25 bp, Homo sapien
ggctgcccgagtgtctcggtgccca

SEQ ID NO: 800110 - DNA, 25 bp, Homo sapien
cattgacgggcgtctggtgtttctg

SEQ ID NO: 800111 - DNA, 25 bp, Homo sapien
tggttctgactctcccattgacggg

SEQ ID NO: 800112 - DNA, 25 bp, Homo sapien
tctcctgtcttgttggggacacagg

SEQ ID NO: 800113 - DNA, 25 bp, Homo sapien
tgtcttgttggggacacaggacatg

SEQ ID NO: 800114 - DNA, 25 bp, Homo sapien
cctgtcttgttggggacacaggaca

SEQ ID NO: 800115 - DNA, 25 bp, Homo sapien
tcctgtcttgttggggacacaggac

SEQ ID NO: 800116 - DNA, 25 bp, Homo sapien
cagagctttaagcacaccactgtcc

SEQ ID NO: 800117 - DNA, 25 bp, Homo sapien
cacttcctcgggcagcagagcttta

SEQ ID NO: 800118 - DNA, 25 bp, Homo sapien
tcgggcagcagagctttaagcacac

SEQ ID NO: 800119 - DNA, 25 bp, Homo sapien
gcagcagagctttaagcacaccact

SEQ ID NO: 800120 - DNA, 25 bp, Homo sapien
tggactcgccatccccgactgggag

SEQ ID NO: 800121 - DNA, 25 bp, Homo sapien
tgagtaaagccgcagcagggcgtcc

SEQ ID NO: 800122 - DNA, 25 bp, Homo sapien
gtcctgtggtgaccgccttgctctg

SEQ ID NO: 800123 - DNA, 25 bp, Homo sapien
tccccgactgggaggcgcaggtcct

SEQ ID NO: 800124 - DNA, 25 bp, Homo sapien
gccccagcgtccaagcccgagaccg

SEQ ID NO: 800125 - DNA, 25 bp, Homo sapien
caggacgacatccacctttaaggcc

SEQ ID NO: 800126 - DNA, 25 bp, Homo sapien
cttggaatgcttgtccatgggggca

SEQ ID NO: 800127 - DNA, 25 bp, Homo sapien
agagcagattcggccaggacgacat

SEQ ID NO: 800128 - DNA, 25 bp, Homo sapien
ggtttggtggtgagacattatctaa

SEQ ID NO: 800129 - DNA, 25 bp, Homo sapien
tgtgtgtgtgagatcaagatcaggt

SEQ ID NO: 800130 - DNA, 25 bp, Homo sapien
tggtgatgtactattactgttgtcc

SEQ ID NO: 800131 - DNA, 25 bp, Homo sapien
tatctaacacgtgctgtgtcctttt

SEQ ID NO: 800132 - DNA, 25 bp, Homo sapien
tcatccctagcagaagagctaaaat

SEQ ID NO: 800133 - DNA, 25 bp, Homo sapien
ttaaatcaatcaagagccagcccct

SEQ ID NO: 800134 - DNA, 25 bp, Homo sapien
tgtctgcaatcttcatccctagcag

SEQ ID NO: 800135 - DNA, 25 bp, Homo sapien
tccgacgttgcattccccagggtct

SEQ ID NO: 800136 - DNA, 25 bp, Homo sapien
tgccgtgatttctgttgtccccgag

SEQ ID NO: 800137 - DNA, 25 bp, Homo sapien
tagttattgcctagagactgtccaa

SEQ ID NO: 800138 - DNA, 25 bp, Homo sapien
tgttcttgggagtcaccctgggtcc

SEQ ID NO: 800139 - DNA, 25 bp, Homo sapien
tagtcagagatgagaccgcggctca

SEQ ID NO: 800140 - DNA, 25 bp, Homo sapien
taaagcagtgcagatcaacccggca

SEQ ID NO: 800141 - DNA, 25 bp, Homo sapien
gagacattgagatcgtgactggcac

SEQ ID NO: 800142 - DNA, 25 bp, Homo sapien
tatgggacaaacctgccctagctgg

SEQ ID NO: 800143 - DNA, 25 bp, Homo sapien
caaagcgaggaaataggacagggtc

SEQ ID NO: 800144 - DNA, 25 bp, Homo sapien
tctgcacagtctttagcacccagga

SEQ ID NO: 800145 - DNA, 25 bp, Homo sapien
tacaggactagactgtgagacgctc

SEQ ID NO: 800146 - DNA, 25 bp, Homo sapien
cagaatgatgactaggatggcccag

SEQ ID NO: 800147 - DNA, 25 bp, Homo sapien
cacagcgtgtgaagctattgggcaa

SEQ ID NO: 800148 - DNA, 25 bp, Homo sapien
cgagttactccgtcagagcgctgta

SEQ ID NO: 800149 - DNA, 25 bp, Homo sapien
tcgcttactcggagggtggagccct

SEQ ID NO: 800150 - DNA, 25 bp, Homo sapien
gagggctctgaagtacagctcggaa

SEQ ID NO: 800151 - DNA, 25 bp, Homo sapien
ggttatatacctgtcacaagccctg

SEQ ID NO: 800152 - DNA, 25 bp, Homo sapien
cacagtactgtaatgacggcgctga

SEQ ID NO: 800153 - DNA, 25 bp, Homo sapien
tcttcgagttatgttgagttcctgc

SEQ ID NO: 800154 - DNA, 25 bp, Homo sapien
gcagagctctaacactctgtgtgaa

SEQ ID NO: 800155 - DNA, 25 bp, Homo sapien
acaacctgctagacaagctcttgca

SEQ ID NO: 800156 - DNA, 25 bp, Homo sapien
gcagcaaagggcgtagctcccgtga

SEQ ID NO: 800157 - DNA, 25 bp, Homo sapien
gatactcaaagatggatgcggctag

SEQ ID NO: 800158 - DNA, 25 bp, Homo sapien
cggctagaatcatgaagcgagtgag

SEQ ID NO: 800159 - DNA, 25 bp, Homo sapien
tagctcccgtgacaggctgaagaga

SEQ ID NO: 800160 - DNA, 25 bp, Homo sapien
catctcaatttttgggtggatgttc

SEQ ID NO: 800161 - DNA, 25 bp, Homo sapien
tagtggaaatcacagaggcgtagcg

SEQ ID NO: 800162 - DNA, 25 bp, Homo sapien
catacagaaacacgggtctccggat

SEQ ID NO: 800163 - DNA, 25 bp, Homo sapien
tgcgccacgtgcttccatacagaaa

SEQ ID NO: 800164 - DNA, 25 bp, Homo sapien
gcaggtgtcatgattagcggtcaca

SEQ ID NO: 800165 - DNA, 25 bp, Homo sapien
tcaagagattgagaccaggctggcc

SEQ ID NO: 800166 - DNA, 25 bp, Homo sapien
aaagatacaaaaattagccaggcgt

SEQ ID NO: 800167 - DNA, 25 bp, Homo sapien
ggtggcgggtgcctgtaatcccacc

SEQ ID NO: 800168 - DNA, 25 bp, Homo sapien
aacatggtgaaaccccgtctctgct

SEQ ID NO: 800169 - DNA, 25 bp, Homo sapien
tgcttggaattgtcaaaacctggaa

SEQ ID NO: 800170 - DNA, 25 bp, Homo sapien
taaacacgtgcctaccatgtgacgc

SEQ ID NO: 800171 - DNA, 25 bp, Homo sapien
taaaaacctgtatgcgatcgctcat

SEQ ID NO: 800172 - DNA, 25 bp, Homo sapien
gatcgctcatagcagctttgcttgg

SEQ ID NO: 800173 - DNA, 25 bp, Homo sapien
aaatattggaaagacgctcgtcacc

SEQ ID NO: 800174 - DNA, 25 bp, Homo sapien
gccaagaagaaagtggttgatccat

SEQ ID NO: 800175 - DNA, 25 bp, Homo sapien
gttggcaagaacaagcgccttacga

SEQ ID NO: 800176 - DNA, 25 bp, Homo sapien
aggcggcaaaaagggagccaagaag

SEQ ID NO: 800177 - DNA, 25 bp, Homo sapien
cagctgcctgaagtctttgtggata

SEQ ID NO: 800178 - DNA, 25 bp, Homo sapien
tgagataaaatgttgccggtttctc

SEQ ID NO: 800179 - DNA, 25 bp, Homo sapien
tggttttagttcctggtgtaacagc

SEQ ID NO: 800180 - DNA, 25 bp, Homo sapien
tgtggataaaagtgagatgcatata

SEQ ID NO: 800181 - DNA, 25 bp, Homo sapien
cactgtagtcctcaaattctacctt

SEQ ID NO: 800182 - DNA, 25 bp, Homo sapien
agaacaagaaaacttaaagctctgg

SEQ ID NO: 800183 - DNA, 25 bp, Homo sapien
caagaaaacttaaagctctggccgg

SEQ ID NO: 800184 - DNA, 25 bp, Homo sapien
taaattcacatctgcctttcagaac

SEQ ID NO: 800185 - DNA, 25 bp, Homo sapien
ttttaaattcacatctgcctttcag

SEQ ID NO: 800186 - DNA, 25 bp, Homo sapien
gcaaccttgtgtcaccaaactttgc

SEQ ID NO: 800187 - DNA, 25 bp, Homo sapien
gacaaaaaggaccatcagaggcaac

SEQ ID NO: 800188 - DNA, 25 bp, Homo sapien
gagccacaggtgtgtagtcaggtgg

SEQ ID NO: 800189 - DNA, 25 bp, Homo sapien
agtcaggtgggatgcagacaaaaag

SEQ ID NO: 800190 - DNA, 25 bp, Homo sapien
ctgtcccgtttcaaggagtcctcag

SEQ ID NO: 800191 - DNA, 25 bp, Homo sapien
tgcatttctgtcccgtttcaaggag

SEQ ID NO: 800192 - DNA, 25 bp, Homo sapien
ttctgtcccgtttcaaggagtcctc

SEQ ID NO: 800193 - DNA, 25 bp, Homo sapien
tctgtcccgtttcaaggagtcctca

SEQ ID NO: 800194 - DNA, 25 bp, Homo sapien
ctgcctgtcacgatcctctcctttc

SEQ ID NO: 800195 - DNA, 25 bp, Homo sapien
gcctgtcacgatcctctcctttcgt

SEQ ID NO: 800196 - DNA, 25 bp, Homo sapien
tgcctgtcacgatcctctcctttcg

SEQ ID NO: 800197 - DNA, 25 bp, Homo sapien
tcaggaaggtttgacggactccagt

SEQ ID NO: 800198 - DNA, 25 bp, Homo sapien
cagttctatgaaaccgtagcgcaag

SEQ ID NO: 800199 - DNA, 25 bp, Homo sapien
ggtttgacggactccagttctatga

SEQ ID NO: 800200 - DNA, 25 bp, Homo sapien
tagcgcaaggcaggccccttagcct

SEQ ID NO: 800201 - DNA, 25 bp, Homo sapien
gaattgatctcgtgaagccctcaag

SEQ ID NO: 800202 - DNA, 25 bp, Homo sapien
ctcgtgaagccctcaaggaccaaac

SEQ ID NO: 800203 - DNA, 25 bp, Homo sapien
ttgatctcgtgaagccctcaaggac

SEQ ID NO: 800204 - DNA, 25 bp, Homo sapien
gtgaagccctcaaggaccaaacacc

SEQ ID NO: 800205 - DNA, 25 bp, Homo sapien
gagacccggataatgaaagcccctg

SEQ ID NO: 800206 - DNA, 25 bp, Homo sapien
actggcctgtcacccgtattgcgga

SEQ ID NO: 800207 - DNA, 25 bp, Homo sapien
tctggccccagatttgagacccgga

SEQ ID NO: 800208 - DNA, 25 bp, Homo sapien
tagagattgcccgagactgtgagcc

SEQ ID NO: 800209 - DNA, 25 bp, Homo sapien
tgtccaatacagcagccacctgtgg

SEQ ID NO: 800210 - DNA, 25 bp, Homo sapien
gtgactgaggaactgcatcttaaat

SEQ ID NO: 800211 - DNA, 25 bp, Homo sapien
cacctgtggccactaagcactggaa

SEQ ID NO: 800212 - DNA, 25 bp, Homo sapien
gcactggaaatagggctaatgtgac

SEQ ID NO: 800213 - DNA, 25 bp, Homo sapien
atgaatctcgagaacgacgtgctga

SEQ ID NO: 800214 - DNA, 25 bp, Homo sapien
ggtgagctgcaatggggccttcaac

SEQ ID NO: 800215 - DNA, 25 bp, Homo sapien
ctcctgcctgtgatttgcaaagctg

SEQ ID NO: 800216 - DNA, 25 bp, Homo sapien
cgagaacgacgtgctgatagtggct

SEQ ID NO: 800217 - DNA, 25 bp, Homo sapien
gttcagatttgtttaacggggcaga

SEQ ID NO: 800218 - DNA, 25 bp, Homo sapien
tttgtttaacggggcagaggagcaa

SEQ ID NO: 800219 - DNA, 25 bp, Homo sapien
atttgtttaacggggcagaggagca

SEQ ID NO: 800220 - DNA, 25 bp, Homo sapien
cagatttgtttaacggggcagagga

SEQ ID NO: 800221 - DNA, 25 bp, Homo sapien
tccagtccattacccggataacctg

SEQ ID NO: 800222 - DNA, 25 bp, Homo sapien
tgggcggacgaataactggagaatc

SEQ ID NO: 800223 - DNA, 25 bp, Homo sapien
tggagaatcgattgttttctttgac

SEQ ID NO: 800224 - DNA, 25 bp, Homo sapien
taacctggccttgggcggacgaata

SEQ ID NO: 800225 - DNA, 25 bp, Homo sapien
cccaggcctgaagcagcacccacat

SEQ ID NO: 800226 - DNA, 25 bp, Homo sapien
ggcctgaagcagcacccacatttca

SEQ ID NO: 800227 - DNA, 25 bp, Homo sapien
gaagcagcacccacatttcaggcat

SEQ ID NO: 800228 - DNA, 25 bp, Homo sapien
tgaagcagcacccacatttcaggca

SEQ ID NO: 800229 - DNA, 25 bp, Homo sapien
ctcacttatggtgggaattccttgg

SEQ ID NO: 800230 - DNA, 25 bp, Homo sapien
aattccttggtctgcatcacaggtc

SEQ ID NO: 800231 - DNA, 25 bp, Homo sapien
cttggtctgcatcacaggtcacact

SEQ ID NO: 800232 - DNA, 25 bp, Homo sapien
cagcccatcggggactcacttatgg

SEQ ID NO: 800233 - DNA, 25 bp, Homo sapien
tcctctgatggatttctcctgcgga

SEQ ID NO: 800234 - DNA, 25 bp, Homo sapien
cctctgatggatttctcctgcggaa

SEQ ID NO: 800235 - DNA, 25 bp, Homo sapien
cacatcacaactccaacggctgttg

SEQ ID NO: 800236 - DNA, 25 bp, Homo sapien
tctgggacccctcctcggtattctc

SEQ ID NO: 800237 - DNA, 25 bp, Homo sapien
cactgaggttcttctgaaaacgcct

SEQ ID NO: 800238 - DNA, 25 bp, Homo sapien
actccaacggctgttgaaggacaca

SEQ ID NO: 800239 - DNA, 25 bp, Homo sapien
ggcacagtccactggacctgccata

SEQ ID NO: 800240 - DNA, 25 bp, Homo sapien
acactatatgttccatgtgtcccaa

SEQ ID NO: 800241 - DNA, 25 bp, Homo sapien
caaagaccaaggccagtgtcttcac

SEQ ID NO: 800242 - DNA, 25 bp, Homo sapien
taggagttccgtggagatgaggcac

SEQ ID NO: 800243 - DNA, 25 bp, Homo sapien
ggtgaataagaaacttcagcgcgtt

SEQ ID NO: 800244 - DNA, 25 bp, Homo sapien
cggtgaataagaaacttcagcgcgt

SEQ ID NO: 800245 - DNA, 25 bp, Homo sapien
ccggtgaataagaaacttcagcgcg

SEQ ID NO: 800246 - DNA, 25 bp, Homo sapien
gtgaataagaaacttcagcgcgttt

SEQ ID NO: 800247 - DNA, 25 bp, Homo sapien
ccccgttgtaaagatgactcaatac

SEQ ID NO: 800248 - DNA, 25 bp, Homo sapien
tggccccaggttgagtgattgttat

SEQ ID NO: 800249 - DNA, 25 bp, Homo sapien
tggcttgattcaaccaccacctcaa

SEQ ID NO: 800250 - DNA, 25 bp, Homo sapien
gatgactcaatacttcccaaatggc

SEQ ID NO: 800251 - DNA, 25 bp, Homo sapien
ctggagtaaccaggcatgtagaagt

SEQ ID NO: 800252 - DNA, 25 bp, Homo sapien
gagtaaccaggcatgtagaagtgtg

SEQ ID NO: 800253 - DNA, 25 bp, Homo sapien
ccaggcatgtagaagtgtgctctca

SEQ ID NO: 800254 - DNA, 25 bp, Homo sapien
taaccaggcatgtagaagtgtgctc

SEQ ID NO: 800255 - DNA, 25 bp, Homo sapien
ccatcccaaactcccctgagtcagg

SEQ ID NO: 800256 - DNA, 25 bp, Homo sapien
tggggccatcccaaactcccctgag

SEQ ID NO: 800257 - DNA, 25 bp, Homo sapien
gccatcccaaactcccctgagtcag

SEQ ID NO: 800258 - DNA, 25 bp, Homo sapien
gggccatcccaaactcccctgagtc

SEQ ID NO: 800259 - DNA, 25 bp, Homo sapien
agttgaccctttgctgtttgcagcc

SEQ ID NO: 800260 - DNA, 25 bp, Homo sapien
cgtggggctgccacaaaagctgagt

SEQ ID NO: 800261 - DNA, 25 bp, Homo sapien
gagatgatgtccttcctctgaaagt

SEQ ID NO: 800262 - DNA, 25 bp, Homo sapien
acagtctgccggagcctgatgttca

SEQ ID NO: 800263 - DNA, 25 bp, Homo sapien
ctgttgtttgagtgactctggggcc

SEQ ID NO: 800264 - DNA, 25 bp, Homo sapien
gttgtttgagtgactctggggccat

SEQ ID NO: 800265 - DNA, 25 bp, Homo sapien
aagccctcctaaggactgttgtttg

SEQ ID NO: 800266 - DNA, 25 bp, Homo sapien
gccctcctaaggactgttgtttgag

SEQ ID NO: 800267 - DNA, 25 bp, Homo sapien
tcagagaccagagactcagcttcat

SEQ ID NO: 800268 - DNA, 25 bp, Homo sapien
atcagagaccagagactcagcttca

SEQ ID NO: 800269 - DNA, 25 bp, Homo sapien
gatcagagaccagagactcagcttc

SEQ ID NO: 800270 - DNA, 25 bp, Homo sapien
gagagagccgtttctgggagcaggc

SEQ ID NO: 800271 - DNA, 25 bp, Homo sapien
caaggaggccattgtgttctgttcg

SEQ ID NO: 800272 - DNA, 25 bp, Homo sapien
aatttagcatgtcacacaaggaggc

SEQ ID NO: 800273 - DNA, 25 bp, Homo sapien
tcccggctccgtatggggctcgaat

SEQ ID NO: 800274 - DNA, 25 bp, Homo sapien
gggcccaacaatggctaattcaagg

SEQ ID NO: 800275 - DNA, 25 bp, Homo sapien
taattcaaggacatgagtcacgcag

SEQ ID NO: 800276 - DNA, 25 bp, Homo sapien
ccctcgggcccaacaatggctaatt

SEQ ID NO: 800277 - DNA, 25 bp, Homo sapien
cacgcagacgctgggtgtgaattga

SEQ ID NO: 800278 - DNA, 25 bp, Homo sapien
ctttgaaagggcagagtgggatgga

SEQ ID NO: 800279 - DNA, 25 bp, Homo sapien
tttgaaagggcagagtgggatggag

SEQ ID NO: 800280 - DNA, 25 bp, Homo sapien
gaaagggcagagtgggatggaggtg

SEQ ID NO: 800281 - DNA, 25 bp, Homo sapien
tgaaagggcagagtgggatggaggt

SEQ ID NO: 800282 - DNA, 25 bp, Homo sapien
tttgccgggctgtctgaatggagta

SEQ ID NO: 800283 - DNA, 25 bp, Homo sapien
tcttggtggccttacaaacagggca

SEQ ID NO: 800284 - DNA, 25 bp, Homo sapien
tgtccccaggtacatagcattgtga

SEQ ID NO: 800285 - DNA, 25 bp, Homo sapien
gacacgttgatgtacaaggaacttc

SEQ ID NO: 800286 - DNA, 25 bp, Homo sapien
cacggagacgccgtagttgtggtta

SEQ ID NO: 800287 - DNA, 25 bp, Homo sapien
tacagcaggtaaaccttcatacacg

SEQ ID NO: 800288 - DNA, 25 bp, Homo sapien
aaggcagggtcgttttgtagtacag

SEQ ID NO: 800289 - DNA, 25 bp, Homo sapien
ggcagggtcgttttgtagtacagca

SEQ ID NO: 800290 - DNA, 25 bp, Homo sapien
gttaagtatgaccttgactggactc

SEQ ID NO: 800291 - DNA, 25 bp, Homo sapien
tttttcagctggatgaaaactcgaa

SEQ ID NO: 800292 - DNA, 25 bp, Homo sapien
tacatcctttttcagctggatgaaa

SEQ ID NO: 800293 - DNA, 25 bp, Homo sapien
cttgttaagtatgaccttgactgga

SEQ ID NO: 800294 - DNA, 25 bp, Homo sapien
ggatgcaacggtccccgggacgcgc

SEQ ID NO: 800295 - DNA, 25 bp, Homo sapien
gcgccaactcggaaaacgctcggga

SEQ ID NO: 800296 - DNA, 25 bp, Homo sapien
ctcactctcgaggcgggaaggagcc

SEQ ID NO: 800297 - DNA, 25 bp, Homo sapien
ggaaggagccgcacgacggccgcct

SEQ ID NO: 800298 - DNA, 25 bp, Homo sapien
accccgactgccatcgcgagccacc

SEQ ID NO: 800299 - DNA, 25 bp, Homo sapien
ctgccatcgcgagccacccccgcgg

SEQ ID NO: 800300 - DNA, 25 bp, Homo sapien
cacccccgcggcaggcgtgggcctt

SEQ ID NO: 800301 - DNA, 25 bp, Homo sapien
tcgaaccccgactgccatcgcgagc

SEQ ID NO: 800302 - DNA, 25 bp, Homo sapien
cctcagggaggcgttttctccagca

SEQ ID NO: 800303 - DNA, 25 bp, Homo sapien
gaggacgcgggcgtcacaggctgag

SEQ ID NO: 800304 - DNA, 25 bp, Homo sapien
cggtgtcccggtgcccctttctcag

SEQ ID NO: 800305 - DNA, 25 bp, Homo sapien
agggtggcttctggcgcggcacggg

SEQ ID NO: 800306 - DNA, 25 bp, Homo sapien
ttcgctgctggcagtagccgcgctg

SEQ ID NO: 800307 - DNA, 25 bp, Homo sapien
ctcggcatgggcgagcgggcgccgt

SEQ ID NO: 800308 - DNA, 25 bp, Homo sapien
gcagaagtctcctgccgtctcacag

SEQ ID NO: 800309 - DNA, 25 bp, Homo sapien
ctgtcgtctcgagggtcgcgtgcac

SEQ ID NO: 800310 - DNA, 25 bp, Homo sapien
ggcaggtcgcccatagtgtccttgc

SEQ ID NO: 800311 - DNA, 25 bp, Homo sapien
ctccaggcggtccttgagggtctgc

SEQ ID NO: 800312 - DNA, 25 bp, Homo sapien
cagtgccgtgcacacgaagcggcta

SEQ ID NO: 800313 - DNA, 25 bp, Homo sapien
ttgcccgtgagctcgcggatggcct

SEQ ID NO: 800314 - DNA, 25 bp, Homo sapien
cattccaggtcccccgcgctccccg

SEQ ID NO: 800315 - DNA, 25 bp, Homo sapien
tcacccccacggacgatcacaccct

SEQ ID NO: 800316 - DNA, 25 bp, Homo sapien
catcctcccgagtcttccgcccccg

SEQ ID NO: 800317 - DNA, 25 bp, Homo sapien
ccagctcacccccacggacgatcac

SEQ ID NO: 800318 - DNA, 25 bp, Homo sapien
tgaagcaatccggaagagcacctta

SEQ ID NO: 800319 - DNA, 25 bp, Homo sapien
gaatgaggtcccttcccctgaagca

SEQ ID NO: 800320 - DNA, 25 bp, Homo sapien
tgaagttaaccagaggttgcccctc

SEQ ID NO: 800321 - DNA, 25 bp, Homo sapien
tccaacttgcagacacgggagtctt

SEQ ID NO: 800322 - DNA, 25 bp, Homo sapien
gcagcccagcattggacacgtttgc

SEQ ID NO: 800323 - DNA, 25 bp, Homo sapien
ggtgagccgaggtctcattgtgcag

SEQ ID NO: 800324 - DNA, 25 bp, Homo sapien
ctgctggagcacctcgcggaagtcg

SEQ ID NO: 800325 - DNA, 25 bp, Homo sapien
gcgttcagggtgctctcggtcttct

SEQ ID NO: 800326 - DNA, 25 bp, Homo sapien
tgtggatgctggctgtaaaatggaa

SEQ ID NO: 800327 - DNA, 25 bp, Homo sapien
actaggaaagggatgaaagagacct

SEQ ID NO: 800328 - DNA, 25 bp, Homo sapien
gccaaagtcattggatgttctgcta

SEQ ID NO: 800329 - DNA, 25 bp, Homo sapien
aaagagacctgtggcttgtggatgc

SEQ ID NO: 800330 - DNA, 25 bp, Homo sapien
tttctgagaagggccaggaagaaag

SEQ ID NO: 800331 - DNA, 25 bp, Homo sapien
agaagggccaggaagaaaggatagg

SEQ ID NO: 800332 - DNA, 25 bp, Homo sapien
ctttttctgagaagggccaggaaga

SEQ ID NO: 800333 - DNA, 25 bp, Homo sapien
gagaagggccaggaagaaaggatag

SEQ ID NO: 800334 - DNA, 25 bp, Homo sapien
gtaagcccagtgaaatgacattggc

SEQ ID NO: 800335 - DNA, 25 bp, Homo sapien
agtaagcccagtgaaatgacattgg

SEQ ID NO: 800336 - DNA, 25 bp, Homo sapien
gggcagccttgccaatctgatacga

SEQ ID NO: 800337 - DNA, 25 bp, Homo sapien
ttcaagtggcaaatgaccatgtcct

SEQ ID NO: 800338 - DNA, 25 bp, Homo sapien
aatctgatacgactccgtgtgggta

SEQ ID NO: 800339 - DNA, 25 bp, Homo sapien
gaaatggctgctatacttgcgggag

SEQ ID NO: 800340 - DNA, 25 bp, Homo sapien
cttgatggaccctccagcaagcgac

SEQ ID NO: 800341 - DNA, 25 bp, Homo sapien
tctggcaggattcaggacacaagat

SEQ ID NO: 800342 - DNA, 25 bp, Homo sapien
ggtgacagcaagtacagggccccaa

SEQ ID NO: 800343 - DNA, 25 bp, Homo sapien
aaaccagcagcaggtacgcgaggga

SEQ ID NO: 800344 - DNA, 25 bp, Homo sapien
gcagatggtgaaggcgtacagctca

SEQ ID NO: 800345 - DNA, 25 bp, Homo sapien
gcatctggtgacttaaaggcgctat

SEQ ID NO: 800346 - DNA, 25 bp, Homo sapien
tacagctcaggcagcgtcttcttga

SEQ ID NO: 800347 - DNA, 25 bp, Homo sapien
gagggacaccttgaacgcatctggt

SEQ ID NO: 800348 - DNA, 25 bp, Homo sapien
tggctccctccaccacatgatgggt

SEQ ID NO: 800349 - DNA, 25 bp, Homo sapien
cctccaccacatgatgggttctggg

SEQ ID NO: 800350 - DNA, 25 bp, Homo sapien
tccctccaccacatgatgggttctg

SEQ ID NO: 800351 - DNA, 25 bp, Homo sapien
aggagggcgaggacggctggggtgg

SEQ ID NO: 800352 - DNA, 25 bp, Homo sapien
acatgccatcccgtgtcgtccaggt

SEQ ID NO: 800353 - DNA, 25 bp, Homo sapien
gctcttgtccaaggatcagcacgcc

SEQ ID NO: 800354 - DNA, 25 bp, Homo sapien
tccgtcctggaatgcctcccacatg

SEQ ID NO: 800355 - DNA, 25 bp, Homo sapien
cacttgccgtcactgacaaacaggg

SEQ ID NO: 800356 - DNA, 25 bp, Homo sapien
gaaggacgcggtcccatatgttgaa

SEQ ID NO: 800357 - DNA, 25 bp, Homo sapien
tgttgcccggcatgtttgtggagca

SEQ ID NO: 800358 - DNA, 25 bp, Homo sapien
tgagctccccgacaaatgcctgagt

SEQ ID NO: 800359 - DNA, 25 bp, Homo sapien
gacaatttcttgtgcgcgaaggacg

SEQ ID NO: 800360 - DNA, 25 bp, Homo sapien
ctacaagtcaaggagacgctcctca

SEQ ID NO: 800361 - DNA, 25 bp, Homo sapien
tacaagtcaaggagacgctcctcac

SEQ ID NO: 800362 - DNA, 25 bp, Homo sapien
ggaaggcagatatccacccacttgg

SEQ ID NO: 800363 - DNA, 25 bp, Homo sapien
gatgtcccctttctggagacacaga

SEQ ID NO: 800364 - DNA, 25 bp, Homo sapien
tgcacgggacaccaaggaactggaa

SEQ ID NO: 800365 - DNA, 25 bp, Homo sapien
ggtagggaacaaacaagccagtgac

SEQ ID NO: 800366 - DNA, 25 bp, Homo sapien
gagcaggaagctgtttggtgaggct

SEQ ID NO: 800367 - DNA, 25 bp, Homo sapien
gaggcttcaaatttaccctccacat

SEQ ID NO: 800368 - DNA, 25 bp, Homo sapien
tggaggtccccaaggaatggtccag

SEQ ID NO: 800369 - DNA, 25 bp, Homo sapien
aaatagaacgggaggtagggctgtg

SEQ ID NO: 800370 - DNA, 25 bp, Homo sapien
gcagaaaacatgattgacattccag

SEQ ID NO: 800371 - DNA, 25 bp, Homo sapien
agttgggctggcatcagtctcatct

SEQ ID NO: 800372 - DNA, 25 bp, Homo sapien
aagaaaagacgtgaaaatttccatg

SEQ ID NO: 800373 - DNA, 25 bp, Homo sapien
agcaggactccaagaaaagacgtga

SEQ ID NO: 800374 - DNA, 25 bp, Homo sapien
ggcgatagaggccccatgcagataa

SEQ ID NO: 800375 - DNA, 25 bp, Homo sapien
gatagaggccccatgcagataaacc

SEQ ID NO: 800376 - DNA, 25 bp, Homo sapien
cgatagaggccccatgcagataaac

SEQ ID NO: 800377 - DNA, 25 bp, Homo sapien
gcgatagaggccccatgcagataaa

SEQ ID NO: 800378 - DNA, 25 bp, Homo sapien
ggttgaacacagaggtcgccaaagc

SEQ ID NO: 800379 - DNA, 25 bp, Homo sapien
acagaggtcgccaaagcaggaccag

SEQ ID NO: 800380 - DNA, 25 bp, Homo sapien
aggtcgccaaagcaggaccagccat

SEQ ID NO: 800381 - DNA, 25 bp, Homo sapien
tggtggtgccctgggttgaacacag

SEQ ID NO: 800382 - DNA, 25 bp, Homo sapien
gccaggagtcgagggacataaacgt

SEQ ID NO: 800383 - DNA, 25 bp, Homo sapien
tatttactgcaagagcttatcctga

SEQ ID NO: 800384 - DNA, 25 bp, Homo sapien
aggaaacaaggctccaagcgggaag

SEQ ID NO: 800385 - DNA, 25 bp, Homo sapien
cagcagcgcatgtgccgattaaacc

SEQ ID NO: 800386 - DNA, 25 bp, Homo sapien
cacattttgcacacggaggacaaga

SEQ ID NO: 800387 - DNA, 25 bp, Homo sapien
ggcgagggcaggactcaatgtctat

SEQ ID NO: 800388 - DNA, 25 bp, Homo sapien
ggaagactgtcttacacctggccat

SEQ ID NO: 800389 - DNA, 25 bp, Homo sapien
tgtctatcttgagcccatggtggtc

SEQ ID NO: 800390 - DNA, 25 bp, Homo sapien
ctcagagaagtcacggttaccctca

SEQ ID NO: 800391 - DNA, 25 bp, Homo sapien
tcagagaagtcacggttaccctcac

SEQ ID NO: 800392 - DNA, 25 bp, Homo sapien
acctcagagaagtcacggttaccct

SEQ ID NO: 800393 - DNA, 25 bp, Homo sapien
gagaagtcacggttaccctcactcc

SEQ ID NO: 800394 - DNA, 25 bp, Homo sapien
ctccgctcccaagctgccaccccac

SEQ ID NO: 800395 - DNA, 25 bp, Homo sapien
acgacacgctgaaactcccctcatg

SEQ ID NO: 800396 - DNA, 25 bp, Homo sapien
tcactgcgaggagtgcagagtcttc

SEQ ID NO: 800397 - DNA, 25 bp, Homo sapien
gtaacaaggggccacacgacacgct

SEQ ID NO: 800398 - DNA, 25 bp, Homo sapien
ttcatgatgctattggcaggctcca

SEQ ID NO: 800399 - DNA, 25 bp, Homo sapien
agttgtgtcactcgtatgtttgaca

SEQ ID NO: 800400 - DNA, 25 bp, Homo sapien
atgtttgacagaattgtgtttggct

SEQ ID NO: 800401 - DNA, 25 bp, Homo sapien
tgtttgacagaattgtgtttggctt

SEQ ID NO: 800402 - DNA, 25 bp, Homo sapien
gtgtcactcgtatgtttgacagaat

SEQ ID NO: 800403 - DNA, 25 bp, Homo sapien
ggaccactaactcattgatggcaga

SEQ ID NO: 800404 - DNA, 25 bp, Homo sapien
tatcaacgtgcacatctagagtccc

SEQ ID NO: 800405 - DNA, 25 bp, Homo sapien
cacgcttcttaaagcgtgcttgtgc

SEQ ID NO: 800406 - DNA, 25 bp, Homo sapien
aatgttgagggtgcattcttggacc

SEQ ID NO: 800407 - DNA, 25 bp, Homo sapien
tctggcaccatcttccatgaatgtg

SEQ ID NO: 800408 - DNA, 25 bp, Homo sapien
ccagagtctggcaccatcttccatg

SEQ ID NO: 800409 - DNA, 25 bp, Homo sapien
catgaatgtgtcagcattgagctcc

SEQ ID NO: 800410 - DNA, 25 bp, Homo sapien
accatcttccatgaatgtgtcagca

SEQ ID NO: 800411 - DNA, 25 bp, Homo sapien
tataagatggaccttctggctccag

SEQ ID NO: 800412 - DNA, 25 bp, Homo sapien
tactccagtgaattccagcagcaag

SEQ ID NO: 800413 - DNA, 25 bp, Homo sapien
gcaggcactgggtatctgtataaga

SEQ ID NO: 800414 - DNA, 25 bp, Homo sapien
tccataaagatccaacacgtagaca

SEQ ID NO: 800415 - DNA, 25 bp, Homo sapien
tccttggagatgaccactgggcagg

SEQ ID NO: 800416 - DNA, 25 bp, Homo sapien
ctctggtccttggagatgaccactg

SEQ ID NO: 800417 - DNA, 25 bp, Homo sapien
ctactctggtccttggagatgacca

SEQ ID NO: 800418 - DNA, 25 bp, Homo sapien
ccttggagatgaccactgggcaggc

SEQ ID NO: 800419 - DNA, 25 bp, Homo sapien
cttggagatatccactgggcaggcc

SEQ ID NO: 800420 - DNA, 25 bp, Homo sapien
gctggtccttggagatatccactgg

SEQ ID NO: 800421 - DNA, 25 bp, Homo sapien
ggtccttggagatatccactgggca

SEQ ID NO: 800422 - DNA, 25 bp, Homo sapien
tccttggagatatccactgggcagg

SEQ ID NO: 800423 - DNA, 25 bp, Homo sapien
caggacagttgtaggtccttctgca

SEQ ID NO: 800424 - DNA, 25 bp, Homo sapien
gtggcaggacagttgtaggtccttc

SEQ ID NO: 800425 - DNA, 25 bp, Homo sapien
gagcagcctcgggtgatggctcctt

SEQ ID NO: 800426 - DNA, 25 bp, Homo sapien
gatggctccttaacagccacctggg

SEQ ID NO: 800427 - DNA, 25 bp, Homo sapien
attggcgtggttcactcccagctgg

SEQ ID NO: 800428 - DNA, 25 bp, Homo sapien
cctcctgtagcattggcgtggttca

SEQ ID NO: 800429 - DNA, 25 bp, Homo sapien
tctcgtgggctcagcttagtgcttg

SEQ ID NO: 800430 - DNA, 25 bp, Homo sapien
cttggaccaaggtccctcaacgttg

SEQ ID NO: 800431 - DNA, 25 bp, Homo sapien
ctctttttctcttccttggtgtcca

SEQ ID NO: 800432 - DNA, 25 bp, Homo sapien
tctttttctcttccttggtgtccat

SEQ ID NO: 800433 - DNA, 25 bp, Homo sapien
aatagggtggtcattcaggcaaaac

SEQ ID NO: 800434 - DNA, 25 bp, Homo sapien
ggtcattcaggcaaaactcactctc

SEQ ID NO: 800435 - DNA, 25 bp, Homo sapien
ggtggtcattcaggcaaaactcact

SEQ ID NO: 800436 - DNA, 25 bp, Homo sapien
tacagaaatagggtggtcattcagg

SEQ ID NO: 800437 - DNA, 25 bp, Homo sapien
gcatagacatagaattggttaaata

SEQ ID NO: 800438 - DNA, 25 bp, Homo sapien
gcaaagtccacaagagatctgtaat

SEQ ID NO: 800439 - DNA, 25 bp, Homo sapien
tttatcatcaatatgaatgtggaca

SEQ ID NO: 800440 - DNA, 25 bp, Homo sapien
tccacaagagatctgtaatgctctc

SEQ ID NO: 800441 - DNA, 25 bp, Homo sapien
gatgaggttcaatttgtctgttttc

SEQ ID NO: 800442 - DNA, 25 bp, Homo sapien
atggtatcctttgaaacacagaagt

SEQ ID NO: 800443 - DNA, 25 bp, Homo sapien
ttaggtcgtcttttcagtttcttga

SEQ ID NO: 800444 - DNA, 25 bp, Homo sapien
ttttctgaattctagacttttatct

SEQ ID NO: 800445 - DNA, 25 bp, Homo sapien
tctgcacggctgctgtctgtgacca

SEQ ID NO: 800446 - DNA, 25 bp, Homo sapien
ctaggtctgcacggctgctgtctgt

SEQ ID NO: 800447 - DNA, 25 bp, Homo sapien
aggtctgcacggctgctgtctgtga

SEQ ID NO: 800448 - DNA, 25 bp, Homo sapien
ctgcacggctgctgtctgtgaccat

SEQ ID NO: 800449 - DNA, 25 bp, Homo sapien
ctgaggcccgggttcaccttctggc

SEQ ID NO: 800450 - DNA, 25 bp, Homo sapien
tgaggcccgggttcaccttctggcc

SEQ ID NO: 800451 - DNA, 25 bp, Homo sapien
gaggcccgggttcaccttctggcca

SEQ ID NO: 800452 - DNA, 25 bp, Homo sapien
gaacacaggcccaacgtggggtaca

SEQ ID NO: 800453 - DNA, 25 bp, Homo sapien
gagaacacaggcccaacgtggggta

SEQ ID NO: 800454 - DNA, 25 bp, Homo sapien
cgtggggtacaggttggaggattgg

SEQ ID NO: 800455 - DNA, 25 bp, Homo sapien
cacaggcccaacgtggggtacaggt

SEQ ID NO: 800456 - DNA, 25 bp, Homo sapien
ctgcagatggcagcgaggaaaacat

SEQ ID NO: 800457 - DNA, 25 bp, Homo sapien
gtacccagctgtcttgggtactgca

SEQ ID NO: 800458 - DNA, 25 bp, Homo sapien
gatggcagcgaggaaaacattgttt

SEQ ID NO: 800459 - DNA, 25 bp, Homo sapien
ggtactgcagatggcagcgaggaaa

SEQ ID NO: 800460 - DNA, 25 bp, Homo sapien
ttgccattatccacaatgggcggag

SEQ ID NO: 800461 - DNA, 25 bp, Homo sapien
cacaatgggcggagctccaacaggc

SEQ ID NO: 800462 - DNA, 25 bp, Homo sapien
cattatccacaatgggcggagctcc

SEQ ID NO: 800463 - DNA, 25 bp, Homo sapien
tctgtttgccattatccacaatggg

SEQ ID NO: 800464 - DNA, 25 bp, Homo sapien
ctctttgccggtaagaggaggcagc

SEQ ID NO: 800465 - DNA, 25 bp, Homo sapien
tctttgccggtaagaggaggcagct

SEQ ID NO: 800466 - DNA, 25 bp, Homo sapien
ttctctttgccggtaagaggaggca

SEQ ID NO: 800467 - DNA, 25 bp, Homo sapien
tttgccggtaagaggaggcagctct

SEQ ID NO: 800468 - DNA, 25 bp, Homo sapien
ctgatacttccacaggaccttcttc

SEQ ID NO: 800469 - DNA, 25 bp, Homo sapien
cctgatacttccacaggaccttctt

SEQ ID NO: 800470 - DNA, 25 bp, Homo sapien
tcctgatacttccacaggaccttct

SEQ ID NO: 800471 - DNA, 25 bp, Homo sapien
gtgcaacgttgatcccagctgggct

SEQ ID NO: 800472 - DNA, 25 bp, Homo sapien
tcctggacagtggagcctcttgcac

SEQ ID NO: 800473 - DNA, 25 bp, Homo sapien
ggcaggcctgggtcatgcactatgt

SEQ ID NO: 800474 - DNA, 25 bp, Homo sapien
tagcacacgaagtttattgcacgtg

SEQ ID NO: 800475 - DNA, 25 bp, Homo sapien
ccttgcagacagcaacggcagtgct

SEQ ID NO: 800476 - DNA, 25 bp, Homo sapien
tctgaatatagccaagcatagacgg

SEQ ID NO: 800477 - DNA, 25 bp, Homo sapien
caagcatagacggtgtggccagagt

SEQ ID NO: 800478 - DNA, 25 bp, Homo sapien
tgtgcatggacgtttttgccttgca

SEQ ID NO: 800479 - DNA, 25 bp, Homo sapien
cacatgggcatttcagatgatcagc

SEQ ID NO: 800480 - DNA, 25 bp, Homo sapien
gaaaaggccttgcagcggtagaaga

SEQ ID NO: 800481 - DNA, 25 bp, Homo sapien
tgggatgcaccctgcactagagctg

SEQ ID NO: 800482 - DNA, 25 bp, Homo sapien
tataaggccatcctagtccctgctg

SEQ ID NO: 800483 - DNA, 25 bp, Homo sapien
tcccgcccccgcttaaagcggcagc

SEQ ID NO: 800484 - DNA, 25 bp, Homo sapien
cagccgagccctcgtcgcaaccgct

SEQ ID NO: 800485 - DNA, 25 bp, Homo sapien
agccctcgtcgcaaccgctcggccg

SEQ ID NO: 800486 - DNA, 25 bp, Homo sapien
agcacccgccgaccgagcaccaggc

SEQ ID NO: 800487 - DNA, 25 bp, Homo sapien
gaaaagtatcaggtccatgagttca

SEQ ID NO: 800488 - DNA, 25 bp, Homo sapien
gggctggtttgcttctcaagagaaa

SEQ ID NO: 800489 - DNA, 25 bp, Homo sapien
gcttctcaagagaaaagtatcaggt

SEQ ID NO: 800490 - DNA, 25 bp, Homo sapien
ttgggctggtttgcttctcaagaga

SEQ ID NO: 800491 - DNA, 25 bp, Homo sapien
gtggtctggtcaaccaccgtggccc

SEQ ID NO: 800492 - DNA, 25 bp, Homo sapien
aaagtggtctggtcaaccaccgtgg

SEQ ID NO: 800493 - DNA, 25 bp, Homo sapien
atcaaagtggtctggtcaaccaccg

SEQ ID NO: 800494 - DNA, 25 bp, Homo sapien
tggccccctgtgttgcaacaaacgc

SEQ ID NO: 800495 - DNA, 25 bp, Homo sapien
aaattttcactaacttcttgcatca

SEQ ID NO: 800496 - DNA, 25 bp, Homo sapien
tttcactaacttcttgcatcatttt

SEQ ID NO: 800497 - DNA, 25 bp, Homo sapien
gcatcattttcaactttgtttcatc

SEQ ID NO: 800498 - DNA, 25 bp, Homo sapien
atcattttcaactttgtttcatcag

SEQ ID NO: 800499 - DNA, 25 bp, Homo sapien
gatagtagggtatttgattcaaccc

SEQ ID NO: 800500 - DNA, 25 bp, Homo sapien
tgcaccactgtacagcaagacccta

SEQ ID NO: 800501 - DNA, 25 bp, Homo sapien
ggcacagcgggttacacctgtaata

SEQ ID NO: 800502 - DNA, 25 bp, Homo sapien
atacaaaagaccttacggaagctag

SEQ ID NO: 800503 - DNA, 25 bp, Homo sapien
aaatgtctctagtagggctgggcac

SEQ ID NO: 800504 - DNA, 25 bp, Homo sapien
tatgaaacacccacaaccaaggatt

SEQ ID NO: 800505 - DNA, 25 bp, Homo sapien
tgggccaactcggtgcagatttctg

SEQ ID NO: 800506 - DNA, 25 bp, Homo sapien
acagaacactgtatgggaggcggcc

SEQ ID NO: 800507 - DNA, 25 bp, Homo sapien
aggaatgtagaatactgaggagatg

SEQ ID NO: 800508 - DNA, 25 bp, Homo sapien
ggaatgtagaatactgaggagatga

SEQ ID NO: 800509 - DNA, 25 bp, Homo sapien
ctaggaatgtagaatactgaggaga

SEQ ID NO: 800510 - DNA, 25 bp, Homo sapien
taggaatgtagaatactgaggagat

SEQ ID NO: 800511 - DNA, 25 bp, Homo sapien
tccatcttggagaaatgtaaggaat

SEQ ID NO: 800512 - DNA, 25 bp, Homo sapien
tcttggagaaatgtaaggaatcgag

SEQ ID NO: 800513 - DNA, 25 bp, Homo sapien
agaaatgtaaggaatcgagggatga

SEQ ID NO: 800514 - DNA, 25 bp, Homo sapien
tgtaaggaatcgagggatgatatgt

SEQ ID NO: 800515 - DNA, 25 bp, Homo sapien
tttcaagtacgagcttccgcagttg

SEQ ID NO: 800516 - DNA, 25 bp, Homo sapien
ttttgtgtgaggacgaagatgttcg

SEQ ID NO: 800517 - DNA, 25 bp, Homo sapien
cgaagatgttcgttggttggtattc

SEQ ID NO: 800518 - DNA, 25 bp, Homo sapien
tctaaaaagcgaaacatcacagaca

SEQ ID NO: 800519 - DNA, 25 bp, Homo sapien
ttcttgtgtgatcggtggcctgaac

SEQ ID NO: 800520 - DNA, 25 bp, Homo sapien
cctgaactgtttgtgtagctcaata

SEQ ID NO: 800521 - DNA, 25 bp, Homo sapien
tcggtggcctgaactgtttgtgtag

SEQ ID NO: 800522 - DNA, 25 bp, Homo sapien
tgtttgtgtagctcaataattattc

SEQ ID NO: 800523 - DNA, 25 bp, Homo sapien
ttgtaaatctgtttcacaaaatcca

SEQ ID NO: 800524 - DNA, 25 bp, Homo sapien
cactacttttggaagctccttgtaa

SEQ ID NO: 800525 - DNA, 25 bp, Homo sapien
tgtaaatctgtttcacaaaatccag

SEQ ID NO: 800526 - DNA, 25 bp, Homo sapien
acttttggaagctccttgtaaatct

SEQ ID NO: 800527 - DNA, 25 bp, Homo sapien
ttcacagcaatcgttgttatcatac

SEQ ID NO: 800528 - DNA, 25 bp, Homo sapien
ctcacgctccgggttgactttcaca

SEQ ID NO: 800529 - DNA, 25 bp, Homo sapien
tcacttgagggttctcaaagtagcg

SEQ ID NO: 800530 - DNA, 25 bp, Homo sapien
tgttcgagtctcactgtcctcacgc

SEQ ID NO: 800531 - DNA, 25 bp, Homo sapien
gaaagtgatcccctcggaatgatgg

SEQ ID NO: 800532 - DNA, 25 bp, Homo sapien
agagaaagtgatcccctcggaatga

SEQ ID NO: 800533 - DNA, 25 bp, Homo sapien
gtgatcccctcggaatgatggaatg

SEQ ID NO: 800534 - DNA, 25 bp, Homo sapien
ttcagagaaagtgatcccctcggaa

SEQ ID NO: 800535 - DNA, 25 bp, Homo sapien
atggcaatggtgttcatgatcaagg

SEQ ID NO: 800536 - DNA, 25 bp, Homo sapien
aaactcagcaacaacattgtggatg

SEQ ID NO: 800537 - DNA, 25 bp, Homo sapien
gcttgtgcagacacctgaatggcaa

SEQ ID NO: 800538 - DNA, 25 bp, Homo sapien
gatcaagggcacaaactcagcaaca

SEQ ID NO: 800539 - DNA, 25 bp, Homo sapien
aaatcctgataatgtaagctaaaaa

SEQ ID NO: 800540 - DNA, 25 bp, Homo sapien
tgttttaatctgagcagcaatgaag

SEQ ID NO: 800541 - DNA, 25 bp, Homo sapien
ctccttgttgtaaagcttatgttgc

SEQ ID NO: 800542 - DNA, 25 bp, Homo sapien
atgaagtcagcatacaactccttgt

SEQ ID NO: 800543 - DNA, 25 bp, Homo sapien
gctgcagccgttatctggcaggacg

SEQ ID NO: 800544 - DNA, 25 bp, Homo sapien
tgtgaaagccctaactccatatgtg

SEQ ID NO: 800545 - DNA, 25 bp, Homo sapien
tctctgttcgccattgtgaggacac

SEQ ID NO: 800546 - DNA, 25 bp, Homo sapien
tcagtgaggtcatacggctgcagcc

SEQ ID NO: 800547 - DNA, 25 bp, Homo sapien
caatcttcttttgcggtgtcagcag

SEQ ID NO: 800548 - DNA, 25 bp, Homo sapien
tgtgaacaacagtggagtcaacttg

SEQ ID NO: 800549 - DNA, 25 bp, Homo sapien
gataacgcaagctgactaaaatgtc

SEQ ID NO: 800550 - DNA, 25 bp, Homo sapien
tcaacttgagccaactcagaacagg

SEQ ID NO: 800551 - DNA, 25 bp, Homo sapien
ccatctgctgagaatacttagtcac

SEQ ID NO: 800552 - DNA, 25 bp, Homo sapien
tgtttggcagcaatcagaagctcct

SEQ ID NO: 800553 - DNA, 25 bp, Homo sapien
agtctctgctggacaatttgaaagt

SEQ ID NO: 800554 - DNA, 25 bp, Homo sapien
aatttgaaagtaactggagcattcc

SEQ ID NO: 800555 - DNA, 25 bp, Homo sapien
tagccagcccgccagtctgatatgc

SEQ ID NO: 800556 - DNA, 25 bp, Homo sapien
ccgccagtctgatatgcaatccaga

SEQ ID NO: 800557 - DNA, 25 bp, Homo sapien
agtgctttcgaagtagccagcccgc

SEQ ID NO: 800558 - DNA, 25 bp, Homo sapien
tttacagtgctttcgaagtagccag

SEQ ID NO: 800559 - DNA, 25 bp, Homo sapien
agacaaacatccattgcacagatca

SEQ ID NO: 800560 - DNA, 25 bp, Homo sapien
ctagaagacaaacatccattgcaca

SEQ ID NO: 800561 - DNA, 25 bp, Homo sapien
tagaagacaaacatccattgcacag

SEQ ID NO: 800562 - DNA, 25 bp, Homo sapien
gaagacaaacatccattgcacagat

SEQ ID NO: 800563 - DNA, 25 bp, Homo sapien
cttagagtctctctggcagtatatc

SEQ ID NO: 800564 - DNA, 25 bp, Homo sapien
tctctggcagtatatcctgagccaa

SEQ ID NO: 800565 - DNA, 25 bp, Homo sapien
gagccaattagtatggattcatcaa

SEQ ID NO: 800566 - DNA, 25 bp, Homo sapien
cagcttgtccatgcaaggaatgaac

SEQ ID NO: 800567 - DNA, 25 bp, Homo sapien
tcctgctcgctcttggaacggatgc

SEQ ID NO: 800568 - DNA, 25 bp, Homo sapien
tcgtcgatgttcttggcgaagagct

SEQ ID NO: 800569 - DNA, 25 bp, Homo sapien
cacgaggtcggccagcgtgctgtag

SEQ ID NO: 800570 - DNA, 25 bp, Homo sapien
ggagcttgcaggacatggtctggat

SEQ ID NO: 800571 - DNA, 25 bp, Homo sapien
gctggtaccgagcaattgtgtggaa

SEQ ID NO: 800572 - DNA, 25 bp, Homo sapien
caattgtgtggaatttgagaacgaa

SEQ ID NO: 800573 - DNA, 25 bp, Homo sapien
gcaattgtgtggaatttgagaacga

SEQ ID NO: 800574 - DNA, 25 bp, Homo sapien
agagagctggtaccgagcaattgtg

SEQ ID NO: 800575 - DNA, 25 bp, Homo sapien
gcttccacggctccaagttctgact

SEQ ID NO: 800576 - DNA, 25 bp, Homo sapien
gccggggtcacaggggtggcaggtg

SEQ ID NO: 800577 - DNA, 25 bp, Homo sapien
tggggagggagcagggccaggagct

SEQ ID NO: 800578 - DNA, 25 bp, Homo sapien
tggaggtggggcagggacaggggct

SEQ ID NO: 800579 - DNA, 25 bp, Homo sapien
caggagctgcaggggcagtgggcac

SEQ ID NO: 800580 - DNA, 25 bp, Homo sapien
tatgccccacgtgattgtcttgaca

SEQ ID NO: 800581 - DNA, 25 bp, Homo sapien
tttgaccaaacttcgacagtctgtg

SEQ ID NO: 800582 - DNA, 25 bp, Homo sapien
tgctttgcatgatgttatgccccac

SEQ ID NO: 800583 - DNA, 25 bp, Homo sapien
tggaatgtctgcttgtcttccttgt

SEQ ID NO: 800584 - DNA, 25 bp, Homo sapien
taaatatctaaagcttgcattgcat

SEQ ID NO: 800585 - DNA, 25 bp, Homo sapien
tcacaagtttgatgtaaatctgtgt

SEQ ID NO: 800586 - DNA, 25 bp, Homo sapien
tctctttgggttgtaactgcttgtt

SEQ ID NO: 800587 - DNA, 25 bp, Homo sapien
ttgggttgtaactgcttgttgggaa

SEQ ID NO: 800588 - DNA, 25 bp, Homo sapien
tggccacacggatgtatgtctgtcc

SEQ ID NO: 800589 - DNA, 25 bp, Homo sapien
cagttggccacacggatgtatgtct

SEQ ID NO: 800590 - DNA, 25 bp, Homo sapien
gccacacggatgtatgtctgtccat

SEQ ID NO: 800591 - DNA, 25 bp, Homo sapien
ctggcagttggccacacggatgtat

SEQ ID NO: 800592 - DNA, 25 bp, Homo sapien
catataagggaccgtagtttggaag

SEQ ID NO: 800593 - DNA, 25 bp, Homo sapien
gaacacaccagcgaaatgctccaat

SEQ ID NO: 800594 - DNA, 25 bp, Homo sapien
tctttgaacgttaaggggttcatca

SEQ ID NO: 800595 - DNA, 25 bp, Homo sapien
gttcatcattgtgaacacaccagcg

SEQ ID NO: 800596 - DNA, 25 bp, Homo sapien
ggagcccatttctggcaggcgatca

SEQ ID NO: 800597 - DNA, 25 bp, Homo sapien
gagacagagccaaagaccagcttga

SEQ ID NO: 800598 - DNA, 25 bp, Homo sapien
caggcgatcaaggagatattccacc

SEQ ID NO: 800599 - DNA, 25 bp, Homo sapien
caccagaatcgtagcaaacagagca

SEQ ID NO: 800600 - DNA, 25 bp, Homo sapien
gaattatatgaggacacagattata

SEQ ID NO: 800601 - DNA, 25 bp, Homo sapien
catagtcatatctaatgctggcaaa

SEQ ID NO: 800602 - DNA, 25 bp, Homo sapien
agccacattccaacattcgatttgt

SEQ ID NO: 800603 - DNA, 25 bp, Homo sapien
tgtcccgataggttttattctgggc

SEQ ID NO: 800604 - DNA, 25 bp, Homo sapien
aatagagcgaaacagcgcccgtagc

SEQ ID NO: 800605 - DNA, 25 bp, Homo sapien
gctccatagagctgttcacaatctt

SEQ ID NO: 800606 - DNA, 25 bp, Homo sapien
ctccaccaatagagcgaaacagcgc

SEQ ID NO: 800607 - DNA, 25 bp, Homo sapien
tccttggcagtctgcgcgagctcca

SEQ ID NO: 800608 - DNA, 25 bp, Homo sapien
tcctgatacaagagatcgtggctac

SEQ ID NO: 800609 - DNA, 25 bp, Homo sapien
aggcaagaactcctgatacaagaga

SEQ ID NO: 800610 - DNA, 25 bp, Homo sapien
aaggagaggcaagaactcctgatac

SEQ ID NO: 800611 - DNA, 25 bp, Homo sapien
gaactcctgatacaagagatcgtgg

SEQ ID NO: 800612 - DNA, 25 bp, Homo sapien
tctgagacccattgagtgcagacac

SEQ ID NO: 800613 - DNA, 25 bp, Homo sapien
cataagcatgggcaggtacggcaaa

SEQ ID NO: 800614 - DNA, 25 bp, Homo sapien
tcctgaggccttggctgaccaatgt

SEQ ID NO: 800615 - DNA, 25 bp, Homo sapien
tgcagacaccaagggatccataagc

SEQ ID NO: 800616 - DNA, 25 bp, Homo sapien
gatgcgacttagcagtgaggttcca

SEQ ID NO: 800617 - DNA, 25 bp, Homo sapien
gaattaagttaatgtggactccgca

SEQ ID NO: 800618 - DNA, 25 bp, Homo sapien
gaaatatccgcactcaactgtcgca

SEQ ID NO: 800619 - DNA, 25 bp, Homo sapien
gaaaaacacagatcacgaaggcacc

SEQ ID NO: 800620 - DNA, 25 bp, Homo sapien
tgttactgccgccaaacttaccgag

SEQ ID NO: 800621 - DNA, 25 bp, Homo sapien
aagctttgcagtcggaaaactccac

SEQ ID NO: 800622 - DNA, 25 bp, Homo sapien
tgaacctcggtcacaacgtagtgca

SEQ ID NO: 800623 - DNA, 25 bp, Homo sapien
ttaccgagcacacggtaggccacgt

SEQ ID NO: 800624 - DNA, 25 bp, Homo sapien
tgttggcgcttttcaggcagtccag

SEQ ID NO: 800625 - DNA, 25 bp, Homo sapien
tagagtgcgtgcttgttgtcctcca

SEQ ID NO: 800626 - DNA, 25 bp, Homo sapien
agcatttgatcacttcccacgcctg

SEQ ID NO: 800627 - DNA, 25 bp, Homo sapien
gcctgcctccggtagtagggctcag

SEQ ID NO: 800628 - DNA, 25 bp, Homo sapien
agggcctgctcaaaagtcttccggg

SEQ ID NO: 800629 - DNA, 25 bp, Homo sapien
tgggcgactgccaccatcgtatagt

SEQ ID NO: 800630 - DNA, 25 bp, Homo sapien
gctgggccgcaggtccttaatgaca

SEQ ID NO: 800631 - DNA, 25 bp, Homo sapien
tatagtggcggatcaagctggcgac

SEQ ID NO: 800632 - DNA, 25 bp, Homo sapien
cagcctgggcaacaaagtgagactc

SEQ ID NO: 800633 - DNA, 25 bp, Homo sapien
gagccatgaccacgccactgcactc

SEQ ID NO: 800634 - DNA, 25 bp, Homo sapien
tcacttgagctcagcaggtagaggc

SEQ ID NO: 800635 - DNA, 25 bp, Homo sapien
tgcagtgagccatgaccacgccact

SEQ ID NO: 800636 - DNA, 25 bp, Homo sapien
catcaaatatcacagctagggccac

SEQ ID NO: 800637 - DNA, 25 bp, Homo sapien
tggagcccaggatgatacttgcaac

SEQ ID NO: 800638 - DNA, 25 bp, Homo sapien
caattgcatcaatgagaaccaaagg

SEQ ID NO: 800639 - DNA, 25 bp, Homo sapien
ccacctggtagcaaggcagcaagaa

SEQ ID NO: 800640 - DNA, 25 bp, Homo sapien
cagctttgcataccacgcctgttca

SEQ ID NO: 800641 - DNA, 25 bp, Homo sapien
gaggcagccgctccatgagaaactt

SEQ ID NO: 800642 - DNA, 25 bp, Homo sapien
cagttaagtccatcatgacaaagag

SEQ ID NO: 800643 - DNA, 25 bp, Homo sapien
gagaaacttaatagacaccacaccc

SEQ ID NO: 800644 - DNA, 25 bp, Homo sapien
ggtgacttctcgaaccaagtcgtgt

SEQ ID NO: 800645 - DNA, 25 bp, Homo sapien
gttgcgcaccgcatcagaagctgct

SEQ ID NO: 800646 - DNA, 25 bp, Homo sapien
ccagcgtggtctttgccatagcgac

SEQ ID NO: 800647 - DNA, 25 bp, Homo sapien
tcgtcttttaaaggcgttgcgcacc

SEQ ID NO: 800648 - DNA, 25 bp, Homo sapien
ttatgctccaccacgttaaggtcca

SEQ ID NO: 800649 - DNA, 25 bp, Homo sapien
tgggctgcaacgtggtacagaacgt

SEQ ID NO: 800650 - DNA, 25 bp, Homo sapien
aaggtccattgtgaagagcctgggc

SEQ ID NO: 800651 - DNA, 25 bp, Homo sapien
catcaggccaatctgtgcgttggca

SEQ ID NO: 800652 - DNA, 25 bp, Homo sapien
tgtctctagatcagccaagggaagt

SEQ ID NO: 800653 - DNA, 25 bp, Homo sapien
aagctttcagacagtggattcccag

SEQ ID NO: 800654 - DNA, 25 bp, Homo sapien
ggattcccaggtctcacccaaatgg

SEQ ID NO: 800655 - DNA, 25 bp, Homo sapien
tctccaaggaaaggactcgagtcca

SEQ ID NO: 800656 - DNA, 25 bp, Homo sapien
gacggaaggcttttataacagggca

SEQ ID NO: 800657 - DNA, 25 bp, Homo sapien
gctttgttaaagctgaatcttcagc

SEQ ID NO: 800658 - DNA, 25 bp, Homo sapien
caattcgtaaaggtacgagtgacgg

SEQ ID NO: 800659 - DNA, 25 bp, Homo sapien
taatgccgcaattcgtaaaggtacg

SEQ ID NO: 800660 - DNA, 25 bp, Homo sapien
ttggagctcactattggtggaattc

SEQ ID NO: 800661 - DNA, 25 bp, Homo sapien
ttgaagagtgcagcgatgattttct

SEQ ID NO: 800662 - DNA, 25 bp, Homo sapien
ggctttgaagagtgcagcgatgatt

SEQ ID NO: 800663 - DNA, 25 bp, Homo sapien
ctattggtggaattcagggctttga

SEQ ID NO: 800664 - DNA, 25 bp, Homo sapien
gcatcatcagcaaaggtcgcatatg

SEQ ID NO: 800665 - DNA, 25 bp, Homo sapien
gaatttgggaagagcctcgtgaccg

SEQ ID NO: 800666 - DNA, 25 bp, Homo sapien
tcaggcgattcacaacattcagcgt

SEQ ID NO: 800667 - DNA, 25 bp, Homo sapien
aagctccggtaatctcccagcatca

SEQ ID NO: 800668 - DNA, 25 bp, Homo sapien
tcacagtaggtgcattccactggtg

SEQ ID NO: 800669 - DNA, 25 bp, Homo sapien
cacagtaggtgcattccactggtgg

SEQ ID NO: 800670 - DNA, 25 bp, Homo sapien
cagtaggtgcattccactggtggaa

SEQ ID NO: 800671 - DNA, 25 bp, Homo sapien
agtaggtgcattccactggtggaaa

SEQ ID NO: 800672 - DNA, 25 bp, Homo sapien
caccacttccatccacttgcgcaga

SEQ ID NO: 800673 - DNA, 25 bp, Homo sapien
cccctttgtgggtgatcaccaccac

SEQ ID NO: 800674 - DNA, 25 bp, Homo sapien
cacttccatccacttgcgcagatgt

SEQ ID NO: 800675 - DNA, 25 bp, Homo sapien
accacttccatccacttgcgcagat

SEQ ID NO: 800676 - DNA, 25 bp, Homo sapien
caagggacatctcccgcactcggaa

SEQ ID NO: 800677 - DNA, 25 bp, Homo sapien
ggacatctcccgcactcggaaatgc

SEQ ID NO: 800678 - DNA, 25 bp, Homo sapien
tggagacaagggacatctcccgcac

SEQ ID NO: 800679 - DNA, 25 bp, Homo sapien
atctcccgcactcggaaatgctttc

SEQ ID NO: 800680 - DNA, 25 bp, Homo sapien
ctgaggagcagccgggatcagatga

SEQ ID NO: 800681 - DNA, 25 bp, Homo sapien
gagcagccgggatcagatgaaaaag

SEQ ID NO: 800682 - DNA, 25 bp, Homo sapien
aggagcagccgggatcagatgaaaa

SEQ ID NO: 800683 - DNA, 25 bp, Homo sapien
gcagccgggatcagatgaaaaaggt

SEQ ID NO: 800684 - DNA, 25 bp, Homo sapien
gctccgttttcatgacaacctctag

SEQ ID NO: 800685 - DNA, 25 bp, Homo sapien
agcatcgcccgctccgttttcatga

SEQ ID NO: 800686 - DNA, 25 bp, Homo sapien
ttttcatgacaacctctagcaaagg

SEQ ID NO: 800687 - DNA, 25 bp, Homo sapien
catgacaacctctagcaaaggcttc

SEQ ID NO: 800688 - DNA, 25 bp, Homo sapien
cataaacattctgctccactgggga

SEQ ID NO: 800689 - DNA, 25 bp, Homo sapien
gcttccatcatgaacagctccactg

SEQ ID NO: 800690 - DNA, 25 bp, Homo sapien
cactgtctgcgagggatgtcgagtc

SEQ ID NO: 800691 - DNA, 25 bp, Homo sapien
tggggatcgttcagtgtggcttcca

SEQ ID NO: 800692 - DNA, 25 bp, Homo sapien
agccgtctgggcaccccccggcagc

SEQ ID NO: 800693 - DNA, 25 bp, Homo sapien
gtgctgggcgaaccggggcgcacag

SEQ ID NO: 800694 - DNA, 25 bp, Homo sapien
gtgatgaacctgttggggttggcag

SEQ ID NO: 800695 - DNA, 25 bp, Homo sapien
agaggtctggcgtctttgtgtttta

SEQ ID NO: 800696 - DNA, 25 bp, Homo sapien
cagccaggagtcatcgtttttcact

SEQ ID NO: 800697 - DNA, 25 bp, Homo sapien
catgttctccttgcggtgcctctct

SEQ ID NO: 800698 - DNA, 25 bp, Homo sapien
tgcagtagttcagcaggcagtaggc

SEQ ID NO: 800699 - DNA, 25 bp, Homo sapien
gtcgcaactggctcaccagagagtg

SEQ ID NO: 800700 - DNA, 25 bp, Homo sapien
gaccacagccttgtacagagtagaa

SEQ ID NO: 800701 - DNA, 25 bp, Homo sapien
aaccaatctgactgcacgcatccaa

SEQ ID NO: 800702 - DNA, 25 bp, Homo sapien
agcccattctccacaaccaatctga

SEQ ID NO: 800703 - DNA, 25 bp, Homo sapien
tgcctttaaacagctcagagacaca

SEQ ID NO: 800704 - DNA, 25 bp, Homo sapien
tcatgttgcagagaaaacgaccagt

SEQ ID NO: 800705 - DNA, 25 bp, Homo sapien
ggcacgtttctgagcgatgctgtaa

SEQ ID NO: 800706 - DNA, 25 bp, Homo sapien
cttttaattcatctccgaagttggg

SEQ ID NO: 800707 - DNA, 25 bp, Homo sapien
tacaaagcgaaagaacagggcacgt

SEQ ID NO: 800708 - DNA, 25 bp, Homo sapien
gaccaaatacccatacccttctaca

SEQ ID NO: 800709 - DNA, 25 bp, Homo sapien
cagcacctggctcactctactattt

SEQ ID NO: 800710 - DNA, 25 bp, Homo sapien
tctacagcataagagtgggactcac

SEQ ID NO: 800711 - DNA, 25 bp, Homo sapien
tggctcactctactatttattcaag

SEQ ID NO: 800712 - DNA, 25 bp, Homo sapien
caaagctgtacaagaaagcaggatt

SEQ ID NO: 800713 - DNA, 25 bp, Homo sapien
tgtacaagaaagcaggattcaagat

SEQ ID NO: 800714 - DNA, 25 bp, Homo sapien
gctgtacaagaaagcaggattcaag

SEQ ID NO: 800715 - DNA, 25 bp, Homo sapien
acaagaaagcaggattcaagatatg

SEQ ID NO: 800716 - DNA, 25 bp, Homo sapien
cgtactgcagcaggtagatccgcag

SEQ ID NO: 800717 - DNA, 25 bp, Homo sapien
tccgctgtacttgcaggctgggtcc

SEQ ID NO: 800718 - DNA, 25 bp, Homo sapien
tgtgcgccaggagcaagtgtccgct

SEQ ID NO: 800719 - DNA, 25 bp, Homo sapien
caggacgatcttcttgtgtatggcg

SEQ ID NO: 800720 - DNA, 25 bp, Homo sapien
gctgatgtcggcggacaggaggggc

SEQ ID NO: 800721 - DNA, 25 bp, Homo sapien
ctgatgtcggcggacaggaggggct

SEQ ID NO: 800722 - DNA, 25 bp, Homo sapien
tgatgtcggcggacaggaggggctt

SEQ ID NO: 800723 - DNA, 25 bp, Homo sapien
tccattgcgtgagccttgaggagac

SEQ ID NO: 800724 - DNA, 25 bp, Homo sapien
gacgatcgctcgagcttccattgcg

SEQ ID NO: 800725 - DNA, 25 bp, Homo sapien
atggccatcgcctgtctgacgatcg

SEQ ID NO: 800726 - DNA, 25 bp, Homo sapien
atgatcttccgggtccagtgggtca

SEQ ID NO: 800727 - DNA, 25 bp, Homo sapien
tgcatggcgctcaccatgtgctgca

SEQ ID NO: 800728 - DNA, 25 bp, Homo sapien
atgacgacttcagacaggtccacgg

SEQ ID NO: 800729 - DNA, 25 bp, Homo sapien
cgcctctgctcgatggtgacactgg

SEQ ID NO: 800730 - DNA, 25 bp, Homo sapien
gcaccaagtggtgccgtaccgggta

SEQ ID NO: 800731 - DNA, 25 bp, Homo sapien
ggcgcttggttttactgactgattt

SEQ ID NO: 800732 - DNA, 25 bp, Homo sapien
cacacaggcgcttggttttactgac

SEQ ID NO: 800733 - DNA, 25 bp, Homo sapien
aacacacaggcgcttggttttactg

SEQ ID NO: 800734 - DNA, 25 bp, Homo sapien
cacaggcgcttggttttactgactg

SEQ ID NO: 800735 - DNA, 25 bp, Homo sapien
actggaatttgggtccatatctgaa

SEQ ID NO: 800736 - DNA, 25 bp, Homo sapien
taatggaggatgagacagaattgac

SEQ ID NO: 800737 - DNA, 25 bp, Homo sapien
acagaattgactccttctccactgg

SEQ ID NO: 800738 - DNA, 25 bp, Homo sapien
aatttgggtccatatctgaatccgg

SEQ ID NO: 800739 - DNA, 25 bp, Homo sapien
tgcactgatggctccggtggccgtc

SEQ ID NO: 800740 - DNA, 25 bp, Homo sapien
tggccgtcctaaagcgtttcacttc

SEQ ID NO: 800741 - DNA, 25 bp, Homo sapien
tgatggctccggtggccgtcctaaa

SEQ ID NO: 800742 - DNA, 25 bp, Homo sapien
ctaaagcgtttcacttcctgggcag

SEQ ID NO: 800743 - DNA, 25 bp, Homo sapien
ggcttggcgaggagagagtctgctc

SEQ ID NO: 800744 - DNA, 25 bp, Homo sapien
taaggaagttcaccacagtgtctgt

SEQ ID NO: 800745 - DNA, 25 bp, Homo sapien
acaggccacgcggataaggaagttc

SEQ ID NO: 800746 - DNA, 25 bp, Homo sapien
agtctgctccaggtagcgactggct

SEQ ID NO: 800747 - DNA, 25 bp, Homo sapien
ccactgcagcttgagttcggacttg

SEQ ID NO: 800748 - DNA, 25 bp, Homo sapien
tggccgcaacgcagtcttcagaagg

SEQ ID NO: 800749 - DNA, 25 bp, Homo sapien
aaggttcacacaccggcgagagagc

SEQ ID NO: 800750 - DNA, 25 bp, Homo sapien
cagcagcttgtcgaaccactgcagc

SEQ ID NO: 800751 - DNA, 25 bp, Homo sapien
aattagtcaaactctctccctggag

SEQ ID NO: 800752 - DNA, 25 bp, Homo sapien
cgaactcctaaagcctcaagagcaa

SEQ ID NO: 800753 - DNA, 25 bp, Homo sapien
gtgacagtatctgctagtggcctcg

SEQ ID NO: 800754 - DNA, 25 bp, Homo sapien
tgatccacaaatgtccagtccctgc

SEQ ID NO: 800755 - DNA, 25 bp, Homo sapien
gaagctcagcacttctaggcccgtg

SEQ ID NO: 800756 - DNA, 25 bp, Homo sapien
taggcccgtgcagatattcccatag

SEQ ID NO: 800757 - DNA, 25 bp, Homo sapien
ctcatcaggcgcgagagaaggctgt

SEQ ID NO: 800758 - DNA, 25 bp, Homo sapien
tgtttccacatgtcatgcaggcggc

SEQ ID NO: 800759 - DNA, 25 bp, Homo sapien
ccttctcgtagttggtgagcccttc

SEQ ID NO: 800760 - DNA, 25 bp, Homo sapien
gcgtagaggcactccagctcttcat

SEQ ID NO: 800761 - DNA, 25 bp, Homo sapien
tttccgacggctgcgtagaggcact

SEQ ID NO: 800762 - DNA, 25 bp, Homo sapien
gagcccttcatagatgacctttccg

SEQ ID NO: 800763 - DNA, 25 bp, Homo sapien
agagtgacccagctgccctgatcac

SEQ ID NO: 800764 - DNA, 25 bp, Homo sapien
tggggccagagtgacccagctgccc

SEQ ID NO: 800765 - DNA, 25 bp, Homo sapien
ctggggccagagtgacccagctgcc

SEQ ID NO: 800766 - DNA, 25 bp, Homo sapien
gccagagtgacccagctgccctgat

SEQ ID NO: 800767 - DNA, 25 bp, Homo sapien
gcagacttgaggatcataagggtcc

SEQ ID NO: 800768 - DNA, 25 bp, Homo sapien
tcctgacgctgcctgagggtttaaa

SEQ ID NO: 800769 - DNA, 25 bp, Homo sapien
tcttctgcagggagcgcataaagac

SEQ ID NO: 800770 - DNA, 25 bp, Homo sapien
gcataaagacggagatcagcctgtc

SEQ ID NO: 800771 - DNA, 25 bp, Homo sapien
aacagagtctgaggaaaggcccccg

SEQ ID NO: 800772 - DNA, 25 bp, Homo sapien
tctgaggaaaggcccccggtggcca

SEQ ID NO: 800773 - DNA, 25 bp, Homo sapien
tcaacagagtctgaggaaaggcccc

SEQ ID NO: 800774 - DNA, 25 bp, Homo sapien
cagagtctgaggaaaggcccccggt

SEQ ID NO: 800775 - DNA, 25 bp, Homo sapien
gatgaagttcttccgcatctccatg

SEQ ID NO: 800776 - DNA, 25 bp, Homo sapien
ccacagcccggaggattttggcatc

SEQ ID NO: 800777 - DNA, 25 bp, Homo sapien
gactcagcatcaccagctcgcttgt

SEQ ID NO: 800778 - DNA, 25 bp, Homo sapien
gatttttcgatgagggatgtcagga

SEQ ID NO: 800779 - DNA, 25 bp, Homo sapien
gtagacatagttaacaagatctaaa

SEQ ID NO: 800780 - DNA, 25 bp, Homo sapien
ctgtagacatagttaacaagatcta

SEQ ID NO: 800781 - DNA, 25 bp, Homo sapien
tgtagacatagttaacaagatctaa

SEQ ID NO: 800782 - DNA, 25 bp, Homo sapien
cagttctgcgaacaggtcacataga

SEQ ID NO: 800783 - DNA, 25 bp, Homo sapien
aaaactttgccctgatgagtggctg

SEQ ID NO: 800784 - DNA, 25 bp, Homo sapien
tgcttgatccagaagtggttcccca

SEQ ID NO: 800785 - DNA, 25 bp, Homo sapien
tagagcaagcgctcgtagacacgac

SEQ ID NO: 800786 - DNA, 25 bp, Homo sapien
tctagggcacgcagacagaattcaa

SEQ ID NO: 800787 - DNA, 25 bp, Homo sapien
cgctttagatgaacgcttgccctga

SEQ ID NO: 800788 - DNA, 25 bp, Homo sapien
ccacagatgtgagccgagtcttcct

SEQ ID NO: 800789 - DNA, 25 bp, Homo sapien
taaatcagcccaaaaacgctttaga

SEQ ID NO: 800790 - DNA, 25 bp, Homo sapien
tccaggtaaatggacgagaactacc

SEQ ID NO: 800791 - DNA, 25 bp, Homo sapien
gagaactacctgcacagcactggta

SEQ ID NO: 800792 - DNA, 25 bp, Homo sapien
gagaactaatccaccttctgtccca

SEQ ID NO: 800793 - DNA, 25 bp, Homo sapien
tcaggagacatagtacgtggtgacc

SEQ ID NO: 800794 - DNA, 25 bp, Homo sapien
tggcgaaggcggcacggtcgtggct

SEQ ID NO: 800795 - DNA, 25 bp, Homo sapien
tcctctttggactcgctgttctccc

SEQ ID NO: 800796 - DNA, 25 bp, Homo sapien
caggttgatgacgttggtgatggac

SEQ ID NO: 800797 - DNA, 25 bp, Homo sapien
cacggtcgtggctatcggccaggtt

SEQ ID NO: 800798 - DNA, 25 bp, Homo sapien
aacttgtcgtgcctgttggttagca

SEQ ID NO: 800799 - DNA, 25 bp, Homo sapien
tggtctgatccccaggagctagttc

SEQ ID NO: 800800 - DNA, 25 bp, Homo sapien
ttctttggttttgggcgtgctggtc

SEQ ID NO: 800801 - DNA, 25 bp, Homo sapien
tctcggagagtgtccagaaacttgt

SEQ ID NO: 800802 - DNA, 25 bp, Homo sapien
agaggatcttccacaatctggggaa

SEQ ID NO: 800803 - DNA, 25 bp, Homo sapien
ccagcgtcgtggaaatgtggcacag

SEQ ID NO: 800804 - DNA, 25 bp, Homo sapien
tgtggcacagctgaacgaaagcgct

SEQ ID NO: 800805 - DNA, 25 bp, Homo sapien
aaaagctggacccacgtcttctctg

SEQ ID NO: 800806 - DNA, 25 bp, Homo sapien
acaaagcagttcagcgcgctgggct

SEQ ID NO: 800807 - DNA, 25 bp, Homo sapien
gccgctgcacagaaatggacttatc

SEQ ID NO: 800808 - DNA, 25 bp, Homo sapien
caaaagcctggtgctccaacatcag

SEQ ID NO: 800809 - DNA, 25 bp, Homo sapien
ttccccaggtacttcaggacgcagg

SEQ ID NO: 800810 - DNA, 25 bp, Homo sapien
ctgaaaacacaaagtaaggttcctg

SEQ ID NO: 800811 - DNA, 25 bp, Homo sapien
aacacaaagtaaggttcctgagtgc

SEQ ID NO: 800812 - DNA, 25 bp, Homo sapien
aagaggtaattaacaaactgaggcg

SEQ ID NO: 800813 - DNA, 25 bp, Homo sapien
aggtaattaacaaactgaggcgcac

SEQ ID NO: 800814 - DNA, 25 bp, Homo sapien
taacagggagtaaagctccgcaagg

SEQ ID NO: 800815 - DNA, 25 bp, Homo sapien
tgctcgtaagcaatcgcagtcgctg

SEQ ID NO: 800816 - DNA, 25 bp, Homo sapien
tctccgagtacttgcaccgcttctg

SEQ ID NO: 800817 - DNA, 25 bp, Homo sapien
tcaaagaacccgtgctgctcgtaag

SEQ ID NO: 800818 - DNA, 25 bp, Homo sapien
tataaatgacctctcattacacacc

SEQ ID NO: 800819 - DNA, 25 bp, Homo sapien
aatgacctctcattacacacccaag

SEQ ID NO: 800820 - DNA, 25 bp, Homo sapien
aagaaccgttataaatgacctctca

SEQ ID NO: 800821 - DNA, 25 bp, Homo sapien
cacccaagaccgtcagtggtctgag

SEQ ID NO: 800822 - DNA, 25 bp, Homo sapien
catctcaaaaaaagagaacgtgaac

SEQ ID NO: 800823 - DNA, 25 bp, Homo sapien
aaatagcaggggaggcgttactcct

SEQ ID NO: 800824 - DNA, 25 bp, Homo sapien
ttcttttttggctttatccattgcc

SEQ ID NO: 800825 - DNA, 25 bp, Homo sapien
gaggcgttactcctctcatgttctt

SEQ ID NO: 800826 - DNA, 25 bp, Homo sapien
tcttttttggctttatccattgcct

SEQ ID NO: 800827 - DNA, 25 bp, Homo sapien
aagctcaatcaccagcacactcatg

SEQ ID NO: 800828 - DNA, 25 bp, Homo sapien
agcaaaagctcaatcaccagcacac

SEQ ID NO: 800829 - DNA, 25 bp, Homo sapien
gctcaatcaccagcacactcatgaa

SEQ ID NO: 800830 - DNA, 25 bp, Homo sapien
aaaagctcaatcaccagcacactca

SEQ ID NO: 800831 - DNA, 25 bp, Homo sapien
gactgaccgtactccgtcagggctt

SEQ ID NO: 800832 - DNA, 25 bp, Homo sapien
ggcagtccagttggacacccgccag

SEQ ID NO: 800833 - DNA, 25 bp, Homo sapien
agggcttcccactggttcaattcct

SEQ ID NO: 800834 - DNA, 25 bp, Homo sapien
ccaggcgcactccaggacgaggtag

SEQ ID NO: 800835 - DNA, 25 bp, Homo sapien
atctccttcggacagctcacttcca

SEQ ID NO: 800836 - DNA, 25 bp, Homo sapien
agatggccaggtatccgcggtacat

SEQ ID NO: 800837 - DNA, 25 bp, Homo sapien
caggtatccgcggtacatgttcacc

SEQ ID NO: 800838 - DNA, 25 bp, Homo sapien
taggagaggcgtgtgcacgtgggac

SEQ ID NO: 800839 - DNA, 25 bp, Homo sapien
cactgtgaggatgtcttcaatcccg

SEQ ID NO: 800840 - DNA, 25 bp, Homo sapien
catgtttttctcaacgttttaactg

SEQ ID NO: 800841 - DNA, 25 bp, Homo sapien
aacaccgacatgtttttctcaacgt

SEQ ID NO: 800842 - DNA, 25 bp, Homo sapien
ttcaatcccgcagaaacaccgacat

SEQ ID NO: 800843 - DNA, 25 bp, Homo sapien
gactctgtaactgagggtggcacag

SEQ ID NO: 800844 - DNA, 25 bp, Homo sapien
tgctgaaaacagagcgatggactct

SEQ ID NO: 800845 - DNA, 25 bp, Homo sapien
cagctcccgccaaaagcttgctgaa

SEQ ID NO: 800846 - DNA, 25 bp, Homo sapien
tgaaattgcctagaacaatctgtgc

SEQ ID NO: 800847 - DNA, 25 bp, Homo sapien
ggctgtaagcctgcgttgatttgtg

SEQ ID NO: 800848 - DNA, 25 bp, Homo sapien
cttcctggagttcgatgatttgctg

SEQ ID NO: 800849 - DNA, 25 bp, Homo sapien
tgcagcttcctggagttcgatgatt

SEQ ID NO: 800850 - DNA, 25 bp, Homo sapien
gcgttgatttgtgcagcttcctgga

SEQ ID NO: 800851 - DNA, 25 bp, Homo sapien
tcgtcagacacgatgggcagtcggt

SEQ ID NO: 800852 - DNA, 25 bp, Homo sapien
ctccagtgggacaagtcgtcagaca

SEQ ID NO: 800853 - DNA, 25 bp, Homo sapien
ggcagtcggttcctccaggtcttca

SEQ ID NO: 800854 - DNA, 25 bp, Homo sapien
acacgatgggcagtcggttcctcca

SEQ ID NO: 800855 - DNA, 25 bp, Homo sapien
tgcatgccggaccaggtcggtttac

SEQ ID NO: 800856 - DNA, 25 bp, Homo sapien
gagcacaactcgtcctgggatggga

SEQ ID NO: 800857 - DNA, 25 bp, Homo sapien
cttcaacgcagagtgccatggctca

SEQ ID NO: 800858 - DNA, 25 bp, Homo sapien
tggctcagagcattgatccccccgg

SEQ ID NO: 800859 - DNA, 25 bp, Homo sapien
cccggcctgtacgattctgccccaa

SEQ ID NO: 800860 - DNA, 25 bp, Homo sapien
aggaatcattagcccacaccgatcc

SEQ ID NO: 800861 - DNA, 25 bp, Homo sapien
tcattagcccacaccgatcctcttt

SEQ ID NO: 800862 - DNA, 25 bp, Homo sapien
cacaccgatcctctttcaaagcact

SEQ ID NO: 800863 - DNA, 25 bp, Homo sapien
agcccacaccgatcctctttcaaag

SEQ ID NO: 800864 - DNA, 25 bp, Homo sapien
tccatactggatgatcgctgaagct

SEQ ID NO: 800865 - DNA, 25 bp, Homo sapien
tgcatgaaccccaagcatagcgtta

SEQ ID NO: 800866 - DNA, 25 bp, Homo sapien
tgaccagtccttgtttccgggcgat

SEQ ID NO: 800867 - DNA, 25 bp, Homo sapien
tatccagagctacattgaccagtcc

SEQ ID NO: 800868 - DNA, 25 bp, Homo sapien
cctcattcttcaagtgtcctgtccg

SEQ ID NO: 800869 - DNA, 25 bp, Homo sapien
cattcttcaagtgtcctgtccgcac

SEQ ID NO: 800870 - DNA, 25 bp, Homo sapien
ggcctcattcttcaagtgtcctgtc

SEQ ID NO: 800871 - DNA, 25 bp, Homo sapien
ctggcctcattcttcaagtgtcctg

SEQ ID NO: 800872 - DNA, 25 bp, Homo sapien
taaaattcggctgtcatctcttttg

SEQ ID NO: 800873 - DNA, 25 bp, Homo sapien
cattcccttcagtgcataaaattcg

SEQ ID NO: 800874 - DNA, 25 bp, Homo sapien
cttcagtgcataaaattcggctgtc

SEQ ID NO: 800875 - DNA, 25 bp, Homo sapien
ttgttgatctgagccaagaacattc

SEQ ID NO: 800876 - DNA, 25 bp, Homo sapien
gatttgctctcgttctgatgccggc

SEQ ID NO: 800877 - DNA, 25 bp, Homo sapien
gtgatggcagacacgcccaggtgca

SEQ ID NO: 800878 - DNA, 25 bp, Homo sapien
gctgccgctccttcacaaagatgtt

SEQ ID NO: 800879 - DNA, 25 bp, Homo sapien
ttctccaggtagtcgccccacatgg

SEQ ID NO: 800880 - DNA, 25 bp, Homo sapien
ccactggatgggtggcacaccaatg

SEQ ID NO: 800881 - DNA, 25 bp, Homo sapien
caccaatgcagtacttgtcgacggc

SEQ ID NO: 800882 - DNA, 25 bp, Homo sapien
gacggcatctgccaaagtgtttttg

SEQ ID NO: 800883 - DNA, 25 bp, Homo sapien
tgggatccaggccagccactggatg

SEQ ID NO: 800884 - DNA, 25 bp, Homo sapien
tccggatgggaaagtagaccgcttg

SEQ ID NO: 800885 - DNA, 25 bp, Homo sapien
ttcccgctgttctattttcagggtc

SEQ ID NO: 800886 - DNA, 25 bp, Homo sapien
gaccgcttggggatacacgcgtcca

SEQ ID NO: 800887 - DNA, 25 bp, Homo sapien
cgctcttgtagcgttcccgctgttc

SEQ ID NO: 800888 - DNA, 25 bp, Homo sapien
cccatgggccaaaggagcgctggtt

SEQ ID NO: 800889 - DNA, 25 bp, Homo sapien
acccatgggccaaaggagcgctggt

SEQ ID NO: 800890 - DNA, 25 bp, Homo sapien
ccatgggccaaaggagcgctggttc

SEQ ID NO: 800891 - DNA, 25 bp, Homo sapien
cacaacgccagtgtcagcgcaaaac

SEQ ID NO: 800892 - DNA, 25 bp, Homo sapien
tgtcagcgcaaaaccgacagacgcc

SEQ ID NO: 800893 - DNA, 25 bp, Homo sapien
accgacagacgccagggctcggagc

SEQ ID NO: 800894 - DNA, 25 bp, Homo sapien
cacacaacgccagtgtcagcgcaaa

SEQ ID NO: 800895 - DNA, 25 bp, Homo sapien
ctgatgcagaatgggactggttacc

SEQ ID NO: 800896 - DNA, 25 bp, Homo sapien
tgatgcagaatgggactggttaccc

SEQ ID NO: 800897 - DNA, 25 bp, Homo sapien
tgctgttgctcttatgggccctgga

SEQ ID NO: 800898 - DNA, 25 bp, Homo sapien
catgtgcatgattcggctgcagcgc

SEQ ID NO: 800899 - DNA, 25 bp, Homo sapien
tctgatcgacgatgccttccaggga

SEQ ID NO: 800900 - DNA, 25 bp, Homo sapien
gctgcagcgccacatgggtgctgtt

SEQ ID NO: 800901 - DNA, 25 bp, Homo sapien
ctgcgctggagaacatggtcgagac

SEQ ID NO: 800902 - DNA, 25 bp, Homo sapien
ggagtaacatttcgccaggccctgt

SEQ ID NO: 800903 - DNA, 25 bp, Homo sapien
cacttttctcaaacgccacggagta

SEQ ID NO: 800904 - DNA, 25 bp, Homo sapien
tgattttagcatcggacaccgctcc

SEQ ID NO: 800905 - DNA, 25 bp, Homo sapien
tgtgccccgtgcagtgatcagaaaa

SEQ ID NO: 800906 - DNA, 25 bp, Homo sapien
ttctaccccgtcttggatcctggca

SEQ ID NO: 800907 - DNA, 25 bp, Homo sapien
aacagagtgtaaccagtgtgccccg

SEQ ID NO: 800908 - DNA, 25 bp, Homo sapien
cctgggctgaaggaaattggactcc

SEQ ID NO: 800909 - DNA, 25 bp, Homo sapien
agacaaatctcgttttcacacagca

SEQ ID NO: 800910 - DNA, 25 bp, Homo sapien
taaccagatagtttcatgcacttcc

SEQ ID NO: 800911 - DNA, 25 bp, Homo sapien
tcatctctgggaaactgtaccagac

SEQ ID NO: 800912 - DNA, 25 bp, Homo sapien
gagtcagcaaagactatgtttctgg

SEQ ID NO: 800913 - DNA, 25 bp, Homo sapien
ggtgaaggagcattcatactttttt

SEQ ID NO: 800914 - DNA, 25 bp, Homo sapien
gaacatggcttatattttcatctgg

SEQ ID NO: 800915 - DNA, 25 bp, Homo sapien
gaagaacatggcttatattttcatc

SEQ ID NO: 800916 - DNA, 25 bp, Homo sapien
atctggtgaaggagcattcatactt

SEQ ID NO: 800917 - DNA, 25 bp, Homo sapien
ggatgccatgtactggctgcaggct

SEQ ID NO: 800918 - DNA, 25 bp, Homo sapien
tacttcaccgtgttgtaaccggctg

SEQ ID NO: 800919 - DNA, 25 bp, Homo sapien
gaagagaactcgaagagatgcccat

SEQ ID NO: 800920 - DNA, 25 bp, Homo sapien
ctattgggtcggcatgggttctctc

SEQ ID NO: 800921 - DNA, 25 bp, Homo sapien
aatacctgcaagcagatgaggccaa

SEQ ID NO: 800922 - DNA, 25 bp, Homo sapien
atacctgcaagcagatgaggccaag

SEQ ID NO: 800923 - DNA, 25 bp, Homo sapien
tgcggcctgccccacttgttggtca

SEQ ID NO: 800924 - DNA, 25 bp, Homo sapien
gtcagttgcccaagtgacgccggct

SEQ ID NO: 800925 - DNA, 25 bp, Homo sapien
acgccggctggcgagtgctggagac

SEQ ID NO: 800926 - DNA, 25 bp, Homo sapien
cagtggcatgctgaacccagaccag

SEQ ID NO: 800927 - DNA, 25 bp, Homo sapien
cagggcgactggaggtcaggacgaa

SEQ ID NO: 800928 - DNA, 25 bp, Homo sapien
cgactggaggtcaggacgaacccaa

SEQ ID NO: 800929 - DNA, 25 bp, Homo sapien
cgaacccaaccaaaactgcagcaaa

SEQ ID NO: 800930 - DNA, 25 bp, Homo sapien
gaacccaaccaaaactgcagcaaag

SEQ ID NO: 800931 - DNA, 25 bp, Homo sapien
ttccacttcagctgtctgtgccgag

SEQ ID NO: 800932 - DNA, 25 bp, Homo sapien
taataatgcgttggctttggcatca

SEQ ID NO: 800933 - DNA, 25 bp, Homo sapien
tcatggatcctggaacgctgaagtc

SEQ ID NO: 800934 - DNA, 25 bp, Homo sapien
aaattgctcaagaaccggcactttt

SEQ ID NO: 800935 - DNA, 25 bp, Homo sapien
aacaagtgcctcttggtggtctcct

SEQ ID NO: 800936 - DNA, 25 bp, Homo sapien
ctctgtgaggcaggcgtcgttcatg

SEQ ID NO: 800937 - DNA, 25 bp, Homo sapien
gacgaggtatgggtagatcttgcca

SEQ ID NO: 800938 - DNA, 25 bp, Homo sapien
attgtgtccccggatgtacagccgc

SEQ ID NO: 800939 - DNA, 25 bp, Homo sapien
gctgcttgtagatctccacaaggga

SEQ ID NO: 800940 - DNA, 25 bp, Homo sapien
gtcatgctcgatgcccttcttggcg

SEQ ID NO: 800941 - DNA, 25 bp, Homo sapien
tagccagccggtcatagtaacggga

SEQ ID NO: 800942 - DNA, 25 bp, Homo sapien
tgtcctccacgaggcgcatctgtgg

SEQ ID NO: 800943 - DNA, 25 bp, Homo sapien
tgcgcggcaccatgttactctgaac

SEQ ID NO: 800944 - DNA, 25 bp, Homo sapien
ggtgaacatcttccggaacgtccag

SEQ ID NO: 800945 - DNA, 25 bp, Homo sapien
tatttaaatgcaggacgaattccgc

SEQ ID NO: 800946 - DNA, 25 bp, Homo sapien
gaattccgcgaagcctatcagagcc

SEQ ID NO: 800947 - DNA, 25 bp, Homo sapien
caatcatggacgctgtcaacgggcc

SEQ ID NO: 800948 - DNA, 25 bp, Homo sapien
cccgatggtggtcagaaactcagaa

SEQ ID NO: 800949 - DNA, 25 bp, Homo sapien
cagtcgcgtcgtttatgtcaaatcg

SEQ ID NO: 800950 - DNA, 25 bp, Homo sapien
aaatgggacaggacggttggcatcc

SEQ ID NO: 800951 - DNA, 25 bp, Homo sapien
tctagcctgcgcctgtgataggacg

SEQ ID NO: 800952 - DNA, 25 bp, Homo sapien
tgctgcgactgaggcccaatctgtt

SEQ ID NO: 800953 - DNA, 25 bp, Homo sapien
ggcagcgcggacctagatgacaaag

SEQ ID NO: 800954 - DNA, 25 bp, Homo sapien
cgttccaagcactacagacaagagt

SEQ ID NO: 800955 - DNA, 25 bp, Homo sapien
cggagaaccgttttcagaatgccat

SEQ ID NO: 800956 - DNA, 25 bp, Homo sapien
tgatggcggtgacggctttctgaac

SEQ ID NO: 800957 - DNA, 25 bp, Homo sapien
tgtgccaagcaatgatctcgtcccg

SEQ ID NO: 800958 - DNA, 25 bp, Homo sapien
tccatgcggcacagattgtccaggc

SEQ ID NO: 800959 - DNA, 25 bp, Homo sapien
tagaagacatccgaagagccagaaa

SEQ ID NO: 800960 - DNA, 25 bp, Homo sapien
gaacgctcaacgagattcccaaggc

SEQ ID NO: 800961 - DNA, 25 bp, Homo sapien
caaaggtctgtacaaaagcacgaag

SEQ ID NO: 800962 - DNA, 25 bp, Homo sapien
taaccgcaacccagtgaaactatgg

SEQ ID NO: 800963 - DNA, 25 bp, Homo sapien
gacaccaggcttcatggagcgcaag

SEQ ID NO: 800964 - DNA, 25 bp, Homo sapien
cacacacgttacatggcagcagtcc

SEQ ID NO: 800965 - DNA, 25 bp, Homo sapien
taacttgagtccagtcagaccggca

SEQ ID NO: 800966 - DNA, 25 bp, Homo sapien
aactgcgatctcaagctgccaaggg

SEQ ID NO: 800967 - DNA, 25 bp, Homo sapien
ttatagtgttcagcgtttcaacctg

SEQ ID NO: 800968 - DNA, 25 bp, Homo sapien
actgctgtctcccttactgttactg

SEQ ID NO: 800969 - DNA, 25 bp, Homo sapien
tgaataacatacagaactctgctcc

SEQ ID NO: 800970 - DNA, 25 bp, Homo sapien
tacatctttatacgttgtgcaccca

SEQ ID NO: 800971 - DNA, 25 bp, Homo sapien
aattcagattaaggtggtcacccaa

SEQ ID NO: 800972 - DNA, 25 bp, Homo sapien
ccaacccgagatgtcaggaaaggcc

SEQ ID NO: 800973 - DNA, 25 bp, Homo sapien
gacccctgagcttgttcggacgtat

SEQ ID NO: 800974 - DNA, 25 bp, Homo sapien
gcagccttcccgaaacatagtatgg

SEQ ID NO: 800975 - DNA, 25 bp, Homo sapien
gcaggaatgttgcatttgacgcctt

SEQ ID NO: 800976 - DNA, 25 bp, Homo sapien
tgccgggtgttgcttcagcccagag

SEQ ID NO: 800977 - DNA, 25 bp, Homo sapien
ggtggtatccaaaatcttcagtaac

SEQ ID NO: 800978 - DNA, 25 bp, Homo sapien
ctccgggatgaggtcagaggcccca

SEQ ID NO: 800979 - DNA, 25 bp, Homo sapien
aacagagtctagctcatggccacca

SEQ ID NO: 800980 - DNA, 25 bp, Homo sapien
cctgaggggaaagggttgtctctct

SEQ ID NO: 800981 - DNA, 25 bp, Homo sapien
cagaccaaaagcatccagcttctgt

SEQ ID NO: 800982 - DNA, 25 bp, Homo sapien
aaggcaacagagtctagctcatggc

SEQ ID NO: 800983 - DNA, 25 bp, Homo sapien
ccatatgagtcctatgagaagctct

SEQ ID NO: 800984 - DNA, 25 bp, Homo sapien
ttttcagctttaaccggatcgacat

SEQ ID NO: 800985 - DNA, 25 bp, Homo sapien
gaagctctacgagaagctgctgaca

SEQ ID NO: 800986 - DNA, 25 bp, Homo sapien
ggactgcccacacggtgactctctt

SEQ ID NO: 800987 - DNA, 25 bp, Homo sapien
cagaaaaacacaggggacatggaga

SEQ ID NO: 800988 - DNA, 25 bp, Homo sapien
acacaggggacatggagaactcatc

SEQ ID NO: 800989 - DNA, 25 bp, Homo sapien
aaaaacacaggggacatggagaact

SEQ ID NO: 800990 - DNA, 25 bp, Homo sapien
aaacacaggggacatggagaactca

SEQ ID NO: 800991 - DNA, 25 bp, Homo sapien
tactgtgtgttgattgggcacagtg

SEQ ID NO: 800992 - DNA, 25 bp, Homo sapien
tttactgtgtgttgattgggcacag

SEQ ID NO: 800993 - DNA, 25 bp, Homo sapien
gcacagtggctcccagcacgttgag

SEQ ID NO: 800994 - DNA, 25 bp, Homo sapien
ctcccagcacgttgagagggcaagg

SEQ ID NO: 800995 - DNA, 25 bp, Homo sapien
attttttggtttgctacgatagctt

SEQ ID NO: 800996 - DNA, 25 bp, Homo sapien
tttggtttgctacgatagcttctta

SEQ ID NO: 800997 - DNA, 25 bp, Homo sapien
gtttgctacgatagcttcttaaagg

SEQ ID NO: 800998 - DNA, 25 bp, Homo sapien
ttgctacgatagcttcttaaaggat

SEQ ID NO: 800999 - DNA, 25 bp, Homo sapien
aagcaccgcggccaggaagtcacgg

SEQ ID NO: 801000 - DNA, 25 bp, Homo sapien
cgcggccaggaagtcacggcgtcct

SEQ ID NO: 801001 - DNA, 25 bp, Homo sapien
ctggtaagcaccgcggccaggaagt

SEQ ID NO: 801002 - DNA, 25 bp, Homo sapien
aggatgctgacgttcacgttttttt

SEQ ID NO: 801003 - DNA, 25 bp, Homo sapien
gcagggctattcgatgacgcgtcta

SEQ ID NO: 801004 - DNA, 25 bp, Homo sapien
cataggcggcctggataaaatagac

SEQ ID NO: 801005 - DNA, 25 bp, Homo sapien
tgcagagcaaaaaccccgctttggt

SEQ ID NO: 801006 - DNA, 25 bp, Homo sapien
aattgcggaaacatgccctatcggc

SEQ ID NO: 801007 - DNA, 25 bp, Homo sapien
gtggtaatgtgtgagataagtgttt

SEQ ID NO: 801008 - DNA, 25 bp, Homo sapien
tgcttggaattgtggtacctccttt

SEQ ID NO: 801009 - DNA, 25 bp, Homo sapien
tttgtggtggtaatgtgtgagataa

SEQ ID NO: 801010 - DNA, 25 bp, Homo sapien
tgagataagtgtttgcttggaattg

SEQ ID NO: 801011 - DNA, 25 bp, Homo sapien
gacacgtggcccttaggttgagaag

SEQ ID NO: 801012 - DNA, 25 bp, Homo sapien
taccgagatggcagtattaggcggc

SEQ ID NO: 801013 - DNA, 25 bp, Homo sapien
taggcggctgcacgaaggaagtttc

SEQ ID NO: 801014 - DNA, 25 bp, Homo sapien
tagatttcactcgagcggtctgctg

SEQ ID NO: 801015 - DNA, 25 bp, Homo sapien
ctgggaggatatattttgtagatca

SEQ ID NO: 801016 - DNA, 25 bp, Homo sapien
gctgggaagtcagaagtacagtttc

SEQ ID NO: 801017 - DNA, 25 bp, Homo sapien
agatcataataaccgaacaacccag

SEQ ID NO: 801018 - DNA, 25 bp, Homo sapien
gacccaaggttacaccacatcatga

SEQ ID NO: 801019 - DNA, 25 bp, Homo sapien
tgaaaatgagaatgcctcgtcctgc

SEQ ID NO: 801020 - DNA, 25 bp, Homo sapien
gaatgaggtgtctcttttgtacccc

SEQ ID NO: 801021 - DNA, 25 bp, Homo sapien
tctggccgggaacatttaatgacac

SEQ ID NO: 801022 - DNA, 25 bp, Homo sapien
gagcccctgttccttatcatggtta

SEQ ID NO: 801023 - DNA, 25 bp, Homo sapien
cttctgtaggacagacaacccaggg

SEQ ID NO: 801024 - DNA, 25 bp, Homo sapien
caacccagggtcttcaacaaataga

SEQ ID NO: 801025 - DNA, 25 bp, Homo sapien
ggacctggccaacaagcagtaattg

SEQ ID NO: 801026 - DNA, 25 bp, Homo sapien
tcacggccccaagggaatataatca

SEQ ID NO: 801027 - DNA, 25 bp, Homo sapien
acacagtgagacttaatccccccca

SEQ ID NO: 801028 - DNA, 25 bp, Homo sapien
cacagtgagacttaatcccccccaa

SEQ ID NO: 801029 - DNA, 25 bp, Homo sapien
tggagttacagctgcttgccaccac

SEQ ID NO: 801030 - DNA, 25 bp, Homo sapien
tattaaacttaagtcagaatgttct

SEQ ID NO: 801031 - DNA, 25 bp, Homo sapien
gagttacagctgcttgccaccacgc

SEQ ID NO: 801032 - DNA, 25 bp, Homo sapien
cttaagtcagaatgttcttaagaaa

SEQ ID NO: 801033 - DNA, 25 bp, Homo sapien
tcagcaggaggtgtaattaatagtg

SEQ ID NO: 801034 - DNA, 25 bp, Homo sapien
gataacatgggtgaaatcaacaaac

SEQ ID NO: 801035 - DNA, 25 bp, Homo sapien
cactaaaaagactgaggtggaaagg

SEQ ID NO: 801036 - DNA, 25 bp, Homo sapien
gccaggcaaatgctagacaaacagt

SEQ ID NO: 801037 - DNA, 25 bp, Homo sapien
agtgtgcaaagcttccaggctctcg

SEQ ID NO: 801038 - DNA, 25 bp, Homo sapien
gatcaagcgctaatttctgccaggc

SEQ ID NO: 801039 - DNA, 25 bp, Homo sapien
gaacatggcataggagtcagacaca

SEQ ID NO: 801040 - DNA, 25 bp, Homo sapien
cattgtggcgcttgcaaaacagttg

SEQ ID NO: 801041 - DNA, 25 bp, Homo sapien
gttttaaatgatcttatgaatctat

SEQ ID NO: 801042 - DNA, 25 bp, Homo sapien
ttaagttttaaatgatcttatgaat

SEQ ID NO: 801043 - DNA, 25 bp, Homo sapien
taagttttaaatgatcttatgaatc

SEQ ID NO: 801044 - DNA, 25 bp, Homo sapien
agttttaaatgatcttatgaatcta

SEQ ID NO: 801045 - DNA, 25 bp, Homo sapien
tggccacacgccctgcccgaggcat

SEQ ID NO: 801046 - DNA, 25 bp, Homo sapien
gcaatgaggattccaggcgcagctg

SEQ ID NO: 801047 - DNA, 25 bp, Homo sapien
catggccaagcaatgaggattccag

SEQ ID NO: 801048 - DNA, 25 bp, Homo sapien
ctccactggggggtgggcatggcca

SEQ ID NO: 801049 - DNA, 25 bp, Homo sapien
tcatgtgatcccttgcagggagctg

SEQ ID NO: 801050 - DNA, 25 bp, Homo sapien
gagctgggaagtgcagacttctgtt

SEQ ID NO: 801051 - DNA, 25 bp, Homo sapien
ctgggaagtgcagacttctgttttc

SEQ ID NO: 801052 - DNA, 25 bp, Homo sapien
gggagctgggaagtgcagacttctg

SEQ ID NO: 801053 - DNA, 25 bp, Homo sapien
ctgtattgtggtccggaagtgacac

SEQ ID NO: 801054 - DNA, 25 bp, Homo sapien
cctctgtattgtggtccggaagtga

SEQ ID NO: 801055 - DNA, 25 bp, Homo sapien
tattgtggtccggaagtgacacaca

SEQ ID NO: 801056 - DNA, 25 bp, Homo sapien
ctgctcctctgtattgtggtccgga

SEQ ID NO: 801057 - DNA, 25 bp, Homo sapien
gattatgggtctatgtgggagggag

SEQ ID NO: 801058 - DNA, 25 bp, Homo sapien
cttccaaccctgctatcgctgtaag

SEQ ID NO: 801059 - DNA, 25 bp, Homo sapien
cgctgtaagcagtagggaaaggaag

SEQ ID NO: 801060 - DNA, 25 bp, Homo sapien
agataagagggtctcagcaaaatgc

SEQ ID NO: 801061 - DNA, 25 bp, Homo sapien
tgggaaaggaattactgcacggacc

SEQ ID NO: 801062 - DNA, 25 bp, Homo sapien
gactattgaaacagccaccaaagag

SEQ ID NO: 801063 - DNA, 25 bp, Homo sapien
tagaccctgtgttagatactgtgga

SEQ ID NO: 801064 - DNA, 25 bp, Homo sapien
gaatccattccgtgagagtgagaac

SEQ ID NO: 801065 - DNA, 25 bp, Homo sapien
tgtcctactgtgtgtgtttattgta

SEQ ID NO: 801066 - DNA, 25 bp, Homo sapien
tttattgtagacaggacaagcaatt

SEQ ID NO: 801067 - DNA, 25 bp, Homo sapien
tccatcattgaaaccagaaaacatc

SEQ ID NO: 801068 - DNA, 25 bp, Homo sapien
ttctctttgaagttttgtgtcctac

SEQ ID NO: 801069 - DNA, 25 bp, Homo sapien
aatatttcatcttcaccgcagtagt

SEQ ID NO: 801070 - DNA, 25 bp, Homo sapien
ccgcagtagtgcctgtgattaatgc

SEQ ID NO: 801071 - DNA, 25 bp, Homo sapien
tcaatccttaaatcacttgggaaaa

SEQ ID NO: 801072 - DNA, 25 bp, Homo sapien
cagtcatgagctgctaacgaaacaa

SEQ ID NO: 801073 - DNA, 25 bp, Homo sapien
gaagctgcccaggttttcctgtccc

SEQ ID NO: 801074 - DNA, 25 bp, Homo sapien
aggaggaagctgcccaggttttcct

SEQ ID NO: 801075 - DNA, 25 bp, Homo sapien
agaggaggaagctgcccaggttttc

SEQ ID NO: 801076 - DNA, 25 bp, Homo sapien
aggaagctgcccaggttttcctgtc

SEQ ID NO: 801077 - DNA, 25 bp, Homo sapien
ctgtcagtgcccaaaggcccccaac

SEQ ID NO: 801078 - DNA, 25 bp, Homo sapien
gtcagtgcccaaaggcccccaactg

SEQ ID NO: 801079 - DNA, 25 bp, Homo sapien
cagtgcccaaaggcccccaactggg

SEQ ID NO: 801080 - DNA, 25 bp, Homo sapien
tgtcagtgcccaaaggcccccaact

SEQ ID NO: 801081 - DNA, 25 bp, Homo sapien
gtttccagactgctatgattttatc

SEQ ID NO: 801082 - DNA, 25 bp, Homo sapien
tttgaggagcttgtcttgggtgtgg

SEQ ID NO: 801083 - DNA, 25 bp, Homo sapien
tgcatccctacaccatgtgtacagt

SEQ ID NO: 801084 - DNA, 25 bp, Homo sapien
tcagcaatgcgccaagaggttttag

SEQ ID NO: 801085 - DNA, 25 bp, Homo sapien
ctaccaagatggcgcagtgaaggtg

SEQ ID NO: 801086 - DNA, 25 bp, Homo sapien
tggttcctgcagagagtcctgttgg

SEQ ID NO: 801087 - DNA, 25 bp, Homo sapien
ggcagctcgttggaacaatggtttt

SEQ ID NO: 801088 - DNA, 25 bp, Homo sapien
agtggagactgttcccctcgccgct

SEQ ID NO: 801089 - DNA, 25 bp, Homo sapien
ttttccttgggtccagcatcgtttg

SEQ ID NO: 801090 - DNA, 25 bp, Homo sapien
gtttgttgctgactatatcaagcag

SEQ ID NO: 801091 - DNA, 25 bp, Homo sapien
cctgcccggcctaacatttcaaaat

SEQ ID NO: 801092 - DNA, 25 bp, Homo sapien
ccagcatcgtttgttgctgactata

SEQ ID NO: 801093 - DNA, 25 bp, Homo sapien
agatactgcttaaaacctttttgtg

SEQ ID NO: 801094 - DNA, 25 bp, Homo sapien
tcagatactgcttaaaacctttttg

SEQ ID NO: 801095 - DNA, 25 bp, Homo sapien
cagatactgcttaaaacctttttgt

SEQ ID NO: 801096 - DNA, 25 bp, Homo sapien
gcaggaacggctccagcatcaagat

SEQ ID NO: 801097 - DNA, 25 bp, Homo sapien
cagcccggagccgtaaccttgaggc

SEQ ID NO: 801098 - DNA, 25 bp, Homo sapien
atcgttggcgggagatgtcgaaccc

SEQ ID NO: 801099 - DNA, 25 bp, Homo sapien
tggatccgcggctgcccgatcgttg

SEQ ID NO: 801100 - DNA, 25 bp, Homo sapien
ccaccgtatggtaatgaaagtgttc

SEQ ID NO: 801101 - DNA, 25 bp, Homo sapien
atgattttgccccaccgtatggtaa

SEQ ID NO: 801102 - DNA, 25 bp, Homo sapien
ggctggtagcttaggtgtagtaaat

SEQ ID NO: 801103 - DNA, 25 bp, Homo sapien
gctataatggctggtagcttaggtg

SEQ ID NO: 801104 - DNA, 25 bp, Homo sapien
ttaactgagtgtgatggcgcacagc

SEQ ID NO: 801105 - DNA, 25 bp, Homo sapien
ttatagatgccaacgaccacgcccg

SEQ ID NO: 801106 - DNA, 25 bp, Homo sapien
cctgcccatctttgctactctgtgg

SEQ ID NO: 801107 - DNA, 25 bp, Homo sapien
ccatctttgctactctgtggccaaa

SEQ ID NO: 801108 - DNA, 25 bp, Homo sapien
cactgggcaacttggaggattaaat

SEQ ID NO: 801109 - DNA, 25 bp, Homo sapien
actgggcaacttggaggattaaatg

SEQ ID NO: 801110 - DNA, 25 bp, Homo sapien
ccacactgggcaacttggaggatta

SEQ ID NO: 801111 - DNA, 25 bp, Homo sapien
cacactgggcaacttggaggattaa

SEQ ID NO: 801112 - DNA, 25 bp, Homo sapien
atgcccggcctattttattcattta

SEQ ID NO: 801113 - DNA, 25 bp, Homo sapien
ccatgcccggcctattttattcatt

SEQ ID NO: 801114 - DNA, 25 bp, Homo sapien
catgcccggcctattttattcattt

SEQ ID NO: 801115 - DNA, 25 bp, Homo sapien
tcatagggcttgttcatggcttcaa

SEQ ID NO: 801116 - DNA, 25 bp, Homo sapien
gacttggtcaccctgttcagactgg

SEQ ID NO: 801117 - DNA, 25 bp, Homo sapien
cagcaggacctcttaatgtcatagg

SEQ ID NO: 801118 - DNA, 25 bp, Homo sapien
gaaaggcatagggtccacatcgtcc

SEQ ID NO: 801119 - DNA, 25 bp, Homo sapien
aactgaccatgcacaatcaattgag

SEQ ID NO: 801120 - DNA, 25 bp, Homo sapien
cagtaatgagaagggtggggggaag

SEQ ID NO: 801121 - DNA, 25 bp, Homo sapien
aagactaagtgcagtaatgagaagg

SEQ ID NO: 801122 - DNA, 25 bp, Homo sapien
actaagtgcagtaatgagaagggtg

SEQ ID NO: 801123 - DNA, 25 bp, Homo sapien
tgggttcatctgctggatatcatcc

SEQ ID NO: 801124 - DNA, 25 bp, Homo sapien
tgtctaggacactggcctcattcag

SEQ ID NO: 801125 - DNA, 25 bp, Homo sapien
cgttggcgcagattgtctaggacac

SEQ ID NO: 801126 - DNA, 25 bp, Homo sapien
ctcatgttggtgtagcgttggcgca

SEQ ID NO: 801127 - DNA, 25 bp, Homo sapien
gaagatggtcagctgatttttcctc

SEQ ID NO: 801128 - DNA, 25 bp, Homo sapien
gctgatttttcctcctggtaccctc

SEQ ID NO: 801129 - DNA, 25 bp, Homo sapien
tcagctgatttttcctcctggtacc

SEQ ID NO: 801130 - DNA, 25 bp, Homo sapien
gagggaagatggtcagctgattttt

SEQ ID NO: 801131 - DNA, 25 bp, Homo sapien
tgaggcggcatctctgtgcgcttct

SEQ ID NO: 801132 - DNA, 25 bp, Homo sapien
gggttgaccgtcacgcagaacaagc

SEQ ID NO: 801133 - DNA, 25 bp, Homo sapien
tgcccttgtacatgttagccacacg

SEQ ID NO: 801134 - DNA, 25 bp, Homo sapien
cataagcatgtcgtggtaggcgttg

SEQ ID NO: 801135 - DNA, 25 bp, Homo sapien
cccagcagagcccaccccgacgcac

SEQ ID NO: 801136 - DNA, 25 bp, Homo sapien
ccctgccccagcagagcccaccccg

SEQ ID NO: 801137 - DNA, 25 bp, Homo sapien
cctgccccagcagagcccaccccga

SEQ ID NO: 801138 - DNA, 25 bp, Homo sapien
tgccccagcagagcccaccccgacg

SEQ ID NO: 801139 - DNA, 25 bp, Homo sapien
tgattagcatagactgattctcacg

SEQ ID NO: 801140 - DNA, 25 bp, Homo sapien
gattagcatagactgattctcacga

SEQ ID NO: 801141 - DNA, 25 bp, Homo sapien
attagcatagactgattctcacgat

SEQ ID NO: 801142 - DNA, 25 bp, Homo sapien
gtgattagcatagactgattctcac

SEQ ID NO: 801143 - DNA, 25 bp, Homo sapien
tctgtggtctgtttgccagttcctc

SEQ ID NO: 801144 - DNA, 25 bp, Homo sapien
ggtctgtttgccagttcctccaatg

SEQ ID NO: 801145 - DNA, 25 bp, Homo sapien
tcttatctgtggtctgtttgccagt

SEQ ID NO: 801146 - DNA, 25 bp, Homo sapien
tgtttgccagttcctccaatgttgg

SEQ ID NO: 801147 - DNA, 25 bp, Homo sapien
agtcagttgaccagttggctgctgc

SEQ ID NO: 801148 - DNA, 25 bp, Homo sapien
cagcacagggtttgcctggatgact

SEQ ID NO: 801149 - DNA, 25 bp, Homo sapien
agcgagaggagttgttgttcctggt

SEQ ID NO: 801150 - DNA, 25 bp, Homo sapien
tttgcctggatgacttgatcctcca

SEQ ID NO: 801151 - DNA, 25 bp, Homo sapien
ggcctccagcacagggtttgcctgg

SEQ ID NO: 801152 - DNA, 25 bp, Homo sapien
ctctctatgtcggctccagccagtt

SEQ ID NO: 801153 - DNA, 25 bp, Homo sapien
agctctctatgtcggctccagccag

SEQ ID NO: 801154 - DNA, 25 bp, Homo sapien
gctctctatgtcggctccagccagt

SEQ ID NO: 801155 - DNA, 25 bp, Homo sapien
tctctatgtcggctccagccagttt

SEQ ID NO: 801156 - DNA, 25 bp, Homo sapien
gaagatcctggtgagtacacagctg

SEQ ID NO: 801157 - DNA, 25 bp, Homo sapien
gatcctggtgagtacacagctgttt

SEQ ID NO: 801158 - DNA, 25 bp, Homo sapien
gtgaagatcctggtgagtacacagc

SEQ ID NO: 801159 - DNA, 25 bp, Homo sapien
aagatcctggtgagtacacagctgt

SEQ ID NO: 801160 - DNA, 25 bp, Homo sapien
ggtagcttctctcggctgcttgctg

SEQ ID NO: 801161 - DNA, 25 bp, Homo sapien
gatgtggtagcttctctcggctgct

SEQ ID NO: 801162 - DNA, 25 bp, Homo sapien
gctgtgagatgacacgagatttctc

SEQ ID NO: 801163 - DNA, 25 bp, Homo sapien
gatgacacgagatttctctaagaga

SEQ ID NO: 801164 - DNA, 25 bp, Homo sapien
ggtggatagacataaaggtctttac

SEQ ID NO: 801165 - DNA, 25 bp, Homo sapien
ttagggttggggaccagcagcaaac

SEQ ID NO: 801166 - DNA, 25 bp, Homo sapien
gggttggggaccagcagcaaactct

SEQ ID NO: 801167 - DNA, 25 bp, Homo sapien
cttagggttggggaccagcagcaaa

SEQ ID NO: 801168 - DNA, 25 bp, Homo sapien
tagggttggggaccagcagcaaact

SEQ ID NO: 801169 - DNA, 25 bp, Homo sapien
agtggtgacgccttggctcacccag

SEQ ID NO: 801170 - DNA, 25 bp, Homo sapien
gtgacgccttggctcacccagtggt

SEQ ID NO: 801171 - DNA, 25 bp, Homo sapien
ttgtcatccatgttgtccacagtgg

SEQ ID NO: 801172 - DNA, 25 bp, Homo sapien
cgccttggctcacccagtggtattc

SEQ ID NO: 801173 - DNA, 25 bp, Homo sapien
agagacaaagtcatgtgactcctgg

SEQ ID NO: 801174 - DNA, 25 bp, Homo sapien
caacagagacaaagtcatgtgactc

SEQ ID NO: 801175 - DNA, 25 bp, Homo sapien
gccactgcggcagggcatggacgct

SEQ ID NO: 801176 - DNA, 25 bp, Homo sapien
catggacgctggagttggacacccc

SEQ ID NO: 801177 - DNA, 25 bp, Homo sapien
ttatacacggccatcttctcctcgg

SEQ ID NO: 801178 - DNA, 25 bp, Homo sapien
gctgaagcccagtacgtcaaaggct

SEQ ID NO: 801179 - DNA, 25 bp, Homo sapien
tgttcccaaagtgcatgatacctcc

SEQ ID NO: 801180 - DNA, 25 bp, Homo sapien
gatacctcccgtcagcttatacacg

SEQ ID NO: 801181 - DNA, 25 bp, Homo sapien
gagcagcccaagccccagcacccac

SEQ ID NO: 801182 - DNA, 25 bp, Homo sapien
ccctgagcagcccaagccccagcac

SEQ ID NO: 801183 - DNA, 25 bp, Homo sapien
cttgtccctgagcagcccaagcccc

SEQ ID NO: 801184 - DNA, 25 bp, Homo sapien
ctgagcagcccaagccccagcaccc

SEQ ID NO: 801185 - DNA, 25 bp, Homo sapien
tgagtgcaaggaagatgttgccatg

SEQ ID NO: 801186 - DNA, 25 bp, Homo sapien
gagtgcaaggaagatgttgccatgc

SEQ ID NO: 801187 - DNA, 25 bp, Homo sapien
aggcaggtgagtgcaaggaagatgt

SEQ ID NO: 801188 - DNA, 25 bp, Homo sapien
cggggcctggtaatgcctttctgca

SEQ ID NO: 801189 - DNA, 25 bp, Homo sapien
tgactcggggcctggtaatgccttt

SEQ ID NO: 801190 - DNA, 25 bp, Homo sapien
gccaactttgactcggggcctggta

SEQ ID NO: 801191 - DNA, 25 bp, Homo sapien
attgccaactttgactcggggcctg

SEQ ID NO: 801192 - DNA, 25 bp, Homo sapien
ggagttttggcactgttccatgttc

SEQ ID NO: 801193 - DNA, 25 bp, Homo sapien
gttttggcactgttccatgttctgg

SEQ ID NO: 801194 - DNA, 25 bp, Homo sapien
ttggcactgttccatgttctggcct

SEQ ID NO: 801195 - DNA, 25 bp, Homo sapien
atggagttttggcactgttccatgt

SEQ ID NO: 801196 - DNA, 25 bp, Homo sapien
acttgaacatcttgtcatagacagc

SEQ ID NO: 801197 - DNA, 25 bp, Homo sapien
tgcatcttggtgtccaaggtcttgt

SEQ ID NO: 801198 - DNA, 25 bp, Homo sapien
aaggtcttgttaatcctggccacca

SEQ ID NO: 801199 - DNA, 25 bp, Homo sapien
gcgatgtccagcactccaatgaaga

SEQ ID NO: 801200 - DNA, 25 bp, Homo sapien
ggtgaagttgatgcatagctgctca

SEQ ID NO: 801201 - DNA, 25 bp, Homo sapien
acatgtggtggttgaagaactgctg

SEQ ID NO: 801202 - DNA, 25 bp, Homo sapien
gctccagcacgaacatgtggtggtt

SEQ ID NO: 801203 - DNA, 25 bp, Homo sapien
aagttgatgcatagctgctcaaagc

SEQ ID NO: 801204 - DNA, 25 bp, Homo sapien
cccactcgatgccttccctcttgta

SEQ ID NO: 801205 - DNA, 25 bp, Homo sapien
gaaggtcgaggccaaagtcgatgaa

SEQ ID NO: 801206 - DNA, 25 bp, Homo sapien
gatgaagacccactcgatgccttcc

SEQ ID NO: 801207 - DNA, 25 bp, Homo sapien
gccaaagtcgatgaagacccactcg

SEQ ID NO: 801208 - DNA, 25 bp, Homo sapien
tctctccaatccctcctttgagaag

SEQ ID NO: 801209 - DNA, 25 bp, Homo sapien
tgccagtgacatcccttggccctgg

SEQ ID NO: 801210 - DNA, 25 bp, Homo sapien
ggtggtgtcactgactcccctgaag

SEQ ID NO: 801211 - DNA, 25 bp, Homo sapien
gctagaggtcataccaaggaaggtc

SEQ ID NO: 801212 - DNA, 25 bp, Homo sapien
agggctgccttgaacgtggcatcgg

SEQ ID NO: 801213 - DNA, 25 bp, Homo sapien
ggaagacgcactgttcctccaagat

SEQ ID NO: 801214 - DNA, 25 bp, Homo sapien
gggaagacgcactgttcctccaaga

SEQ ID NO: 801215 - DNA, 25 bp, Homo sapien
cttgaacgtggcatcggtggctttg

SEQ ID NO: 801216 - DNA, 25 bp, Homo sapien
ggtgcctgcgtagtgaaccagctcg

SEQ ID NO: 801217 - DNA, 25 bp, Homo sapien
aaccagctcgaagtggacctcgggc

SEQ ID NO: 801218 - DNA, 25 bp, Homo sapien
gcgtagtgaaccagctcgaagtgga

SEQ ID NO: 801219 - DNA, 25 bp, Homo sapien
tagtgaaccagctcgaagtggacct

SEQ ID NO: 801220 - DNA, 25 bp, Homo sapien
agaagggccaggattgccacactcg

SEQ ID NO: 801221 - DNA, 25 bp, Homo sapien
gccaggattgccacactcgatttct

SEQ ID NO: 801222 - DNA, 25 bp, Homo sapien
gccacactcgatttctggaacaagc

SEQ ID NO: 801223 - DNA, 25 bp, Homo sapien
tggaacaagcccaccactgtttcat

SEQ ID NO: 801224 - DNA, 25 bp, Homo sapien
agaaattggagactgtcatgaagga

SEQ ID NO: 801225 - DNA, 25 bp, Homo sapien
aaattggagactgtcatgaaggagg

SEQ ID NO: 801226 - DNA, 25 bp, Homo sapien
ctgtagaaattggagactgtcatga

SEQ ID NO: 801227 - DNA, 25 bp, Homo sapien
cctgtagaaattggagactgtcatg

SEQ ID NO: 801228 - DNA, 25 bp, Homo sapien
gaggacaaagaacaagtgagtgaaa

SEQ ID NO: 801229 - DNA, 25 bp, Homo sapien
tggaggacaaagaacaagtgagtga

SEQ ID NO: 801230 - DNA, 25 bp, Homo sapien
ttggaggacaaagaacaagtgagtg

SEQ ID NO: 801231 - DNA, 25 bp, Homo sapien
gggttggaggacaaagaacaagtga

SEQ ID NO: 801232 - DNA, 25 bp, Homo sapien
gcttaaactcattggggataataca

SEQ ID NO: 801233 - DNA, 25 bp, Homo sapien
taatacagcggacaaaatggggtgc

SEQ ID NO: 801234 - DNA, 25 bp, Homo sapien
tgcggctatggagggtggtcatcag

SEQ ID NO: 801235 - DNA, 25 bp, Homo sapien
ccgattgcttaaactcattggggat

SEQ ID NO: 801236 - DNA, 25 bp, Homo sapien
caccattgcaagctagctggtgcat

SEQ ID NO: 801237 - DNA, 25 bp, Homo sapien
ctgtttgaactccgggtactgcagc

SEQ ID NO: 801238 - DNA, 25 bp, Homo sapien
aggacaccattgcaagctagctggt

SEQ ID NO: 801239 - DNA, 25 bp, Homo sapien
actccgggtactgcagcctgtttgg

SEQ ID NO: 801240 - DNA, 25 bp, Homo sapien
cacgttggggttcagcacttggtac

SEQ ID NO: 801241 - DNA, 25 bp, Homo sapien
tgaggcctttttgttgtccacgaac

SEQ ID NO: 801242 - DNA, 25 bp, Homo sapien
gggaatcacgttggggttcagcact

SEQ ID NO: 801243 - DNA, 25 bp, Homo sapien
tcattcacatctaggtcaatggctg

SEQ ID NO: 801244 - DNA, 25 bp, Homo sapien
cctcatgaggaagccccgaagccga

SEQ ID NO: 801245 - DNA, 25 bp, Homo sapien
ccaggatgcccgcacggaagaacac

SEQ ID NO: 801246 - DNA, 25 bp, Homo sapien
cagcatcgtcatgatcttggccaga

SEQ ID NO: 801247 - DNA, 25 bp, Homo sapien
ttggccagacgctcgtccctcatgt

SEQ ID NO: 801248 - DNA, 25 bp, Homo sapien
gtgccttctcgagacccagcattgc

SEQ ID NO: 801249 - DNA, 25 bp, Homo sapien
tcagacaccaaagtgccttctcgag

SEQ ID NO: 801250 - DNA, 25 bp, Homo sapien
cattgcccatgtggtctgcggcagg

SEQ ID NO: 801251 - DNA, 25 bp, Homo sapien
cagcattgcccatgtggtctgcggc

SEQ ID NO: 801252 - DNA, 25 bp, Homo sapien
tgagtgggttacaatgaaggtgtta

SEQ ID NO: 801253 - DNA, 25 bp, Homo sapien
aatccagggttgagtgggttacaat

SEQ ID NO: 801254 - DNA, 25 bp, Homo sapien
agggttgagtgggttacaatgaagg

SEQ ID NO: 801255 - DNA, 25 bp, Homo sapien
ttacaatgaaggtgttaggacctgg

SEQ ID NO: 801256 - DNA, 25 bp, Homo sapien
tgtgcacgttctgctgaatgacttt

SEQ ID NO: 801257 - DNA, 25 bp, Homo sapien
gcaggaacttgtgcacgttctgctg

SEQ ID NO: 801258 - DNA, 25 bp, Homo sapien
ccccagaaacggagctgcaggaact

SEQ ID NO: 801259 - DNA, 25 bp, Homo sapien
cccagaaacggagctgcaggaactt

SEQ ID NO: 801260 - DNA, 25 bp, Homo sapien
cttgaccttgtttaccaactcctgg

SEQ ID NO: 801261 - DNA, 25 bp, Homo sapien
tgccgagccacattcaggagtggct

SEQ ID NO: 801262 - DNA, 25 bp, Homo sapien
tcatctcctcttcttgccgagccac

SEQ ID NO: 801263 - DNA, 25 bp, Homo sapien
actcctgggtttgggccatggcttt

SEQ ID NO: 801264 - DNA, 25 bp, Homo sapien
cagctggatggtgaggtcattcttc

SEQ ID NO: 801265 - DNA, 25 bp, Homo sapien
agctggatggtgaggtcattcttct

SEQ ID NO: 801266 - DNA, 25 bp, Homo sapien
gctggatggtgaggtcattcttctc

SEQ ID NO: 801267 - DNA, 25 bp, Homo sapien
ctggacaagccttgagctgaacaaa

SEQ ID NO: 801268 - DNA, 25 bp, Homo sapien
aagccttgagctgaacaaatgtgtc

SEQ ID NO: 801269 - DNA, 25 bp, Homo sapien
caagacgctggacaagccttgagct

SEQ ID NO: 801270 - DNA, 25 bp, Homo sapien
aagacgctggacaagccttgagctg

SEQ ID NO: 801271 - DNA, 25 bp, Homo sapien
ctgcatccatcaggttctcttgctc

SEQ ID NO: 801272 - DNA, 25 bp, Homo sapien
cgcatgtctgagatctggctctcta

SEQ ID NO: 801273 - DNA, 25 bp, Homo sapien
caacttgcgcttggcggcactcagt

SEQ ID NO: 801274 - DNA, 25 bp, Homo sapien
tccttctctgtcttggccagcgtgg

SEQ ID NO: 801275 - DNA, 25 bp, Homo sapien
aggccctctaggtcccgcttcaggt

SEQ ID NO: 801276 - DNA, 25 bp, Homo sapien
cataggggctttaggtatggcccct

SEQ ID NO: 801277 - DNA, 25 bp, Homo sapien
cctgagaaaagcgtggcagggcccc

SEQ ID NO: 801278 - DNA, 25 bp, Homo sapien
tttaggtatggcccctgaaggtggc

SEQ ID NO: 801279 - DNA, 25 bp, Homo sapien
aggtggcctgagaaaagcgtggcag

SEQ ID NO: 801280 - DNA, 25 bp, Homo sapien
gcaactgcttgtttgggcagaaatt

SEQ ID NO: 801281 - DNA, 25 bp, Homo sapien
gtttgggcagaaattcaacagctga

SEQ ID NO: 801282 - DNA, 25 bp, Homo sapien
tgttcagaggggcagcaactgcttg

SEQ ID NO: 801283 - DNA, 25 bp, Homo sapien
gaaattcaacagctgaaggtggaca

SEQ ID NO: 801284 - DNA, 25 bp, Homo sapien
cagccagatggcatcaggagccagg

SEQ ID NO: 801285 - DNA, 25 bp, Homo sapien
gaccaggggccagccagatggcatc

SEQ ID NO: 801286 - DNA, 25 bp, Homo sapien
ggaccttgggaccaggggccagcca

SEQ ID NO: 801287 - DNA, 25 bp, Homo sapien
ctgcaatagcaggaaggggaccttg

SEQ ID NO: 801288 - DNA, 25 bp, Homo sapien
agtcttcacggagtgagaggtcccc

SEQ ID NO: 801289 - DNA, 25 bp, Homo sapien
cgtcagggtacggaccttgtgatcc

SEQ ID NO: 801290 - DNA, 25 bp, Homo sapien
cccgtcagggtacggaccttgtgat

SEQ ID NO: 801291 - DNA, 25 bp, Homo sapien
tggagcttggtgatggagtcttcac

SEQ ID NO: 801292 - DNA, 25 bp, Homo sapien
ctcctcagcctgtaggtcgtccagg

SEQ ID NO: 801293 - DNA, 25 bp, Homo sapien
ctcagcctgtaggtcgtccagggtt

SEQ ID NO: 801294 - DNA, 25 bp, Homo sapien
cagcctgtaggtcgtccagggtttt

SEQ ID NO: 801295 - DNA, 25 bp, Homo sapien
gtcctcctcagcctgtaggtcgtcc

SEQ ID NO: 801296 - DNA, 25 bp, Homo sapien
atggatctgcgtgctcagcttgctg

SEQ ID NO: 801297 - DNA, 25 bp, Homo sapien
tcatggatctgcgtgctcagcttgc

SEQ ID NO: 801298 - DNA, 25 bp, Homo sapien
catggatctgcgtgctcagcttgct

SEQ ID NO: 801299 - DNA, 25 bp, Homo sapien
ctcatggatctgcgtgctcagcttg

SEQ ID NO: 801300 - DNA, 25 bp, Homo sapien
tcagctttccgacgagccttttcca

SEQ ID NO: 801301 - DNA, 25 bp, Homo sapien
actctcagctttccgacgagccttt

SEQ ID NO: 801302 - DNA, 25 bp, Homo sapien
gcttggaacgctccatctcattgag

SEQ ID NO: 801303 - DNA, 25 bp, Homo sapien
cacctcctcgagatccagcttggaa

SEQ ID NO: 801304 - DNA, 25 bp, Homo sapien
gtgatggacaaaacgaacgacgaca

SEQ ID NO: 801305 - DNA, 25 bp, Homo sapien
cattgtgatggacaaaacgaacgac

SEQ ID NO: 801306 - DNA, 25 bp, Homo sapien
gatggacaaaacgaacgacgacaag

SEQ ID NO: 801307 - DNA, 25 bp, Homo sapien
ttgtgatggacaaaacgaacgacga

SEQ ID NO: 801308 - DNA, 25 bp, Homo sapien
ttcgagttgacagagtttatttcca

SEQ ID NO: 801309 - DNA, 25 bp, Homo sapien
tcatggccctctcagcttctagttc

SEQ ID NO: 801310 - DNA, 25 bp, Homo sapien
gctctcatggccctctcagcttcta

SEQ ID NO: 801311 - DNA, 25 bp, Homo sapien
tctcatggccctctcagcttctagt

SEQ ID NO: 801312 - DNA, 25 bp, Homo sapien
ttggctctcatggccctctcagctt

SEQ ID NO: 801313 - DNA, 25 bp, Homo sapien
acaggtcactgcgttgtttctccac

SEQ ID NO: 801314 - DNA, 25 bp, Homo sapien
agatcttcaagatcccgggacaggt

SEQ ID NO: 801315 - DNA, 25 bp, Homo sapien
gagatcttcaagatcccgggacagg

SEQ ID NO: 801316 - DNA, 25 bp, Homo sapien
ccgggacaggtcactgcgttgtttc

SEQ ID NO: 801317 - DNA, 25 bp, Homo sapien
catggagtccacgtgcttcttgcgc

SEQ ID NO: 801318 - DNA, 25 bp, Homo sapien
tccatgctggcattgaggtcatcaa

SEQ ID NO: 801319 - DNA, 25 bp, Homo sapien
tctctagcttggacttgaccctctg

SEQ ID NO: 801320 - DNA, 25 bp, Homo sapien
gacttctgtatcgtctccatgctgg

SEQ ID NO: 801321 - DNA, 25 bp, Homo sapien
gcttggtttcgctctagctctgcca

SEQ ID NO: 801322 - DNA, 25 bp, Homo sapien
ttctgacgtgggcctcggcgttcat

SEQ ID NO: 801323 - DNA, 25 bp, Homo sapien
tgccaccttggcgttggcttctgat

SEQ ID NO: 801324 - DNA, 25 bp, Homo sapien
gttggcttctgataagctgtcttcc

SEQ ID NO: 801325 - DNA, 25 bp, Homo sapien
taggatttgattgagccggctctgg

SEQ ID NO: 801326 - DNA, 25 bp, Homo sapien
tcatattccctgctcagttcactat

SEQ ID NO: 801327 - DNA, 25 bp, Homo sapien
gagatgtctttatccgtaggatttg

SEQ ID NO: 801328 - DNA, 25 bp, Homo sapien
taatcatccacttgtgacgtcagag

SEQ ID NO: 801329 - DNA, 25 bp, Homo sapien
tctccaccgcaaccccacgtccaaa

SEQ ID NO: 801330 - DNA, 25 bp, Homo sapien
ctttaaggcggcagctctgtctcca

SEQ ID NO: 801331 - DNA, 25 bp, Homo sapien
taactttaaggcggcagctctgtct

SEQ ID NO: 801332 - DNA, 25 bp, Homo sapien
ctataactttaaggcggcagctctg

SEQ ID NO: 801333 - DNA, 25 bp, Homo sapien
cgtgcttggtgttggccagactcac

SEQ ID NO: 801334 - DNA, 25 bp, Homo sapien
aggtcgtgcttggtgttggccagac

SEQ ID NO: 801335 - DNA, 25 bp, Homo sapien
ctaggtccaggtcgtgcttggtgtt

SEQ ID NO: 801336 - DNA, 25 bp, Homo sapien
ggccagactcaccacggcggtgctg

SEQ ID NO: 801337 - DNA, 25 bp, Homo sapien
tgctcctcctccagctgctccttta

SEQ ID NO: 801338 - DNA, 25 bp, Homo sapien
cttgcctccctgctcctcctccagc

SEQ ID NO: 801339 - DNA, 25 bp, Homo sapien
tccctgctcctcctccagctgctcc

SEQ ID NO: 801340 - DNA, 25 bp, Homo sapien
cctgctcctcctccagctgctcctt

SEQ ID NO: 801341 - DNA, 25 bp, Homo sapien
gatggcatcggtctcgtacttggtc

SEQ ID NO: 801342 - DNA, 25 bp, Homo sapien
cctctggatggcatcggtctcgtac

SEQ ID NO: 801343 - DNA, 25 bp, Homo sapien
ccaggtggtgacctcagtgttgagt

SEQ ID NO: 801344 - DNA, 25 bp, Homo sapien
gtttggacacgaggcgctgcagctc

SEQ ID NO: 801345 - DNA, 25 bp, Homo sapien
gcttatttttctcgagggaggcggc

SEQ ID NO: 801346 - DNA, 25 bp, Homo sapien
ctgcttatttttctcgagggaggcg

SEQ ID NO: 801347 - DNA, 25 bp, Homo sapien
tgcttatttttctcgagggaggcgg

SEQ ID NO: 801348 - DNA, 25 bp, Homo sapien
agcatcttgtcaaagagcctctgct

SEQ ID NO: 801349 - DNA, 25 bp, Homo sapien
tccagagactcctcgtaggcagtct

SEQ ID NO: 801350 - DNA, 25 bp, Homo sapien
gtacatgcggcactccttctgcgag

SEQ ID NO: 801351 - DNA, 25 bp, Homo sapien
aagctctctgtcatgtacatgcggc

SEQ ID NO: 801352 - DNA, 25 bp, Homo sapien
tcttcacggactctagatgctccag

SEQ ID NO: 801353 - DNA, 25 bp, Homo sapien
ttctgcagttcatgcacactccttc

SEQ ID NO: 801354 - DNA, 25 bp, Homo sapien
ctcacccagctgatcaatgagatcc

SEQ ID NO: 801355 - DNA, 25 bp, Homo sapien
tcatggattcttcggtcgatgtcag

SEQ ID NO: 801356 - DNA, 25 bp, Homo sapien
ctttctcatggattcttcggtcgat

SEQ ID NO: 801357 - DNA, 25 bp, Homo sapien
tgaattcgaatcaccttgctctctt

SEQ ID NO: 801358 - DNA, 25 bp, Homo sapien
ttcttcggtcgatgtcagctttaac

SEQ ID NO: 801359 - DNA, 25 bp, Homo sapien
tcttcttgagccgaagtgcctctgc

SEQ ID NO: 801360 - DNA, 25 bp, Homo sapien
caatgtctttacaagttcgctgttg

SEQ ID NO: 801361 - DNA, 25 bp, Homo sapien
tcttgttggcgtggtccagctggat

SEQ ID NO: 801362 - DNA, 25 bp, Homo sapien
ctaggctggcctgcaaggactcgat

SEQ ID NO: 801363 - DNA, 25 bp, Homo sapien
atttctcctcctcccagatcgctac

SEQ ID NO: 801364 - DNA, 25 bp, Homo sapien
catttctcctcctcccagatcgcta

SEQ ID NO: 801365 - DNA, 25 bp, Homo sapien
tcatttctcctcctcccagatcgct

SEQ ID NO: 801366 - DNA, 25 bp, Homo sapien
cttcctgctccaacagcttgcgtga

SEQ ID NO: 801367 - DNA, 25 bp, Homo sapien
agcttgcgtgaacgctcgctgccct

SEQ ID NO: 801368 - DNA, 25 bp, Homo sapien
tgcctggcatcctcgtccatctgga

SEQ ID NO: 801369 - DNA, 25 bp, Homo sapien
tgatctcgttgtgccattcggtgat

SEQ ID NO: 801370 - DNA, 25 bp, Homo sapien
ctaacccccggagtgtgggtgcgag

SEQ ID NO: 801371 - DNA, 25 bp, Homo sapien
cccccggagtgtgggtgcgagtggc

SEQ ID NO: 801372 - DNA, 25 bp, Homo sapien
ccggagtgtgggtgcgagtggcact

SEQ ID NO: 801373 - DNA, 25 bp, Homo sapien
gagtgtgggtgcgagtggcactgac

SEQ ID NO: 801374 - DNA, 25 bp, Homo sapien
ctcacgtggtttgggcaccatcccg

SEQ ID NO: 801375 - DNA, 25 bp, Homo sapien
gtggtttgggcaccatcccggcctc

SEQ ID NO: 801376 - DNA, 25 bp, Homo sapien
gggctcacgtggtttgggcaccatc

SEQ ID NO: 801377 - DNA, 25 bp, Homo sapien
tggacttttaagtcacaattttaca

SEQ ID NO: 801378 - DNA, 25 bp, Homo sapien
ttggagatgcgctggacatctgact

SEQ ID NO: 801379 - DNA, 25 bp, Homo sapien
gatgagctcctcatgctcgttggag

SEQ ID NO: 801380 - DNA, 25 bp, Homo sapien
tccagcttgcgtttgaccacgagga

SEQ ID NO: 801381 - DNA, 25 bp, Homo sapien
ttggccctctcttcggtcaagcgga

SEQ ID NO: 801382 - DNA, 25 bp, Homo sapien
ggaaaagaagagcaggggttggagc

SEQ ID NO: 801383 - DNA, 25 bp, Homo sapien
tgcaggtggggaaaagaagagcagg

SEQ ID NO: 801384 - DNA, 25 bp, Homo sapien
gcaggtggggaaaagaagagcaggg

SEQ ID NO: 801385 - DNA, 25 bp, Homo sapien
gaagagcaggggttggagctgggtg

SEQ ID NO: 801386 - DNA, 25 bp, Homo sapien
gatggtgacctcgtagttcttcttg

SEQ ID NO: 801387 - DNA, 25 bp, Homo sapien
gcagtggtcctgctcttgccggagt

SEQ ID NO: 801388 - DNA, 25 bp, Homo sapien
ccggagttcttctgccatgcgggca

SEQ ID NO: 801389 - DNA, 25 bp, Homo sapien
ttcgcttgccgcctttcagagccag

SEQ ID NO: 801390 - DNA, 25 bp, Homo sapien
ccgccccgccagatccccattcctc

SEQ ID NO: 801391 - DNA, 25 bp, Homo sapien
cccgccccgccagatccccattcct

SEQ ID NO: 801392 - DNA, 25 bp, Homo sapien
acacagtgtcttgactgtctccacg

SEQ ID NO: 801393 - DNA, 25 bp, Homo sapien
catgcgctgattggtcttgtggtcc

SEQ ID NO: 801394 - DNA, 25 bp, Homo sapien
aatctgcctcttgtagaccttcagc

SEQ ID NO: 801395 - DNA, 25 bp, Homo sapien
gaggcgacgctcattcttacacagt

SEQ ID NO: 801396 - DNA, 25 bp, Homo sapien
gctcatgcaccgtcttcctgtatcg

SEQ ID NO: 801397 - DNA, 25 bp, Homo sapien
cagcgtcatccagctcatgcaccgt

SEQ ID NO: 801398 - DNA, 25 bp, Homo sapien
tctggtgcgcagcttgtttagggca

SEQ ID NO: 801399 - DNA, 25 bp, Homo sapien
cttcctgtatcgagccaaggtctgg

SEQ ID NO: 801400 - DNA, 25 bp, Homo sapien
aagggttttcgaggtgcctgtcttg

SEQ ID NO: 801401 - DNA, 25 bp, Homo sapien
ctcagaaagggttttcgaggtgcct

SEQ ID NO: 801402 - DNA, 25 bp, Homo sapien
tcctcagaaagggttttcgaggtgc

SEQ ID NO: 801403 - DNA, 25 bp, Homo sapien
ttttcgaggtgcctgtcttggacac

SEQ ID NO: 801404 - DNA, 25 bp, Homo sapien
caggacagacccagttttccatttt

SEQ ID NO: 801405 - DNA, 25 bp, Homo sapien
tgaatggactgcagttgagatctgt

SEQ ID NO: 801406 - DNA, 25 bp, Homo sapien
gactgcagttgagatctgtattacc

SEQ ID NO: 801407 - DNA, 25 bp, Homo sapien
tcaggacagacccagttttccattt

SEQ ID NO: 801408 - DNA, 25 bp, Homo sapien
actttcttttgcatagtaaacattc

SEQ ID NO: 801409 - DNA, 25 bp, Homo sapien
gaccatgtaggaactcaactgaaac

SEQ ID NO: 801410 - DNA, 25 bp, Homo sapien
cattcctctaatggcgggttttaca

SEQ ID NO: 801411 - DNA, 25 bp, Homo sapien
tctttgtagagaacagccgggtcac

SEQ ID NO: 801412 - DNA, 25 bp, Homo sapien
caaatgcttactgccgttccagaga

SEQ ID NO: 801413 - DNA, 25 bp, Homo sapien
ggactctgggcagtcgacgcgaaca

SEQ ID NO: 801414 - DNA, 25 bp, Homo sapien
tgacagatcccggaagtggacacgg

SEQ ID NO: 801415 - DNA, 25 bp, Homo sapien
ttccattggcgtggtactgtcggcg

SEQ ID NO: 801416 - DNA, 25 bp, Homo sapien
cccacggaacgcctggcaagtgctg

SEQ ID NO: 801417 - DNA, 25 bp, Homo sapien
cagaaggggccgttaattcgggcat

SEQ ID NO: 801418 - DNA, 25 bp, Homo sapien
atcggaggcggctaggagctcgaac

SEQ ID NO: 801419 - DNA, 25 bp, Homo sapien
ttaattcgggcatcggaggcggcta

SEQ ID NO: 801420 - DNA, 25 bp, Homo sapien
ggaggcggctaggagctcgaacatc

SEQ ID NO: 801421 - DNA, 25 bp, Homo sapien
caattttagagacggtgacaaatgc

SEQ ID NO: 801422 - DNA, 25 bp, Homo sapien
tgacacaattttagagacggtgaca

SEQ ID NO: 801423 - DNA, 25 bp, Homo sapien
ttttagagacggtgacaaatgcccc

SEQ ID NO: 801424 - DNA, 25 bp, Homo sapien
cacaattttagagacggtgacaaat

SEQ ID NO: 801425 - DNA, 25 bp, Homo sapien
acactaaagagatgaatagtcccgc

SEQ ID NO: 801426 - DNA, 25 bp, Homo sapien
gctcgattacgggagatcctcctac

SEQ ID NO: 801427 - DNA, 25 bp, Homo sapien
atagtcccgcgggtcgctcgattac

SEQ ID NO: 801428 - DNA, 25 bp, Homo sapien
agagatgaatagtcccgcgggtcgc

SEQ ID NO: 801429 - DNA, 25 bp, Homo sapien
atcctatgggcgcctactgtatgca

SEQ ID NO: 801430 - DNA, 25 bp, Homo sapien
aggcaaacatcctatgggcgcctac

SEQ ID NO: 801431 - DNA, 25 bp, Homo sapien
caaacatcctatgggcgcctactgt

SEQ ID NO: 801432 - DNA, 25 bp, Homo sapien
tcctatgggcgcctactgtatgcag

SEQ ID NO: 801433 - DNA, 25 bp, Homo sapien
gagaaggtttttctcgagatcgaga

SEQ ID NO: 801434 - DNA, 25 bp, Homo sapien
attaaccgaaggattgagggctgcc

SEQ ID NO: 801435 - DNA, 25 bp, Homo sapien
gagatcgagaaggttccccattaac

SEQ ID NO: 801436 - DNA, 25 bp, Homo sapien
cccattaaccgaaggattgagggct

SEQ ID NO: 801437 - DNA, 25 bp, Homo sapien
ccaggatcactcaacaaagtggtgg

SEQ ID NO: 801438 - DNA, 25 bp, Homo sapien
aaacaggcgcagagaagcatcttcc

SEQ ID NO: 801439 - DNA, 25 bp, Homo sapien
attgatcacctactctcggccagga

SEQ ID NO: 801440 - DNA, 25 bp, Homo sapien
aaggcggtactcatgcagggaaatc

SEQ ID NO: 801441 - DNA, 25 bp, Homo sapien
tcatgtccagttgaaaagtacagct

SEQ ID NO: 801442 - DNA, 25 bp, Homo sapien
gacttcaaaagaggtggccatttac

SEQ ID NO: 801443 - DNA, 25 bp, Homo sapien
gctattttaagtctgcaggccaaga

SEQ ID NO: 801444 - DNA, 25 bp, Homo sapien
gaatgcacctagcaaacaccacttg

SEQ ID NO: 801445 - DNA, 25 bp, Homo sapien
attcttagtgttttcaaaggagaga

SEQ ID NO: 801446 - DNA, 25 bp, Homo sapien
tattcttagtgttttcaaaggagag

SEQ ID NO: 801447 - DNA, 25 bp, Homo sapien
tcttagtgttttcaaaggagagaaa

SEQ ID NO: 801448 - DNA, 25 bp, Homo sapien
cttagtgttttcaaaggagagaaag

SEQ ID NO: 801449 - DNA, 25 bp, Homo sapien
tggctctagtaaaaactgatgcagt

SEQ ID NO: 801450 - DNA, 25 bp, Homo sapien
ggtgattggctctagtaaaaactga

SEQ ID NO: 801451 - DNA, 25 bp, Homo sapien
gctctagtaaaaactgatgcagtga

SEQ ID NO: 801452 - DNA, 25 bp, Homo sapien
ctagtaaaaactgatgcagtgacat

SEQ ID NO: 801453 - DNA, 25 bp, Homo sapien
gatgtgcacttcgtgattattggga

SEQ ID NO: 801454 - DNA, 25 bp, Homo sapien
ccactggctcccgttcttcttatag

SEQ ID NO: 801455 - DNA, 25 bp, Homo sapien
ccttgagttcatgagctttcaccca

SEQ ID NO: 801456 - DNA, 25 bp, Homo sapien
tgtgatgtgtccgttgtgctccttg

SEQ ID NO: 801457 - DNA, 25 bp, Homo sapien
aatggactggaatggtgtcatagca

SEQ ID NO: 801458 - DNA, 25 bp, Homo sapien
tggcctaagcttgtttatgaatatg

SEQ ID NO: 801459 - DNA, 25 bp, Homo sapien
tttccttaagtttcctgatacagga

SEQ ID NO: 801460 - DNA, 25 bp, Homo sapien
tctggtggcgattatctgatatggg

SEQ ID NO: 801461 - DNA, 25 bp, Homo sapien
gaaaaactctcatggctaatacacg

SEQ ID NO: 801462 - DNA, 25 bp, Homo sapien
gcaatctgatgaggcctggcaacac

SEQ ID NO: 801463 - DNA, 25 bp, Homo sapien
cttcccatctcaagtatgtggcggg

SEQ ID NO: 801464 - DNA, 25 bp, Homo sapien
tacgtacagaaatcaagggatgcct

SEQ ID NO: 801465 - DNA, 25 bp, Homo sapien
aggtgtaagcctgatcaatatttat

SEQ ID NO: 801466 - DNA, 25 bp, Homo sapien
acaggtgtaagcctgatcaatattt

SEQ ID NO: 801467 - DNA, 25 bp, Homo sapien
tgtaagcctgatcaatatttattat

SEQ ID NO: 801468 - DNA, 25 bp, Homo sapien
gtgtaagcctgatcaatatttatta

SEQ ID NO: 801469 - DNA, 25 bp, Homo sapien
aatggcacgatctcagctcactgca

SEQ ID NO: 801470 - DNA, 25 bp, Homo sapien
atggcacgatctcagctcactgcaa

SEQ ID NO: 801471 - DNA, 25 bp, Homo sapien
gtttcactcttgcagcccagggtgg

SEQ ID NO: 801472 - DNA, 25 bp, Homo sapien
actcttgcagcccagggtggagtac

SEQ ID NO: 801473 - DNA, 25 bp, Homo sapien
caaacagaaatgagtcgtgctccac

SEQ ID NO: 801474 - DNA, 25 bp, Homo sapien
tgccccacaagtgacaatgcggtcg

SEQ ID NO: 801475 - DNA, 25 bp, Homo sapien
tagctgcgcgattaattctcaggat

SEQ ID NO: 801476 - DNA, 25 bp, Homo sapien
gacataggcattgcggtctgcccca

SEQ ID NO: 801477 - DNA, 25 bp, Homo sapien
tttgaagtcacatgatcctgctgcc

SEQ ID NO: 801478 - DNA, 25 bp, Homo sapien
aagtcacatgatcctgctgccagca

SEQ ID NO: 801479 - DNA, 25 bp, Homo sapien
tgaagtcacatgatcctgctgccag

SEQ ID NO: 801480 - DNA, 25 bp, Homo sapien
gtcacatgatcctgctgccagcaaa

SEQ ID NO: 801481 - DNA, 25 bp, Homo sapien
gcacttcaggaggccaaggagggag

SEQ ID NO: 801482 - DNA, 25 bp, Homo sapien
tgggcaatgtagcaagaccccgtct

SEQ ID NO: 801483 - DNA, 25 bp, Homo sapien
gatcacttgaggccaggagttcaag

SEQ ID NO: 801484 - DNA, 25 bp, Homo sapien
accaacctgggcaatgtagcaagac

SEQ ID NO: 801485 - DNA, 25 bp, Homo sapien
cttgctgccccagggcgtgctggct

SEQ ID NO: 801486 - DNA, 25 bp, Homo sapien
ggcgtgctggctggcttttcatcca

SEQ ID NO: 801487 - DNA, 25 bp, Homo sapien
ccagggcgtgctggctggcttttca

SEQ ID NO: 801488 - DNA, 25 bp, Homo sapien
ccccagggcgtgctggctggctttt

SEQ ID NO: 801489 - DNA, 25 bp, Homo sapien
gtggacccagccaccagtgccactg

SEQ ID NO: 801490 - DNA, 25 bp, Homo sapien
agtgccactgccaccaaactctgac

SEQ ID NO: 801491 - DNA, 25 bp, Homo sapien
cccgtggacccagccaccagtgcca

SEQ ID NO: 801492 - DNA, 25 bp, Homo sapien
tctgacatcagctgcccaaaaggca

SEQ ID NO: 801493 - DNA, 25 bp, Homo sapien
ggtgctgtcgtggctgacccaggcc

SEQ ID NO: 801494 - DNA, 25 bp, Homo sapien
gccaggcggctcccactggcagaga

SEQ ID NO: 801495 - DNA, 25 bp, Homo sapien
tgctgtcgtggctgacccaggccag

SEQ ID NO: 801496 - DNA, 25 bp, Homo sapien
ccaggccaggcggctcccactggca

SEQ ID NO: 801497 - DNA, 25 bp, Homo sapien
cactttttgaggcatcagcaacaga

SEQ ID NO: 801498 - DNA, 25 bp, Homo sapien
tgcacactttttgaggcatcagcaa

SEQ ID NO: 801499 - DNA, 25 bp, Homo sapien
tttttgaggcatcagcaacagacac

SEQ ID NO: 801500 - DNA, 25 bp, Homo sapien
cacactttttgaggcatcagcaaca

SEQ ID NO: 801501 - DNA, 25 bp, Homo sapien
atcccaagatgcaacagactattag

SEQ ID NO: 801502 - DNA, 25 bp, Homo sapien
cagactattagcttctttacagaca

SEQ ID NO: 801503 - DNA, 25 bp, Homo sapien
cacaagaacatgtgttatcccaaga

SEQ ID NO: 801504 - DNA, 25 bp, Homo sapien
cagatgatcacaaaggacccattct

SEQ ID NO: 801505 - DNA, 25 bp, Homo sapien
gccacgacgctgttctctgagacaa

SEQ ID NO: 801506 - DNA, 25 bp, Homo sapien
gaactctgtcttcagagtcgagacc

SEQ ID NO: 801507 - DNA, 25 bp, Homo sapien
gacaaatgacacacttaggagcggc

SEQ ID NO: 801508 - DNA, 25 bp, Homo sapien
taggagcggcaggaactctgtcttc

SEQ ID NO: 801509 - DNA, 25 bp, Homo sapien
ctgaggatgggagttcgagaccggc

SEQ ID NO: 801510 - DNA, 25 bp, Homo sapien
cttctaaaaatacaaaattagccag

SEQ ID NO: 801511 - DNA, 25 bp, Homo sapien
ccaacatggagaaaccccgtctctt

SEQ ID NO: 801512 - DNA, 25 bp, Homo sapien
aaattagccaggtatggtggcgcat

SEQ ID NO: 801513 - DNA, 25 bp, Homo sapien
tggaatatctaacttggagacgaag

SEQ ID NO: 801514 - DNA, 25 bp, Homo sapien
tgttgcggtcctcagttgtggctct

SEQ ID NO: 801515 - DNA, 25 bp, Homo sapien
cgtagttaaagagcattgggcagca

SEQ ID NO: 801516 - DNA, 25 bp, Homo sapien
ggcagccgcggtcatcgtagttaaa

SEQ ID NO: 801517 - DNA, 25 bp, Homo sapien
tgggaacgcagcattcaggaatgtc

SEQ ID NO: 801518 - DNA, 25 bp, Homo sapien
aaagggtaccctaggaagcagctgc

SEQ ID NO: 801519 - DNA, 25 bp, Homo sapien
ccattacttgaaacgacagctacag

SEQ ID NO: 801520 - DNA, 25 bp, Homo sapien
tatgtgtgcactactgtgggaacgc

SEQ ID NO: 801521 - DNA, 25 bp, Homo sapien
taacacttggtctgtatagaaacgt

SEQ ID NO: 801522 - DNA, 25 bp, Homo sapien
caaacaggaagtctagaggtttcca

SEQ ID NO: 801523 - DNA, 25 bp, Homo sapien
tcacaagaagtaactcggagccatt

SEQ ID NO: 801524 - DNA, 25 bp, Homo sapien
gctgccccttctccgctgaagatga

SEQ ID NO: 801525 - DNA, 25 bp, Homo sapien
gcatgactgaattccatagctccaa

SEQ ID NO: 801526 - DNA, 25 bp, Homo sapien
ggatggcaaactatggcacacactg

SEQ ID NO: 801527 - DNA, 25 bp, Homo sapien
ctgcctatgcccgtacagcctgtga

SEQ ID NO: 801528 - DNA, 25 bp, Homo sapien
actagattccgaccaagctaagcag

SEQ ID NO: 801529 - DNA, 25 bp, Homo sapien
ttgtcatggctccatcgatgccagt

SEQ ID NO: 801530 - DNA, 25 bp, Homo sapien
cttgaaatcccaaattgtcatggct

SEQ ID NO: 801531 - DNA, 25 bp, Homo sapien
cgatgccagtagtgcaaaatttgcg

SEQ ID NO: 801532 - DNA, 25 bp, Homo sapien
atcttgcttgtccacctcataaata

SEQ ID NO: 801533 - DNA, 25 bp, Homo sapien
attaaactgtatactagatttaaca

SEQ ID NO: 801534 - DNA, 25 bp, Homo sapien
agccgggtgttgtagtgtgctcctg

SEQ ID NO: 801535 - DNA, 25 bp, Homo sapien
gccgggtgttgtagtgtgctcctgt

SEQ ID NO: 801536 - DNA, 25 bp, Homo sapien
tccatctgtgcttccggaggaccac

SEQ ID NO: 801537 - DNA, 25 bp, Homo sapien
taccagacaggctcattcagattgg

SEQ ID NO: 801538 - DNA, 25 bp, Homo sapien
gaatgtgccgttcttctgcggatga

SEQ ID NO: 801539 - DNA, 25 bp, Homo sapien
ggcacccaggagatatgtactaaat

SEQ ID NO: 801540 - DNA, 25 bp, Homo sapien
actcaccccgcagagacactccagg

SEQ ID NO: 801541 - DNA, 25 bp, Homo sapien
cgaggtaggtatgacaccactccct

SEQ ID NO: 801542 - DNA, 25 bp, Homo sapien
tgtctaccccgaggtaggtatgaca

SEQ ID NO: 801543 - DNA, 25 bp, Homo sapien
gatgtcactgaggagtgtctacccc

SEQ ID NO: 801544 - DNA, 25 bp, Homo sapien
gaggccctggatggaagactcgagg

SEQ ID NO: 801545 - DNA, 25 bp, Homo sapien
ggccctggatggaagactcgagggt

SEQ ID NO: 801546 - DNA, 25 bp, Homo sapien
attatccggaggccctggatggaag

SEQ ID NO: 801547 - DNA, 25 bp, Homo sapien
tatccggaggccctggatggaagac

SEQ ID NO: 801548 - DNA, 25 bp, Homo sapien
ccacacggcattggcgtgatatgtg

SEQ ID NO: 801549 - DNA, 25 bp, Homo sapien
cggcattggcgtgatatgtgttttc

SEQ ID NO: 801550 - DNA, 25 bp, Homo sapien
caaaaccacacggcattggcgtgat

SEQ ID NO: 801551 - DNA, 25 bp, Homo sapien
aaccacacggcattggcgtgatatg

SEQ ID NO: 801552 - DNA, 25 bp, Homo sapien
ctactaaaaattgaaatactacaag

SEQ ID NO: 801553 - DNA, 25 bp, Homo sapien
gaccgacacaacctactttgcagaa

SEQ ID NO: 801554 - DNA, 25 bp, Homo sapien
gaagtattgcaatgttcagaaacgg

SEQ ID NO: 801555 - DNA, 25 bp, Homo sapien
ttgtccaaccggcagaaccgtgtgc

SEQ ID NO: 801556 - DNA, 25 bp, Homo sapien
tatgacctggttgtttcaaggagcc

SEQ ID NO: 801557 - DNA, 25 bp, Homo sapien
tctcgagcacatcatgatgtgcctt

SEQ ID NO: 801558 - DNA, 25 bp, Homo sapien
cttctctcgagcacatcatgatgtg

SEQ ID NO: 801559 - DNA, 25 bp, Homo sapien
ttctctcgagcacatcatgatgtgc

SEQ ID NO: 801560 - DNA, 25 bp, Homo sapien
tctctcgagcacatcatgatgtgcc

SEQ ID NO: 801561 - DNA, 25 bp, Homo sapien
gctgcaggaatctggactcgtaagt

SEQ ID NO: 801562 - DNA, 25 bp, Homo sapien
tctggactcgtaagtggaacgcgga

SEQ ID NO: 801563 - DNA, 25 bp, Homo sapien
ggaacgcggaagtggaacagcaaca

SEQ ID NO: 801564 - DNA, 25 bp, Homo sapien
cagctgatgatccagcgcacaaagc

SEQ ID NO: 801565 - DNA, 25 bp, Homo sapien
gcgaggagctcccttcacgctgatg

SEQ ID NO: 801566 - DNA, 25 bp, Homo sapien
gccggtgggcgccaactgtgcaggc

SEQ ID NO: 801567 - DNA, 25 bp, Homo sapien
gagtcacgtcctctgagcccggacg

SEQ ID NO: 801568 - DNA, 25 bp, Homo sapien
tgagcggctagcgagccctgcagcc

SEQ ID NO: 801569 - DNA, 25 bp, Homo sapien
gcgcgcagcctgagccgccgctggg

SEQ ID NO: 801570 - DNA, 25 bp, Homo sapien
gtccgcaaccaccgtcaatgcttta

SEQ ID NO: 801571 - DNA, 25 bp, Homo sapien
gagccaggcgcgcagcctgagccgc

SEQ ID NO: 801572 - DNA, 25 bp, Homo sapien
gctctgtccgcagaagccgtccgca

SEQ ID NO: 801573 - DNA, 25 bp, Homo sapien
agcggtcgcgagatccaggtcccgc

SEQ ID NO: 801574 - DNA, 25 bp, Homo sapien
ctggggcagcggtcgcgagatccag

SEQ ID NO: 801575 - DNA, 25 bp, Homo sapien
gggcagcggtcgcgagatccaggtc

SEQ ID NO: 801576 - DNA, 25 bp, Homo sapien
gcagcggtcgcgagatccaggtccc

SEQ ID NO: 801577 - DNA, 25 bp, Homo sapien
tctgggcagtcgacgcgccgaaccg

SEQ ID NO: 801578 - DNA, 25 bp, Homo sapien
agcagccacttcctcgtgggcgggg

SEQ ID NO: 801579 - DNA, 25 bp, Homo sapien
ggactctgggcagtcgacgcgccga

SEQ ID NO: 801580 - DNA, 25 bp, Homo sapien
agtcgacgcgccgaaccggctctgg

SEQ ID NO: 801581 - DNA, 25 bp, Homo sapien
cagacaaaagcaacgatttgttcaa

SEQ ID NO: 801582 - DNA, 25 bp, Homo sapien
caaaagcaacgatttgttcaaagtc

SEQ ID NO: 801583 - DNA, 25 bp, Homo sapien
ggctcagacaaaagcaacgatttgt

SEQ ID NO: 801584 - DNA, 25 bp, Homo sapien
ccaggctcagacaaaagcaacgatt

SEQ ID NO: 801585 - DNA, 25 bp, Homo sapien
gcagtgagtcaaggtagtgtcacca

SEQ ID NO: 801586 - DNA, 25 bp, Homo sapien
agtcaaggtagtgtcaccacactcc

SEQ ID NO: 801587 - DNA, 25 bp, Homo sapien
cagtgagtcaaggtagtgtcaccac

SEQ ID NO: 801588 - DNA, 25 bp, Homo sapien
tgagtcaaggtagtgtcaccacact

SEQ ID NO: 801589 - DNA, 25 bp, Homo sapien
gatccaaaccgcttgctttcacttg

SEQ ID NO: 801590 - DNA, 25 bp, Homo sapien
actccagatccaaaccgcttgcttt

SEQ ID NO: 801591 - DNA, 25 bp, Homo sapien
gcttgctttcacttgtatcaggatg

SEQ ID NO: 801592 - DNA, 25 bp, Homo sapien
aaccgcttgctttcacttgtatcag

SEQ ID NO: 801593 - DNA, 25 bp, Homo sapien
ggtccttgttccaggcgtggcagct

SEQ ID NO: 801594 - DNA, 25 bp, Homo sapien
cttgttccaggcgtggcagctgatg

SEQ ID NO: 801595 - DNA, 25 bp, Homo sapien
aggcgtggcagctgatgggctccac

SEQ ID NO: 801596 - DNA, 25 bp, Homo sapien
caggcgtggcagctgatgggctcca

SEQ ID NO: 801597 - DNA, 25 bp, Homo sapien
cctcttctgccttgcaggggccccc

SEQ ID NO: 801598 - DNA, 25 bp, Homo sapien
gctaggccaccctgtcttctcctgg

SEQ ID NO: 801599 - DNA, 25 bp, Homo sapien
cttctgccttgcaggggccccctga

SEQ ID NO: 801600 - DNA, 25 bp, Homo sapien
ctgctaggccaccctgtcttctcct

SEQ ID NO: 801601 - DNA, 25 bp, Homo sapien
cttgagctcgtgcaccttggtccat

SEQ ID NO: 801602 - DNA, 25 bp, Homo sapien
tggcaccgctcttttcatagatatg

SEQ ID NO: 801603 - DNA, 25 bp, Homo sapien
agatatgcacctcatggttgttggg

SEQ ID NO: 801604 - DNA, 25 bp, Homo sapien
ggtccatttggcaccgctcttttca

SEQ ID NO: 801605 - DNA, 25 bp, Homo sapien
ttggtaacatgagccaacacagtcc

SEQ ID NO: 801606 - DNA, 25 bp, Homo sapien
tggatcaagcctctcctgaagccct

SEQ ID NO: 801607 - DNA, 25 bp, Homo sapien
gaagccagtttgaatccgggtttca

SEQ ID NO: 801608 - DNA, 25 bp, Homo sapien
tccacaatgagtggccatgccctgc

SEQ ID NO: 801609 - DNA, 25 bp, Homo sapien
tctgtgccgcaggtcacaatacggt

SEQ ID NO: 801610 - DNA, 25 bp, Homo sapien
tccgcaggatgaccagcgtgggctt

SEQ ID NO: 801611 - DNA, 25 bp, Homo sapien
tcagcgtccacacgtaggcgttgcg

SEQ ID NO: 801612 - DNA, 25 bp, Homo sapien
acagatggagatcacacgagagccg

SEQ ID NO: 801613 - DNA, 25 bp, Homo sapien
gcagagaactgctcgaacccggcag

SEQ ID NO: 801614 - DNA, 25 bp, Homo sapien
gaggcagagaactgctcgaacccgg

SEQ ID NO: 801615 - DNA, 25 bp, Homo sapien
tatccgggcatggtagcaggtgcct

SEQ ID NO: 801616 - DNA, 25 bp, Homo sapien
ttatccgggcatggtagcaggtgcc

SEQ ID NO: 801617 - DNA, 25 bp, Homo sapien
aatgatttgggcctgtagtccgagc

SEQ ID NO: 801618 - DNA, 25 bp, Homo sapien
gatgccatcaccagaggtcacacaa

SEQ ID NO: 801619 - DNA, 25 bp, Homo sapien
gaactctgtgccctctatcctttag

SEQ ID NO: 801620 - DNA, 25 bp, Homo sapien
taagacgtggactggcaatcatggc

SEQ ID NO: 801621 - DNA, 25 bp, Homo sapien
gaggacggtggagcggatgggcttc

SEQ ID NO: 801622 - DNA, 25 bp, Homo sapien
ggctgaggacggtggagcggatggg

SEQ ID NO: 801623 - DNA, 25 bp, Homo sapien
cacattgttggggtgccagtccagg

SEQ ID NO: 801624 - DNA, 25 bp, Homo sapien
ctgaggacggtggagcggatgggct

SEQ ID NO: 801625 - DNA, 25 bp, Homo sapien
cagctactgctggattcgaacatca

SEQ ID NO: 801626 - DNA, 25 bp, Homo sapien
aacagacgccatgtacccagccgca

SEQ ID NO: 801627 - DNA, 25 bp, Homo sapien
tgtacccagccgcagctactgctgg

SEQ ID NO: 801628 - DNA, 25 bp, Homo sapien
gattcgaacatcagttccccaaagg

SEQ ID NO: 801629 - DNA, 25 bp, Homo sapien
ttcttgtcggcatcagccaggcaga

SEQ ID NO: 801630 - DNA, 25 bp, Homo sapien
cttcttgtcggcatcagccaggcag

SEQ ID NO: 801631 - DNA, 25 bp, Homo sapien
gccatcttcttgtcggcatcagcca

SEQ ID NO: 801632 - DNA, 25 bp, Homo sapien
atcttcttgtcggcatcagccaggc

SEQ ID NO: 801633 - DNA, 25 bp, Homo sapien
agcagtggtagtgtttcagaggcca

SEQ ID NO: 801634 - DNA, 25 bp, Homo sapien
gcagtggtagtgtttcagaggccag

SEQ ID NO: 801635 - DNA, 25 bp, Homo sapien
cagcagtggtagtgtttcagaggcc

SEQ ID NO: 801636 - DNA, 25 bp, Homo sapien
cagccagggacttttggttactgca

SEQ ID NO: 801637 - DNA, 25 bp, Homo sapien
tctgcccaattctggtacatgagag

SEQ ID NO: 801638 - DNA, 25 bp, Homo sapien
accatagctcagttcagaagcctcg

SEQ ID NO: 801639 - DNA, 25 bp, Homo sapien
tactctgttaagcaactgcagccag

SEQ ID NO: 801640 - DNA, 25 bp, Homo sapien
taggtgaacagcaccgggaagcagt

SEQ ID NO: 801641 - DNA, 25 bp, Homo sapien
agctctgcttaggaacgtccagccg

SEQ ID NO: 801642 - DNA, 25 bp, Homo sapien
ttcttgtgcagcgagtctaggcccg

SEQ ID NO: 801643 - DNA, 25 bp, Homo sapien
ggagctcgccttcttgtccaggttc

SEQ ID NO: 801644 - DNA, 25 bp, Homo sapien
caggcaaatgggacaggacactcaa

SEQ ID NO: 801645 - DNA, 25 bp, Homo sapien
tctggcggacacaggaggttttaca

SEQ ID NO: 801646 - DNA, 25 bp, Homo sapien
tatgaattcaacctgtgctggcgct

SEQ ID NO: 801647 - DNA, 25 bp, Homo sapien
tttacagaccgaagggcttggccag

SEQ ID NO: 801648 - DNA, 25 bp, Homo sapien
cgccatccatgccagtggtgcagaa

SEQ ID NO: 801649 - DNA, 25 bp, Homo sapien
tggtgcagaactgcgagcacttggc

SEQ ID NO: 801650 - DNA, 25 bp, Homo sapien
agcacttggccttgccgccgctgag

SEQ ID NO: 801651 - DNA, 25 bp, Homo sapien
ccagatactcatgccgccatccatg

SEQ ID NO: 801652 - DNA, 25 bp, Homo sapien
ccagggacctgatcacccatctcag

SEQ ID NO: 801653 - DNA, 25 bp, Homo sapien
gaatcccggccctgaagacgggtgc

SEQ ID NO: 801654 - DNA, 25 bp, Homo sapien
gagaacctgcagttttggagtctgt

SEQ ID NO: 801655 - DNA, 25 bp, Homo sapien
ctcatccccatgcagtgccatctct

SEQ ID NO: 801656 - DNA, 25 bp, Homo sapien
catttgatcttgaggtccttcaagg

SEQ ID NO: 801657 - DNA, 25 bp, Homo sapien
tcatttgatcttgaggtccttcaag

SEQ ID NO: 801658 - DNA, 25 bp, Homo sapien
ttgatcttgaggtccttcaaggctg

SEQ ID NO: 801659 - DNA, 25 bp, Homo sapien
cttgaggtccttcaaggctgactcc

SEQ ID NO: 801660 - DNA, 25 bp, Homo sapien
gcaaagcaaccattagcctccctga

SEQ ID NO: 801661 - DNA, 25 bp, Homo sapien
gcccctatgggaactcgtattggta

SEQ ID NO: 801662 - DNA, 25 bp, Homo sapien
cccagcagctaggatgaaggcaaca

SEQ ID NO: 801663 - DNA, 25 bp, Homo sapien
ttgaataggtaagaaaagctcccca

SEQ ID NO: 801664 - DNA, 25 bp, Homo sapien
caagtcaggatcttaggcctcagca

SEQ ID NO: 801665 - DNA, 25 bp, Homo sapien
tagcattggatgtcgccaaggccca

SEQ ID NO: 801666 - DNA, 25 bp, Homo sapien
gatggaccctagataccacagcctg

SEQ ID NO: 801667 - DNA, 25 bp, Homo sapien
ggttcagggcacatacctacctggg

SEQ ID NO: 801668 - DNA, 25 bp, Homo sapien
tcttcaggcgatctctaaggcatga

SEQ ID NO: 801669 - DNA, 25 bp, Homo sapien
tatagaattccagagccgctgttgc

SEQ ID NO: 801670 - DNA, 25 bp, Homo sapien
tacccgcgcggagattgcgtcatct

SEQ ID NO: 801671 - DNA, 25 bp, Homo sapien
taaggcatgaggtccttgcggagcc

SEQ ID NO: 801672 - DNA, 25 bp, Homo sapien
tcccctcagaagaacgaacgtggcg

SEQ ID NO: 801673 - DNA, 25 bp, Homo sapien
cgggagctctctccggcctcaaggt

SEQ ID NO: 801674 - DNA, 25 bp, Homo sapien
ctcaaggtccaaagcccgaacacat

SEQ ID NO: 801675 - DNA, 25 bp, Homo sapien
ccaaggtaatcgagaacagagggaa

SEQ ID NO: 801676 - DNA, 25 bp, Homo sapien
gaaacggcgcgagaatcctagagga

SEQ ID NO: 801677 - DNA, 25 bp, Homo sapien
aggaaacggcgcgagaatcctagag

SEQ ID NO: 801678 - DNA, 25 bp, Homo sapien
acggcgcgagaatcctagaggaaaa

SEQ ID NO: 801679 - DNA, 25 bp, Homo sapien
cagaggaaacggcgcgagaatccta

SEQ ID NO: 801680 - DNA, 25 bp, Homo sapien
gttgcaggcttggattcttgttcag

SEQ ID NO: 801681 - DNA, 25 bp, Homo sapien
acagcagaaagatctctcgtctctg

SEQ ID NO: 801682 - DNA, 25 bp, Homo sapien
tcttgttcagctctaaaaaattatt

SEQ ID NO: 801683 - DNA, 25 bp, Homo sapien
cagcagaaagatctctcgtctctgc

SEQ ID NO: 801684 - DNA, 25 bp, Homo sapien
aaaaatgaattggtttctgagtctc

SEQ ID NO: 801685 - DNA, 25 bp, Homo sapien
tccttccacaggataatctgcaaag

SEQ ID NO: 801686 - DNA, 25 bp, Homo sapien
cttccacaggataatctgcaaagat

SEQ ID NO: 801687 - DNA, 25 bp, Homo sapien
ccttccacaggataatctgcaaaga

SEQ ID NO: 801688 - DNA, 25 bp, Homo sapien
tgttggctcaatcaactcccagcca

SEQ ID NO: 801689 - DNA, 25 bp, Homo sapien
tccagtgttggctcaatcaactccc

SEQ ID NO: 801690 - DNA, 25 bp, Homo sapien
tcatccagtgttggctcaatcaact

SEQ ID NO: 801691 - DNA, 25 bp, Homo sapien
cagtgttggctcaatcaactcccag

SEQ ID NO: 801692 - DNA, 25 bp, Homo sapien
cacccagacaggaactcccctactc

SEQ ID NO: 801693 - DNA, 25 bp, Homo sapien
cccagacaggaactcccctactcac

SEQ ID NO: 801694 - DNA, 25 bp, Homo sapien
ccacccagacaggaactcccctact

SEQ ID NO: 801695 - DNA, 25 bp, Homo sapien
acccagacaggaactcccctactca

SEQ ID NO: 801696 - DNA, 25 bp, Homo sapien
gcctgtaatccaaattactcgagag

SEQ ID NO: 801697 - DNA, 25 bp, Homo sapien
ccatgattaggttagttacaagcaa

SEQ ID NO: 801698 - DNA, 25 bp, Homo sapien
gaccgtgattactgcaataggccca

SEQ ID NO: 801699 - DNA, 25 bp, Homo sapien
taaagagctgtttcgggaagacatc

SEQ ID NO: 801700 - DNA, 25 bp, Homo sapien
taattactgctggaggtacgacctc

SEQ ID NO: 801701 - DNA, 25 bp, Homo sapien
ttaacaggttcacttttacagtata

SEQ ID NO: 801702 - DNA, 25 bp, Homo sapien
taagccgccgggcattttgggaggc

SEQ ID NO: 801703 - DNA, 25 bp, Homo sapien
agaataagccgccgggcattttggg

SEQ ID NO: 801704 - DNA, 25 bp, Homo sapien
aaaacagaataagccgccgggcatt

SEQ ID NO: 801705 - DNA, 25 bp, Homo sapien
gcagaagagttaggtggctcctcaa

SEQ ID NO: 801706 - DNA, 25 bp, Homo sapien
aattggaactctcctacgttcctgg

SEQ ID NO: 801707 - DNA, 25 bp, Homo sapien
gctggaccctacagatgactataat

SEQ ID NO: 801708 - DNA, 25 bp, Homo sapien
agttaaacagggctggccggaatcg

SEQ ID NO: 801709 - DNA, 25 bp, Homo sapien
gggccacagagattccactttcctc

SEQ ID NO: 801710 - DNA, 25 bp, Homo sapien
aggtcgaagatgtagcgggttttct

SEQ ID NO: 801711 - DNA, 25 bp, Homo sapien
gctttccgcttgtaaaagaggtcga

SEQ ID NO: 801712 - DNA, 25 bp, Homo sapien
tgctgatggctttccgcttgtaaaa

SEQ ID NO: 801713 - DNA, 25 bp, Homo sapien
attactcgggcgtggtagcagctgt

SEQ ID NO: 801714 - DNA, 25 bp, Homo sapien
tcagtattgcaacgggacagtcctt

SEQ ID NO: 801715 - DNA, 25 bp, Homo sapien
aaaattactcgggcgtggtagcagc

SEQ ID NO: 801716 - DNA, 25 bp, Homo sapien
aaggcattcagtattgcaacgggac

SEQ ID NO: 801717 - DNA, 25 bp, Homo sapien
gcggcagatgcagttcgtcccgaag

SEQ ID NO: 801718 - DNA, 25 bp, Homo sapien
cagcttgcttttgggcacgcggcag

SEQ ID NO: 801719 - DNA, 25 bp, Homo sapien
ccgaagttggtgtcccgtgtctgaa

SEQ ID NO: 801720 - DNA, 25 bp, Homo sapien
ccgtgtctgaatgcaccgcaggcag

SEQ ID NO: 801721 - DNA, 25 bp, Homo sapien
tatcactgtgaggactgaaagggac

SEQ ID NO: 801722 - DNA, 25 bp, Homo sapien
catccagggacaaaacgacattcca

SEQ ID NO: 801723 - DNA, 25 bp, Homo sapien
gagttgagattgaccccagacctaa

SEQ ID NO: 801724 - DNA, 25 bp, Homo sapien
cataagatcccttgcagtcgactaa

SEQ ID NO: 801725 - DNA, 25 bp, Homo sapien
tgctaagtgagcatgacagaccctg

SEQ ID NO: 801726 - DNA, 25 bp, Homo sapien
gaaaatttggctccctcatgaaggt

SEQ ID NO: 801727 - DNA, 25 bp, Homo sapien
agctgctgttgacaccgaggttaca

SEQ ID NO: 801728 - DNA, 25 bp, Homo sapien
tgccatatagggacacacctcagaa

SEQ ID NO: 801729 - DNA, 25 bp, Homo sapien
agtgtgtgcactcgatgatgcggcc

SEQ ID NO: 801730 - DNA, 25 bp, Homo sapien
tcagccagagcagccacgacagcca

SEQ ID NO: 801731 - DNA, 25 bp, Homo sapien
cagccagagcagccacgacagccac

SEQ ID NO: 801732 - DNA, 25 bp, Homo sapien
aggaacctgcgaagtccagagtcca

SEQ ID NO: 801733 - DNA, 25 bp, Homo sapien
ggtggcgtgacaggcaggaacctgc

SEQ ID NO: 801734 - DNA, 25 bp, Homo sapien
atagagaccgtgctccaactcgggc

SEQ ID NO: 801735 - DNA, 25 bp, Homo sapien
ccatagagaccgtgctccaactcgg

SEQ ID NO: 801736 - DNA, 25 bp, Homo sapien
cacagctgatagacagcgaagcctt

SEQ ID NO: 801737 - DNA, 25 bp, Homo sapien
tcacagctgatagacagcgaagcct

SEQ ID NO: 801738 - DNA, 25 bp, Homo sapien
cagctgatagacagcgaagccttcc

SEQ ID NO: 801739 - DNA, 25 bp, Homo sapien
aatcacagctgatagacagcgaagc

SEQ ID NO: 801740 - DNA, 25 bp, Homo sapien
acactcctccttcgcttcgcctcgc

SEQ ID NO: 801741 - DNA, 25 bp, Homo sapien
cagccttctcgcctttacccgccgc

SEQ ID NO: 801742 - DNA, 25 bp, Homo sapien
cacacactcctccttcgcttcgcct

SEQ ID NO: 801743 - DNA, 25 bp, Homo sapien
tgcagccttctcgcctttacccgcc

SEQ ID NO: 801744 - DNA, 25 bp, Homo sapien
ttgatgtggtccacgctggcgatga

SEQ ID NO: 801745 - DNA, 25 bp, Homo sapien
ctgctccaccgcgatctccaagtca

SEQ ID NO: 801746 - DNA, 25 bp, Homo sapien
cagagggccaaagatccgaggcagt

SEQ ID NO: 801747 - DNA, 25 bp, Homo sapien
caggagtcctgaaaccaaggggagc

SEQ ID NO: 801748 - DNA, 25 bp, Homo sapien
aaggagtccccagacggtggaaatg

SEQ ID NO: 801749 - DNA, 25 bp, Homo sapien
cagtgaactcctgagtccgagtgag

SEQ ID NO: 801750 - DNA, 25 bp, Homo sapien
gacgggccaaaaactagggatgagc

SEQ ID NO: 801751 - DNA, 25 bp, Homo sapien
gctgctgggtgtgatgaataactca

SEQ ID NO: 801752 - DNA, 25 bp, Homo sapien
ggaagccaggagccaccatatgaag

SEQ ID NO: 801753 - DNA, 25 bp, Homo sapien
tgaagggagttcaggccaagggtcc

SEQ ID NO: 801754 - DNA, 25 bp, Homo sapien
agaggtcacatgtgcatgagaaggt

SEQ ID NO: 801755 - DNA, 25 bp, Homo sapien
gtcacatgtgcatgagaaggtgtga

SEQ ID NO: 801756 - DNA, 25 bp, Homo sapien
tcagaggtcacatgtgcatgagaag

SEQ ID NO: 801757 - DNA, 25 bp, Homo sapien
catgtgcatgagaaggtgtgaccgc

SEQ ID NO: 801758 - DNA, 25 bp, Homo sapien
cctatggttaacttggataagccga

SEQ ID NO: 801759 - DNA, 25 bp, Homo sapien
ctgtgagcttggagagtaagaaagc

SEQ ID NO: 801760 - DNA, 25 bp, Homo sapien
ctgctcaggcagctaggtttgggat

SEQ ID NO: 801761 - DNA, 25 bp, Homo sapien
gataagccgaaggaaagagctcaaa

SEQ ID NO: 801762 - DNA, 25 bp, Homo sapien
tgccgcaggcagctttcaaaaagaa

SEQ ID NO: 801763 - DNA, 25 bp, Homo sapien
aaaaagaattcacagacagcagcgc

SEQ ID NO: 801764 - DNA, 25 bp, Homo sapien
aattcacagacagcagcgcccgact

SEQ ID NO: 801765 - DNA, 25 bp, Homo sapien
cgcaggcagctttcaaaaagaattc

SEQ ID NO: 801766 - DNA, 25 bp, Homo sapien
tggttatcgagaacaagaccccgca

SEQ ID NO: 801767 - DNA, 25 bp, Homo sapien
taaggcagccttagagccaggttca

SEQ ID NO: 801768 - DNA, 25 bp, Homo sapien
ttcaggtggaacaccccatcagggt

SEQ ID NO: 801769 - DNA, 25 bp, Homo sapien
gacactgggctctgccgcttattaa

SEQ ID NO: 801770 - DNA, 25 bp, Homo sapien
aggcaacatgatttgaggtactaca

SEQ ID NO: 801771 - DNA, 25 bp, Homo sapien
tgaaggcatcacgtcctggaaaggg

SEQ ID NO: 801772 - DNA, 25 bp, Homo sapien
tgaggtactacactgacagacattt

SEQ ID NO: 801773 - DNA, 25 bp, Homo sapien
ctgaaggcatcacgtcctggaaagg

SEQ ID NO: 801774 - DNA, 25 bp, Homo sapien
tcatgcaggaactcacactggtccc

SEQ ID NO: 801775 - DNA, 25 bp, Homo sapien
tgcaggaactcacactggtcccctt

SEQ ID NO: 801776 - DNA, 25 bp, Homo sapien
tactcatgcaggaactcacactggt

SEQ ID NO: 801777 - DNA, 25 bp, Homo sapien
tcatactcatgcaggaactcacact

SEQ ID NO: 801778 - DNA, 25 bp, Homo sapien
tgttcgtctcatggcctatcagcta

SEQ ID NO: 801779 - DNA, 25 bp, Homo sapien
tttccctggaccacaagagtgaagg

SEQ ID NO: 801780 - DNA, 25 bp, Homo sapien
tatagcggtgccttaagagcctgcc

SEQ ID NO: 801781 - DNA, 25 bp, Homo sapien
gggccctcaacccaatgtctgtggt

SEQ ID NO: 801782 - DNA, 25 bp, Homo sapien
ggtcgatgtgcaggaagggacattc

SEQ ID NO: 801783 - DNA, 25 bp, Homo sapien
cgtgcttgcagaagccacggtcata

SEQ ID NO: 801784 - DNA, 25 bp, Homo sapien
cagaagccacggtcataccaaggac

SEQ ID NO: 801785 - DNA, 25 bp, Homo sapien
caggaagggacattccttgttgctg

SEQ ID NO: 801786 - DNA, 25 bp, Homo sapien
gagaaagccgctagctgcagaatgt

SEQ ID NO: 801787 - DNA, 25 bp, Homo sapien
tatcaaaaaagcgggtggaccacca

SEQ ID NO: 801788 - DNA, 25 bp, Homo sapien
gctgtcccccattcatgggagacgg

SEQ ID NO: 801789 - DNA, 25 bp, Homo sapien
tcccctctaccagttagagagctgg

SEQ ID NO: 801790 - DNA, 25 bp, Homo sapien
aatcccacgaggtaattcacacaga

SEQ ID NO: 801791 - DNA, 25 bp, Homo sapien
tgcatgaatttacacgagggcccct

SEQ ID NO: 801792 - DNA, 25 bp, Homo sapien
tccgggcagaatcccacgaggtaat

SEQ ID NO: 801793 - DNA, 25 bp, Homo sapien
acagatgactctccgtgtgtgccgg

SEQ ID NO: 801794 - DNA, 25 bp, Homo sapien
tgcgggctcaggaagcattggtggc

SEQ ID NO: 801795 - DNA, 25 bp, Homo sapien
agcttccattacattaccagatggc

SEQ ID NO: 801796 - DNA, 25 bp, Homo sapien
tggcccatgacccaagaaagatcag

SEQ ID NO: 801797 - DNA, 25 bp, Homo sapien
gctcctggtctaggcagagccacct

SEQ ID NO: 801798 - DNA, 25 bp, Homo sapien
tcccatgggcagttcaaatcgaggg

SEQ ID NO: 801799 - DNA, 25 bp, Homo sapien
ttcccatgggcagttcaaatcgagg

SEQ ID NO: 801800 - DNA, 25 bp, Homo sapien
gttcccatgggcagttcaaatcgag

SEQ ID NO: 801801 - DNA, 25 bp, Homo sapien
ggttcccatgggcagttcaaatcga

SEQ ID NO: 801802 - DNA, 25 bp, Homo sapien
ttggagcctgacacactgagctgcg

SEQ ID NO: 801803 - DNA, 25 bp, Homo sapien
ccgtaagtgcagaacccgagctaga

SEQ ID NO: 801804 - DNA, 25 bp, Homo sapien
tctcgagggagatatacacggcttt

SEQ ID NO: 801805 - DNA, 25 bp, Homo sapien
gttagccccatctcacaacgggtgg

SEQ ID NO: 801806 - DNA, 25 bp, Homo sapien
ggtcaggatgaacgcttggttcagc

SEQ ID NO: 801807 - DNA, 25 bp, Homo sapien
tcaggatgaacgcttggttcagcca

SEQ ID NO: 801808 - DNA, 25 bp, Homo sapien
ggatgaacgcttggttcagccagat

SEQ ID NO: 801809 - DNA, 25 bp, Homo sapien
tcaggtcaggatgaacgcttggttc

SEQ ID NO: 801810 - DNA, 25 bp, Homo sapien
cagagaaacatgtggtgatgatggc

SEQ ID NO: 801811 - DNA, 25 bp, Homo sapien
tcgtcccgcaaacggcaggaagcag

SEQ ID NO: 801812 - DNA, 25 bp, Homo sapien
tgtggaaaacacgtgcacgcagact

SEQ ID NO: 801813 - DNA, 25 bp, Homo sapien
cactgcccgaaaaacaccatgcaga

SEQ ID NO: 801814 - DNA, 25 bp, Homo sapien
ctggaaagagttacacaacacggtt

SEQ ID NO: 801815 - DNA, 25 bp, Homo sapien
gacgacctttgtaatggcggattgt

SEQ ID NO: 801816 - DNA, 25 bp, Homo sapien
ctggatcaaggaggacgacctttgt

SEQ ID NO: 801817 - DNA, 25 bp, Homo sapien
gttctgactcgttaactggatcaag

SEQ ID NO: 801818 - DNA, 25 bp, Homo sapien
gaagagttctgactcgttaactgga

SEQ ID NO: 801819 - DNA, 25 bp, Homo sapien
gtaacaggtgacctgctccagtggc

SEQ ID NO: 801820 - DNA, 25 bp, Homo sapien
tttgactctgcatgaccccgatgac

SEQ ID NO: 801821 - DNA, 25 bp, Homo sapien
cggttgcccgcgctgctgttttgac

SEQ ID NO: 801822 - DNA, 25 bp, Homo sapien
cttgtaacaggtgacctgctccagt

SEQ ID NO: 801823 - DNA, 25 bp, Homo sapien
tggccactgacggtaagggaagacc

SEQ ID NO: 801824 - DNA, 25 bp, Homo sapien
tgttttctcgggtgtgccctgcagg

SEQ ID NO: 801825 - DNA, 25 bp, Homo sapien
ccattcactaggcaggcgttctcac

SEQ ID NO: 801826 - DNA, 25 bp, Homo sapien
gaaataggacagtctctagcccacc

SEQ ID NO: 801827 - DNA, 25 bp, Homo sapien
cataagggcccattaataacgtcaa

SEQ ID NO: 801828 - DNA, 25 bp, Homo sapien
gaatacaggcctagactcacataag

SEQ ID NO: 801829 - DNA, 25 bp, Homo sapien
aattgtgtgcgccttgggttgagaa

SEQ ID NO: 801830 - DNA, 25 bp, Homo sapien
caggacagttttcgaggaggtttct

SEQ ID NO: 801831 - DNA, 25 bp, Homo sapien
ctggagggtggcaagataacagcta

SEQ ID NO: 801832 - DNA, 25 bp, Homo sapien
agtggccccgcttaacaggcctgga

SEQ ID NO: 801833 - DNA, 25 bp, Homo sapien
cagctaagtctgctctacacagtgc

SEQ ID NO: 801834 - DNA, 25 bp, Homo sapien
ctgcacagaagtggccccgcttaac

SEQ ID NO: 801835 - DNA, 25 bp, Homo sapien
taaggctccaggacttaagggcgct

SEQ ID NO: 801836 - DNA, 25 bp, Homo sapien
tctaaggctccaggacttaagggcg

SEQ ID NO: 801837 - DNA, 25 bp, Homo sapien
aggctccaggacttaagggcgcttg

SEQ ID NO: 801838 - DNA, 25 bp, Homo sapien
ctttctaaggctccaggacttaagg

SEQ ID NO: 801839 - DNA, 25 bp, Homo sapien
tgtgacacacctaagctaccttggg

SEQ ID NO: 801840 - DNA, 25 bp, Homo sapien
gaacagcatcagaagtgtcccagcc

SEQ ID NO: 801841 - DNA, 25 bp, Homo sapien
ctgccgatgggctgtagggctaaca

SEQ ID NO: 801842 - DNA, 25 bp, Homo sapien
aacgttttccctcgtggctgtgaca

SEQ ID NO: 801843 - DNA, 25 bp, Homo sapien
tccccagtcgggacatgactctgaa

SEQ ID NO: 801844 - DNA, 25 bp, Homo sapien
cagttttcaactaagggagtgccca

SEQ ID NO: 801845 - DNA, 25 bp, Homo sapien
cagtggtgcagaaactagccagcaa

SEQ ID NO: 801846 - DNA, 25 bp, Homo sapien
actcccaagtgggtagcaggacaaa

SEQ ID NO: 801847 - DNA, 25 bp, Homo sapien
gccaagtgccctttggtgcatctgt

SEQ ID NO: 801848 - DNA, 25 bp, Homo sapien
gcgggccagctcgagccacagtcgc

SEQ ID NO: 801849 - DNA, 25 bp, Homo sapien
aacaagcgcatgaaacagttaaatg

SEQ ID NO: 801850 - DNA, 25 bp, Homo sapien
ccacagtcgcgccaacaagcgcatg

SEQ ID NO: 801851 - DNA, 25 bp, Homo sapien
agcgcatgaaacagttaaatgcaca

SEQ ID NO: 801852 - DNA, 25 bp, Homo sapien
gataggaaactaacagacgtggccc

SEQ ID NO: 801853 - DNA, 25 bp, Homo sapien
gcatcgatgcccagccaaacatgat

SEQ ID NO: 801854 - DNA, 25 bp, Homo sapien
aacatgatgtcgactgcagggaccc

SEQ ID NO: 801855 - DNA, 25 bp, Homo sapien
gacgtggcccctcagagtgatgaaa

SEQ ID NO: 801856 - DNA, 25 bp, Homo sapien
ggggaatgaccaccgccacacagaa

SEQ ID NO: 801857 - DNA, 25 bp, Homo sapien
gctttgaatgacctaccagcccctg

SEQ ID NO: 801858 - DNA, 25 bp, Homo sapien
agcccctggcgtcaccaagaactgg

SEQ ID NO: 801859 - DNA, 25 bp, Homo sapien
tcaccaagaactggtgtttaatgag

SEQ ID NO: 801860 - DNA, 25 bp, Homo sapien
catgccacaggtgtctgagtgacag

SEQ ID NO: 801861 - DNA, 25 bp, Homo sapien
tcaaatcacagatataggcacagct

SEQ ID NO: 801862 - DNA, 25 bp, Homo sapien
cacagctttaggattcagcagggca

SEQ ID NO: 801863 - DNA, 25 bp, Homo sapien
gtcaggcacgtaccccaagagaaaa

SEQ ID NO: 801864 - DNA, 25 bp, Homo sapien
agttggctggccctttatggtgtaa

SEQ ID NO: 801865 - DNA, 25 bp, Homo sapien
cgaagtccgtcccttgccatgagtg

SEQ ID NO: 801866 - DNA, 25 bp, Homo sapien
aaggcttgcgtacctgagagcgcca

SEQ ID NO: 801867 - DNA, 25 bp, Homo sapien
caggtgcatttgcagacattctggc

SEQ ID NO: 801868 - DNA, 25 bp, Homo sapien
tcactcccattctgtggcaccaggg

SEQ ID NO: 801869 - DNA, 25 bp, Homo sapien
gtggcaggttggctcctgaggtgtc

SEQ ID NO: 801870 - DNA, 25 bp, Homo sapien
tgcctctgaaggacgggttctctgg

SEQ ID NO: 801871 - DNA, 25 bp, Homo sapien
tttgtgccccccgggtctgctgatt

SEQ ID NO: 801872 - DNA, 25 bp, Homo sapien
tggtgctggcatgctacgtgctctt

SEQ ID NO: 801873 - DNA, 25 bp, Homo sapien
ctcctcttgtggttatctttgagaa

SEQ ID NO: 801874 - DNA, 25 bp, Homo sapien
cagcagactcttgaggctggtcctg

SEQ ID NO: 801875 - DNA, 25 bp, Homo sapien
tggctcctcttgtggttatctttga

SEQ ID NO: 801876 - DNA, 25 bp, Homo sapien
tcctgacagagccttagtctttcct

SEQ ID NO: 801877 - DNA, 25 bp, Homo sapien
ccctcgcgcggtccggcacagcgga

SEQ ID NO: 801878 - DNA, 25 bp, Homo sapien
agtgtccggccccaggtaaggctgt

SEQ ID NO: 801879 - DNA, 25 bp, Homo sapien
tttggactccgtggtggaagcagga

SEQ ID NO: 801880 - DNA, 25 bp, Homo sapien
aaatggcgtcagttggtgagtgtcc

SEQ ID NO: 801881 - DNA, 25 bp, Homo sapien
agttgtgacctgcttcccgtgagcc

SEQ ID NO: 801882 - DNA, 25 bp, Homo sapien
tagttccagggtgttcgcagttgtg

SEQ ID NO: 801883 - DNA, 25 bp, Homo sapien
gcttcatggccttctagtagttcca

SEQ ID NO: 801884 - DNA, 25 bp, Homo sapien
cctggatggggcgtgcattccctac

SEQ ID NO: 801885 - DNA, 25 bp, Homo sapien
tataattgtatatgcgattttcact

SEQ ID NO: 801886 - DNA, 25 bp, Homo sapien
taattgtatatgcgattttcactgc

SEQ ID NO: 801887 - DNA, 25 bp, Homo sapien
ataattgtatatgcgattttcactg

SEQ ID NO: 801888 - DNA, 25 bp, Homo sapien
ctataattgtatatgcgattttcac

SEQ ID NO: 801889 - DNA, 25 bp, Homo sapien
tccagtgtgcggatcctgggctccg

SEQ ID NO: 801890 - DNA, 25 bp, Homo sapien
cctggattccagtgtgcggatcctg

SEQ ID NO: 801891 - DNA, 25 bp, Homo sapien
ggatcgggcattggcgtagcttccc

SEQ ID NO: 801892 - DNA, 25 bp, Homo sapien
ggcggctctgcgtccccgcgagtgt

SEQ ID NO: 801893 - DNA, 25 bp, Homo sapien
agtcagacgcgctgccgttgcgcca

SEQ ID NO: 801894 - DNA, 25 bp, Homo sapien
gatctggagtcagacgcgctgccgt

SEQ ID NO: 801895 - DNA, 25 bp, Homo sapien
tgaccccgacgtgatttgaacacgc

SEQ ID NO: 801896 - DNA, 25 bp, Homo sapien
gcgctgccgttgcgccacgaggtct

SEQ ID NO: 801897 - DNA, 25 bp, Homo sapien
cggaggaacagacacaaccactctg

SEQ ID NO: 801898 - DNA, 25 bp, Homo sapien
cctgcgcgcgccgagcgaagcgtcc

SEQ ID NO: 801899 - DNA, 25 bp, Homo sapien
ccgagcgaagcgtcccagccagcgg

SEQ ID NO: 801900 - DNA, 25 bp, Homo sapien
ggaacagacacaaccactctggcag

SEQ ID NO: 801901 - DNA, 25 bp, Homo sapien
acggctccgaatctccgccaagccg

SEQ ID NO: 801902 - DNA, 25 bp, Homo sapien
ctgctgacggctccgaatctccgcc

SEQ ID NO: 801903 - DNA, 25 bp, Homo sapien
gacccgaggtctgtctggtccgcgc

SEQ ID NO: 801904 - DNA, 25 bp, Homo sapien
ggcctgacccgaggtctgtctggtc

SEQ ID NO: 801905 - DNA, 25 bp, Homo sapien
tccctgaaaagtgtgcgctgaccag

SEQ ID NO: 801906 - DNA, 25 bp, Homo sapien
tactcaaaagctggtgccacaggcc

SEQ ID NO: 801907 - DNA, 25 bp, Homo sapien
caaaatgccgcttcacaatcacgtg

SEQ ID NO: 801908 - DNA, 25 bp, Homo sapien
tgaaccaatcagctacagatgcgag

SEQ ID NO: 801909 - DNA, 25 bp, Homo sapien
cagagtaacacttcgtctcaaacac

SEQ ID NO: 801910 - DNA, 25 bp, Homo sapien
gagattggcccattgtactccaaac

SEQ ID NO: 801911 - DNA, 25 bp, Homo sapien
acacttcgtctcaaacacaacagca

SEQ ID NO: 801912 - DNA, 25 bp, Homo sapien
ggcccattgtactccaaactgggca

SEQ ID NO: 801913 - DNA, 25 bp, Homo sapien
cattctctacaccaaacttgtccaa

SEQ ID NO: 801914 - DNA, 25 bp, Homo sapien
cctgatcaatggctccaaggctgga

SEQ ID NO: 801915 - DNA, 25 bp, Homo sapien
agcctgtggaccgcatatggcccag

SEQ ID NO: 801916 - DNA, 25 bp, Homo sapien
aaggcctcatccctttcattctcta

SEQ ID NO: 801917 - DNA, 25 bp, Homo sapien
ttgctttctaactcaggatgaattt

SEQ ID NO: 801918 - DNA, 25 bp, Homo sapien
tggatgcccctcaaacacagttcac

SEQ ID NO: 801919 - DNA, 25 bp, Homo sapien
gctttctaactcaggatgaatttta

SEQ ID NO: 801920 - DNA, 25 bp, Homo sapien
tttcattttaatggatgcccctcaa

SEQ ID NO: 801921 - DNA, 25 bp, Homo sapien
caataagtctagtaatttcaatttc

SEQ ID NO: 801922 - DNA, 25 bp, Homo sapien
acaataagtctagtaatttcaattt

SEQ ID NO: 801923 - DNA, 25 bp, Homo sapien
gtgggatcctggacgtctggctgag

SEQ ID NO: 801924 - DNA, 25 bp, Homo sapien
gtgggaacatggcttccacggcctg

SEQ ID NO: 801925 - DNA, 25 bp, Homo sapien
gggaacatggcttccacggcctggt

SEQ ID NO: 801926 - DNA, 25 bp, Homo sapien
acatggcttccacggcctggtcttt

SEQ ID NO: 801927 - DNA, 25 bp, Homo sapien
cattgtggcatggtaactcctctcc

SEQ ID NO: 801928 - DNA, 25 bp, Homo sapien
gcttcatctcccagagtcattgtgg

SEQ ID NO: 801929 - DNA, 25 bp, Homo sapien
tgtacattgacagatgggcaccaaa

SEQ ID NO: 801930 - DNA, 25 bp, Homo sapien
tttccaagaacccatcaacagctag

SEQ ID NO: 801931 - DNA, 25 bp, Homo sapien
atccagagtgtcactcttttaccag

SEQ ID NO: 801932 - DNA, 25 bp, Homo sapien
cactcttttaccagagctgcgctgc

SEQ ID NO: 801933 - DNA, 25 bp, Homo sapien
atgtcctcaatctgacctactcagc

SEQ ID NO: 801934 - DNA, 25 bp, Homo sapien
cattatccagagtgtcactctttta

SEQ ID NO: 801935 - DNA, 25 bp, Homo sapien
caagaaatgtggaagctcgcaggtc

SEQ ID NO: 801936 - DNA, 25 bp, Homo sapien
tataaaaggtacagaccaaggcgca

SEQ ID NO: 801937 - DNA, 25 bp, Homo sapien
gagaccatcctgagaagcttcacgt

SEQ ID NO: 801938 - DNA, 25 bp, Homo sapien
caaacgttcgctgtcctataagtgg

SEQ ID NO: 801939 - DNA, 25 bp, Homo sapien
ccacatcctcaaacgagagcagctc

SEQ ID NO: 801940 - DNA, 25 bp, Homo sapien
ttctgaccccagttgaggtggcccc

SEQ ID NO: 801941 - DNA, 25 bp, Homo sapien
ctggtgaagtacatcgccacatcct

SEQ ID NO: 801942 - DNA, 25 bp, Homo sapien
ctctctggtgaagtacatcgccaca

SEQ ID NO: 801943 - DNA, 25 bp, Homo sapien
agcccaatcttcaagccgtgtccta

SEQ ID NO: 801944 - DNA, 25 bp, Homo sapien
aaagcccaatcttcaagccgtgtcc

SEQ ID NO: 801945 - DNA, 25 bp, Homo sapien
gcccaatcttcaagccgtgtcctac

SEQ ID NO: 801946 - DNA, 25 bp, Homo sapien
aagcccaatcttcaagccgtgtcct

SEQ ID NO: 801947 - DNA, 25 bp, Homo sapien
gataagggactaagggcttgcacag

SEQ ID NO: 801948 - DNA, 25 bp, Homo sapien
gattctggaattgcagataagggac

SEQ ID NO: 801949 - DNA, 25 bp, Homo sapien
gatgtctggtcagggcttgtagcca

SEQ ID NO: 801950 - DNA, 25 bp, Homo sapien
cctataggatgaagtcaggtttcac

SEQ ID NO: 801951 - DNA, 25 bp, Homo sapien
gaagtgtctcggtctgagccctaac

SEQ ID NO: 801952 - DNA, 25 bp, Homo sapien
tgtgaaacccttaggaccagatgtg

SEQ ID NO: 801953 - DNA, 25 bp, Homo sapien
cataacgtatcatccccagtagggt

SEQ ID NO: 801954 - DNA, 25 bp, Homo sapien
aaatccagaggtgggtggacagtcc

SEQ ID NO: 801955 - DNA, 25 bp, Homo sapien
gggaacaattaaatcaagcgtagct

SEQ ID NO: 801956 - DNA, 25 bp, Homo sapien
ggcagtgatatagtaaagaagcact

SEQ ID NO: 801957 - DNA, 25 bp, Homo sapien
gtgaatttcttgtcagatcctcaaa

SEQ ID NO: 801958 - DNA, 25 bp, Homo sapien
taatagacacatagacggactggga

SEQ ID NO: 801959 - DNA, 25 bp, Homo sapien
ttggctgtggtcatttcgctcttag

SEQ ID NO: 801960 - DNA, 25 bp, Homo sapien
ctttggctgtggtcatttcgctctt

SEQ ID NO: 801961 - DNA, 25 bp, Homo sapien
tttggctgtggtcatttcgctctta

SEQ ID NO: 801962 - DNA, 25 bp, Homo sapien
cgcccccacgctttgctaagttttg

SEQ ID NO: 801963 - DNA, 25 bp, Homo sapien
ttgagccactgtacttagccaacta

SEQ ID NO: 801964 - DNA, 25 bp, Homo sapien
gagccactgtacttagccaactatt

SEQ ID NO: 801965 - DNA, 25 bp, Homo sapien
gcacagcgcccccacgctttgctaa

SEQ ID NO: 801966 - DNA, 25 bp, Homo sapien
gggaacaattaaatcaagcgtagca

SEQ ID NO: 801967 - DNA, 25 bp, Homo sapien
cgtagcacattaatgcgatgaaggc

SEQ ID NO: 801968 - DNA, 25 bp, Homo sapien
gcgatgaaggcataagtattaggca

SEQ ID NO: 801969 - DNA, 25 bp, Homo sapien
gtattaggcagatattaaaaatcct

SEQ ID NO: 801970 - DNA, 25 bp, Homo sapien
taaggacaataatcaaaagcggtgg

SEQ ID NO: 801971 - DNA, 25 bp, Homo sapien
tggccgttagtgagttacagagaca

SEQ ID NO: 801972 - DNA, 25 bp, Homo sapien
aagtaaatgggatgtggccgttagt

SEQ ID NO: 801973 - DNA, 25 bp, Homo sapien
ggtgagaatagagattggcacaatc

SEQ ID NO: 801974 - DNA, 25 bp, Homo sapien
ctgggcaagcactaccggaagcctt

SEQ ID NO: 801975 - DNA, 25 bp, Homo sapien
tattcccagttctcggtagatccag

SEQ ID NO: 801976 - DNA, 25 bp, Homo sapien
tctccagctgacagatcatctcagg

SEQ ID NO: 801977 - DNA, 25 bp, Homo sapien
tctcggtagatccaggatccactgc

SEQ ID NO: 801978 - DNA, 25 bp, Homo sapien
gcacctggctcagcgtctggcacac

SEQ ID NO: 801979 - DNA, 25 bp, Homo sapien
tcttcctgattccactcgcctgggt

SEQ ID NO: 801980 - DNA, 25 bp, Homo sapien
gtgggataatatatgcccagcacct

SEQ ID NO: 801981 - DNA, 25 bp, Homo sapien
aaggggcttcactaacatgccttcc

SEQ ID NO: 801982 - DNA, 25 bp, Homo sapien
tccagggtgccctaagagctgtcac

SEQ ID NO: 801983 - DNA, 25 bp, Homo sapien
tcgtcagcccaaaacgtcagtagtg

SEQ ID NO: 801984 - DNA, 25 bp, Homo sapien
cagtgtccacctcccaactgtgaga

SEQ ID NO: 801985 - DNA, 25 bp, Homo sapien
tagagcatctgcgtcagagcagcac

SEQ ID NO: 801986 - DNA, 25 bp, Homo sapien
aggcaactgttaggggtctaggaca

SEQ ID NO: 801987 - DNA, 25 bp, Homo sapien
gggtctaggacaatcaaatgaagct

SEQ ID NO: 801988 - DNA, 25 bp, Homo sapien
gaagctaagaagtgatctcgtttac

SEQ ID NO: 801989 - DNA, 25 bp, Homo sapien
tttacatcatcagactcaagaggcc

SEQ ID NO: 801990 - DNA, 25 bp, Homo sapien
agaaaagatgtaaatgacctatcca

SEQ ID NO: 801991 - DNA, 25 bp, Homo sapien
gattcctgcattaccactgatatct

SEQ ID NO: 801992 - DNA, 25 bp, Homo sapien
ttctgttttggagttagctttttca

SEQ ID NO: 801993 - DNA, 25 bp, Homo sapien
tctgttttggagttagctttttcat

SEQ ID NO: 801994 - DNA, 25 bp, Homo sapien
ttcatcaccactagtagggaaagta

SEQ ID NO: 801995 - DNA, 25 bp, Homo sapien
ctagtagggaaagtaagcctgcaac

SEQ ID NO: 801996 - DNA, 25 bp, Homo sapien
gggaaagtaagcctgcaactgtcca

SEQ ID NO: 801997 - DNA, 25 bp, Homo sapien
tcaccactagtagggaaagtaagcc

SEQ ID NO: 801998 - DNA, 25 bp, Homo sapien
tgcttccaccttgtttgcgcattct

SEQ ID NO: 801999 - DNA, 25 bp, Homo sapien
cctgcttccaccttgtttgcgcatt

SEQ ID NO: 802000 - DNA, 25 bp, Homo sapien
ttccaccttgtttgcgcattctgat

SEQ ID NO: 802001 - DNA, 25 bp, Homo sapien
gcttccaccttgtttgcgcattctg

SEQ ID NO: 802002 - DNA, 25 bp, Homo sapien
tttatggaccgtaagagctgaccgc

SEQ ID NO: 802003 - DNA, 25 bp, Homo sapien
tcttgtgagaattcgctcatgcccc

SEQ ID NO: 802004 - DNA, 25 bp, Homo sapien
tatgttcaacaagatacgcgagctg

SEQ ID NO: 802005 - DNA, 25 bp, Homo sapien
tatggcttgttttgcaggtgacact

SEQ ID NO: 802006 - DNA, 25 bp, Homo sapien
gacatagaagggttgaatgccggcc

SEQ ID NO: 802007 - DNA, 25 bp, Homo sapien
tgatgctgaatgagatccacattcc

SEQ ID NO: 802008 - DNA, 25 bp, Homo sapien
gacacattggtagggttggcttcca

SEQ ID NO: 802009 - DNA, 25 bp, Homo sapien
gacctgatgtcgaaaaagattcctc

SEQ ID NO: 802010 - DNA, 25 bp, Homo sapien
tggatatctgtcctttgtgagtgcc

SEQ ID NO: 802011 - DNA, 25 bp, Homo sapien
gagtgccctggtgcttaataaagct

SEQ ID NO: 802012 - DNA, 25 bp, Homo sapien
cctggtgcttaataaagcttgtgtg

SEQ ID NO: 802013 - DNA, 25 bp, Homo sapien
tcatgtggatatctgtcctttgtga

SEQ ID NO: 802014 - DNA, 25 bp, Homo sapien
tcatggaaacaattacgtgatacac

SEQ ID NO: 802015 - DNA, 25 bp, Homo sapien
cttgaagtagaggtttataagttct

SEQ ID NO: 802016 - DNA, 25 bp, Homo sapien
ataagttctagttctccaatgactg

SEQ ID NO: 802017 - DNA, 25 bp, Homo sapien
ttacgtgatacacacttgaagtaga

SEQ ID NO: 802018 - DNA, 25 bp, Homo sapien
tacagattggctacacaaagatggc

SEQ ID NO: 802019 - DNA, 25 bp, Homo sapien
gagtggacacaacagcctaataacc

SEQ ID NO: 802020 - DNA, 25 bp, Homo sapien
agacatgcgacaccatactggctgt

SEQ ID NO: 802021 - DNA, 25 bp, Homo sapien
taagcgtttcttcactacagattgg

SEQ ID NO: 802022 - DNA, 25 bp, Homo sapien
gatgattggttgacagctgctccca

SEQ ID NO: 802023 - DNA, 25 bp, Homo sapien
cccacagaaggtgtaaggccagagg

SEQ ID NO: 802024 - DNA, 25 bp, Homo sapien
tgcagacacagtcagatgaagccca

SEQ ID NO: 802025 - DNA, 25 bp, Homo sapien
gaatgtgttattaccccacaggcca

SEQ ID NO: 802026 - DNA, 25 bp, Homo sapien
tacaggtgcaccatgccatgcccag

SEQ ID NO: 802027 - DNA, 25 bp, Homo sapien
actcctaagctcaggcagtccgccc

SEQ ID NO: 802028 - DNA, 25 bp, Homo sapien
cctaagctcaggcagtccgcccacc

SEQ ID NO: 802029 - DNA, 25 bp, Homo sapien
cctaggctggtggtgaactcctaag

SEQ ID NO: 802030 - DNA, 25 bp, Homo sapien
cccatgtccgtttctgtcgtatcag

SEQ ID NO: 802031 - DNA, 25 bp, Homo sapien
cagccggttgcctccgctgactggg

SEQ ID NO: 802032 - DNA, 25 bp, Homo sapien
aaactttttccaactgggcgcagcg

SEQ ID NO: 802033 - DNA, 25 bp, Homo sapien
tgtttgttaggatcaaagtcgttaa

SEQ ID NO: 802034 - DNA, 25 bp, Homo sapien
tgcagcctccgaccttcactgtgtt

SEQ ID NO: 802035 - DNA, 25 bp, Homo sapien
ggtctcaagcgatcgtctcatttta

SEQ ID NO: 802036 - DNA, 25 bp, Homo sapien
tcccaagtaagtggtgtatcctgag

SEQ ID NO: 802037 - DNA, 25 bp, Homo sapien
cagtgggttcatcctctcgctgact

SEQ ID NO: 802038 - DNA, 25 bp, Homo sapien
ttgtaagcctagctagtggacaggc

SEQ ID NO: 802039 - DNA, 25 bp, Homo sapien
ttgaccaccgcagtcggctcagaag

SEQ ID NO: 802040 - DNA, 25 bp, Homo sapien
ggtctcgcgagcctatcagaaggtg

SEQ ID NO: 802041 - DNA, 25 bp, Homo sapien
gaaggccgacatcttcaacgtcaca

SEQ ID NO: 802042 - DNA, 25 bp, Homo sapien
agcccgcaaacctcgcttatgttga

SEQ ID NO: 802043 - DNA, 25 bp, Homo sapien
ccgcaaacctcgcttatgttgaatt

SEQ ID NO: 802044 - DNA, 25 bp, Homo sapien
aaacctcgcttatgttgaatttggg

SEQ ID NO: 802045 - DNA, 25 bp, Homo sapien
tgacagcccgcaaacctcgcttatg

SEQ ID NO: 802046 - DNA, 25 bp, Homo sapien
gaagccgctcgcacagcatcaccaa

SEQ ID NO: 802047 - DNA, 25 bp, Homo sapien
ccaatcggcggggagatgggacgcg

SEQ ID NO: 802048 - DNA, 25 bp, Homo sapien
cagcatcaccaaagcggggaggcaa

SEQ ID NO: 802049 - DNA, 25 bp, Homo sapien
agtgactcggacgtctccagggccc

SEQ ID NO: 802050 - DNA, 25 bp, Homo sapien
agactaactagtccagacgcagccg

SEQ ID NO: 802051 - DNA, 25 bp, Homo sapien
gatacagagactgtggcccggtcaa

SEQ ID NO: 802052 - DNA, 25 bp, Homo sapien
gctacaagagcttgacaggccaagg

SEQ ID NO: 802053 - DNA, 25 bp, Homo sapien
aagatgcggttcttcccacggagag

SEQ ID NO: 802054 - DNA, 25 bp, Homo sapien
gaaggacactttcagtagcatgcaa

SEQ ID NO: 802055 - DNA, 25 bp, Homo sapien
tgaaggacactttcagtagcatgca

SEQ ID NO: 802056 - DNA, 25 bp, Homo sapien
aaggacactttcagtagcatgcaac

SEQ ID NO: 802057 - DNA, 25 bp, Homo sapien
tccaactcagagggaagtcttcgag

SEQ ID NO: 802058 - DNA, 25 bp, Homo sapien
ccaactcagagggaagtcttcgagg

SEQ ID NO: 802059 - DNA, 25 bp, Homo sapien
caactcagagggaagtcttcgaggc

SEQ ID NO: 802060 - DNA, 25 bp, Homo sapien
actcagagggaagtcttcgaggctg

SEQ ID NO: 802061 - DNA, 25 bp, Homo sapien
gcctgaagcgctggtaaaaagtctc

SEQ ID NO: 802062 - DNA, 25 bp, Homo sapien
catggtactggaagtgcctgaagcg

SEQ ID NO: 802063 - DNA, 25 bp, Homo sapien
aacgttggcgggttgtactcctgca

SEQ ID NO: 802064 - DNA, 25 bp, Homo sapien
gtatattttctatcacggccaccgc

SEQ ID NO: 802065 - DNA, 25 bp, Homo sapien
tcccacctcaggtgcccaaaatgct

SEQ ID NO: 802066 - DNA, 25 bp, Homo sapien
gagtagctggaagtataagtgcatg

SEQ ID NO: 802067 - DNA, 25 bp, Homo sapien
atgctacccaggctgatgtggaact

SEQ ID NO: 802068 - DNA, 25 bp, Homo sapien
ggctgatgtggaactcctggtctta

SEQ ID NO: 802069 - DNA, 25 bp, Homo sapien
gtgttgccatcttccgaggaagcac

SEQ ID NO: 802070 - DNA, 25 bp, Homo sapien
caggagacgaggcttctgtggcgct

SEQ ID NO: 802071 - DNA, 25 bp, Homo sapien
ggaagcacatcagggcaggcaacaa

SEQ ID NO: 802072 - DNA, 25 bp, Homo sapien
ttccgaggaagcacatcagggcagg

SEQ ID NO: 802073 - DNA, 25 bp, Homo sapien
cccaagttcccgtgggaccatagag

SEQ ID NO: 802074 - DNA, 25 bp, Homo sapien
tgccatgacgaaaggtgacccaagt

SEQ ID NO: 802075 - DNA, 25 bp, Homo sapien
ttcccgtgggaccatagaggcagga

SEQ ID NO: 802076 - DNA, 25 bp, Homo sapien
agcacagcgtgaagagtgccatgac

SEQ ID NO: 802077 - DNA, 25 bp, Homo sapien
tgcattctgctttgccaagatcaaa

SEQ ID NO: 802078 - DNA, 25 bp, Homo sapien
aaggatgcattctgctttgccaaga

SEQ ID NO: 802079 - DNA, 25 bp, Homo sapien
aaaaaggatgcattctgctttgcca

SEQ ID NO: 802080 - DNA, 25 bp, Homo sapien
tctgctttgccaagatcaaatttta

SEQ ID NO: 802081 - DNA, 25 bp, Homo sapien
ggacccagttgagagaagtgaagct

SEQ ID NO: 802082 - DNA, 25 bp, Homo sapien
ctgggacccagttgagagaagtgaa

SEQ ID NO: 802083 - DNA, 25 bp, Homo sapien
cccagttgagagaagtgaagctgtc

SEQ ID NO: 802084 - DNA, 25 bp, Homo sapien
gtgaagctgtcagctcctggctgtc

SEQ ID NO: 802085 - DNA, 25 bp, Homo sapien
aaggatacagccacatcagccacct

SEQ ID NO: 802086 - DNA, 25 bp, Homo sapien
aggatacagccacatcagccacctc

SEQ ID NO: 802087 - DNA, 25 bp, Homo sapien
ggactggtccaaatgcccccattcc

SEQ ID NO: 802088 - DNA, 25 bp, Homo sapien
tgggactggtccaaatgcccccatt

SEQ ID NO: 802089 - DNA, 25 bp, Homo sapien
tctgggactggtccaaatgccccca

SEQ ID NO: 802090 - DNA, 25 bp, Homo sapien
ttctgggactggtccaaatgccccc

SEQ ID NO: 802091 - DNA, 25 bp, Homo sapien
agtaatactcccatagttctccttc

SEQ ID NO: 802092 - DNA, 25 bp, Homo sapien
ggaagtaatactcccatagttctcc

SEQ ID NO: 802093 - DNA, 25 bp, Homo sapien
tggaagtaatactcccatagttctc

SEQ ID NO: 802094 - DNA, 25 bp, Homo sapien
ccatggaagtaatactcccatagtt

SEQ ID NO: 802095 - DNA, 25 bp, Homo sapien
gagccaacgcgactgggcaatattc

SEQ ID NO: 802096 - DNA, 25 bp, Homo sapien
aacgcgactgggcaatattcttttt

SEQ ID NO: 802097 - DNA, 25 bp, Homo sapien
acgtgagccaacgcgactgggcaat

SEQ ID NO: 802098 - DNA, 25 bp, Homo sapien
gccaacgcgactgggcaatattctt

SEQ ID NO: 802099 - DNA, 25 bp, Homo sapien
tcagaaatctgcttcactatgagct

SEQ ID NO: 802100 - DNA, 25 bp, Homo sapien
catgcctttaaggtcactgacttct

SEQ ID NO: 802101 - DNA, 25 bp, Homo sapien
gctcctttcggtgtgttctggcgcc

SEQ ID NO: 802102 - DNA, 25 bp, Homo sapien
tggatcctgaggaacgctcctttcg

SEQ ID NO: 802103 - DNA, 25 bp, Homo sapien
gtctgtgattgcatccagatccctt

SEQ ID NO: 802104 - DNA, 25 bp, Homo sapien
cttagggctgatgtctgtgattgca

SEQ ID NO: 802105 - DNA, 25 bp, Homo sapien
tggggttgacctgccacctttgtac

SEQ ID NO: 802106 - DNA, 25 bp, Homo sapien
ttctgggaaggattctgccttgatt

SEQ ID NO: 802107 - DNA, 25 bp, Homo sapien
ctgtgccctctctcgccatgtgtgc

SEQ ID NO: 802108 - DNA, 25 bp, Homo sapien
gtgccctctctcgccatgtgtgctt

SEQ ID NO: 802109 - DNA, 25 bp, Homo sapien
tgtgccctctctcgccatgtgtgct

SEQ ID NO: 802110 - DNA, 25 bp, Homo sapien
gccctctctcgccatgtgtgctttg

SEQ ID NO: 802111 - DNA, 25 bp, Homo sapien
tggaggaagaatttgccacaatcgc

SEQ ID NO: 802112 - DNA, 25 bp, Homo sapien
gaggaagaatttgccacaatcgctg

SEQ ID NO: 802113 - DNA, 25 bp, Homo sapien
ggaagaatttgccacaatcgctgca

SEQ ID NO: 802114 - DNA, 25 bp, Homo sapien
gaagaatttgccacaatcgctgcat

SEQ ID NO: 802115 - DNA, 25 bp, Homo sapien
gtggtgctgaaccaggtgggaactc

SEQ ID NO: 802116 - DNA, 25 bp, Homo sapien
tgcacccgctgattgtagctcttcc

SEQ ID NO: 802117 - DNA, 25 bp, Homo sapien
tgggtgaggtgcacccgctgattgt

SEQ ID NO: 802118 - DNA, 25 bp, Homo sapien
ctgtggtgctgaaccaggtgggaac

SEQ ID NO: 802119 - DNA, 25 bp, Homo sapien
tgttcgatcagatgcgaatggcgac

SEQ ID NO: 802120 - DNA, 25 bp, Homo sapien
cgttttaggtgttcgatcagatgcg

SEQ ID NO: 802121 - DNA, 25 bp, Homo sapien
aagtggcgttttaggtgttcgatca

SEQ ID NO: 802122 - DNA, 25 bp, Homo sapien
tctccctgaagtggcgttttaggtg

SEQ ID NO: 802123 - DNA, 25 bp, Homo sapien
ttatcccccggatataaactcctca

SEQ ID NO: 802124 - DNA, 25 bp, Homo sapien
tgccttgaaactcacagccttctcc

SEQ ID NO: 802125 - DNA, 25 bp, Homo sapien
tagtatctctttcatgggaattccc

SEQ ID NO: 802126 - DNA, 25 bp, Homo sapien
ctttctatccagcttgccttgaaac

SEQ ID NO: 802127 - DNA, 25 bp, Homo sapien
ctagtatctctttcatgggaattcc

SEQ ID NO: 802128 - DNA, 25 bp, Homo sapien
tgtagttcatcctctttgaagatgg

SEQ ID NO: 802129 - DNA, 25 bp, Homo sapien
tagttcatcctctttgaagatggtt

SEQ ID NO: 802130 - DNA, 25 bp, Homo sapien
ctgtagttcatcctctttgaagatg

SEQ ID NO: 802131 - DNA, 25 bp, Homo sapien
ttcatcctctttgaagatggttgtc

SEQ ID NO: 802132 - DNA, 25 bp, Homo sapien
ctccagtggaggattttttgtggac

SEQ ID NO: 802133 - DNA, 25 bp, Homo sapien
ctctctccagtggaggattttttgt

SEQ ID NO: 802134 - DNA, 25 bp, Homo sapien
ctctccagtggaggattttttgtgg

SEQ ID NO: 802135 - DNA, 25 bp, Homo sapien
tccagtggaggattttttgtggaca

SEQ ID NO: 802136 - DNA, 25 bp, Homo sapien
caaggtgggacctcactctgaaggc

SEQ ID NO: 802137 - DNA, 25 bp, Homo sapien
cacgcgttggttgtagcttttccca

SEQ ID NO: 802138 - DNA, 25 bp, Homo sapien
cccactgtgcacgctctgatgctga

SEQ ID NO: 802139 - DNA, 25 bp, Homo sapien
tgctgagttaggtgcacgcgttggt

SEQ ID NO: 802140 - DNA, 25 bp, Homo sapien
gatgggatttctctcgggagtggag

SEQ ID NO: 802141 - DNA, 25 bp, Homo sapien
gagtggagtcgaagatgtccagcca

SEQ ID NO: 802142 - DNA, 25 bp, Homo sapien
agccaggtgggaacgcctcccaaag

SEQ ID NO: 802143 - DNA, 25 bp, Homo sapien
cagccaggtgggaacgcctcccaaa

SEQ ID NO: 802144 - DNA, 25 bp, Homo sapien
tgaaaaaagatttccccacattcac

SEQ ID NO: 802145 - DNA, 25 bp, Homo sapien
aaaagatttccccacattcacgaca

SEQ ID NO: 802146 - DNA, 25 bp, Homo sapien
ctgatgttcaattaggctaacgtac

SEQ ID NO: 802147 - DNA, 25 bp, Homo sapien
caagttccaactatatgcttcctca

SEQ ID NO: 802148 - DNA, 25 bp, Homo sapien
ttccaactatatgcttcctcacaga

SEQ ID NO: 802149 - DNA, 25 bp, Homo sapien
ctgtcaagttccaactatatgcttc

SEQ ID NO: 802150 - DNA, 25 bp, Homo sapien
gttccaactatatgcttcctcacag

SEQ ID NO: 802151 - DNA, 25 bp, Homo sapien
gaggtctgagctataaccaaaggct

SEQ ID NO: 802152 - DNA, 25 bp, Homo sapien
tgtaatgctgaatgaggtctgagct

SEQ ID NO: 802153 - DNA, 25 bp, Homo sapien
cacagatatcacactgataaggctg

SEQ ID NO: 802154 - DNA, 25 bp, Homo sapien
ggctgctcttgtaactcaatcttct

SEQ ID NO: 802155 - DNA, 25 bp, Homo sapien
tgggattttgtgctggagtagattt

SEQ ID NO: 802156 - DNA, 25 bp, Homo sapien
tcatgacattgatgggattttgtgc

SEQ ID NO: 802157 - DNA, 25 bp, Homo sapien
cattgatgggattttgtgctggagt

SEQ ID NO: 802158 - DNA, 25 bp, Homo sapien
cattcatgacattgatgggattttg

SEQ ID NO: 802159 - DNA, 25 bp, Homo sapien
ccagctgaaattcattccacattct

SEQ ID NO: 802160 - DNA, 25 bp, Homo sapien
cattctttacattgaaaaggtttct

SEQ ID NO: 802161 - DNA, 25 bp, Homo sapien
ccacattctttacattgaaaaggtt

SEQ ID NO: 802162 - DNA, 25 bp, Homo sapien
tctttacattgaaaaggtttctcac

SEQ ID NO: 802163 - DNA, 25 bp, Homo sapien
cttaaggtatttatgggatctgtcc

SEQ ID NO: 802164 - DNA, 25 bp, Homo sapien
tcaggtgtttaaagaggctacaact

SEQ ID NO: 802165 - DNA, 25 bp, Homo sapien
ccctctacacttaaggtatttatgg

SEQ ID NO: 802166 - DNA, 25 bp, Homo sapien
tatgggatctgtcctctcatggctt

SEQ ID NO: 802167 - DNA, 25 bp, Homo sapien
gttctccggtgttcctaaaggctga

SEQ ID NO: 802168 - DNA, 25 bp, Homo sapien
ttcgccgtaagatgtgactgaccag

SEQ ID NO: 802169 - DNA, 25 bp, Homo sapien
tagatacgccgtcaaacaaggcaga

SEQ ID NO: 802170 - DNA, 25 bp, Homo sapien
gaaaaggttcattgctgaggtacca

SEQ ID NO: 802171 - DNA, 25 bp, Homo sapien
gaagtcagcacacatactgctggga

SEQ ID NO: 802172 - DNA, 25 bp, Homo sapien
tctatgggtttagctgccctcattc

SEQ ID NO: 802173 - DNA, 25 bp, Homo sapien
caactccttctatgggtttagctgc

SEQ ID NO: 802174 - DNA, 25 bp, Homo sapien
ccaggactcgtaattcgccttggtc

SEQ ID NO: 802175 - DNA, 25 bp, Homo sapien
gaaactcattctgtatatcaccact

SEQ ID NO: 802176 - DNA, 25 bp, Homo sapien
tattgggcatttattgtaagccagg

SEQ ID NO: 802177 - DNA, 25 bp, Homo sapien
ctgcctgcctgctcacgactgatta

SEQ ID NO: 802178 - DNA, 25 bp, Homo sapien
caagtcagcagaaacggcctgagca

SEQ ID NO: 802179 - DNA, 25 bp, Homo sapien
cacttgcagcccaaactcagagcag

SEQ ID NO: 802180 - DNA, 25 bp, Homo sapien
ggctcagaaaaagtctagcttggcc

SEQ ID NO: 802181 - DNA, 25 bp, Homo sapien
tggacagggcaccacagtgtacaac

SEQ ID NO: 802182 - DNA, 25 bp, Homo sapien
tagcttggcctgatccaagggtgcc

SEQ ID NO: 802183 - DNA, 25 bp, Homo sapien
actattaacagtgatgcgggtcttc

SEQ ID NO: 802184 - DNA, 25 bp, Homo sapien
gtcaatagatcgctttccacctgta

SEQ ID NO: 802185 - DNA, 25 bp, Homo sapien
agttccccacaagtgaatgacttag

SEQ ID NO: 802186 - DNA, 25 bp, Homo sapien
cagcttcctatgaccacttgtggca

SEQ ID NO: 802187 - DNA, 25 bp, Homo sapien
gctaccaagaaggtcctctgacaca

SEQ ID NO: 802188 - DNA, 25 bp, Homo sapien
cactgtcgctctgtcaactgggcta

SEQ ID NO: 802189 - DNA, 25 bp, Homo sapien
aggtcctctgacacacacttggcat

SEQ ID NO: 802190 - DNA, 25 bp, Homo sapien
aaattggtggttatttgccctgtca

SEQ ID NO: 802191 - DNA, 25 bp, Homo sapien
aatctgttcccctgtccaccgccat

SEQ ID NO: 802192 - DNA, 25 bp, Homo sapien
tatactcaaatctgttcccctgtcc

SEQ ID NO: 802193 - DNA, 25 bp, Homo sapien
aaatctgttcccctgtccaccgcca

SEQ ID NO: 802194 - DNA, 25 bp, Homo sapien
ttttatactcaaatctgttcccctg

SEQ ID NO: 802195 - DNA, 25 bp, Homo sapien
cacggaggactgtaggttagaaagc

SEQ ID NO: 802196 - DNA, 25 bp, Homo sapien
catcacggaggactgtaggttagaa

SEQ ID NO: 802197 - DNA, 25 bp, Homo sapien
gaggactgtaggttagaaagccagc

SEQ ID NO: 802198 - DNA, 25 bp, Homo sapien
gccagtgataaaggagcaaagattg

SEQ ID NO: 802199 - DNA, 25 bp, Homo sapien
gaaggctcgttttcgcagcttttcc

SEQ ID NO: 802200 - DNA, 25 bp, Homo sapien
gcgcgtccatgattcgaaggctcgt

SEQ ID NO: 802201 - DNA, 25 bp, Homo sapien
ccgcccaggcatgagggtcccggat

SEQ ID NO: 802202 - DNA, 25 bp, Homo sapien
agtgacggccccggatgaggaactc

SEQ ID NO: 802203 - DNA, 25 bp, Homo sapien
ccgctgtagacagccccgaggccgg

SEQ ID NO: 802204 - DNA, 25 bp, Homo sapien
ccgggccgctgtagacagccccgag

SEQ ID NO: 802205 - DNA, 25 bp, Homo sapien
agcctctcccgggccgctgtagaca

SEQ ID NO: 802206 - DNA, 25 bp, Homo sapien
gtagacagccccgaggccggcgctt

SEQ ID NO: 802207 - DNA, 25 bp, Homo sapien
aggggcgggcctggccgctgtcctg

SEQ ID NO: 802208 - DNA, 25 bp, Homo sapien
gggcgggcctggccgctgtcctgtc

SEQ ID NO: 802209 - DNA, 25 bp, Homo sapien
gaggggcgggcctggccgctgtcct

SEQ ID NO: 802210 - DNA, 25 bp, Homo sapien
gcgggcctggccgctgtcctgtcac

SEQ ID NO: 802211 - DNA, 25 bp, Homo sapien
gaagcgaactaccgtcggccgcggc

SEQ ID NO: 802212 - DNA, 25 bp, Homo sapien
tctactcccgtgaaggcaaaacaag

SEQ ID NO: 802213 - DNA, 25 bp, Homo sapien
tcggtccgcgaggtgaatgaaccag

SEQ ID NO: 802214 - DNA, 25 bp, Homo sapien
tgaagagaaacaggccctcctcgca

SEQ ID NO: 802215 - DNA, 25 bp, Homo sapien
gagtccctgttccatgtcggtgtcc

SEQ ID NO: 802216 - DNA, 25 bp, Homo sapien
tgagtccctgttccatgtcggtgtc

SEQ ID NO: 802217 - DNA, 25 bp, Homo sapien
agtccctgttccatgtcggtgtcct

SEQ ID NO: 802218 - DNA, 25 bp, Homo sapien
gaagagcaggcacctgaggaacagg

SEQ ID NO: 802219 - DNA, 25 bp, Homo sapien
ggaagagcaggcacctgaggaacag

SEQ ID NO: 802220 - DNA, 25 bp, Homo sapien
caggtctccgaagaggatcaattcc

SEQ ID NO: 802221 - DNA, 25 bp, Homo sapien
gaatgagaacactgtagcaccatgg

SEQ ID NO: 802222 - DNA, 25 bp, Homo sapien
aaattccaggcaaggtctacagatg

SEQ ID NO: 802223 - DNA, 25 bp, Homo sapien
gagagaggccacactccatcagtag

SEQ ID NO: 802224 - DNA, 25 bp, Homo sapien
ccagtgagaccacgttcccataatt

SEQ ID NO: 802225 - DNA, 25 bp, Homo sapien
cagtgagaccacgttcccataattc

SEQ ID NO: 802226 - DNA, 25 bp, Homo sapien
cctctcgagtaaggtgcacagccac

SEQ ID NO: 802227 - DNA, 25 bp, Homo sapien
tgaacagggtccaggtatccccatt

SEQ ID NO: 802228 - DNA, 25 bp, Homo sapien
gacatgagttaagcattgaccccac

SEQ ID NO: 802229 - DNA, 25 bp, Homo sapien
aatgacatctcaagttctgcctgct

SEQ ID NO: 802230 - DNA, 25 bp, Homo sapien
gaaaagatgccccacaatggccata

SEQ ID NO: 802231 - DNA, 25 bp, Homo sapien
ccctcccggagaagacgatgtgaaa

SEQ ID NO: 802232 - DNA, 25 bp, Homo sapien
agcactacagcttggctaatcccag

SEQ ID NO: 802233 - DNA, 25 bp, Homo sapien
gcactacagcttggctaatcccagc

SEQ ID NO: 802234 - DNA, 25 bp, Homo sapien
gcagcactacagcttggctaatccc

SEQ ID NO: 802235 - DNA, 25 bp, Homo sapien
ccagcagcactacagcttggctaat

SEQ ID NO: 802236 - DNA, 25 bp, Homo sapien
ctaaagaaaaaggaacaatgctcac

SEQ ID NO: 802237 - DNA, 25 bp, Homo sapien
actaaagaaaaaggaacaatgctca

SEQ ID NO: 802238 - DNA, 25 bp, Homo sapien
ctgtaaggacggcaagtgtttctcc

SEQ ID NO: 802239 - DNA, 25 bp, Homo sapien
gacgagcaatatcgatgggaagccg

SEQ ID NO: 802240 - DNA, 25 bp, Homo sapien
atctcttggagattcctgctgtaag

SEQ ID NO: 802241 - DNA, 25 bp, Homo sapien
aaagcacttgcctgggtatgactca

SEQ ID NO: 802242 - DNA, 25 bp, Homo sapien
aagagggccacagggacttcaagga

SEQ ID NO: 802243 - DNA, 25 bp, Homo sapien
gggcaggttgtgttcgccacataaa

SEQ ID NO: 802244 - DNA, 25 bp, Homo sapien
ggcttccttggaccctaacatttga

SEQ ID NO: 802245 - DNA, 25 bp, Homo sapien
gctgcgattttacacagtggtggca

SEQ ID NO: 802246 - DNA, 25 bp, Homo sapien
gaagtctgctgaacccaaaaatatg

SEQ ID NO: 802247 - DNA, 25 bp, Homo sapien
cacaaaagcaagatgagtagaaggc

SEQ ID NO: 802248 - DNA, 25 bp, Homo sapien
taactgctaaggagatgctgctaac

SEQ ID NO: 802249 - DNA, 25 bp, Homo sapien
ataattcccgcaagcttagtgttcc

SEQ ID NO: 802250 - DNA, 25 bp, Homo sapien
gctgtgacaatggaaaacattctgt

SEQ ID NO: 802251 - DNA, 25 bp, Homo sapien
tctgctcacagggttatggtaagga

SEQ ID NO: 802252 - DNA, 25 bp, Homo sapien
ctgtgcaaaataactgtagtccttc

SEQ ID NO: 802253 - DNA, 25 bp, Homo sapien
cattcccaatctactgacccagtta

SEQ ID NO: 802254 - DNA, 25 bp, Homo sapien
tttgctgcttttactacggctatgc

SEQ ID NO: 802255 - DNA, 25 bp, Homo sapien
gaaagcttcacgcttttcttcctgg

SEQ ID NO: 802256 - DNA, 25 bp, Homo sapien
tggtcccaaactatatactggcctg

SEQ ID NO: 802257 - DNA, 25 bp, Homo sapien
gatacctgttggactggaatgtgtc

SEQ ID NO: 802258 - DNA, 25 bp, Homo sapien
ctcggctcacctcaactccacctcc

SEQ ID NO: 802259 - DNA, 25 bp, Homo sapien
acgatctcggctcacctcaactcca

SEQ ID NO: 802260 - DNA, 25 bp, Homo sapien
cgatctcggctcacctcaactccac

SEQ ID NO: 802261 - DNA, 25 bp, Homo sapien
ctcacctcaactccacctcctgggt

SEQ ID NO: 802262 - DNA, 25 bp, Homo sapien
ggtgcaaagtaccatgccaagagct

SEQ ID NO: 802263 - DNA, 25 bp, Homo sapien
gattttgcctcctaacaagccctga

SEQ ID NO: 802264 - DNA, 25 bp, Homo sapien
caagagctctctaggttttcactca

SEQ ID NO: 802265 - DNA, 25 bp, Homo sapien
tcacagtttagaagagagaacaggg

SEQ ID NO: 802266 - DNA, 25 bp, Homo sapien
tattgagtgccaactctgtgcgccc

SEQ ID NO: 802267 - DNA, 25 bp, Homo sapien
gtttttaaatgtgtccagcccagaa

SEQ ID NO: 802268 - DNA, 25 bp, Homo sapien
cccaaagattccatgtgagagccta

SEQ ID NO: 802269 - DNA, 25 bp, Homo sapien
tttaaagctaaagcaacaggcagtc

SEQ ID NO: 802270 - DNA, 25 bp, Homo sapien
tgtagcaagagaatcagtgaaaact

SEQ ID NO: 802271 - DNA, 25 bp, Homo sapien
ttctaaggaccaatctcaagaaaca

SEQ ID NO: 802272 - DNA, 25 bp, Homo sapien
ataaatattctaaggaccaatctca

SEQ ID NO: 802273 - DNA, 25 bp, Homo sapien
gaaacaatttgtttcagtacacata

SEQ ID NO: 802274 - DNA, 25 bp, Homo sapien
ttcggattagatctggtctacaagt

SEQ ID NO: 802275 - DNA, 25 bp, Homo sapien
tcaaaatgtaattctgctggactgg

SEQ ID NO: 802276 - DNA, 25 bp, Homo sapien
aggtcatcaaaatgtaattctgctg

SEQ ID NO: 802277 - DNA, 25 bp, Homo sapien
taaagattaatcttcggattagatc

SEQ ID NO: 802278 - DNA, 25 bp, Homo sapien
gacagaaggtcgattctgagaagac

SEQ ID NO: 802279 - DNA, 25 bp, Homo sapien
tattattcagacaacagaatgtgtg

SEQ ID NO: 802280 - DNA, 25 bp, Homo sapien
tgtggcaatgtatccccaggtccta

SEQ ID NO: 802281 - DNA, 25 bp, Homo sapien
gatctacaaggagctcagatttgtg

SEQ ID NO: 802282 - DNA, 25 bp, Homo sapien
tctctagtcttagtttccagatcaa

SEQ ID NO: 802283 - DNA, 25 bp, Homo sapien
ccagatcaaagacctgtagatcctg

SEQ ID NO: 802284 - DNA, 25 bp, Homo sapien
agtcatctcttaagacttctctagt

SEQ ID NO: 802285 - DNA, 25 bp, Homo sapien
gatcaaagacctgtagatcctgttc

SEQ ID NO: 802286 - DNA, 25 bp, Homo sapien
aaaggaaggaactctccatgctagg

SEQ ID NO: 802287 - DNA, 25 bp, Homo sapien
taaaacagcggacatgttcagcaga

SEQ ID NO: 802288 - DNA, 25 bp, Homo sapien
gggtctagtacgacatgtgcacgga

SEQ ID NO: 802289 - DNA, 25 bp, Homo sapien
tgtgcacggatactaaacaaatgga

SEQ ID NO: 802290 - DNA, 25 bp, Homo sapien
taatatcgtgtttgagtcttcctac

SEQ ID NO: 802291 - DNA, 25 bp, Homo sapien
caacagcttgttctcttctctggtc

SEQ ID NO: 802292 - DNA, 25 bp, Homo sapien
tgaagcttttttcgggttcatgaca

SEQ ID NO: 802293 - DNA, 25 bp, Homo sapien
acttctctagtctcaggaacttggg

SEQ ID NO: 802294 - DNA, 25 bp, Homo sapien
actactctgaaaatcctctgttaga

SEQ ID NO: 802295 - DNA, 25 bp, Homo sapien
tacattcactactctgaaaatcctc

SEQ ID NO: 802296 - DNA, 25 bp, Homo sapien
tcactactctgaaaatcctctgtta

SEQ ID NO: 802297 - DNA, 25 bp, Homo sapien
ttccttacattcactactctgaaaa

SEQ ID NO: 802298 - DNA, 25 bp, Homo sapien
gatgctctcccatttattaaggtgg

SEQ ID NO: 802299 - DNA, 25 bp, Homo sapien
tttctcagtgttagggatgctctcc

SEQ ID NO: 802300 - DNA, 25 bp, Homo sapien
tataggatttctcagtgttagggat

SEQ ID NO: 802301 - DNA, 25 bp, Homo sapien
ggaaaattttcccacatacatcaca

SEQ ID NO: 802302 - DNA, 25 bp, Homo sapien
tttatcagacgcttcacaggattta

SEQ ID NO: 802303 - DNA, 25 bp, Homo sapien
gatttatcagacgcttcacaggatt

SEQ ID NO: 802304 - DNA, 25 bp, Homo sapien
cagacgcttcacaggatttatcaga

SEQ ID NO: 802305 - DNA, 25 bp, Homo sapien
tatcagacgcttcacaggatttatc

SEQ ID NO: 802306 - DNA, 25 bp, Homo sapien
aagatgtgaattcaatctgaagtct

SEQ ID NO: 802307 - DNA, 25 bp, Homo sapien
gatgtgaattcaatctgaagtcttt

SEQ ID NO: 802308 - DNA, 25 bp, Homo sapien
taagatgtgaattcaatctgaagtc

SEQ ID NO: 802309 - DNA, 25 bp, Homo sapien
tgaataaggcatgaggtttgactga

SEQ ID NO: 802310 - DNA, 25 bp, Homo sapien
aggcatgaggtttgactgaaagctt

SEQ ID NO: 802311 - DNA, 25 bp, Homo sapien
gaataaggcatgaggtttgactgaa

SEQ ID NO: 802312 - DNA, 25 bp, Homo sapien
taaggcatgaggtttgactgaaagc

SEQ ID NO: 802313 - DNA, 25 bp, Homo sapien
gatgttgaactagatgtgctctctg

SEQ ID NO: 802314 - DNA, 25 bp, Homo sapien
tgatgttgaactagatgtgctctct

SEQ ID NO: 802315 - DNA, 25 bp, Homo sapien
gaactctcagatgctgaatgaagcc

SEQ ID NO: 802316 - DNA, 25 bp, Homo sapien
tgaactctcagatgctgaatgaagc

SEQ ID NO: 802317 - DNA, 25 bp, Homo sapien
aactctcagatgctgaatgaagcct

SEQ ID NO: 802318 - DNA, 25 bp, Homo sapien
gactactggtctctatacataaggg

SEQ ID NO: 802319 - DNA, 25 bp, Homo sapien
tatgaaagcctcaattgctggactg

SEQ ID NO: 802320 - DNA, 25 bp, Homo sapien
taagatccctagtaaagagcaggcc

SEQ ID NO: 802321 - DNA, 25 bp, Homo sapien
ttaccctaccaagagcagacctgag

SEQ ID NO: 802322 - DNA, 25 bp, Homo sapien
cagcgtggggactttgaataaattt

SEQ ID NO: 802323 - DNA, 25 bp, Homo sapien
gaataaatttcctgtgtctccttcc

SEQ ID NO: 802324 - DNA, 25 bp, Homo sapien
ccttcctgggtcctgggcttctaat

SEQ ID NO: 802325 - DNA, 25 bp, Homo sapien
tctccttcctgggtcctgggcttct

SEQ ID NO: 802326 - DNA, 25 bp, Homo sapien
gcggtttcgcgtcccagagctgggc

SEQ ID NO: 802327 - DNA, 25 bp, Homo sapien
ggcggtttcgcgtcccagagctggg

SEQ ID NO: 802328 - DNA, 25 bp, Homo sapien
cgtaggcggtttcgcgtcccagagc

SEQ ID NO: 802329 - DNA, 25 bp, Homo sapien
cgtcgtaggcggtttcgcgtcccag

SEQ ID NO: 802330 - DNA, 25 bp, Homo sapien
aggccctggcacttaacaggaaagt

SEQ ID NO: 802331 - DNA, 25 bp, Homo sapien
ctggcacttaacaggaaagtcggca

SEQ ID NO: 802332 - DNA, 25 bp, Homo sapien
ttaacaggaaagtcggcagctgctc

SEQ ID NO: 802333 - DNA, 25 bp, Homo sapien
gatgaaggaagtgggcgacctgaag

SEQ ID NO: 802334 - DNA, 25 bp, Homo sapien
catcatgtgatgcagtgcttttgtc

SEQ ID NO: 802335 - DNA, 25 bp, Homo sapien
agcccttagtgccagcactggacaa

SEQ ID NO: 802336 - DNA, 25 bp, Homo sapien
tacatcttcggatacacaacttcag

SEQ ID NO: 802337 - DNA, 25 bp, Homo sapien
cttcagatccgcacggatataggcc

SEQ ID NO: 802338 - DNA, 25 bp, Homo sapien
ccactcccaatgtaggccaatggtg

SEQ ID NO: 802339 - DNA, 25 bp, Homo sapien
actcccaatgtaggccaatggtggg

SEQ ID NO: 802340 - DNA, 25 bp, Homo sapien
ccccactcccaatgtaggccaatgg

SEQ ID NO: 802341 - DNA, 25 bp, Homo sapien
aatgtaggccaatggtggggattca

SEQ ID NO: 802342 - DNA, 25 bp, Homo sapien
cactccctcagcaaaaattcactgt

SEQ ID NO: 802343 - DNA, 25 bp, Homo sapien
ctaatacacctgggttccttcctgg

SEQ ID NO: 802344 - DNA, 25 bp, Homo sapien
actccctcagcaaaaattcactgtg

SEQ ID NO: 802345 - DNA, 25 bp, Homo sapien
ttgctcagagtctcaggaccttgct

SEQ ID NO: 802346 - DNA, 25 bp, Homo sapien
tgctcagagtctcaggaccttgctt

SEQ ID NO: 802347 - DNA, 25 bp, Homo sapien
accgtggtgggtaagtgctggctgg

SEQ ID NO: 802348 - DNA, 25 bp, Homo sapien
tggctggtcttgtctcagcttcatc

SEQ ID NO: 802349 - DNA, 25 bp, Homo sapien
tcgtggaggtgggacaccgacccaa

SEQ ID NO: 802350 - DNA, 25 bp, Homo sapien
tgatcgtggaggtgggacaccgacc

SEQ ID NO: 802351 - DNA, 25 bp, Homo sapien
gagaaaagtgatcgtggaggtggga

SEQ ID NO: 802352 - DNA, 25 bp, Homo sapien
aaagtgatcgtggaggtgggacacc

SEQ ID NO: 802353 - DNA, 25 bp, Homo sapien
tcatgtccttgtcctctaacgtcag

SEQ ID NO: 802354 - DNA, 25 bp, Homo sapien
gaggttaaggctgggactatggccc

SEQ ID NO: 802355 - DNA, 25 bp, Homo sapien
tccttgtcctctaacgtcagcatca

SEQ ID NO: 802356 - DNA, 25 bp, Homo sapien
ggactatggcccaggagaatccctt

SEQ ID NO: 802357 - DNA, 25 bp, Homo sapien
tttgtcagtcgcacccagaagggaa

SEQ ID NO: 802358 - DNA, 25 bp, Homo sapien
ctgaaaaagacttcgtgggactcct

SEQ ID NO: 802359 - DNA, 25 bp, Homo sapien
tggagaccaccagtataatcaggta

SEQ ID NO: 802360 - DNA, 25 bp, Homo sapien
gataagggtcgaggcttccagcatt

SEQ ID NO: 802361 - DNA, 25 bp, Homo sapien
caaagttttgcttccaggtcctcgg

SEQ ID NO: 802362 - DNA, 25 bp, Homo sapien
tgatgcaggctaacacaaagttttg

SEQ ID NO: 802363 - DNA, 25 bp, Homo sapien
catgatgaaggtggtgacgaaagcc

SEQ ID NO: 802364 - DNA, 25 bp, Homo sapien
gaaaacccggccgaggatgatgtaa

SEQ ID NO: 802365 - DNA, 25 bp, Homo sapien
aaagatgccgaagcccagcacgtag

SEQ ID NO: 802366 - DNA, 25 bp, Homo sapien
cccagcacgtagtaaggccacagca

SEQ ID NO: 802367 - DNA, 25 bp, Homo sapien
tgccgaagcccagcacgtagtaagg

SEQ ID NO: 802368 - DNA, 25 bp, Homo sapien
ctatgaacagaaagatgccgaagcc

SEQ ID NO: 802369 - DNA, 25 bp, Homo sapien
agtggacaacaagtgccagcaaggg

SEQ ID NO: 802370 - DNA, 25 bp, Homo sapien
tttgtactgagctcggttctcctcc

SEQ ID NO: 802371 - DNA, 25 bp, Homo sapien
tactctgggaagtggacaacaagtg

SEQ ID NO: 802372 - DNA, 25 bp, Homo sapien
tctccagattgtccaggtacaggct

SEQ ID NO: 802373 - DNA, 25 bp, Homo sapien
tgacacgcaagaagctcctcaaagg

SEQ ID NO: 802374 - DNA, 25 bp, Homo sapien
tattgaaaatacctgcaaaaacgtc

SEQ ID NO: 802375 - DNA, 25 bp, Homo sapien
ggtggagagttgatctgacacgcaa

SEQ ID NO: 802376 - DNA, 25 bp, Homo sapien
caaaaacgtcacttaggaagctcag

SEQ ID NO: 802377 - DNA, 25 bp, Homo sapien
ttatcttgtaatattcctccctccc

SEQ ID NO: 802378 - DNA, 25 bp, Homo sapien
tctgtattctgtacggtttctgttt

SEQ ID NO: 802379 - DNA, 25 bp, Homo sapien
ccctgcggacttggtttttgagata

SEQ ID NO: 802380 - DNA, 25 bp, Homo sapien
caccagcccaaatagttgtcattcc

SEQ ID NO: 802381 - DNA, 25 bp, Homo sapien
tagggtcgccagtgctatccgcggt

SEQ ID NO: 802382 - DNA, 25 bp, Homo sapien
gcgtctcgatggttgctgatcccag

SEQ ID NO: 802383 - DNA, 25 bp, Homo sapien
ctctctaggatgctcggaggtctcg

SEQ ID NO: 802384 - DNA, 25 bp, Homo sapien
tagacaggtgcgtaaggaaagactc

SEQ ID NO: 802385 - DNA, 25 bp, Homo sapien
ccgccgcggccctgaagggcctctc

SEQ ID NO: 802386 - DNA, 25 bp, Homo sapien
gccgcggccctgaagggcctctcac

SEQ ID NO: 802387 - DNA, 25 bp, Homo sapien
cgccgcggccctgaagggcctctca

SEQ ID NO: 802388 - DNA, 25 bp, Homo sapien
accaacaaacttgctgatggcttag

SEQ ID NO: 802389 - DNA, 25 bp, Homo sapien
caagcagatgataagggcttagatc

SEQ ID NO: 802390 - DNA, 25 bp, Homo sapien
gagtcagacaaaatcaagacgtatt

SEQ ID NO: 802391 - DNA, 25 bp, Homo sapien
gcttagatgtgatggtgcgctcaac

SEQ ID NO: 802392 - DNA, 25 bp, Homo sapien
aactcatatgctggtacagcagaca

SEQ ID NO: 802393 - DNA, 25 bp, Homo sapien
cctgaaactcatatgctggtacagc

SEQ ID NO: 802394 - DNA, 25 bp, Homo sapien
tgaaactcatatgctggtacagcag

SEQ ID NO: 802395 - DNA, 25 bp, Homo sapien
ctcatatgctggtacagcagacaga

SEQ ID NO: 802396 - DNA, 25 bp, Homo sapien
catgaaaggtcagcccatcccagtt

SEQ ID NO: 802397 - DNA, 25 bp, Homo sapien
gacacatgaaaggtcagcccatccc

SEQ ID NO: 802398 - DNA, 25 bp, Homo sapien
gagacacatgaaaggtcagcccatc

SEQ ID NO: 802399 - DNA, 25 bp, Homo sapien
acatgaaaggtcagcccatcccagt

SEQ ID NO: 802400 - DNA, 25 bp, Homo sapien
gactccctccgaggagactgagaat

SEQ ID NO: 802401 - DNA, 25 bp, Homo sapien
ccctccgaggagactgagaatgact

SEQ ID NO: 802402 - DNA, 25 bp, Homo sapien
gactgagaatgactgcatcaatgac

SEQ ID NO: 802403 - DNA, 25 bp, Homo sapien
ttcagactccctccgaggagactga

SEQ ID NO: 802404 - DNA, 25 bp, Homo sapien
ccggatccaggcgtagaactcgcgg

SEQ ID NO: 802405 - DNA, 25 bp, Homo sapien
tcctggagctccctaagagcttcct

SEQ ID NO: 802406 - DNA, 25 bp, Homo sapien
tgccgaaacctcagccgaaaagtct

SEQ ID NO: 802407 - DNA, 25 bp, Homo sapien
cgaaaagtctctggactagggtcct

SEQ ID NO: 802408 - DNA, 25 bp, Homo sapien
ggcctccagtgctctttctgtcagg

SEQ ID NO: 802409 - DNA, 25 bp, Homo sapien
cctccagtgctctttctgtcaggtc

SEQ ID NO: 802410 - DNA, 25 bp, Homo sapien
ttggcctccagtgctctttctgtca

SEQ ID NO: 802411 - DNA, 25 bp, Homo sapien
tccagtgctctttctgtcaggtcct

SEQ ID NO: 802412 - DNA, 25 bp, Homo sapien
aacctcaaggaagcacgtgcggtgc

SEQ ID NO: 802413 - DNA, 25 bp, Homo sapien
caacaccgattagaatgaggcctgg

SEQ ID NO: 802414 - DNA, 25 bp, Homo sapien
tgcccacaagggaaatatggccagg

SEQ ID NO: 802415 - DNA, 25 bp, Homo sapien
gctaaactcatgcatcaggccctga

SEQ ID NO: 802416 - DNA, 25 bp, Homo sapien
tctgcaaagtgctgtttcctcctgc

SEQ ID NO: 802417 - DNA, 25 bp, Homo sapien
tggctcccaagcgcctctgcaaagt

SEQ ID NO: 802418 - DNA, 25 bp, Homo sapien
ctggctcccaagcgcctctgcaaag

SEQ ID NO: 802419 - DNA, 25 bp, Homo sapien
caaagtgctgtttcctcctgctctc

SEQ ID NO: 802420 - DNA, 25 bp, Homo sapien
tcaggcttgacctccactggcccca

SEQ ID NO: 802421 - DNA, 25 bp, Homo sapien
acctccactggccccagctggatgc

SEQ ID NO: 802422 - DNA, 25 bp, Homo sapien
ttgacctccactggccccagctgga

SEQ ID NO: 802423 - DNA, 25 bp, Homo sapien
caggcttgacctccactggccccag

SEQ ID NO: 802424 - DNA, 25 bp, Homo sapien
aaggcccgtgtctcatctccagggt

SEQ ID NO: 802425 - DNA, 25 bp, Homo sapien
ctggaaggcccgtgtctcatctcca

SEQ ID NO: 802426 - DNA, 25 bp, Homo sapien
ctcggtacctgggtctggaccttga

SEQ ID NO: 802427 - DNA, 25 bp, Homo sapien
gctgctcctcggtacctgggtctgg

SEQ ID NO: 802428 - DNA, 25 bp, Homo sapien
cagtaaagaacccagctgccatctc

SEQ ID NO: 802429 - DNA, 25 bp, Homo sapien
tctgggattcactgcggggaggcca

SEQ ID NO: 802430 - DNA, 25 bp, Homo sapien
cagctgccatctcttggtctctggg

SEQ ID NO: 802431 - DNA, 25 bp, Homo sapien
caggacccgcctgcagaacaggtag

SEQ ID NO: 802432 - DNA, 25 bp, Homo sapien
gggccaatcagcacagcctagatag

SEQ ID NO: 802433 - DNA, 25 bp, Homo sapien
agcagaagtacccataaacggcacc

SEQ ID NO: 802434 - DNA, 25 bp, Homo sapien
cggcacccacaaagggttatctcgg

SEQ ID NO: 802435 - DNA, 25 bp, Homo sapien
acagttgtaagagtccatctgtggc

SEQ ID NO: 802436 - DNA, 25 bp, Homo sapien
gaccctgcagtcctgcggttccaca

SEQ ID NO: 802437 - DNA, 25 bp, Homo sapien
tgcagtcctgcggttccacatactc

SEQ ID NO: 802438 - DNA, 25 bp, Homo sapien
atactccccaaagcagtctatctgg

SEQ ID NO: 802439 - DNA, 25 bp, Homo sapien
ccccaaagcagtctatctgggctgg

SEQ ID NO: 802440 - DNA, 25 bp, Homo sapien
tggccaggagagcatgaaaatcttc

SEQ ID NO: 802441 - DNA, 25 bp, Homo sapien
tctgagttctgagacactgagctgg

SEQ ID NO: 802442 - DNA, 25 bp, Homo sapien
cggcagaaatgttcaggtatgggct

SEQ ID NO: 802443 - DNA, 25 bp, Homo sapien
aggacagaaccagtctccagaacag

SEQ ID NO: 802444 - DNA, 25 bp, Homo sapien
gagaaacccgttttgagtgctgcac

SEQ ID NO: 802445 - DNA, 25 bp, Homo sapien
cctaagtataaacagagacactggg

SEQ ID NO: 802446 - DNA, 25 bp, Homo sapien
gataaagacctaagtgtgttccctg

SEQ ID NO: 802447 - DNA, 25 bp, Homo sapien
agaagggacctagcagtgagaaacc

SEQ ID NO: 802448 - DNA, 25 bp, Homo sapien
cccaaccacgtaaacagcattcagt

SEQ ID NO: 802449 - DNA, 25 bp, Homo sapien
caacgggaacacattgtctggactt

SEQ ID NO: 802450 - DNA, 25 bp, Homo sapien
caccacacactatgcaaagaatttt

SEQ ID NO: 802451 - DNA, 25 bp, Homo sapien
cagaacataaccagtccctagaagc

SEQ ID NO: 802452 - DNA, 25 bp, Homo sapien
gcctccttttccttgctcccaccgc

SEQ ID NO: 802453 - DNA, 25 bp, Homo sapien
ttttgcctccttttccttgctccca

SEQ ID NO: 802454 - DNA, 25 bp, Homo sapien
tgcctccttttccttgctcccaccg

SEQ ID NO: 802455 - DNA, 25 bp, Homo sapien
ttgcctccttttccttgctcccacc

SEQ ID NO: 802456 - DNA, 25 bp, Homo sapien
tgccaccagcgcccctttcaggtct

SEQ ID NO: 802457 - DNA, 25 bp, Homo sapien
aaacctctctgatgtcagtgccacc

SEQ ID NO: 802458 - DNA, 25 bp, Homo sapien
gccaccagcgcccctttcaggtctt

SEQ ID NO: 802459 - DNA, 25 bp, Homo sapien
cccaaacctctctgatgtcagtgcc

SEQ ID NO: 802460 - DNA, 25 bp, Homo sapien
aggaggaagcccaggcgcactgcct

SEQ ID NO: 802461 - DNA, 25 bp, Homo sapien
gaagcccaggcgcactgcctgcagg

SEQ ID NO: 802462 - DNA, 25 bp, Homo sapien
aggaagcccaggcgcactgcctgca

SEQ ID NO: 802463 - DNA, 25 bp, Homo sapien
ggaggaagcccaggcgcactgcctg

SEQ ID NO: 802464 - DNA, 25 bp, Homo sapien
gttttgacttcgtcaggcaggggga

SEQ ID NO: 802465 - DNA, 25 bp, Homo sapien
tgggttttgacttcgtcaggcaggg

SEQ ID NO: 802466 - DNA, 25 bp, Homo sapien
ctgtgggttttgacttcgtcaggca

SEQ ID NO: 802467 - DNA, 25 bp, Homo sapien
ttttgacttcgtcaggcagggggat

SEQ ID NO: 802468 - DNA, 25 bp, Homo sapien
ttcgctggtgcctgacgagattgga

SEQ ID NO: 802469 - DNA, 25 bp, Homo sapien
tccacacagccataagacttctctt

SEQ ID NO: 802470 - DNA, 25 bp, Homo sapien
gacttctcttcgtgggttcgctggt

SEQ ID NO: 802471 - DNA, 25 bp, Homo sapien
ggtgcttcatcaggtattctctcag

SEQ ID NO: 802472 - DNA, 25 bp, Homo sapien
ctgaaggttttccagcactcgctgc

SEQ ID NO: 802473 - DNA, 25 bp, Homo sapien
aggttttccagcactcgctgcacac

SEQ ID NO: 802474 - DNA, 25 bp, Homo sapien
aaggttttccagcactcgctgcaca

SEQ ID NO: 802475 - DNA, 25 bp, Homo sapien
gaaggttttccagcactcgctgcac

SEQ ID NO: 802476 - DNA, 25 bp, Homo sapien
ggacctctggttgaagcttcgcccg

SEQ ID NO: 802477 - DNA, 25 bp, Homo sapien
ggtgtgcgtcctccggtgcacctgc

SEQ ID NO: 802478 - DNA, 25 bp, Homo sapien
cagattggcattcctgctgaagctc

SEQ ID NO: 802479 - DNA, 25 bp, Homo sapien
gattctctggtgtcggaccagccgc

SEQ ID NO: 802480 - DNA, 25 bp, Homo sapien
acagataccctgagaatgcctcggg

SEQ ID NO: 802481 - DNA, 25 bp, Homo sapien
ggaagatgttctcacgggcacacag

SEQ ID NO: 802482 - DNA, 25 bp, Homo sapien
tggaagctctaagtaagccaggcct

SEQ ID NO: 802483 - DNA, 25 bp, Homo sapien
tctgagctatgaccctgcaggcaag

SEQ ID NO: 802484 - DNA, 25 bp, Homo sapien
gacccctagtgccttggatgacaag

SEQ ID NO: 802485 - DNA, 25 bp, Homo sapien
tgaagatcaggtacatccacgagac

SEQ ID NO: 802486 - DNA, 25 bp, Homo sapien
caaggagcgtcatttgctaagccaa

SEQ ID NO: 802487 - DNA, 25 bp, Homo sapien
tggcactcatgcaaaacaggtcgct

SEQ ID NO: 802488 - DNA, 25 bp, Homo sapien
tgaagacagattggtaggcagccac

SEQ ID NO: 802489 - DNA, 25 bp, Homo sapien
ggtccttcacgctttggccatattg

SEQ ID NO: 802490 - DNA, 25 bp, Homo sapien
catacatcatgcacgagcaggaata

SEQ ID NO: 802491 - DNA, 25 bp, Homo sapien
cgggacatcttggtatagttggaca

SEQ ID NO: 802492 - DNA, 25 bp, Homo sapien
gaaatcggctatcataatccctagg

SEQ ID NO: 802493 - DNA, 25 bp, Homo sapien
gtgaagaacatgcaggaaatcggct

SEQ ID NO: 802494 - DNA, 25 bp, Homo sapien
tcagagggtcacaacaactgccttc

SEQ ID NO: 802495 - DNA, 25 bp, Homo sapien
tacagtaataggctgcaaagggcgt

SEQ ID NO: 802496 - DNA, 25 bp, Homo sapien
ccgtttgcactacgcttggaagcca

SEQ ID NO: 802497 - DNA, 25 bp, Homo sapien
tcttatctatggcttcagggcagct

SEQ ID NO: 802498 - DNA, 25 bp, Homo sapien
aatgttactctgttggtggctcccc

SEQ ID NO: 802499 - DNA, 25 bp, Homo sapien
ctgtacaacttgagaaattccccgt

SEQ ID NO: 802500 - DNA, 25 bp, Homo sapien
tatgggccaaagaacctacttggat

SEQ ID NO: 802501 - DNA, 25 bp, Homo sapien
gaagtgcaatgattacctggctgtg

SEQ ID NO: 802502 - DNA, 25 bp, Homo sapien
ggctgtgacttaaatggtgttctcc

SEQ ID NO: 802503 - DNA, 25 bp, Homo sapien
aaagtccacacagattagcatgaca

SEQ ID NO: 802504 - DNA, 25 bp, Homo sapien
agcctgaggagttccgccctgaaag

SEQ ID NO: 802505 - DNA, 25 bp, Homo sapien
tgacccaaagtactggacagagcct

SEQ ID NO: 802506 - DNA, 25 bp, Homo sapien
ggtattcattcccaaagggtcaatg

SEQ ID NO: 802507 - DNA, 25 bp, Homo sapien
aaggtacaagtctccagggaaatgg

SEQ ID NO: 802508 - DNA, 25 bp, Homo sapien
actctggtctggctatggtctgagg

SEQ ID NO: 802509 - DNA, 25 bp, Homo sapien
gcatttattgctcacaagactggat

SEQ ID NO: 802510 - DNA, 25 bp, Homo sapien
gtctcatgttccagtcaggtagcca

SEQ ID NO: 802511 - DNA, 25 bp, Homo sapien
gctaggtacatatcatccacagttt

SEQ ID NO: 802512 - DNA, 25 bp, Homo sapien
tctgggccacattcaaagcaatgtg

SEQ ID NO: 802513 - DNA, 25 bp, Homo sapien
tgggccacattcaaagcaatgtgta

SEQ ID NO: 802514 - DNA, 25 bp, Homo sapien
gccacattcaaagcaatgtgtagag

SEQ ID NO: 802515 - DNA, 25 bp, Homo sapien
ctctgggccacattcaaagcaatgt

SEQ ID NO: 802516 - DNA, 25 bp, Homo sapien
cccatctcacgtgcaaagtaacaca

SEQ ID NO: 802517 - DNA, 25 bp, Homo sapien
tcacgtgcaaagtaacacataggct

SEQ ID NO: 802518 - DNA, 25 bp, Homo sapien
tctcacgtgcaaagtaacacatagg

SEQ ID NO: 802519 - DNA, 25 bp, Homo sapien
catctcacgtgcaaagtaacacata

SEQ ID NO: 802520 - DNA, 25 bp, Homo sapien
gagagtagtggttctcccagcacac

SEQ ID NO: 802521 - DNA, 25 bp, Homo sapien
cctctaggggcagagcatagccaac

SEQ ID NO: 802522 - DNA, 25 bp, Homo sapien
aatactgcgcttttctgatggtctt

SEQ ID NO: 802523 - DNA, 25 bp, Homo sapien
ctctaggggcagagcatagccaacc

SEQ ID NO: 802524 - DNA, 25 bp, Homo sapien
cgcttttctgatggtcttagcaaac

SEQ ID NO: 802525 - DNA, 25 bp, Homo sapien
gccactcaccctgatgtccagcaga

SEQ ID NO: 802526 - DNA, 25 bp, Homo sapien
tccttcactttatatgaactggcca

SEQ ID NO: 802527 - DNA, 25 bp, Homo sapien
ccttcactttatatgaactggccac

SEQ ID NO: 802528 - DNA, 25 bp, Homo sapien
actcaccctgatgtccagcagaaac

SEQ ID NO: 802529 - DNA, 25 bp, Homo sapien
gactcactggtcacttaaaactgta

SEQ ID NO: 802530 - DNA, 25 bp, Homo sapien
taagttaagcagcagattatggtct

SEQ ID NO: 802531 - DNA, 25 bp, Homo sapien
tccatggaagttgatgtacatatgc

SEQ ID NO: 802532 - DNA, 25 bp, Homo sapien
cctgaacagcatgattaagttaagc

SEQ ID NO: 802533 - DNA, 25 bp, Homo sapien
tggtctgaggcaacatacagtctgc

SEQ ID NO: 802534 - DNA, 25 bp, Homo sapien
cccatgctgtaggtgtattaaagac

SEQ ID NO: 802535 - DNA, 25 bp, Homo sapien
gattttatcatgacagctggaagta

SEQ ID NO: 802536 - DNA, 25 bp, Homo sapien
taagagaaagttccaagcatgctgg

SEQ ID NO: 802537 - DNA, 25 bp, Homo sapien
taaaactgaagccacacatgcgtac

SEQ ID NO: 802538 - DNA, 25 bp, Homo sapien
catgcgtacaaatggcgacagtgtc

SEQ ID NO: 802539 - DNA, 25 bp, Homo sapien
gataacacactggaagtcgcacacc

SEQ ID NO: 802540 - DNA, 25 bp, Homo sapien
tgtctggtgtacagcagcgctctgc

SEQ ID NO: 802541 - DNA, 25 bp, Homo sapien
taaggaattcctgaaactagcgatg

SEQ ID NO: 802542 - DNA, 25 bp, Homo sapien
tcagattgcagctctaggcattcca

SEQ ID NO: 802543 - DNA, 25 bp, Homo sapien
caagttgtgccgtatctgtagtgtc

SEQ ID NO: 802544 - DNA, 25 bp, Homo sapien
tcttttacctaccatcgccagggca

SEQ ID NO: 802545 - DNA, 25 bp, Homo sapien
taacatcttgcaatcttgtatattg

SEQ ID NO: 802546 - DNA, 25 bp, Homo sapien
aggaaggttccatgtactcttcatc

SEQ ID NO: 802547 - DNA, 25 bp, Homo sapien
catatattcacagaaggttacctaa

SEQ ID NO: 802548 - DNA, 25 bp, Homo sapien
tcctgtcccgcccagtggtaacatc

SEQ ID NO: 802549 - DNA, 25 bp, Homo sapien
ttcatcatatgaagccttgggtggc

SEQ ID NO: 802550 - DNA, 25 bp, Homo sapien
gctgtgtgtcacaccctaatgaact

SEQ ID NO: 802551 - DNA, 25 bp, Homo sapien
cctaaggttgctgtgtgtcgtacaa

SEQ ID NO: 802552 - DNA, 25 bp, Homo sapien
ggctcctgtgtgagactcttgctgt

SEQ ID NO: 802553 - DNA, 25 bp, Homo sapien
gccccacaccaactgcccttgcagc

SEQ ID NO: 802554 - DNA, 25 bp, Homo sapien
gcacttgatgatttacctgccttca

SEQ ID NO: 802555 - DNA, 25 bp, Homo sapien
atttttcactgacctaatattcttt

SEQ ID NO: 802556 - DNA, 25 bp, Homo sapien
cccacaccaactgcccttgcagcat

SEQ ID NO: 802557 - DNA, 25 bp, Homo sapien
tcttcagtctgaactaggctaggag

SEQ ID NO: 802558 - DNA, 25 bp, Homo sapien
ttttcgaggcttgtcctaccaagga

SEQ ID NO: 802559 - DNA, 25 bp, Homo sapien
tcaccaggtatcgaggtcttcagtc

SEQ ID NO: 802560 - DNA, 25 bp, Homo sapien
tgatgccacaccaaggttggacagg

SEQ ID NO: 802561 - DNA, 25 bp, Homo sapien
gaacatgaaacttgctctagtcaga

SEQ ID NO: 802562 - DNA, 25 bp, Homo sapien
cctttggaagtggacccagaaactg

SEQ ID NO: 802563 - DNA, 25 bp, Homo sapien
tggcatgaggtttgctctcgtgaac

SEQ ID NO: 802564 - DNA, 25 bp, Homo sapien
ggacccagaaactgcattggcatga

SEQ ID NO: 802565 - DNA, 25 bp, Homo sapien
cagattattcccagttgctatgaga

SEQ ID NO: 802566 - DNA, 25 bp, Homo sapien
tgctacaatcctttgccagtatgag

SEQ ID NO: 802567 - DNA, 25 bp, Homo sapien
gttcaacagtactacatggactgag

SEQ ID NO: 802568 - DNA, 25 bp, Homo sapien
ttttcaggcaccacccacctatgat

SEQ ID NO: 802569 - DNA, 25 bp, Homo sapien
aacagataaaagaaggtcgcctcaa

SEQ ID NO: 802570 - DNA, 25 bp, Homo sapien
gataattcatttggtaggaatgcag

SEQ ID NO: 802571 - DNA, 25 bp, Homo sapien
aaagagtacttatgtttagagcaag

SEQ ID NO: 802572 - DNA, 25 bp, Homo sapien
tacatatgatcggtgcacttccctg

SEQ ID NO: 802573 - DNA, 25 bp, Homo sapien
tggcaccaaatgtcatttgcgtcca

SEQ ID NO: 802574 - DNA, 25 bp, Homo sapien
aggacaggggatgggactcccgaag

SEQ ID NO: 802575 - DNA, 25 bp, Homo sapien
caggggatgggactcccgaaggagt

SEQ ID NO: 802576 - DNA, 25 bp, Homo sapien
ccaagaggtggatctccccatggag

SEQ ID NO: 802577 - DNA, 25 bp, Homo sapien
agtttggcatccgtgattctccggg

SEQ ID NO: 802578 - DNA, 25 bp, Homo sapien
gcatccgtgattctccggggggctt

SEQ ID NO: 802579 - DNA, 25 bp, Homo sapien
tgaagtttggcatccgtgattctcc

SEQ ID NO: 802580 - DNA, 25 bp, Homo sapien
catccgtgattctccggggggcttc

SEQ ID NO: 802581 - DNA, 25 bp, Homo sapien
gcttaggggccagagggatgggaaa

SEQ ID NO: 802582 - DNA, 25 bp, Homo sapien
gaacatgtggctcccggcacatacc

SEQ ID NO: 802583 - DNA, 25 bp, Homo sapien
caaggaatctggcatgatgttcacc

SEQ ID NO: 802584 - DNA, 25 bp, Homo sapien
aggccaggtgccgagcagccctgga

SEQ ID NO: 802585 - DNA, 25 bp, Homo sapien
ccctatttaatgtgctcagcgaagc

SEQ ID NO: 802586 - DNA, 25 bp, Homo sapien
gagtaattcacttggccactggaag

SEQ ID NO: 802587 - DNA, 25 bp, Homo sapien
caatgttgcttctgcctaccacgag

SEQ ID NO: 802588 - DNA, 25 bp, Homo sapien
gagtaacccttgagacaggaacacg

SEQ ID NO: 802589 - DNA, 25 bp, Homo sapien
caatttagtaaagtgtaggatgcac

SEQ ID NO: 802590 - DNA, 25 bp, Homo sapien
tggataagtactgcccagggtaggc

SEQ ID NO: 802591 - DNA, 25 bp, Homo sapien
tgtttcattaattcccttccacgtg

SEQ ID NO: 802592 - DNA, 25 bp, Homo sapien
tccacgtgctcttctgaaatttgcc

SEQ ID NO: 802593 - DNA, 25 bp, Homo sapien
ggattgggaccatgaaaacttcagc

SEQ ID NO: 802594 - DNA, 25 bp, Homo sapien
ggccagatcctaaaacagggtcaga

SEQ ID NO: 802595 - DNA, 25 bp, Homo sapien
ggatgagaagccctaaatcagtggg

SEQ ID NO: 802596 - DNA, 25 bp, Homo sapien
tgacagtttaagaagggccagatcc

SEQ ID NO: 802597 - DNA, 25 bp, Homo sapien
agctaggcatggtggactcgcctgt

SEQ ID NO: 802598 - DNA, 25 bp, Homo sapien
caaagaactgaagctcttattatat

SEQ ID NO: 802599 - DNA, 25 bp, Homo sapien
aatatgcctttttgaagcacgtaca

SEQ ID NO: 802600 - DNA, 25 bp, Homo sapien
ctcctttcatatttctgggagacag

SEQ ID NO: 802601 - DNA, 25 bp, Homo sapien
caagaaatctgtgcctgagaacacc

SEQ ID NO: 802602 - DNA, 25 bp, Homo sapien
tgagtcaagggatggcaccgtaagt

SEQ ID NO: 802603 - DNA, 25 bp, Homo sapien
gggcttcatccaatggactgcataa

SEQ ID NO: 802604 - DNA, 25 bp, Homo sapien
gcttctcacgggactatttccacca

SEQ ID NO: 802605 - DNA, 25 bp, Homo sapien
gactgaaagctcctatagtgtcagg

SEQ ID NO: 802606 - DNA, 25 bp, Homo sapien
tatagtgtggacacatcaccaccct

SEQ ID NO: 802607 - DNA, 25 bp, Homo sapien
tcagtcagtcccatcacttatgtgc

SEQ ID NO: 802608 - DNA, 25 bp, Homo sapien
gacttgaggcaggaacctacttttc

SEQ ID NO: 802609 - DNA, 25 bp, Homo sapien
catcagtatcatcaggttcatgata

SEQ ID NO: 802610 - DNA, 25 bp, Homo sapien
gagattatagttcaatttcacatca

SEQ ID NO: 802611 - DNA, 25 bp, Homo sapien
ctaaactttgagattatagttcaat

SEQ ID NO: 802612 - DNA, 25 bp, Homo sapien
ggttcatgataactgaatactatga

SEQ ID NO: 802613 - DNA, 25 bp, Homo sapien
caatataacttgctgtgataaagga

SEQ ID NO: 802614 - DNA, 25 bp, Homo sapien
tggctattgagcactggatatgtgg

SEQ ID NO: 802615 - DNA, 25 bp, Homo sapien
gatatgtggctagtgccattgaaga

SEQ ID NO: 802616 - DNA, 25 bp, Homo sapien
ctaactattcatctatctatcccaa

SEQ ID NO: 802617 - DNA, 25 bp, Homo sapien
gactcatttcaagtacaaacctgtt

SEQ ID NO: 802618 - DNA, 25 bp, Homo sapien
gccacctgctgaagtgtagcgtgtg

SEQ ID NO: 802619 - DNA, 25 bp, Homo sapien
tgagccatctcacatgatagccaga

SEQ ID NO: 802620 - DNA, 25 bp, Homo sapien
cctgctttccaaggatttagaaggg

SEQ ID NO: 802621 - DNA, 25 bp, Homo sapien
tatcacctgtcttgagccccttagg

SEQ ID NO: 802622 - DNA, 25 bp, Homo sapien
gggtctctgtcttcctatgatgggc

SEQ ID NO: 802623 - DNA, 25 bp, Homo sapien
taaagtgctgaagaggaatcggctc

SEQ ID NO: 802624 - DNA, 25 bp, Homo sapien
ggcatagagtctgcagtcaggcaat

SEQ ID NO: 802625 - DNA, 25 bp, Homo sapien
cagggatatgtggtcactcactata

SEQ ID NO: 802626 - DNA, 25 bp, Homo sapien
aaacaggtgtaatctgagtttgtcc

SEQ ID NO: 802627 - DNA, 25 bp, Homo sapien
taaaaacactataggtagggcaagc

SEQ ID NO: 802628 - DNA, 25 bp, Homo sapien
tttttaaccaggacattattggtca

SEQ ID NO: 802629 - DNA, 25 bp, Homo sapien
catcagatggtagtagatgcatggt

SEQ ID NO: 802630 - DNA, 25 bp, Homo sapien
caaacatcagatggtagtagatgca

SEQ ID NO: 802631 - DNA, 25 bp, Homo sapien
tctccttgaagaggagaacttcaca

SEQ ID NO: 802632 - DNA, 25 bp, Homo sapien
aagaggagaacttcacatcccttgt

SEQ ID NO: 802633 - DNA, 25 bp, Homo sapien
gcttcactaggctgtccccaaggaa

SEQ ID NO: 802634 - DNA, 25 bp, Homo sapien
tcactaggctgtccccaaggaacat

SEQ ID NO: 802635 - DNA, 25 bp, Homo sapien
cctgcttcactaggctgtccccaag

SEQ ID NO: 802636 - DNA, 25 bp, Homo sapien
ttcactaggctgtccccaaggaaca

SEQ ID NO: 802637 - DNA, 25 bp, Homo sapien
acacaaatgattctgattgtgacat

SEQ ID NO: 802638 - DNA, 25 bp, Homo sapien
gaaacacaaatgattctgattgtga

SEQ ID NO: 802639 - DNA, 25 bp, Homo sapien
ctggaaacacaaatgattctgattg

SEQ ID NO: 802640 - DNA, 25 bp, Homo sapien
ggaaacacaaatgattctgattgtg

SEQ ID NO: 802641 - DNA, 25 bp, Homo sapien
ctgttggtttcatcaccttttactt

SEQ ID NO: 802642 - DNA, 25 bp, Homo sapien
tcatcaccttttactttttgctttc

SEQ ID NO: 802643 - DNA, 25 bp, Homo sapien
ccctctatgcctgcttgctggaaga

SEQ ID NO: 802644 - DNA, 25 bp, Homo sapien
tatcatcactgacccacgttccatg

SEQ ID NO: 802645 - DNA, 25 bp, Homo sapien
taaggatgaggcctgcgacagcaat

SEQ ID NO: 802646 - DNA, 25 bp, Homo sapien
gaggcctgcgacagcaatgctgtca

SEQ ID NO: 802647 - DNA, 25 bp, Homo sapien
ggactccaataagatgatttgagct

SEQ ID NO: 802648 - DNA, 25 bp, Homo sapien
gtggctgatgtcactacaagcagca

SEQ ID NO: 802649 - DNA, 25 bp, Homo sapien
cacatacaacatcaaggactccaat

SEQ ID NO: 802650 - DNA, 25 bp, Homo sapien
cagccaccttagccaccagggatgt

SEQ ID NO: 802651 - DNA, 25 bp, Homo sapien
catacagcaagagcttttggctggg

SEQ ID NO: 802652 - DNA, 25 bp, Homo sapien
cagctgccattcctgtacattcaga

SEQ ID NO: 802653 - DNA, 25 bp, Homo sapien
tacattcagaatgatccaccaggat

SEQ ID NO: 802654 - DNA, 25 bp, Homo sapien
tggtgaccaagccactttcctgcat

SEQ ID NO: 802655 - DNA, 25 bp, Homo sapien
gcatattgcaaaacttttcctggga

SEQ ID NO: 802656 - DNA, 25 bp, Homo sapien
catattgcaaaacttttcctgggac

SEQ ID NO: 802657 - DNA, 25 bp, Homo sapien
attgcaaaacttttcctgggactct

SEQ ID NO: 802658 - DNA, 25 bp, Homo sapien
ttagattgctgcatattgcaaaact

SEQ ID NO: 802659 - DNA, 25 bp, Homo sapien
gctggtagccaggagaacacacatt

SEQ ID NO: 802660 - DNA, 25 bp, Homo sapien
accatcactgtctttgtctggaaca

SEQ ID NO: 802661 - DNA, 25 bp, Homo sapien
gggacctggcaacttggtaccagca

SEQ ID NO: 802662 - DNA, 25 bp, Homo sapien
acctggcaacttggtaccagcaggg

SEQ ID NO: 802663 - DNA, 25 bp, Homo sapien
tttaccatcactgtctttgtctgga

SEQ ID NO: 802664 - DNA, 25 bp, Homo sapien
tttgctgggctgtgcatatagagct

SEQ ID NO: 802665 - DNA, 25 bp, Homo sapien
gctgggctgtgcatatagagctttg

SEQ ID NO: 802666 - DNA, 25 bp, Homo sapien
tgctgggctgtgcatatagagcttt

SEQ ID NO: 802667 - DNA, 25 bp, Homo sapien
gggctgtgcatatagagctttgttt

SEQ ID NO: 802668 - DNA, 25 bp, Homo sapien
caggctggtagccacaagaacccat

SEQ ID NO: 802669 - DNA, 25 bp, Homo sapien
aggctggtagccacaagaacccatg

SEQ ID NO: 802670 - DNA, 25 bp, Homo sapien
aagtttatgtgaatgggtcccataa

SEQ ID NO: 802671 - DNA, 25 bp, Homo sapien
aaaagtttatgtgaatgggtcccat

SEQ ID NO: 802672 - DNA, 25 bp, Homo sapien
ggcagaggggttggcccaggaattc

SEQ ID NO: 802673 - DNA, 25 bp, Homo sapien
aaatagttcccagaaaaggcagagg

SEQ ID NO: 802674 - DNA, 25 bp, Homo sapien
caccatgggaacatgaagaaaccga

SEQ ID NO: 802675 - DNA, 25 bp, Homo sapien
tcaccaccatgggaacatgaagaaa

SEQ ID NO: 802676 - DNA, 25 bp, Homo sapien
ctgaattatcaccaccatgggaaca

SEQ ID NO: 802677 - DNA, 25 bp, Homo sapien
gaattatcaccaccatgggaacatg

SEQ ID NO: 802678 - DNA, 25 bp, Homo sapien
ttctgcatatgttgtctctgcaatc

SEQ ID NO: 802679 - DNA, 25 bp, Homo sapien
tgcatatgttgtctctgcaatctca

SEQ ID NO: 802680 - DNA, 25 bp, Homo sapien
catatgttgtctctgcaatctcata

SEQ ID NO: 802681 - DNA, 25 bp, Homo sapien
atgttgtctctgcaatctcataaac

SEQ ID NO: 802682 - DNA, 25 bp, Homo sapien
tgtctatgaacactaagcaactcat

SEQ ID NO: 802683 - DNA, 25 bp, Homo sapien
tatgaacactaagcaactcattgtc

SEQ ID NO: 802684 - DNA, 25 bp, Homo sapien
ttctgtctatgaacactaagcaact

SEQ ID NO: 802685 - DNA, 25 bp, Homo sapien
gaacactaagcaactcattgtcttt

SEQ ID NO: 802686 - DNA, 25 bp, Homo sapien
tcattacattctctgtcaaaattcc

SEQ ID NO: 802687 - DNA, 25 bp, Homo sapien
ttacattctctgtcaaaattccaaa

SEQ ID NO: 802688 - DNA, 25 bp, Homo sapien
cacatttctccgtatttttcattac

SEQ ID NO: 802689 - DNA, 25 bp, Homo sapien
ccccacatttctccgtatttttcat

SEQ ID NO: 802690 - DNA, 25 bp, Homo sapien
tgatgaccagcatgggctgttgccc

SEQ ID NO: 802691 - DNA, 25 bp, Homo sapien
gcatgggctgttgcccctcatacag

SEQ ID NO: 802692 - DNA, 25 bp, Homo sapien
gatgaccagcatgggctgttgcccc

SEQ ID NO: 802693 - DNA, 25 bp, Homo sapien
gaccagcatgggctgttgcccctca

SEQ ID NO: 802694 - DNA, 25 bp, Homo sapien
acattctttcactaacactgttttg

SEQ ID NO: 802695 - DNA, 25 bp, Homo sapien
aacattctttcactaacactgtttt

SEQ ID NO: 802696 - DNA, 25 bp, Homo sapien
tgaagacagagtaacattctttcac

SEQ ID NO: 802697 - DNA, 25 bp, Homo sapien
ggtttgtgaagacagagtaacattc

SEQ ID NO: 802698 - DNA, 25 bp, Homo sapien
taaggcacttttcagaaatcccatt

SEQ ID NO: 802699 - DNA, 25 bp, Homo sapien
atcttcagcaaaacttaaggcactt

SEQ ID NO: 802700 - DNA, 25 bp, Homo sapien
aggcacttttcagaaatcccattgg

SEQ ID NO: 802701 - DNA, 25 bp, Homo sapien
ttcatcttcagcaaaacttaaggca

SEQ ID NO: 802702 - DNA, 25 bp, Homo sapien
tacactggtgaaagctggagatagc

SEQ ID NO: 802703 - DNA, 25 bp, Homo sapien
gaattttacactggtgaaagctgga

SEQ ID NO: 802704 - DNA, 25 bp, Homo sapien
gctggagatagcaatgttcgtattc

SEQ ID NO: 802705 - DNA, 25 bp, Homo sapien
tgaaagctggagatagcaatgttcg

SEQ ID NO: 802706 - DNA, 25 bp, Homo sapien
tatgatgatacttactacctgtctc

SEQ ID NO: 802707 - DNA, 25 bp, Homo sapien
taatgactcaccatgtcctctagga

SEQ ID NO: 802708 - DNA, 25 bp, Homo sapien
catagttaactacgcagactcgagt

SEQ ID NO: 802709 - DNA, 25 bp, Homo sapien
cagtggactacccattagaaaggaa

SEQ ID NO: 802710 - DNA, 25 bp, Homo sapien
aggcttctcaccaacatatctccac

SEQ ID NO: 802711 - DNA, 25 bp, Homo sapien
tatttttcagaaagggatcttgtgg

SEQ ID NO: 802712 - DNA, 25 bp, Homo sapien
tccaaataatgtgccagtgattaca

SEQ ID NO: 802713 - DNA, 25 bp, Homo sapien
cagtgattacatccatggtgtaggc

SEQ ID NO: 802714 - DNA, 25 bp, Homo sapien
gattgttgagagaatccaagttcac

SEQ ID NO: 802715 - DNA, 25 bp, Homo sapien
gcaccatgcactccggcctaggcaa

SEQ ID NO: 802716 - DNA, 25 bp, Homo sapien
tgagcccagatcgcaccatgcactc

SEQ ID NO: 802717 - DNA, 25 bp, Homo sapien
agatcgcaccatgcactccggccta

SEQ ID NO: 802718 - DNA, 25 bp, Homo sapien
gtgagcccagatcgcaccatgcact

SEQ ID NO: 802719 - DNA, 25 bp, Homo sapien
aaataaatcatagtgaaaaatgtga

SEQ ID NO: 802720 - DNA, 25 bp, Homo sapien
tgaaatttacctacaacaattacaa

SEQ ID NO: 802721 - DNA, 25 bp, Homo sapien
aaatgtgaaatttacctacaacaat

SEQ ID NO: 802722 - DNA, 25 bp, Homo sapien
aataaatcatagtgaaaaatgtgaa

SEQ ID NO: 802723 - DNA, 25 bp, Homo sapien
actggggtaagaaatggaaagagtg

SEQ ID NO: 802724 - DNA, 25 bp, Homo sapien
catcttttggaaacaaaccgatatt

SEQ ID NO: 802725 - DNA, 25 bp, Homo sapien
tcatcctttcaatggaattttttaa

SEQ ID NO: 802726 - DNA, 25 bp, Homo sapien
ctttgaggcgactttctttcatcct

SEQ ID NO: 802727 - DNA, 25 bp, Homo sapien
ttgtttatctttgaggcgactttct

SEQ ID NO: 802728 - DNA, 25 bp, Homo sapien
tagcctggtagggactcctgctgaa

SEQ ID NO: 802729 - DNA, 25 bp, Homo sapien
tgcaggtagcctggtagggactcct

SEQ ID NO: 802730 - DNA, 25 bp, Homo sapien
ctgcaggtagcctggtagggactcc

SEQ ID NO: 802731 - DNA, 25 bp, Homo sapien
aggtagcctggtagggactcctgct

SEQ ID NO: 802732 - DNA, 25 bp, Homo sapien
gagtcgatcatctgttgaaagaaat

SEQ ID NO: 802733 - DNA, 25 bp, Homo sapien
tctgggagtcgatcatctgttgaaa

SEQ ID NO: 802734 - DNA, 25 bp, Homo sapien
aattctgggagtcgatcatctgttg

SEQ ID NO: 802735 - DNA, 25 bp, Homo sapien
ttggaattctgggagtcgatcatct

SEQ ID NO: 802736 - DNA, 25 bp, Homo sapien
atgatgataattgactgggccacaa

SEQ ID NO: 802737 - DNA, 25 bp, Homo sapien
tggtgctagttgtgtcataggcagc

SEQ ID NO: 802738 - DNA, 25 bp, Homo sapien
gggagagtggtgctagttgtgtcat

SEQ ID NO: 802739 - DNA, 25 bp, Homo sapien
aaatgatgataattgactgggccac

SEQ ID NO: 802740 - DNA, 25 bp, Homo sapien
tgaacactccattgatttcaatatc

SEQ ID NO: 802741 - DNA, 25 bp, Homo sapien
gagcatagattggaaccatcactgc

SEQ ID NO: 802742 - DNA, 25 bp, Homo sapien
gcagactctcgtaactctactaaca

SEQ ID NO: 802743 - DNA, 25 bp, Homo sapien
gaaccatcactgctaaccctttggg

SEQ ID NO: 802744 - DNA, 25 bp, Homo sapien
tcaggctggttgagggaaggctcct

SEQ ID NO: 802745 - DNA, 25 bp, Homo sapien
tggttgagggaaggctcctttccca

SEQ ID NO: 802746 - DNA, 25 bp, Homo sapien
gctggttgagggaaggctcctttcc

SEQ ID NO: 802747 - DNA, 25 bp, Homo sapien
caggctggttgagggaaggctcctt

SEQ ID NO: 802748 - DNA, 25 bp, Homo sapien
cctggtgtctatagaatatagttat

SEQ ID NO: 802749 - DNA, 25 bp, Homo sapien
tgcagcattgactactgagacaggt

SEQ ID NO: 802750 - DNA, 25 bp, Homo sapien
gggatgcattaatactgttctatag

SEQ ID NO: 802751 - DNA, 25 bp, Homo sapien
caagataacattgtagtcacagaga

SEQ ID NO: 802752 - DNA, 25 bp, Homo sapien
ggagaagttctgcagtgctctaatg

SEQ ID NO: 802753 - DNA, 25 bp, Homo sapien
cggggtccagctccaaaaggtatgt

SEQ ID NO: 802754 - DNA, 25 bp, Homo sapien
gttctgcagtgctctaatgacagca

SEQ ID NO: 802755 - DNA, 25 bp, Homo sapien
ggtccagctccaaaaggtatgtatc

SEQ ID NO: 802756 - DNA, 25 bp, Homo sapien
aaagcttctgcaagttctagtgagt

SEQ ID NO: 802757 - DNA, 25 bp, Homo sapien
gaaagcttctgcaagttctagtgag

SEQ ID NO: 802758 - DNA, 25 bp, Homo sapien
gagaaagcttctgcaagttctagtg

SEQ ID NO: 802759 - DNA, 25 bp, Homo sapien
atgagaaagcttctgcaagttctag

SEQ ID NO: 802760 - DNA, 25 bp, Homo sapien
ctggttgaagaattggtagattgtc

SEQ ID NO: 802761 - DNA, 25 bp, Homo sapien
tctggttgaagaattggtagattgt

SEQ ID NO: 802762 - DNA, 25 bp, Homo sapien
acaatttgaagtgtctagtgttctg

SEQ ID NO: 802763 - DNA, 25 bp, Homo sapien
tcttgaacaaagtggaagtccttag

SEQ ID NO: 802764 - DNA, 25 bp, Homo sapien
ctagtgttctgggatacagctttct

SEQ ID NO: 802765 - DNA, 25 bp, Homo sapien
tgaacaaagtggaagtccttaggga

SEQ ID NO: 802766 - DNA, 25 bp, Homo sapien
tgcaacgtgtaatactctacccaga

SEQ ID NO: 802767 - DNA, 25 bp, Homo sapien
caggaggacttgagggtactaacta

SEQ ID NO: 802768 - DNA, 25 bp, Homo sapien
taaatgtcactacgagaatcacaag

SEQ ID NO: 802769 - DNA, 25 bp, Homo sapien
tctacccagacaatgagagctcaat

SEQ ID NO: 802770 - DNA, 25 bp, Homo sapien
gctagcctcttcatatgctgttgca

SEQ ID NO: 802771 - DNA, 25 bp, Homo sapien
gagtaactagctcagtattggccag

SEQ ID NO: 802772 - DNA, 25 bp, Homo sapien
ctcagtgagatggaaagtcaaatcc

SEQ ID NO: 802773 - DNA, 25 bp, Homo sapien
tctgctctagattgtctggactcag

SEQ ID NO: 802774 - DNA, 25 bp, Homo sapien
gccatattggaactgagaacacagg

SEQ ID NO: 802775 - DNA, 25 bp, Homo sapien
ggtatctgccctttgtgtgcttcac

SEQ ID NO: 802776 - DNA, 25 bp, Homo sapien
cttgcagcctgaagtaccgtaactg

SEQ ID NO: 802777 - DNA, 25 bp, Homo sapien
tgcttcacaagaggcagtcccatgg

SEQ ID NO: 802778 - DNA, 25 bp, Homo sapien
tgctcctaaaagagccacgaagtgg

SEQ ID NO: 802779 - DNA, 25 bp, Homo sapien
tcagtgttgcccgataaagtttact

SEQ ID NO: 802780 - DNA, 25 bp, Homo sapien
gtggctgtcattcctactggaagca

SEQ ID NO: 802781 - DNA, 25 bp, Homo sapien
catcgacgaggccttcgagagctac

SEQ ID NO: 802782 - DNA, 25 bp, Homo sapien
tgcaccgcaactgggcgccgggcgg

SEQ ID NO: 802783 - DNA, 25 bp, Homo sapien
tgccccgaatgtcggcacccatcgg

SEQ ID NO: 802784 - DNA, 25 bp, Homo sapien
gacccggtgtccatcgagtgcggcc

SEQ ID NO: 802785 - DNA, 25 bp, Homo sapien
tgtccatcgagtgcggccacaactt

SEQ ID NO: 802786 - DNA, 25 bp, Homo sapien
gaatccaaatcatccccacgttagc

SEQ ID NO: 802787 - DNA, 25 bp, Homo sapien
ccatggatgttctttgggatagcaa

SEQ ID NO: 802788 - DNA, 25 bp, Homo sapien
caagatcgaaaatccacttaaggga

SEQ ID NO: 802789 - DNA, 25 bp, Homo sapien
tcaaattggataccaaaaaggcaat

SEQ ID NO: 802790 - DNA, 25 bp, Homo sapien
tgtagcagcataaccgacaactggg

SEQ ID NO: 802791 - DNA, 25 bp, Homo sapien
ggacactaggtgctactgcggctca

SEQ ID NO: 802792 - DNA, 25 bp, Homo sapien
gaatgtagatactccaccgcaagga

SEQ ID NO: 802793 - DNA, 25 bp, Homo sapien
tgtgttcagtctcctaatgggccca

SEQ ID NO: 802794 - DNA, 25 bp, Homo sapien
aaaagcatctagaaggtattccagg

SEQ ID NO: 802795 - DNA, 25 bp, Homo sapien
cctgggatacggcccgagattctgc

SEQ ID NO: 802796 - DNA, 25 bp, Homo sapien
tcataccttaactctttgacatgga

SEQ ID NO: 802797 - DNA, 25 bp, Homo sapien
gacatggattctgccaccaacagaa

SEQ ID NO: 802798 - DNA, 25 bp, Homo sapien
tggttgtgataaattgtttgaaaac

SEQ ID NO: 802799 - DNA, 25 bp, Homo sapien
attgtttgaaaacagcactgcactt

SEQ ID NO: 802800 - DNA, 25 bp, Homo sapien
tttgaaaacagcactgcactttgac

SEQ ID NO: 802801 - DNA, 25 bp, Homo sapien
tgataaattgtttgaaaacagcact

SEQ ID NO: 802802 - DNA, 25 bp, Homo sapien
ctcttttgcccagtccggtctggaa

SEQ ID NO: 802803 - DNA, 25 bp, Homo sapien
gtagaggtgggaatcttgctctttt

SEQ ID NO: 802804 - DNA, 25 bp, Homo sapien
tttgtagaggtgggaatcttgctct

SEQ ID NO: 802805 - DNA, 25 bp, Homo sapien
tgctcttttgcccagtccggtctgg

SEQ ID NO: 802806 - DNA, 25 bp, Homo sapien
ttagggttccgtgtagttctcacag

SEQ ID NO: 802807 - DNA, 25 bp, Homo sapien
tagggttccgtgtagttctcacagt

SEQ ID NO: 802808 - DNA, 25 bp, Homo sapien
tgcctttgaatcagtccttaagctt

SEQ ID NO: 802809 - DNA, 25 bp, Homo sapien
ttgaatcagtccttaagcttaacct

SEQ ID NO: 802810 - DNA, 25 bp, Homo sapien
tttgaatcagtccttaagcttaacc

SEQ ID NO: 802811 - DNA, 25 bp, Homo sapien
cctttgaatcagtccttaagcttaa

SEQ ID NO: 802812 - DNA, 25 bp, Homo sapien
tctacccagggaaaattgatgtgca

SEQ ID NO: 802813 - DNA, 25 bp, Homo sapien
gcaatgtgggatctcagacccagta

SEQ ID NO: 802814 - DNA, 25 bp, Homo sapien
cagtcaatggatccacaaggcctga

SEQ ID NO: 802815 - DNA, 25 bp, Homo sapien
tttggagaccgaagactgggatgcc

SEQ ID NO: 802816 - DNA, 25 bp, Homo sapien
agcaaaaatatcctggaccggcaag

SEQ ID NO: 802817 - DNA, 25 bp, Homo sapien
tgtcttgataaagggattgcatgct

SEQ ID NO: 802818 - DNA, 25 bp, Homo sapien
tgataaatttctcaccaggctgact

SEQ ID NO: 802819 - DNA, 25 bp, Homo sapien
gcccaatgtgcaagactaagagtta

SEQ ID NO: 802820 - DNA, 25 bp, Homo sapien
ccaggctgtagctctcttaaggagg

SEQ ID NO: 802821 - DNA, 25 bp, Homo sapien
ggactacaggctacaggcatgtgtc

SEQ ID NO: 802822 - DNA, 25 bp, Homo sapien
ggctgatgtacaatggctccatctc

SEQ ID NO: 802823 - DNA, 25 bp, Homo sapien
tgtctttcaggctgatgtacaatgg

SEQ ID NO: 802824 - DNA, 25 bp, Homo sapien
gcatgtgtcactactcctggttaat

SEQ ID NO: 802825 - DNA, 25 bp, Homo sapien
catctcgggtctcctggaggacagc

SEQ ID NO: 802826 - DNA, 25 bp, Homo sapien
aggacagcaggacccagaagcagca

SEQ ID NO: 802827 - DNA, 25 bp, Homo sapien
ggaggacagcaggacccagaagcag

SEQ ID NO: 802828 - DNA, 25 bp, Homo sapien
gcagagacagcaggacagacaccat

SEQ ID NO: 802829 - DNA, 25 bp, Homo sapien
cttcactgttgtagtggaagaaggc

SEQ ID NO: 802830 - DNA, 25 bp, Homo sapien
ttcactgttgtagtggaagaaggca

SEQ ID NO: 802831 - DNA, 25 bp, Homo sapien
tgtcttcactgttgtagtggaagaa

SEQ ID NO: 802832 - DNA, 25 bp, Homo sapien
tcttcactgttgtagtggaagaagg

SEQ ID NO: 802833 - DNA, 25 bp, Homo sapien
tcttccagaatgctccagtgcttct

SEQ ID NO: 802834 - DNA, 25 bp, Homo sapien
acaaccaaacctttcctgcaaggca

SEQ ID NO: 802835 - DNA, 25 bp, Homo sapien
accaaacctttcctgcaaggcatga

SEQ ID NO: 802836 - DNA, 25 bp, Homo sapien
tcacaaccaaacctttcctgcaagg

SEQ ID NO: 802837 - DNA, 25 bp, Homo sapien
gggcacatgcaccaacaaccaggtc

SEQ ID NO: 802838 - DNA, 25 bp, Homo sapien
ccaggtcaggtaagtgccgtttcca

SEQ ID NO: 802839 - DNA, 25 bp, Homo sapien
gccgtttccaccgtgaagaacatct

SEQ ID NO: 802840 - DNA, 25 bp, Homo sapien
tgcaccaacaaccaggtcaggtaag

SEQ ID NO: 802841 - DNA, 25 bp, Homo sapien
agttaatactgttctctgtcgtgct

SEQ ID NO: 802842 - DNA, 25 bp, Homo sapien
gcttgggagcaggaccaatgagaaa

SEQ ID NO: 802843 - DNA, 25 bp, Homo sapien
gggccttgaggatccattgaccgtg

SEQ ID NO: 802844 - DNA, 25 bp, Homo sapien
tttgggtccgagtcagctcaggaca

SEQ ID NO: 802845 - DNA, 25 bp, Homo sapien
acaaggcggaatcccaggagcacgg

SEQ ID NO: 802846 - DNA, 25 bp, Homo sapien
agcagcacaaggcggaatcccagga

SEQ ID NO: 802847 - DNA, 25 bp, Homo sapien
gacacacgaattcactctgctcatc

SEQ ID NO: 802848 - DNA, 25 bp, Homo sapien
ctgggtgtgacacacgaattcactc

SEQ ID NO: 802849 - DNA, 25 bp, Homo sapien
gtagaggacgctaggtacagccacc

SEQ ID NO: 802850 - DNA, 25 bp, Homo sapien
tgtagaggacgctaggtacagccac

SEQ ID NO: 802851 - DNA, 25 bp, Homo sapien
atgtagaggacgctaggtacagcca

SEQ ID NO: 802852 - DNA, 25 bp, Homo sapien
catgtagaggacgctaggtacagcc

SEQ ID NO: 802853 - DNA, 25 bp, Homo sapien
catgattcttcccagtgccagatca

SEQ ID NO: 802854 - DNA, 25 bp, Homo sapien
atgattcttcccagtgccagatcac

SEQ ID NO: 802855 - DNA, 25 bp, Homo sapien
tcatgattcttcccagtgccagatc

SEQ ID NO: 802856 - DNA, 25 bp, Homo sapien
acccatacaggtggtactgcaaccc

SEQ ID NO: 802857 - DNA, 25 bp, Homo sapien
gaacccatacaggtggtactgcaac

SEQ ID NO: 802858 - DNA, 25 bp, Homo sapien
ggaacccatacaggtggtactgcaa

SEQ ID NO: 802859 - DNA, 25 bp, Homo sapien
aacccatacaggtggtactgcaacc

SEQ ID NO: 802860 - DNA, 25 bp, Homo sapien
aaggctcttggccacatgcaaagga

SEQ ID NO: 802861 - DNA, 25 bp, Homo sapien
caaaagagtgaacaagagacggaac

SEQ ID NO: 802862 - DNA, 25 bp, Homo sapien
aaaaggtgcaagttaatctatacgg

SEQ ID NO: 802863 - DNA, 25 bp, Homo sapien
aagttaatctatacgggcaaggctc

SEQ ID NO: 802864 - DNA, 25 bp, Homo sapien
tcaagcctgaactcgagaggtagcc

SEQ ID NO: 802865 - DNA, 25 bp, Homo sapien
taaccggtacctcgacttggccata

SEQ ID NO: 802866 - DNA, 25 bp, Homo sapien
tggtctctgaaatggaacaaggctg

SEQ ID NO: 802867 - DNA, 25 bp, Homo sapien
aagtcatccgcaaggacgtggtggc

SEQ ID NO: 802868 - DNA, 25 bp, Homo sapien
ttttactgctagaagatcatgctcc

SEQ ID NO: 802869 - DNA, 25 bp, Homo sapien
tcatttcctaaagactcacagagaa

SEQ ID NO: 802870 - DNA, 25 bp, Homo sapien
gagaacagaagactggttgcatgag

SEQ ID NO: 802871 - DNA, 25 bp, Homo sapien
ttcggttatacatcattgctggtat

SEQ ID NO: 802872 - DNA, 25 bp, Homo sapien
tctctaggacttcggagggcccgca

SEQ ID NO: 802873 - DNA, 25 bp, Homo sapien
caaacagcagtgacagcaacaaaca

SEQ ID NO: 802874 - DNA, 25 bp, Homo sapien
aacagaaccgacagccgcagaccgc

SEQ ID NO: 802875 - DNA, 25 bp, Homo sapien
ctagccgctggcaagaacaaacagc

SEQ ID NO: 802876 - DNA, 25 bp, Homo sapien
gcatggactttggtgctagcggggt

SEQ ID NO: 802877 - DNA, 25 bp, Homo sapien
tgctagcggggtcggcctgaaatct

SEQ ID NO: 802878 - DNA, 25 bp, Homo sapien
cattttcaaactgagctgccacgga

SEQ ID NO: 802879 - DNA, 25 bp, Homo sapien
gactttggtgctagcggggtcggcc

SEQ ID NO: 802880 - DNA, 25 bp, Homo sapien
tgctgtcagccgagaccatcacgcc

SEQ ID NO: 802881 - DNA, 25 bp, Homo sapien
ctgctgtcagccgagaccatcacgc

SEQ ID NO: 802882 - DNA, 25 bp, Homo sapien
gctgctgtcagccgagaccatcacg

SEQ ID NO: 802883 - DNA, 25 bp, Homo sapien
gctgtcagccgagaccatcacgcca

SEQ ID NO: 802884 - DNA, 25 bp, Homo sapien
tgcaaggcaattcataaatgtctaa

SEQ ID NO: 802885 - DNA, 25 bp, Homo sapien
cactcggggtagaacttggcaggaa

SEQ ID NO: 802886 - DNA, 25 bp, Homo sapien
tgttactacctttccattgcaaggc

SEQ ID NO: 802887 - DNA, 25 bp, Homo sapien
aactctcgaagttgctgttactacc

SEQ ID NO: 802888 - DNA, 25 bp, Homo sapien
tgacccttgggcttgagtgacatgt

SEQ ID NO: 802889 - DNA, 25 bp, Homo sapien
cattgggatgtcatgaggcttgcat

SEQ ID NO: 802890 - DNA, 25 bp, Homo sapien
aatcagcagttgcagggtctggcat

SEQ ID NO: 802891 - DNA, 25 bp, Homo sapien
gctcttttctagcagtgctgaggtg

SEQ ID NO: 802892 - DNA, 25 bp, Homo sapien
gaacatgtgcaggtggtctcttcat

SEQ ID NO: 802893 - DNA, 25 bp, Homo sapien
gctgtcagcggagatcttagctggg

SEQ ID NO: 802894 - DNA, 25 bp, Homo sapien
gatggctcatctatgctccacctgg

SEQ ID NO: 802895 - DNA, 25 bp, Homo sapien
tcctaagattggtgattggtctggc

SEQ ID NO: 802896 - DNA, 25 bp, Homo sapien
tcctctctaggagcgcgggaggact

SEQ ID NO: 802897 - DNA, 25 bp, Homo sapien
ggccggaagcgtgtcaccacctcgt

SEQ ID NO: 802898 - DNA, 25 bp, Homo sapien
acacaatgagtcacaaaggccggaa

SEQ ID NO: 802899 - DNA, 25 bp, Homo sapien
aagggcaccgcacacggacttaggc

SEQ ID NO: 802900 - DNA, 25 bp, Homo sapien
tctcccaggaagaacggcgctttct

SEQ ID NO: 802901 - DNA, 25 bp, Homo sapien
atggactctcttcgcacaacagcgg

SEQ ID NO: 802902 - DNA, 25 bp, Homo sapien
ggacgtctcccaggaagaacggcgc

SEQ ID NO: 802903 - DNA, 25 bp, Homo sapien
aggcaggggcatggactctcttcgc

SEQ ID NO: 802904 - DNA, 25 bp, Homo sapien
gtctggaaacgtatgcggcacctca

SEQ ID NO: 802905 - DNA, 25 bp, Homo sapien
gagtgtctcgtcttatccaaggtca

SEQ ID NO: 802906 - DNA, 25 bp, Homo sapien
caaatcatttcgaagtcggaagggc

SEQ ID NO: 802907 - DNA, 25 bp, Homo sapien
cactggcccgtacaataaatgcttt

SEQ ID NO: 802908 - DNA, 25 bp, Homo sapien
taccttaaaagacagctagctattc

SEQ ID NO: 802909 - DNA, 25 bp, Homo sapien
gcaaaagactaagtagctagcttcc

SEQ ID NO: 802910 - DNA, 25 bp, Homo sapien
gtggtgaaaactgcctgaaataata

SEQ ID NO: 802911 - DNA, 25 bp, Homo sapien
ttaaatcgagaatgagcaaaagact

SEQ ID NO: 802912 - DNA, 25 bp, Homo sapien
caagccttgggacacatgcctgtag

SEQ ID NO: 802913 - DNA, 25 bp, Homo sapien
cttgaagttacaagctcaaaggctg

SEQ ID NO: 802914 - DNA, 25 bp, Homo sapien
tcttaaacaacggcttgaagttaca

SEQ ID NO: 802915 - DNA, 25 bp, Homo sapien
gccaagccttgggacacatgcctgt

SEQ ID NO: 802916 - DNA, 25 bp, Homo sapien
cagctaaggatacctcagttctcac

SEQ ID NO: 802917 - DNA, 25 bp, Homo sapien
gcagctaaggatacctcagttctca

SEQ ID NO: 802918 - DNA, 25 bp, Homo sapien
tccagcagctaaggatacctcagtt

SEQ ID NO: 802919 - DNA, 25 bp, Homo sapien
cagcagctaaggatacctcagttct

SEQ ID NO: 802920 - DNA, 25 bp, Homo sapien
actgacataccatccactttaaata

SEQ ID NO: 802921 - DNA, 25 bp, Homo sapien
tactgacataccatccactttaaat

SEQ ID NO: 802922 - DNA, 25 bp, Homo sapien
ggttttatgatgtgtttctttacta

SEQ ID NO: 802923 - DNA, 25 bp, Homo sapien
ggaactgacttgatccaaacagggt

SEQ ID NO: 802924 - DNA, 25 bp, Homo sapien
tcaggctccaggaactgacttgatc

SEQ ID NO: 802925 - DNA, 25 bp, Homo sapien
ggctccaggaactgacttgatccaa

SEQ ID NO: 802926 - DNA, 25 bp, Homo sapien
aactgacttgatccaaacagggtct

SEQ ID NO: 802927 - DNA, 25 bp, Homo sapien
ggacagacccgtggcttcccgtgat

SEQ ID NO: 802928 - DNA, 25 bp, Homo sapien
gacagacccgtggcttcccgtgatt

SEQ ID NO: 802929 - DNA, 25 bp, Homo sapien
gggacagacccgtggcttcccgtga

SEQ ID NO: 802930 - DNA, 25 bp, Homo sapien
gtgtttatttctggccgcagccact

SEQ ID NO: 802931 - DNA, 25 bp, Homo sapien
caagtcttctagaagggtcacggcc

SEQ ID NO: 802932 - DNA, 25 bp, Homo sapien
taacagaagcgcctgaagcgttggc

SEQ ID NO: 802933 - DNA, 25 bp, Homo sapien
gatgacaaagttccttcagccgact

SEQ ID NO: 802934 - DNA, 25 bp, Homo sapien
tgcgagcatctcaggtccatgaact

SEQ ID NO: 802935 - DNA, 25 bp, Homo sapien
tcaaagctcgaggactcctgaactg

SEQ ID NO: 802936 - DNA, 25 bp, Homo sapien
ccgagacgaatgtttgaagtgggac

SEQ ID NO: 802937 - DNA, 25 bp, Homo sapien
ctgggtggcctcgtgatgaaggtca

SEQ ID NO: 802938 - DNA, 25 bp, Homo sapien
gactctcgtcctgaatcatttccct

SEQ ID NO: 802939 - DNA, 25 bp, Homo sapien
tcagcagcacaaagactctcgtcct

SEQ ID NO: 802940 - DNA, 25 bp, Homo sapien
gctacgttgcccaggactaacatgc

SEQ ID NO: 802941 - DNA, 25 bp, Homo sapien
gcccaggactaacatgcttcttcat

SEQ ID NO: 802942 - DNA, 25 bp, Homo sapien
cacctcctgggttcaagtgattctc

SEQ ID NO: 802943 - DNA, 25 bp, Homo sapien
tacgatctcggcttactgcaacctc

SEQ ID NO: 802944 - DNA, 25 bp, Homo sapien
ccaaggctagagcacagtggtacga

SEQ ID NO: 802945 - DNA, 25 bp, Homo sapien
tcaccaaggctagagcacagtggta

SEQ ID NO: 802946 - DNA, 25 bp, Homo sapien
tgcgatggcatgacaatggtgcgat

SEQ ID NO: 802947 - DNA, 25 bp, Homo sapien
cataacttatccctgccattaagtg

SEQ ID NO: 802948 - DNA, 25 bp, Homo sapien
gactgtgaactgatcttttttcgtg

SEQ ID NO: 802949 - DNA, 25 bp, Homo sapien
tgttcgcacaacaaaatcacttaac

SEQ ID NO: 802950 - DNA, 25 bp, Homo sapien
catgcataacattatcacgtgatca

SEQ ID NO: 802951 - DNA, 25 bp, Homo sapien
gaaactgaatgaccaaaccttgtac

SEQ ID NO: 802952 - DNA, 25 bp, Homo sapien
caacaataagataggctctctgtca

SEQ ID NO: 802953 - DNA, 25 bp, Homo sapien
aatgcagtgctcaaacatgtctcac

SEQ ID NO: 802954 - DNA, 25 bp, Homo sapien
ctggtctctgggactaccctcatga

SEQ ID NO: 802955 - DNA, 25 bp, Homo sapien
gtctctgggactaccctcatgaggg

SEQ ID NO: 802956 - DNA, 25 bp, Homo sapien
ggaatccgctgtgaatagtgcagat

SEQ ID NO: 802957 - DNA, 25 bp, Homo sapien
tgcagatgccatcgcctggtctctg

SEQ ID NO: 802958 - DNA, 25 bp, Homo sapien
tcctgcctgttgtccctactgagat

SEQ ID NO: 802959 - DNA, 25 bp, Homo sapien
ccgagccagattctgacatccccat

SEQ ID NO: 802960 - DNA, 25 bp, Homo sapien
cctactgagattcctccgagccaga

SEQ ID NO: 802961 - DNA, 25 bp, Homo sapien
ttcctccagaatgagggacacagcc

SEQ ID NO: 802962 - DNA, 25 bp, Homo sapien
gattagacggatgatcagttcgcct

SEQ ID NO: 802963 - DNA, 25 bp, Homo sapien
tggaatcagggtcacagtaccatgc

SEQ ID NO: 802964 - DNA, 25 bp, Homo sapien
gaagctgggaatcctcatcacaagg

SEQ ID NO: 802965 - DNA, 25 bp, Homo sapien
aaattgtaatccatgggaacggagc

SEQ ID NO: 802966 - DNA, 25 bp, Homo sapien
gcacccggcctgacttcacaatatt

SEQ ID NO: 802967 - DNA, 25 bp, Homo sapien
cagaggtcacaggtctactactgga

SEQ ID NO: 802968 - DNA, 25 bp, Homo sapien
agggaagacaacaaatcacagcaga

SEQ ID NO: 802969 - DNA, 25 bp, Homo sapien
tggaaaatgagagcgcaggcaaaga

SEQ ID NO: 802970 - DNA, 25 bp, Homo sapien
acttttcaggaacgcgccaaatgca

SEQ ID NO: 802971 - DNA, 25 bp, Homo sapien
tgtctccccgcgtgatgctgaatct

SEQ ID NO: 802972 - DNA, 25 bp, Homo sapien
gaattctccgatgcaaaatcaggta

SEQ ID NO: 802973 - DNA, 25 bp, Homo sapien
caaatgcatcaagggaggctgggct

SEQ ID NO: 802974 - DNA, 25 bp, Homo sapien
gaagtcctgtagaagtcagtctgaa

SEQ ID NO: 802975 - DNA, 25 bp, Homo sapien
ggttgccgagagtccaagagtgcct

SEQ ID NO: 802976 - DNA, 25 bp, Homo sapien
gcacataccctctctttcgggaaga

SEQ ID NO: 802977 - DNA, 25 bp, Homo sapien
ttttatcacacacgtagaagtcctg

SEQ ID NO: 802978 - DNA, 25 bp, Homo sapien
gaagctgggccaggctaccatattt

SEQ ID NO: 802979 - DNA, 25 bp, Homo sapien
tttcagggactcacgattcacaggc

SEQ ID NO: 802980 - DNA, 25 bp, Homo sapien
ggctaccatatttcagggactcacg

SEQ ID NO: 802981 - DNA, 25 bp, Homo sapien
tgggccaggctaccatatttcaggg

SEQ ID NO: 802982 - DNA, 25 bp, Homo sapien
tgaagatcgaagcaaccctagtggc

SEQ ID NO: 802983 - DNA, 25 bp, Homo sapien
taagctttccgatgctaagggctga

SEQ ID NO: 802984 - DNA, 25 bp, Homo sapien
tgccgtattcatcacattcaggagg

SEQ ID NO: 802985 - DNA, 25 bp, Homo sapien
tcctacttgagtggcgatgactact

SEQ ID NO: 802986 - DNA, 25 bp, Homo sapien
tttctgtctgaagcaatgagtgcta

SEQ ID NO: 802987 - DNA, 25 bp, Homo sapien
gccaagattgagctccctcttgcaa

SEQ ID NO: 802988 - DNA, 25 bp, Homo sapien
cgattggaacataccgacggaattc

SEQ ID NO: 802989 - DNA, 25 bp, Homo sapien
tctcaaattcatcacgattggaaca

SEQ ID NO: 802990 - DNA, 25 bp, Homo sapien
caaaaggctgcacgtttaaaggagt

SEQ ID NO: 802991 - DNA, 25 bp, Homo sapien
tgtgataagcaccaaactatgaagc

SEQ ID NO: 802992 - DNA, 25 bp, Homo sapien
tactctcgcttcatggagaagaccg

SEQ ID NO: 802993 - DNA, 25 bp, Homo sapien
caataacaagggactgaaggtacaa

SEQ ID NO: 802994 - DNA, 25 bp, Homo sapien
ctaaacgaagaagctgggaactgac

SEQ ID NO: 802995 - DNA, 25 bp, Homo sapien
gatgcatctgcacacaattccggga

SEQ ID NO: 802996 - DNA, 25 bp, Homo sapien
taacatgctttgtccttgctagggc

SEQ ID NO: 802997 - DNA, 25 bp, Homo sapien
taagcagatcagcatgactacctgg

SEQ ID NO: 802998 - DNA, 25 bp, Homo sapien
cgctcgttctcatcatcacctattt

SEQ ID NO: 802999 - DNA, 25 bp, Homo sapien
aaaccgtgacttcccttagagcagg

SEQ ID NO: 803000 - DNA, 25 bp, Homo sapien
tgggcaagcctctggcgcatgacaa

SEQ ID NO: 803001 - DNA, 25 bp, Homo sapien
gctggccagcagagggtaaccaaac

SEQ ID NO: 803002 - DNA, 25 bp, Homo sapien
tggaattccctgtccatacgcgtca

SEQ ID NO: 803003 - DNA, 25 bp, Homo sapien
tgttgaggaacaccaatatggctgc

SEQ ID NO: 803004 - DNA, 25 bp, Homo sapien
accaatatggctgcctgcacgtgga

SEQ ID NO: 803005 - DNA, 25 bp, Homo sapien
cgcgtcatgaattcatagatactca

SEQ ID NO: 803006 - DNA, 25 bp, Homo sapien
gctgaactccttccaatgctgcagg

SEQ ID NO: 803007 - DNA, 25 bp, Homo sapien
agacctaggggctgaactccttcca

SEQ ID NO: 803008 - DNA, 25 bp, Homo sapien
agaagacctaggggctgaactcctt

SEQ ID NO: 803009 - DNA, 25 bp, Homo sapien
tgcaggactcgatgaagatgtcttt

SEQ ID NO: 803010 - DNA, 25 bp, Homo sapien
tacctatgatggtcgggctacagct

SEQ ID NO: 803011 - DNA, 25 bp, Homo sapien
ggatcttctaatgggcaactggctg

SEQ ID NO: 803012 - DNA, 25 bp, Homo sapien
caatggcccaaggtacagtctcaag

SEQ ID NO: 803013 - DNA, 25 bp, Homo sapien
tcataggtgaactcaaggatcttct

SEQ ID NO: 803014 - DNA, 25 bp, Homo sapien
aagacggtcagaccagatgaaggct

SEQ ID NO: 803015 - DNA, 25 bp, Homo sapien
ggctgcggcggttctctcacccaac

SEQ ID NO: 803016 - DNA, 25 bp, Homo sapien
tctgtttttaccgaagacggtcaga

SEQ ID NO: 803017 - DNA, 25 bp, Homo sapien
ggagttgagtccaccccgaaaatga

SEQ ID NO: 803018 - DNA, 25 bp, Homo sapien
tcgggaccgcgcacccggaagtgcg

SEQ ID NO: 803019 - DNA, 25 bp, Homo sapien
ggaccgcgcacccggaagtgcgtca

SEQ ID NO: 803020 - DNA, 25 bp, Homo sapien
ctcgggaccgcgcacccggaagtgc

SEQ ID NO: 803021 - DNA, 25 bp, Homo sapien
cgggaccgcgcacccggaagtgcgt

SEQ ID NO: 803022 - DNA, 25 bp, Homo sapien
gaatcagagccgctccgggtaccgg

SEQ ID NO: 803023 - DNA, 25 bp, Homo sapien
atgaatcagagccgctccgggtacc

SEQ ID NO: 803024 - DNA, 25 bp, Homo sapien
atcagagccgctccgggtaccggga

SEQ ID NO: 803025 - DNA, 25 bp, Homo sapien
catgaatcagagccgctccgggtac

SEQ ID NO: 803026 - DNA, 25 bp, Homo sapien
tctaatgaggttcggcttcccacag

SEQ ID NO: 803027 - DNA, 25 bp, Homo sapien
tcaatgagccttgcgttcggacctc

SEQ ID NO: 803028 - DNA, 25 bp, Homo sapien
tgttctagcccgaacaaagcccgag

SEQ ID NO: 803029 - DNA, 25 bp, Homo sapien
aaaaaaggcggccacggtcagactg

SEQ ID NO: 803030 - DNA, 25 bp, Homo sapien
caggagatcgagaccattctggcta

SEQ ID NO: 803031 - DNA, 25 bp, Homo sapien
gcccgaggcgggcagatcacgaggt

SEQ ID NO: 803032 - DNA, 25 bp, Homo sapien
ctagggggcccggcgccgtggctca

SEQ ID NO: 803033 - DNA, 25 bp, Homo sapien
acctgtaattccagcactttgggag

SEQ ID NO: 803034 - DNA, 25 bp, Homo sapien
cacgcccggtggtacatcagttttg

SEQ ID NO: 803035 - DNA, 25 bp, Homo sapien
tgcccaaactgtatctccaacttag

SEQ ID NO: 803036 - DNA, 25 bp, Homo sapien
aagactacaaacgagtagagggccg

SEQ ID NO: 803037 - DNA, 25 bp, Homo sapien
tgcggtgcacacaactcaaatgtac

SEQ ID NO: 803038 - DNA, 25 bp, Homo sapien
tgtggggcaggaatattcgttcctt

SEQ ID NO: 803039 - DNA, 25 bp, Homo sapien
ctgtggggcaggaatattcgttcct

SEQ ID NO: 803040 - DNA, 25 bp, Homo sapien
tggggcaggaatattcgttcctttg

SEQ ID NO: 803041 - DNA, 25 bp, Homo sapien
actccagaaacagcctcaccaaaga

SEQ ID NO: 803042 - DNA, 25 bp, Homo sapien
tccagaaacagcctcaccaaagatg

SEQ ID NO: 803043 - DNA, 25 bp, Homo sapien
gggccatgcctagtaccttggtcat

SEQ ID NO: 803044 - DNA, 25 bp, Homo sapien
ggggccatgcctagtaccttggtca

SEQ ID NO: 803045 - DNA, 25 bp, Homo sapien
gaactggggccatgcctagtacctt

SEQ ID NO: 803046 - DNA, 25 bp, Homo sapien
ctggggccatgcctagtaccttggt

SEQ ID NO: 803047 - DNA, 25 bp, Homo sapien
aggtacttgcctttctcttctttct

SEQ ID NO: 803048 - DNA, 25 bp, Homo sapien
ctaggaaggtacttgcctttctctt

SEQ ID NO: 803049 - DNA, 25 bp, Homo sapien
acttgcctttctcttctttctcctc

SEQ ID NO: 803050 - DNA, 25 bp, Homo sapien
gtacttgcctttctcttctttctcc

SEQ ID NO: 803051 - DNA, 25 bp, Homo sapien
gaagcgctggcggaacatctccagg

SEQ ID NO: 803052 - DNA, 25 bp, Homo sapien
ggtatcatggtacccaaactgcctg

SEQ ID NO: 803053 - DNA, 25 bp, Homo sapien
gagtgacagcctcttcagcgctctc

SEQ ID NO: 803054 - DNA, 25 bp, Homo sapien
cgctccagatcttcgaggagagtga

SEQ ID NO: 803055 - DNA, 25 bp, Homo sapien
cagactcttggatgtacaggggccc

SEQ ID NO: 803056 - DNA, 25 bp, Homo sapien
tctgttcgtttggaggagttgagac

SEQ ID NO: 803057 - DNA, 25 bp, Homo sapien
tatcttctcccacaccggtttctgt

SEQ ID NO: 803058 - DNA, 25 bp, Homo sapien
cccaagactcgtatttgtgactggt

SEQ ID NO: 803059 - DNA, 25 bp, Homo sapien
ttggatcttgagcgaactcctgctc

SEQ ID NO: 803060 - DNA, 25 bp, Homo sapien
cttggatcttgagcgaactcctgct

SEQ ID NO: 803061 - DNA, 25 bp, Homo sapien
tggatcttgagcgaactcctgctcc

SEQ ID NO: 803062 - DNA, 25 bp, Homo sapien
tcttggatcttgagcgaactcctgc

SEQ ID NO: 803063 - DNA, 25 bp, Homo sapien
gcctggggcactgaataggagtcta

SEQ ID NO: 803064 - DNA, 25 bp, Homo sapien
aataggagtctaatgggtggtcctc

SEQ ID NO: 803065 - DNA, 25 bp, Homo sapien
tgaataggagtctaatgggtggtcc

SEQ ID NO: 803066 - DNA, 25 bp, Homo sapien
taggagtctaatgggtggtcctcac

SEQ ID NO: 803067 - DNA, 25 bp, Homo sapien
catgatagcgcatagatacaagtaa

SEQ ID NO: 803068 - DNA, 25 bp, Homo sapien
gactaaacagagctcatgatagcgc

SEQ ID NO: 803069 - DNA, 25 bp, Homo sapien
agatagaaccatcaggtgagactga

SEQ ID NO: 803070 - DNA, 25 bp, Homo sapien
gaagggtgactaaacagagctcatg

SEQ ID NO: 803071 - DNA, 25 bp, Homo sapien
gctggcctcaggtttattggcgata

SEQ ID NO: 803072 - DNA, 25 bp, Homo sapien
tcattttcaaggtttacgcactgcc

SEQ ID NO: 803073 - DNA, 25 bp, Homo sapien
tttacgcactgcctctctaagctgg

SEQ ID NO: 803074 - DNA, 25 bp, Homo sapien
tcatctgctgattcctcgtgctggg

SEQ ID NO: 803075 - DNA, 25 bp, Homo sapien
aggtttagtaggaactgattctcta

SEQ ID NO: 803076 - DNA, 25 bp, Homo sapien
gtaggtttagtaggaactgattctc

SEQ ID NO: 803077 - DNA, 25 bp, Homo sapien
taggtttagtaggaactgattctct

SEQ ID NO: 803078 - DNA, 25 bp, Homo sapien
ggtttagtaggaactgattctctac

SEQ ID NO: 803079 - DNA, 25 bp, Homo sapien
tcagcacatatataacgtctctctc

SEQ ID NO: 803080 - DNA, 25 bp, Homo sapien
tccgatagtgacgaatgaggctgcc

SEQ ID NO: 803081 - DNA, 25 bp, Homo sapien
tagggccggtccaccaagtgtgttc

SEQ ID NO: 803082 - DNA, 25 bp, Homo sapien
cacaatctttgcactgatatggcgc

SEQ ID NO: 803083 - DNA, 25 bp, Homo sapien
tgaggcccgcatgctgactgaagct

SEQ ID NO: 803084 - DNA, 25 bp, Homo sapien
gaaagattggacttgctacagaagg

SEQ ID NO: 803085 - DNA, 25 bp, Homo sapien
gattggacttgctacagaaggtctt

SEQ ID NO: 803086 - DNA, 25 bp, Homo sapien
ggacttgctacagaaggtctttcca

SEQ ID NO: 803087 - DNA, 25 bp, Homo sapien
acttgctacagaaggtctttccaca

SEQ ID NO: 803088 - DNA, 25 bp, Homo sapien
taagtgtggcgaagggactctgctc

SEQ ID NO: 803089 - DNA, 25 bp, Homo sapien
taactacgcaaaaggtaatgctggc

SEQ ID NO: 803090 - DNA, 25 bp, Homo sapien
tgaactggcgagtgtggaacctcct

SEQ ID NO: 803091 - DNA, 25 bp, Homo sapien
tgccatgttgctgtggagctcgcac

SEQ ID NO: 803092 - DNA, 25 bp, Homo sapien
cagctgataaatggagtcctggccc

SEQ ID NO: 803093 - DNA, 25 bp, Homo sapien
gcaccgggattgttcagtgacagct

SEQ ID NO: 803094 - DNA, 25 bp, Homo sapien
gctgcctcagcagggttaatagtag

SEQ ID NO: 803095 - DNA, 25 bp, Homo sapien
tgttatctcggaaggcccaaatagc

SEQ ID NO: 803096 - DNA, 25 bp, Homo sapien
aaatagcttcccgttcactcagaca

SEQ ID NO: 803097 - DNA, 25 bp, Homo sapien
tcctttagggctcttggagcagcca

SEQ ID NO: 803098 - DNA, 25 bp, Homo sapien
gaaacctggtgatattgccagcaga

SEQ ID NO: 803099 - DNA, 25 bp, Homo sapien
gattcctttagttggagtccgcgta

SEQ ID NO: 803100 - DNA, 25 bp, Homo sapien
tgggcaaatctgtccaaacagctag

SEQ ID NO: 803101 - DNA, 25 bp, Homo sapien
ctcattctgcatcggaggatccaca

SEQ ID NO: 803102 - DNA, 25 bp, Homo sapien
cattctgcatcggaggatccacacg

SEQ ID NO: 803103 - DNA, 25 bp, Homo sapien
tgccctcattctgcatcggaggatc

SEQ ID NO: 803104 - DNA, 25 bp, Homo sapien
ttctgcatcggaggatccacacggg

SEQ ID NO: 803105 - DNA, 25 bp, Homo sapien
cacatcagagactccccgtgggaga

SEQ ID NO: 803106 - DNA, 25 bp, Homo sapien
aatgattttgggaacagcttcactg

SEQ ID NO: 803107 - DNA, 25 bp, Homo sapien
ggagacagaccccataagtgtgatg

SEQ ID NO: 803108 - DNA, 25 bp, Homo sapien
gcctatgaacgagaagtcagtctga

SEQ ID NO: 803109 - DNA, 25 bp, Homo sapien
cagtgcatcgcgtgatacacctggc

SEQ ID NO: 803110 - DNA, 25 bp, Homo sapien
taacacagttattcgcgcccgtggc

SEQ ID NO: 803111 - DNA, 25 bp, Homo sapien
taagcgtacgcagttagcacgaggg

SEQ ID NO: 803112 - DNA, 25 bp, Homo sapien
cggtgtttacactctgaagggcttt

SEQ ID NO: 803113 - DNA, 25 bp, Homo sapien
actctgtggccagcctggagtacag

SEQ ID NO: 803114 - DNA, 25 bp, Homo sapien
acagtggtgcgatgtcggctcactg

SEQ ID NO: 803115 - DNA, 25 bp, Homo sapien
gcgtctgccaccacgcccgggtaat

SEQ ID NO: 803116 - DNA, 25 bp, Homo sapien
cactctgtggccagcctggagtaca

SEQ ID NO: 803117 - DNA, 25 bp, Homo sapien
cccgcgcccgccagcctcggccccg

SEQ ID NO: 803118 - DNA, 25 bp, Homo sapien
tttccccgcgcccgccagcctcggc

SEQ ID NO: 803119 - DNA, 25 bp, Homo sapien
tccccgcgcccgccagcctcggccc

SEQ ID NO: 803120 - DNA, 25 bp, Homo sapien
cgcgcccgccagcctcggccccgcc

SEQ ID NO: 803121 - DNA, 25 bp, Homo sapien
gtcccgttcgtagctgcagccgccg

SEQ ID NO: 803122 - DNA, 25 bp, Homo sapien
cggtcccgttcgtagctgcagccgc

SEQ ID NO: 803123 - DNA, 25 bp, Homo sapien
tcctccggtcccgttcgtagctgca

SEQ ID NO: 803124 - DNA, 25 bp, Homo sapien
ctccggtcccgttcgtagctgcagc

SEQ ID NO: 803125 - DNA, 25 bp, Homo sapien
agtggtctgagatgttgagaatgac

SEQ ID NO: 803126 - DNA, 25 bp, Homo sapien
ggagagcgacggaaacactcccagt

SEQ ID NO: 803127 - DNA, 25 bp, Homo sapien
agcgcatgcggatccagtggtctga

SEQ ID NO: 803128 - DNA, 25 bp, Homo sapien
gcccctcctgggagcgcatgcggat

SEQ ID NO: 803129 - DNA, 25 bp, Homo sapien
ccatgtattggggaaacgatgattt

SEQ ID NO: 803130 - DNA, 25 bp, Homo sapien
tgagatcagtgggaaccatgtattg

SEQ ID NO: 803131 - DNA, 25 bp, Homo sapien
actggagtctatgcccaacactcac

SEQ ID NO: 803132 - DNA, 25 bp, Homo sapien
tatgacctgagggtctgagatcagt

SEQ ID NO: 803133 - DNA, 25 bp, Homo sapien
tctcttccacggtgtgggacagcag

SEQ ID NO: 803134 - DNA, 25 bp, Homo sapien
ggagttcatcacctcgatatttcgg

SEQ ID NO: 803135 - DNA, 25 bp, Homo sapien
tgcttgccaatcagagccccaatca

SEQ ID NO: 803136 - DNA, 25 bp, Homo sapien
tattccttgtcaatgataatcttct

SEQ ID NO: 803137 - DNA, 25 bp, Homo sapien
tcttccccacatctattccactctc

SEQ ID NO: 803138 - DNA, 25 bp, Homo sapien
cttccccacatctattccactctca

SEQ ID NO: 803139 - DNA, 25 bp, Homo sapien
tcagtttagaataactactcccttc

SEQ ID NO: 803140 - DNA, 25 bp, Homo sapien
tgagcccggcctgacatagtaattc

SEQ ID NO: 803141 - DNA, 25 bp, Homo sapien
tcttttgagaaagaactctgaacgt

SEQ ID NO: 803142 - DNA, 25 bp, Homo sapien
tcctcaatgtgaagctcctggtgta

SEQ ID NO: 803143 - DNA, 25 bp, Homo sapien
caggtggcccccctgtggtatacca

SEQ ID NO: 803144 - DNA, 25 bp, Homo sapien
ctgcttatggacgtggatgtccgag

SEQ ID NO: 803145 - DNA, 25 bp, Homo sapien
cctgtggtataccaacccagaaact

SEQ ID NO: 803146 - DNA, 25 bp, Homo sapien
gtataccaacccagaaactccagct

SEQ ID NO: 803147 - DNA, 25 bp, Homo sapien
ccttcccctcattctccattctctg

SEQ ID NO: 803148 - DNA, 25 bp, Homo sapien
ggacaatgcacaggaagtcagtgcc

SEQ ID NO: 803149 - DNA, 25 bp, Homo sapien
attctctgccccagcatgcacaggt

SEQ ID NO: 803150 - DNA, 25 bp, Homo sapien
ccccagcatgcacaggtgtgagcat

SEQ ID NO: 803151 - DNA, 25 bp, Homo sapien
tgtgcttggtcatagggttcaactt

SEQ ID NO: 803152 - DNA, 25 bp, Homo sapien
ggtcatagggttcaacttcagaaag

SEQ ID NO: 803153 - DNA, 25 bp, Homo sapien
ctgtgtgcttggtcatagggttcaa

SEQ ID NO: 803154 - DNA, 25 bp, Homo sapien
cttggtcatagggttcaacttcaga

SEQ ID NO: 803155 - DNA, 25 bp, Homo sapien
gcatctggcattccccaatagagga

SEQ ID NO: 803156 - DNA, 25 bp, Homo sapien
caacatttgggctagctgcttttac

SEQ ID NO: 803157 - DNA, 25 bp, Homo sapien
accaatgaagtagggattacctcct

SEQ ID NO: 803158 - DNA, 25 bp, Homo sapien
tagcgacaatcatgacagagtaggc

SEQ ID NO: 803159 - DNA, 25 bp, Homo sapien
gacagactcaaaaacgctgacagga

SEQ ID NO: 803160 - DNA, 25 bp, Homo sapien
atgacagactcaaaaacgctgacag

SEQ ID NO: 803161 - DNA, 25 bp, Homo sapien
tgacagactcaaaaacgctgacagg

SEQ ID NO: 803162 - DNA, 25 bp, Homo sapien
cagactcaaaaacgctgacaggaag

SEQ ID NO: 803163 - DNA, 25 bp, Homo sapien
acaaagggagaatcaaaagcaggaa

SEQ ID NO: 803164 - DNA, 25 bp, Homo sapien
tggtctacaccaatgcgttccgctt

SEQ ID NO: 803165 - DNA, 25 bp, Homo sapien
tcattcgggctacgtggtctacacc

SEQ ID NO: 803166 - DNA, 25 bp, Homo sapien
cctgttgctgtcattcgggctacgt

SEQ ID NO: 803167 - DNA, 25 bp, Homo sapien
aatgcgttccgcttcctctgtggcc

SEQ ID NO: 803168 - DNA, 25 bp, Homo sapien
cccacttccaaggaatcccctccat

SEQ ID NO: 803169 - DNA, 25 bp, Homo sapien
ccacttccaaggaatcccctccatt

SEQ ID NO: 803170 - DNA, 25 bp, Homo sapien
cacttccaaggaatcccctccatta

SEQ ID NO: 803171 - DNA, 25 bp, Homo sapien
atggcgctgtgctgtgctatcaggt

SEQ ID NO: 803172 - DNA, 25 bp, Homo sapien
tgctgtgctatcaggtgttcagcca

SEQ ID NO: 803173 - DNA, 25 bp, Homo sapien
ccaagatgagcttgacgcggctgtg

SEQ ID NO: 803174 - DNA, 25 bp, Homo sapien
tccaagatgagcttgacgcggctgt

SEQ ID NO: 803175 - DNA, 25 bp, Homo sapien
tgagcaccgggagacagtgacacag

SEQ ID NO: 803176 - DNA, 25 bp, Homo sapien
tctgtgctgagcaccgggagacagt

SEQ ID NO: 803177 - DNA, 25 bp, Homo sapien
gtgacacagagcataggcctcccgc

SEQ ID NO: 803178 - DNA, 25 bp, Homo sapien
gatctcatgattaaaggggacctct

SEQ ID NO: 803179 - DNA, 25 bp, Homo sapien
gttcctcgggatccctcgtggcatg

SEQ ID NO: 803180 - DNA, 25 bp, Homo sapien
ggcatgcccggggaacaacagtccc

SEQ ID NO: 803181 - DNA, 25 bp, Homo sapien
tcgtggcatgcccggggaacaacag

SEQ ID NO: 803182 - DNA, 25 bp, Homo sapien
aggaccagttcctcgggatccctcg

SEQ ID NO: 803183 - DNA, 25 bp, Homo sapien
cattctcctgccgatgccttgtcgg

SEQ ID NO: 803184 - DNA, 25 bp, Homo sapien
acaaactggttcatggtgttgcacg

SEQ ID NO: 803185 - DNA, 25 bp, Homo sapien
ccatgagccccacgtcgttgcattg

SEQ ID NO: 803186 - DNA, 25 bp, Homo sapien
cgtagaggacattgaacttgttcac

SEQ ID NO: 803187 - DNA, 25 bp, Homo sapien
gtccatcagcccttcaagtaccctc

SEQ ID NO: 803188 - DNA, 25 bp, Homo sapien
cctgtccatcagcccttcaagtacc

SEQ ID NO: 803189 - DNA, 25 bp, Homo sapien
tccatcagcccttcaagtaccctca

SEQ ID NO: 803190 - DNA, 25 bp, Homo sapien
tgtccatcagcccttcaagtaccct

SEQ ID NO: 803191 - DNA, 25 bp, Homo sapien
tcccctttgggatagttgcctgacc

SEQ ID NO: 803192 - DNA, 25 bp, Homo sapien
gacagcggtttctctcaaggaagtg

SEQ ID NO: 803193 - DNA, 25 bp, Homo sapien
tgccctcccctttgggatagttgcc

SEQ ID NO: 803194 - DNA, 25 bp, Homo sapien
tcaaggaagtgtagtgccctcccct

SEQ ID NO: 803195 - DNA, 25 bp, Homo sapien
tggtaattcacagtgcccacaggat

SEQ ID NO: 803196 - DNA, 25 bp, Homo sapien
tgtagaacagagaccacttaggtgg

SEQ ID NO: 803197 - DNA, 25 bp, Homo sapien
gaatgagcctcgatgaacatccaag

SEQ ID NO: 803198 - DNA, 25 bp, Homo sapien
ggtagtgcctccctcactgaagagc

SEQ ID NO: 803199 - DNA, 25 bp, Homo sapien
gagcagcgctgtgtatctcgtggct

SEQ ID NO: 803200 - DNA, 25 bp, Homo sapien
cggacacggatcacttttgtctgat

SEQ ID NO: 803201 - DNA, 25 bp, Homo sapien
ggagctcaatgtctggcaggtcaat

SEQ ID NO: 803202 - DNA, 25 bp, Homo sapien
tgtgtatctcgtggcttcacacccg

SEQ ID NO: 803203 - DNA, 25 bp, Homo sapien
tccgtgagtggagaactgaccttag

SEQ ID NO: 803204 - DNA, 25 bp, Homo sapien
gcctggagcagaacatacagctacc

SEQ ID NO: 803205 - DNA, 25 bp, Homo sapien
tgagttcgacaagatggctgaggcc

SEQ ID NO: 803206 - DNA, 25 bp, Homo sapien
cagctgtgctgagagactccgtgag

SEQ ID NO: 803207 - DNA, 25 bp, Homo sapien
catgcgcagattgtgagtggtctct

SEQ ID NO: 803208 - DNA, 25 bp, Homo sapien
ggacgtttacattgagcatcggcta

SEQ ID NO: 803209 - DNA, 25 bp, Homo sapien
catcggctaatgatggagcagcgga

SEQ ID NO: 803210 - DNA, 25 bp, Homo sapien
gaaccagtaccctgctgaactcatg

SEQ ID NO: 803211 - DNA, 25 bp, Homo sapien
tcttcgctggttagaaacagacttg

SEQ ID NO: 803212 - DNA, 25 bp, Homo sapien
tgttggatggccctgtgcactgcca

SEQ ID NO: 803213 - DNA, 25 bp, Homo sapien
tgtttactaagagcggaagcgatgg

SEQ ID NO: 803214 - DNA, 25 bp, Homo sapien
aatcccgagctgtgaagcggctgga

SEQ ID NO: 803215 - DNA, 25 bp, Homo sapien
gaaaagctagtaatcccacctggta

SEQ ID NO: 803216 - DNA, 25 bp, Homo sapien
gctgcacagggaaaagtcgcgccca

SEQ ID NO: 803217 - DNA, 25 bp, Homo sapien
tccttcgcgcttttgggcattccca

SEQ ID NO: 803218 - DNA, 25 bp, Homo sapien
gccatcgatgttgaagaaaagctag

SEQ ID NO: 803219 - DNA, 25 bp, Homo sapien
aggagcaagacctctgagcccgcca

SEQ ID NO: 803220 - DNA, 25 bp, Homo sapien
gcgcggagattctcagcttccccag

SEQ ID NO: 803221 - DNA, 25 bp, Homo sapien
cgatggcactgaaggactacgcgct

SEQ ID NO: 803222 - DNA, 25 bp, Homo sapien
tcgagctgcggcctggctaaggccc

SEQ ID NO: 803223 - DNA, 25 bp, Homo sapien
gattcccttccgacgcccgcaccgc

SEQ ID NO: 803224 - DNA, 25 bp, Homo sapien
cggagattcccttccgacgcccgca

SEQ ID NO: 803225 - DNA, 25 bp, Homo sapien
tcccttccgacgcccgcaccgcctc

SEQ ID NO: 803226 - DNA, 25 bp, Homo sapien
ggagattcccttccgacgcccgcac

SEQ ID NO: 803227 - DNA, 25 bp, Homo sapien
acaaaagaacgcgtgtgcgctggcc

SEQ ID NO: 803228 - DNA, 25 bp, Homo sapien
tctggagagtagacaagaagacggc

SEQ ID NO: 803229 - DNA, 25 bp, Homo sapien
caagaagacggcgaaagtcgggcct

SEQ ID NO: 803230 - DNA, 25 bp, Homo sapien
tggccctttaagagcgattctcctc

SEQ ID NO: 803231 - DNA, 25 bp, Homo sapien
atgagcgggtcccccttggaggaca

SEQ ID NO: 803232 - DNA, 25 bp, Homo sapien
agtctttgtagatgagcgggtcccc

SEQ ID NO: 803233 - DNA, 25 bp, Homo sapien
tagatgagcgggtcccccttggagg

SEQ ID NO: 803234 - DNA, 25 bp, Homo sapien
cgggtcccccttggaggacagaatg

SEQ ID NO: 803235 - DNA, 25 bp, Homo sapien
ctggcgggtggaaggactcagtgaa

SEQ ID NO: 803236 - DNA, 25 bp, Homo sapien
ggcgggtggaaggactcagtgaagg

SEQ ID NO: 803237 - DNA, 25 bp, Homo sapien
cgggtggaaggactcagtgaaggat

SEQ ID NO: 803238 - DNA, 25 bp, Homo sapien
gggtggaaggactcagtgaaggatc

SEQ ID NO: 803239 - DNA, 25 bp, Homo sapien
gggactcgtctcctggcagtcccgt

SEQ ID NO: 803240 - DNA, 25 bp, Homo sapien
tgacaaccggggactcgtctcctgg

SEQ ID NO: 803241 - DNA, 25 bp, Homo sapien
tcccgtcagcttccggtagaagagc

SEQ ID NO: 803242 - DNA, 25 bp, Homo sapien
gcagtcccgtcagcttccggtagaa

SEQ ID NO: 803243 - DNA, 25 bp, Homo sapien
tgggagggagctggcgcccacccgg

SEQ ID NO: 803244 - DNA, 25 bp, Homo sapien
ttagctttatttggcggaatgcacc

SEQ ID NO: 803245 - DNA, 25 bp, Homo sapien
gcgccgggcctcacgttagctttat

SEQ ID NO: 803246 - DNA, 25 bp, Homo sapien
ccccaagtggaatctaccaatgaac

SEQ ID NO: 803247 - DNA, 25 bp, Homo sapien
aaatagaggccgctgtgtctgatgt

SEQ ID NO: 803248 - DNA, 25 bp, Homo sapien
tagaggccgctgtgtctgatgtgaa

SEQ ID NO: 803249 - DNA, 25 bp, Homo sapien
ccgctgtgtctgatgtgaatgaaat

SEQ ID NO: 803250 - DNA, 25 bp, Homo sapien
aggccgctgtgtctgatgtgaatga

SEQ ID NO: 803251 - DNA, 25 bp, Homo sapien
gctgaagggagaaacgttttctgaa

SEQ ID NO: 803252 - DNA, 25 bp, Homo sapien
ctggagagcagttctaggaggctga

SEQ ID NO: 803253 - DNA, 25 bp, Homo sapien
gagagcagttctaggaggctgaagg

SEQ ID NO: 803254 - DNA, 25 bp, Homo sapien
gcagttctaggaggctgaagggaga

SEQ ID NO: 803255 - DNA, 25 bp, Homo sapien
tataccagagccacattgcgggaga

SEQ ID NO: 803256 - DNA, 25 bp, Homo sapien
cacattgcgggagatggtcccctcg

SEQ ID NO: 803257 - DNA, 25 bp, Homo sapien
gggagccacagtaatcgcccagaag

SEQ ID NO: 803258 - DNA, 25 bp, Homo sapien
cagcacttcatccaggagttcgtat

SEQ ID NO: 803259 - DNA, 25 bp, Homo sapien
tcagcatctccgtggatgtggtctg

SEQ ID NO: 803260 - DNA, 25 bp, Homo sapien
ccacagcttccgtctggatgaaatt

SEQ ID NO: 803261 - DNA, 25 bp, Homo sapien
gcatctccgtggatgtggtctgtac

SEQ ID NO: 803262 - DNA, 25 bp, Homo sapien
gtctggatgaaattcctcagcatct

SEQ ID NO: 803263 - DNA, 25 bp, Homo sapien
cgactggacaggacggggcggctgg

SEQ ID NO: 803264 - DNA, 25 bp, Homo sapien
gagcgactggacaggacggggcggc

SEQ ID NO: 803265 - DNA, 25 bp, Homo sapien
ctggtcagagcgactggacaggacg

SEQ ID NO: 803266 - DNA, 25 bp, Homo sapien
ggtcagagcgactggacaggacggg

SEQ ID NO: 803267 - DNA, 25 bp, Homo sapien
ttagatgctatcagtacagacaatc

SEQ ID NO: 803268 - DNA, 25 bp, Homo sapien
agacaatctctcgaccacatccaaa

SEQ ID NO: 803269 - DNA, 25 bp, Homo sapien
tgctatcagtacagacaatctctcg

SEQ ID NO: 803270 - DNA, 25 bp, Homo sapien
cagtacagacaatctctcgaccaca

SEQ ID NO: 803271 - DNA, 25 bp, Homo sapien
tccaggtttgggagctcaaacttac

SEQ ID NO: 803272 - DNA, 25 bp, Homo sapien
ccgggctagcgtgcagtgactcgat

SEQ ID NO: 803273 - DNA, 25 bp, Homo sapien
atccgggctagcgtgcagtgactcg

SEQ ID NO: 803274 - DNA, 25 bp, Homo sapien
tcatccgggctagcgtgcagtgact

SEQ ID NO: 803275 - DNA, 25 bp, Homo sapien
tccgggctagcgtgcagtgactcga

SEQ ID NO: 803276 - DNA, 25 bp, Homo sapien
ggaagctcttgagccgaatctctcc

SEQ ID NO: 803277 - DNA, 25 bp, Homo sapien
tcttgagccgaatctctccctgcac

SEQ ID NO: 803278 - DNA, 25 bp, Homo sapien
agctcttgagccgaatctctccctg

SEQ ID NO: 803279 - DNA, 25 bp, Homo sapien
ttgagccgaatctctccctgcacat

SEQ ID NO: 803280 - DNA, 25 bp, Homo sapien
tcttccgtcaagccaatgcgcatct

SEQ ID NO: 803281 - DNA, 25 bp, Homo sapien
ccacacaaaactcttccgtcaagcc

SEQ ID NO: 803282 - DNA, 25 bp, Homo sapien
cccacacaaaactcttccgtcaagc

SEQ ID NO: 803283 - DNA, 25 bp, Homo sapien
tcacagagctgtgaaacgagacttc

SEQ ID NO: 803284 - DNA, 25 bp, Homo sapien
caaattcgtccagattcacagagct

SEQ ID NO: 803285 - DNA, 25 bp, Homo sapien
atcgacccggattcctggcccataa

SEQ ID NO: 803286 - DNA, 25 bp, Homo sapien
tgcaagcggaggattcgatgagact

SEQ ID NO: 803287 - DNA, 25 bp, Homo sapien
ggagagttggtaccgcatcacagtc

SEQ ID NO: 803288 - DNA, 25 bp, Homo sapien
ctgcacagaggggaagagccggaag

SEQ ID NO: 803289 - DNA, 25 bp, Homo sapien
atcggagagttggtaccgcatcaca

SEQ ID NO: 803290 - DNA, 25 bp, Homo sapien
gaagagccggaaggggagcggtgag

SEQ ID NO: 803291 - DNA, 25 bp, Homo sapien
ctttgagagcaggtcacatcgcaac

SEQ ID NO: 803292 - DNA, 25 bp, Homo sapien
tcgcaactttagataaacctggagc

SEQ ID NO: 803293 - DNA, 25 bp, Homo sapien
gagcaggtcacatcgcaactttaga

SEQ ID NO: 803294 - DNA, 25 bp, Homo sapien
caggtcacatcgcaactttagataa

SEQ ID NO: 803295 - DNA, 25 bp, Homo sapien
cctgtcttccgtcccatagagctga

SEQ ID NO: 803296 - DNA, 25 bp, Homo sapien
tggccctgtcttccgtcccatagag

SEQ ID NO: 803297 - DNA, 25 bp, Homo sapien
ctgtcttccgtcccatagagctgaa

SEQ ID NO: 803298 - DNA, 25 bp, Homo sapien
gccctgtcttccgtcccatagagct

SEQ ID NO: 803299 - DNA, 25 bp, Homo sapien
actggcttctgaggctggcagctgc

SEQ ID NO: 803300 - DNA, 25 bp, Homo sapien
taactggcttctgaggctggcagct

SEQ ID NO: 803301 - DNA, 25 bp, Homo sapien
tggcttctgaggctggcagctgcat

SEQ ID NO: 803302 - DNA, 25 bp, Homo sapien
cttaactggcttctgaggctggcag

SEQ ID NO: 803303 - DNA, 25 bp, Homo sapien
aaggcacagtcccttgtcctgttcc

SEQ ID NO: 803304 - DNA, 25 bp, Homo sapien
ctacagaggagacgggaacaaagtc

SEQ ID NO: 803305 - DNA, 25 bp, Homo sapien
agaggagacgggaacaaagtcagcc

SEQ ID NO: 803306 - DNA, 25 bp, Homo sapien
gaaggcacagtcccttgtcctgttc

SEQ ID NO: 803307 - DNA, 25 bp, Homo sapien
ggtgcagcctgacattgagggcttg

SEQ ID NO: 803308 - DNA, 25 bp, Homo sapien
gtgcagcctgacattgagggcttgg

SEQ ID NO: 803309 - DNA, 25 bp, Homo sapien
gagcctccttgcacccgaggcaggt

SEQ ID NO: 803310 - DNA, 25 bp, Homo sapien
aggtcccagcgaagggctccctctg

SEQ ID NO: 803311 - DNA, 25 bp, Homo sapien
cacccgaggcaggtcccagcgaagg

SEQ ID NO: 803312 - DNA, 25 bp, Homo sapien
ttgagagcctccttgcacccgaggc

SEQ ID NO: 803313 - DNA, 25 bp, Homo sapien
gaaggagggcaagaagctgaccacg

SEQ ID NO: 803314 - DNA, 25 bp, Homo sapien
aaggagggcaagaagctgaccacgc

SEQ ID NO: 803315 - DNA, 25 bp, Homo sapien
tgaccacgctgggggaaccaggcag

SEQ ID NO: 803316 - DNA, 25 bp, Homo sapien
gaccacgctgggggaaccaggcagc

SEQ ID NO: 803317 - DNA, 25 bp, Homo sapien
ggggaagctcgaaggagagactggc

SEQ ID NO: 803318 - DNA, 25 bp, Homo sapien
tgccggggaagctcgaaggagagac

SEQ ID NO: 803319 - DNA, 25 bp, Homo sapien
gtgtgccggggaagctcgaaggaga

SEQ ID NO: 803320 - DNA, 25 bp, Homo sapien
ccggggaagctcgaaggagagactg

SEQ ID NO: 803321 - DNA, 25 bp, Homo sapien
ggttggcattgccgcatggcctgaa

SEQ ID NO: 803322 - DNA, 25 bp, Homo sapien
ggggttggcattgccgcatggcctg

SEQ ID NO: 803323 - DNA, 25 bp, Homo sapien
gggttggcattgccgcatggcctga

SEQ ID NO: 803324 - DNA, 25 bp, Homo sapien
gttggcattgccgcatggcctgaag

SEQ ID NO: 803325 - DNA, 25 bp, Homo sapien
cgtcgctgtggcttaggtgtcgcac

SEQ ID NO: 803326 - DNA, 25 bp, Homo sapien
tcagatccgaatgacataggcgtcg

SEQ ID NO: 803327 - DNA, 25 bp, Homo sapien
cgctgtggcttaggtgtcgcaccca

SEQ ID NO: 803328 - DNA, 25 bp, Homo sapien
tgacataggcgtcgctgtggcttag

SEQ ID NO: 803329 - DNA, 25 bp, Homo sapien
tggccgtcgtgtcctcgtttgggga

SEQ ID NO: 803330 - DNA, 25 bp, Homo sapien
cttggccgtcgtgtcctcgtttggg

SEQ ID NO: 803331 - DNA, 25 bp, Homo sapien
aacaacttgttcaggcagggagcga

SEQ ID NO: 803332 - DNA, 25 bp, Homo sapien
tctacagggtgaactacaggaacaa

SEQ ID NO: 803333 - DNA, 25 bp, Homo sapien
cagattcagagtccgaaggccagga

SEQ ID NO: 803334 - DNA, 25 bp, Homo sapien
tgaacaaggtctccagccatagctg

SEQ ID NO: 803335 - DNA, 25 bp, Homo sapien
caatcaggacgcctatcgggcagaa

SEQ ID NO: 803336 - DNA, 25 bp, Homo sapien
agtcagtagtctcagggcaaccagg

SEQ ID NO: 803337 - DNA, 25 bp, Homo sapien
gccacatgtgccctcagtcagtagt

SEQ ID NO: 803338 - DNA, 25 bp, Homo sapien
tcttagtagatggtgccacttcccc

SEQ ID NO: 803339 - DNA, 25 bp, Homo sapien
ggaaagactgagattagactgagta

SEQ ID NO: 803340 - DNA, 25 bp, Homo sapien
ccttacagagctgggtggacgagaa

SEQ ID NO: 803341 - DNA, 25 bp, Homo sapien
tgagctgggacacgatgttaggcct

SEQ ID NO: 803342 - DNA, 25 bp, Homo sapien
agaagacgccctggacgactcgtta

SEQ ID NO: 803343 - DNA, 25 bp, Homo sapien
gttatggctccatcgcaggcttggc

SEQ ID NO: 803344 - DNA, 25 bp, Homo sapien
ggtgtgcactaccacgccctgctaa

SEQ ID NO: 803345 - DNA, 25 bp, Homo sapien
tgattctcgtgccttagtctcccta

SEQ ID NO: 803346 - DNA, 25 bp, Homo sapien
caggtgtgcactaccacgccctgct

SEQ ID NO: 803347 - DNA, 25 bp, Homo sapien
acctctgccctctggtttcaagtga

SEQ ID NO: 803348 - DNA, 25 bp, Homo sapien
gcaagggtagactccggttgacatt

SEQ ID NO: 803349 - DNA, 25 bp, Homo sapien
gaagcattttggctgcaacgttagg

SEQ ID NO: 803350 - DNA, 25 bp, Homo sapien
tttactttatggcaagtggagagcc

SEQ ID NO: 803351 - DNA, 25 bp, Homo sapien
gagccattatgagggtttgagcaaa

SEQ ID NO: 803352 - DNA, 25 bp, Homo sapien
ggctagcggcaaccttaaatccagc

SEQ ID NO: 803353 - DNA, 25 bp, Homo sapien
cttaaattcccaggcggctagcggc

SEQ ID NO: 803354 - DNA, 25 bp, Homo sapien
ttcccaggcggctagcggcaacctt

SEQ ID NO: 803355 - DNA, 25 bp, Homo sapien
cttcaacttcgggaaggtagtgtgg

SEQ ID NO: 803356 - DNA, 25 bp, Homo sapien
gccgtctacaaacaatcaccgcttg

SEQ ID NO: 803357 - DNA, 25 bp, Homo sapien
aagcgccgtctacaaacaatcaccg

SEQ ID NO: 803358 - DNA, 25 bp, Homo sapien
gacaaagcgccgtctacaaacaatc

SEQ ID NO: 803359 - DNA, 25 bp, Homo sapien
caaagcgccgtctacaaacaatcac

SEQ ID NO: 803360 - DNA, 25 bp, Homo sapien
ccaagcctcgtgcacggccaaaaaa

SEQ ID NO: 803361 - DNA, 25 bp, Homo sapien
tgctgggcaagcgttctgtgtcatc

SEQ ID NO: 803362 - DNA, 25 bp, Homo sapien
aagcaatattcccaaccgcacaggt

SEQ ID NO: 803363 - DNA, 25 bp, Homo sapien
aacatcccagcccaagcctcgtgca

SEQ ID NO: 803364 - DNA, 25 bp, Homo sapien
ggccgatggtccctgaactacaatt

SEQ ID NO: 803365 - DNA, 25 bp, Homo sapien
aattcccacaatccattggcgggcg

SEQ ID NO: 803366 - DNA, 25 bp, Homo sapien
tgctctaaaagttggcagtcccggg

SEQ ID NO: 803367 - DNA, 25 bp, Homo sapien
gaggtggcactacacgttcgcttcc

SEQ ID NO: 803368 - DNA, 25 bp, Homo sapien
ggcagcggatgtccacaaggcctga

SEQ ID NO: 803369 - DNA, 25 bp, Homo sapien
gggcctgtaatttgggagcgtctat

SEQ ID NO: 803370 - DNA, 25 bp, Homo sapien
caaaggctgaattactcaccctcaa

SEQ ID NO: 803371 - DNA, 25 bp, Homo sapien
cgtctgcaaagtctcaccggatggg

SEQ ID NO: 803372 - DNA, 25 bp, Homo sapien
gcctgggcaacggcatgagacgctg

SEQ ID NO: 803373 - DNA, 25 bp, Homo sapien
taaaaataaataggccagcacagtg

SEQ ID NO: 803374 - DNA, 25 bp, Homo sapien
cctgggcaacggcatgagacgctgt

SEQ ID NO: 803375 - DNA, 25 bp, Homo sapien
aaataaataggccagcacagtgact

SEQ ID NO: 803376 - DNA, 25 bp, Homo sapien
tacaagtgcagactatggagccaga

SEQ ID NO: 803377 - DNA, 25 bp, Homo sapien
gtgcagactatggagccagactggc

SEQ ID NO: 803378 - DNA, 25 bp, Homo sapien
caagtgcagactatggagccagact

SEQ ID NO: 803379 - DNA, 25 bp, Homo sapien
aagtgcagactatggagccagactg

SEQ ID NO: 803380 - DNA, 25 bp, Homo sapien
aacgctgtaaggcacgtgtctcttc

SEQ ID NO: 803381 - DNA, 25 bp, Homo sapien
cagcacctctcgagatcgaccggtg

SEQ ID NO: 803382 - DNA, 25 bp, Homo sapien
gtgcgactcagttccgcctgtagct

SEQ ID NO: 803383 - DNA, 25 bp, Homo sapien
gctgtaaggcacgtgtctcttcctc

SEQ ID NO: 803384 - DNA, 25 bp, Homo sapien
gaacactatagtccaggatccgctc

SEQ ID NO: 803385 - DNA, 25 bp, Homo sapien
gcccttgcgctcagcgtgaacacta

SEQ ID NO: 803386 - DNA, 25 bp, Homo sapien
gcgctcagcgtgaacactatagtcc

SEQ ID NO: 803387 - DNA, 25 bp, Homo sapien
cttgcgctcagcgtgaacactatag

SEQ ID NO: 803388 - DNA, 25 bp, Homo sapien
ctgcactaggcctttcagtgttgcc

SEQ ID NO: 803389 - DNA, 25 bp, Homo sapien
tttcagtgttgccatggtctgactc

SEQ ID NO: 803390 - DNA, 25 bp, Homo sapien
cagtgttgccatggtctgactctga

SEQ ID NO: 803391 - DNA, 25 bp, Homo sapien
taggcctttcagtgttgccatggtc

SEQ ID NO: 803392 - DNA, 25 bp, Homo sapien
ttgaggtatgtgacctccacgctgg

SEQ ID NO: 803393 - DNA, 25 bp, Homo sapien
cttgaggtatgtgacctccacgctg

SEQ ID NO: 803394 - DNA, 25 bp, Homo sapien
ttcttgaggtatgtgacctccacgc

SEQ ID NO: 803395 - DNA, 25 bp, Homo sapien
tcttgaggtatgtgacctccacgct

SEQ ID NO: 803396 - DNA, 25 bp, Homo sapien
ggtagacatcccctatagtcaaacc

SEQ ID NO: 803397 - DNA, 25 bp, Homo sapien
ctccctggatggtgcagtgtcttat

SEQ ID NO: 803398 - DNA, 25 bp, Homo sapien
tatagtcaaaccctagaacctagct

SEQ ID NO: 803399 - DNA, 25 bp, Homo sapien
tttaatcaatggcacagtcctcact

SEQ ID NO: 803400 - DNA, 25 bp, Homo sapien
tcaagtagaagggccagaagagtat

SEQ ID NO: 803401 - DNA, 25 bp, Homo sapien
ggtcaagtagaagggccagaagagt

SEQ ID NO: 803402 - DNA, 25 bp, Homo sapien
gggatttgggatcccgcctgtcttc

SEQ ID NO: 803403 - DNA, 25 bp, Homo sapien
gagggatttgggatcccgcctgtct

SEQ ID NO: 803404 - DNA, 25 bp, Homo sapien
ggagcacatgaccttcacagagaaa

SEQ ID NO: 803405 - DNA, 25 bp, Homo sapien
gaagtaccagtctcccacaatgtct

SEQ ID NO: 803406 - DNA, 25 bp, Homo sapien
gtggaagtaccagtctcccacaatg

SEQ ID NO: 803407 - DNA, 25 bp, Homo sapien
cagctgggagcacatgaccttcaca

SEQ ID NO: 803408 - DNA, 25 bp, Homo sapien
cttctcggtcaagtttggggtggct

SEQ ID NO: 803409 - DNA, 25 bp, Homo sapien
tcaaagatcttctcggtcaagtttg

SEQ ID NO: 803410 - DNA, 25 bp, Homo sapien
gatcttctcggtcaagtttggggtg

SEQ ID NO: 803411 - DNA, 25 bp, Homo sapien
caaagatcttctcggtcaagtttgg

SEQ ID NO: 803412 - DNA, 25 bp, Homo sapien
agggagagtgcaggctttagagggc

SEQ ID NO: 803413 - DNA, 25 bp, Homo sapien
ggagagtgcaggctttagagggctc

SEQ ID NO: 803414 - DNA, 25 bp, Homo sapien
gctttagagggctctccatgatccc

SEQ ID NO: 803415 - DNA, 25 bp, Homo sapien
ctttagagggctctccatgatccct

SEQ ID NO: 803416 - DNA, 25 bp, Homo sapien
cagtgccactgctgacttttgggtg

SEQ ID NO: 803417 - DNA, 25 bp, Homo sapien
cagctacaagcttgggtggagtcac

SEQ ID NO: 803418 - DNA, 25 bp, Homo sapien
taaggagctaagtgacttccccaaa

SEQ ID NO: 803419 - DNA, 25 bp, Homo sapien
gatagagttcatctctaggagcagg

SEQ ID NO: 803420 - DNA, 25 bp, Homo sapien
tgtagcctcctggatacaggcaatg

SEQ ID NO: 803421 - DNA, 25 bp, Homo sapien
cacggtttgctggtgtgtagcctcc

SEQ ID NO: 803422 - DNA, 25 bp, Homo sapien
ttatcagcaactccaggccatgacc

SEQ ID NO: 803423 - DNA, 25 bp, Homo sapien
tatagatcgcagagaatgtccgttc

SEQ ID NO: 803424 - DNA, 25 bp, Homo sapien
catctccacctctgcagtaactggg

SEQ ID NO: 803425 - DNA, 25 bp, Homo sapien
cccatctccacctctgcagtaactg

SEQ ID NO: 803426 - DNA, 25 bp, Homo sapien
ctaatcttgttatccacccgccttg

SEQ ID NO: 803427 - DNA, 25 bp, Homo sapien
cgatctcctaatcttgttatccacc

SEQ ID NO: 803428 - DNA, 25 bp, Homo sapien
tagctcgccccagtcttgaacccct

SEQ ID NO: 803429 - DNA, 25 bp, Homo sapien
atagctcgccccagtcttgaacccc

SEQ ID NO: 803430 - DNA, 25 bp, Homo sapien
atcatagctcgccccagtcttgaac

SEQ ID NO: 803431 - DNA, 25 bp, Homo sapien
catcatagctcgccccagtcttgaa

SEQ ID NO: 803432 - DNA, 25 bp, Homo sapien
ctgcagaattttgaagcgccattag

SEQ ID NO: 803433 - DNA, 25 bp, Homo sapien
cgccattagctttgaggagggttca

SEQ ID NO: 803434 - DNA, 25 bp, Homo sapien
tgaagcgccattagctttgaggagg

SEQ ID NO: 803435 - DNA, 25 bp, Homo sapien
ggagggttcatgctcagttgcccag

SEQ ID NO: 803436 - DNA, 25 bp, Homo sapien
aaacgcgggtgagagtttgtcctct

SEQ ID NO: 803437 - DNA, 25 bp, Homo sapien
gaaagcgcagaaatcgaaaacgcgg

SEQ ID NO: 803438 - DNA, 25 bp, Homo sapien
ttgtcctctgcggttcccgtgtacc

SEQ ID NO: 803439 - DNA, 25 bp, Homo sapien
tgtacccagatatggcggccgaagc

SEQ ID NO: 803440 - DNA, 25 bp, Homo sapien
gggcctctgctaggtcttgcctcac

SEQ ID NO: 803441 - DNA, 25 bp, Homo sapien
cttgggcctctgctaggtcttgcct

SEQ ID NO: 803442 - DNA, 25 bp, Homo sapien
ttgggcctctgctaggtcttgcctc

SEQ ID NO: 803443 - DNA, 25 bp, Homo sapien
tgggcctctgctaggtcttgcctca

SEQ ID NO: 803444 - DNA, 25 bp, Homo sapien
tccatcgaatcctagccgcgctcta

SEQ ID NO: 803445 - DNA, 25 bp, Homo sapien
ccctccaaaggctatcctttatgtt

SEQ ID NO: 803446 - DNA, 25 bp, Homo sapien
ctccaaaggctatcctttatgtttc

SEQ ID NO: 803447 - DNA, 25 bp, Homo sapien
ttccctccatcgaatcctagccgcg

SEQ ID NO: 803448 - DNA, 25 bp, Homo sapien
aatggagcagtgggcgaccgtcctg

SEQ ID NO: 803449 - DNA, 25 bp, Homo sapien
ggagcagtgggcgaccgtcctgtcc

SEQ ID NO: 803450 - DNA, 25 bp, Homo sapien
tccgcgatcccccacccgcgctcgg

SEQ ID NO: 803451 - DNA, 25 bp, Homo sapien
agcagtgggcgaccgtcctgtccct

SEQ ID NO: 803452 - DNA, 25 bp, Homo sapien
caccacagagtaggggtcgccgggc

SEQ ID NO: 803453 - DNA, 25 bp, Homo sapien
gaaccaccacagagtaggggtcgcc

SEQ ID NO: 803454 - DNA, 25 bp, Homo sapien
agaaccaccacagagtaggggtcgc

SEQ ID NO: 803455 - DNA, 25 bp, Homo sapien
accaccacagagtaggggtcgccgg

SEQ ID NO: 803456 - DNA, 25 bp, Homo sapien
gtacgaccacgtcggcaacgaccag

SEQ ID NO: 803457 - DNA, 25 bp, Homo sapien
gtgaccaggtacgaccacgtcggca

SEQ ID NO: 803458 - DNA, 25 bp, Homo sapien
aaggcagaagtcgtgcgagaccagc

SEQ ID NO: 803459 - DNA, 25 bp, Homo sapien
ttcccgatgtgatccgagtgcccgt

SEQ ID NO: 803460 - DNA, 25 bp, Homo sapien
ctccgtctcgggctgcgaggcttcc

SEQ ID NO: 803461 - DNA, 25 bp, Homo sapien
cgtctcgggctgcgaggcttccctt

SEQ ID NO: 803462 - DNA, 25 bp, Homo sapien
tccaccctccgtctcgggctgcgag

SEQ ID NO: 803463 - DNA, 25 bp, Homo sapien
ctcgggctgcgaggcttcccttaac

SEQ ID NO: 803464 - DNA, 25 bp, Homo sapien
gggcgggctcctcgtctccgaccac

SEQ ID NO: 803465 - DNA, 25 bp, Homo sapien
agggcgggctcctcgtctccgacca

SEQ ID NO: 803466 - DNA, 25 bp, Homo sapien
gctcttcgctgttagggcttccctg

SEQ ID NO: 803467 - DNA, 25 bp, Homo sapien
caagagtgcagtccctctcgaggct

SEQ ID NO: 803468 - DNA, 25 bp, Homo sapien
tactgacgatgtgatggcagtgtca

SEQ ID NO: 803469 - DNA, 25 bp, Homo sapien
cagagacaggcagtgatactgacga

SEQ ID NO: 803470 - DNA, 25 bp, Homo sapien
tccaagcagcttttcgtccgggaaa

SEQ ID NO: 803471 - DNA, 25 bp, Homo sapien
caagcagcttttcgtccgggaaatt

SEQ ID NO: 803472 - DNA, 25 bp, Homo sapien
ccaagcagcttttcgtccgggaaat

SEQ ID NO: 803473 - DNA, 25 bp, Homo sapien
cggtgcttcacgctggtaatctcag

SEQ ID NO: 803474 - DNA, 25 bp, Homo sapien
gccagccacggtgcttcacgctggt

SEQ ID NO: 803475 - DNA, 25 bp, Homo sapien
tacaaggcttcaattaatatgctga

SEQ ID NO: 803476 - DNA, 25 bp, Homo sapien
gaagctctacaaggcttcaattaat

SEQ ID NO: 803477 - DNA, 25 bp, Homo sapien
gcattggtcatcaggatcagcagta

SEQ ID NO: 803478 - DNA, 25 bp, Homo sapien
gcagaacacaaattggcattggtca

SEQ ID NO: 803479 - DNA, 25 bp, Homo sapien
tcaggatcagcagtatcaatggtgt

SEQ ID NO: 803480 - DNA, 25 bp, Homo sapien
gcagtatcaatggtgtgagcccaaa

SEQ ID NO: 803481 - DNA, 25 bp, Homo sapien
cttcccagttgctgaaggactttca

SEQ ID NO: 803482 - DNA, 25 bp, Homo sapien
ccagttgctgaaggactttcaccca

SEQ ID NO: 803483 - DNA, 25 bp, Homo sapien
cagttgctgaaggactttcacccat

SEQ ID NO: 803484 - DNA, 25 bp, Homo sapien
tcccagttgctgaaggactttcacc

SEQ ID NO: 803485 - DNA, 25 bp, Homo sapien
aaaagataactttattggtgactag

SEQ ID NO: 803486 - DNA, 25 bp, Homo sapien
ctttattggtgactagggttgtgtc

SEQ ID NO: 803487 - DNA, 25 bp, Homo sapien
tggtgactagggttgtgtcaaaaga

SEQ ID NO: 803488 - DNA, 25 bp, Homo sapien
actagggttgtgtcaaaagaactca

SEQ ID NO: 803489 - DNA, 25 bp, Homo sapien
cgagaggaagacgcgggagcgtccg

SEQ ID NO: 803490 - DNA, 25 bp, Homo sapien
gagcgagaggaagacgcgggagcgt

SEQ ID NO: 803491 - DNA, 25 bp, Homo sapien
tgagcgagaggaagacgcgggagcg

SEQ ID NO: 803492 - DNA, 25 bp, Homo sapien
agaggaagacgcgggagcgtccgag

SEQ ID NO: 803493 - DNA, 25 bp, Homo sapien
tttagccccgcctctagcatgagga

SEQ ID NO: 803494 - DNA, 25 bp, Homo sapien
ctgtttcccggaggcgcacgttgat

SEQ ID NO: 803495 - DNA, 25 bp, Homo sapien
caaccagccagtgcgaagcgctgtt

SEQ ID NO: 803496 - DNA, 25 bp, Homo sapien
catgaggattggacagtggccacgt

SEQ ID NO: 803497 - DNA, 25 bp, Homo sapien
taccagataggtagcttccggcttc

SEQ ID NO: 803498 - DNA, 25 bp, Homo sapien
catcgcagtcttcggtgctggggga

SEQ ID NO: 803499 - DNA, 25 bp, Homo sapien
gataggtagcttccggcttcaggcc

SEQ ID NO: 803500 - DNA, 25 bp, Homo sapien
tccctaccagataggtagcttccgg

SEQ ID NO: 803501 - DNA, 25 bp, Homo sapien
gtcctctcgcgcatgcgtcctcact

SEQ ID NO: 803502 - DNA, 25 bp, Homo sapien
tggggagcagagacgctgaaccccc

SEQ ID NO: 803503 - DNA, 25 bp, Homo sapien
ccggcgggtcctctcgcgcatgcgt

SEQ ID NO: 803504 - DNA, 25 bp, Homo sapien
cagagacgctgaacccccggcgggt

SEQ ID NO: 803505 - DNA, 25 bp, Homo sapien
ttcctccccgagcggataggaggtg

SEQ ID NO: 803506 - DNA, 25 bp, Homo sapien
gcagactacccgcagccccagaaca

SEQ ID NO: 803507 - DNA, 25 bp, Homo sapien
attctcgtcgccatccctcccattt

SEQ ID NO: 803508 - DNA, 25 bp, Homo sapien
ttgctaccccaaggggcctttgctg

SEQ ID NO: 803509 - DNA, 25 bp, Homo sapien
aagtctctgggttgacgatggcccc

SEQ ID NO: 803510 - DNA, 25 bp, Homo sapien
ctagtgggtaaagatgcaagtcgtg

SEQ ID NO: 803511 - DNA, 25 bp, Homo sapien
ctagagggatggacggcccgatacc

SEQ ID NO: 803512 - DNA, 25 bp, Homo sapien
caagtcgtgagaagcatgctagagg

SEQ ID NO: 803513 - DNA, 25 bp, Homo sapien
gctggtctgggattcgctccagccc

SEQ ID NO: 803514 - DNA, 25 bp, Homo sapien
tagccgagctggtctgggattcgct

SEQ ID NO: 803515 - DNA, 25 bp, Homo sapien
ccgagctggtctgggattcgctcca

SEQ ID NO: 803516 - DNA, 25 bp, Homo sapien
ctcagtaccaggtagccgagctggt

SEQ ID NO: 803517 - DNA, 25 bp, Homo sapien
aagccgagaaaagaagggccaatat

SEQ ID NO: 803518 - DNA, 25 bp, Homo sapien
gcagccgttaggagactaagattcc

SEQ ID NO: 803519 - DNA, 25 bp, Homo sapien
taaataaatcgcagccgttaggaga

SEQ ID NO: 803520 - DNA, 25 bp, Homo sapien
gactgattactgaaagtaattgcaa

SEQ ID NO: 803521 - DNA, 25 bp, Homo sapien
tctttttctgtcttcacacttgctg

SEQ ID NO: 803522 - DNA, 25 bp, Homo sapien
catctttttctgtcttcacacttgc

SEQ ID NO: 803523 - DNA, 25 bp, Homo sapien
ctgttaatggctccatctttttctg

SEQ ID NO: 803524 - DNA, 25 bp, Homo sapien
tttttctgtcttcacacttgctgcc

SEQ ID NO: 803525 - DNA, 25 bp, Homo sapien
agacaggcgcttgaagggcacattc

SEQ ID NO: 803526 - DNA, 25 bp, Homo sapien
attcatgccgcggtgcagccggaaa

SEQ ID NO: 803527 - DNA, 25 bp, Homo sapien
ggaaaccgcaggctgtgctgaccag

SEQ ID NO: 803528 - DNA, 25 bp, Homo sapien
gaaaccgcaggctgtgctgaccagc

SEQ ID NO: 803529 - DNA, 25 bp, Homo sapien
cacacgcacattggctgggatcaaa

SEQ ID NO: 803530 - DNA, 25 bp, Homo sapien
agttagtgggtgcaacagactccat

SEQ ID NO: 803531 - DNA, 25 bp, Homo sapien
gaagttctatagttccaggctcaga

SEQ ID NO: 803532 - DNA, 25 bp, Homo sapien
caattctgataccagggagtcccaa

SEQ ID NO: 803533 - DNA, 25 bp, Homo sapien
tcggttctgcctcttcaccacaaac

SEQ ID NO: 803534 - DNA, 25 bp, Homo sapien
tcagacatcaatgggctcccgacct

SEQ ID NO: 803535 - DNA, 25 bp, Homo sapien
tcttcaccacaaacaccctctgtcc

SEQ ID NO: 803536 - DNA, 25 bp, Homo sapien
ccctctgtcctgacaccgtcaccag

SEQ ID NO: 803537 - DNA, 25 bp, Homo sapien
gaaggccctagttctagcagcaagc

SEQ ID NO: 803538 - DNA, 25 bp, Homo sapien
catcagactcatgtttattagggag

SEQ ID NO: 803539 - DNA, 25 bp, Homo sapien
cttgttctccttaacacagctcaga

SEQ ID NO: 803540 - DNA, 25 bp, Homo sapien
aagccaagaccgacaggtgtgcctg

SEQ ID NO: 803541 - DNA, 25 bp, Homo sapien
ggcagcgcgctcaccttcagtgtgg

SEQ ID NO: 803542 - DNA, 25 bp, Homo sapien
acgctgtagtgtttgctggtccctg

SEQ ID NO: 803543 - DNA, 25 bp, Homo sapien
tgagtgctgagtgatgcagaatgct

SEQ ID NO: 803544 - DNA, 25 bp, Homo sapien
tggacggaggcaggacccttagatt

SEQ ID NO: 803545 - DNA, 25 bp, Homo sapien
gggtccagctattctgagccaagct

SEQ ID NO: 803546 - DNA, 25 bp, Homo sapien
tgagatgccggcagttcactgtggc

SEQ ID NO: 803547 - DNA, 25 bp, Homo sapien
gcaacaagggaactgattggatgca

SEQ ID NO: 803548 - DNA, 25 bp, Homo sapien
gctggaaaacacttgaccgtgctca

SEQ ID NO: 803549 - DNA, 25 bp, Homo sapien
tcaccgtttcactggatagactgcc

SEQ ID NO: 803550 - DNA, 25 bp, Homo sapien
taaggccaaggtaagatgagcaaga

SEQ ID NO: 803551 - DNA, 25 bp, Homo sapien
gcctgtggaggaaccgattgtgtcc

SEQ ID NO: 803552 - DNA, 25 bp, Homo sapien
gatcaaggctacctgcgattgctgc

SEQ ID NO: 803553 - DNA, 25 bp, Homo sapien
tttcctgccccaaggcagatccaca

SEQ ID NO: 803554 - DNA, 25 bp, Homo sapien
cacatcaccgaagctccctagaggg

SEQ ID NO: 803555 - DNA, 25 bp, Homo sapien
tggagtgagccacaggaagtttggg

SEQ ID NO: 803556 - DNA, 25 bp, Homo sapien
tccctagaggggcaaaagatggagt

SEQ ID NO: 803557 - DNA, 25 bp, Homo sapien
cggatagagaaatacggccagggcc

SEQ ID NO: 803558 - DNA, 25 bp, Homo sapien
cgagaggccctagcgaaacattgtc

SEQ ID NO: 803559 - DNA, 25 bp, Homo sapien
caagccctgcctctttcgatttggg

SEQ ID NO: 803560 - DNA, 25 bp, Homo sapien
caacagtggactgactgcggaggac

SEQ ID NO: 803561 - DNA, 25 bp, Homo sapien
gctggtcagcggacacatggcttgt

SEQ ID NO: 803562 - DNA, 25 bp, Homo sapien
tttttccattgtccgagacccagcg

SEQ ID NO: 803563 - DNA, 25 bp, Homo sapien
tactatggtttgactttggcctgcc

SEQ ID NO: 803564 - DNA, 25 bp, Homo sapien
gggaccactacgctcgcaacttact

SEQ ID NO: 803565 - DNA, 25 bp, Homo sapien
cagggccagtagctatcgcgaggtt

SEQ ID NO: 803566 - DNA, 25 bp, Homo sapien
gtcctgccctctcacgtgggcttgg

SEQ ID NO: 803567 - DNA, 25 bp, Homo sapien
aagacacgctgtgcgcaagcgcaat

SEQ ID NO: 803568 - DNA, 25 bp, Homo sapien
tgatgcgcgccacgtttgagtcacg

SEQ ID NO: 803569 - DNA, 25 bp, Homo sapien
cgctgcccttccgggggcgaaagat

SEQ ID NO: 803570 - DNA, 25 bp, Homo sapien
aggtccctcgggtgtctctggccac

SEQ ID NO: 803571 - DNA, 25 bp, Homo sapien
tcaggtccctcgggtgtctctggcc

SEQ ID NO: 803572 - DNA, 25 bp, Homo sapien
caggtccctcgggtgtctctggcca

SEQ ID NO: 803573 - DNA, 25 bp, Homo sapien
ctcaggtccctcgggtgtctctggc

SEQ ID NO: 803574 - DNA, 25 bp, Homo sapien
ggccgagcagggttcagggaaggtc

SEQ ID NO: 803575 - DNA, 25 bp, Homo sapien
ttctggccgagcagggttcagggaa

SEQ ID NO: 803576 - DNA, 25 bp, Homo sapien
tggccgagcagggttcagggaaggt

SEQ ID NO: 803577 - DNA, 25 bp, Homo sapien
tctggccgagcagggttcagggaag

SEQ ID NO: 803578 - DNA, 25 bp, Homo sapien
gaccacagggtaggtatggcgatcc

SEQ ID NO: 803579 - DNA, 25 bp, Homo sapien
ccacagggtaggtatggcgatccag

SEQ ID NO: 803580 - DNA, 25 bp, Homo sapien
accacagggtaggtatggcgatcca

SEQ ID NO: 803581 - DNA, 25 bp, Homo sapien
ctcccacagctctttgcaacgggga

SEQ ID NO: 803582 - DNA, 25 bp, Homo sapien
cacagctctttgcaacggggaagac

SEQ ID NO: 803583 - DNA, 25 bp, Homo sapien
cccacagctctttgcaacggggaag

SEQ ID NO: 803584 - DNA, 25 bp, Homo sapien
cagctctttgcaacggggaagacat

SEQ ID NO: 803585 - DNA, 25 bp, Homo sapien
aaaaatgagcttattgttagtagga

SEQ ID NO: 803586 - DNA, 25 bp, Homo sapien
aatataaccaccctattccctccat

SEQ ID NO: 803587 - DNA, 25 bp, Homo sapien
accgcaccccatctccatgagaaaa

SEQ ID NO: 803588 - DNA, 25 bp, Homo sapien
tattccctccatataaaaggctaat

SEQ ID NO: 803589 - DNA, 25 bp, Homo sapien
catcagctaacaaagagtcgccatt

SEQ ID NO: 803590 - DNA, 25 bp, Homo sapien
tcatcagctaacaaagagtcgccat

SEQ ID NO: 803591 - DNA, 25 bp, Homo sapien
atcagctaacaaagagtcgccattc

SEQ ID NO: 803592 - DNA, 25 bp, Homo sapien
tggtggctctgactgtttccggcta

SEQ ID NO: 803593 - DNA, 25 bp, Homo sapien
ctggtggctctgactgtttccggct

SEQ ID NO: 803594 - DNA, 25 bp, Homo sapien
gtggctctgactgtttccggctatg

SEQ ID NO: 803595 - DNA, 25 bp, Homo sapien
gctggtggctctgactgtttccggc

SEQ ID NO: 803596 - DNA, 25 bp, Homo sapien
tccgcaagattggatgaaaaagtta

SEQ ID NO: 803597 - DNA, 25 bp, Homo sapien
tacatccgcaagattggatgaaaaa

SEQ ID NO: 803598 - DNA, 25 bp, Homo sapien
cgcaagattggatgaaaaagttaac

SEQ ID NO: 803599 - DNA, 25 bp, Homo sapien
ctttacatccgcaagattggatgaa

SEQ ID NO: 803600 - DNA, 25 bp, Homo sapien
tctctgagttggacatcttcttgaa

SEQ ID NO: 803601 - DNA, 25 bp, Homo sapien
gagttggacatcttcttgaacatct

SEQ ID NO: 803602 - DNA, 25 bp, Homo sapien
tgagttggacatcttcttgaacatc

SEQ ID NO: 803603 - DNA, 25 bp, Homo sapien
tctgagttggacatcttcttgaaca

SEQ ID NO: 803604 - DNA, 25 bp, Homo sapien
ttaccaggtccatgaagtcataggg

SEQ ID NO: 803605 - DNA, 25 bp, Homo sapien
tccccaatttgagaggcatattcag

SEQ ID NO: 803606 - DNA, 25 bp, Homo sapien
gatgggaaagttattaccaggtcca

SEQ ID NO: 803607 - DNA, 25 bp, Homo sapien
tgtcaaaactcaacagtccagtaaa

SEQ ID NO: 803608 - DNA, 25 bp, Homo sapien
tgacagaccaatgtcctcacaaatt

SEQ ID NO: 803609 - DNA, 25 bp, Homo sapien
tcatagaggaggctgtactggcact

SEQ ID NO: 803610 - DNA, 25 bp, Homo sapien
agaggaggctgtactggcactgaca

SEQ ID NO: 803611 - DNA, 25 bp, Homo sapien
ctggagctatgagagggtagtcccc

SEQ ID NO: 803612 - DNA, 25 bp, Homo sapien
gaaattgttgctgtgatctacccct

SEQ ID NO: 803613 - DNA, 25 bp, Homo sapien
gaaagtcctataaatccccaggaga

SEQ ID NO: 803614 - DNA, 25 bp, Homo sapien
taaaatcctaagacggcctgtcctg

SEQ ID NO: 803615 - DNA, 25 bp, Homo sapien
tttaaccatcagcatacccctagtg

SEQ ID NO: 803616 - DNA, 25 bp, Homo sapien
tgattgttatcttggtgcacactca

SEQ ID NO: 803617 - DNA, 25 bp, Homo sapien
gacgctgattgttatcttggtgcac

SEQ ID NO: 803618 - DNA, 25 bp, Homo sapien
cgctgattgttatcttggtgcacac

SEQ ID NO: 803619 - DNA, 25 bp, Homo sapien
gctgattgttatcttggtgcacact

SEQ ID NO: 803620 - DNA, 25 bp, Homo sapien
agacacccctgaagagggcattcat

SEQ ID NO: 803621 - DNA, 25 bp, Homo sapien
gacacccctgaagagggcattcatc

SEQ ID NO: 803622 - DNA, 25 bp, Homo sapien
acccctgaagagggcattcatcatc

SEQ ID NO: 803623 - DNA, 25 bp, Homo sapien
ctgtaccgatgaacaaagacacccc

SEQ ID NO: 803624 - DNA, 25 bp, Homo sapien
tgaggaaagacgtgctgtagctttg

SEQ ID NO: 803625 - DNA, 25 bp, Homo sapien
gtagctttgcatccaacacccaatt

SEQ ID NO: 803626 - DNA, 25 bp, Homo sapien
cagatagcacggatctcaggaagga

SEQ ID NO: 803627 - DNA, 25 bp, Homo sapien
tattttaaatagctgtcggtgagga

SEQ ID NO: 803628 - DNA, 25 bp, Homo sapien
cagtgctaggggaatttcaaggttc

SEQ ID NO: 803629 - DNA, 25 bp, Homo sapien
ggttcatcattggtcactaggtaaa

SEQ ID NO: 803630 - DNA, 25 bp, Homo sapien
ggttcagcgccttgatgggttcatc

SEQ ID NO: 803631 - DNA, 25 bp, Homo sapien
gggaatttcaaggttcagcgccttg

SEQ ID NO: 803632 - DNA, 25 bp, Homo sapien
ggccttcacacacttcaggcggact

SEQ ID NO: 803633 - DNA, 25 bp, Homo sapien
gggccttcacacacttcaggcggac

SEQ ID NO: 803634 - DNA, 25 bp, Homo sapien
agggccttcacacacttcaggcgga

SEQ ID NO: 803635 - DNA, 25 bp, Homo sapien
tccatgaccatggaaaccatccggt

SEQ ID NO: 803636 - DNA, 25 bp, Homo sapien
tgccacatcatactctctgtccatg

SEQ ID NO: 803637 - DNA, 25 bp, Homo sapien
ccactgccacatcatactctctgtc

SEQ ID NO: 803638 - DNA, 25 bp, Homo sapien
taagtatcagtaatctgacagcctc

SEQ ID NO: 803639 - DNA, 25 bp, Homo sapien
aggccaggcctcgatgagaggcata

SEQ ID NO: 803640 - DNA, 25 bp, Homo sapien
tagacgctctcacaatccgcgtccg

SEQ ID NO: 803641 - DNA, 25 bp, Homo sapien
gcatacacaactgggtagacgctct

SEQ ID NO: 803642 - DNA, 25 bp, Homo sapien
cagtacagaaattcgcctgcggcag

SEQ ID NO: 803643 - DNA, 25 bp, Homo sapien
ctcgctctccacaaagaaggacagc

SEQ ID NO: 803644 - DNA, 25 bp, Homo sapien
tggaagaaagtcctctgggcgcctg

SEQ ID NO: 803645 - DNA, 25 bp, Homo sapien
tgggctctggcgttgctctcttcca

SEQ ID NO: 803646 - DNA, 25 bp, Homo sapien
tcattcttatctcgcactcagggta

SEQ ID NO: 803647 - DNA, 25 bp, Homo sapien
tgtctactaagtaagcagcgtggtc

SEQ ID NO: 803648 - DNA, 25 bp, Homo sapien
aggatttctatcagtgtgctctcct

SEQ ID NO: 803649 - DNA, 25 bp, Homo sapien
atttctatcagtgtgctctcctgca

SEQ ID NO: 803650 - DNA, 25 bp, Homo sapien
ggatttctatcagtgtgctctcctg

SEQ ID NO: 803651 - DNA, 25 bp, Homo sapien
gatttctatcagtgtgctctcctgc

SEQ ID NO: 803652 - DNA, 25 bp, Homo sapien
cagtgacccggcccacaggcgggtg

SEQ ID NO: 803653 - DNA, 25 bp, Homo sapien
gtgcccctctgaagcttgccgggca

SEQ ID NO: 803654 - DNA, 25 bp, Homo sapien
agtgacccggcccacaggcgggtgc

SEQ ID NO: 803655 - DNA, 25 bp, Homo sapien
tgacccggcccacaggcgggtgccc

SEQ ID NO: 803656 - DNA, 25 bp, Homo sapien
tcggcttgggtcttgcgctccttag

SEQ ID NO: 803657 - DNA, 25 bp, Homo sapien
tcttgcgctccttagaggttaagcc

SEQ ID NO: 803658 - DNA, 25 bp, Homo sapien
tgtcatcggcttgggtcttgcgctc

SEQ ID NO: 803659 - DNA, 25 bp, Homo sapien
gtcaacttcaccctgtcatcggctt

SEQ ID NO: 803660 - DNA, 25 bp, Homo sapien
gcagtagatgtggaggtcaaagcag

SEQ ID NO: 803661 - DNA, 25 bp, Homo sapien
tgcagtagatgtggaggtcaaagca

SEQ ID NO: 803662 - DNA, 25 bp, Homo sapien
tagctggctgcgggcaaagtccgcc

SEQ ID NO: 803663 - DNA, 25 bp, Homo sapien
tcaagcaccgctggctctgcatgct

SEQ ID NO: 803664 - DNA, 25 bp, Homo sapien
caggtagagggcatgcgccccagcc

SEQ ID NO: 803665 - DNA, 25 bp, Homo sapien
tccgcccggctgaagaaagtgaatt

SEQ ID NO: 803666 - DNA, 25 bp, Homo sapien
tggaagcggtcagtcagcaaatcta

SEQ ID NO: 803667 - DNA, 25 bp, Homo sapien
ggaagcggtcagtcagcaaatctac

SEQ ID NO: 803668 - DNA, 25 bp, Homo sapien
cttcaagctcctgctggaagcggtc

SEQ ID NO: 803669 - DNA, 25 bp, Homo sapien
ctggaagcggtcagtcagcaaatct

SEQ ID NO: 803670 - DNA, 25 bp, Homo sapien
agaggcgtttcagagtggctgccag

SEQ ID NO: 803671 - DNA, 25 bp, Homo sapien
gagtggctgccagattatatacctc

SEQ ID NO: 803672 - DNA, 25 bp, Homo sapien
tggctgccagattatatacctcatc

SEQ ID NO: 803673 - DNA, 25 bp, Homo sapien
cagagaggcgtttcagagtggctgc

SEQ ID NO: 803674 - DNA, 25 bp, Homo sapien
agccttctgcaggagttggcaacat

SEQ ID NO: 803675 - DNA, 25 bp, Homo sapien
gctcccagcgagtcaggtcatgagt

SEQ ID NO: 803676 - DNA, 25 bp, Homo sapien
gagttggcaacatggctcatagagc

SEQ ID NO: 803677 - DNA, 25 bp, Homo sapien
catggctcatagagctcccagcgag

SEQ ID NO: 803678 - DNA, 25 bp, Homo sapien
aatagacaagagtcaaggctggcag

SEQ ID NO: 803679 - DNA, 25 bp, Homo sapien
gggttagtgtccagagaatggaaaa

SEQ ID NO: 803680 - DNA, 25 bp, Homo sapien
tgggttagtgtccagagaatggaaa

SEQ ID NO: 803681 - DNA, 25 bp, Homo sapien
caagagtcaaggctggcaggataac

SEQ ID NO: 803682 - DNA, 25 bp, Homo sapien
tgtccctcaaactcgacagctgctt

SEQ ID NO: 803683 - DNA, 25 bp, Homo sapien
cagagttcacagaaggccaccattc

SEQ ID NO: 803684 - DNA, 25 bp, Homo sapien
ctgctcctggatctcagtatccaca

SEQ ID NO: 803685 - DNA, 25 bp, Homo sapien
agaggcaactctggcagagttcaca

SEQ ID NO: 803686 - DNA, 25 bp, Homo sapien
ccggctggatgaagacgtggtccat

SEQ ID NO: 803687 - DNA, 25 bp, Homo sapien
ctgcccaggtctcccggctggatga

SEQ ID NO: 803688 - DNA, 25 bp, Homo sapien
ggagagtagcttcaggaaaaaagac

SEQ ID NO: 803689 - DNA, 25 bp, Homo sapien
caagtggcctaaggaaatcacggcc

SEQ ID NO: 803690 - DNA, 25 bp, Homo sapien
cggcgccgctggtgtagccgctcta

SEQ ID NO: 803691 - DNA, 25 bp, Homo sapien
gccgctggtgtagccgctctatctg

SEQ ID NO: 803692 - DNA, 25 bp, Homo sapien
ctggtgtagccgctctatctgtaaa

SEQ ID NO: 803693 - DNA, 25 bp, Homo sapien
ggtgtagccgctctatctgtaaatg

SEQ ID NO: 803694 - DNA, 25 bp, Homo sapien
tctccagcaccccataaagcaacag

SEQ ID NO: 803695 - DNA, 25 bp, Homo sapien
taaagcaacagcttgcagaacccgg

SEQ ID NO: 803696 - DNA, 25 bp, Homo sapien
cagcaccccataaagcaacagcttg

SEQ ID NO: 803697 - DNA, 25 bp, Homo sapien
cccataaagcaacagcttgcagaac

SEQ ID NO: 803698 - DNA, 25 bp, Homo sapien
tgccttgctctagttaatgtttcct

SEQ ID NO: 803699 - DNA, 25 bp, Homo sapien
aatgacttcggtcaatctgccttgc

SEQ ID NO: 803700 - DNA, 25 bp, Homo sapien
gcaggattcgggaacaatgacttcg

SEQ ID NO: 803701 - DNA, 25 bp, Homo sapien
taatgtttccttgataatgtcacca

SEQ ID NO: 803702 - DNA, 25 bp, Homo sapien
tgaccacgaggtcacggttctgcag

SEQ ID NO: 803703 - DNA, 25 bp, Homo sapien
ttgtgtagcatgaccacgaggtcac

SEQ ID NO: 803704 - DNA, 25 bp, Homo sapien
gctggggtccaaaactcaaggcaaa

SEQ ID NO: 803705 - DNA, 25 bp, Homo sapien
acgaggtcacggttctgcagctgct

SEQ ID NO: 803706 - DNA, 25 bp, Homo sapien
gaagctcagacaaggagaactggat

SEQ ID NO: 803707 - DNA, 25 bp, Homo sapien
gggaaaactctgaaaggagctccag

SEQ ID NO: 803708 - DNA, 25 bp, Homo sapien
tcagacaaggagaactggatgcctt

SEQ ID NO: 803709 - DNA, 25 bp, Homo sapien
tgccagatttggaggctgattggag

SEQ ID NO: 803710 - DNA, 25 bp, Homo sapien
gcctgggagacatgctgcaggcact

SEQ ID NO: 803711 - DNA, 25 bp, Homo sapien
tgcctgggagacatgctgcaggcac

SEQ ID NO: 803712 - DNA, 25 bp, Homo sapien
cctgggagacatgctgcaggcactt

SEQ ID NO: 803713 - DNA, 25 bp, Homo sapien
gtgcctgggagacatgctgcaggca

SEQ ID NO: 803714 - DNA, 25 bp, Homo sapien
ttcaacgcgcctcctcttggagctg

SEQ ID NO: 803715 - DNA, 25 bp, Homo sapien
ggacctgagggctggtctctgctgt

SEQ ID NO: 803716 - DNA, 25 bp, Homo sapien
cttcaacgcgcctcctcttggagct

SEQ ID NO: 803717 - DNA, 25 bp, Homo sapien
ggtctctgctgtgttctccacaggg

SEQ ID NO: 803718 - DNA, 25 bp, Homo sapien
aaaattcgctgggaggccaataggc

SEQ ID NO: 803719 - DNA, 25 bp, Homo sapien
tgtcgttttcgacacagcagccaga

SEQ ID NO: 803720 - DNA, 25 bp, Homo sapien
gagataccttgaaaatgcacccaga

SEQ ID NO: 803721 - DNA, 25 bp, Homo sapien
aatggttttcctactgcactcagag

SEQ ID NO: 803722 - DNA, 25 bp, Homo sapien
cgaggagacgtcctctctgttaggc

SEQ ID NO: 803723 - DNA, 25 bp, Homo sapien
gggcgtgggcgggatgctgttcagc

SEQ ID NO: 803724 - DNA, 25 bp, Homo sapien
gcgtgggcgggatgctgttcagctg

SEQ ID NO: 803725 - DNA, 25 bp, Homo sapien
tgagggtgggcgtgggcgggatgct

SEQ ID NO: 803726 - DNA, 25 bp, Homo sapien
gaggtgagggtgggcgtgggcggga

SEQ ID NO: 803727 - DNA, 25 bp, Homo sapien
ctccatctctttcaacccccacagg

SEQ ID NO: 803728 - DNA, 25 bp, Homo sapien
ggcaaaatccaactctgagccatct

SEQ ID NO: 803729 - DNA, 25 bp, Homo sapien
tgggcaaaatccaactctgagccat

SEQ ID NO: 803730 - DNA, 25 bp, Homo sapien
tcctccatctctttcaacccccaca

SEQ ID NO: 803731 - DNA, 25 bp, Homo sapien
accttgacctctcggtgcctgcgac

SEQ ID NO: 803732 - DNA, 25 bp, Homo sapien
caggccaggacctgaagggttgtgt

SEQ ID NO: 803733 - DNA, 25 bp, Homo sapien
gccaggacctgaagggttgtgtgga

SEQ ID NO: 803734 - DNA, 25 bp, Homo sapien
acctctcggtgcctgcgacgggctg

SEQ ID NO: 803735 - DNA, 25 bp, Homo sapien
agtccaaaaagcacccacagagagg

SEQ ID NO: 803736 - DNA, 25 bp, Homo sapien
aatcccctcacagtgggcgacagat

SEQ ID NO: 803737 - DNA, 25 bp, Homo sapien
caatgggtgagacaggaatcccctc

SEQ ID NO: 803738 - DNA, 25 bp, Homo sapien
tagtttcccgattgtgctgacagga

SEQ ID NO: 803739 - DNA, 25 bp, Homo sapien
atgtctgtatcctgccgttcttcat

SEQ ID NO: 803740 - DNA, 25 bp, Homo sapien
gtctgtatcctgccgttcttcattt

SEQ ID NO: 803741 - DNA, 25 bp, Homo sapien
tgtctgtatcctgccgttcttcatt

SEQ ID NO: 803742 - DNA, 25 bp, Homo sapien
catgtctgtatcctgccgttcttca

SEQ ID NO: 803743 - DNA, 25 bp, Homo sapien
gagcacaagactcccctgttctgtt

SEQ ID NO: 803744 - DNA, 25 bp, Homo sapien
cacaagactcccctgttctgttcta

SEQ ID NO: 803745 - DNA, 25 bp, Homo sapien
tgagcacaagactcccctgttctgt

SEQ ID NO: 803746 - DNA, 25 bp, Homo sapien
tctgagcacaagactcccctgttct

SEQ ID NO: 803747 - DNA, 25 bp, Homo sapien
tggtggaagagtagctacttgcttg

SEQ ID NO: 803748 - DNA, 25 bp, Homo sapien
ctggtggaagagtagctacttgctt

SEQ ID NO: 803749 - DNA, 25 bp, Homo sapien
tgtagaatctaagaggtccagcccg

SEQ ID NO: 803750 - DNA, 25 bp, Homo sapien
tagaatctaagaggtccagcccgcg

SEQ ID NO: 803751 - DNA, 25 bp, Homo sapien
tctgtagaatctaagaggtccagcc

SEQ ID NO: 803752 - DNA, 25 bp, Homo sapien
agctctgtagaatctaagaggtcca

SEQ ID NO: 803753 - DNA, 25 bp, Homo sapien
aatggtcacattcttgaggtaggga

SEQ ID NO: 803754 - DNA, 25 bp, Homo sapien
atggtcacattcttgaggtagggag

SEQ ID NO: 803755 - DNA, 25 bp, Homo sapien
ccaggagactatgggctatttccat

SEQ ID NO: 803756 - DNA, 25 bp, Homo sapien
aaaaatccaggagactatgggctat

SEQ ID NO: 803757 - DNA, 25 bp, Homo sapien
tccaggagactatgggctatttcca

SEQ ID NO: 803758 - DNA, 25 bp, Homo sapien
aatccaggagactatgggctatttc

SEQ ID NO: 803759 - DNA, 25 bp, Homo sapien
gcattttgcagtgttaaccaatgaa

SEQ ID NO: 803760 - DNA, 25 bp, Homo sapien
tgctctaagcccttttttaagagca

SEQ ID NO: 803761 - DNA, 25 bp, Homo sapien
aaacacttatttcgtcaactcatgt

SEQ ID NO: 803762 - DNA, 25 bp, Homo sapien
ttaaaacacttatttcgtcaactca

SEQ ID NO: 803763 - DNA, 25 bp, Homo sapien
ctagtaacggaagactctcagtaat

SEQ ID NO: 803764 - DNA, 25 bp, Homo sapien
gaatctgcgctgatgagtgacacgt

SEQ ID NO: 803765 - DNA, 25 bp, Homo sapien
cgctaagtttggatgtgacctcaga

SEQ ID NO: 803766 - DNA, 25 bp, Homo sapien
cagtatttcatcctatcccgaggga

SEQ ID NO: 803767 - DNA, 25 bp, Homo sapien
tcgtcataggtgatggcaactggct

SEQ ID NO: 803768 - DNA, 25 bp, Homo sapien
gcaggaccagggtccggtgccccat

SEQ ID NO: 803769 - DNA, 25 bp, Homo sapien
atggccccctccagtccaggttctg

SEQ ID NO: 803770 - DNA, 25 bp, Homo sapien
ctgcagggccggcacctgtgcctct

SEQ ID NO: 803771 - DNA, 25 bp, Homo sapien
agtgacacacaaggtcagcagcacc

SEQ ID NO: 803772 - DNA, 25 bp, Homo sapien
aacggatggtgaaggacgagagctc

SEQ ID NO: 803773 - DNA, 25 bp, Homo sapien
gatggtgaaggacgagagctcggtg

SEQ ID NO: 803774 - DNA, 25 bp, Homo sapien
ggtgaaggacgagagctcggtggcc

SEQ ID NO: 803775 - DNA, 25 bp, Homo sapien
cggatggtgaaggacgagagctcgg

SEQ ID NO: 803776 - DNA, 25 bp, Homo sapien
ggcccattgccggatgccacgttct

SEQ ID NO: 803777 - DNA, 25 bp, Homo sapien
ccattgccggatgccacgttctggg

SEQ ID NO: 803778 - DNA, 25 bp, Homo sapien
cggatgccacgttctgggtgcaaca

SEQ ID NO: 803779 - DNA, 25 bp, Homo sapien
gccggatgccacgttctgggtgcaa

SEQ ID NO: 803780 - DNA, 25 bp, Homo sapien
tgggtctgagctgggcgggaggctc

SEQ ID NO: 803781 - DNA, 25 bp, Homo sapien
gagctgggcgggaggctcccacagg

SEQ ID NO: 803782 - DNA, 25 bp, Homo sapien
cacggagacaagaatcagatgggtg

SEQ ID NO: 803783 - DNA, 25 bp, Homo sapien
gcacggagacaagaatcagatgggt

SEQ ID NO: 803784 - DNA, 25 bp, Homo sapien
ggcacggagacaagaatcagatggg

SEQ ID NO: 803785 - DNA, 25 bp, Homo sapien
acggagacaagaatcagatgggtgg

SEQ ID NO: 803786 - DNA, 25 bp, Homo sapien
cagaatgggggcaggagtcggcggg

SEQ ID NO: 803787 - DNA, 25 bp, Homo sapien
gggggcaggagtcggcggggcagag

SEQ ID NO: 803788 - DNA, 25 bp, Homo sapien
ccgcagaatgggggcaggagtcggc

SEQ ID NO: 803789 - DNA, 25 bp, Homo sapien
ctgcccgcagaatgggggcaggagt

SEQ ID NO: 803790 - DNA, 25 bp, Homo sapien
cagcagatgaaggaggtagacacag

SEQ ID NO: 803791 - DNA, 25 bp, Homo sapien
tagacacagccaaagaggaggactc

SEQ ID NO: 803792 - DNA, 25 bp, Homo sapien
acacagccaaagaggaggactcctg

SEQ ID NO: 803793 - DNA, 25 bp, Homo sapien
cggtgcttatgtcggcgcagcagat

SEQ ID NO: 803794 - DNA, 25 bp, Homo sapien
ggtgcgggacggctggagcctaggg

SEQ ID NO: 803795 - DNA, 25 bp, Homo sapien
gggctggtgcgggacggctggagcc

SEQ ID NO: 803796 - DNA, 25 bp, Homo sapien
tcgtgctctcggtgcctgggggctg

SEQ ID NO: 803797 - DNA, 25 bp, Homo sapien
ccatgctcgtgctctcggtgcctgg

SEQ ID NO: 803798 - DNA, 25 bp, Homo sapien
agcgtagagtccattctcaacagag

SEQ ID NO: 803799 - DNA, 25 bp, Homo sapien
cgtagagtccattctcaacagagac

SEQ ID NO: 803800 - DNA, 25 bp, Homo sapien
gagtccattctcaacagagacaaag

SEQ ID NO: 803801 - DNA, 25 bp, Homo sapien
ggggtgagctgtgtccaaagtagct

SEQ ID NO: 803802 - DNA, 25 bp, Homo sapien
ctgaaatggggtaactgtcactcac

SEQ ID NO: 803803 - DNA, 25 bp, Homo sapien
aaatgactgaaatggggtaactgtc

SEQ ID NO: 803804 - DNA, 25 bp, Homo sapien
gacacctatgggacacttattggag

SEQ ID NO: 803805 - DNA, 25 bp, Homo sapien
aaactgtgttgctgacttagttgca

SEQ ID NO: 803806 - DNA, 25 bp, Homo sapien
gctgagagtagaggcgtgtactgct

SEQ ID NO: 803807 - DNA, 25 bp, Homo sapien
tgagagtagaggcgtgtactgctgt

SEQ ID NO: 803808 - DNA, 25 bp, Homo sapien
ctctcctgtactttatttgggttag

SEQ ID NO: 803809 - DNA, 25 bp, Homo sapien
tctcctgtactttatttgggttaga

SEQ ID NO: 803810 - DNA, 25 bp, Homo sapien
ttcagtctgactgagacaccagagg

SEQ ID NO: 803811 - DNA, 25 bp, Homo sapien
tccatccaggtgcaagttcttcagt

SEQ ID NO: 803812 - DNA, 25 bp, Homo sapien
ggtaaactgagacatcatccccggg

SEQ ID NO: 803813 - DNA, 25 bp, Homo sapien
cactatcattgtcgatgaggaagga

SEQ ID NO: 803814 - DNA, 25 bp, Homo sapien
cctggacacaatcataggggctgac

SEQ ID NO: 803815 - DNA, 25 bp, Homo sapien
gaaaacttgggatctcgggccctca

SEQ ID NO: 803816 - DNA, 25 bp, Homo sapien
ctcagaggtccccaaagattgcggg

SEQ ID NO: 803817 - DNA, 25 bp, Homo sapien
gggacatgaagggagagataaacaa

SEQ ID NO: 803818 - DNA, 25 bp, Homo sapien
ggcagagatccatgtcccaaaaatg

SEQ ID NO: 803819 - DNA, 25 bp, Homo sapien
tgtcccaaaaatgtcacggatggcc

SEQ ID NO: 803820 - DNA, 25 bp, Homo sapien
ctccccggctgagcggtgctatcag

SEQ ID NO: 803821 - DNA, 25 bp, Homo sapien
aatgtcacggatggccgcattcctc

SEQ ID NO: 803822 - DNA, 25 bp, Homo sapien
tggtctcgttttgggggtagatgag

SEQ ID NO: 803823 - DNA, 25 bp, Homo sapien
atggtctcgttttgggggtagatga

SEQ ID NO: 803824 - DNA, 25 bp, Homo sapien
gcaatactctctagggtgcagtggg

SEQ ID NO: 803825 - DNA, 25 bp, Homo sapien
tacacctgggttacttgtgggcttc

SEQ ID NO: 803826 - DNA, 25 bp, Homo sapien
tgcctgtgcacgcttggacttgcca

SEQ ID NO: 803827 - DNA, 25 bp, Homo sapien
tttgtgcttgagagccggaacacca

SEQ ID NO: 803828 - DNA, 25 bp, Homo sapien
ctgatgaaataggaactctgacttc

SEQ ID NO: 803829 - DNA, 25 bp, Homo sapien
ttgctctgctatcaggcagatggca

SEQ ID NO: 803830 - DNA, 25 bp, Homo sapien
ggtgcttgatgctgccattccgggc

SEQ ID NO: 803831 - DNA, 25 bp, Homo sapien
gggcccaggtgagacattcggtcat

SEQ ID NO: 803832 - DNA, 25 bp, Homo sapien
gctgctgtcaagggactgcaaatct

SEQ ID NO: 803833 - DNA, 25 bp, Homo sapien
aggctgctgtcaagggactgcaaat

SEQ ID NO: 803834 - DNA, 25 bp, Homo sapien
aacaagaacatcacaccagcaggag

SEQ ID NO: 803835 - DNA, 25 bp, Homo sapien
tgcttgaggtgtgacatatctgttt

SEQ ID NO: 803836 - DNA, 25 bp, Homo sapien
tgccacagtggggacctggaacaca

SEQ ID NO: 803837 - DNA, 25 bp, Homo sapien
tcagggaagagcaactgccacagtg

SEQ ID NO: 803838 - DNA, 25 bp, Homo sapien
cagctgcaccacagggttggcagta

SEQ ID NO: 803839 - DNA, 25 bp, Homo sapien
acctggaacacaaagggaaactgag

SEQ ID NO: 803840 - DNA, 25 bp, Homo sapien
cacctgaactgccaggcgccgacag

SEQ ID NO: 803841 - DNA, 25 bp, Homo sapien
gttgttcacctgaactgccaggcgc

SEQ ID NO: 803842 - DNA, 25 bp, Homo sapien
tgttcacctgaactgccaggcgccg

SEQ ID NO: 803843 - DNA, 25 bp, Homo sapien
ttcacctgaactgccaggcgccgac

SEQ ID NO: 803844 - DNA, 25 bp, Homo sapien
tgttatcaattctcgaggctgggag

SEQ ID NO: 803845 - DNA, 25 bp, Homo sapien
agagtgtgttatcaattctcgaggc

SEQ ID NO: 803846 - DNA, 25 bp, Homo sapien
tgtgttatcaattctcgaggctggg

SEQ ID NO: 803847 - DNA, 25 bp, Homo sapien
tatcaattctcgaggctgggagaag

SEQ ID NO: 803848 - DNA, 25 bp, Homo sapien
aaaatctgtccaatctcaccgaagc

SEQ ID NO: 803849 - DNA, 25 bp, Homo sapien
tctgtccaatctcaccgaagctagt

SEQ ID NO: 803850 - DNA, 25 bp, Homo sapien
tgtccaatctcaccgaagctagtct

SEQ ID NO: 803851 - DNA, 25 bp, Homo sapien
caatctcaccgaagctagtctctgt

SEQ ID NO: 803852 - DNA, 25 bp, Homo sapien
cctggggctgcggttgatggctcgt

SEQ ID NO: 803853 - DNA, 25 bp, Homo sapien
ggggctgcggttgatggctcgtcat

SEQ ID NO: 803854 - DNA, 25 bp, Homo sapien
tcttcctggggctgcggttgatggc

SEQ ID NO: 803855 - DNA, 25 bp, Homo sapien
tcctggggctgcggttgatggctcg

SEQ ID NO: 803856 - DNA, 25 bp, Homo sapien
catcagattcatccaaacactccct

SEQ ID NO: 803857 - DNA, 25 bp, Homo sapien
catcatcagattcatccaaacactc

SEQ ID NO: 803858 - DNA, 25 bp, Homo sapien
cagattcatccaaacactccctctt

SEQ ID NO: 803859 - DNA, 25 bp, Homo sapien
ccttctctggctcatcatcagattc

SEQ ID NO: 803860 - DNA, 25 bp, Homo sapien
catcagattcatccaaacactccct

SEQ ID NO: 803861 - DNA, 25 bp, Homo sapien
catcatcagattcatccaaacactc

SEQ ID NO: 803862 - DNA, 25 bp, Homo sapien
cagattcatccaaacactccctctt

SEQ ID NO: 803863 - DNA, 25 bp, Homo sapien
ccttctctggctcatcatcagattc

SEQ ID NO: 803864 - DNA, 25 bp, Homo sapien
tactcagggagcacgagcgacactc

SEQ ID NO: 803865 - DNA, 25 bp, Homo sapien
gcgacactcgccgtcgcttcgcctt

SEQ ID NO: 803866 - DNA, 25 bp, Homo sapien
gcttcgccttcatcttgaggccaca

SEQ ID NO: 803867 - DNA, 25 bp, Homo sapien
cctgttgaaggcctcgtagtactca

SEQ ID NO: 803868 - DNA, 25 bp, Homo sapien
catcagattcatccaaacactccct

SEQ ID NO: 803869 - DNA, 25 bp, Homo sapien
cagattcatccaaacactccctctt

SEQ ID NO: 803870 - DNA, 25 bp, Homo sapien
catcatcagattcatccaaacactc

SEQ ID NO: 803871 - DNA, 25 bp, Homo sapien
ccttctctggctcatcatcagattc

SEQ ID NO: 803872 - DNA, 25 bp, Homo sapien
cctgttgaaggcctcgtagtactca

SEQ ID NO: 803873 - DNA, 25 bp, Homo sapien
tactcagggagcacgagcgacactc

SEQ ID NO: 803874 - DNA, 25 bp, Homo sapien
gcttcgccttcatcttgaggccaca

SEQ ID NO: 803875 - DNA, 25 bp, Homo sapien
gcgacactcgccgtcgcttcgcctt

SEQ ID NO: 803876 - DNA, 25 bp, Homo sapien
aagaaaccaggccaccgtgtaatgc

SEQ ID NO: 803877 - DNA, 25 bp, Homo sapien
tgagtaaagaaaccaggccaccgtg

SEQ ID NO: 803878 - DNA, 25 bp, Homo sapien
aggccaccgtgtaatgcttctgcaa

SEQ ID NO: 803879 - DNA, 25 bp, Homo sapien
accaggccaccgtgtaatgcttctg

SEQ ID NO: 803880 - DNA, 25 bp, Homo sapien
catcatcagattcatccaaacactc

SEQ ID NO: 803881 - DNA, 25 bp, Homo sapien
catcagattcatccaaacactccct

SEQ ID NO: 803882 - DNA, 25 bp, Homo sapien
ccttctctggctcatcatcagattc

SEQ ID NO: 803883 - DNA, 25 bp, Homo sapien
cagattcatccaaacactccctctt

SEQ ID NO: 803884 - DNA, 25 bp, Homo sapien
tactcagggagcacgagcgacactc

SEQ ID NO: 803885 - DNA, 25 bp, Homo sapien
cctgttgaaggcctcgtagtactca

SEQ ID NO: 803886 - DNA, 25 bp, Homo sapien
gcttcgccttcatcttgaggccaca

SEQ ID NO: 803887 - DNA, 25 bp, Homo sapien
gcgacactcgccgtcgcttcgcctt

SEQ ID NO: 803888 - DNA, 25 bp, Homo sapien
catcagattcatccaaacactccct

SEQ ID NO: 803889 - DNA, 25 bp, Homo sapien
ccttctctggctcatcatcagattc

SEQ ID NO: 803890 - DNA, 25 bp, Homo sapien
catcatcagattcatccaaacactc

SEQ ID NO: 803891 - DNA, 25 bp, Homo sapien
cagattcatccaaacactccctctt

SEQ ID NO: 803892 - DNA, 25 bp, Homo sapien
tgtctgacaccctcagatctttgtc

SEQ ID NO: 803893 - DNA, 25 bp, Homo sapien
caggccaggaatcttttaatgacag

SEQ ID NO: 803894 - DNA, 25 bp, Homo sapien
gccaggaatcttttaatgacaggat

SEQ ID NO: 803895 - DNA, 25 bp, Homo sapien
cttgtctgacaccctcagatctttg

SEQ ID NO: 803896 - DNA, 25 bp, Homo sapien
gaaggtcggatgcaaatccgagaag

SEQ ID NO: 803897 - DNA, 25 bp, Homo sapien
aaggtcggatgcaaatccgagaagc

SEQ ID NO: 803898 - DNA, 25 bp, Homo sapien
aggccggcccggctgaaatacgcta

SEQ ID NO: 803899 - DNA, 25 bp, Homo sapien
ggaggccggcccggctgaaatacgc

SEQ ID NO: 803900 - DNA, 25 bp, Homo sapien
ccggcccggctgaaatacgctatga

SEQ ID NO: 803901 - DNA, 25 bp, Homo sapien
gcccggctgaaatacgctatgacca

SEQ ID NO: 803902 - DNA, 25 bp, Homo sapien
gaccgtccctagctcaggactggca

SEQ ID NO: 803903 - DNA, 25 bp, Homo sapien
aagggaccgtccctagctcaggact

SEQ ID NO: 803904 - DNA, 25 bp, Homo sapien
aggtaagggaccgtccctagctcag

SEQ ID NO: 803905 - DNA, 25 bp, Homo sapien
gggaccgtccctagctcaggactgg

SEQ ID NO: 803906 - DNA, 25 bp, Homo sapien
caggagagacctccggctgaggtca

SEQ ID NO: 803907 - DNA, 25 bp, Homo sapien
ccaccaggagagacctccggctgag

SEQ ID NO: 803908 - DNA, 25 bp, Homo sapien
aggacagaaatcaggttgctgctca

SEQ ID NO: 803909 - DNA, 25 bp, Homo sapien
ctgaggacagaaatcaggttgctgc

SEQ ID NO: 803910 - DNA, 25 bp, Homo sapien
tggaaccaatgcttagggcgcaagg

SEQ ID NO: 803911 - DNA, 25 bp, Homo sapien
aactggaaccaatgcttagggcgca

SEQ ID NO: 803912 - DNA, 25 bp, Homo sapien
aaccaatgcttagggcgcaagggta

SEQ ID NO: 803913 - DNA, 25 bp, Homo sapien
gtgagagtgggtcttcccgtacagg

SEQ ID NO: 803914 - DNA, 25 bp, Homo sapien
cagtgctctgggtcataagcctgga

SEQ ID NO: 803915 - DNA, 25 bp, Homo sapien
agtgctctgggtcataagcctggat

SEQ ID NO: 803916 - DNA, 25 bp, Homo sapien
ccagtgctctgggtcataagcctgg

SEQ ID NO: 803917 - DNA, 25 bp, Homo sapien
aggtgggcgcgatctcgcgcccaca

SEQ ID NO: 803918 - DNA, 25 bp, Homo sapien
gaaaggtgggcgcgatctcgcgccc

SEQ ID NO: 803919 - DNA, 25 bp, Homo sapien
taggaaaggtgggcgcgatctcgcg

SEQ ID NO: 803920 - DNA, 25 bp, Homo sapien
ctaggaaaggtgggcgcgatctcgc

SEQ ID NO: 803921 - DNA, 25 bp, Homo sapien
cttctctcaggccgatgacctcagg

SEQ ID NO: 803922 - DNA, 25 bp, Homo sapien
tgcccatctttttcgaaataaatca

SEQ ID NO: 803923 - DNA, 25 bp, Homo sapien
cttcagcagcatatgtagtaataga

SEQ ID NO: 803924 - DNA, 25 bp, Homo sapien
cccttcagcagcatatgtagtaata

SEQ ID NO: 803925 - DNA, 25 bp, Homo sapien
gcccatctttttcgaaataaatcaa

SEQ ID NO: 803926 - DNA, 25 bp, Homo sapien
ggggagacatattctctgctggtga

SEQ ID NO: 803927 - DNA, 25 bp, Homo sapien
tggggagacatattctctgctggtg

SEQ ID NO: 803928 - DNA, 25 bp, Homo sapien
gggagacatattctctgctggtgat

SEQ ID NO: 803929 - DNA, 25 bp, Homo sapien
gctggtcaaagtgcaacggtcttta

SEQ ID NO: 803930 - DNA, 25 bp, Homo sapien
tggtcaaagtgcaacggtctttaca

SEQ ID NO: 803931 - DNA, 25 bp, Homo sapien
tgcaacggtctttacaactaattga

SEQ ID NO: 803932 - DNA, 25 bp, Homo sapien
caaagtgcaacggtctttacaacta

SEQ ID NO: 803933 - DNA, 25 bp, Homo sapien
ggctgcgggcaaagaattcggccct

SEQ ID NO: 803934 - DNA, 25 bp, Homo sapien
ccagcgatccggtgcccattaggtg

SEQ ID NO: 803935 - DNA, 25 bp, Homo sapien
cgccttgaagccgaggcaagctcct

SEQ ID NO: 803936 - DNA, 25 bp, Homo sapien
ccctgtgaagagttgggttcggcct

SEQ ID NO: 803937 - DNA, 25 bp, Homo sapien
tcggaaaccgccagacaccaacgct

SEQ ID NO: 803938 - DNA, 25 bp, Homo sapien
tgccagacaccaacggtcggaaacc

SEQ ID NO: 803939 - DNA, 25 bp, Homo sapien
aaccgccagacaccaacgctcggaa

SEQ ID NO: 803940 - DNA, 25 bp, Homo sapien
ggcgcgtgccagacaccaacggtcg

SEQ ID NO: 803941 - DNA, 25 bp, Homo sapien
agccagtacatgcaggtgggctcca

SEQ ID NO: 803942 - DNA, 25 bp, Homo sapien
ccgccgctcctgccgtgcatgttgg

SEQ ID NO: 803943 - DNA, 25 bp, Homo sapien
gggagccagtacatgcaggtgggct

SEQ ID NO: 803944 - DNA, 25 bp, Homo sapien
cgccgctcctgccgtgcatgttggg

SEQ ID NO: 803945 - DNA, 25 bp, Homo sapien
ttgaagctgtcctcaaatcattttc

SEQ ID NO: 803946 - DNA, 25 bp, Homo sapien
cgttttgttgctttcttcttcacac

SEQ ID NO: 803947 - DNA, 25 bp, Homo sapien
tgttttcagtggtcgttttgttgct

SEQ ID NO: 803948 - DNA, 25 bp, Homo sapien
ggtcgttttgttgctttcttcttca

SEQ ID NO: 803949 - DNA, 25 bp, Homo sapien
tttcagtggtcgttttgttgctttc

SEQ ID NO: 803950 - DNA, 25 bp, Homo sapien
tgtttccagctatgacgatgtacca

SEQ ID NO: 803951 - DNA, 25 bp, Homo sapien
cagctttcgcagcattgaaaagatc

SEQ ID NO: 803952 - DNA, 25 bp, Homo sapien
gctggtggctctgactgtttccagc

SEQ ID NO: 803953 - DNA, 25 bp, Homo sapien
gaccctttctttggatgttttgcca

SEQ ID NO: 803954 - DNA, 25 bp, Homo sapien
aaatcaagtttgtagacacttgtcc

SEQ ID NO: 803955 - DNA, 25 bp, Homo sapien
gtttgtagacacttgtccttaccac

SEQ ID NO: 803956 - DNA, 25 bp, Homo sapien
tcaaatcaagtttgtagacacttgt

SEQ ID NO: 803957 - DNA, 25 bp, Homo sapien
caagtttgtagacacttgtccttac

SEQ ID NO: 803958 - DNA, 25 bp, Homo sapien
ttacagacaaatgccaccacatgca

SEQ ID NO: 803959 - DNA, 25 bp, Homo sapien
attacagacaaatgccaccacatgc

SEQ ID NO: 803960 - DNA, 25 bp, Homo sapien
gattacagacaaatgccaccacatg

SEQ ID NO: 803961 - DNA, 25 bp, Homo sapien
tccaggagactatgggctacttcca

SEQ ID NO: 803962 - DNA, 25 bp, Homo sapien
aaaaatccaggagactatgggctac

SEQ ID NO: 803963 - DNA, 25 bp, Homo sapien
aaaatccaggagactatgggctact

SEQ ID NO: 803964 - DNA, 25 bp, Homo sapien
aatccaggagactatgggctacttc

SEQ ID NO: 803965 - DNA, 25 bp, Homo sapien
agacgatggtgacaatgtgtggagg

SEQ ID NO: 803966 - DNA, 25 bp, Homo sapien
ttcttcaccaagtcttgacagaatt

SEQ ID NO: 803967 - DNA, 25 bp, Homo sapien
tcacttccggcagacctcatggcca

SEQ ID NO: 803968 - DNA, 25 bp, Homo sapien
cacttccggcagacctcatggccac

SEQ ID NO: 803969 - DNA, 25 bp, Homo sapien
acttccggcagacctcatggccaca

SEQ ID NO: 803970 - DNA, 25 bp, Homo sapien
cccttcacattttaactcaggagat

SEQ ID NO: 803971 - DNA, 25 bp, Homo sapien
taactcaggagataacaccaacaag

SEQ ID NO: 803972 - DNA, 25 bp, Homo sapien
cattttaactcaggagataacacca

SEQ ID NO: 803973 - DNA, 25 bp, Homo sapien
taactgaagactctcagtaatctga

SEQ ID NO: 803974 - DNA, 25 bp, Homo sapien
tgttctgatatatgtgagggccctt

SEQ ID NO: 803975 - DNA, 25 bp, Homo sapien
taagcttggcaatctaagtcctgca

SEQ ID NO: 803976 - DNA, 25 bp, Homo sapien
tgctgaagtaaaagagcccagtggt

SEQ ID NO: 803977 - DNA, 25 bp, Homo sapien
tctgtagaatcaggccctcatgggt

SEQ ID NO: 803978 - DNA, 25 bp, Homo sapien
gactcagattatcaaaccttcaggg

SEQ ID NO: 803979 - DNA, 25 bp, Homo sapien
ggataatcatccaagtggcctccca

SEQ ID NO: 803980 - DNA, 25 bp, Homo sapien
tactgcgcccttacttcttggataa

SEQ ID NO: 803981 - DNA, 25 bp, Homo sapien
taaaagccatggtgcaaagttgact

SEQ ID NO: 803982 - DNA, 25 bp, Homo sapien
gtggagtagacagcggatgcacaca

SEQ ID NO: 803983 - DNA, 25 bp, Homo sapien
cagtggagtagacagcggatgcaca

SEQ ID NO: 803984 - DNA, 25 bp, Homo sapien
gacagtggagtagacagcggatgca

SEQ ID NO: 803985 - DNA, 25 bp, Homo sapien
gagacagtggagtagacagcggatg

SEQ ID NO: 803986 - DNA, 25 bp, Homo sapien
gcctgcaacatggtcttcagtcagg

SEQ ID NO: 803987 - DNA, 25 bp, Homo sapien
ttgccatattttgggacggttctgt

SEQ ID NO: 803988 - DNA, 25 bp, Homo sapien
gggcctgcaacatggtcttcagtca

SEQ ID NO: 803989 - DNA, 25 bp, Homo sapien
ttttgggacggttctgtaggcagct

SEQ ID NO: 803990 - DNA, 25 bp, Homo sapien
ctctgagttgaattaaaagcagcaa

SEQ ID NO: 803991 - DNA, 25 bp, Homo sapien
gtgaggtgtgcacagacagggaatg

SEQ ID NO: 803992 - DNA, 25 bp, Homo sapien
ccgtgaggtgtgcacagacagggaa

SEQ ID NO: 803993 - DNA, 25 bp, Homo sapien
aggaaacaggctggcccttgccgtg

SEQ ID NO: 803994 - DNA, 25 bp, Homo sapien
tgcctcaagggccatccatgtcctg

SEQ ID NO: 803995 - DNA, 25 bp, Homo sapien
tttcagttctcaccgcagtggccag

SEQ ID NO: 803996 - DNA, 25 bp, Homo sapien
caatggagaattggcctggctagtt

SEQ ID NO: 803997 - DNA, 25 bp, Homo sapien
gcgctgtctcccttgtcataggtga

SEQ ID NO: 803998 - DNA, 25 bp, Homo sapien
tgcttccaggtaacaaggcagggcg

SEQ ID NO: 803999 - DNA, 25 bp, Homo sapien
ttccaggtaacaaggcagggcggca

SEQ ID NO: 804000 - DNA, 25 bp, Homo sapien
tgtgcttccaggtaacaaggcaggg

SEQ ID NO: 804001 - DNA, 25 bp, Homo sapien
ggctgtgcttccaggtaacaaggca

SEQ ID NO: 804002 - DNA, 25 bp, Homo sapien
cctctgttctcatcgcaggaagtct

SEQ ID NO: 804003 - DNA, 25 bp, Homo sapien
gcctctgttctcatcgcaggaagtc

SEQ ID NO: 804004 - DNA, 25 bp, Homo sapien
ctctgttctcatcgcaggaagtctt

SEQ ID NO: 804005 - DNA, 25 bp, Homo sapien
ctgttctcatcgcaggaagtcttca

SEQ ID NO: 804006 - DNA, 25 bp, Homo sapien
ggtgaaggacgagagctcggtggcc

SEQ ID NO: 804007 - DNA, 25 bp, Homo sapien
aacccacaacggatggtgaaggacg

SEQ ID NO: 804008 - DNA, 25 bp, Homo sapien
ccaggaacccacaacggatggtgaa

SEQ ID NO: 804009 - DNA, 25 bp, Homo sapien
ccacaacggatggtgaaggacgaga

SEQ ID NO: 804010 - DNA, 25 bp, Homo sapien
gcccattgctggatgccaagttccg

SEQ ID NO: 804011 - DNA, 25 bp, Homo sapien
ttccgggtgcaacacagccagcgtg

SEQ ID NO: 804012 - DNA, 25 bp, Homo sapien
ctggcgagcaggggcccattgctgg

SEQ ID NO: 804013 - DNA, 25 bp, Homo sapien
aagttccgggtgcaacacagccagc

SEQ ID NO: 804014 - DNA, 25 bp, Homo sapien
agcagaaggtggtgttggcgcaggg

SEQ ID NO: 804015 - DNA, 25 bp, Homo sapien
tgcagcagaaggtggtgttggcgca

SEQ ID NO: 804016 - DNA, 25 bp, Homo sapien
gccttccaggatgagagagatgctg

SEQ ID NO: 804017 - DNA, 25 bp, Homo sapien
cagcagaaggtggtgttggcgcagg

SEQ ID NO: 804018 - DNA, 25 bp, Homo sapien
tgggtctgagctgggcgggaggctc

SEQ ID NO: 804019 - DNA, 25 bp, Homo sapien
gagctgggcgggaggctcccacagg

SEQ ID NO: 804020 - DNA, 25 bp, Homo sapien
cagaggcaagaatcagatggatggc

SEQ ID NO: 804021 - DNA, 25 bp, Homo sapien
ggcacagaggcaagaatcagatgga

SEQ ID NO: 804022 - DNA, 25 bp, Homo sapien
gaatcagatggatggccagttcccg

SEQ ID NO: 804023 - DNA, 25 bp, Homo sapien
atggatggccagttcccgagcccct

SEQ ID NO: 804024 - DNA, 25 bp, Homo sapien
aatgggggcaggagtcggcgggaca

SEQ ID NO: 804025 - DNA, 25 bp, Homo sapien
aggtagccacagtcaaagagaagga

SEQ ID NO: 804026 - DNA, 25 bp, Homo sapien
ggaggtagccacagtcaaagagaag

SEQ ID NO: 804027 - DNA, 25 bp, Homo sapien
gaggtagccacagtcaaagagaagg

SEQ ID NO: 804028 - DNA, 25 bp, Homo sapien
aggaggtagccacagtcaaagagaa

SEQ ID NO: 804029 - DNA, 25 bp, Homo sapien
tgctcgtgctctcagtgcctaggag

SEQ ID NO: 804030 - DNA, 25 bp, Homo sapien
gctggtgtgggatggctggagccta

SEQ ID NO: 804031 - DNA, 25 bp, Homo sapien
ccatgctcgtgctctcagtgcctag

SEQ ID NO: 804032 - DNA, 25 bp, Homo sapien
tgctctcagtgcctaggagctggtg

SEQ ID NO: 804033 - DNA, 25 bp, Homo sapien
gtggcataagggacgtggagagcag

SEQ ID NO: 804034 - DNA, 25 bp, Homo sapien
tggaatggggtactgttgctcacac

SEQ ID NO: 804035 - DNA, 25 bp, Homo sapien
attagaggcccaagaataacgtaag

SEQ ID NO: 804036 - DNA, 25 bp, Homo sapien
tctgcccagcctaagcgtagagtcc

SEQ ID NO: 804037 - DNA, 25 bp, Homo sapien
ggggtactgttgctcacacactcac

SEQ ID NO: 804038 - DNA, 25 bp, Homo sapien
ctgacttagtcacagcaggaaacga

SEQ ID NO: 804039 - DNA, 25 bp, Homo sapien
aaggcccatgtcagaggaactgtgt

SEQ ID NO: 804040 - DNA, 25 bp, Homo sapien
agagcaaggctctgaaatccagcca

SEQ ID NO: 804041 - DNA, 25 bp, Homo sapien
cagagggacgccaggtcaaatcaca

SEQ ID NO: 804042 - DNA, 25 bp, Homo sapien
tagcggacacgatggtgcacatccg

SEQ ID NO: 804043 - DNA, 25 bp, Homo sapien
cctaggacatggtgggattgcagca

SEQ ID NO: 804044 - DNA, 25 bp, Homo sapien
agttcgagaccagcccagccaaaca

SEQ ID NO: 804045 - DNA, 25 bp, Homo sapien
gagaccagcccagccaaacatggtg

SEQ ID NO: 804046 - DNA, 25 bp, Homo sapien
gttcgagaccagcccagccaaacat

SEQ ID NO: 804047 - DNA, 25 bp, Homo sapien
aggagttcgagaccagcccagccaa

SEQ ID NO: 804048 - DNA, 25 bp, Homo sapien
attaagaagctcctattcaggcggg

SEQ ID NO: 804049 - DNA, 25 bp, Homo sapien
ttacatcaacttattaaatcagctg

SEQ ID NO: 804050 - DNA, 25 bp, Homo sapien
caggggtagctgactgtaaaatttt

SEQ ID NO: 804051 - DNA, 25 bp, Homo sapien
gctggtcaattttgacccagagcca

SEQ ID NO: 804052 - DNA, 25 bp, Homo sapien
aagggaaatacaagtgctctgtgtc

SEQ ID NO: 804053 - DNA, 25 bp, Homo sapien
ctgaagggaaatacaagtgctctgt

SEQ ID NO: 804054 - DNA, 25 bp, Homo sapien
gaaatacaagtgctctgtgtcttct

SEQ ID NO: 804055 - DNA, 25 bp, Homo sapien
gggaaatacaagtgctctgtgtctt

SEQ ID NO: 804056 - DNA, 25 bp, Homo sapien
cccttcacggtactggagtcctagc

SEQ ID NO: 804057 - DNA, 25 bp, Homo sapien
actgcctcccttcacggtactggag

SEQ ID NO: 804058 - DNA, 25 bp, Homo sapien
tggagtcctagccagcgcgctatgc

SEQ ID NO: 804059 - DNA, 25 bp, Homo sapien
tgcctcccttcacggtactggagtc

SEQ ID NO: 804060 - DNA, 25 bp, Homo sapien
tagctctggagggtacatactcccc

SEQ ID NO: 804061 - DNA, 25 bp, Homo sapien
gcagagtctaaatccagcccgttag

SEQ ID NO: 804062 - DNA, 25 bp, Homo sapien
gcatgattccaacatgggcagagtc

SEQ ID NO: 804063 - DNA, 25 bp, Homo sapien
ttatgtcactttccgggctctggac

SEQ ID NO: 804064 - DNA, 25 bp, Homo sapien
gactgactcttcgttccattcctgc

SEQ ID NO: 804065 - DNA, 25 bp, Homo sapien
gtggcccatgggacccagctagaag

SEQ ID NO: 804066 - DNA, 25 bp, Homo sapien
ggcctcaagagggtggcccaccctg

SEQ ID NO: 804067 - DNA, 25 bp, Homo sapien
taggcatgggatacaacacccagcc

SEQ ID NO: 804068 - DNA, 25 bp, Homo sapien
aactgaggcaccggggctttggact

SEQ ID NO: 804069 - DNA, 25 bp, Homo sapien
gaaactgaggcaccggggctttgga

SEQ ID NO: 804070 - DNA, 25 bp, Homo sapien
ctgaggcaccggggctttggactga

SEQ ID NO: 804071 - DNA, 25 bp, Homo sapien
gaggcaccggggctttggactgaac

SEQ ID NO: 804072 - DNA, 25 bp, Homo sapien
caggccctatacacctcattctcct

SEQ ID NO: 804073 - DNA, 25 bp, Homo sapien
ccaggccctatacacctcattctcc

SEQ ID NO: 804074 - DNA, 25 bp, Homo sapien
aggccctatacacctcattctcctt

SEQ ID NO: 804075 - DNA, 25 bp, Homo sapien
ggccctatacacctcattctccttg

SEQ ID NO: 804076 - DNA, 25 bp, Homo sapien
tcactggagctttggtgacccacag

SEQ ID NO: 804077 - DNA, 25 bp, Homo sapien
ccagaggaagtgataacaatcttct

SEQ ID NO: 804078 - DNA, 25 bp, Homo sapien
catcctctccagagtaaggtggcat

SEQ ID NO: 804079 - DNA, 25 bp, Homo sapien
tgggcaccccgcacaaagtcctggg

SEQ ID NO: 804080 - DNA, 25 bp, Homo sapien
ggacttggcagaagtacacagactg

SEQ ID NO: 804081 - DNA, 25 bp, Homo sapien
tggacttggcagaagtacacagact

SEQ ID NO: 804082 - DNA, 25 bp, Homo sapien
ttgatggactgccacgacagcctcc

SEQ ID NO: 804083 - DNA, 25 bp, Homo sapien
tccccttgatggactgccacgacag

SEQ ID NO: 804084 - DNA, 25 bp, Homo sapien
ccttgatggactgccacgacagcct

SEQ ID NO: 804085 - DNA, 25 bp, Homo sapien
gggtccccttgatggactgccacga

SEQ ID NO: 804086 - DNA, 25 bp, Homo sapien
cctatggctgaaccaggaaggttcc

SEQ ID NO: 804087 - DNA, 25 bp, Homo sapien
ctgagcctatggctgaaccaggaag

SEQ ID NO: 804088 - DNA, 25 bp, Homo sapien
tgagcctatggctgaaccaggaagg

SEQ ID NO: 804089 - DNA, 25 bp, Homo sapien
agcctatggctgaaccaggaaggtt

SEQ ID NO: 804090 - DNA, 25 bp, Homo sapien
tcaacttctgagttgcaggaactca

SEQ ID NO: 804091 - DNA, 25 bp, Homo sapien
caggaggttgttccctcatacagcc

SEQ ID NO: 804092 - DNA, 25 bp, Homo sapien
aagccagtggaggtcacaggcgctc

SEQ ID NO: 804093 - DNA, 25 bp, Homo sapien
tacacagagactggtccctctcgag

SEQ ID NO: 804094 - DNA, 25 bp, Homo sapien
cgcaggctctttcagggagaggaaa

SEQ ID NO: 804095 - DNA, 25 bp, Homo sapien
gcgcaggctctttcagggagaggaa

SEQ ID NO: 804096 - DNA, 25 bp, Homo sapien
agcgcaggctctttcagggagagga

SEQ ID NO: 804097 - DNA, 25 bp, Homo sapien
cttcttattgcaaaagggccttagg

SEQ ID NO: 804098 - DNA, 25 bp, Homo sapien
tctggcttcttattgcaaaagggcc

SEQ ID NO: 804099 - DNA, 25 bp, Homo sapien
ctcccacctggatccctgcagaccc

SEQ ID NO: 804100 - DNA, 25 bp, Homo sapien
gctccggccaggacttcaaatcctt

SEQ ID NO: 804101 - DNA, 25 bp, Homo sapien
ccaggggacggggagaccagcagag

SEQ ID NO: 804102 - DNA, 25 bp, Homo sapien
ttctccaggggacggggagaccagc

SEQ ID NO: 804103 - DNA, 25 bp, Homo sapien
tcttctccaggggacggggagacca

SEQ ID NO: 804104 - DNA, 25 bp, Homo sapien
tgttcttctccaggggacggggaga

SEQ ID NO: 804105 - DNA, 25 bp, Homo sapien
ggggcagcagcaggggccgacccat

SEQ ID NO: 804106 - DNA, 25 bp, Homo sapien
caggctgcagaaatgctggcggctg

SEQ ID NO: 804107 - DNA, 25 bp, Homo sapien
aggggcagcagcaggggccgaccca

SEQ ID NO: 804108 - DNA, 25 bp, Homo sapien
tgcagaaatgctggcggctgcagca

SEQ ID NO: 804109 - DNA, 25 bp, Homo sapien
catacctgggcggtcctgggtactc

SEQ ID NO: 804110 - DNA, 25 bp, Homo sapien
tacctgggcggtcctgggtactcac

SEQ ID NO: 804111 - DNA, 25 bp, Homo sapien
ctcctgtggtttgggcagagaccat

SEQ ID NO: 804112 - DNA, 25 bp, Homo sapien
cagagaccatacctgggcggtcctg

SEQ ID NO: 804113 - DNA, 25 bp, Homo sapien
caggatattctcacgttgggaacta

SEQ ID NO: 804114 - DNA, 25 bp, Homo sapien
aggatattctcacgttgggaactat

SEQ ID NO: 804115 - DNA, 25 bp, Homo sapien
ggatattctcacgttgggaactatg

SEQ ID NO: 804116 - DNA, 25 bp, Homo sapien
gatattctcacgttgggaactatgg

SEQ ID NO: 804117 - DNA, 25 bp, Homo sapien
tctccgggtgtccagctcgactcgg

SEQ ID NO: 804118 - DNA, 25 bp, Homo sapien
atctccgggtgtccagctcgactcg

SEQ ID NO: 804119 - DNA, 25 bp, Homo sapien
cctgatctccgggtgtccagctcga

SEQ ID NO: 804120 - DNA, 25 bp, Homo sapien
tgatctccgggtgtccagctcgact

SEQ ID NO: 804121 - DNA, 25 bp, Homo sapien
caggtgtcagggcagctggactcac

SEQ ID NO: 804122 - DNA, 25 bp, Homo sapien
ctgcggtgggcaaggcaggtgtcag

SEQ ID NO: 804123 - DNA, 25 bp, Homo sapien
gcaggtgtcagggcagctggactca

SEQ ID NO: 804124 - DNA, 25 bp, Homo sapien
cggtgggcaaggcaggtgtcagggc

SEQ ID NO: 804125 - DNA, 25 bp, Homo sapien
tgggtttaaatgtgaagacatcagt

SEQ ID NO: 804126 - DNA, 25 bp, Homo sapien
ctgggtttaaatgtgaagacatcag

SEQ ID NO: 804127 - DNA, 25 bp, Homo sapien
actgggtttaaatgtgaagacatca

SEQ ID NO: 804128 - DNA, 25 bp, Homo sapien
cactgggtttaaatgtgaagacatc

SEQ ID NO: 804129 - DNA, 25 bp, Homo sapien
gctgctttctagattggggacattc

SEQ ID NO: 804130 - DNA, 25 bp, Homo sapien
gacattcaggatgagcaagctgctc

SEQ ID NO: 804131 - DNA, 25 bp, Homo sapien
tagcaaggtgaaatgctaacagctc

SEQ ID NO: 804132 - DNA, 25 bp, Homo sapien
tctggatgaaaggcatggtgtgctg

SEQ ID NO: 804133 - DNA, 25 bp, Homo sapien
ggtgccatgattctgagtgcccttt

SEQ ID NO: 804134 - DNA, 25 bp, Homo sapien
gcagtgtccagacttaggtgccatg

SEQ ID NO: 804135 - DNA, 25 bp, Homo sapien
agcgacagccaatgcaaccctgatg

SEQ ID NO: 804136 - DNA, 25 bp, Homo sapien
gacagccaatgcaaccctgatggca

SEQ ID NO: 804137 - DNA, 25 bp, Homo sapien
gaggagacagtgcgttctgggcact

SEQ ID NO: 804138 - DNA, 25 bp, Homo sapien
tatttctgaagtcccttagctgcag

SEQ ID NO: 804139 - DNA, 25 bp, Homo sapien
gcccccgagatgcagacgccccagc

SEQ ID NO: 804140 - DNA, 25 bp, Homo sapien
ccagcagggtctgcatatttctgaa

SEQ ID NO: 804141 - DNA, 25 bp, Homo sapien
ggtcatggcgtacagtccttttaac

SEQ ID NO: 804142 - DNA, 25 bp, Homo sapien
gggtgatacatgcattccagggcta

SEQ ID NO: 804143 - DNA, 25 bp, Homo sapien
gaaaggtgttcaatcttgtccaatg

SEQ ID NO: 804144 - DNA, 25 bp, Homo sapien
ggctatctccaacttggtcatggcg

SEQ ID NO: 804145 - DNA, 25 bp, Homo sapien
cactccacgaacaagaatgtcatcc

SEQ ID NO: 804146 - DNA, 25 bp, Homo sapien
gaaatcagggaatgcgtgtcctctc

SEQ ID NO: 804147 - DNA, 25 bp, Homo sapien
tacatatgagatcttgtcacctgca

SEQ ID NO: 804148 - DNA, 25 bp, Homo sapien
ggcatggacaccttgacaatattaa

SEQ ID NO: 804149 - DNA, 25 bp, Homo sapien
tcttgtgtaagagcaggtacgtatc

SEQ ID NO: 804150 - DNA, 25 bp, Homo sapien
ttggaagctaatctgccatggcagc

SEQ ID NO: 804151 - DNA, 25 bp, Homo sapien
gtacgtatcataaatcctgccctgg

SEQ ID NO: 804152 - DNA, 25 bp, Homo sapien
ggaggctaaggcaactccatcttgg

SEQ ID NO: 804153 - DNA, 25 bp, Homo sapien
gggaccaacagtgagtcagggtggc

SEQ ID NO: 804154 - DNA, 25 bp, Homo sapien
ttgtggctttagtccgctgctgacg

SEQ ID NO: 804155 - DNA, 25 bp, Homo sapien
ctgctgacgtgtagggggaccaaca

SEQ ID NO: 804156 - DNA, 25 bp, Homo sapien
caacagtgagtcagggtggcatcca

SEQ ID NO: 804157 - DNA, 25 bp, Homo sapien
tcagaagtcactgcttggcgccctg

SEQ ID NO: 804158 - DNA, 25 bp, Homo sapien
atcccttctccccacactctgttgg

SEQ ID NO: 804159 - DNA, 25 bp, Homo sapien
tgtggaggactcacaagcgggtctc

SEQ ID NO: 804160 - DNA, 25 bp, Homo sapien
tatcattgcagtgtggatgctcctg

SEQ ID NO: 804161 - DNA, 25 bp, Homo sapien
tttgcactgctataataaacagccc

SEQ ID NO: 804162 - DNA, 25 bp, Homo sapien
tcctccagtcggtgattcagggacc

SEQ ID NO: 804163 - DNA, 25 bp, Homo sapien
caatttgctgtagtagccgtggcca

SEQ ID NO: 804164 - DNA, 25 bp, Homo sapien
gagaagacacggaagctttgcaccc

SEQ ID NO: 804165 - DNA, 25 bp, Homo sapien
tcaacccgtgcgatcacaggaagca

SEQ ID NO: 804166 - DNA, 25 bp, Homo sapien
gcttcctagagggtgcagtgcctag

SEQ ID NO: 804167 - DNA, 25 bp, Homo sapien
gccctggatccagctgaacccccat

SEQ ID NO: 804168 - DNA, 25 bp, Homo sapien
gtttatgtcactttcaggccctgga

SEQ ID NO: 804169 - DNA, 25 bp, Homo sapien
tttcaggccctggatccagctgaac

SEQ ID NO: 804170 - DNA, 25 bp, Homo sapien
caggccctggatccagctgaacccc

SEQ ID NO: 804171 - DNA, 25 bp, Homo sapien
ggctgtccaatgtgggggccacata

SEQ ID NO: 804172 - DNA, 25 bp, Homo sapien
ggggccacatagaacttatagccaa

SEQ ID NO: 804173 - DNA, 25 bp, Homo sapien
gctgcccaatgctgccacgtgcagt

SEQ ID NO: 804174 - DNA, 25 bp, Homo sapien
gcagtctccttagatgcaacatgca

SEQ ID NO: 804175 - DNA, 25 bp, Homo sapien
agaggaagtgacatcagccttcttg

SEQ ID NO: 804176 - DNA, 25 bp, Homo sapien
gggcccatctctaacggggatctgc

SEQ ID NO: 804177 - DNA, 25 bp, Homo sapien
ctgggcccatctctaacggggatct

SEQ ID NO: 804178 - DNA, 25 bp, Homo sapien
gcccatctctaacggggatctgccg

SEQ ID NO: 804179 - DNA, 25 bp, Homo sapien
agtgaaggctcagagcaacacccac

SEQ ID NO: 804180 - DNA, 25 bp, Homo sapien
gaaagtgaaggctcagagcaacacc

SEQ ID NO: 804181 - DNA, 25 bp, Homo sapien
ttggacacagaagaaagtgaaggct

SEQ ID NO: 804182 - DNA, 25 bp, Homo sapien
tggacacagaagaaagtgaaggctc

SEQ ID NO: 804183 - DNA, 25 bp, Homo sapien
agcccttggctgatccagaagcttc

SEQ ID NO: 804184 - DNA, 25 bp, Homo sapien
ctgagcccttggctgatccagaagc

SEQ ID NO: 804185 - DNA, 25 bp, Homo sapien
tgagcccttggctgatccagaagct

SEQ ID NO: 804186 - DNA, 25 bp, Homo sapien
gagcccttggctgatccagaagctt

SEQ ID NO: 804187 - DNA, 25 bp, Homo sapien
agcgcaggctctttcagggagagga

SEQ ID NO: 804188 - DNA, 25 bp, Homo sapien
gcgcaggctctttcagggagaggaa

SEQ ID NO: 804189 - DNA, 25 bp, Homo sapien
cgcaggctctttcagggagaggaaa

SEQ ID NO: 804190 - DNA, 25 bp, Homo sapien
gtgaccagcacttcctttatccatc

SEQ ID NO: 804191 - DNA, 25 bp, Homo sapien
cagggtgaccagcacttcctttatc

SEQ ID NO: 804192 - DNA, 25 bp, Homo sapien
gggtgaccagcacttcctttatcca

SEQ ID NO: 804193 - DNA, 25 bp, Homo sapien
ggtgaccagcacttcctttatccat

SEQ ID NO: 804194 - DNA, 25 bp, Homo sapien
ttgaggtgagtgaggagagccgggc

SEQ ID NO: 804195 - DNA, 25 bp, Homo sapien
ctgggggttgaggtgagtgaggaga

SEQ ID NO: 804196 - DNA, 25 bp, Homo sapien
ggttgaggtgagtgaggagagccgg

SEQ ID NO: 804197 - DNA, 25 bp, Homo sapien
gggggttgaggtgagtgaggagagc

SEQ ID NO: 804198 - DNA, 25 bp, Homo sapien
gagaccagcagagccgtccaggcag

SEQ ID NO: 804199 - DNA, 25 bp, Homo sapien
tccaggggacggggagaccagcaga

SEQ ID NO: 804200 - DNA, 25 bp, Homo sapien
tcttctccaggggacggggagacca

SEQ ID NO: 804201 - DNA, 25 bp, Homo sapien
acggggagaccagcagagccgtcca

SEQ ID NO: 804202 - DNA, 25 bp, Homo sapien
aggctgcagaaatgctggcggcagc

SEQ ID NO: 804203 - DNA, 25 bp, Homo sapien
cagcagcaagggcagtaggggcagc

SEQ ID NO: 804204 - DNA, 25 bp, Homo sapien
gctgcagaaatgctggcggcagcag

SEQ ID NO: 804205 - DNA, 25 bp, Homo sapien
tgcagaaatgctggcggcagcagca

SEQ ID NO: 804206 - DNA, 25 bp, Homo sapien
gctccgtgtgtccagctcaactcgg

SEQ ID NO: 804207 - DNA, 25 bp, Homo sapien
gcttctgcaggttggagatcctgag

SEQ ID NO: 804208 - DNA, 25 bp, Homo sapien
ctcacgtcgggagctgtggctaact

SEQ ID NO: 804209 - DNA, 25 bp, Homo sapien
caggatattctcacgtcgggagctg

SEQ ID NO: 804210 - DNA, 25 bp, Homo sapien
ggtcgtcagaagaagtggggtctga

SEQ ID NO: 804211 - DNA, 25 bp, Homo sapien
taaaagcctcactgcggtgggcaaa

SEQ ID NO: 804212 - DNA, 25 bp, Homo sapien
atgtcaccagtgatcataaaagcct

SEQ ID NO: 804213 - DNA, 25 bp, Homo sapien
gcggtgggcaaagcgggtgccaggg

SEQ ID NO: 804214 - DNA, 25 bp, Homo sapien
tggagacagataaacccaggctcaa

SEQ ID NO: 804215 - DNA, 25 bp, Homo sapien
catcactaggttcaaaagtaggtca

SEQ ID NO: 804216 - DNA, 25 bp, Homo sapien
taggtcaaggcgaacactatggtca

SEQ ID NO: 804217 - DNA, 25 bp, Homo sapien
tatggtcaactcaataggcgaagcc

SEQ ID NO: 804218 - DNA, 25 bp, Homo sapien
gcaagcaggaattaaggaaagagga

SEQ ID NO: 804219 - DNA, 25 bp, Homo sapien
aaggccatttaaggaaatatgtagg

SEQ ID NO: 804220 - DNA, 25 bp, Homo sapien
gcttcatttagattatggagccact

SEQ ID NO: 804221 - DNA, 25 bp, Homo sapien
caggcagcgagagtgtccgtccctg

SEQ ID NO: 804222 - DNA, 25 bp, Homo sapien
aaaaacaacaaatctgacctatgca

SEQ ID NO: 804223 - DNA, 25 bp, Homo sapien
aaaaaaacaacaaatctgacctatg

SEQ ID NO: 804224 - DNA, 25 bp, Homo sapien
tgaaaatacaatttattagtgaaaa

SEQ ID NO: 804225 - DNA, 25 bp, Homo sapien
aaacaacaaatctgacctatgcaga

SEQ ID NO: 804226 - DNA, 25 bp, Homo sapien
ataataagcatgaatattcaactaa

SEQ ID NO: 804227 - DNA, 25 bp, Homo sapien
taataagcatgaatattcaactaat

SEQ ID NO: 804228 - DNA, 25 bp, Homo sapien
aagcatgaatattcaactaattgaa

SEQ ID NO: 804229 - DNA, 25 bp, Homo sapien
ataagcatgaatattcaactaattg

SEQ ID NO: 804230 - DNA, 25 bp, Homo sapien
aatttagttgtttatgccatatacc

SEQ ID NO: 804231 - DNA, 25 bp, Homo sapien
ttttaaattaagaagccttgctctg

SEQ ID NO: 804232 - DNA, 25 bp, Homo sapien
gatcaatttagttgtttatgccata

SEQ ID NO: 804233 - DNA, 25 bp, Homo sapien
taaagatcaatttagttgtttatgc

SEQ ID NO: 804234 - DNA, 25 bp, Homo sapien
ctcagctcactacagacagttaaac

SEQ ID NO: 804235 - DNA, 25 bp, Homo sapien
ttactgagggatataaaataggacc

SEQ ID NO: 804236 - DNA, 25 bp, Homo sapien
cataataggtttaatgcaactgact

SEQ ID NO: 804237 - DNA, 25 bp, Homo sapien
gaatactaccaagatttactgaggg

SEQ ID NO: 804238 - DNA, 25 bp, Homo sapien
agtcgccttgccagttatccctggg

SEQ ID NO: 804239 - DNA, 25 bp, Homo sapien
tgaggccaagatatagtccccggtg

SEQ ID NO: 804240 - DNA, 25 bp, Homo sapien
tcatatagggactctagccttaggc

SEQ ID NO: 804241 - DNA, 25 bp, Homo sapien
gaaagcaaacctctcgtctttgggc

SEQ ID NO: 804242 - DNA, 25 bp, Homo sapien
ggcttaacaatccacctcaatggaa

SEQ ID NO: 804243 - DNA, 25 bp, Homo sapien
ggatactggagatctaaaagatagc

SEQ ID NO: 804244 - DNA, 25 bp, Homo sapien
aattataccattaagagtactatca

SEQ ID NO: 804245 - DNA, 25 bp, Homo sapien
taagagtactatcaaagtaagtctg

SEQ ID NO: 804246 - DNA, 25 bp, Homo sapien
tgctgggcctctgggtggtggtcgt

SEQ ID NO: 804247 - DNA, 25 bp, Homo sapien
ggcctctgggtggtggtcgtgacag

SEQ ID NO: 804248 - DNA, 25 bp, Homo sapien
gggcctctgggtggtggtcgtgaca

SEQ ID NO: 804249 - DNA, 25 bp, Homo sapien
ctgggcctctgggtggtggtcgtga

SEQ ID NO: 804250 - DNA, 25 bp, Homo sapien
caaaatcatgattccgagcacagtg

SEQ ID NO: 804251 - DNA, 25 bp, Homo sapien
tatgtgccaagagtctgagcgtcgt

SEQ ID NO: 804252 - DNA, 25 bp, Homo sapien
tgtgtgaccctgaggccggttgtgg

SEQ ID NO: 804253 - DNA, 25 bp, Homo sapien
tgagcgtcgtttgccctgtgtgacc

SEQ ID NO: 804254 - DNA, 25 bp, Homo sapien
gacacctcagcataggccacgaagt

SEQ ID NO: 804255 - DNA, 25 bp, Homo sapien
cagacacctcagcataggccacgaa

SEQ ID NO: 804256 - DNA, 25 bp, Homo sapien
tcagcataggccacgaagtcggcct

SEQ ID NO: 804257 - DNA, 25 bp, Homo sapien
cacctcagcataggccacgaagtcg

SEQ ID NO: 804258 - DNA, 25 bp, Homo sapien
gggttgtggctttagtccgctgctg

SEQ ID NO: 804259 - DNA, 25 bp, Homo sapien
gttgtggctttagtccgctgctgac

SEQ ID NO: 804260 - DNA, 25 bp, Homo sapien
ggttgtggctttagtccgctgctga

SEQ ID NO: 804261 - DNA, 25 bp, Homo sapien
gatattctcatatggctcctctgtg

SEQ ID NO: 804262 - DNA, 25 bp, Homo sapien
ctgatattctcatatggctcctctg

SEQ ID NO: 804263 - DNA, 25 bp, Homo sapien
tcctgatattctcatatggctcctc

SEQ ID NO: 804264 - DNA, 25 bp, Homo sapien
tcattcctgatattctcatatggct

SEQ ID NO: 804265 - DNA, 25 bp, Homo sapien
aagggaagcatagacgatgccgtca

SEQ ID NO: 804266 - DNA, 25 bp, Homo sapien
gagggcaagggaagcatagacgatg

SEQ ID NO: 804267 - DNA, 25 bp, Homo sapien
gcaagggaagcatagacgatgccgt

SEQ ID NO: 804268 - DNA, 25 bp, Homo sapien
gggaagcatagacgatgccgtcatc

SEQ ID NO: 804269 - DNA, 25 bp, Homo sapien
gggtctcgttctgggggctcttgag

SEQ ID NO: 804270 - DNA, 25 bp, Homo sapien
ttaggcctttaagacagagtacagg

SEQ ID NO: 804271 - DNA, 25 bp, Homo sapien
tttaagacagagtacagggtctcgt

SEQ ID NO: 804272 - DNA, 25 bp, Homo sapien
gggacggtggctgggaggtgctctg

SEQ ID NO: 804273 - DNA, 25 bp, Homo sapien
tcagtcttgagagggctgtccattg

SEQ ID NO: 804274 - DNA, 25 bp, Homo sapien
cagtcttgagagggctgtccattgg

SEQ ID NO: 804275 - DNA, 25 bp, Homo sapien
ggcatctcgctccattatcaaagct

SEQ ID NO: 804276 - DNA, 25 bp, Homo sapien
tctcgctccattatcaaagctggcc

SEQ ID NO: 804277 - DNA, 25 bp, Homo sapien
catctcgctccattatcaaagctgg

SEQ ID NO: 804278 - DNA, 25 bp, Homo sapien
ctcgctccattatcaaagctggccc

SEQ ID NO: 804279 - DNA, 25 bp, Homo sapien
gaaagatacctgtttgagttgggaa

SEQ ID NO: 804280 - DNA, 25 bp, Homo sapien
gctgcccctgagataaggacatcta

SEQ ID NO: 804281 - DNA, 25 bp, Homo sapien
tagatggatgaaatggcctcaggag

SEQ ID NO: 804282 - DNA, 25 bp, Homo sapien
ttttcagagaggaggtaccacatac

SEQ ID NO: 804283 - DNA, 25 bp, Homo sapien
tttatggaggactccaaagagcttt

SEQ ID NO: 804284 - DNA, 25 bp, Homo sapien
caatgctaaagggtttacttctctt

SEQ ID NO: 804285 - DNA, 25 bp, Homo sapien
ctcttagaccaaggatttgaggaac

SEQ ID NO: 804286 - DNA, 25 bp, Homo sapien
gagtctgggttagaggacaatgcta

SEQ ID NO: 804287 - DNA, 25 bp, Homo sapien
atcgcaatcacctggagacgccaca

SEQ ID NO: 804288 - DNA, 25 bp, Homo sapien
aaagcactaaaacagccgatgttgt

SEQ ID NO: 804289 - DNA, 25 bp, Homo sapien
aacggctgagtcgttctctggctcc

SEQ ID NO: 804290 - DNA, 25 bp, Homo sapien
gccgatgttgtccaacttcctcttc

SEQ ID NO: 804291 - DNA, 25 bp, Homo sapien
aacgcgataggtcattataactcac

SEQ ID NO: 804292 - DNA, 25 bp, Homo sapien
aactgggctcagtaaaacgcgatag

SEQ ID NO: 804293 - DNA, 25 bp, Homo sapien
attattcatgagctgttggtagcaa

SEQ ID NO: 804294 - DNA, 25 bp, Homo sapien
tcttagaagcgcttccgagggagcg

SEQ ID NO: 804295 - DNA, 25 bp, Homo sapien
gtctccgcccggctctaaatccaac

SEQ ID NO: 804296 - DNA, 25 bp, Homo sapien
gaatgagtctcagcggtctccgccc

SEQ ID NO: 804297 - DNA, 25 bp, Homo sapien
tgaaaaggtctccttgacacccgac

SEQ ID NO: 804298 - DNA, 25 bp, Homo sapien
cacccgacccttgttcctgaggaat

SEQ ID NO: 804299 - DNA, 25 bp, Homo sapien
tatgtccggccctactgatctcctt

SEQ ID NO: 804300 - DNA, 25 bp, Homo sapien
taacggctctgggagtttaaatata

SEQ ID NO: 804301 - DNA, 25 bp, Homo sapien
cagactacgaaccaacttaacggct

SEQ ID NO: 804302 - DNA, 25 bp, Homo sapien
tcctttgtctctgccgcgcgatccc

SEQ ID NO: 804303 - DNA, 25 bp, Homo sapien
ttcgcccgggaaccacgcatgcgca

SEQ ID NO: 804304 - DNA, 25 bp, Homo sapien
gccgcgagcgcgcacggtgagcgcg

SEQ ID NO: 804305 - DNA, 25 bp, Homo sapien
tgagcgcgcgttcccttcgcccggg

SEQ ID NO: 804306 - DNA, 25 bp, Homo sapien
ccgggaaccacgcatgcgcactccg

SEQ ID NO: 804307 - DNA, 25 bp, Homo sapien
gctctgctcttcacgcctagtctcg

SEQ ID NO: 804308 - DNA, 25 bp, Homo sapien
agaccaaaacaagaggcccgcgaga

SEQ ID NO: 804309 - DNA, 25 bp, Homo sapien
aagtgcgccctactagcccgcgaga

SEQ ID NO: 804310 - DNA, 25 bp, Homo sapien
cgcgagacccgaactactcgaggac

SEQ ID NO: 804311 - DNA, 25 bp, Homo sapien
ggccggcaccagaaacggctccttc

SEQ ID NO: 804312 - DNA, 25 bp, Homo sapien
ctccgcccgactcatctttgagcgg

SEQ ID NO: 804313 - DNA, 25 bp, Homo sapien
accagaaacggctccttctccgccg

SEQ ID NO: 804314 - DNA, 25 bp, Homo sapien
ccctccgcccgactcatctttgagc

SEQ ID NO: 804315 - DNA, 25 bp, Homo sapien
agatggcgcgcaacgacccggacca

SEQ ID NO: 804316 - DNA, 25 bp, Homo sapien
cccagaggcggcctcttggtgcggt

SEQ ID NO: 804317 - DNA, 25 bp, Homo sapien
gaggcggcctcttggtgcggtggca

SEQ ID NO: 804318 - DNA, 25 bp, Homo sapien
ggaccccgcagatggcgcgcaacga

SEQ ID NO: 804319 - DNA, 25 bp, Homo sapien
cattgcggggtcgaggaggagcagg

SEQ ID NO: 804320 - DNA, 25 bp, Homo sapien
gcctccccatgcgactgcgcctggg

SEQ ID NO: 804321 - DNA, 25 bp, Homo sapien
ggctgatagccattgcggggtcgag

SEQ ID NO: 804322 - DNA, 25 bp, Homo sapien
ctcgccccgggggatccgacaggcg

SEQ ID NO: 804323 - DNA, 25 bp, Homo sapien
ggttcaggggatcaaagatattgcc

SEQ ID NO: 804324 - DNA, 25 bp, Homo sapien
cgcctgcgcctcttgaaggccggat

SEQ ID NO: 804325 - DNA, 25 bp, Homo sapien
taacacagagtcacagtccgaattc

SEQ ID NO: 804326 - DNA, 25 bp, Homo sapien
gaaggccggatgtttgaagcctccc

SEQ ID NO: 804327 - DNA, 25 bp, Homo sapien
caagtattgagactgagcgggtcag

SEQ ID NO: 804328 - DNA, 25 bp, Homo sapien
tggcgaagcaagaactacatggccc

SEQ ID NO: 804329 - DNA, 25 bp, Homo sapien
tacatggccctcatcagtgcaagta

SEQ ID NO: 804330 - DNA, 25 bp, Homo sapien
tatgccgcttccgaccagtcttgag

SEQ ID NO: 804331 - DNA, 25 bp, Homo sapien
gcagagcagatggaaggggagacac

SEQ ID NO: 804332 - DNA, 25 bp, Homo sapien
agagcagatggaaggggagacacca

SEQ ID NO: 804333 - DNA, 25 bp, Homo sapien
cagagcagatggaaggggagacacc

SEQ ID NO: 804334 - DNA, 25 bp, Homo sapien
ctgcagagcagatggaaggggagac

SEQ ID NO: 804335 - DNA, 25 bp, Homo sapien
tcctgcgacgtttgcgatgtcggga

SEQ ID NO: 804336 - DNA, 25 bp, Homo sapien
gcctccgacttgctggaagtcctgc

SEQ ID NO: 804337 - DNA, 25 bp, Homo sapien
gctggaagtcctgcgacgtttgcga

SEQ ID NO: 804338 - DNA, 25 bp, Homo sapien
ccgacttgctggaagtcctgcgacg

SEQ ID NO: 804339 - DNA, 25 bp, Homo sapien
ttttgaagcctgctgcaggcagtgg

SEQ ID NO: 804340 - DNA, 25 bp, Homo sapien
tggtggtggtggtggcggcctcccc

SEQ ID NO: 804341 - DNA, 25 bp, Homo sapien
cttgcgctgttgctttttgaagcct

SEQ ID NO: 804342 - DNA, 25 bp, Homo sapien
tggtggtggtggcggcctccccaac

SEQ ID NO: 804343 - DNA, 25 bp, Homo sapien
tatttgcaataattcccatactgga

SEQ ID NO: 804344 - DNA, 25 bp, Homo sapien
ggaaggattgcggtacccatagtat

SEQ ID NO: 804345 - DNA, 25 bp, Homo sapien
tcagggtcagatggcccacattgca

SEQ ID NO: 804346 - DNA, 25 bp, Homo sapien
actcaggcttcaacacccgaaggcg

SEQ ID NO: 804347 - DNA, 25 bp, Homo sapien
aagcagctcctctttcgaacggtgg

SEQ ID NO: 804348 - DNA, 25 bp, Homo sapien
tgatgtgtccgctccatccaagggc

SEQ ID NO: 804349 - DNA, 25 bp, Homo sapien
gagacgcagctcctcggaaaggtag

SEQ ID NO: 804350 - DNA, 25 bp, Homo sapien
gatgagccgggaatcgatatccagg

SEQ ID NO: 804351 - DNA, 25 bp, Homo sapien
catactcaggtgtttgggcctccac

SEQ ID NO: 804352 - DNA, 25 bp, Homo sapien
gatccggcgaaacatgcgcttcagg

SEQ ID NO: 804353 - DNA, 25 bp, Homo sapien
ttcagatgcacccacttggtgaggc

SEQ ID NO: 804354 - DNA, 25 bp, Homo sapien
tcttgccatacgacgaccagggttg

SEQ ID NO: 804355 - DNA, 25 bp, Homo sapien
gcttcaattggattcggtagtagtt

SEQ ID NO: 804356 - DNA, 25 bp, Homo sapien
gctctggcttcaattggattcggta

SEQ ID NO: 804357 - DNA, 25 bp, Homo sapien
tgtggccacaagctcatagctggag

SEQ ID NO: 804358 - DNA, 25 bp, Homo sapien
gccacaagctcatagctggagaagc

SEQ ID NO: 804359 - DNA, 25 bp, Homo sapien
aacaggtacacaggacgctggaagc

SEQ ID NO: 804360 - DNA, 25 bp, Homo sapien
cttgtggaacaggtacacaggacgc

SEQ ID NO: 804361 - DNA, 25 bp, Homo sapien
tagtggctgggggatcgggccttgt

SEQ ID NO: 804362 - DNA, 25 bp, Homo sapien
gatcgggccttgtggaacaggtaca

SEQ ID NO: 804363 - DNA, 25 bp, Homo sapien
ggcagcgacggaagaaaagctttct

SEQ ID NO: 804364 - DNA, 25 bp, Homo sapien
aaggattttcacagtacctgcgtgc

SEQ ID NO: 804365 - DNA, 25 bp, Homo sapien
gacaagagctaggtacaatggccga

SEQ ID NO: 804366 - DNA, 25 bp, Homo sapien
caggtccttatgagcagcgagggca

SEQ ID NO: 804367 - DNA, 25 bp, Homo sapien
atccctggagggctagttcgtattt

SEQ ID NO: 804368 - DNA, 25 bp, Homo sapien
aggcgatgggaagcgtagaccccaa

SEQ ID NO: 804369 - DNA, 25 bp, Homo sapien
cttcagaggacaccttcctcatgca

SEQ ID NO: 804370 - DNA, 25 bp, Homo sapien
tcatgcaccggacactgaggcgatg

SEQ ID NO: 804371 - DNA, 25 bp, Homo sapien
ccgcgctcagggagaaattggctct

SEQ ID NO: 804372 - DNA, 25 bp, Homo sapien
gaacaggttctgaatgccgcgctca

SEQ ID NO: 804373 - DNA, 25 bp, Homo sapien
tctcagggctgaacgtgccgcgctc

SEQ ID NO: 804374 - DNA, 25 bp, Homo sapien
tgagaaagtcgttccagatccgctg

SEQ ID NO: 804375 - DNA, 25 bp, Homo sapien
ccaggtccgcttccgcctgacgccg

SEQ ID NO: 804376 - DNA, 25 bp, Homo sapien
gccactttgatgctgcgaaggccgt

SEQ ID NO: 804377 - DNA, 25 bp, Homo sapien
ggtgcggtccgagccgcagcctgcg

SEQ ID NO: 804378 - DNA, 25 bp, Homo sapien
tgacgccgccctccccggtgcggtc

SEQ ID NO: 804379 - DNA, 25 bp, Homo sapien
gttggagcgtctgcgacccccgcat

SEQ ID NO: 804380 - DNA, 25 bp, Homo sapien
tgtgtcccctgaccgttggagcgtc

SEQ ID NO: 804381 - DNA, 25 bp, Homo sapien
tcccctgaccgttggagcgtctgcg

SEQ ID NO: 804382 - DNA, 25 bp, Homo sapien
tggagcgtctgcgacccccgcatcc

SEQ ID NO: 804383 - DNA, 25 bp, Homo sapien
gaccccccagcagtagacggcttgg

SEQ ID NO: 804384 - DNA, 25 bp, Homo sapien
ggctgcccggccttgcgtcagccgc

SEQ ID NO: 804385 - DNA, 25 bp, Homo sapien
cccctcttcctatgcagctttaatg

SEQ ID NO: 804386 - DNA, 25 bp, Homo sapien
tgcagctttaatgtccccgtgtccc

SEQ ID NO: 804387 - DNA, 25 bp, Homo sapien
cacccagcgtcggtccggggccgag

SEQ ID NO: 804388 - DNA, 25 bp, Homo sapien
cggcgcgccccgggtccgcacccag

SEQ ID NO: 804389 - DNA, 25 bp, Homo sapien
cgggtccgcacccagcgtcggtccg

SEQ ID NO: 804390 - DNA, 25 bp, Homo sapien
tccgcacccagcgtcggtccggggc

SEQ ID NO: 804391 - DNA, 25 bp, Homo sapien
aggacggaacgggagcggccgtgcg

SEQ ID NO: 804392 - DNA, 25 bp, Homo sapien
cggtcggtgctgagttcggtctccc

SEQ ID NO: 804393 - DNA, 25 bp, Homo sapien
ggcgccagcccgtcgcggtctttgg

SEQ ID NO: 804394 - DNA, 25 bp, Homo sapien
gtcgcggtctttgggcgtccgctcc

SEQ ID NO: 804395 - DNA, 25 bp, Homo sapien
cagaaaacccaacacagcttcgagg

SEQ ID NO: 804396 - DNA, 25 bp, Homo sapien
catgactcgggtcctcagagaggaa

SEQ ID NO: 804397 - DNA, 25 bp, Homo sapien
gaagagacatgactcgggtcctcag

SEQ ID NO: 804398 - DNA, 25 bp, Homo sapien
gaaaacggagaagagacatgactcg

SEQ ID NO: 804399 - DNA, 25 bp, Homo sapien
tggggggccctgctcagtgccacca

SEQ ID NO: 804400 - DNA, 25 bp, Homo sapien
gctggggggccctgctcagtgccac

SEQ ID NO: 804401 - DNA, 25 bp, Homo sapien
gccctgctcagtgccaccaggcccg

SEQ ID NO: 804402 - DNA, 25 bp, Homo sapien
gggccctgctcagtgccaccaggcc

SEQ ID NO: 804403 - DNA, 25 bp, Homo sapien
cactccagcttggtttttcggtaga

SEQ ID NO: 804404 - DNA, 25 bp, Homo sapien
cagcttggtttttcggtagaggagg

SEQ ID NO: 804405 - DNA, 25 bp, Homo sapien
actccagcttggtttttcggtagag

SEQ ID NO: 804406 - DNA, 25 bp, Homo sapien
tccagcttggtttttcggtagagga

SEQ ID NO: 804407 - DNA, 25 bp, Homo sapien
agcgaggcgatgtcccgcacgcgga

SEQ ID NO: 804408 - DNA, 25 bp, Homo sapien
agggagcgccgcagcgaggcgatgt

SEQ ID NO: 804409 - DNA, 25 bp, Homo sapien
catgaaacccatcctgagggagcgc

SEQ ID NO: 804410 - DNA, 25 bp, Homo sapien
ggaggcgggcatcgtcatgaaaccc

SEQ ID NO: 804411 - DNA, 25 bp, Homo sapien
cttccggctggactctcggccctct

SEQ ID NO: 804412 - DNA, 25 bp, Homo sapien
gctggactctcggccctctggggtt

SEQ ID NO: 804413 - DNA, 25 bp, Homo sapien
tccggctggactctcggccctctgg

SEQ ID NO: 804414 - DNA, 25 bp, Homo sapien
actctcggccctctggggttggctt

SEQ ID NO: 804415 - DNA, 25 bp, Homo sapien
gactcatcgaaggagacagagagct

SEQ ID NO: 804416 - DNA, 25 bp, Homo sapien
tcaatgtacacaggctcttcctggg

SEQ ID NO: 804417 - DNA, 25 bp, Homo sapien
gagctgggtgttagggcttcgcctg

SEQ ID NO: 804418 - DNA, 25 bp, Homo sapien
tcgggaccccctagtgaggcgctga

SEQ ID NO: 804419 - DNA, 25 bp, Homo sapien
tcatctcttcatagatggcctcact

SEQ ID NO: 804420 - DNA, 25 bp, Homo sapien
cggaagggcgtgaggctgttgtggc

SEQ ID NO: 804421 - DNA, 25 bp, Homo sapien
gagtggtcttggtgggcgtcccgtc

SEQ ID NO: 804422 - DNA, 25 bp, Homo sapien
ttgccgtcaatggtggagggccatt

SEQ ID NO: 804423 - DNA, 25 bp, Homo sapien
ggcagaggacaggtagccttgagac

SEQ ID NO: 804424 - DNA, 25 bp, Homo sapien
tccttggagtggcagaggacaggta

SEQ ID NO: 804425 - DNA, 25 bp, Homo sapien
gagtggcagaggacaggtagccttg

SEQ ID NO: 804426 - DNA, 25 bp, Homo sapien
tggagccggctggctccttggagtg

SEQ ID NO: 804427 - DNA, 25 bp, Homo sapien
ggaggcgtctcccgctcccgtgcag

SEQ ID NO: 804428 - DNA, 25 bp, Homo sapien
gcgtctcccgctcccgtgcaggcac

SEQ ID NO: 804429 - DNA, 25 bp, Homo sapien
aggcgtctcccgctcccgtgcaggc

SEQ ID NO: 804430 - DNA, 25 bp, Homo sapien
gggaggcgtctcccgctcccgtgca

SEQ ID NO: 804431 - DNA, 25 bp, Homo sapien
ccccgccgccttagggcagatcatg

SEQ ID NO: 804432 - DNA, 25 bp, Homo sapien
cgccttagggcagatcatgctgtgg

SEQ ID NO: 804433 - DNA, 25 bp, Homo sapien
ccgccgccttagggcagatcatgct

SEQ ID NO: 804434 - DNA, 25 bp, Homo sapien
gccgccttagggcagatcatgctgt

SEQ ID NO: 804435 - DNA, 25 bp, Homo sapien
accttgaccgccgagtacaccatgg

SEQ ID NO: 804436 - DNA, 25 bp, Homo sapien
gcatcccatggaggaccgagatctc

SEQ ID NO: 804437 - DNA, 25 bp, Homo sapien
tgagctggtacacagcatcccatgg

SEQ ID NO: 804438 - DNA, 25 bp, Homo sapien
gcaggacagagtgcgtggtcacctt

SEQ ID NO: 804439 - DNA, 25 bp, Homo sapien
ctctcataggcagggggtctcttga

SEQ ID NO: 804440 - DNA, 25 bp, Homo sapien
tgtggctgggtaggtccacagcggg

SEQ ID NO: 804441 - DNA, 25 bp, Homo sapien
tgctgtggctgggtaggtccacagc

SEQ ID NO: 804442 - DNA, 25 bp, Homo sapien
ttgaggctctcataggcagggggtc

SEQ ID NO: 804443 - DNA, 25 bp, Homo sapien
agcctgccccaaatgtcgcggcgcc

SEQ ID NO: 804444 - DNA, 25 bp, Homo sapien
aggagatgctggcaaaagcaccccc

SEQ ID NO: 804445 - DNA, 25 bp, Homo sapien
ccccatcggtcccttgctcctgcag

SEQ ID NO: 804446 - DNA, 25 bp, Homo sapien
ctgcgctggcgatgacgtgggcaca

SEQ ID NO: 804447 - DNA, 25 bp, Homo sapien
tccatggtggatcctggccagcagt

SEQ ID NO: 804448 - DNA, 25 bp, Homo sapien
gtcctcacgctccaccttgcctgga

SEQ ID NO: 804449 - DNA, 25 bp, Homo sapien
gcttctcactgggatccccgatgtc

SEQ ID NO: 804450 - DNA, 25 bp, Homo sapien
ccagggcccctgtcctcacgctcca

SEQ ID NO: 804451 - DNA, 25 bp, Homo sapien
ccagccccgctgtgcacaggtgtgt

SEQ ID NO: 804452 - DNA, 25 bp, Homo sapien
gagaggaagtcaggacaggtgcagc

SEQ ID NO: 804453 - DNA, 25 bp, Homo sapien
gatgtggtatgaggatttagggccc

SEQ ID NO: 804454 - DNA, 25 bp, Homo sapien
tgcccttgaatggtccaggctgccc

SEQ ID NO: 804455 - DNA, 25 bp, Homo sapien
tgccggactccggaggtggaggcgg

SEQ ID NO: 804456 - DNA, 25 bp, Homo sapien
gggtgtgtggagcacgacctgccgg

SEQ ID NO: 804457 - DNA, 25 bp, Homo sapien
cagggccggggtgtgtggagcacga

SEQ ID NO: 804458 - DNA, 25 bp, Homo sapien
ggagcacgacctgccggactccgga

SEQ ID NO: 804459 - DNA, 25 bp, Homo sapien
gccttctccacctgctccttcacaa

SEQ ID NO: 804460 - DNA, 25 bp, Homo sapien
tctccacctgctccttcacaaataa

SEQ ID NO: 804461 - DNA, 25 bp, Homo sapien
gcatattcaagccttctccacctgc

SEQ ID NO: 804462 - DNA, 25 bp, Homo sapien
ttctccacctgctccttcacaaata

SEQ ID NO: 804463 - DNA, 25 bp, Homo sapien
ttacgggtgcctgccccaatgtcca

SEQ ID NO: 804464 - DNA, 25 bp, Homo sapien
gggtgcctgccccaatgtccagcta

SEQ ID NO: 804465 - DNA, 25 bp, Homo sapien
ctgccccaatgtccagctaatttct

SEQ ID NO: 804466 - DNA, 25 bp, Homo sapien
ggattacgggtgcctgccccaatgt

SEQ ID NO: 804467 - DNA, 25 bp, Homo sapien
tggggcggcaggggcagaggcagcg

SEQ ID NO: 804468 - DNA, 25 bp, Homo sapien
ggggcagaggcagcggcagcgcggg

SEQ ID NO: 804469 - DNA, 25 bp, Homo sapien
gggcggcaggggcagaggcagcggc

SEQ ID NO: 804470 - DNA, 25 bp, Homo sapien
ggcagaggcagcggcagcgcggggt

SEQ ID NO: 804471 - DNA, 25 bp, Homo sapien
tcagatggcggtgtcccagaggacc

SEQ ID NO: 804472 - DNA, 25 bp, Homo sapien
tgcacacgcagcgcttgcgctcgat

SEQ ID NO: 804473 - DNA, 25 bp, Homo sapien
agcagcttcccgtcacgctcgcggg

SEQ ID NO: 804474 - DNA, 25 bp, Homo sapien
ggtggcgcgccttgatctccttgca

SEQ ID NO: 804475 - DNA, 25 bp, Homo sapien
tgtacaacgcccagcgggaagaaca

SEQ ID NO: 804476 - DNA, 25 bp, Homo sapien
tcaatgtctctcaaggcgaggctcc

SEQ ID NO: 804477 - DNA, 25 bp, Homo sapien
cagaatcgccctccagactgaaata

SEQ ID NO: 804478 - DNA, 25 bp, Homo sapien
ccaactcccggctctctagaaaaga

SEQ ID NO: 804479 - DNA, 25 bp, Homo sapien
gaaaatctaagaatttgaggttggc

SEQ ID NO: 804480 - DNA, 25 bp, Homo sapien
cataaggacataggtgggctggaac

SEQ ID NO: 804481 - DNA, 25 bp, Homo sapien
ttcatctttcatggcccgcatagcc

SEQ ID NO: 804482 - DNA, 25 bp, Homo sapien
taggtgggctggaactgaaaatcta

SEQ ID NO: 804483 - DNA, 25 bp, Homo sapien
cgcctggcaaccgccccatctgaga

SEQ ID NO: 804484 - DNA, 25 bp, Homo sapien
ctccgcctggcaaccgccccatctg

SEQ ID NO: 804485 - DNA, 25 bp, Homo sapien
gaccctccgcctggcaaccgcccca

SEQ ID NO: 804486 - DNA, 25 bp, Homo sapien
agtgaggagaccctccgcctggcaa

SEQ ID NO: 804487 - DNA, 25 bp, Homo sapien
ctgacagaagctcgggagcgggcgg

SEQ ID NO: 804488 - DNA, 25 bp, Homo sapien
tccctccccgctagtcagcaatcac

SEQ ID NO: 804489 - DNA, 25 bp, Homo sapien
agcaatcaccccttcaaccactgcc

SEQ ID NO: 804490 - DNA, 25 bp, Homo sapien
gcacgcccggctcccctgacagaag

SEQ ID NO: 804491 - DNA, 25 bp, Homo sapien
cgggcccttcttcgccgccatcacc

SEQ ID NO: 804492 - DNA, 25 bp, Homo sapien
cgcctccgccttgcccccgctgacc

SEQ ID NO: 804493 - DNA, 25 bp, Homo sapien
tcccgcacccgacggcaccacacct

SEQ ID NO: 804494 - DNA, 25 bp, Homo sapien
gacggcaccacacctccgaggccgc

SEQ ID NO: 804495 - DNA, 25 bp, Homo sapien
gcgcactcgaagcagtggcggttcc

SEQ ID NO: 804496 - DNA, 25 bp, Homo sapien
gtgatatccacgtaggtgaccccgc

SEQ ID NO: 804497 - DNA, 25 bp, Homo sapien
aggccggagcaggtggtgcacacga

SEQ ID NO: 804498 - DNA, 25 bp, Homo sapien
aagctgcccacggtgatatccacgt

SEQ ID NO: 804499 - DNA, 25 bp, Homo sapien
tttccacgggattgcaggaatacta

SEQ ID NO: 804500 - DNA, 25 bp, Homo sapien
tacttcaggctcagtgaaagttgtc

SEQ ID NO: 804501 - DNA, 25 bp, Homo sapien
aaagttgtcatggagattgacttga

SEQ ID NO: 804502 - DNA, 25 bp, Homo sapien
tgcaggaatactacttcaggctcag

SEQ ID NO: 804503 - DNA, 25 bp, Homo sapien
gataggtgaccttctcaccactcca

SEQ ID NO: 804504 - DNA, 25 bp, Homo sapien
ttctcaccactccatcggtggcagc

SEQ ID NO: 804505 - DNA, 25 bp, Homo sapien
ctgcagataggtgaccttctcacca

SEQ ID NO: 804506 - DNA, 25 bp, Homo sapien
cagataggtgaccttctcaccactc

SEQ ID NO: 804507 - DNA, 25 bp, Homo sapien
tctgaggatccctggaatctggtac

SEQ ID NO: 804508 - DNA, 25 bp, Homo sapien
taaagatgtccgagcatcaaacaga

SEQ ID NO: 804509 - DNA, 25 bp, Homo sapien
aatctggtactaaagatgtccgagc

SEQ ID NO: 804510 - DNA, 25 bp, Homo sapien
tgtccgagcatcaaacagacccaac

SEQ ID NO: 804511 - DNA, 25 bp, Homo sapien
caactgagagagacggtgcaggatc

SEQ ID NO: 804512 - DNA, 25 bp, Homo sapien
cactgcctttggtataagtgggccc

SEQ ID NO: 804513 - DNA, 25 bp, Homo sapien
aagtgggccccttgacttggtctgg

SEQ ID NO: 804514 - DNA, 25 bp, Homo sapien
cacccagaagtgtccgaaggggctt

SEQ ID NO: 804515 - DNA, 25 bp, Homo sapien
cacatgagccaaggtaaccctgaga

SEQ ID NO: 804516 - DNA, 25 bp, Homo sapien
gagatatacaggaatactgcccaat

SEQ ID NO: 804517 - DNA, 25 bp, Homo sapien
aaccttcccaggtattggacaccat

SEQ ID NO: 804518 - DNA, 25 bp, Homo sapien
tacaggttaacagcagagccgagac

SEQ ID NO: 804519 - DNA, 25 bp, Homo sapien
gatgtccgagcgtgagactgactga

SEQ ID NO: 804520 - DNA, 25 bp, Homo sapien
tgggatgtccgagcgtgagactgac

SEQ ID NO: 804521 - DNA, 25 bp, Homo sapien
ctgggatgtccgagcgtgagactga

SEQ ID NO: 804522 - DNA, 25 bp, Homo sapien
tgtccgagcgtgagactgactgacg

SEQ ID NO: 804523 - DNA, 25 bp, Homo sapien
cagcaggtcagtactggcttttttg

SEQ ID NO: 804524 - DNA, 25 bp, Homo sapien
gggtctccaccgatgtcagccagca

SEQ ID NO: 804525 - DNA, 25 bp, Homo sapien
gcaggtcagtactggcttttttgac

SEQ ID NO: 804526 - DNA, 25 bp, Homo sapien
agccagcaggtcagtactggctttt

SEQ ID NO: 804527 - DNA, 25 bp, Homo sapien
cataatcctggctgtacttatttga

SEQ ID NO: 804528 - DNA, 25 bp, Homo sapien
gggaaaacagattctatgctgctga

SEQ ID NO: 804529 - DNA, 25 bp, Homo sapien
gaaccctctactggctattgctgat

SEQ ID NO: 804530 - DNA, 25 bp, Homo sapien
aaggaagtgctaggagccctcaact

SEQ ID NO: 804531 - DNA, 25 bp, Homo sapien
agttggcaaagcctccttgggaagg

SEQ ID NO: 804532 - DNA, 25 bp, Homo sapien
aaagcctccttgggaaggtgtctgg

SEQ ID NO: 804533 - DNA, 25 bp, Homo sapien
tcaaagttggcaaagcctccttggg

SEQ ID NO: 804534 - DNA, 25 bp, Homo sapien
ttggcaaagcctccttgggaaggtg

SEQ ID NO: 804535 - DNA, 25 bp, Homo sapien
gcctggaacgaggcttgaccagctg

SEQ ID NO: 804536 - DNA, 25 bp, Homo sapien
ctggaacgaggcttgaccagctgga

SEQ ID NO: 804537 - DNA, 25 bp, Homo sapien
aagagctggggccactgctaaaggc

SEQ ID NO: 804538 - DNA, 25 bp, Homo sapien
cttccaaacacagaagagctggggc

SEQ ID NO: 804539 - DNA, 25 bp, Homo sapien
gaccctttgggacagcgtactatgc

SEQ ID NO: 804540 - DNA, 25 bp, Homo sapien
cgtactatgcagacaagagcacctt

SEQ ID NO: 804541 - DNA, 25 bp, Homo sapien
caacatagagtttacaggcctttgg

SEQ ID NO: 804542 - DNA, 25 bp, Homo sapien
catgaacaaatggacacggttggaa

SEQ ID NO: 804543 - DNA, 25 bp, Homo sapien
taactttcagttagcatccgactgg

SEQ ID NO: 804544 - DNA, 25 bp, Homo sapien
tgtaactttcagttagcatccgact

SEQ ID NO: 804545 - DNA, 25 bp, Homo sapien
gctgtaactttcagttagcatccga

SEQ ID NO: 804546 - DNA, 25 bp, Homo sapien
caaagctgtaactttcagttagcat

SEQ ID NO: 804547 - DNA, 25 bp, Homo sapien
tccatctgtttcatacctttaagct

SEQ ID NO: 804548 - DNA, 25 bp, Homo sapien
tactttatggatactaatttccatc

SEQ ID NO: 804549 - DNA, 25 bp, Homo sapien
gaatgtgacctatggccaggcatag

SEQ ID NO: 804550 - DNA, 25 bp, Homo sapien
ttttatcatacagaatgtgacctat

SEQ ID NO: 804551 - DNA, 25 bp, Homo sapien
cacctgcatgatcatggtgtagtgg

SEQ ID NO: 804552 - DNA, 25 bp, Homo sapien
agcggttctgccaattatcagcatt

SEQ ID NO: 804553 - DNA, 25 bp, Homo sapien
ctgcatgatcatggtgtagtgggaa

SEQ ID NO: 804554 - DNA, 25 bp, Homo sapien
tagtgggaagcggttctgccaatta

SEQ ID NO: 804555 - DNA, 25 bp, Homo sapien
catttatcagaacatggcagggagg

SEQ ID NO: 804556 - DNA, 25 bp, Homo sapien
aaatcttacaaaacagctgagggcc

SEQ ID NO: 804557 - DNA, 25 bp, Homo sapien
ttgggaccctatcgaccacactggg

SEQ ID NO: 804558 - DNA, 25 bp, Homo sapien
ctttattgacaggacgcggcagttc

SEQ ID NO: 804559 - DNA, 25 bp, Homo sapien
cagttgtggaaaatacaacagggag

SEQ ID NO: 804560 - DNA, 25 bp, Homo sapien
gttgtggaaaatacaacagggagag

SEQ ID NO: 804561 - DNA, 25 bp, Homo sapien
ctgggcagttgtggaaaatacaaca

SEQ ID NO: 804562 - DNA, 25 bp, Homo sapien
ggcagttgtggaaaatacaacaggg

SEQ ID NO: 804563 - DNA, 25 bp, Homo sapien
caccaaatggagtcccctggctgct

SEQ ID NO: 804564 - DNA, 25 bp, Homo sapien
tgtttggctgactggcgggtgccag

SEQ ID NO: 804565 - DNA, 25 bp, Homo sapien
ctgcgaggctgtttggctgactggc

SEQ ID NO: 804566 - DNA, 25 bp, Homo sapien
gggagtggcaccaaatggagtcccc

SEQ ID NO: 804567 - DNA, 25 bp, Homo sapien
ctgctaggaacacctgcagcgggca

SEQ ID NO: 804568 - DNA, 25 bp, Homo sapien
cctgcagcgggcaccccgggtccca

SEQ ID NO: 804569 - DNA, 25 bp, Homo sapien
ggaacacctgcagcgggcaccccgg

SEQ ID NO: 804570 - DNA, 25 bp, Homo sapien
gctaggaacacctgcagcgggcacc

SEQ ID NO: 804571 - DNA, 25 bp, Homo sapien
cgccgccgcccatcgtgacagactg

SEQ ID NO: 804572 - DNA, 25 bp, Homo sapien
cgcccatcgtgacagactggagcgg

SEQ ID NO: 804573 - DNA, 25 bp, Homo sapien
tcgtgacagactggagcggggggac

SEQ ID NO: 804574 - DNA, 25 bp, Homo sapien
gacctggccagccatcccgaagagg

SEQ ID NO: 804575 - DNA, 25 bp, Homo sapien
gttggtggaaggcagcggggactgg

SEQ ID NO: 804576 - DNA, 25 bp, Homo sapien
ccaagccattgggctggaacgggtt

SEQ ID NO: 804577 - DNA, 25 bp, Homo sapien
ccattgggctggaacgggttggtgg

SEQ ID NO: 804578 - DNA, 25 bp, Homo sapien
ctggcgccaagccattgggctggaa

SEQ ID NO: 804579 - DNA, 25 bp, Homo sapien
aggcccagcactgctcatcccaaag

SEQ ID NO: 804580 - DNA, 25 bp, Homo sapien
cagcactgctcatcccaaagccggg

SEQ ID NO: 804581 - DNA, 25 bp, Homo sapien
cccagcactgctcatcccaaagccg

SEQ ID NO: 804582 - DNA, 25 bp, Homo sapien
agcactgctcatcccaaagccgggc

SEQ ID NO: 804583 - DNA, 25 bp, Homo sapien
ctgctgctgaacaagcggggtctgc

SEQ ID NO: 804584 - DNA, 25 bp, Homo sapien
tgcggggggaacagcggtgctggga

SEQ ID NO: 804585 - DNA, 25 bp, Homo sapien
ggtctgcggggggaacagcggtgct

SEQ ID NO: 804586 - DNA, 25 bp, Homo sapien
gctgctgaacaagcggggtctgcgg

SEQ ID NO: 804587 - DNA, 25 bp, Homo sapien
ctgatcctaagtccccgaaggaaga

SEQ ID NO: 804588 - DNA, 25 bp, Homo sapien
tggctgatcctaagtccccgaagga

SEQ ID NO: 804589 - DNA, 25 bp, Homo sapien
cttggctgatcctaagtccccgaag

SEQ ID NO: 804590 - DNA, 25 bp, Homo sapien
caacttggctgatcctaagtccccg

SEQ ID NO: 804591 - DNA, 25 bp, Homo sapien
gttggaggtttggaggcgaatgggc

SEQ ID NO: 804592 - DNA, 25 bp, Homo sapien
gtttggaggcgaatgggcttgatga

SEQ ID NO: 804593 - DNA, 25 bp, Homo sapien
tggaggtttggaggcgaatgggctt

SEQ ID NO: 804594 - DNA, 25 bp, Homo sapien
gtggttggaggtttggaggcgaatg

SEQ ID NO: 804595 - DNA, 25 bp, Homo sapien
ggccccagaaggcagggaagaggcc

SEQ ID NO: 804596 - DNA, 25 bp, Homo sapien
agcagaggggccccagaaggcaggg

SEQ ID NO: 804597 - DNA, 25 bp, Homo sapien
cagaggggccccagaaggcagggaa

SEQ ID NO: 804598 - DNA, 25 bp, Homo sapien
cagaaggcagggaagaggcccccca

SEQ ID NO: 804599 - DNA, 25 bp, Homo sapien
ggcccatagaaatgcccacaggcaa

SEQ ID NO: 804600 - DNA, 25 bp, Homo sapien
tccccaaggcccatagaaatgccca

SEQ ID NO: 804601 - DNA, 25 bp, Homo sapien
tagaaatgcccacaggcaagtggtc

SEQ ID NO: 804602 - DNA, 25 bp, Homo sapien
caaggcccatagaaatgcccacagg

SEQ ID NO: 804603 - DNA, 25 bp, Homo sapien
ctgtaggccccaagcaaagcattag

SEQ ID NO: 804604 - DNA, 25 bp, Homo sapien
acaggggactgatcatttgaaaaaa

SEQ ID NO: 804605 - DNA, 25 bp, Homo sapien
ccacaggggactgatcatttgaaaa

SEQ ID NO: 804606 - DNA, 25 bp, Homo sapien
cacaggggactgatcatttgaaaaa

SEQ ID NO: 804607 - DNA, 25 bp, Homo sapien
tccatgaggagcacagcgctggcga

SEQ ID NO: 804608 - DNA, 25 bp, Homo sapien
cacagcgctggcgagctaggcccag

SEQ ID NO: 804609 - DNA, 25 bp, Homo sapien
tcccgtccatgaggagcacagcgct

SEQ ID NO: 804610 - DNA, 25 bp, Homo sapien
gctggcgagctaggcccagggaaga

SEQ ID NO: 804611 - DNA, 25 bp, Homo sapien
tcttgttcagacagggacgggctct

SEQ ID NO: 804612 - DNA, 25 bp, Homo sapien
gcagcattatcactggcccaggcag

SEQ ID NO: 804613 - DNA, 25 bp, Homo sapien
tgttgtcacaacatccccaggtgga

SEQ ID NO: 804614 - DNA, 25 bp, Homo sapien
ggtaaaccgctcatcctgggcgctg

SEQ ID NO: 804615 - DNA, 25 bp, Homo sapien
tacaccataacagattccagcttcc

SEQ ID NO: 804616 - DNA, 25 bp, Homo sapien
cctccctccggctctaagcagaaag

SEQ ID NO: 804617 - DNA, 25 bp, Homo sapien
gcctggacccagatagtgaggagat

SEQ ID NO: 804618 - DNA, 25 bp, Homo sapien
aacctcggcgctcctggcattaagg

SEQ ID NO: 804619 - DNA, 25 bp, Homo sapien
agccagcaggctggagtccttgtgg

SEQ ID NO: 804620 - DNA, 25 bp, Homo sapien
gccagcaggctggagtccttgtggg

SEQ ID NO: 804621 - DNA, 25 bp, Homo sapien
cagccagcaggctggagtccttgtg

SEQ ID NO: 804622 - DNA, 25 bp, Homo sapien
ctggcgttaacttcttactgctcat

SEQ ID NO: 804623 - DNA, 25 bp, Homo sapien
aacttcttactgctcatccagctct

SEQ ID NO: 804624 - DNA, 25 bp, Homo sapien
ggcgttaacttcttactgctcatcc

SEQ ID NO: 804625 - DNA, 25 bp, Homo sapien
gttaacttcttactgctcatccagc

SEQ ID NO: 804626 - DNA, 25 bp, Homo sapien
gagcagctcctagtgtcagcctgtg

SEQ ID NO: 804627 - DNA, 25 bp, Homo sapien
ggtttgaatctgcagctaccaggca

SEQ ID NO: 804628 - DNA, 25 bp, Homo sapien
tgagtcactctagccccgtggtgtg

SEQ ID NO: 804629 - DNA, 25 bp, Homo sapien
tccattctttgctactctccaggag

SEQ ID NO: 804630 - DNA, 25 bp, Homo sapien
tgctagaggactgctgtctgcagag

SEQ ID NO: 804631 - DNA, 25 bp, Homo sapien
tggagacacttggtggctgactcct

SEQ ID NO: 804632 - DNA, 25 bp, Homo sapien
gggccatgctagaggactgctgtct

SEQ ID NO: 804633 - DNA, 25 bp, Homo sapien
gtggagacacttggtggctgactcc

SEQ ID NO: 804634 - DNA, 25 bp, Homo sapien
tatttcagccggtagccctggtaac

SEQ ID NO: 804635 - DNA, 25 bp, Homo sapien
aatgccaggtgattggacccactga

SEQ ID NO: 804636 - DNA, 25 bp, Homo sapien
gacaaacctggagtcacgcaactgg

SEQ ID NO: 804637 - DNA, 25 bp, Homo sapien
tggtaacttgagtggctccccaggg

SEQ ID NO: 804638 - DNA, 25 bp, Homo sapien
accctgtgtcactgaaccttgggtg

SEQ ID NO: 804639 - DNA, 25 bp, Homo sapien
aaccaccctgtgtcactgaaccttg

SEQ ID NO: 804640 - DNA, 25 bp, Homo sapien
ccaccctgtgtcactgaaccttggg

SEQ ID NO: 804641 - DNA, 25 bp, Homo sapien
accaccctgtgtcactgaaccttgg

SEQ ID NO: 804642 - DNA, 25 bp, Homo sapien
tccttccccttcccactccccatca

SEQ ID NO: 804643 - DNA, 25 bp, Homo sapien
ctgaggaagatctctttattccttc

SEQ ID NO: 804644 - DNA, 25 bp, Homo sapien
ccccttcccactccccatcaaccag

SEQ ID NO: 804645 - DNA, 25 bp, Homo sapien
gaggaagatctctttattccttccc

SEQ ID NO: 804646 - DNA, 25 bp, Homo sapien
gaggaccctgagatatcacccaagg

SEQ ID NO: 804647 - DNA, 25 bp, Homo sapien
caggtgacacctggtgggaccttag

SEQ ID NO: 804648 - DNA, 25 bp, Homo sapien
gaccctgagatatcacccaaggcaa

SEQ ID NO: 804649 - DNA, 25 bp, Homo sapien
gtgggaccttagaggaccctgagat

SEQ ID NO: 804650 - DNA, 25 bp, Homo sapien
tcaagtggccactgaaggagacctc

SEQ ID NO: 804651 - DNA, 25 bp, Homo sapien
gaccatggacgtgtggacttcctca

SEQ ID NO: 804652 - DNA, 25 bp, Homo sapien
acttcctcatggaggtaccctttgc

SEQ ID NO: 804653 - DNA, 25 bp, Homo sapien
catctctcaggaagaccccttcggg

SEQ ID NO: 804654 - DNA, 25 bp, Homo sapien
ctgcagaagaggcagagacggctgg

SEQ ID NO: 804655 - DNA, 25 bp, Homo sapien
gaagaggcagagacggctgggtctc

SEQ ID NO: 804656 - DNA, 25 bp, Homo sapien
aggcagagacggctgggtctcgtgt

SEQ ID NO: 804657 - DNA, 25 bp, Homo sapien
cagaagaggcagagacggctgggtc

SEQ ID NO: 804658 - DNA, 25 bp, Homo sapien
attcaggggcgaaggcaataaagtg

SEQ ID NO: 804659 - DNA, 25 bp, Homo sapien
ccgcctgcgggcttcattcaggggc

SEQ ID NO: 804660 - DNA, 25 bp, Homo sapien
ccgccgcctgcgggcttcattcagg

SEQ ID NO: 804661 - DNA, 25 bp, Homo sapien
gcctgcgggcttcattcaggggcga

SEQ ID NO: 804662 - DNA, 25 bp, Homo sapien
tcggcacgcgcgaaacttctgctcg

SEQ ID NO: 804663 - DNA, 25 bp, Homo sapien
ttgctggtggtgcacgcacccgcca

SEQ ID NO: 804664 - DNA, 25 bp, Homo sapien
ttctgctcgctctcggaacactcgg

SEQ ID NO: 804665 - DNA, 25 bp, Homo sapien
ggtgctggcgcgcatctgcgcactt

SEQ ID NO: 804666 - DNA, 25 bp, Homo sapien
agacacccattgtccatagccttct

SEQ ID NO: 804667 - DNA, 25 bp, Homo sapien
ccccagaccatacctctgacccacc

SEQ ID NO: 804668 - DNA, 25 bp, Homo sapien
gttctcagggtgctgacctctctct

SEQ ID NO: 804669 - DNA, 25 bp, Homo sapien
tgtggtagccccagcagttctcagg

SEQ ID NO: 804670 - DNA, 25 bp, Homo sapien
tattggtaggtagagccgtccctca

SEQ ID NO: 804671 - DNA, 25 bp, Homo sapien
tcctgctagtggagtgccggtgtcc

SEQ ID NO: 804672 - DNA, 25 bp, Homo sapien
cattgtgattgggtgcagctgcgct

SEQ ID NO: 804673 - DNA, 25 bp, Homo sapien
gaggcaggtccagattcccttcgga

SEQ ID NO: 804674 - DNA, 25 bp, Homo sapien
tccttagcaaagggaccgccttctc

SEQ ID NO: 804675 - DNA, 25 bp, Homo sapien
gcaaagggaccgccttctcgcccat

SEQ ID NO: 804676 - DNA, 25 bp, Homo sapien
ttagcaaagggaccgccttctcgcc

SEQ ID NO: 804677 - DNA, 25 bp, Homo sapien
ccttagcaaagggaccgccttctcg

SEQ ID NO: 804678 - DNA, 25 bp, Homo sapien
cacacagtgtcacagatccgttcat

SEQ ID NO: 804679 - DNA, 25 bp, Homo sapien
cccagcctaggcttgggggacctct

SEQ ID NO: 804680 - DNA, 25 bp, Homo sapien
catgtccccagcctaggcttggggg

SEQ ID NO: 804681 - DNA, 25 bp, Homo sapien
gcctaggcttgggggacctctgagg

SEQ ID NO: 804682 - DNA, 25 bp, Homo sapien
tgtccccagcctaggcttgggggac

SEQ ID NO: 804683 - DNA, 25 bp, Homo sapien
cttggcccccccgttcctgctggct

SEQ ID NO: 804684 - DNA, 25 bp, Homo sapien
tttgcagcttccgtctctggcttcc

SEQ ID NO: 804685 - DNA, 25 bp, Homo sapien
gtgaatttttgcagcttccgtctct

SEQ ID NO: 804686 - DNA, 25 bp, Homo sapien
tttttgcagcttccgtctctggctt

SEQ ID NO: 804687 - DNA, 25 bp, Homo sapien
gaatttttgcagcttccgtctctgg

SEQ ID NO: 804688 - DNA, 25 bp, Homo sapien
aaggggtgcatagggtcccatgagg

SEQ ID NO: 804689 - DNA, 25 bp, Homo sapien
agaaggggtgcatagggtcccatga

SEQ ID NO: 804690 - DNA, 25 bp, Homo sapien
ccaagaaggggtgcatagggtccca

SEQ ID NO: 804691 - DNA, 25 bp, Homo sapien
caagaaggggtgcatagggtcccat

SEQ ID NO: 804692 - DNA, 25 bp, Homo sapien
ctctggggggaacaactggatggaa

SEQ ID NO: 804693 - DNA, 25 bp, Homo sapien
tctcttcaaccccaagctccgagcc

SEQ ID NO: 804694 - DNA, 25 bp, Homo sapien
gaacaactggatggaaatcggattt

SEQ ID NO: 804695 - DNA, 25 bp, Homo sapien
agctccgagccacaagaagggcagc

SEQ ID NO: 804696 - DNA, 25 bp, Homo sapien
cacttcgtggaagtagcggcaggtc

SEQ ID NO: 804697 - DNA, 25 bp, Homo sapien
tctgactgggaggaatgagatgata

SEQ ID NO: 804698 - DNA, 25 bp, Homo sapien
agtctgcgacagatgcgtctccaca

SEQ ID NO: 804699 - DNA, 25 bp, Homo sapien
tccccatcgcacacttcgtggaagt

SEQ ID NO: 804700 - DNA, 25 bp, Homo sapien
gctctcttccagggccggactccag

SEQ ID NO: 804701 - DNA, 25 bp, Homo sapien
agttcagaatggcagctctcttcca

SEQ ID NO: 804702 - DNA, 25 bp, Homo sapien
ttcagaatggcagctctcttccagg

SEQ ID NO: 804703 - DNA, 25 bp, Homo sapien
tctcttccagggccggactccagaa

SEQ ID NO: 804704 - DNA, 25 bp, Homo sapien
gtgagtgtaagaagtacaccctggg

SEQ ID NO: 804705 - DNA, 25 bp, Homo sapien
ctcttttaatctcccagtgagtgta

SEQ ID NO: 804706 - DNA, 25 bp, Homo sapien
tttaatctcccagtgagtgtaagaa

SEQ ID NO: 804707 - DNA, 25 bp, Homo sapien
tctcccagtgagtgtaagaagtaca

SEQ ID NO: 804708 - DNA, 25 bp, Homo sapien
ggtccccacgtagtcaagaatgaag

SEQ ID NO: 804709 - DNA, 25 bp, Homo sapien
cacgctcttgctgagacatcggcgg

SEQ ID NO: 804710 - DNA, 25 bp, Homo sapien
aatgaagacgtgatccttggtgggc

SEQ ID NO: 804711 - DNA, 25 bp, Homo sapien
gacacaacacaacatagcgacaggc

SEQ ID NO: 804712 - DNA, 25 bp, Homo sapien
gatgagggcgtctgggatctagagt

SEQ ID NO: 804713 - DNA, 25 bp, Homo sapien
ggcgtctgggatctagagtttcaaa

SEQ ID NO: 804714 - DNA, 25 bp, Homo sapien
tagagtttcaaaatgggatggggct

SEQ ID NO: 804715 - DNA, 25 bp, Homo sapien
gagggcgtctgggatctagagtttc

SEQ ID NO: 804716 - DNA, 25 bp, Homo sapien
gaggtatttacggtaaactgtgtca

SEQ ID NO: 804717 - DNA, 25 bp, Homo sapien
tgcggctcccgagtggccaagacgt

SEQ ID NO: 804718 - DNA, 25 bp, Homo sapien
ggtaaactgtgtcacaccttgggtc

SEQ ID NO: 804719 - DNA, 25 bp, Homo sapien
cgagtggccaagacgtagaggtatt

SEQ ID NO: 804720 - DNA, 25 bp, Homo sapien
agcagtagagcccgctgggtctcct

SEQ ID NO: 804721 - DNA, 25 bp, Homo sapien
gatagacctcaacacagtcacaggc

SEQ ID NO: 804722 - DNA, 25 bp, Homo sapien
aaggtcattgagtggtggaatgtca

SEQ ID NO: 804723 - DNA, 25 bp, Homo sapien
tgaccaaccagcacgatctgcttga

SEQ ID NO: 804724 - DNA, 25 bp, Homo sapien
taggagcgtggctggtcaagctggg

SEQ ID NO: 804725 - DNA, 25 bp, Homo sapien
tcagggccagctgaaccgtgtagga

SEQ ID NO: 804726 - DNA, 25 bp, Homo sapien
gtctcattcactaccaaagagtaga

SEQ ID NO: 804727 - DNA, 25 bp, Homo sapien
ctctggttggaagtcatgcaggcca

SEQ ID NO: 804728 - DNA, 25 bp, Homo sapien
tgggcacccatttcctagggataag

SEQ ID NO: 804729 - DNA, 25 bp, Homo sapien
ctttgggcacccatttcctagggat

SEQ ID NO: 804730 - DNA, 25 bp, Homo sapien
gcacccatttcctagggataaggcc

SEQ ID NO: 804731 - DNA, 25 bp, Homo sapien
tttgggcacccatttcctagggata

SEQ ID NO: 804732 - DNA, 25 bp, Homo sapien
ctggggggtcaggagccctcagctc

SEQ ID NO: 804733 - DNA, 25 bp, Homo sapien
ggggggtcaggagccctcagctcag

SEQ ID NO: 804734 - DNA, 25 bp, Homo sapien
gggtcaggagccctcagctcagcag

SEQ ID NO: 804735 - DNA, 25 bp, Homo sapien
ggggtcaggagccctcagctcagca

SEQ ID NO: 804736 - DNA, 25 bp, Homo sapien
aaagagatcgcgatacacccctggg

SEQ ID NO: 804737 - DNA, 25 bp, Homo sapien
gtcccaaagagatcgcgatacaccc

SEQ ID NO: 804738 - DNA, 25 bp, Homo sapien
gggtcccaaagagatcgcgatacac

SEQ ID NO: 804739 - DNA, 25 bp, Homo sapien
cacctcaaaatacactcccccctgg

SEQ ID NO: 804740 - DNA, 25 bp, Homo sapien
tgtagccaagagcacagaataggat

SEQ ID NO: 804741 - DNA, 25 bp, Homo sapien
gccaaggtggttgtagccaagagca

SEQ ID NO: 804742 - DNA, 25 bp, Homo sapien
gtggttgtagccaagagcacagaat

SEQ ID NO: 804743 - DNA, 25 bp, Homo sapien
caccaggccaaggtggttgtagcca

SEQ ID NO: 804744 - DNA, 25 bp, Homo sapien
ccgtatctgttatttccttgcatga

SEQ ID NO: 804745 - DNA, 25 bp, Homo sapien
ttgtcccctgttcctagctgcccgt

SEQ ID NO: 804746 - DNA, 25 bp, Homo sapien
cctagctgcccgtatctgttatttc

SEQ ID NO: 804747 - DNA, 25 bp, Homo sapien
tccttgcatgaagattcggccaaat

SEQ ID NO: 804748 - DNA, 25 bp, Homo sapien
cagggagtggttgaggccgcaccac

SEQ ID NO: 804749 - DNA, 25 bp, Homo sapien
gtggttgaggccgcaccacagggtg

SEQ ID NO: 804750 - DNA, 25 bp, Homo sapien
gggagtggttgaggccgcaccacag

SEQ ID NO: 804751 - DNA, 25 bp, Homo sapien
ggttgaggccgcaccacagggtgat

SEQ ID NO: 804752 - DNA, 25 bp, Homo sapien
tgacgaaggaggcactccccttggg

SEQ ID NO: 804753 - DNA, 25 bp, Homo sapien
cttgacttggagcttgacgaaggag

SEQ ID NO: 804754 - DNA, 25 bp, Homo sapien
acttggagcttgacgaaggaggcac

SEQ ID NO: 804755 - DNA, 25 bp, Homo sapien
ggagcttgacgaaggaggcactccc

SEQ ID NO: 804756 - DNA, 25 bp, Homo sapien
aagaagtccttctgtgcggccatca

SEQ ID NO: 804757 - DNA, 25 bp, Homo sapien
ctgtggatctggctgaggtactcct

SEQ ID NO: 804758 - DNA, 25 bp, Homo sapien
cgtgcggtcctgcaacgtttggcaa

SEQ ID NO: 804759 - DNA, 25 bp, Homo sapien
gctggacaggatgtataggcactcc

SEQ ID NO: 804760 - DNA, 25 bp, Homo sapien
taggtctcaggggctgggggcccta

SEQ ID NO: 804761 - DNA, 25 bp, Homo sapien
cacgcatgtgcacaatggtcattgc

SEQ ID NO: 804762 - DNA, 25 bp, Homo sapien
ttctatccatcaaatctcttgtcca

SEQ ID NO: 804763 - DNA, 25 bp, Homo sapien
tcgctgcagccttttattctatcca

SEQ ID NO: 804764 - DNA, 25 bp, Homo sapien
tgaacattcttaccctggttagccg

SEQ ID NO: 804765 - DNA, 25 bp, Homo sapien
gcagcaggataatcagcgccagatg

SEQ ID NO: 804766 - DNA, 25 bp, Homo sapien
cagcagcaggataatcagcgccaga

SEQ ID NO: 804767 - DNA, 25 bp, Homo sapien
agcaggataatcagcgccagatggg

SEQ ID NO: 804768 - DNA, 25 bp, Homo sapien
gcgctggggtcctcaagacagaggc

SEQ ID NO: 804769 - DNA, 25 bp, Homo sapien
tgggcaaaaggcagcagggcgcagg

SEQ ID NO: 804770 - DNA, 25 bp, Homo sapien
atgaggatgaaactccaaggaggga

SEQ ID NO: 804771 - DNA, 25 bp, Homo sapien
caacaggaattcccggaatcctcct

SEQ ID NO: 804772 - DNA, 25 bp, Homo sapien
ctgggggatgaaatggaaaggcctt

SEQ ID NO: 804773 - DNA, 25 bp, Homo sapien
gcctggcaactcgaccatccctcca

SEQ ID NO: 804774 - DNA, 25 bp, Homo sapien
tcacttgccacgtaacctgattccc

SEQ ID NO: 804775 - DNA, 25 bp, Homo sapien
cgttatggtccagatgcactcctta

SEQ ID NO: 804776 - DNA, 25 bp, Homo sapien
tggggaacccctcacttgccacgta

SEQ ID NO: 804777 - DNA, 25 bp, Homo sapien
ggtccagatgcactccttattaggg

SEQ ID NO: 804778 - DNA, 25 bp, Homo sapien
cgaagactcggaatgagagggacac

SEQ ID NO: 804779 - DNA, 25 bp, Homo sapien
gcgcaggccggaaggtcccacaaaa

SEQ ID NO: 804780 - DNA, 25 bp, Homo sapien
aagacctccagagcatcgtagcggc

SEQ ID NO: 804781 - DNA, 25 bp, Homo sapien
aaaagcgtccgagccgctggccgga

SEQ ID NO: 804782 - DNA, 25 bp, Homo sapien
gagggactgaaggggcggttagtga

SEQ ID NO: 804783 - DNA, 25 bp, Homo sapien
agggactgaaggggcggttagtgag

SEQ ID NO: 804784 - DNA, 25 bp, Homo sapien
gatgggtgggtgcgggaggagggga

SEQ ID NO: 804785 - DNA, 25 bp, Homo sapien
atgggtgggtgcgggaggaggggag

SEQ ID NO: 804786 - DNA, 25 bp, Homo sapien
tgggtgggtgcgggaggaggggaga

SEQ ID NO: 804787 - DNA, 25 bp, Homo sapien
agggatgggtgggtgcgggaggagg

SEQ ID NO: 804788 - DNA, 25 bp, Homo sapien
ggtcggtgacccatttccgcctcgc

SEQ ID NO: 804789 - DNA, 25 bp, Homo sapien
cccaggccgcccattccacccgcgg

SEQ ID NO: 804790 - DNA, 25 bp, Homo sapien
cagtaaccccaggccgcccattcca

SEQ ID NO: 804791 - DNA, 25 bp, Homo sapien
ccatttccgcctcgcgcctgggggg

SEQ ID NO: 804792 - DNA, 25 bp, Homo sapien
agagtcccctttcaggctggagagg

SEQ ID NO: 804793 - DNA, 25 bp, Homo sapien
cggagggagcccgattgcggacggg

SEQ ID NO: 804794 - DNA, 25 bp, Homo sapien
tgatgggaccgcaatcgggagccca

SEQ ID NO: 804795 - DNA, 25 bp, Homo sapien
gaggtccccgcctgaaacattgcaa

SEQ ID NO: 804796 - DNA, 25 bp, Homo sapien
ccctcggtcagcttcaggagaactc

SEQ ID NO: 804797 - DNA, 25 bp, Homo sapien
gggcggtggagaccctcggtcagct

SEQ ID NO: 804798 - DNA, 25 bp, Homo sapien
ttcaggagaactctaggctgggagc

SEQ ID NO: 804799 - DNA, 25 bp, Homo sapien
gcaggttaacagagagcggccggga

SEQ ID NO: 804800 - DNA, 25 bp, Homo sapien
agccgccccccgcaaaattggtgct

SEQ ID NO: 804801 - DNA, 25 bp, Homo sapien
aacagctgatgcccggggggtaatc

SEQ ID NO: 804802 - DNA, 25 bp, Homo sapien
tccgggggcgcgatgatgtgccagg

SEQ ID NO: 804803 - DNA, 25 bp, Homo sapien
cagttgggcgtggtcagggttccct

SEQ ID NO: 804804 - DNA, 25 bp, Homo sapien
agcgcaagcgcagtgctcgggacac

SEQ ID NO: 804805 - DNA, 25 bp, Homo sapien
ccgcgtgttataccaggaccctgta

SEQ ID NO: 804806 - DNA, 25 bp, Homo sapien
tggcaaggtcaagtcctggcgcact

SEQ ID NO: 804807 - DNA, 25 bp, Homo sapien
tcacaagtgacaggcccgcgtgtta

SEQ ID NO: 804808 - DNA, 25 bp, Homo sapien
gcgggacacccctgggcgcctgcac

SEQ ID NO: 804809 - DNA, 25 bp, Homo sapien
atctcctactgggtgcctgcagcag

SEQ ID NO: 804810 - DNA, 25 bp, Homo sapien
ctgaaggcgttcacaccacagcacg

SEQ ID NO: 804811 - DNA, 25 bp, Homo sapien
gggactgcgcggcgggacacccctg

SEQ ID NO: 804812 - DNA, 25 bp, Homo sapien
tgaacacgctgaccgagtcatagcg

SEQ ID NO: 804813 - DNA, 25 bp, Homo sapien
agtcgtcgctcacggctccgttgaa

SEQ ID NO: 804814 - DNA, 25 bp, Homo sapien
tcatagcggcagtaggtgtccggct

SEQ ID NO: 804815 - DNA, 25 bp, Homo sapien
aaacttctcgaaggtcagcgcgatg

SEQ ID NO: 804816 - DNA, 25 bp, Homo sapien
ctcccctcgccggtttggagccctg

SEQ ID NO: 804817 - DNA, 25 bp, Homo sapien
gagccctggggttcagatcccgtcc

SEQ ID NO: 804818 - DNA, 25 bp, Homo sapien
ttaacttcgtcccaacttcgcagag

SEQ ID NO: 804819 - DNA, 25 bp, Homo sapien
cgtgcgtgcggtccgccgactctct

SEQ ID NO: 804820 - DNA, 25 bp, Homo sapien
gggaagtgtcagggcgggcgtgcac

SEQ ID NO: 804821 - DNA, 25 bp, Homo sapien
ctgcaggtggccaccgagcattggg

SEQ ID NO: 804822 - DNA, 25 bp, Homo sapien
cattgggggaagtgtcagggcgggc

SEQ ID NO: 804823 - DNA, 25 bp, Homo sapien
cgagcattgggggaagtgtcagggc

SEQ ID NO: 804824 - DNA, 25 bp, Homo sapien
gacactgagatctgagacgaactgg

SEQ ID NO: 804825 - DNA, 25 bp, Homo sapien
tctgagacgaactggacgaggagtt

SEQ ID NO: 804826 - DNA, 25 bp, Homo sapien
ccgcggcagggtcttgtaggaggct

SEQ ID NO: 804827 - DNA, 25 bp, Homo sapien
gttcattcccttcggaggagatgga

SEQ ID NO: 804828 - DNA, 25 bp, Homo sapien
agaagttgctctgcaaggtgcctgt

SEQ ID NO: 804829 - DNA, 25 bp, Homo sapien
aaggctgctggcacagaagttgctc

SEQ ID NO: 804830 - DNA, 25 bp, Homo sapien
cactgctttgggcaggtgggtgcat

SEQ ID NO: 804831 - DNA, 25 bp, Homo sapien
aggtgcctgtccggcggcactgctt

SEQ ID NO: 804832 - DNA, 25 bp, Homo sapien
gaaccatggacttcactgtcgcagt

SEQ ID NO: 804833 - DNA, 25 bp, Homo sapien
agtcctccagttttataagcaccaa

SEQ ID NO: 804834 - DNA, 25 bp, Homo sapien
cacgtaaaacttcagggaggcacca

SEQ ID NO: 804835 - DNA, 25 bp, Homo sapien
taagactgacagtcacggcaaggcc

SEQ ID NO: 804836 - DNA, 25 bp, Homo sapien
gatctggtcctggttgggccggtgg

SEQ ID NO: 804837 - DNA, 25 bp, Homo sapien
ttgggccggtggagaaccacaaagc

SEQ ID NO: 804838 - DNA, 25 bp, Homo sapien
cttaggttggtgaggatctggtcct

SEQ ID NO: 804839 - DNA, 25 bp, Homo sapien
cacaaagctctctggaggaaggacg

SEQ ID NO: 804840 - DNA, 25 bp, Homo sapien
aagaaggcctgagggctaggggccg

SEQ ID NO: 804841 - DNA, 25 bp, Homo sapien
agaaggcctgagggctaggggccgg

SEQ ID NO: 804842 - DNA, 25 bp, Homo sapien
ttaagatttgctgatttcaaaccca

SEQ ID NO: 804843 - DNA, 25 bp, Homo sapien
taagatttgctgatttcaaacccat

SEQ ID NO: 804844 - DNA, 25 bp, Homo sapien
tgcacagggaattaagatttgctga

SEQ ID NO: 804845 - DNA, 25 bp, Homo sapien
atttgcacagggaattaagatttgc

SEQ ID NO: 804846 - DNA, 25 bp, Homo sapien
tgtgctgaaagaccaaacaacgccc

SEQ ID NO: 804847 - DNA, 25 bp, Homo sapien
taactatacgccgattggtgtgctg

SEQ ID NO: 804848 - DNA, 25 bp, Homo sapien
gattccggtgacgtaacagttgtac

SEQ ID NO: 804849 - DNA, 25 bp, Homo sapien
cagttgtactggctcgaactcgagc

SEQ ID NO: 804850 - DNA, 25 bp, Homo sapien
ggtcagattaatgttgccatgttcc

SEQ ID NO: 804851 - DNA, 25 bp, Homo sapien
gattaatgttgccatgttccagaga

SEQ ID NO: 804852 - DNA, 25 bp, Homo sapien
agcttgtggtcagattaatgttgcc

SEQ ID NO: 804853 - DNA, 25 bp, Homo sapien
gccagtcagcttgtggtcagattaa

SEQ ID NO: 804854 - DNA, 25 bp, Homo sapien
gagacctgtgtttgcgtctccggcc

SEQ ID NO: 804855 - DNA, 25 bp, Homo sapien
agacctgtgtttgcgtctccggccc

SEQ ID NO: 804856 - DNA, 25 bp, Homo sapien
acctgtgtttgcgtctccggcccct

SEQ ID NO: 804857 - DNA, 25 bp, Homo sapien
cctgtgtttgcgtctccggcccctc

SEQ ID NO: 804858 - DNA, 25 bp, Homo sapien
acgcccagctcacgatctccataag

SEQ ID NO: 804859 - DNA, 25 bp, Homo sapien
tcccggagcagggcctcgactgatg

SEQ ID NO: 804860 - DNA, 25 bp, Homo sapien
gccgccttggaaccccgctagatgg

SEQ ID NO: 804861 - DNA, 25 bp, Homo sapien
agcagggcctcgactgatgccgccg

SEQ ID NO: 804862 - DNA, 25 bp, Homo sapien
tctgggcggtcggacatccgagggc

SEQ ID NO: 804863 - DNA, 25 bp, Homo sapien
gcaggctctgggcggtcggacatcc

SEQ ID NO: 804864 - DNA, 25 bp, Homo sapien
ggcggtcggacatccgagggcagag

SEQ ID NO: 804865 - DNA, 25 bp, Homo sapien
aggctctgggcggtcggacatccga

SEQ ID NO: 804866 - DNA, 25 bp, Homo sapien
ggtcctggggcgccccacggcgcat

SEQ ID NO: 804867 - DNA, 25 bp, Homo sapien
cagctcctggtcctggggcgcccca

SEQ ID NO: 804868 - DNA, 25 bp, Homo sapien
cctggtcctggggcgccccacggcg

SEQ ID NO: 804869 - DNA, 25 bp, Homo sapien
agctcctggtcctggggcgccccac

SEQ ID NO: 804870 - DNA, 25 bp, Homo sapien
gtcggggtccgctccgctggtccgc

SEQ ID NO: 804871 - DNA, 25 bp, Homo sapien
gctgtcggggtccgctccgctggtc

SEQ ID NO: 804872 - DNA, 25 bp, Homo sapien
tgtcggggtccgctccgctggtccg

SEQ ID NO: 804873 - DNA, 25 bp, Homo sapien
cagctgtcggggtccgctccgctgg

SEQ ID NO: 804874 - DNA, 25 bp, Homo sapien
ggacatgactttcccagtccaccaa

SEQ ID NO: 804875 - DNA, 25 bp, Homo sapien
tcccagtccaccaaagctggacgtg

SEQ ID NO: 804876 - DNA, 25 bp, Homo sapien
aagctggacgtgcaaccctacccat

SEQ ID NO: 804877 - DNA, 25 bp, Homo sapien
cttctgccccggaggctggacatga

SEQ ID NO: 804878 - DNA, 25 bp, Homo sapien
ctgcgtcaaacaccgtgtatttggc

SEQ ID NO: 804879 - DNA, 25 bp, Homo sapien
tcacatatccctctgcgtcaaacac

SEQ ID NO: 804880 - DNA, 25 bp, Homo sapien
tctgcgtcaaacaccgtgtatttgg

SEQ ID NO: 804881 - DNA, 25 bp, Homo sapien
gcgtcaaacaccgtgtatttggcag

SEQ ID NO: 804882 - DNA, 25 bp, Homo sapien
gaatgaggcagtaatccaaggaaat

SEQ ID NO: 804883 - DNA, 25 bp, Homo sapien
aagcccattggggtgaatgaggcag

SEQ ID NO: 804884 - DNA, 25 bp, Homo sapien
ctggtcccaaggtaggagagaagcc

SEQ ID NO: 804885 - DNA, 25 bp, Homo sapien
gagagaagcccattggggtgaatga

SEQ ID NO: 804886 - DNA, 25 bp, Homo sapien
gaatgggtgccacatggcgaatcac

SEQ ID NO: 804887 - DNA, 25 bp, Homo sapien
aatgggtgccacatggcgaatcaca

SEQ ID NO: 804888 - DNA, 25 bp, Homo sapien
ctgggaatgggtgccacatggcgaa

SEQ ID NO: 804889 - DNA, 25 bp, Homo sapien
gggaatgggtgccacatggcgaatc

SEQ ID NO: 804890 - DNA, 25 bp, Homo sapien
tgggcgaggcgctggatctggctgt

SEQ ID NO: 804891 - DNA, 25 bp, Homo sapien
aggtaatgtccttgcgtcccaccac

SEQ ID NO: 804892 - DNA, 25 bp, Homo sapien
gtgtctggccgtgggtggtggtgtc

SEQ ID NO: 804893 - DNA, 25 bp, Homo sapien
tcctcagacagctcaatgcggaagc

SEQ ID NO: 804894 - DNA, 25 bp, Homo sapien
cctccctacagaactcaagatccca

SEQ ID NO: 804895 - DNA, 25 bp, Homo sapien
ctcatctctagggaaatgctagttc

SEQ ID NO: 804896 - DNA, 25 bp, Homo sapien
cctacagaactcaagatcccagtct

SEQ ID NO: 804897 - DNA, 25 bp, Homo sapien
ctccctccctacagaactcaagatc

SEQ ID NO: 804898 - DNA, 25 bp, Homo sapien
cctcgagcaattgcaatcctcccac

SEQ ID NO: 804899 - DNA, 25 bp, Homo sapien
tttaagttgtttgtagatggtcttg

SEQ ID NO: 804900 - DNA, 25 bp, Homo sapien
caagactcatcagatgctgcagccc

SEQ ID NO: 804901 - DNA, 25 bp, Homo sapien
gaaacaagactcatcagatgctgca

SEQ ID NO: 804902 - DNA, 25 bp, Homo sapien
tgagaaacaagactcatcagatgct

SEQ ID NO: 804903 - DNA, 25 bp, Homo sapien
aacaagactcatcagatgctgcagc

SEQ ID NO: 804904 - DNA, 25 bp, Homo sapien
taggcggccaccaacttttgtccca

SEQ ID NO: 804905 - DNA, 25 bp, Homo sapien
agctggctgccgagttcgtccggga

SEQ ID NO: 804906 - DNA, 25 bp, Homo sapien
cagggagacgtgcaggacttgaggc

SEQ ID NO: 804907 - DNA, 25 bp, Homo sapien
agacacaatccccgtcagcaagaag

SEQ ID NO: 804908 - DNA, 25 bp, Homo sapien
gggctctgttagctctcctcccgtc

SEQ ID NO: 804909 - DNA, 25 bp, Homo sapien
tggggctctgttagctctcctcccg

SEQ ID NO: 804910 - DNA, 25 bp, Homo sapien
agaatagggtcgcatgggcagccct

SEQ ID NO: 804911 - DNA, 25 bp, Homo sapien
aagaaagaatagggtcgcatgggca

SEQ ID NO: 804912 - DNA, 25 bp, Homo sapien
cggaggaacaccatggtgaggaggc

SEQ ID NO: 804913 - DNA, 25 bp, Homo sapien
gtccggaggaacaccatggtgagga

SEQ ID NO: 804914 - DNA, 25 bp, Homo sapien
caggtccggaggaacaccatggtga

SEQ ID NO: 804915 - DNA, 25 bp, Homo sapien
tcaggtccggaggaacaccatggtg

SEQ ID NO: 804916 - DNA, 25 bp, Homo sapien
aaggtatgagcatcacagtggctgc

SEQ ID NO: 804917 - DNA, 25 bp, Homo sapien
gaggcaaggtaaggtatgagcatca

SEQ ID NO: 804918 - DNA, 25 bp, Homo sapien
acttggaaaatgagtacaaatccct

SEQ ID NO: 804919 - DNA, 25 bp, Homo sapien
caaatccctgggtgttttttgtcag

SEQ ID NO: 804920 - DNA, 25 bp, Homo sapien
cagatatagggtccaaaaggcagaa

SEQ ID NO: 804921 - DNA, 25 bp, Homo sapien
ggagttccaccgcaggcaggattag

SEQ ID NO: 804922 - DNA, 25 bp, Homo sapien
ccagccaagggagttgaagtcttaa

SEQ ID NO: 804923 - DNA, 25 bp, Homo sapien
tacattggcttagggacaggatcct

SEQ ID NO: 804924 - DNA, 25 bp, Homo sapien
tcggttaatcagagagtagcatccc

SEQ ID NO: 804925 - DNA, 25 bp, Homo sapien
cactctgggaggtttgctaggccct

SEQ ID NO: 804926 - DNA, 25 bp, Homo sapien
cagtgtagctgaccctaatgtgacg

SEQ ID NO: 804927 - DNA, 25 bp, Homo sapien
gagatcgctggcaccatagccttat

SEQ ID NO: 804928 - DNA, 25 bp, Homo sapien
aataataaaatagcagttgccattt

SEQ ID NO: 804929 - DNA, 25 bp, Homo sapien
taataaaatagcagttgccatttgt

SEQ ID NO: 804930 - DNA, 25 bp, Homo sapien
ataaaatagcagttgccatttgttt

SEQ ID NO: 804931 - DNA, 25 bp, Homo sapien
ataataatagttgtcttagaataga

SEQ ID NO: 804932 - DNA, 25 bp, Homo sapien
gacggtctctaagtccctgctaggt

SEQ ID NO: 804933 - DNA, 25 bp, Homo sapien
ctcatcagtcgtcctgcagagtcct

SEQ ID NO: 804934 - DNA, 25 bp, Homo sapien
tctgccgccagttccttagcgacgg

SEQ ID NO: 804935 - DNA, 25 bp, Homo sapien
gccagttccttagcgacggtctcta

SEQ ID NO: 804936 - DNA, 25 bp, Homo sapien
agatgggggcctcatcgccagctgt

SEQ ID NO: 804937 - DNA, 25 bp, Homo sapien
tgaatagtcctgtatgcccagcttt

SEQ ID NO: 804938 - DNA, 25 bp, Homo sapien
gacactgactccagaatcagatggg

SEQ ID NO: 804939 - DNA, 25 bp, Homo sapien
tgtatgcccagctttcagccagaca

SEQ ID NO: 804940 - DNA, 25 bp, Homo sapien
tgagtagccaacttatctgagcagg

SEQ ID NO: 804941 - DNA, 25 bp, Homo sapien
catccaatggctgactgaatatccc

SEQ ID NO: 804942 - DNA, 25 bp, Homo sapien
cgtgtgccgacttggtgtacatcca

SEQ ID NO: 804943 - DNA, 25 bp, Homo sapien
gccaggtgatgaccaatgagtagcc

SEQ ID NO: 804944 - DNA, 25 bp, Homo sapien
gaggatgcggacttctggaacccaa

SEQ ID NO: 804945 - DNA, 25 bp, Homo sapien
gaaatctgggttggaatagagcccc

SEQ ID NO: 804946 - DNA, 25 bp, Homo sapien
gatggcctaagaccaagctctgagg

SEQ ID NO: 804947 - DNA, 25 bp, Homo sapien
gactttgggtatctcagcttggccg

SEQ ID NO: 804948 - DNA, 25 bp, Homo sapien
atgtaatgagcacggtacccaatag

SEQ ID NO: 804949 - DNA, 25 bp, Homo sapien
gaggtttggaatacgattgatccca

SEQ ID NO: 804950 - DNA, 25 bp, Homo sapien
tcccatcacccatgtaatgagcacg

SEQ ID NO: 804951 - DNA, 25 bp, Homo sapien
acactgaggtttggaatacgattga

SEQ ID NO: 804952 - DNA, 25 bp, Homo sapien
caaccttgaatgacaggtgcaccct

SEQ ID NO: 804953 - DNA, 25 bp, Homo sapien
gaaccggatgatgtatcaggcactg

SEQ ID NO: 804954 - DNA, 25 bp, Homo sapien
gtcacttaacaacaagcagcgcagg

SEQ ID NO: 804955 - DNA, 25 bp, Homo sapien
gcagcgcaggactacagcacaattt

SEQ ID NO: 804956 - DNA, 25 bp, Homo sapien
tgtggcggtgggactctgcggcgga

SEQ ID NO: 804957 - DNA, 25 bp, Homo sapien
gcgcgggcggcgctgtcttcctccg

SEQ ID NO: 804958 - DNA, 25 bp, Homo sapien
gcggaggtcgctggcggtgcgcggg

SEQ ID NO: 804959 - DNA, 25 bp, Homo sapien
gcggcgcggatggatttcctcagtg

SEQ ID NO: 804960 - DNA, 25 bp, Homo sapien
gctcaggagagtgacgggagggtcc

SEQ ID NO: 804961 - DNA, 25 bp, Homo sapien
gccggcgctccatagagaaatgagg

SEQ ID NO: 804962 - DNA, 25 bp, Homo sapien
agaaatgagggtgcaaccgcctccg

SEQ ID NO: 804963 - DNA, 25 bp, Homo sapien
tggtgcggcgctgcgaagcgcagtg

SEQ ID NO: 804964 - DNA, 25 bp, Homo sapien
cccattagccgtccgccgcgggtgg

SEQ ID NO: 804965 - DNA, 25 bp, Homo sapien
ccggataatccccggtccggctgcg

SEQ ID NO: 804966 - DNA, 25 bp, Homo sapien
ccgcgggtgggggtgacagcggcgg

SEQ ID NO: 804967 - DNA, 25 bp, Homo sapien
ccggctgcgccccattagccgtccg

SEQ ID NO: 804968 - DNA, 25 bp, Homo sapien
cgctaataggttctggacggctcac

SEQ ID NO: 804969 - DNA, 25 bp, Homo sapien
gttgccaaggcaaccgcatccacgg

SEQ ID NO: 804970 - DNA, 25 bp, Homo sapien
gagacctgtagggtgggtgacccca

SEQ ID NO: 804971 - DNA, 25 bp, Homo sapien
gccgattgggcgctaataggttctg

SEQ ID NO: 804972 - DNA, 25 bp, Homo sapien
aggcaaccgtcacccggaccgagag

SEQ ID NO: 804973 - DNA, 25 bp, Homo sapien
ctgttcgtggggttgcctaggcaac

SEQ ID NO: 804974 - DNA, 25 bp, Homo sapien
gagcacctcattggtgaaatgcccc

SEQ ID NO: 804975 - DNA, 25 bp, Homo sapien
accgagagcacctcattggtgaaat

SEQ ID NO: 804976 - DNA, 25 bp, Homo sapien
aaggggcggtgcctcttgaaattca

SEQ ID NO: 804977 - DNA, 25 bp, Homo sapien
ccttcgaaaacagacctggcttctg

SEQ ID NO: 804978 - DNA, 25 bp, Homo sapien
tgaaattcaccccacaaggcgcaca

SEQ ID NO: 804979 - DNA, 25 bp, Homo sapien
gtgtcccttcgaaaacagacctggc

SEQ ID NO: 804980 - DNA, 25 bp, Homo sapien
caaccagggtctccggcaccagaga

SEQ ID NO: 804981 - DNA, 25 bp, Homo sapien
agggtctccggcaccagagacgtcg

SEQ ID NO: 804982 - DNA, 25 bp, Homo sapien
caccagagacgtcgccgagtaagag

SEQ ID NO: 804983 - DNA, 25 bp, Homo sapien
aaacggagcgggaagtgcaagagga

SEQ ID NO: 804984 - DNA, 25 bp, Homo sapien
gatgcagggctgacgtcaggcccga

SEQ ID NO: 804985 - DNA, 25 bp, Homo sapien
gggatgcagggctgacgtcaggccc

SEQ ID NO: 804986 - DNA, 25 bp, Homo sapien
cagggctgacgtcaggcccgaggcc

SEQ ID NO: 804987 - DNA, 25 bp, Homo sapien
tgcagggctgacgtcaggcccgagg

SEQ ID NO: 804988 - DNA, 25 bp, Homo sapien
ctgggggaggcagctcctggccgct

SEQ ID NO: 804989 - DNA, 25 bp, Homo sapien
gcagctcctggccgctggcccgagg

SEQ ID NO: 804990 - DNA, 25 bp, Homo sapien
cagctcctggccgctggcccgaggc

SEQ ID NO: 804991 - DNA, 25 bp, Homo sapien
gggaggcagctcctggccgctggcc

SEQ ID NO: 804992 - DNA, 25 bp, Homo sapien
ctggttccggagctgctcggcctcc

SEQ ID NO: 804993 - DNA, 25 bp, Homo sapien
gagtccccacatgcttttcgggcat

SEQ ID NO: 804994 - DNA, 25 bp, Homo sapien
gtgttgagtccccacatgcttttcg

SEQ ID NO: 804995 - DNA, 25 bp, Homo sapien
tgagtccccacatgcttttcgggca

SEQ ID NO: 804996 - DNA, 25 bp, Homo sapien
gttgagtccccacatgcttttcggg

SEQ ID NO: 804997 - DNA, 25 bp, Homo sapien
ggcatagatctttgccaggtgccca

SEQ ID NO: 804998 - DNA, 25 bp, Homo sapien
gcatagatctttgccaggtgcccac

SEQ ID NO: 804999 - DNA, 25 bp, Homo sapien
cacggagggtcctccgggtcctcat

SEQ ID NO: 805000 - DNA, 25 bp, Homo sapien
tcctccgggtcctcatctggattct

SEQ ID NO: 805001 - DNA, 25 bp, Homo sapien
tacgctgggtattttggtggcctgc

SEQ ID NO: 805002 - DNA, 25 bp, Homo sapien
cagaagggtggcgtgaaaacaagac

SEQ ID NO: 805003 - DNA, 25 bp, Homo sapien
gcttactccgccagatctgaggctg

SEQ ID NO: 805004 - DNA, 25 bp, Homo sapien
tcccacggcctgctagaaagtcggc

SEQ ID NO: 805005 - DNA, 25 bp, Homo sapien
gagcttcccatcctgggaggcgctg

SEQ ID NO: 805006 - DNA, 25 bp, Homo sapien
agcttcccatcctgggaggcgctga

SEQ ID NO: 805007 - DNA, 25 bp, Homo sapien
gatgagcttcccatcctgggaggcg

SEQ ID NO: 805008 - DNA, 25 bp, Homo sapien
tgagcttcccatcctgggaggcgct

SEQ ID NO: 805009 - DNA, 25 bp, Homo sapien
caccccgcagcccgcgccaccctac

SEQ ID NO: 805010 - DNA, 25 bp, Homo sapien
ctgccccaccccgcagcccgcgcca

SEQ ID NO: 805011 - DNA, 25 bp, Homo sapien
cccaccccgcagcccgcgccaccct

SEQ ID NO: 805012 - DNA, 25 bp, Homo sapien
gccccaccccgcagcccgcgccacc

SEQ ID NO: 805013 - DNA, 25 bp, Homo sapien
ggggaagcgccggggtcagagccag

SEQ ID NO: 805014 - DNA, 25 bp, Homo sapien
agcaggggaagcgccggggtcagag

SEQ ID NO: 805015 - DNA, 25 bp, Homo sapien
tgcggagcaggggaagcgccggggt

SEQ ID NO: 805016 - DNA, 25 bp, Homo sapien
gcggagcaggggaagcgccggggtc

SEQ ID NO: 805017 - DNA, 25 bp, Homo sapien
ccctgagggcgcgtaggcacaggtc

SEQ ID NO: 805018 - DNA, 25 bp, Homo sapien
ccctcgcgggtcttgaggctgtaga

SEQ ID NO: 805019 - DNA, 25 bp, Homo sapien
cgcgtaggcacaggtcattacccag

SEQ ID NO: 805020 - DNA, 25 bp, Homo sapien
cctgacgttgccctcgcgggtcttg

SEQ ID NO: 805021 - DNA, 25 bp, Homo sapien
agccaggtctccacacggagggcag

SEQ ID NO: 805022 - DNA, 25 bp, Homo sapien
caggtctccacacggagggcagtgc

SEQ ID NO: 805023 - DNA, 25 bp, Homo sapien
gtcagccaggtctccacacggaggg

SEQ ID NO: 805024 - DNA, 25 bp, Homo sapien
gtctccacacggagggcagtgcacc

SEQ ID NO: 805025 - DNA, 25 bp, Homo sapien
cagagctggtgatgatttggttgtc

SEQ ID NO: 805026 - DNA, 25 bp, Homo sapien
ggtgatgatttggttgtcatccagg

SEQ ID NO: 805027 - DNA, 25 bp, Homo sapien
tccaggaagcggcaacacgacaggt

SEQ ID NO: 805028 - DNA, 25 bp, Homo sapien
aggaagcggcaacacgacaggtacc

SEQ ID NO: 805029 - DNA, 25 bp, Homo sapien
gatagaggcatcacaggcgcctgac

SEQ ID NO: 805030 - DNA, 25 bp, Homo sapien
tgtcggcacatggaatcccgcacgt

SEQ ID NO: 805031 - DNA, 25 bp, Homo sapien
gatgtcggattcatggccgatgaag

SEQ ID NO: 805032 - DNA, 25 bp, Homo sapien
gggacagggacatcacatccccact

SEQ ID NO: 805033 - DNA, 25 bp, Homo sapien
caacagaggtgatgccacagatgat

SEQ ID NO: 805034 - DNA, 25 bp, Homo sapien
tcatggcatcccagatgttgcagtt

SEQ ID NO: 805035 - DNA, 25 bp, Homo sapien
tcgtcagagccggtggtgaaggcgt

SEQ ID NO: 805036 - DNA, 25 bp, Homo sapien
gtccgctgcgcgagaaggcaacaga

SEQ ID NO: 805037 - DNA, 25 bp, Homo sapien
aagtcagaacccattgggcctgggc

SEQ ID NO: 805038 - DNA, 25 bp, Homo sapien
gaagtcagaacccattgggcctggg

SEQ ID NO: 805039 - DNA, 25 bp, Homo sapien
agaagtcagaacccattgggcctgg

SEQ ID NO: 805040 - DNA, 25 bp, Homo sapien
agtcagaacccattgggcctgggct

SEQ ID NO: 805041 - DNA, 25 bp, Homo sapien
ctcacgcggttgtcgtggccagcga

SEQ ID NO: 805042 - DNA, 25 bp, Homo sapien
gtcggtgaccccgaggcagctcacg

SEQ ID NO: 805043 - DNA, 25 bp, Homo sapien
atcgtcggtgaccccgaggcagctc

SEQ ID NO: 805044 - DNA, 25 bp, Homo sapien
gcagctcacgcggttgtcgtggcca

SEQ ID NO: 805045 - DNA, 25 bp, Homo sapien
ctggcctgtagtgtgggcatgggca

SEQ ID NO: 805046 - DNA, 25 bp, Homo sapien
cgcagccctggcctgtagtgtgggc

SEQ ID NO: 805047 - DNA, 25 bp, Homo sapien
ccccgcagccctggcctgtagtgtg

SEQ ID NO: 805048 - DNA, 25 bp, Homo sapien
ccctggcctgtagtgtgggcatggg

SEQ ID NO: 805049 - DNA, 25 bp, Homo sapien
tgagagtggtcaatgtttacaagcc

SEQ ID NO: 805050 - DNA, 25 bp, Homo sapien
gttcccacagtgttagcgtccctga

SEQ ID NO: 805051 - DNA, 25 bp, Homo sapien
ccaaagtggcaactaggtcagtgtt

SEQ ID NO: 805052 - DNA, 25 bp, Homo sapien
tcctgttgtgactgaatgtaacccc

SEQ ID NO: 805053 - DNA, 25 bp, Homo sapien
gacccttccgctgaccaaatgggag

SEQ ID NO: 805054 - DNA, 25 bp, Homo sapien
ccttccgggtctgatatgatgcgct

SEQ ID NO: 805055 - DNA, 25 bp, Homo sapien
cagcagtttgcacaggaggcctgtc

SEQ ID NO: 805056 - DNA, 25 bp, Homo sapien
gcacaaattggacgagtggccccag

SEQ ID NO: 805057 - DNA, 25 bp, Homo sapien
gccggccagcccaagtaaccgcgac

SEQ ID NO: 805058 - DNA, 25 bp, Homo sapien
gtcctgaacgggctgcggagtgcgc

SEQ ID NO: 805059 - DNA, 25 bp, Homo sapien
cgagctatgaatcgccttcccggct

SEQ ID NO: 805060 - DNA, 25 bp, Homo sapien
gccaggccactcaagggttcgccgg

SEQ ID NO: 805061 - DNA, 25 bp, Homo sapien
ccaccccccgttccgattcattcat

SEQ ID NO: 805062 - DNA, 25 bp, Homo sapien
tgttgcggatccgagtcagtggctc

SEQ ID NO: 805063 - DNA, 25 bp, Homo sapien
ccacggtggaggtattggcagccac

SEQ ID NO: 805064 - DNA, 25 bp, Homo sapien
tgtgaccctgaagactcggatgtgg

SEQ ID NO: 805065 - DNA, 25 bp, Homo sapien
tgtagatctcagagcacgcgttctg

SEQ ID NO: 805066 - DNA, 25 bp, Homo sapien
catgcgaagagccatatcacggagg

SEQ ID NO: 805067 - DNA, 25 bp, Homo sapien
tatatggcaatagttacagaccgca

SEQ ID NO: 805068 - DNA, 25 bp, Homo sapien
ttacatggctctggtccgaggtcca

SEQ ID NO: 805069 - DNA, 25 bp, Homo sapien
cgaggtccagtactcagcatgcgaa

SEQ ID NO: 805070 - DNA, 25 bp, Homo sapien
ctgccaaatatgccatctcccttct

SEQ ID NO: 805071 - DNA, 25 bp, Homo sapien
tgccaaatatgccatctcccttctt

SEQ ID NO: 805072 - DNA, 25 bp, Homo sapien
tttgaaaagggccagttgtgacagg

SEQ ID NO: 805073 - DNA, 25 bp, Homo sapien
tgctcagagaagaacccaacctaga

SEQ ID NO: 805074 - DNA, 25 bp, Homo sapien
gctccacggattcctcctggcagtg

SEQ ID NO: 805075 - DNA, 25 bp, Homo sapien
ctggcagtggattcagattggaaat

SEQ ID NO: 805076 - DNA, 25 bp, Homo sapien
gggtccctcagcgacctggggcgcg

SEQ ID NO: 805077 - DNA, 25 bp, Homo sapien
tggaggagagggcggctgtccaggg

SEQ ID NO: 805078 - DNA, 25 bp, Homo sapien
tggggcgcgccgggtgaccacaccg

SEQ ID NO: 805079 - DNA, 25 bp, Homo sapien
tcatcccgggaagctcggcggtgca

SEQ ID NO: 805080 - DNA, 25 bp, Homo sapien
agcagggacaggagaagccacagcc

SEQ ID NO: 805081 - DNA, 25 bp, Homo sapien
aggcccagagggagcgacagcaggg

SEQ ID NO: 805082 - DNA, 25 bp, Homo sapien
ctgggaggcccagagggagcgacag

SEQ ID NO: 805083 - DNA, 25 bp, Homo sapien
gggaggcccagagggagcgacagca

SEQ ID NO: 805084 - DNA, 25 bp, Homo sapien
tacctctccaggactcggctgtcac

SEQ ID NO: 805085 - DNA, 25 bp, Homo sapien
gtacctctccaggactcggctgtca

SEQ ID NO: 805086 - DNA, 25 bp, Homo sapien
tcctcttccaggcatagaaattaac

SEQ ID NO: 805087 - DNA, 25 bp, Homo sapien
ctcttccaggcatagaaattaactt

SEQ ID NO: 805088 - DNA, 25 bp, Homo sapien
tccatcctcttccaggcatagaaat

SEQ ID NO: 805089 - DNA, 25 bp, Homo sapien
catcctcttccaggcatagaaatta

SEQ ID NO: 805090 - DNA, 25 bp, Homo sapien
aaggccactgacggctttatccaca

SEQ ID NO: 805091 - DNA, 25 bp, Homo sapien
cctgccagacttctacggcctgctg

SEQ ID NO: 805092 - DNA, 25 bp, Homo sapien
cacggctgggaagagttgaccaaca

SEQ ID NO: 805093 - DNA, 25 bp, Homo sapien
cccagagcccgaagcagagtggtga

SEQ ID NO: 805094 - DNA, 25 bp, Homo sapien
tgcaggcctcccctgtgtacagctt

SEQ ID NO: 805095 - DNA, 25 bp, Homo sapien
aagagtttgcggaaagtgtcagcag

SEQ ID NO: 805096 - DNA, 25 bp, Homo sapien
ttggagtagactcggaagagtttgc

SEQ ID NO: 805097 - DNA, 25 bp, Homo sapien
cagctttccccggaggaaattggag

SEQ ID NO: 805098 - DNA, 25 bp, Homo sapien
tccctgatggtaggtgcgaaaacag

SEQ ID NO: 805099 - DNA, 25 bp, Homo sapien
attttgcagggtgccgagtgagctc

SEQ ID NO: 805100 - DNA, 25 bp, Homo sapien
aaacttggaccccatgagagccaga

SEQ ID NO: 805101 - DNA, 25 bp, Homo sapien
caggtaaatcgcctccaaagcgtgt

SEQ ID NO: 805102 - DNA, 25 bp, Homo sapien
cagctggacttagcgaggatgtgca

SEQ ID NO: 805103 - DNA, 25 bp, Homo sapien
gcgagtattcatggtgacagtcccc

SEQ ID NO: 805104 - DNA, 25 bp, Homo sapien
tccccaggtgagtaaaggaggcagc

SEQ ID NO: 805105 - DNA, 25 bp, Homo sapien
tgtgaatttcagaggcgagtattca

SEQ ID NO: 805106 - DNA, 25 bp, Homo sapien
tcccccctggcctccttagcttggc

SEQ ID NO: 805107 - DNA, 25 bp, Homo sapien
aggaccctaagtggttgctcccagg

SEQ ID NO: 805108 - DNA, 25 bp, Homo sapien
ccctggcctccttagcttggcatcc

SEQ ID NO: 805109 - DNA, 25 bp, Homo sapien
gaggaccctaagtggttgctcccag

SEQ ID NO: 805110 - DNA, 25 bp, Homo sapien
accagaagcagcagagtccagactg

SEQ ID NO: 805111 - DNA, 25 bp, Homo sapien
gcagcagagtccagactggaggaac

SEQ ID NO: 805112 - DNA, 25 bp, Homo sapien
cagcccccaccagaagcagcagagt

SEQ ID NO: 805113 - DNA, 25 bp, Homo sapien
gcagagtccagactggaggaaccat

SEQ ID NO: 805114 - DNA, 25 bp, Homo sapien
aaatgcaactcgtgtcattatcaag

SEQ ID NO: 805115 - DNA, 25 bp, Homo sapien
caaaaatgcaactcgtgtcattatc

SEQ ID NO: 805116 - DNA, 25 bp, Homo sapien
aagcaaaaatgcaactcgtgtcatt

SEQ ID NO: 805117 - DNA, 25 bp, Homo sapien
aatgcaactcgtgtcattatcaaga

SEQ ID NO: 805118 - DNA, 25 bp, Homo sapien
ccctagagctgcgaacaaccagctt

SEQ ID NO: 805119 - DNA, 25 bp, Homo sapien
accagcttctggtccggaggcttct

SEQ ID NO: 805120 - DNA, 25 bp, Homo sapien
aacaaccagcttctggtccggaggc

SEQ ID NO: 805121 - DNA, 25 bp, Homo sapien
agttgtccctagagctgcgaacaac

SEQ ID NO: 805122 - DNA, 25 bp, Homo sapien
cttgggaccagtcacagaggggttt

SEQ ID NO: 805123 - DNA, 25 bp, Homo sapien
catcgtctgcggacacttgggacca

SEQ ID NO: 805124 - DNA, 25 bp, Homo sapien
ctggctcgaacccagtcttcatcgt

SEQ ID NO: 805125 - DNA, 25 bp, Homo sapien
gggtttggcgtcatcctcaaaatca

SEQ ID NO: 805126 - DNA, 25 bp, Homo sapien
ttcgattccatatgcagatagctgc

SEQ ID NO: 805127 - DNA, 25 bp, Homo sapien
caagacagcccgaacatgtggtggg

SEQ ID NO: 805128 - DNA, 25 bp, Homo sapien
tgaaccctgcgggcacagtgacggt

SEQ ID NO: 805129 - DNA, 25 bp, Homo sapien
ccacggtggaagctgttcgattcca

SEQ ID NO: 805130 - DNA, 25 bp, Homo sapien
taggcagtgctaccccgtgttccct

SEQ ID NO: 805131 - DNA, 25 bp, Homo sapien
cgattacaggagccccggcggatag

SEQ ID NO: 805132 - DNA, 25 bp, Homo sapien
ttacaggagccccggcggatagaga

SEQ ID NO: 805133 - DNA, 25 bp, Homo sapien
aggtaggcagtgctaccccgtgttc

SEQ ID NO: 805134 - DNA, 25 bp, Homo sapien
ggctagagaagtcgccatcaggccc

SEQ ID NO: 805135 - DNA, 25 bp, Homo sapien
cacgcctggctttcctgatgaccct

SEQ ID NO: 805136 - DNA, 25 bp, Homo sapien
ccaggtccagtcacagaggtcattt

SEQ ID NO: 805137 - DNA, 25 bp, Homo sapien
agtccacttggccccggaggcagtt

SEQ ID NO: 805138 - DNA, 25 bp, Homo sapien
agctcagacagccaatcagcgtgga

SEQ ID NO: 805139 - DNA, 25 bp, Homo sapien
cagccaatcagcgtggacctcgcta

SEQ ID NO: 805140 - DNA, 25 bp, Homo sapien
gcgtggacctcgctaggtgacgcaa

SEQ ID NO: 805141 - DNA, 25 bp, Homo sapien
caatcagcgtggacctcgctaggtg

SEQ ID NO: 805142 - DNA, 25 bp, Homo sapien
gcggctctgacacagaggagcaaga

SEQ ID NO: 805143 - DNA, 25 bp, Homo sapien
caaactggcgagagatacagcggct

SEQ ID NO: 805144 - DNA, 25 bp, Homo sapien
ggacataacctattcacgcaaactg

SEQ ID NO: 805145 - DNA, 25 bp, Homo sapien
gagatacagcggctctgacacagag

SEQ ID NO: 805146 - DNA, 25 bp, Homo sapien
ccagaggacaggctcacggggctca

SEQ ID NO: 805147 - DNA, 25 bp, Homo sapien
gaggatgtagtggaaggaaaagctc

SEQ ID NO: 805148 - DNA, 25 bp, Homo sapien
gccccggaggatgtagtggaaggaa

SEQ ID NO: 805149 - DNA, 25 bp, Homo sapien
agactggccccggaggatgtagtgg

SEQ ID NO: 805150 - DNA, 25 bp, Homo sapien
gaagcataaatgtggagggctgcac

SEQ ID NO: 805151 - DNA, 25 bp, Homo sapien
tgaagcataaatgtggagggctgca

SEQ ID NO: 805152 - DNA, 25 bp, Homo sapien
ctgaagcataaatgtggagggctgc

SEQ ID NO: 805153 - DNA, 25 bp, Homo sapien
gccagttgggcccaggttgtcctga

SEQ ID NO: 805154 - DNA, 25 bp, Homo sapien
ctgtatccgtcccacggctgtgtaa

SEQ ID NO: 805155 - DNA, 25 bp, Homo sapien
agcctgccagttgggcccaggttgt

SEQ ID NO: 805156 - DNA, 25 bp, Homo sapien
ctgtgtaattgacagaaacagcctg

SEQ ID NO: 805157 - DNA, 25 bp, Homo sapien
caaggagcaatgctggttgcatcaa

SEQ ID NO: 805158 - DNA, 25 bp, Homo sapien
caatgctggttgcatcaactgccac

SEQ ID NO: 805159 - DNA, 25 bp, Homo sapien
ccccacaaggagcaatgctggttgc

SEQ ID NO: 805160 - DNA, 25 bp, Homo sapien
tgctggttgcatcaactgccacagc

SEQ ID NO: 805161 - DNA, 25 bp, Homo sapien
cccatgccatggacgggtccatttt

SEQ ID NO: 805162 - DNA, 25 bp, Homo sapien
tccatttttatgtccgagggcccag

SEQ ID NO: 805163 - DNA, 25 bp, Homo sapien
gggatgggcgttgtcttcaaagtca

SEQ ID NO: 805164 - DNA, 25 bp, Homo sapien
cccggaagtctggacccagtcacag

SEQ ID NO: 805165 - DNA, 25 bp, Homo sapien
ctgggagaactcgtcagcctcaagg

SEQ ID NO: 805166 - DNA, 25 bp, Homo sapien
gcctcaaggtagatatagtgacccc

SEQ ID NO: 805167 - DNA, 25 bp, Homo sapien
tcgtcagcctcaaggtagatatagt

SEQ ID NO: 805168 - DNA, 25 bp, Homo sapien
gagaactcgtcagcctcaaggtaga

SEQ ID NO: 805169 - DNA, 25 bp, Homo sapien
cggctcaccagtctgactgactggc

SEQ ID NO: 805170 - DNA, 25 bp, Homo sapien
cagaagggccggctcaccagtctga

SEQ ID NO: 805171 - DNA, 25 bp, Homo sapien
ggccggctcaccagtctgactgact

SEQ ID NO: 805172 - DNA, 25 bp, Homo sapien
agggccggctcaccagtctgactga

SEQ ID NO: 805173 - DNA, 25 bp, Homo sapien
gagaccccacgcgtttccagagagg

SEQ ID NO: 805174 - DNA, 25 bp, Homo sapien
ccagtaagggcgctgagaccccacg

SEQ ID NO: 805175 - DNA, 25 bp, Homo sapien
caggaggagttcgagcatagtaccc

SEQ ID NO: 805176 - DNA, 25 bp, Homo sapien
catacatgtggtatgcgaactccac

SEQ ID NO: 805177 - DNA, 25 bp, Homo sapien
cctgaggggacggtgacggaggtgt

SEQ ID NO: 805178 - DNA, 25 bp, Homo sapien
ctgaggggacggtgacggaggtgtt

SEQ ID NO: 805179 - DNA, 25 bp, Homo sapien
gctgttggtgtcctgaggggacggt

SEQ ID NO: 805180 - DNA, 25 bp, Homo sapien
tgaggggacggtgacggaggtgttc

SEQ ID NO: 805181 - DNA, 25 bp, Homo sapien
gatgaaacccatagcaaccacagag

SEQ ID NO: 805182 - DNA, 25 bp, Homo sapien
gaggccgtgttgcttccctggatgc

SEQ ID NO: 805183 - DNA, 25 bp, Homo sapien
ccatagcaaccacagaggccgtgtt

SEQ ID NO: 805184 - DNA, 25 bp, Homo sapien
agtcccaggattgatcaagatgaaa

SEQ ID NO: 805185 - DNA, 25 bp, Homo sapien
gaagaaactggagatacgggaggaa

SEQ ID NO: 805186 - DNA, 25 bp, Homo sapien
ggaggaagctctggtagcactttta

SEQ ID NO: 805187 - DNA, 25 bp, Homo sapien
tgggcttttctgtggtgacactggg

SEQ ID NO: 805188 - DNA, 25 bp, Homo sapien
aaactggagatacgggaggaagctc

SEQ ID NO: 805189 - DNA, 25 bp, Homo sapien
ggttgtggtagtgcccagaatcaca

SEQ ID NO: 805190 - DNA, 25 bp, Homo sapien
tacttggagcatgtggagacatcac

SEQ ID NO: 805191 - DNA, 25 bp, Homo sapien
tggagatgatagtctcttccatgga

SEQ ID NO: 805192 - DNA, 25 bp, Homo sapien
gaatcacactggtcataggggtact

SEQ ID NO: 805193 - DNA, 25 bp, Homo sapien
aaaacagcctctgtcatgctttcat

SEQ ID NO: 805194 - DNA, 25 bp, Homo sapien
cctctgtcatgctttcattccatgg

SEQ ID NO: 805195 - DNA, 25 bp, Homo sapien
cattccatggctttctcagggagtc

SEQ ID NO: 805196 - DNA, 25 bp, Homo sapien
ctttcattccatggctttctcaggg

SEQ ID NO: 805197 - DNA, 25 bp, Homo sapien
acaggattcgtagcgggcatttgga

SEQ ID NO: 805198 - DNA, 25 bp, Homo sapien
catagtagtcgttgttgtagaagca

SEQ ID NO: 805199 - DNA, 25 bp, Homo sapien
aaaagccagggttgcagacacagcc

SEQ ID NO: 805200 - DNA, 25 bp, Homo sapien
gctcttgcacgaagcaggacaagca

SEQ ID NO: 805201 - DNA, 25 bp, Homo sapien
gccagcagcggcaatgttctgtgca

SEQ ID NO: 805202 - DNA, 25 bp, Homo sapien
gggtggcatccatactggccattct

SEQ ID NO: 805203 - DNA, 25 bp, Homo sapien
cccacactgagagatctggcactcg

SEQ ID NO: 805204 - DNA, 25 bp, Homo sapien
ggccattcttaagctggcacacggt

SEQ ID NO: 805205 - DNA, 25 bp, Homo sapien
ctccaggctggaccgcacatgctgg

SEQ ID NO: 805206 - DNA, 25 bp, Homo sapien
ggaaggagaacaggcgaagctgctt

SEQ ID NO: 805207 - DNA, 25 bp, Homo sapien
cctccaggctggaccgcacatgctg

SEQ ID NO: 805208 - DNA, 25 bp, Homo sapien
tctccgtagaccaagcaggtggcag

SEQ ID NO: 805209 - DNA, 25 bp, Homo sapien
ggctgggccaagatgtaagtgcact

SEQ ID NO: 805210 - DNA, 25 bp, Homo sapien
gtgcctcccgtcaaaggtgacataa

SEQ ID NO: 805211 - DNA, 25 bp, Homo sapien
gacataatgagggtctccgtagacc

SEQ ID NO: 805212 - DNA, 25 bp, Homo sapien
gggcagggtcacgtagactttgctc

SEQ ID NO: 805213 - DNA, 25 bp, Homo sapien
tgctcaggcaggacacgccttcctg

SEQ ID NO: 805214 - DNA, 25 bp, Homo sapien
cttaagcagggtgacggtgctctcg

SEQ ID NO: 805215 - DNA, 25 bp, Homo sapien
gctcaggcaggacacgccttcctgt

SEQ ID NO: 805216 - DNA, 25 bp, Homo sapien
ggtatggctgggagagtaacttgct

SEQ ID NO: 805217 - DNA, 25 bp, Homo sapien
gaagacgcctttagagggtatggct

SEQ ID NO: 805218 - DNA, 25 bp, Homo sapien
cgcaaaccgaactccgtctgcagct

SEQ ID NO: 805219 - DNA, 25 bp, Homo sapien
tggacacagtaacatacagctgctg

SEQ ID NO: 805220 - DNA, 25 bp, Homo sapien
ctggtcctcgtcctggtccgtctgc

SEQ ID NO: 805221 - DNA, 25 bp, Homo sapien
attgtcactgttgccgtcatagttc

SEQ ID NO: 805222 - DNA, 25 bp, Homo sapien
ctgggctgccgtccaacttcaggtg

SEQ ID NO: 805223 - DNA, 25 bp, Homo sapien
tgttgccgtcatagttcccacacaa

SEQ ID NO: 805224 - DNA, 25 bp, Homo sapien
ctggccccgacatgctgctctgcag

SEQ ID NO: 805225 - DNA, 25 bp, Homo sapien
gagtgtcgaccagccgtccacagaa

SEQ ID NO: 805226 - DNA, 25 bp, Homo sapien
ctgcagagatgaatcacaagacggg

SEQ ID NO: 805227 - DNA, 25 bp, Homo sapien
tcaaatgggccatgagtgtcgacca

SEQ ID NO: 805228 - DNA, 25 bp, Homo sapien
ggccttcacgtgcagcaggcatgtc

SEQ ID NO: 805229 - DNA, 25 bp, Homo sapien
ccctggaatccgcacatatcaagca

SEQ ID NO: 805230 - DNA, 25 bp, Homo sapien
cagaagtggggttccctccagggct

SEQ ID NO: 805231 - DNA, 25 bp, Homo sapien
caagcatgcagctgtcgaagaagga

SEQ ID NO: 805232 - DNA, 25 bp, Homo sapien
aacatgccggagaatcctgaatggc

SEQ ID NO: 805233 - DNA, 25 bp, Homo sapien
cacactgggagcgaggtatgcactc

SEQ ID NO: 805234 - DNA, 25 bp, Homo sapien
gacgaagcccggattgcattcacag

SEQ ID NO: 805235 - DNA, 25 bp, Homo sapien
tggcttcgcacacagggagtacttg

SEQ ID NO: 805236 - DNA, 25 bp, Homo sapien
ctggcttgtaccaccgctcccctac

SEQ ID NO: 805237 - DNA, 25 bp, Homo sapien
tccagggctggcagcgaattctgtt

SEQ ID NO: 805238 - DNA, 25 bp, Homo sapien
ttcacagacgcacaactctttgcag

SEQ ID NO: 805239 - DNA, 25 bp, Homo sapien
gcgaattctgttgttgctttcacag

SEQ ID NO: 805240 - DNA, 25 bp, Homo sapien
cttgggcatggcagccatagatacc

SEQ ID NO: 805241 - DNA, 25 bp, Homo sapien
tggtggcgctcacaacaaaatagct

SEQ ID NO: 805242 - DNA, 25 bp, Homo sapien
gtcaggacataggtgcaggtgccca

SEQ ID NO: 805243 - DNA, 25 bp, Homo sapien
caaaatagctgtcttgggacctgga

SEQ ID NO: 805244 - DNA, 25 bp, Homo sapien
cccatgaagtggtgcaaggcgccat

SEQ ID NO: 805245 - DNA, 25 bp, Homo sapien
gcccaaagttcgtgtagaggaggac

SEQ ID NO: 805246 - DNA, 25 bp, Homo sapien
gtcgtagcgaacttggagcccaaag

SEQ ID NO: 805247 - DNA, 25 bp, Homo sapien
tgctgctgagccttatggtcacccg

SEQ ID NO: 805248 - DNA, 25 bp, Homo sapien
gtagggccacccgatggccattcag

SEQ ID NO: 805249 - DNA, 25 bp, Homo sapien
tcattgtcccagctttccccgcagg

SEQ ID NO: 805250 - DNA, 25 bp, Homo sapien
cccagctttccccgcaggtgcccag

SEQ ID NO: 805251 - DNA, 25 bp, Homo sapien
attgtcccagctttccccgcaggtg

SEQ ID NO: 805252 - DNA, 25 bp, Homo sapien
tgtcccagctttccccgcaggtgcc

SEQ ID NO: 805253 - DNA, 25 bp, Homo sapien
cccagctgcatggaatcgcctgcaa

SEQ ID NO: 805254 - DNA, 25 bp, Homo sapien
caagctttctgtcggggcgcaggtt

SEQ ID NO: 805255 - DNA, 25 bp, Homo sapien
ccaggttcagaggattcaggtaact

SEQ ID NO: 805256 - DNA, 25 bp, Homo sapien
cggggcgcaggttgtcatccaagct

SEQ ID NO: 805257 - DNA, 25 bp, Homo sapien
cctgagggtttattaagatcgcaca

SEQ ID NO: 805258 - DNA, 25 bp, Homo sapien
tattaagatcgcacagttcttgttc

SEQ ID NO: 805259 - DNA, 25 bp, Homo sapien
gggtttattaagatcgcacagttct

SEQ ID NO: 805260 - DNA, 25 bp, Homo sapien
ttaagatcgcacagttcttgttcca

SEQ ID NO: 805261 - DNA, 25 bp, Homo sapien
agaaggttctgttccgccaggcagg

SEQ ID NO: 805262 - DNA, 25 bp, Homo sapien
acctggtgacattgagagaagggtc

SEQ ID NO: 805263 - DNA, 25 bp, Homo sapien
ccatgcacgcaactggcaaagctgg

SEQ ID NO: 805264 - DNA, 25 bp, Homo sapien
tggtgtcgcccttggtcccacactg

SEQ ID NO: 805265 - DNA, 25 bp, Homo sapien
gcagtccctcgggttgtttatgctg

SEQ ID NO: 805266 - DNA, 25 bp, Homo sapien
cctcgggttgtttatgctgctgcag

SEQ ID NO: 805267 - DNA, 25 bp, Homo sapien
gtaggagcccgctgggtcagtgcag

SEQ ID NO: 805268 - DNA, 25 bp, Homo sapien
gccacactggccaaggggcacgcag

SEQ ID NO: 805269 - DNA, 25 bp, Homo sapien
atccagggcccagcatatctggttg

SEQ ID NO: 805270 - DNA, 25 bp, Homo sapien
tgttgtggacggagcaggtgcagag

SEQ ID NO: 805271 - DNA, 25 bp, Homo sapien
aggtgatgttgttgtggacggagca

SEQ ID NO: 805272 - DNA, 25 bp, Homo sapien
tgaggcccgaaacggagcagcccat

SEQ ID NO: 805273 - DNA, 25 bp, Homo sapien
caccaggacaagagtgcaggcgtcc

SEQ ID NO: 805274 - DNA, 25 bp, Homo sapien
caggcgtccgggatagaatggttac

SEQ ID NO: 805275 - DNA, 25 bp, Homo sapien
aagctcacgtagtgggactcccctg

SEQ ID NO: 805276 - DNA, 25 bp, Homo sapien
tggttactaccatcaaagctcacgt

SEQ ID NO: 805277 - DNA, 25 bp, Homo sapien
cctgggcatcgtagatgtcaatgta

SEQ ID NO: 805278 - DNA, 25 bp, Homo sapien
catgaaggcggaaagcctcagttcc

SEQ ID NO: 805279 - DNA, 25 bp, Homo sapien
tcaatgtagacctcatgaaggcgga

SEQ ID NO: 805280 - DNA, 25 bp, Homo sapien
ggtgacctgggcatcgtagatgtca

SEQ ID NO: 805281 - DNA, 25 bp, Homo sapien
ccccgatcttgatgttaacaatgct

SEQ ID NO: 805282 - DNA, 25 bp, Homo sapien
gatgctgctggacttgacactgacc

SEQ ID NO: 805283 - DNA, 25 bp, Homo sapien
gtcaaacttgacttgcaccccgatc

SEQ ID NO: 805284 - DNA, 25 bp, Homo sapien
aatctctaagagatgattcccgtca

SEQ ID NO: 805285 - DNA, 25 bp, Homo sapien
tcactgtcactatttgctacttcat

SEQ ID NO: 805286 - DNA, 25 bp, Homo sapien
tatctttccaactgttcacaaattc

SEQ ID NO: 805287 - DNA, 25 bp, Homo sapien
ctcttcctcatcattgaagttccca

SEQ ID NO: 805288 - DNA, 25 bp, Homo sapien
gggcatcattagttcgtcctcttcc

SEQ ID NO: 805289 - DNA, 25 bp, Homo sapien
gtttccactcgggttctcctgctgt

SEQ ID NO: 805290 - DNA, 25 bp, Homo sapien
tgcagtttccactcgggttctcctg

SEQ ID NO: 805291 - DNA, 25 bp, Homo sapien
gggttctcctgctgttccgctggaa

SEQ ID NO: 805292 - DNA, 25 bp, Homo sapien
ggaggtcggccgccctgcagtttcc

SEQ ID NO: 805293 - DNA, 25 bp, Homo sapien
tggccccgaaggcttgcagagcctg

SEQ ID NO: 805294 - DNA, 25 bp, Homo sapien
gagggcctggtagagacctccgaac

SEQ ID NO: 805295 - DNA, 25 bp, Homo sapien
gacctccgaactcacagagggtgtt

SEQ ID NO: 805296 - DNA, 25 bp, Homo sapien
ccaggaagggcgtgaggtctatgcg

SEQ ID NO: 805297 - DNA, 25 bp, Homo sapien
actcagcacatagccgggctgacaa

SEQ ID NO: 805298 - DNA, 25 bp, Homo sapien
tggggacacacttgtcttcactcag

SEQ ID NO: 805299 - DNA, 25 bp, Homo sapien
gaaggcagttggtgtagctgctgta

SEQ ID NO: 805300 - DNA, 25 bp, Homo sapien
gcagttggtgtagctgctgtaggca

SEQ ID NO: 805301 - DNA, 25 bp, Homo sapien
ccccgggccagctgtaagtcatggg

SEQ ID NO: 805302 - DNA, 25 bp, Homo sapien
agctgtaagtcatgggtatcccagg

SEQ ID NO: 805303 - DNA, 25 bp, Homo sapien
gggccagctgtaagtcatgggtatc

SEQ ID NO: 805304 - DNA, 25 bp, Homo sapien
ccagctgtaagtcatgggtatccca

SEQ ID NO: 805305 - DNA, 25 bp, Homo sapien
acttctccgtgcaaccgctggagac

SEQ ID NO: 805306 - DNA, 25 bp, Homo sapien
tgaatggctcctcccgtgcagacac

SEQ ID NO: 805307 - DNA, 25 bp, Homo sapien
cgtgcagacacacttctccgtgcaa

SEQ ID NO: 805308 - DNA, 25 bp, Homo sapien
ggcatcggaagtccccgcactgaat

SEQ ID NO: 805309 - DNA, 25 bp, Homo sapien
cttgcaagcggtagctgaagccgtc

SEQ ID NO: 805310 - DNA, 25 bp, Homo sapien
tgatcagaacataggtcatgcggcc

SEQ ID NO: 805311 - DNA, 25 bp, Homo sapien
gctgcactttatagccgtagacggt

SEQ ID NO: 805312 - DNA, 25 bp, Homo sapien
tcttgttgcgtccttccacgaggag

SEQ ID NO: 805313 - DNA, 25 bp, Homo sapien
ccagctcaaagtcggtgaccaggta

SEQ ID NO: 805314 - DNA, 25 bp, Homo sapien
gacccgcaggtgttcatttggcctg

SEQ ID NO: 805315 - DNA, 25 bp, Homo sapien
tttttccttccaccaaagctgacga

SEQ ID NO: 805316 - DNA, 25 bp, Homo sapien
tgaccaggtagagccgttggcccca

SEQ ID NO: 805317 - DNA, 25 bp, Homo sapien
tcaccaggatttgcctgtcttaaat

SEQ ID NO: 805318 - DNA, 25 bp, Homo sapien
tctgaagctgggtgccccactaccg

SEQ ID NO: 805319 - DNA, 25 bp, Homo sapien
gggccgagtctgctcaccaggattt

SEQ ID NO: 805320 - DNA, 25 bp, Homo sapien
ctgggtgccccactaccgggccgag

SEQ ID NO: 805321 - DNA, 25 bp, Homo sapien
ttgtcgtagtttccgcacaggccac

SEQ ID NO: 805322 - DNA, 25 bp, Homo sapien
catgtcattcttgcggttcttgtcg

SEQ ID NO: 805323 - DNA, 25 bp, Homo sapien
gcaggagtgcgtcctcggtcttcac

SEQ ID NO: 805324 - DNA, 25 bp, Homo sapien
tcacaagcccctcgtacatgctggg

SEQ ID NO: 805325 - DNA, 25 bp, Homo sapien
attcggacacttggaggcccgtgcg

SEQ ID NO: 805326 - DNA, 25 bp, Homo sapien
ccctacaggcctgggtgctgttgct

SEQ ID NO: 805327 - DNA, 25 bp, Homo sapien
agctgctccgggctacattcggaca

SEQ ID NO: 805328 - DNA, 25 bp, Homo sapien
gggctacattcggacacttggaggc

SEQ ID NO: 805329 - DNA, 25 bp, Homo sapien
agagcacagatccagcacgcagtgc

SEQ ID NO: 805330 - DNA, 25 bp, Homo sapien
aggacctggcaacgcagctcctctt

SEQ ID NO: 805331 - DNA, 25 bp, Homo sapien
ggtcctgagcagagcacagatccag

SEQ ID NO: 805332 - DNA, 25 bp, Homo sapien
tcctcttgctctcttgggtcctgag

SEQ ID NO: 805333 - DNA, 25 bp, Homo sapien
gagggtgcggtcccgccagccagcc

SEQ ID NO: 805334 - DNA, 25 bp, Homo sapien
agagggtgcggtcccgccagccagc

SEQ ID NO: 805335 - DNA, 25 bp, Homo sapien
ggacagtcatggtcagaaactggct

SEQ ID NO: 805336 - DNA, 25 bp, Homo sapien
cggggacagtcatggtcagaaactg

SEQ ID NO: 805337 - DNA, 25 bp, Homo sapien
cagtcatggtcagaaactggctggg

SEQ ID NO: 805338 - DNA, 25 bp, Homo sapien
ctgcggggacagtcatggtcagaaa

SEQ ID NO: 805339 - DNA, 25 bp, Homo sapien
ggatgctgggcagggtgtcatacag

SEQ ID NO: 805340 - DNA, 25 bp, Homo sapien
gggtgtcatacagctctgatatatg

SEQ ID NO: 805341 - DNA, 25 bp, Homo sapien
ggcagggtgtcatacagctctgata

SEQ ID NO: 805342 - DNA, 25 bp, Homo sapien
atatggtacctgctggacactccat

SEQ ID NO: 805343 - DNA, 25 bp, Homo sapien
cctgggatgctggcgcagccttcca

SEQ ID NO: 805344 - DNA, 25 bp, Homo sapien
gcctgggatgctggcgcagccttcc

SEQ ID NO: 805345 - DNA, 25 bp, Homo sapien
gggatgctggcgcagccttccacgc

SEQ ID NO: 805346 - DNA, 25 bp, Homo sapien
ggatgctggcgcagccttccacgca

SEQ ID NO: 805347 - DNA, 25 bp, Homo sapien
tagtagatgccattgctggtgcagc

SEQ ID NO: 805348 - DNA, 25 bp, Homo sapien
ggtagtagatgccattgctggtgca

SEQ ID NO: 805349 - DNA, 25 bp, Homo sapien
gtagatgccattgctggtgcagcca

SEQ ID NO: 805350 - DNA, 25 bp, Homo sapien
agtagatgccattgctggtgcagcc

SEQ ID NO: 805351 - DNA, 25 bp, Homo sapien
tggtctggctctccttggcgcctct

SEQ ID NO: 805352 - DNA, 25 bp, Homo sapien
gttccagttccatccctggtctggc

SEQ ID NO: 805353 - DNA, 25 bp, Homo sapien
ggtctggctctccttggcgcctctg

SEQ ID NO: 805354 - DNA, 25 bp, Homo sapien
ccctggtctggctctccttggcgcc

SEQ ID NO: 805355 - DNA, 25 bp, Homo sapien
agcagccttgggtgtggttccccag

SEQ ID NO: 805356 - DNA, 25 bp, Homo sapien
cagcaggatccgtgagctggcacag

SEQ ID NO: 805357 - DNA, 25 bp, Homo sapien
acaggtgcaccgctgagagcagtcc

SEQ ID NO: 805358 - DNA, 25 bp, Homo sapien
cagggtgcagacctcccccgctctg

SEQ ID NO: 805359 - DNA, 25 bp, Homo sapien
caggggttctgcagacacgggcttt

SEQ ID NO: 805360 - DNA, 25 bp, Homo sapien
tgcccgtcattctgacaggggttct

SEQ ID NO: 805361 - DNA, 25 bp, Homo sapien
aggtggcgcatctcgaggctccata

SEQ ID NO: 805362 - DNA, 25 bp, Homo sapien
gtaaccaacttcacactcgcaggtg

SEQ ID NO: 805363 - DNA, 25 bp, Homo sapien
gtaaatgcactctctggtcacggcc

SEQ ID NO: 805364 - DNA, 25 bp, Homo sapien
agtaggacgcccaccaggttagatg

SEQ ID NO: 805365 - DNA, 25 bp, Homo sapien
ttcctcctcgttctgtaaatgcact

SEQ ID NO: 805366 - DNA, 25 bp, Homo sapien
ggccagtagtacgaccaccacaggc

SEQ ID NO: 805367 - DNA, 25 bp, Homo sapien
gccagtctgtctccctcctgcgttt

SEQ ID NO: 805368 - DNA, 25 bp, Homo sapien
gcctggccagtctgtctccctcctg

SEQ ID NO: 805369 - DNA, 25 bp, Homo sapien
agtctgtctccctcctgcgttttct

SEQ ID NO: 805370 - DNA, 25 bp, Homo sapien
gtccaccagcctggccagtctgtct

SEQ ID NO: 805371 - DNA, 25 bp, Homo sapien
ttaacaggcacagtccagaacagta

SEQ ID NO: 805372 - DNA, 25 bp, Homo sapien
taacaggcacagtccagaacagtat

SEQ ID NO: 805373 - DNA, 25 bp, Homo sapien
cttcttgtctgaagacagctcaaaa

SEQ ID NO: 805374 - DNA, 25 bp, Homo sapien
agataaggtgtcctagagagctgta

SEQ ID NO: 805375 - DNA, 25 bp, Homo sapien
tagataaggtgtcctagagagctgt

SEQ ID NO: 805376 - DNA, 25 bp, Homo sapien
ctagataaggtgtcctagagagctg

SEQ ID NO: 805377 - DNA, 25 bp, Homo sapien
gataaggtgtcctagagagctgtag

SEQ ID NO: 805378 - DNA, 25 bp, Homo sapien
tccaaatgccccgctttctttcttg

SEQ ID NO: 805379 - DNA, 25 bp, Homo sapien
cctccaaatgccccgctttctttct

SEQ ID NO: 805380 - DNA, 25 bp, Homo sapien
caaatgccccgctttctttcttgcc

SEQ ID NO: 805381 - DNA, 25 bp, Homo sapien
aaatgccccgctttctttcttgcca

SEQ ID NO: 805382 - DNA, 25 bp, Homo sapien
ttagaggcagtgcggggagagtgtc

SEQ ID NO: 805383 - DNA, 25 bp, Homo sapien
gctgccttcatattgaaggtttttg

SEQ ID NO: 805384 - DNA, 25 bp, Homo sapien
tgtttttctaccgtccttgtcataa

SEQ ID NO: 805385 - DNA, 25 bp, Homo sapien
gagggaacctgtttcactatggcct

SEQ ID NO: 805386 - DNA, 25 bp, Homo sapien
acccagaaacggacgccggtgcttg

SEQ ID NO: 805387 - DNA, 25 bp, Homo sapien
tgcagtcccaaacacttcggaccga

SEQ ID NO: 805388 - DNA, 25 bp, Homo sapien
gcggcgccatggagctccgggtgct

SEQ ID NO: 805389 - DNA, 25 bp, Homo sapien
tctgctgggcttcgttggccgcagc

SEQ ID NO: 805390 - DNA, 25 bp, Homo sapien
tctgactacccctacccgggcactg

SEQ ID NO: 805391 - DNA, 25 bp, Homo sapien
actccctgaacagtcgttcttagct

SEQ ID NO: 805392 - DNA, 25 bp, Homo sapien
tccctgaacagtcgttcttagctct

SEQ ID NO: 805393 - DNA, 25 bp, Homo sapien
ctgaacagtcgttcttagctctggc

SEQ ID NO: 805394 - DNA, 25 bp, Homo sapien
cctgaacagtcgttcttagctctgg

SEQ ID NO: 805395 - DNA, 25 bp, Homo sapien
agagggcaaccaacgagaggacgcc

SEQ ID NO: 805396 - DNA, 25 bp, Homo sapien
ccgccgctttttctgcggttgcgtc

SEQ ID NO: 805397 - DNA, 25 bp, Homo sapien
cagagcgtccacaccgccgcttttt

SEQ ID NO: 805398 - DNA, 25 bp, Homo sapien
ggcttcagagagagggcaaccaacg

SEQ ID NO: 805399 - DNA, 25 bp, Homo sapien
tccacagtttgatgagaatatgatc

SEQ ID NO: 805400 - DNA, 25 bp, Homo sapien
cttccacagtttgatgagaatatga

SEQ ID NO: 805401 - DNA, 25 bp, Homo sapien
ccacagtttgatgagaatatgatct

SEQ ID NO: 805402 - DNA, 25 bp, Homo sapien
ttcttccacagtttgatgagaatat

SEQ ID NO: 805403 - DNA, 25 bp, Homo sapien
cattatacaaacaaggcttttttag

SEQ ID NO: 805404 - DNA, 25 bp, Homo sapien
aactgtaaaataataggaccatagc

SEQ ID NO: 805405 - DNA, 25 bp, Homo sapien
gcaaatgagtcctgcgatgagtttt

SEQ ID NO: 805406 - DNA, 25 bp, Homo sapien
ttaagagaactacaccttattccca

SEQ ID NO: 805407 - DNA, 25 bp, Homo sapien
gcacgggggccggaaaagacagctg

SEQ ID NO: 805408 - DNA, 25 bp, Homo sapien
gaaaagacagctgcggctaccggga

SEQ ID NO: 805409 - DNA, 25 bp, Homo sapien
caggacgcagcgctcgggggcgatc

SEQ ID NO: 805410 - DNA, 25 bp, Homo sapien
tccgctcgggcggagagtgcacggg

SEQ ID NO: 805411 - DNA, 25 bp, Homo sapien
caaaggttctctgacggcacaggct

SEQ ID NO: 805412 - DNA, 25 bp, Homo sapien
taagttacgggcaggagagccttcc

SEQ ID NO: 805413 - DNA, 25 bp, Homo sapien
cctgagactagggatggcaccggtt

SEQ ID NO: 805414 - DNA, 25 bp, Homo sapien
gcaactcaaaaaagtccgtgggctg

SEQ ID NO: 805415 - DNA, 25 bp, Homo sapien
aggtagaggaagccacaaatgggtt

SEQ ID NO: 805416 - DNA, 25 bp, Homo sapien
tgagcacaggtagaggaagccacaa

SEQ ID NO: 805417 - DNA, 25 bp, Homo sapien
acaggtagaggaagccacaaatggg

SEQ ID NO: 805418 - DNA, 25 bp, Homo sapien
gcacaggtagaggaagccacaaatg

SEQ ID NO: 805419 - DNA, 25 bp, Homo sapien
aggaaggtggacagcttccgggcag

SEQ ID NO: 805420 - DNA, 25 bp, Homo sapien
ccccaggagccggtaggccagcaga

SEQ ID NO: 805421 - DNA, 25 bp, Homo sapien
agcttccgggcagacgcccctccag

SEQ ID NO: 805422 - DNA, 25 bp, Homo sapien
gaaaaacaactatgctgaacatgga

SEQ ID NO: 805423 - DNA, 25 bp, Homo sapien
cgcccccctgcacggctccattggt

SEQ ID NO: 805424 - DNA, 25 bp, Homo sapien
ctgcacggctccattggtggcgatg

SEQ ID NO: 805425 - DNA, 25 bp, Homo sapien
cacggctccattggtggcgatggca

SEQ ID NO: 805426 - DNA, 25 bp, Homo sapien
ccccctgcacggctccattggtggc

SEQ ID NO: 805427 - DNA, 25 bp, Homo sapien
gccagaccccagtccatcgatgttg

SEQ ID NO: 805428 - DNA, 25 bp, Homo sapien
gaccccagtccatcgatgttggagg

SEQ ID NO: 805429 - DNA, 25 bp, Homo sapien
ccagtccatcgatgttggaggatac

SEQ ID NO: 805430 - DNA, 25 bp, Homo sapien
cagaccccagtccatcgatgttgga

SEQ ID NO: 805431 - DNA, 25 bp, Homo sapien
ctgaaatggacgtgaggaagttgcc

SEQ ID NO: 805432 - DNA, 25 bp, Homo sapien
gaagttgccatagctccaagcactg

SEQ ID NO: 805433 - DNA, 25 bp, Homo sapien
tggctttgcccaagtcactcatatc

SEQ ID NO: 805434 - DNA, 25 bp, Homo sapien
gaaattggcatcaacgtgcagggca

SEQ ID NO: 805435 - DNA, 25 bp, Homo sapien
ggtagaacatgagcccaatgctgcc

SEQ ID NO: 805436 - DNA, 25 bp, Homo sapien
cgttagccaggtagaacatgagccc

SEQ ID NO: 805437 - DNA, 25 bp, Homo sapien
cagccacagacgttagccaggtaga

SEQ ID NO: 805438 - DNA, 25 bp, Homo sapien
gccccgaagacatcaagcacagact

SEQ ID NO: 805439 - DNA, 25 bp, Homo sapien
tagatggttagctccctgcaggcaa

SEQ ID NO: 805440 - DNA, 25 bp, Homo sapien
catatctcctgcacgatgctggcca

SEQ ID NO: 805441 - DNA, 25 bp, Homo sapien
tgtgacccaaagcaagacaagccct

SEQ ID NO: 805442 - DNA, 25 bp, Homo sapien
tagcctggtctctccgattagatgg

SEQ ID NO: 805443 - DNA, 25 bp, Homo sapien
agctgaggcaggtggatcacttgag

SEQ ID NO: 805444 - DNA, 25 bp, Homo sapien
agagtgagaccttctctcaagaaaa

SEQ ID NO: 805445 - DNA, 25 bp, Homo sapien
cgcctgtaatcccaacactttggga

SEQ ID NO: 805446 - DNA, 25 bp, Homo sapien
agaaggggcagggcgccggggctca

SEQ ID NO: 805447 - DNA, 25 bp, Homo sapien
acagagttagaaggcccgatcctaa

SEQ ID NO: 805448 - DNA, 25 bp, Homo sapien
cgatcctaaggcaccccaccagccg

SEQ ID NO: 805449 - DNA, 25 bp, Homo sapien
gggacagagttagaaggcccgatcc

SEQ ID NO: 805450 - DNA, 25 bp, Homo sapien
gatcctaaggcaccccaccagccgg

SEQ ID NO: 805451 - DNA, 25 bp, Homo sapien
aatgtgaggaatgaggcccgggcat

SEQ ID NO: 805452 - DNA, 25 bp, Homo sapien
gtcaagcggatgtccctcggcccca

SEQ ID NO: 805453 - DNA, 25 bp, Homo sapien
acagcaggttccagccgtagccctg

SEQ ID NO: 805454 - DNA, 25 bp, Homo sapien
cggagcccactgggccctgtggcat

SEQ ID NO: 805455 - DNA, 25 bp, Homo sapien
cggcagggaggagccattggggcca

SEQ ID NO: 805456 - DNA, 25 bp, Homo sapien
ggcggcagggaggagccattggggc

SEQ ID NO: 805457 - DNA, 25 bp, Homo sapien
gcagggaggagccattggggccagg

SEQ ID NO: 805458 - DNA, 25 bp, Homo sapien
cagggaggagccattggggccaggc

SEQ ID NO: 805459 - DNA, 25 bp, Homo sapien
caagttgtccttcagggtactgctg

SEQ ID NO: 805460 - DNA, 25 bp, Homo sapien
ccttcagggtactgctgttgaagcc

SEQ ID NO: 805461 - DNA, 25 bp, Homo sapien
ttgtccttcagggtactgctgttga

SEQ ID NO: 805462 - DNA, 25 bp, Homo sapien
cgcccaagttgtccttcagggtact

SEQ ID NO: 805463 - DNA, 25 bp, Homo sapien
tccctgccacggcagcacccagctc

SEQ ID NO: 805464 - DNA, 25 bp, Homo sapien
cctgccacggcagcacccagctcac

SEQ ID NO: 805465 - DNA, 25 bp, Homo sapien
cccgagatccctgccacggcagcac

SEQ ID NO: 805466 - DNA, 25 bp, Homo sapien
cgagatccctgccacggcagcaccc

SEQ ID NO: 805467 - DNA, 25 bp, Homo sapien
cggctcactgaatggcacaatctcg

SEQ ID NO: 805468 - DNA, 25 bp, Homo sapien
gcacacgctagacaggcttgaatta

SEQ ID NO: 805469 - DNA, 25 bp, Homo sapien
ctcatccagaggttttacgggcccg

SEQ ID NO: 805470 - DNA, 25 bp, Homo sapien
gtttaagtcatgctgggccattctg

SEQ ID NO: 805471 - DNA, 25 bp, Homo sapien
gagtgcatcagcatccgtctcaggg

SEQ ID NO: 805472 - DNA, 25 bp, Homo sapien
agtgctccgatattcctccctccag

SEQ ID NO: 805473 - DNA, 25 bp, Homo sapien
gggtcagccagacacattgccacgt

SEQ ID NO: 805474 - DNA, 25 bp, Homo sapien
cagaccctaatccacgctcttttat

SEQ ID NO: 805475 - DNA, 25 bp, Homo sapien
aattcatcacggctcccgtggtgta

SEQ ID NO: 805476 - DNA, 25 bp, Homo sapien
agcaaagacgctggcaaaattcatc

SEQ ID NO: 805477 - DNA, 25 bp, Homo sapien
gccatgatgcctgtacagccgttaa

SEQ ID NO: 805478 - DNA, 25 bp, Homo sapien
cccgtggtgtagtcctcagcatagc

SEQ ID NO: 805479 - DNA, 25 bp, Homo sapien
ctgggtccctcacggtggcagcccc

SEQ ID NO: 805480 - DNA, 25 bp, Homo sapien
ggagtgaggtcagccctccagccat

SEQ ID NO: 805481 - DNA, 25 bp, Homo sapien
gtccctcacggtggcagccccaaac

SEQ ID NO: 805482 - DNA, 25 bp, Homo sapien
gcagagggagtgaggtcagccctcc

SEQ ID NO: 805483 - DNA, 25 bp, Homo sapien
aggtgtaggcgacggcgacgatcgt

SEQ ID NO: 805484 - DNA, 25 bp, Homo sapien
tgcccagagggatcgcccggctggg

SEQ ID NO: 805485 - DNA, 25 bp, Homo sapien
taggcgacggcgacgatcgtgccca

SEQ ID NO: 805486 - DNA, 25 bp, Homo sapien
ggacatagacgaagaaggtgtaggc

SEQ ID NO: 805487 - DNA, 25 bp, Homo sapien
taggttgtcaatcgccggtagccac

SEQ ID NO: 805488 - DNA, 25 bp, Homo sapien
tgcaaactgggtagaaagccactac

SEQ ID NO: 805489 - DNA, 25 bp, Homo sapien
taagtgcctgcaacagtactgggtc

SEQ ID NO: 805490 - DNA, 25 bp, Homo sapien
tcaaatgtgctaaagggatatgcct

SEQ ID NO: 805491 - DNA, 25 bp, Homo sapien
catagattccgatcaacaccagtgg

SEQ ID NO: 805492 - DNA, 25 bp, Homo sapien
gggaggcaccaatgagcgagctcat

SEQ ID NO: 805493 - DNA, 25 bp, Homo sapien
cgctgagagcgctgtggcatagatt

SEQ ID NO: 805494 - DNA, 25 bp, Homo sapien
gaacccatagtcttcctgcagcagg

SEQ ID NO: 805495 - DNA, 25 bp, Homo sapien
agggcgtgctccaagccagcaagga

SEQ ID NO: 805496 - DNA, 25 bp, Homo sapien
agacagacaagggagggcgtgctcc

SEQ ID NO: 805497 - DNA, 25 bp, Homo sapien
gggctcagcggggacggagagacag

SEQ ID NO: 805498 - DNA, 25 bp, Homo sapien
agacacatcagccagggctcagcgg

SEQ ID NO: 805499 - DNA, 25 bp, Homo sapien
taaagtacagctgcccaggggtttc

SEQ ID NO: 805500 - DNA, 25 bp, Homo sapien
gaataaagtacagctgcccaggggt

SEQ ID NO: 805501 - DNA, 25 bp, Homo sapien
cctcgggacacaaccttggccggtg

SEQ ID NO: 805502 - DNA, 25 bp, Homo sapien
aaccttggccggtgccaagatcacg

SEQ ID NO: 805503 - DNA, 25 bp, Homo sapien
aagaggcgtgccgttgttccaaagt

SEQ ID NO: 805504 - DNA, 25 bp, Homo sapien
atgaaccccagagagtgccagtgca

SEQ ID NO: 805505 - DNA, 25 bp, Homo sapien
aaaagtgcccgtgagccctgtaaag

SEQ ID NO: 805506 - DNA, 25 bp, Homo sapien
agtgaaccctgcacaatgcccgtgt

SEQ ID NO: 805507 - DNA, 25 bp, Homo sapien
cggcagcataggccaccaggtagaa

SEQ ID NO: 805508 - DNA, 25 bp, Homo sapien
cacggcagcataggccaccaggtag

SEQ ID NO: 805509 - DNA, 25 bp, Homo sapien
gcagcataggccaccaggtagaaga

SEQ ID NO: 805510 - DNA, 25 bp, Homo sapien
tccacggcagcataggccaccaggt

SEQ ID NO: 805511 - DNA, 25 bp, Homo sapien
ggcaggccgcacacgaggctgcagt

SEQ ID NO: 805512 - DNA, 25 bp, Homo sapien
gcaggccgcacacgaggctgcagtc

SEQ ID NO: 805513 - DNA, 25 bp, Homo sapien
agggcaggccgcacacgaggctgca

SEQ ID NO: 805514 - DNA, 25 bp, Homo sapien
ccagccccacgcctgagcccgagtc

SEQ ID NO: 805515 - DNA, 25 bp, Homo sapien
ctcctcgcgcggtgagcagggcagc

SEQ ID NO: 805516 - DNA, 25 bp, Homo sapien
tgatgaggaacatcatgagcaggca

SEQ ID NO: 805517 - DNA, 25 bp, Homo sapien
ctactggggcctcctcgcgcggtga

SEQ ID NO: 805518 - DNA, 25 bp, Homo sapien
accagccgcgccaggactgatgagg

SEQ ID NO: 805519 - DNA, 25 bp, Homo sapien
aggtctcccagggtgacgtggccca

SEQ ID NO: 805520 - DNA, 25 bp, Homo sapien
ggacgtccagccgaagcagatactt

SEQ ID NO: 805521 - DNA, 25 bp, Homo sapien
ccttcttaagctggttggccaaccg

SEQ ID NO: 805522 - DNA, 25 bp, Homo sapien
tcacgtgatccttccggacgtccag

SEQ ID NO: 805523 - DNA, 25 bp, Homo sapien
aggctgagccatgccccatactgcg

SEQ ID NO: 805524 - DNA, 25 bp, Homo sapien
tgtacagggtccgagggcagggagt

SEQ ID NO: 805525 - DNA, 25 bp, Homo sapien
catgccccatactgcggctgtacag

SEQ ID NO: 805526 - DNA, 25 bp, Homo sapien
ccatactgcggctgtacagggtccg

SEQ ID NO: 805527 - DNA, 25 bp, Homo sapien
gccggagattcgcagcagatgctga

SEQ ID NO: 805528 - DNA, 25 bp, Homo sapien
aggccggagattcgcagcagatgct

SEQ ID NO: 805529 - DNA, 25 bp, Homo sapien
gagggttagatccacaaaagccttc

SEQ ID NO: 805530 - DNA, 25 bp, Homo sapien
cctggcgcacggagggtgagagggt

SEQ ID NO: 805531 - DNA, 25 bp, Homo sapien
cctgatcagccaagctcatgacctg

SEQ ID NO: 805532 - DNA, 25 bp, Homo sapien
ccccagggtaatagcgtcccagact

SEQ ID NO: 805533 - DNA, 25 bp, Homo sapien
tgtgcaaaccagacaccctgatcag

SEQ ID NO: 805534 - DNA, 25 bp, Homo sapien
gatcagccaagctcatgacctgaat

SEQ ID NO: 805535 - DNA, 25 bp, Homo sapien
tcacggcaggggatgcgagtttgac

SEQ ID NO: 805536 - DNA, 25 bp, Homo sapien
cacggcaggggatgcgagtttgact

SEQ ID NO: 805537 - DNA, 25 bp, Homo sapien
tccacttaaacaggcaaagttcgcc

SEQ ID NO: 805538 - DNA, 25 bp, Homo sapien
ttatctcagtgactaatctcctcca

SEQ ID NO: 805539 - DNA, 25 bp, Homo sapien
aaagttcgccttaggattcttgcca

SEQ ID NO: 805540 - DNA, 25 bp, Homo sapien
taatgagcactccaattctatggag

SEQ ID NO: 805541 - DNA, 25 bp, Homo sapien
gaccaacgtgttgggcttcatgcca

SEQ ID NO: 805542 - DNA, 25 bp, Homo sapien
ggatcctcagttggctcagcagtgc

SEQ ID NO: 805543 - DNA, 25 bp, Homo sapien
gttagagtctccagtagcgccaggt

SEQ ID NO: 805544 - DNA, 25 bp, Homo sapien
ggagcgtcatcgtagaaacctagga

SEQ ID NO: 805545 - DNA, 25 bp, Homo sapien
gatcagtgcaggtgactggagtgac

SEQ ID NO: 805546 - DNA, 25 bp, Homo sapien
ccaaggatcaggataggccgcctgc

SEQ ID NO: 805547 - DNA, 25 bp, Homo sapien
gccctctctacctagccctggaggc

SEQ ID NO: 805548 - DNA, 25 bp, Homo sapien
tccaaggatcaggataggccgcctg

SEQ ID NO: 805549 - DNA, 25 bp, Homo sapien
caaggatcaggataggccgcctgcc

SEQ ID NO: 805550 - DNA, 25 bp, Homo sapien
tagcatcaaggcaccagtgaaggga

SEQ ID NO: 805551 - DNA, 25 bp, Homo sapien
caggatccccttcaaacctcccctg

SEQ ID NO: 805552 - DNA, 25 bp, Homo sapien
cacccagagttagtgtgctggggtc

SEQ ID NO: 805553 - DNA, 25 bp, Homo sapien
tccctctgccaaaggaggtgggcgt

SEQ ID NO: 805554 - DNA, 25 bp, Homo sapien
tgggccggtgagtctggccaaaatg

SEQ ID NO: 805555 - DNA, 25 bp, Homo sapien
aaaacatcaccaccccagtgggccg

SEQ ID NO: 805556 - DNA, 25 bp, Homo sapien
cagtgggccggtgagtctggccaaa

SEQ ID NO: 805557 - DNA, 25 bp, Homo sapien
acgaaaacatcaccaccccagtggg

SEQ ID NO: 805558 - DNA, 25 bp, Homo sapien
tggtcttttattcatggtcagcaga

SEQ ID NO: 805559 - DNA, 25 bp, Homo sapien
ttggtcttttattcatggtcagcag

SEQ ID NO: 805560 - DNA, 25 bp, Homo sapien
tttggggacgaccacgcctccgatg

SEQ ID NO: 805561 - DNA, 25 bp, Homo sapien
tccgatgacgtcaccacattcctgg

SEQ ID NO: 805562 - DNA, 25 bp, Homo sapien
ccgcacctcgtttgggactccagaa

SEQ ID NO: 805563 - DNA, 25 bp, Homo sapien
gggactccagacagcggtcttgaag

SEQ ID NO: 805564 - DNA, 25 bp, Homo sapien
cgcgggggatcgccctcccctgagg

SEQ ID NO: 805565 - DNA, 25 bp, Homo sapien
gctccggctgcttcgggggcagcca

SEQ ID NO: 805566 - DNA, 25 bp, Homo sapien
ctccggctgcttcgggggcagccag

SEQ ID NO: 805567 - DNA, 25 bp, Homo sapien
tgccgcgggggatcgccctcccctg

SEQ ID NO: 805568 - DNA, 25 bp, Homo sapien
ggctcttctgtctcacaagggctgc

SEQ ID NO: 805569 - DNA, 25 bp, Homo sapien
cccaagagagcgcaggcggctgttc

SEQ ID NO: 805570 - DNA, 25 bp, Homo sapien
agcggtaggacagaggtgagcgcca

SEQ ID NO: 805571 - DNA, 25 bp, Homo sapien
tatatttgaggagccaccctctccg

SEQ ID NO: 805572 - DNA, 25 bp, Homo sapien
cagatggaagggggcaaaaattgac

SEQ ID NO: 805573 - DNA, 25 bp, Homo sapien
gctcagatggaagggggcaaaaatt

SEQ ID NO: 805574 - DNA, 25 bp, Homo sapien
ctgctcagatggaagggggcaaaaa

SEQ ID NO: 805575 - DNA, 25 bp, Homo sapien
ctcagatggaagggggcaaaaattg

SEQ ID NO: 805576 - DNA, 25 bp, Homo sapien
cgtgtgctggagtactccatgggac

SEQ ID NO: 805577 - DNA, 25 bp, Homo sapien
tgcgtgtgctggagtactccatggg

SEQ ID NO: 805578 - DNA, 25 bp, Homo sapien
gtgctggagtactccatgggacccc

SEQ ID NO: 805579 - DNA, 25 bp, Homo sapien
gctggagtactccatgggaccccac

SEQ ID NO: 805580 - DNA, 25 bp, Homo sapien
cctgggtccctcagactcggttctg

SEQ ID NO: 805581 - DNA, 25 bp, Homo sapien
catgtcccaccccacgatcccgggt

SEQ ID NO: 805582 - DNA, 25 bp, Homo sapien
tcggttctgggggatcccacatgtc

SEQ ID NO: 805583 - DNA, 25 bp, Homo sapien
agaatgcaaatcaccataggccttc

SEQ ID NO: 805584 - DNA, 25 bp, Homo sapien
tatctcggcgtccaggcttccaggg

SEQ ID NO: 805585 - DNA, 25 bp, Homo sapien
tcagcaagtctatctcggcgtccag

SEQ ID NO: 805586 - DNA, 25 bp, Homo sapien
tggtcgccgtgacgcatgaccccga

SEQ ID NO: 805587 - DNA, 25 bp, Homo sapien
ctgtcggtctggtcgccgtgacgca

SEQ ID NO: 805588 - DNA, 25 bp, Homo sapien
ccagaagtcgtaagcaaggacccca

SEQ ID NO: 805589 - DNA, 25 bp, Homo sapien
ggtcccgtcctcaagtggctgacat

SEQ ID NO: 805590 - DNA, 25 bp, Homo sapien
tttgtggaaatgaccctggctgtgg

SEQ ID NO: 805591 - DNA, 25 bp, Homo sapien
tgacatgttggtacttgcagccacg

SEQ ID NO: 805592 - DNA, 25 bp, Homo sapien
gctggcggtagtgtaagaggctgga

SEQ ID NO: 805593 - DNA, 25 bp, Homo sapien
gggcccccatagggagacgctggga

SEQ ID NO: 805594 - DNA, 25 bp, Homo sapien
gctgggagcggcgaggctggatttg

SEQ ID NO: 805595 - DNA, 25 bp, Homo sapien
ccgtgcggtaggcaggaggtggcgg

SEQ ID NO: 805596 - DNA, 25 bp, Homo sapien
gcctgagaggctccccgcctgggtg

SEQ ID NO: 805597 - DNA, 25 bp, Homo sapien
aggcctgagaggctccccgcctggg

SEQ ID NO: 805598 - DNA, 25 bp, Homo sapien
gcctgggtgggccgcagcccctcac

SEQ ID NO: 805599 - DNA, 25 bp, Homo sapien
agaggcctgagaggctccccgcctg

SEQ ID NO: 805600 - DNA, 25 bp, Homo sapien
tctctggctcctatagccaggcccc

SEQ ID NO: 805601 - DNA, 25 bp, Homo sapien
ctggggcccgtgctcgcctcctctt

SEQ ID NO: 805602 - DNA, 25 bp, Homo sapien
tggggcccgtgctcgcctcctcttc

SEQ ID NO: 805603 - DNA, 25 bp, Homo sapien
gtcggtgtcccattgtctgtagggc

SEQ ID NO: 805604 - DNA, 25 bp, Homo sapien
ccagtcggtgtcccattgtctgtag

SEQ ID NO: 805605 - DNA, 25 bp, Homo sapien
cagtcggtgtcccattgtctgtagg

SEQ ID NO: 805606 - DNA, 25 bp, Homo sapien
agtcggtgtcccattgtctgtaggg

SEQ ID NO: 805607 - DNA, 25 bp, Homo sapien
ctcggtcctactctagctcctgatg

SEQ ID NO: 805608 - DNA, 25 bp, Homo sapien
aatcgggctcggtcctactctagct

SEQ ID NO: 805609 - DNA, 25 bp, Homo sapien
gtgggaatcgggctcggtcctactc

SEQ ID NO: 805610 - DNA, 25 bp, Homo sapien
ctggaaggtgggaatcgggctcggt

SEQ ID NO: 805611 - DNA, 25 bp, Homo sapien
ctatccagctcatcctctggaggct

SEQ ID NO: 805612 - DNA, 25 bp, Homo sapien
atccagctcatcctctggaggctgg

SEQ ID NO: 805613 - DNA, 25 bp, Homo sapien
tatccagctcatcctctggaggctg

SEQ ID NO: 805614 - DNA, 25 bp, Homo sapien
tcatgtcgtgaaccagcttcttcgt

SEQ ID NO: 805615 - DNA, 25 bp, Homo sapien
tactccccgctgggcgggtggttca

SEQ ID NO: 805616 - DNA, 25 bp, Homo sapien
ctgggcgggtggttcatgtcgtgaa

SEQ ID NO: 805617 - DNA, 25 bp, Homo sapien
caaagtactccccgctgggcgggtg

SEQ ID NO: 805618 - DNA, 25 bp, Homo sapien
gaggacagggagaaacagcatcagt

SEQ ID NO: 805619 - DNA, 25 bp, Homo sapien
gtcttcacagacccaggaagccact

SEQ ID NO: 805620 - DNA, 25 bp, Homo sapien
ggaagccactgtcccctctgtctcc

SEQ ID NO: 805621 - DNA, 25 bp, Homo sapien
ggagaaacagcatcagtcttcacag

SEQ ID NO: 805622 - DNA, 25 bp, Homo sapien
gctgggcccggcatgtagaacatac

SEQ ID NO: 805623 - DNA, 25 bp, Homo sapien
acatacaaagcagcccacgtgaaag

SEQ ID NO: 805624 - DNA, 25 bp, Homo sapien
tctccacggcgtagaaatgctggcc

SEQ ID NO: 805625 - DNA, 25 bp, Homo sapien
gtgaaagacgcgatcaagggccaca

SEQ ID NO: 805626 - DNA, 25 bp, Homo sapien
tggacgctctagttaccaccttgga

SEQ ID NO: 805627 - DNA, 25 bp, Homo sapien
tccacacttgtaagagctgcgtcct

SEQ ID NO: 805628 - DNA, 25 bp, Homo sapien
tcagccaccagtgttaagctacttg

SEQ ID NO: 805629 - DNA, 25 bp, Homo sapien
tgatacttgcagaattccgccctgt

SEQ ID NO: 805630 - DNA, 25 bp, Homo sapien
aaaggcagacttgagcagatctgag

SEQ ID NO: 805631 - DNA, 25 bp, Homo sapien
ttcaggtcccagcactatacacggt

SEQ ID NO: 805632 - DNA, 25 bp, Homo sapien
agccatggcagctcaacaggaaccc

SEQ ID NO: 805633 - DNA, 25 bp, Homo sapien
gcctcctgcatgtgattcggtgaaa

SEQ ID NO: 805634 - DNA, 25 bp, Homo sapien
ctgggagcacgtggcacatttctcc

SEQ ID NO: 805635 - DNA, 25 bp, Homo sapien
gggagcacgtggcacatttctccag

SEQ ID NO: 805636 - DNA, 25 bp, Homo sapien
agcacgtggcacatttctccagggt

SEQ ID NO: 805637 - DNA, 25 bp, Homo sapien
gagcacgtggcacatttctccaggg

SEQ ID NO: 805638 - DNA, 25 bp, Homo sapien
cagtggatctggctcgtagcatcca

SEQ ID NO: 805639 - DNA, 25 bp, Homo sapien
agccagggtggtaggccttccccat

SEQ ID NO: 805640 - DNA, 25 bp, Homo sapien
ccgcggtgacacaccacgcaggtga

SEQ ID NO: 805641 - DNA, 25 bp, Homo sapien
tctggctcgtagcatccactgtgaa

SEQ ID NO: 805642 - DNA, 25 bp, Homo sapien
taacagccaatgtgaaaacttcgat

SEQ ID NO: 805643 - DNA, 25 bp, Homo sapien
ctgacctggctcaggcattatggcc

SEQ ID NO: 805644 - DNA, 25 bp, Homo sapien
tggctcaggcattatggccccaccg

SEQ ID NO: 805645 - DNA, 25 bp, Homo sapien
gatccagagcaacaattctcacagt

SEQ ID NO: 805646 - DNA, 25 bp, Homo sapien
cccagcaccctagacactgccagcc

SEQ ID NO: 805647 - DNA, 25 bp, Homo sapien
ctacccagcaccctagacactgcca

SEQ ID NO: 805648 - DNA, 25 bp, Homo sapien
tacccagcaccctagacactgccag

SEQ ID NO: 805649 - DNA, 25 bp, Homo sapien
tctacccagcaccctagacactgcc

SEQ ID NO: 805650 - DNA, 25 bp, Homo sapien
gaagcaacaattggccgggcgcgat

SEQ ID NO: 805651 - DNA, 25 bp, Homo sapien
tgttgaaaaagaagcaacaattggc

SEQ ID NO: 805652 - DNA, 25 bp, Homo sapien
ttgaaaaagaagcaacaattggccg

SEQ ID NO: 805653 - DNA, 25 bp, Homo sapien
aaaagaagcaacaattggccgggcg

SEQ ID NO: 805654 - DNA, 25 bp, Homo sapien
aagatgtgcccatccagcgggtagc

SEQ ID NO: 805655 - DNA, 25 bp, Homo sapien
ggcgctgcaggccttgcacaagatg

SEQ ID NO: 805656 - DNA, 25 bp, Homo sapien
acactcgccctcagaggagagcagc

SEQ ID NO: 805657 - DNA, 25 bp, Homo sapien
cagcgggtagcagccctgacactcg

SEQ ID NO: 805658 - DNA, 25 bp, Homo sapien
caatgactgggcctgtaatgggcta

SEQ ID NO: 805659 - DNA, 25 bp, Homo sapien
tttggtgacaaagtcatacaggtgg

SEQ ID NO: 805660 - DNA, 25 bp, Homo sapien
taatgggctactgggagaatcagat

SEQ ID NO: 805661 - DNA, 25 bp, Homo sapien
tgatcaatcaaaggatgggaactgg

SEQ ID NO: 805662 - DNA, 25 bp, Homo sapien
tgatttcgtcccctcctcgggcagg

SEQ ID NO: 805663 - DNA, 25 bp, Homo sapien
ggtgatttcgtcccctcctcgggca

SEQ ID NO: 805664 - DNA, 25 bp, Homo sapien
gaagcgcgggcgcttaggggatgga

SEQ ID NO: 805665 - DNA, 25 bp, Homo sapien
cgcgggcgcttaggggatggaaggt

SEQ ID NO: 805666 - DNA, 25 bp, Homo sapien
tggaactaacaaaccgagcgcgaag

SEQ ID NO: 805667 - DNA, 25 bp, Homo sapien
ctcgcgctcggacgggctagatttc

SEQ ID NO: 805668 - DNA, 25 bp, Homo sapien
gagaggcgaacaaaagtgggacaac

SEQ ID NO: 805669 - DNA, 25 bp, Homo sapien
tcgcgcggcttttcgagacgataac

SEQ ID NO: 805670 - DNA, 25 bp, Homo sapien
catcctaggcctgagaacgcggctc

SEQ ID NO: 805671 - DNA, 25 bp, Homo sapien
taggcctgagaacgcggctccaaca

SEQ ID NO: 805672 - DNA, 25 bp, Homo sapien
tccactcgccccgagtttctccgcg

SEQ ID NO: 805673 - DNA, 25 bp, Homo sapien
caacacctccactcgccccgagttt

SEQ ID NO: 805674 - DNA, 25 bp, Homo sapien
tctctcgcgggaacggtcgtagtcg

SEQ ID NO: 805675 - DNA, 25 bp, Homo sapien
tcttctgaacttgtccctgcgcctt

SEQ ID NO: 805676 - DNA, 25 bp, Homo sapien
gtagtcgctgcgctctcttctgaac

SEQ ID NO: 805677 - DNA, 25 bp, Homo sapien
gatcgtactcgtcatcactgtcacc

SEQ ID NO: 805678 - DNA, 25 bp, Homo sapien
taggctgaaccacagaaaacggtcc

SEQ ID NO: 805679 - DNA, 25 bp, Homo sapien
tgagccatttcataggattcgccct

SEQ ID NO: 805680 - DNA, 25 bp, Homo sapien
caagatgaagttaaaaacggctcac

SEQ ID NO: 805681 - DNA, 25 bp, Homo sapien
cagctagttatttggccaacagcaa

SEQ ID NO: 805682 - DNA, 25 bp, Homo sapien
tctcaatctctcgatctcgtgatct

SEQ ID NO: 805683 - DNA, 25 bp, Homo sapien
tctcacaggctagttagaaccttca

SEQ ID NO: 805684 - DNA, 25 bp, Homo sapien
gctgtcaagctcacattagtagaag

SEQ ID NO: 805685 - DNA, 25 bp, Homo sapien
gcatcactgcctatctcaccaagaa

SEQ ID NO: 805686 - DNA, 25 bp, Homo sapien
caatggacctggattatgtctcacc

SEQ ID NO: 805687 - DNA, 25 bp, Homo sapien
gggttacatctatcgatacttacta

SEQ ID NO: 805688 - DNA, 25 bp, Homo sapien
ctggctttgtagaggatagcttcta

SEQ ID NO: 805689 - DNA, 25 bp, Homo sapien
tcacatctgtaatgaatgctagcac

SEQ ID NO: 805690 - DNA, 25 bp, Homo sapien
gaggacaccaaagagtttctgctta

SEQ ID NO: 805691 - DNA, 25 bp, Homo sapien
gcaggtcgcggctgcagcaagcttc

SEQ ID NO: 805692 - DNA, 25 bp, Homo sapien
gctgcagcaagcttcgactgcacca

SEQ ID NO: 805693 - DNA, 25 bp, Homo sapien
caggtcgcggctgcagcaagcttcg

SEQ ID NO: 805694 - DNA, 25 bp, Homo sapien
gcagcaagcttcgactgcaccagtg

SEQ ID NO: 805695 - DNA, 25 bp, Homo sapien
gtcatagtcccgatattcaccccga

SEQ ID NO: 805696 - DNA, 25 bp, Homo sapien
tgagttcgtggcgaggtggcgagaa

SEQ ID NO: 805697 - DNA, 25 bp, Homo sapien
tggcgagaagcgctctcgccgattc

SEQ ID NO: 805698 - DNA, 25 bp, Homo sapien
ttctgtggcgggctgagttcgtggc

SEQ ID NO: 805699 - DNA, 25 bp, Homo sapien
catgatgtggacgtcagggtggccc

SEQ ID NO: 805700 - DNA, 25 bp, Homo sapien
tagccactgtggtatgggtcagagc

SEQ ID NO: 805701 - DNA, 25 bp, Homo sapien
ccagcatagggcatctcatagccac

SEQ ID NO: 805702 - DNA, 25 bp, Homo sapien
ggtgctgcatgatgtggacgtcagg

SEQ ID NO: 805703 - DNA, 25 bp, Homo sapien
ttgaaggtcttcatcacgggcggcg

SEQ ID NO: 805704 - DNA, 25 bp, Homo sapien
tctttgtgcgccaggaagaaatcct

SEQ ID NO: 805705 - DNA, 25 bp, Homo sapien
gaaatcctgcatctgttgcctccgg

SEQ ID NO: 805706 - DNA, 25 bp, Homo sapien
tcattatagcgcttgacggcctccg

SEQ ID NO: 805707 - DNA, 25 bp, Homo sapien
ggctgtggctccaccagcggggcca

SEQ ID NO: 805708 - DNA, 25 bp, Homo sapien
ttctggacagggaaaactgggaaga

SEQ ID NO: 805709 - DNA, 25 bp, Homo sapien
ggtccagggaagtaggggcactcac

SEQ ID NO: 805710 - DNA, 25 bp, Homo sapien
gccagggggacatgccagggcagag

SEQ ID NO: 805711 - DNA, 25 bp, Homo sapien
cttggccgcttggtcaaacagagct

SEQ ID NO: 805712 - DNA, 25 bp, Homo sapien
taaaccgctgcattgtgcacagcag

SEQ ID NO: 805713 - DNA, 25 bp, Homo sapien
tcgatgagcgggtgtagttcccagt

SEQ ID NO: 805714 - DNA, 25 bp, Homo sapien
aagatttaactagcggcgcccaggg

SEQ ID NO: 805715 - DNA, 25 bp, Homo sapien
ggaaaggaaagccgcaggcatcacc

SEQ ID NO: 805716 - DNA, 25 bp, Homo sapien
acagaaccacgagtggggcagaaga

SEQ ID NO: 805717 - DNA, 25 bp, Homo sapien
cagaacagaaccacgagtggggcag

SEQ ID NO: 805718 - DNA, 25 bp, Homo sapien
aggaaagccgcaggcatcacctcca

SEQ ID NO: 805719 - DNA, 25 bp, Homo sapien
acaggaaagaccgaagggagacact

SEQ ID NO: 805720 - DNA, 25 bp, Homo sapien
tccacccgtgggaagataagcaaga

SEQ ID NO: 805721 - DNA, 25 bp, Homo sapien
gtcatttcccaaagcttcagagagg

SEQ ID NO: 805722 - DNA, 25 bp, Homo sapien
gagtgccctttagagcctcaggtcc

SEQ ID NO: 805723 - DNA, 25 bp, Homo sapien
aacagttattggaagccaaggccag

SEQ ID NO: 805724 - DNA, 25 bp, Homo sapien
gacaaaacagttattggaagccaag

SEQ ID NO: 805725 - DNA, 25 bp, Homo sapien
caaaacagttattggaagccaaggc

SEQ ID NO: 805726 - DNA, 25 bp, Homo sapien
gaaagacaaaacagttattggaagc

SEQ ID NO: 805727 - DNA, 25 bp, Homo sapien
cccacctcatctgggtggtacttag

SEQ ID NO: 805728 - DNA, 25 bp, Homo sapien
ggaagaccctcagtcggttttgcag

SEQ ID NO: 805729 - DNA, 25 bp, Homo sapien
gaaggttatcaaaccagccagtctc

SEQ ID NO: 805730 - DNA, 25 bp, Homo sapien
catctgggtggtacttagaccgaaa

SEQ ID NO: 805731 - DNA, 25 bp, Homo sapien
cttcttctcatccttgtcgttggtt

SEQ ID NO: 805732 - DNA, 25 bp, Homo sapien
gcgaagatcattctccgtgcctcct

SEQ ID NO: 805733 - DNA, 25 bp, Homo sapien
ctgctccaggatgcgaagatcattc

SEQ ID NO: 805734 - DNA, 25 bp, Homo sapien
tgtcgttggttttgcgctccccgtc

SEQ ID NO: 805735 - DNA, 25 bp, Homo sapien
ttttggcttccttctcggagtcttc

SEQ ID NO: 805736 - DNA, 25 bp, Homo sapien
tccccatcaccctccgacttctttg

SEQ ID NO: 805737 - DNA, 25 bp, Homo sapien
ccctccgacttctttgttttgtcat

SEQ ID NO: 805738 - DNA, 25 bp, Homo sapien
tggcttccttctcggagtcttcttt

SEQ ID NO: 805739 - DNA, 25 bp, Homo sapien
ccagccccaacactctgaccccagg

SEQ ID NO: 805740 - DNA, 25 bp, Homo sapien
acaagtcagcgtgccagaaccccag

SEQ ID NO: 805741 - DNA, 25 bp, Homo sapien
aggggacaagtcagcgtgccagaac

SEQ ID NO: 805742 - DNA, 25 bp, Homo sapien
ggacaagtcagcgtgccagaacccc

SEQ ID NO: 805743 - DNA, 25 bp, Homo sapien
tgacacgctgccctcgtcaaagctg

SEQ ID NO: 805744 - DNA, 25 bp, Homo sapien
tgtgcttccggttccgcttcttgct

SEQ ID NO: 805745 - DNA, 25 bp, Homo sapien
gctgtcgtcaccactgtgcttccgg

SEQ ID NO: 805746 - DNA, 25 bp, Homo sapien
ggccgctctctgactccgactcaga

SEQ ID NO: 805747 - DNA, 25 bp, Homo sapien
cagcggccgcggcttgcactccagc

SEQ ID NO: 805748 - DNA, 25 bp, Homo sapien
cgatgttgcgcatgaagagggagca

SEQ ID NO: 805749 - DNA, 25 bp, Homo sapien
gagcaggtcttatgcagcggccgcg

SEQ ID NO: 805750 - DNA, 25 bp, Homo sapien
tctcggcccgggagatgttgggcgc

SEQ ID NO: 805751 - DNA, 25 bp, Homo sapien
gccctgactccacgggtccccactc

SEQ ID NO: 805752 - DNA, 25 bp, Homo sapien
cctgactccacgggtccccactcac

SEQ ID NO: 805753 - DNA, 25 bp, Homo sapien
tgccctgactccacgggtccccact

SEQ ID NO: 805754 - DNA, 25 bp, Homo sapien
cctgccctgactccacgggtcccca

SEQ ID NO: 805755 - DNA, 25 bp, Homo sapien
tggggctctgagagcgccacccgca

SEQ ID NO: 805756 - DNA, 25 bp, Homo sapien
tggctggggctctgagagcgccacc

SEQ ID NO: 805757 - DNA, 25 bp, Homo sapien
ggggctctgagagcgccacccgcat

SEQ ID NO: 805758 - DNA, 25 bp, Homo sapien
gctggggctctgagagcgccacccg

SEQ ID NO: 805759 - DNA, 25 bp, Homo sapien
aagaaaatgttagcatagtcaagcg

SEQ ID NO: 805760 - DNA, 25 bp, Homo sapien
ttagcatagtcaagcgagggagttg

SEQ ID NO: 805761 - DNA, 25 bp, Homo sapien
tggccattaacgttcccctgcactt

SEQ ID NO: 805762 - DNA, 25 bp, Homo sapien
gagttggtgttggccattaacgttc

SEQ ID NO: 805763 - DNA, 25 bp, Homo sapien
cggatgttctgcaggttccaacaga

SEQ ID NO: 805764 - DNA, 25 bp, Homo sapien
ttaacactgcggtcgaaggtcaccc

SEQ ID NO: 805765 - DNA, 25 bp, Homo sapien
gatctctttaatgttaacactgcgg

SEQ ID NO: 805766 - DNA, 25 bp, Homo sapien
gaaggtcacccagccacgacggaaa

SEQ ID NO: 805767 - DNA, 25 bp, Homo sapien
cataggttccgtccatgctaacgcc

SEQ ID NO: 805768 - DNA, 25 bp, Homo sapien
gcaccagcgattgatcagactgcga

SEQ ID NO: 805769 - DNA, 25 bp, Homo sapien
aaaacggtcaaagagtgtgcagaac

SEQ ID NO: 805770 - DNA, 25 bp, Homo sapien
aacaaagtcacacagaggtcccgtg

SEQ ID NO: 805771 - DNA, 25 bp, Homo sapien
gatgtcgttgcgcacaatctgcttg

SEQ ID NO: 805772 - DNA, 25 bp, Homo sapien
ttgatgttgcgaacgcgccgggtca

SEQ ID NO: 805773 - DNA, 25 bp, Homo sapien
agcgtgtggatcagcttggccgcca

SEQ ID NO: 805774 - DNA, 25 bp, Homo sapien
tgtgtcctgtcatccagcgtgtgga

SEQ ID NO: 805775 - DNA, 25 bp, Homo sapien
tcaggtagtcggtgatattcttcaa

SEQ ID NO: 805776 - DNA, 25 bp, Homo sapien
gtcggtgatattcttcaagatcggg

SEQ ID NO: 805777 - DNA, 25 bp, Homo sapien
aagatcgggttttgcgagggcaggc

SEQ ID NO: 805778 - DNA, 25 bp, Homo sapien
ggtagtcggtgatattcttcaagat

SEQ ID NO: 805779 - DNA, 25 bp, Homo sapien
tccacgttgatctctgccgggttcc

SEQ ID NO: 805780 - DNA, 25 bp, Homo sapien
ctcctcaggaggagcgcccccgctg

SEQ ID NO: 805781 - DNA, 25 bp, Homo sapien
ttaatcaacttctcatcccgctcca

SEQ ID NO: 805782 - DNA, 25 bp, Homo sapien
ttctcatcccgctccacgttgatct

SEQ ID NO: 805783 - DNA, 25 bp, Homo sapien
ctaagggaagtgaatgcgagcgttc

SEQ ID NO: 805784 - DNA, 25 bp, Homo sapien
ctcgtcctcgttggggtactcacag

SEQ ID NO: 805785 - DNA, 25 bp, Homo sapien
tcgttggggtactcacaggtgttgt

SEQ ID NO: 805786 - DNA, 25 bp, Homo sapien
atccaaggaatgcacgatgcgcagg

SEQ ID NO: 805787 - DNA, 25 bp, Homo sapien
taatccaaggaatgcacgatgcgca

SEQ ID NO: 805788 - DNA, 25 bp, Homo sapien
ggatgatcccacagcgattgggcat

SEQ ID NO: 805789 - DNA, 25 bp, Homo sapien
tgatgcggttgggtggcatgggccc

SEQ ID NO: 805790 - DNA, 25 bp, Homo sapien
atgggcccccgaacgtggatgatcc

SEQ ID NO: 805791 - DNA, 25 bp, Homo sapien
cttccccgtgactgatgcggttggg

SEQ ID NO: 805792 - DNA, 25 bp, Homo sapien
ttcctctgagagtgactcccgcaca

SEQ ID NO: 805793 - DNA, 25 bp, Homo sapien
cgcacactcagcaacggcgtgagct

SEQ ID NO: 805794 - DNA, 25 bp, Homo sapien
cccagttcctgcgtgttggaggtga

SEQ ID NO: 805795 - DNA, 25 bp, Homo sapien
gaggtgacgaacttctccacttcct

SEQ ID NO: 805796 - DNA, 25 bp, Homo sapien
tgttgaagatatgtttgcgcacaaa

SEQ ID NO: 805797 - DNA, 25 bp, Homo sapien
gcttgttgaagatatgtttgcgcac

SEQ ID NO: 805798 - DNA, 25 bp, Homo sapien
tatgtttgcgcacaaactcaggacc

SEQ ID NO: 805799 - DNA, 25 bp, Homo sapien
gaagatatgtttgcgcacaaactca

SEQ ID NO: 805800 - DNA, 25 bp, Homo sapien
ggcgcttagcatcagtgaggaagtt

SEQ ID NO: 805801 - DNA, 25 bp, Homo sapien
cagagctgggcgcttagcatcagtg

SEQ ID NO: 805802 - DNA, 25 bp, Homo sapien
cttagcatcagtgaggaagttgtta

SEQ ID NO: 805803 - DNA, 25 bp, Homo sapien
ctgggcgcttagcatcagtgaggaa

SEQ ID NO: 805804 - DNA, 25 bp, Homo sapien
acaggagtccctgggtagtcaagga

SEQ ID NO: 805805 - DNA, 25 bp, Homo sapien
aaggaagagggcacatgcgaccttc

SEQ ID NO: 805806 - DNA, 25 bp, Homo sapien
tacgggtacaattgacttctagggc

SEQ ID NO: 805807 - DNA, 25 bp, Homo sapien
gcgaccttcatggatcgtatcttac

SEQ ID NO: 805808 - DNA, 25 bp, Homo sapien
gggggccggggctgaccatagggca

SEQ ID NO: 805809 - DNA, 25 bp, Homo sapien
tccatagcccaagatcgggggccgg

SEQ ID NO: 805810 - DNA, 25 bp, Homo sapien
ggccggggctgaccatagggcatca

SEQ ID NO: 805811 - DNA, 25 bp, Homo sapien
tctggtgtgggtaggggagtcctgg

SEQ ID NO: 805812 - DNA, 25 bp, Homo sapien
tgttgagttgcaaaactatgtcctc

SEQ ID NO: 805813 - DNA, 25 bp, Homo sapien
ctatgacagagatcagtgttgagtt

SEQ ID NO: 805814 - DNA, 25 bp, Homo sapien
tcccaaagccacacactcaccaagc

SEQ ID NO: 805815 - DNA, 25 bp, Homo sapien
gttgcaaaactatgtcctcaattcc

SEQ ID NO: 805816 - DNA, 25 bp, Homo sapien
tgttgcgaggtttcccaggataacc

SEQ ID NO: 805817 - DNA, 25 bp, Homo sapien
tcgaccagcaccatacggggcatgg

SEQ ID NO: 805818 - DNA, 25 bp, Homo sapien
gaaggcatcatagttccctcgacca

SEQ ID NO: 805819 - DNA, 25 bp, Homo sapien
aggataacctccctggcctcggaag

SEQ ID NO: 805820 - DNA, 25 bp, Homo sapien
agggctcccaaaagggagtctgcag

SEQ ID NO: 805821 - DNA, 25 bp, Homo sapien
gaggtacaggatgagagctgagggc

SEQ ID NO: 805822 - DNA, 25 bp, Homo sapien
aagcttgggcgtctgccctcctcac

SEQ ID NO: 805823 - DNA, 25 bp, Homo sapien
tctgcaggcggcaacaaagcttggg

SEQ ID NO: 805824 - DNA, 25 bp, Homo sapien
tggcccttgggtctccacgaaccat

SEQ ID NO: 805825 - DNA, 25 bp, Homo sapien
caatggcccttgggtctccacgaac

SEQ ID NO: 805826 - DNA, 25 bp, Homo sapien
ggcccttgggtctccacgaaccatc

SEQ ID NO: 805827 - DNA, 25 bp, Homo sapien
atggcccttgggtctccacgaacca

SEQ ID NO: 805828 - DNA, 25 bp, Homo sapien
ggggcatccaggtcccgatattcca

SEQ ID NO: 805829 - DNA, 25 bp, Homo sapien
aatcaacatcgtctggggcatccag

SEQ ID NO: 805830 - DNA, 25 bp, Homo sapien
tggggcatccaggtcccgatattcc

SEQ ID NO: 805831 - DNA, 25 bp, Homo sapien
agaaatcaacatcgtctggggcatc

SEQ ID NO: 805832 - DNA, 25 bp, Homo sapien
tggatgatacaggactgaggaacgg

SEQ ID NO: 805833 - DNA, 25 bp, Homo sapien
gcttttattagcagtaaggctgatc

SEQ ID NO: 805834 - DNA, 25 bp, Homo sapien
aaggctgatcgtacaaaaaattctc

SEQ ID NO: 805835 - DNA, 25 bp, Homo sapien
tagtacaagtatggatgatacagga

SEQ ID NO: 805836 - DNA, 25 bp, Homo sapien
ggagctcctacatggtgcactggaa

SEQ ID NO: 805837 - DNA, 25 bp, Homo sapien
tgcactggaagaaccagttcgacca

SEQ ID NO: 805838 - DNA, 25 bp, Homo sapien
ttcagggctgggctataacacagac

SEQ ID NO: 805839 - DNA, 25 bp, Homo sapien
gaccactacagcaagcaggatcgct

SEQ ID NO: 805840 - DNA, 25 bp, Homo sapien
cccacgcctttgttgtttgaatgga

SEQ ID NO: 805841 - DNA, 25 bp, Homo sapien
cccttcctcctcaaaccgagagact

SEQ ID NO: 805842 - DNA, 25 bp, Homo sapien
tcctctaatgagtggtcggaccgtg

SEQ ID NO: 805843 - DNA, 25 bp, Homo sapien
ggatctcagacctagtgctcccttc

SEQ ID NO: 805844 - DNA, 25 bp, Homo sapien
caggcttcacccatggggaggctgc

SEQ ID NO: 805845 - DNA, 25 bp, Homo sapien
gcgcccaggcctgcgccttctggaa

SEQ ID NO: 805846 - DNA, 25 bp, Homo sapien
ctccccaaattgctcagcgccaccg

SEQ ID NO: 805847 - DNA, 25 bp, Homo sapien
gcgcgcccaggcctgcgccttctgg

SEQ ID NO: 805848 - DNA, 25 bp, Homo sapien
aggcctgcgccttctggaaccgctt

SEQ ID NO: 805849 - DNA, 25 bp, Homo sapien
tcctggtgaaccacgaatggcacgt

SEQ ID NO: 805850 - DNA, 25 bp, Homo sapien
tcaagaaagcgtcttccggttctcc

SEQ ID NO: 805851 - DNA, 25 bp, Homo sapien
ggtgacccgacatcagtgacgctgt

SEQ ID NO: 805852 - DNA, 25 bp, Homo sapien
aatggcacgtgctgcctcaagaaag

SEQ ID NO: 805853 - DNA, 25 bp, Homo sapien
ggtacccgagctgcgcaggttcccg

SEQ ID NO: 805854 - DNA, 25 bp, Homo sapien
ctaattggggcggtacccgagctgc

SEQ ID NO: 805855 - DNA, 25 bp, Homo sapien
cttccccgatcgctccctagtccgg

SEQ ID NO: 805856 - DNA, 25 bp, Homo sapien
cactggaagacaccccctaattggg

SEQ ID NO: 805857 - DNA, 25 bp, Homo sapien
caggtctttgggtcgcgtctgtcac

SEQ ID NO: 805858 - DNA, 25 bp, Homo sapien
tcactgcatgaggtcgtccgtctgc

SEQ ID NO: 805859 - DNA, 25 bp, Homo sapien
cgtctgtctgtcacgtgggtgtcta

SEQ ID NO: 805860 - DNA, 25 bp, Homo sapien
tctgtcactgcgctctgtcgtcggt

SEQ ID NO: 805861 - DNA, 25 bp, Homo sapien
ccatgccgatttgggccgatgtgac

SEQ ID NO: 805862 - DNA, 25 bp, Homo sapien
gatttgggccgatgtgacaagaatg

SEQ ID NO: 805863 - DNA, 25 bp, Homo sapien
agatcagaccatgccgatttgggcc

SEQ ID NO: 805864 - DNA, 25 bp, Homo sapien
ctggcagtacatattgagggcatat

SEQ ID NO: 805865 - DNA, 25 bp, Homo sapien
caataacacaatctaccacagctgg

SEQ ID NO: 805866 - DNA, 25 bp, Homo sapien
taaaatactatcagagagaggcact

SEQ ID NO: 805867 - DNA, 25 bp, Homo sapien
cgagacagggaggtatgatctaccc

SEQ ID NO: 805868 - DNA, 25 bp, Homo sapien
tcaagcgtgatatcagcgagacagg

SEQ ID NO: 805869 - DNA, 25 bp, Homo sapien
cccacggggaggccttgagcatcca

SEQ ID NO: 805870 - DNA, 25 bp, Homo sapien
ccttgagcatccagaggaggccgag

SEQ ID NO: 805871 - DNA, 25 bp, Homo sapien
tggcccacggggaggccttgagcat

SEQ ID NO: 805872 - DNA, 25 bp, Homo sapien
aggaggccgaggagccccaacagct

SEQ ID NO: 805873 - DNA, 25 bp, Homo sapien
atccactggtaaatccgtgggtcat

SEQ ID NO: 805874 - DNA, 25 bp, Homo sapien
tgcattggcggcagagcagaggaat

SEQ ID NO: 805875 - DNA, 25 bp, Homo sapien
ctgcattggcggcagagcagaggaa

SEQ ID NO: 805876 - DNA, 25 bp, Homo sapien
aggaatccactggtaaatccgtggg

SEQ ID NO: 805877 - DNA, 25 bp, Homo sapien
taaagctcgttggatacacgcactc

SEQ ID NO: 805878 - DNA, 25 bp, Homo sapien
tggctgaatagaccaacacggtggg

SEQ ID NO: 805879 - DNA, 25 bp, Homo sapien
cctgcgtcgtggtcacacagatgga

SEQ ID NO: 805880 - DNA, 25 bp, Homo sapien
tggagaattgctgagcacagcgctg

SEQ ID NO: 805881 - DNA, 25 bp, Homo sapien
atgtaggtgtagacctgctgatggt

SEQ ID NO: 805882 - DNA, 25 bp, Homo sapien
tctcagatgtaggtgtagacctgct

SEQ ID NO: 805883 - DNA, 25 bp, Homo sapien
gtggtctcagatgtaggtgtagacc

SEQ ID NO: 805884 - DNA, 25 bp, Homo sapien
gaagtagggtaggtggtctcagatg

SEQ ID NO: 805885 - DNA, 25 bp, Homo sapien
ggagagaagtctctgtggacaatgt

SEQ ID NO: 805886 - DNA, 25 bp, Homo sapien
tgggtgggagagaagtctctgtgga

SEQ ID NO: 805887 - DNA, 25 bp, Homo sapien
tgggagagaagtctctgtggacaat

SEQ ID NO: 805888 - DNA, 25 bp, Homo sapien
agagaagtctctgtggacaatgtac

SEQ ID NO: 805889 - DNA, 25 bp, Homo sapien
tttgtcataggagtcgtggctgttt

SEQ ID NO: 805890 - DNA, 25 bp, Homo sapien
tggtggttaccaagtttgtcatagg

SEQ ID NO: 805891 - DNA, 25 bp, Homo sapien
caagtttgtcataggagtcgtggct

SEQ ID NO: 805892 - DNA, 25 bp, Homo sapien
ctcagtggtggtggttaccaagttt

SEQ ID NO: 805893 - DNA, 25 bp, Homo sapien
tctgggagtactgtgtgaggtgact

SEQ ID NO: 805894 - DNA, 25 bp, Homo sapien
tggagtagatggttgatgaagagaa

SEQ ID NO: 805895 - DNA, 25 bp, Homo sapien
gtggagtagatggttgatgaagaga

SEQ ID NO: 805896 - DNA, 25 bp, Homo sapien
ctgtgtgaggtgactgtggagtaga

SEQ ID NO: 805897 - DNA, 25 bp, Homo sapien
tccaaaggtgacagtagtaggtgca

SEQ ID NO: 805898 - DNA, 25 bp, Homo sapien
tagtcaatgaagtgctggtgcccac

SEQ ID NO: 805899 - DNA, 25 bp, Homo sapien
tgggagtcaccgcagtctctgaggt

SEQ ID NO: 805900 - DNA, 25 bp, Homo sapien
ggaacctgtgatgttgacacgatcg

SEQ ID NO: 805901 - DNA, 25 bp, Homo sapien
gcctgtgatagaagcggagcccaca

SEQ ID NO: 805902 - DNA, 25 bp, Homo sapien
gcatttgtagacgtacttcccctag

SEQ ID NO: 805903 - DNA, 25 bp, Homo sapien
catgataatagtgggtgttgaggac

SEQ ID NO: 805904 - DNA, 25 bp, Homo sapien
cactggagttatgctggcagaagat

SEQ ID NO: 805905 - DNA, 25 bp, Homo sapien
tgggcagtcgagtacttgtgaaaac

SEQ ID NO: 805906 - DNA, 25 bp, Homo sapien
aactgtgtttgtgggtacagtccca

SEQ ID NO: 805907 - DNA, 25 bp, Homo sapien
caggtgaccatttcggtagtaaagg

SEQ ID NO: 805908 - DNA, 25 bp, Homo sapien
tttggatactgatggaggtaggaca

SEQ ID NO: 805909 - DNA, 25 bp, Homo sapien
tctgagaagtgatgcgagttgtcct

SEQ ID NO: 805910 - DNA, 25 bp, Homo sapien
ggtcaacgtggactgtgtggtcatc

SEQ ID NO: 805911 - DNA, 25 bp, Homo sapien
tgttgacttgcttgaagtcctcagg

SEQ ID NO: 805912 - DNA, 25 bp, Homo sapien
tcctcaggatggtcgggaggctact

SEQ ID NO: 805913 - DNA, 25 bp, Homo sapien
cacagcaaactcacaactggaacca

SEQ ID NO: 805914 - DNA, 25 bp, Homo sapien
ccattctggcatctggtctggagct

SEQ ID NO: 805915 - DNA, 25 bp, Homo sapien
ctggagctgacagcggtccccagaa

SEQ ID NO: 805916 - DNA, 25 bp, Homo sapien
agcaaactcacaactggaaccatag

SEQ ID NO: 805917 - DNA, 25 bp, Homo sapien
aaagcaggcagaaagatagcggtca

SEQ ID NO: 805918 - DNA, 25 bp, Homo sapien
aagatagcggtcagcctgtggtccc

SEQ ID NO: 805919 - DNA, 25 bp, Homo sapien
tagcggtcagcctgtggtccctcct

SEQ ID NO: 805920 - DNA, 25 bp, Homo sapien
ggcagaaagatagcggtcagcctgt

SEQ ID NO: 805921 - DNA, 25 bp, Homo sapien
ttgttgaaatccctgtaggcctggg

SEQ ID NO: 805922 - DNA, 25 bp, Homo sapien
gcgagaactgctgatccacagacac

SEQ ID NO: 805923 - DNA, 25 bp, Homo sapien
tgtcattgaggtccggcgagaactg

SEQ ID NO: 805924 - DNA, 25 bp, Homo sapien
cctgggaagtgttgtcattgaggtc

SEQ ID NO: 805925 - DNA, 25 bp, Homo sapien
acccttgaaggtgaagccctgcatg

SEQ ID NO: 805926 - DNA, 25 bp, Homo sapien
gcatgtctgcaaaaatcttctgcat

SEQ ID NO: 805927 - DNA, 25 bp, Homo sapien
ggacaggatctccacacccttgaag

SEQ ID NO: 805928 - DNA, 25 bp, Homo sapien
cagcgtggtcttcacctgctcatac

SEQ ID NO: 805929 - DNA, 25 bp, Homo sapien
tggctggcgttctggagcccctcct

SEQ ID NO: 805930 - DNA, 25 bp, Homo sapien
tgctcatactcgctctccagctggg

SEQ ID NO: 805931 - DNA, 25 bp, Homo sapien
agtcctggcagctgttcgcatcctg

SEQ ID NO: 805932 - DNA, 25 bp, Homo sapien
gggtcagctctgtcttgctgttgtt

SEQ ID NO: 805933 - DNA, 25 bp, Homo sapien
gctgttgttgttcaccttgatggag

SEQ ID NO: 805934 - DNA, 25 bp, Homo sapien
gttgttcaccttgatggagtcaggc

SEQ ID NO: 805935 - DNA, 25 bp, Homo sapien
tgatggagtcaggcttaaaacacag

SEQ ID NO: 805936 - DNA, 25 bp, Homo sapien
tccaccagagggaagtagaactctt

SEQ ID NO: 805937 - DNA, 25 bp, Homo sapien
cacgcccgacgtgcatttggtgaca

SEQ ID NO: 805938 - DNA, 25 bp, Homo sapien
ccctggtgacagtcgatggcgttgt

SEQ ID NO: 805939 - DNA, 25 bp, Homo sapien
tagaactcttcatagcccgtgggag

SEQ ID NO: 805940 - DNA, 25 bp, Homo sapien
tgcgggagatcgcagggtcagaccc

SEQ ID NO: 805941 - DNA, 25 bp, Homo sapien
ggagatcgcagggtcagaccctctt

SEQ ID NO: 805942 - DNA, 25 bp, Homo sapien
gatcgcagggtcagaccctcttcac

SEQ ID NO: 805943 - DNA, 25 bp, Homo sapien
cgggagatcgcagggtcagaccctc

SEQ ID NO: 805944 - DNA, 25 bp, Homo sapien
ggccagagaaccagtgcgtgtcggt

SEQ ID NO: 805945 - DNA, 25 bp, Homo sapien
ccagtggacggccacctcgcagcgc

SEQ ID NO: 805946 - DNA, 25 bp, Homo sapien
gcgccctccagtggacggccacctc

SEQ ID NO: 805947 - DNA, 25 bp, Homo sapien
cagcgcgggccagagaaccagtgcg

SEQ ID NO: 805948 - DNA, 25 bp, Homo sapien
ccagtttgaaaaagtgcccacgact

SEQ ID NO: 805949 - DNA, 25 bp, Homo sapien
gaaaaagtgcccacgacttcctcat

SEQ ID NO: 805950 - DNA, 25 bp, Homo sapien
tcctcatcccaggtctcgaaccatt

SEQ ID NO: 805951 - DNA, 25 bp, Homo sapien
tcccaggtctcgaaccatttcctgt

SEQ ID NO: 805952 - DNA, 25 bp, Homo sapien
atagtggtgtccacgttctccaagg

SEQ ID NO: 805953 - DNA, 25 bp, Homo sapien
tcatagtggtgtccacgttctccaa

SEQ ID NO: 805954 - DNA, 25 bp, Homo sapien
catagtggtgtccacgttctccaag

SEQ ID NO: 805955 - DNA, 25 bp, Homo sapien
gaggacgaggtcatctcgggtctct

SEQ ID NO: 805956 - DNA, 25 bp, Homo sapien
acactgaggacgaggtcatctcggg

SEQ ID NO: 805957 - DNA, 25 bp, Homo sapien
gacgaggtcatctcgggtctcttga

SEQ ID NO: 805958 - DNA, 25 bp, Homo sapien
tcatctcgggtctcttgatgtgcac

SEQ ID NO: 805959 - DNA, 25 bp, Homo sapien
caacgacggcgtgagctatcataca

SEQ ID NO: 805960 - DNA, 25 bp, Homo sapien
cagagtaggaccgagaattgaccaa

SEQ ID NO: 805961 - DNA, 25 bp, Homo sapien
caggaatgctgtacccgttttgcag

SEQ ID NO: 805962 - DNA, 25 bp, Homo sapien
gcaatggcaacacgagggctgagac

SEQ ID NO: 805963 - DNA, 25 bp, Homo sapien
ggatggatgaaggaacggggtcaaa

SEQ ID NO: 805964 - DNA, 25 bp, Homo sapien
atggatgaaggaacggggtcaaaag

SEQ ID NO: 805965 - DNA, 25 bp, Homo sapien
cttgctagggaccaggatgtgagga

SEQ ID NO: 805966 - DNA, 25 bp, Homo sapien
ttgctagggaccaggatgtgaggag

SEQ ID NO: 805967 - DNA, 25 bp, Homo sapien
agcacccggggtatcctaagacaca

SEQ ID NO: 805968 - DNA, 25 bp, Homo sapien
gcagaaccgatgaatggacgggctc

SEQ ID NO: 805969 - DNA, 25 bp, Homo sapien
agggtgaccgagggaacagcacccg

SEQ ID NO: 805970 - DNA, 25 bp, Homo sapien
ccggggtatcctaagacacagaggc

SEQ ID NO: 805971 - DNA, 25 bp, Homo sapien
aagagaaacggggaattgagcaacg

SEQ ID NO: 805972 - DNA, 25 bp, Homo sapien
gaaccaccgatgaatggacaggctc

SEQ ID NO: 805973 - DNA, 25 bp, Homo sapien
ggcagaaccaccgatgaatggacag

SEQ ID NO: 805974 - DNA, 25 bp, Homo sapien
caccgatgaatggacaggctcagaa

SEQ ID NO: 805975 - DNA, 25 bp, Homo sapien
ataaactctatattgtgcacatgga

SEQ ID NO: 805976 - DNA, 25 bp, Homo sapien
gacctggagatgtgccgacttcctg

SEQ ID NO: 805977 - DNA, 25 bp, Homo sapien
cagggctcagagttaccgcaggaat

SEQ ID NO: 805978 - DNA, 25 bp, Homo sapien
aaagccaatcttccccgccaaggag

SEQ ID NO: 805979 - DNA, 25 bp, Homo sapien
tcgtcaggagggaccaagaaatgaa

SEQ ID NO: 805980 - DNA, 25 bp, Homo sapien
cgtcaggagggaccaagaaatgaaa

SEQ ID NO: 805981 - DNA, 25 bp, Homo sapien
gtcaggagggaccaagaaatgaaag

SEQ ID NO: 805982 - DNA, 25 bp, Homo sapien
ctcgtcaggagggaccaagaaatga

SEQ ID NO: 805983 - DNA, 25 bp, Homo sapien
gccggagagccagcgtcagaatcca

SEQ ID NO: 805984 - DNA, 25 bp, Homo sapien
gtcagaatccagatcaccagcatct

SEQ ID NO: 805985 - DNA, 25 bp, Homo sapien
ggtgtcactgtagtaacggacgcgc

SEQ ID NO: 805986 - DNA, 25 bp, Homo sapien
actgtagtaacggacgcgcagagcc

SEQ ID NO: 805987 - DNA, 25 bp, Homo sapien
tgactacagagatctgctaggccag

SEQ ID NO: 805988 - DNA, 25 bp, Homo sapien
tctgactacagagatctgctaggcc

SEQ ID NO: 805989 - DNA, 25 bp, Homo sapien
atctgactacagagatctgctaggc

SEQ ID NO: 805990 - DNA, 25 bp, Homo sapien
actacagagatctgctaggccaggc

SEQ ID NO: 805991 - DNA, 25 bp, Homo sapien
tgggaaatggctttgtgaacagcag

SEQ ID NO: 805992 - DNA, 25 bp, Homo sapien
gctgggaaatggctttgtgaacagc

SEQ ID NO: 805993 - DNA, 25 bp, Homo sapien
gaaatggctttgtgaacagcagagc

SEQ ID NO: 805994 - DNA, 25 bp, Homo sapien
ctgctgggaaatggctttgtgaaca

SEQ ID NO: 805995 - DNA, 25 bp, Homo sapien
tcttcccttgctcgactgtctgctt

SEQ ID NO: 805996 - DNA, 25 bp, Homo sapien
ttcccttgctcgactgtctgcttct

SEQ ID NO: 805997 - DNA, 25 bp, Homo sapien
gctcttcccttgctcgactgtctgc

SEQ ID NO: 805998 - DNA, 25 bp, Homo sapien
ctgccttctcagagtgctcttccct

SEQ ID NO: 805999 - DNA, 25 bp, Homo sapien
cctgtcatccacaaatgcaccagca

SEQ ID NO: 806000 - DNA, 25 bp, Homo sapien
tcagggcattcctgcaccgtagctc

SEQ ID NO: 806001 - DNA, 25 bp, Homo sapien
actctccccagcaaacatcacgctc

SEQ ID NO: 806002 - DNA, 25 bp, Homo sapien
aaacatcacgctccatccagcagat

SEQ ID NO: 806003 - DNA, 25 bp, Homo sapien
tcccctgggctagcaaactccacca

SEQ ID NO: 806004 - DNA, 25 bp, Homo sapien
ctctgccatccccgtcgtcccctgg

SEQ ID NO: 806005 - DNA, 25 bp, Homo sapien
ccccaggctaaagccctcggctctg

SEQ ID NO: 806006 - DNA, 25 bp, Homo sapien
ggctagcaaactccaccaagcccag

SEQ ID NO: 806007 - DNA, 25 bp, Homo sapien
ttctctctggctcctgcagcccttg

SEQ ID NO: 806008 - DNA, 25 bp, Homo sapien
ctggctcctgcagcccttgcctgct

SEQ ID NO: 806009 - DNA, 25 bp, Homo sapien
gctcctgcagcccttgcctgctcac

SEQ ID NO: 806010 - DNA, 25 bp, Homo sapien
ctcctgacgctccttctctctggct

SEQ ID NO: 806011 - DNA, 25 bp, Homo sapien
acggaccagttctggtctggggcca

SEQ ID NO: 806012 - DNA, 25 bp, Homo sapien
cccctgttatagacccttgtgcctt

SEQ ID NO: 806013 - DNA, 25 bp, Homo sapien
cacggaccagttctggtctggggcc

SEQ ID NO: 806014 - DNA, 25 bp, Homo sapien
ggacccctgttatagacccttgtgc

SEQ ID NO: 806015 - DNA, 25 bp, Homo sapien
gctatgatttatgactgtctcctca

SEQ ID NO: 806016 - DNA, 25 bp, Homo sapien
tgtgatttgagagaaaccagagaaa

SEQ ID NO: 806017 - DNA, 25 bp, Homo sapien
atgactgtctcctcatgtttggtgg

SEQ ID NO: 806018 - DNA, 25 bp, Homo sapien
ctgtgatttgagagaaaccagagaa

SEQ ID NO: 806019 - DNA, 25 bp, Homo sapien
cagttgagcccgtgataaatgtgac

SEQ ID NO: 806020 - DNA, 25 bp, Homo sapien
cattgtttgagttgagcccgggctc

SEQ ID NO: 806021 - DNA, 25 bp, Homo sapien
tccctcatgggttgtagagctggaa

SEQ ID NO: 806022 - DNA, 25 bp, Homo sapien
ttcaacatggcctgaggtcgcggag

SEQ ID NO: 806023 - DNA, 25 bp, Homo sapien
tagagccggcaggtaagactgttgt

SEQ ID NO: 806024 - DNA, 25 bp, Homo sapien
cctgagattgtggagctatcacgga

SEQ ID NO: 806025 - DNA, 25 bp, Homo sapien
caacaagaactgagggtgtagagcc

SEQ ID NO: 806026 - DNA, 25 bp, Homo sapien
gagggcgtcgagtctccaacaagaa

SEQ ID NO: 806027 - DNA, 25 bp, Homo sapien
gtggtggattcttcaccgacgccca

SEQ ID NO: 806028 - DNA, 25 bp, Homo sapien
tgtggtttcagttgagcctcggctg

SEQ ID NO: 806029 - DNA, 25 bp, Homo sapien
tcccgttgcgtcttggctgctgtgc

SEQ ID NO: 806030 - DNA, 25 bp, Homo sapien
tgcggtgctaggaggtgaaggcgtt

SEQ ID NO: 806031 - DNA, 25 bp, Homo sapien
tggagcgggcaggtgagagttttgt

SEQ ID NO: 806032 - DNA, 25 bp, Homo sapien
gaggtggtggagcgggcaggtgaga

SEQ ID NO: 806033 - DNA, 25 bp, Homo sapien
ggtggagcgggcaggtgagagtttt

SEQ ID NO: 806034 - DNA, 25 bp, Homo sapien
ggtggtggagcgggcaggtgagagt

SEQ ID NO: 806035 - DNA, 25 bp, Homo sapien
tgtaggttcctgactgaggtctgag

SEQ ID NO: 806036 - DNA, 25 bp, Homo sapien
taggttcctgactgaggtctgaggt

SEQ ID NO: 806037 - DNA, 25 bp, Homo sapien
atgagggtgttgttccacttgcatc

SEQ ID NO: 806038 - DNA, 25 bp, Homo sapien
gatgagggtgttgttccacttgcat

SEQ ID NO: 806039 - DNA, 25 bp, Homo sapien
ggattcttcaccgacgcctaggctt

SEQ ID NO: 806040 - DNA, 25 bp, Homo sapien
tgctgtagacggtggtagattcctc

SEQ ID NO: 806041 - DNA, 25 bp, Homo sapien
tagaaggtggtagatgcctcactga

SEQ ID NO: 806042 - DNA, 25 bp, Homo sapien
tgtagattcttcagtgaggcccgag

SEQ ID NO: 806043 - DNA, 25 bp, Homo sapien
gctggattcttcactgacgcctgag

SEQ ID NO: 806044 - DNA, 25 bp, Homo sapien
ttgtgtgcgttgagcctggttgact

SEQ ID NO: 806045 - DNA, 25 bp, Homo sapien
aaggtggttgatttctcactgaggc

SEQ ID NO: 806046 - DNA, 25 bp, Homo sapien
gattctccaacgaggccagaggtgg

SEQ ID NO: 806047 - DNA, 25 bp, Homo sapien
gtgctggcaggtaacagtgttgtat

SEQ ID NO: 806048 - DNA, 25 bp, Homo sapien
gctggcaggtaacagtgttgtatcc

SEQ ID NO: 806049 - DNA, 25 bp, Homo sapien
tgttgtatccgttgagcctgggctg

SEQ ID NO: 806050 - DNA, 25 bp, Homo sapien
ggtaacagtgttgtatccgttgagc

SEQ ID NO: 806051 - DNA, 25 bp, Homo sapien
gatgcttcaacgatgcctgagcttg

SEQ ID NO: 806052 - DNA, 25 bp, Homo sapien
ggattcttcaccgacgcctaggctt

SEQ ID NO: 806053 - DNA, 25 bp, Homo sapien
tgtagattcttcagtgaggcccgag

SEQ ID NO: 806054 - DNA, 25 bp, Homo sapien
tgctgtagacggtggtagattcctc

SEQ ID NO: 806055 - DNA, 25 bp, Homo sapien
tgtggatacttcaacagggactgct

SEQ ID NO: 806056 - DNA, 25 bp, Homo sapien
gattcctcactaaggcctggcactg

SEQ ID NO: 806057 - DNA, 25 bp, Homo sapien
tcaccacggcctgaagttgtgttgc

SEQ ID NO: 806058 - DNA, 25 bp, Homo sapien
gggtagtgtccttcgagtttggcca

SEQ ID NO: 806059 - DNA, 25 bp, Homo sapien
caaaagaagacaactctacccatgg

SEQ ID NO: 806060 - DNA, 25 bp, Homo sapien
gaagacaactctacccatgggatca

SEQ ID NO: 806061 - DNA, 25 bp, Homo sapien
agaagacaactctacccatgggatc

SEQ ID NO: 806062 - DNA, 25 bp, Homo sapien
aaagaagacaactctacccatggga

SEQ ID NO: 806063 - DNA, 25 bp, Homo sapien
acagcaatgaagatgcctctgctgc

SEQ ID NO: 806064 - DNA, 25 bp, Homo sapien
tcagcatcgcactggagagcaggac

SEQ ID NO: 806065 - DNA, 25 bp, Homo sapien
agtcactcagcatcgcactggagag

SEQ ID NO: 806066 - DNA, 25 bp, Homo sapien
tccagtcactcagcatcgcactgga

SEQ ID NO: 806067 - DNA, 25 bp, Homo sapien
ggacagacgcattgttttccattcc

SEQ ID NO: 806068 - DNA, 25 bp, Homo sapien
tagccttggggacagacgcattgtt

SEQ ID NO: 806069 - DNA, 25 bp, Homo sapien
aagcactggtaaccaacgtagcctt

SEQ ID NO: 806070 - DNA, 25 bp, Homo sapien
cactggtaaccaacgtagccttggg

SEQ ID NO: 806071 - DNA, 25 bp, Homo sapien
cctgggaggatgcgtcattcatctt

SEQ ID NO: 806072 - DNA, 25 bp, Homo sapien
catacctaaagtggcgttgagtttt

SEQ ID NO: 806073 - DNA, 25 bp, Homo sapien
tcactttcactgtcatacctaaagt

SEQ ID NO: 806074 - DNA, 25 bp, Homo sapien
ccgattcttgaagagggtactgaag

SEQ ID NO: 806075 - DNA, 25 bp, Homo sapien
caatctccgaatgttcacccctcta

SEQ ID NO: 806076 - DNA, 25 bp, Homo sapien
tgttcacccctctatactgaggaag

SEQ ID NO: 806077 - DNA, 25 bp, Homo sapien
tgtcgcccttcaaaacgacatccat

SEQ ID NO: 806078 - DNA, 25 bp, Homo sapien
tctatactgaggaagattgtcgccc

SEQ ID NO: 806079 - DNA, 25 bp, Homo sapien
caagcacccagagtggtaatgggag

SEQ ID NO: 806080 - DNA, 25 bp, Homo sapien
ctggaagtgggaatcgtttcatcag

SEQ ID NO: 806081 - DNA, 25 bp, Homo sapien
ggagcccaagcacccagagtggtaa

SEQ ID NO: 806082 - DNA, 25 bp, Homo sapien
gtttcatcagttacccatgtcacca

SEQ ID NO: 806083 - DNA, 25 bp, Homo sapien
tctaaagtgtagtctgcctccagga

SEQ ID NO: 806084 - DNA, 25 bp, Homo sapien
ggttttcaaacagttcctcatactc

SEQ ID NO: 806085 - DNA, 25 bp, Homo sapien
cgttcttgaccacgatgctaccgtt

SEQ ID NO: 806086 - DNA, 25 bp, Homo sapien
caggatgacatcgttcttgaccacg

SEQ ID NO: 806087 - DNA, 25 bp, Homo sapien
gatgaatccacgaaagtgtcctctt

SEQ ID NO: 806088 - DNA, 25 bp, Homo sapien
ctggaagtcaaagcccggagtcacc

SEQ ID NO: 806089 - DNA, 25 bp, Homo sapien
tcctcttcactatagcacagtatgg

SEQ ID NO: 806090 - DNA, 25 bp, Homo sapien
ggagtcaccgatgaatccacgaaag

SEQ ID NO: 806091 - DNA, 25 bp, Homo sapien
gggccactgcgttgcagctgacatg

SEQ ID NO: 806092 - DNA, 25 bp, Homo sapien
gacatccacatagtagaactgggta

SEQ ID NO: 806093 - DNA, 25 bp, Homo sapien
gcccaggttacagttcatttgcgac

SEQ ID NO: 806094 - DNA, 25 bp, Homo sapien
cgacttcgttcctttggtgcacttg

SEQ ID NO: 806095 - DNA, 25 bp, Homo sapien
gattaggatgatcaatgcgagcagc

SEQ ID NO: 806096 - DNA, 25 bp, Homo sapien
ggctcttggcgatgttgaattcaca

SEQ ID NO: 806097 - DNA, 25 bp, Homo sapien
taccagtgtgtgttcgtatttgggc

SEQ ID NO: 806098 - DNA, 25 bp, Homo sapien
cacgatcccatacacgaggctcttg

SEQ ID NO: 806099 - DNA, 25 bp, Homo sapien
tgccaggggtgccttcctttcgcca

SEQ ID NO: 806100 - DNA, 25 bp, Homo sapien
tttcgccactcttgaggcacatcat

SEQ ID NO: 806101 - DNA, 25 bp, Homo sapien
ttcctttcgccactcttgaggcaca

SEQ ID NO: 806102 - DNA, 25 bp, Homo sapien
gggtgccttcctttcgccactcttg

SEQ ID NO: 806103 - DNA, 25 bp, Homo sapien
ctctgggggcaagatctggttctca

SEQ ID NO: 806104 - DNA, 25 bp, Homo sapien
cccgcttagctgagtgtgcactgga

SEQ ID NO: 806105 - DNA, 25 bp, Homo sapien
tgtgcactggatgccctcactgagt

SEQ ID NO: 806106 - DNA, 25 bp, Homo sapien
gcaagatctggttctcaaccactcc

SEQ ID NO: 806107 - DNA, 25 bp, Homo sapien
tattccagtacgtggttcaggctgc

SEQ ID NO: 806108 - DNA, 25 bp, Homo sapien
ctctattccagtacgtggttcaggc

SEQ ID NO: 806109 - DNA, 25 bp, Homo sapien
attccagtacgtggttcaggctgca

SEQ ID NO: 806110 - DNA, 25 bp, Homo sapien
tctattccagtacgtggttcaggct

SEQ ID NO: 806111 - DNA, 25 bp, Homo sapien
gagccgcccgctggaccccggaaca

SEQ ID NO: 806112 - DNA, 25 bp, Homo sapien
catgcacggggtggaagcgggggcc

SEQ ID NO: 806113 - DNA, 25 bp, Homo sapien
ctggaccccggaacaggagggagcg

SEQ ID NO: 806114 - DNA, 25 bp, Homo sapien
gggccacggaggagcgtgcgttcag

SEQ ID NO: 806115 - DNA, 25 bp, Homo sapien
gatttcctctggcaaaaggaagagt

SEQ ID NO: 806116 - DNA, 25 bp, Homo sapien
cccctccgaccctgcatcactgggc

SEQ ID NO: 806117 - DNA, 25 bp, Homo sapien
gaggccgtgatgagtgatgggagcc

SEQ ID NO: 806118 - DNA, 25 bp, Homo sapien
ggcatctgccctacgccctttccca

SEQ ID NO: 806119 - DNA, 25 bp, Homo sapien
tgtgccagagtcaacagtctccagg

SEQ ID NO: 806120 - DNA, 25 bp, Homo sapien
taggcgttctcaaggccgaatctgc

SEQ ID NO: 806121 - DNA, 25 bp, Homo sapien
ccggaagttgttgtaggcgttctca

SEQ ID NO: 806122 - DNA, 25 bp, Homo sapien
tgccagagtcaacagtctccagggt

SEQ ID NO: 806123 - DNA, 25 bp, Homo sapien
gtgggggcagctcgcagctgagtca

SEQ ID NO: 806124 - DNA, 25 bp, Homo sapien
ggtgggggcagctcgcagctgagtc

SEQ ID NO: 806125 - DNA, 25 bp, Homo sapien
tgggggcagctcgcagctgagtcac

SEQ ID NO: 806126 - DNA, 25 bp, Homo sapien
tctcctgaacagagctagatgaggg

SEQ ID NO: 806127 - DNA, 25 bp, Homo sapien
gactggccaagtctgtcagctcaga

SEQ ID NO: 806128 - DNA, 25 bp, Homo sapien
caggaccggcttcagggcctgactt

SEQ ID NO: 806129 - DNA, 25 bp, Homo sapien
ggcctgacttcggtctcctcttgac

SEQ ID NO: 806130 - DNA, 25 bp, Homo sapien
ggtccctggccttggcatcggagct

SEQ ID NO: 806131 - DNA, 25 bp, Homo sapien
aggagctggcgaaatgagcctcaga

SEQ ID NO: 806132 - DNA, 25 bp, Homo sapien
gagaggaccaaggtcagcagacaca

SEQ ID NO: 806133 - DNA, 25 bp, Homo sapien
gctctgagcacgtctcacttgcctg

SEQ ID NO: 806134 - DNA, 25 bp, Homo sapien
gctgggcaaacagacaggacattgt

SEQ ID NO: 806135 - DNA, 25 bp, Homo sapien
gacaggtgactgagcacccaagcct

SEQ ID NO: 806136 - DNA, 25 bp, Homo sapien
caatataaccaggtgatctgcagga

SEQ ID NO: 806137 - DNA, 25 bp, Homo sapien
ccttggtggccctcatgctgggtgt

SEQ ID NO: 806138 - DNA, 25 bp, Homo sapien
tgtcctaacgtgctgagacagctgc

SEQ ID NO: 806139 - DNA, 25 bp, Homo sapien
agacgtccccttgggagatgcaccc

SEQ ID NO: 806140 - DNA, 25 bp, Homo sapien
tgctggcactgacggttcaagacgt

SEQ ID NO: 806141 - DNA, 25 bp, Homo sapien
gcactgacggttcaagacgtcccct

SEQ ID NO: 806142 - DNA, 25 bp, Homo sapien
cacttggtgttgacatgggcacgtc

SEQ ID NO: 806143 - DNA, 25 bp, Homo sapien
tcagaattggccaacagcgtggtgc

SEQ ID NO: 806144 - DNA, 25 bp, Homo sapien
gctagtaccgtcagcaattggagga

SEQ ID NO: 806145 - DNA, 25 bp, Homo sapien
gcatacctgctaatggagtggtccg

SEQ ID NO: 806146 - DNA, 25 bp, Homo sapien
gaactggcttgactagaactggtaa

SEQ ID NO: 806147 - DNA, 25 bp, Homo sapien
ccttcactaggcgtccagattggca

SEQ ID NO: 806148 - DNA, 25 bp, Homo sapien
cattggcagggtgataacttcagga

SEQ ID NO: 806149 - DNA, 25 bp, Homo sapien
tagacatacgcatagtggtgacctg

SEQ ID NO: 806150 - DNA, 25 bp, Homo sapien
gtggaacaatcacagaagttttctt

SEQ ID NO: 806151 - DNA, 25 bp, Homo sapien
tccaagttcctccattgaggcacct

SEQ ID NO: 806152 - DNA, 25 bp, Homo sapien
tttctttccaagttcctccattgag

SEQ ID NO: 806153 - DNA, 25 bp, Homo sapien
ctgtggaacaatcacagaagttttc

SEQ ID NO: 806154 - DNA, 25 bp, Homo sapien
agcgagaggccgtattctggcaccc

SEQ ID NO: 806155 - DNA, 25 bp, Homo sapien
aatagaggttgggacactggcactt

SEQ ID NO: 806156 - DNA, 25 bp, Homo sapien
tccattcttgcagcgagaggccgta

SEQ ID NO: 806157 - DNA, 25 bp, Homo sapien
cacacaactccccataatagaggtt

SEQ ID NO: 806158 - DNA, 25 bp, Homo sapien
ttgcttgtatggaggtcgggtccca

SEQ ID NO: 806159 - DNA, 25 bp, Homo sapien
tcctggcctcacatcaaggtggggc

SEQ ID NO: 806160 - DNA, 25 bp, Homo sapien
gaactgttgcttgtatggaggtcgg

SEQ ID NO: 806161 - DNA, 25 bp, Homo sapien
tatggaggtcgggtcccagggcatg

SEQ ID NO: 806162 - DNA, 25 bp, Homo sapien
ttttttagctcttcggtgaacttca

SEQ ID NO: 806163 - DNA, 25 bp, Homo sapien
ttccgtgaatgtctgtttgaactcc

SEQ ID NO: 806164 - DNA, 25 bp, Homo sapien
cttcggtgaacttcacactggtcac

SEQ ID NO: 806165 - DNA, 25 bp, Homo sapien
cacagtcagttccatttgggcagag

SEQ ID NO: 806166 - DNA, 25 bp, Homo sapien
acatactcagggatcccggaataca

SEQ ID NO: 806167 - DNA, 25 bp, Homo sapien
tgttcaccccgacatactcagggat

SEQ ID NO: 806168 - DNA, 25 bp, Homo sapien
cccgacatactcagggatcccggaa

SEQ ID NO: 806169 - DNA, 25 bp, Homo sapien
tagctttgtgatgttcaccccgaca

SEQ ID NO: 806170 - DNA, 25 bp, Homo sapien
tcactacttcggtggcattgtccaa

SEQ ID NO: 806171 - DNA, 25 bp, Homo sapien
gctgtgtggtcacttttgtgatttt

SEQ ID NO: 806172 - DNA, 25 bp, Homo sapien
tactgtcttgtattctggtgtgtac

SEQ ID NO: 806173 - DNA, 25 bp, Homo sapien
tcttaggaggacgtcatgctccacc

SEQ ID NO: 806174 - DNA, 25 bp, Homo sapien
tcagggtcgtactgggtcaccgtaa

SEQ ID NO: 806175 - DNA, 25 bp, Homo sapien
ccgtaatgttttgcacttgggtgcc

SEQ ID NO: 806176 - DNA, 25 bp, Homo sapien
cttgggtgccagtggtgttgaaaca

SEQ ID NO: 806177 - DNA, 25 bp, Homo sapien
actgggtcaccgtaatgttttgcac

SEQ ID NO: 806178 - DNA, 25 bp, Homo sapien
tcttggagacactgaagccaggctc

SEQ ID NO: 806179 - DNA, 25 bp, Homo sapien
tgccgaggttacagttcttggagac

SEQ ID NO: 806180 - DNA, 25 bp, Homo sapien
ttagagacatctggcacttgccgag

SEQ ID NO: 806181 - DNA, 25 bp, Homo sapien
gaagtagtctccatattccttggcc

SEQ ID NO: 806182 - DNA, 25 bp, Homo sapien
tcaggagagctaccaggatgatcag

SEQ ID NO: 806183 - DNA, 25 bp, Homo sapien
cacctctctcttggagcggaaaacg

SEQ ID NO: 806184 - DNA, 25 bp, Homo sapien
gaggccgtacaccagactcttctgg

SEQ ID NO: 806185 - DNA, 25 bp, Homo sapien
accagtgagtttccgtggtcacgca

SEQ ID NO: 806186 - DNA, 25 bp, Homo sapien
ttggcagatgtcaaagccaatgttt

SEQ ID NO: 806187 - DNA, 25 bp, Homo sapien
caatgttttggaaggtcccaggagc

SEQ ID NO: 806188 - DNA, 25 bp, Homo sapien
caggagctggtccactgtcctcttc

SEQ ID NO: 806189 - DNA, 25 bp, Homo sapien
ccacttgtataactgagacaatctg

SEQ ID NO: 806190 - DNA, 25 bp, Homo sapien
tttgagccattctgagttcagagag

SEQ ID NO: 806191 - DNA, 25 bp, Homo sapien
cagcctgtttccacattttgagcca

SEQ ID NO: 806192 - DNA, 25 bp, Homo sapien
acattttgagccattctgagttcag

SEQ ID NO: 806193 - DNA, 25 bp, Homo sapien
gagccattctgagttcagagaggaa

SEQ ID NO: 806194 - DNA, 25 bp, Homo sapien
gatggactccaggtggatggaatca

SEQ ID NO: 806195 - DNA, 25 bp, Homo sapien
gagggctggaaattactatagatgg

SEQ ID NO: 806196 - DNA, 25 bp, Homo sapien
tactatagatggactccaggtggat

SEQ ID NO: 806197 - DNA, 25 bp, Homo sapien
tctatgtgtctcaaggagggctgga

SEQ ID NO: 806198 - DNA, 25 bp, Homo sapien
aaaatgatgtcgtcattacctgagg

SEQ ID NO: 806199 - DNA, 25 bp, Homo sapien
aatgatgtcgtcattacctgaggcc

SEQ ID NO: 806200 - DNA, 25 bp, Homo sapien
ttaaaatgatgtcgtcattacctga

SEQ ID NO: 806201 - DNA, 25 bp, Homo sapien
aaatgatgtcgtcattacctgaggc

SEQ ID NO: 806202 - DNA, 25 bp, Homo sapien
gcttagccggactgggatctcctca

SEQ ID NO: 806203 - DNA, 25 bp, Homo sapien
gaaaatgctccaccaagcttagccg

SEQ ID NO: 806204 - DNA, 25 bp, Homo sapien
tccaccaagcttagccggactggga

SEQ ID NO: 806205 - DNA, 25 bp, Homo sapien
aatgggaacattgagttcccatgga

SEQ ID NO: 806206 - DNA, 25 bp, Homo sapien
aaagcctagcctgatatcatgacaa

SEQ ID NO: 806207 - DNA, 25 bp, Homo sapien
gcgtccacgggtttctatttgagaa

SEQ ID NO: 806208 - DNA, 25 bp, Homo sapien
tcatgacaagcccattggagcgtcc

SEQ ID NO: 806209 - DNA, 25 bp, Homo sapien
ccattggagcgtccacgggtttcta

SEQ ID NO: 806210 - DNA, 25 bp, Homo sapien
gatgttgcagtcagagtaccctcaa

SEQ ID NO: 806211 - DNA, 25 bp, Homo sapien
tatcagagaaggtcgtcctctcgtc

SEQ ID NO: 806212 - DNA, 25 bp, Homo sapien
gcagggaagtccagatagatacttg

SEQ ID NO: 806213 - DNA, 25 bp, Homo sapien
cctttgactgaagcgtggtcctcct

SEQ ID NO: 806214 - DNA, 25 bp, Homo sapien
tcatggttgtaaacagcgggtcgag

SEQ ID NO: 806215 - DNA, 25 bp, Homo sapien
gtgcatgcagtccagtgtccaaggg

SEQ ID NO: 806216 - DNA, 25 bp, Homo sapien
tgtccatggtactgaacccgggcag

SEQ ID NO: 806217 - DNA, 25 bp, Homo sapien
ggtatgcaataattcttatgagagc

SEQ ID NO: 806218 - DNA, 25 bp, Homo sapien
ccccaaaagcatccgattttatgtt

SEQ ID NO: 806219 - DNA, 25 bp, Homo sapien
gaatggtcctctttccactgcaaat

SEQ ID NO: 806220 - DNA, 25 bp, Homo sapien
ggtcctctttccactgcaaatctct

SEQ ID NO: 806221 - DNA, 25 bp, Homo sapien
cttgaaccccaaaagcatccgattt

SEQ ID NO: 806222 - DNA, 25 bp, Homo sapien
tgacccgatgactcagtgccactag

SEQ ID NO: 806223 - DNA, 25 bp, Homo sapien
catcactcttgtatggttggaggaa

SEQ ID NO: 806224 - DNA, 25 bp, Homo sapien
agaaacttaagagggatgagctgca

SEQ ID NO: 806225 - DNA, 25 bp, Homo sapien
catgaactaactaagtcagagctca

SEQ ID NO: 806226 - DNA, 25 bp, Homo sapien
ccgcataactgggaaggcaatggtg

SEQ ID NO: 806227 - DNA, 25 bp, Homo sapien
gtgttggagcaggtgaaccgcataa

SEQ ID NO: 806228 - DNA, 25 bp, Homo sapien
gggccagggcgttagtgttggagca

SEQ ID NO: 806229 - DNA, 25 bp, Homo sapien
caggtgaaccgcataactgggaagg

SEQ ID NO: 806230 - DNA, 25 bp, Homo sapien
tcggccgtgggaggaaagcagaaga

SEQ ID NO: 806231 - DNA, 25 bp, Homo sapien
cggccgtgggaggaaagcagaagac

SEQ ID NO: 806232 - DNA, 25 bp, Homo sapien
gctcggccgtgggaggaaagcagaa

SEQ ID NO: 806233 - DNA, 25 bp, Homo sapien
aggctcggccgtgggaggaaagcag

SEQ ID NO: 806234 - DNA, 25 bp, Homo sapien
tcttcttcttcttgttgagacaggg

SEQ ID NO: 806235 - DNA, 25 bp, Homo sapien
ttcttcttcttcttgttgagacagg

SEQ ID NO: 806236 - DNA, 25 bp, Homo sapien
aactgaaactaattgtacttgtggt

SEQ ID NO: 806237 - DNA, 25 bp, Homo sapien
ctggaggccgccgttgctgggtgcc

SEQ ID NO: 806238 - DNA, 25 bp, Homo sapien
attgtacttgtggtgcaacttccgt

SEQ ID NO: 806239 - DNA, 25 bp, Homo sapien
aaactaattgtacttgtggtgcaac

SEQ ID NO: 806240 - DNA, 25 bp, Homo sapien
acccgcctggccttacacctgtctt

SEQ ID NO: 806241 - DNA, 25 bp, Homo sapien
tctgctagacctggggcagcatcgc

SEQ ID NO: 806242 - DNA, 25 bp, Homo sapien
agaaatggagtttggccctattggc

SEQ ID NO: 806243 - DNA, 25 bp, Homo sapien
gaaatggagtttggccctattggcc

SEQ ID NO: 806244 - DNA, 25 bp, Homo sapien
cagtgctacttgttgggtcagacct

SEQ ID NO: 806245 - DNA, 25 bp, Homo sapien
ggccttgggccacttgctcttgagc

SEQ ID NO: 806246 - DNA, 25 bp, Homo sapien
cgtgtgtacatccagcaaacgtaaa

SEQ ID NO: 806247 - DNA, 25 bp, Homo sapien
gctcttgagctaaggagctgccctc

SEQ ID NO: 806248 - DNA, 25 bp, Homo sapien
gcagtgtcttgggtgcccgcagctg

SEQ ID NO: 806249 - DNA, 25 bp, Homo sapien
ggtccagcagcccattgacgaagaa

SEQ ID NO: 806250 - DNA, 25 bp, Homo sapien
ggtcttgaaggaggccacaccctcg

SEQ ID NO: 806251 - DNA, 25 bp, Homo sapien
ctcgggcggcacaggcactgtctcg

SEQ ID NO: 806252 - DNA, 25 bp, Homo sapien
acaggaagcgcagtgcctccccggg

SEQ ID NO: 806253 - DNA, 25 bp, Homo sapien
tccaccaggttattgtccacaccgg

SEQ ID NO: 806254 - DNA, 25 bp, Homo sapien
ggtctaggcggcactctctgcacag

SEQ ID NO: 806255 - DNA, 25 bp, Homo sapien
gacactgggccgcttggcgctcccg

SEQ ID NO: 806256 - DNA, 25 bp, Homo sapien
agcctccacgtgggctcgtagctgc

SEQ ID NO: 806257 - DNA, 25 bp, Homo sapien
cagcctctcccgagcagcttcttcg

SEQ ID NO: 806258 - DNA, 25 bp, Homo sapien
tgctcccggccctcaagctccgcca

SEQ ID NO: 806259 - DNA, 25 bp, Homo sapien
gcttcttcggcagcctccacgtggg

SEQ ID NO: 806260 - DNA, 25 bp, Homo sapien
ggagaggatctcggcctctcgcccc

SEQ ID NO: 806261 - DNA, 25 bp, Homo sapien
cctgagccgctgtgcgatcgcccct

SEQ ID NO: 806262 - DNA, 25 bp, Homo sapien
gtgcgatcgccccttccagggagag

SEQ ID NO: 806263 - DNA, 25 bp, Homo sapien
gctgtgcgatcgccccttccaggga

SEQ ID NO: 806264 - DNA, 25 bp, Homo sapien
tcttgttgggtctgccacccctgtg

SEQ ID NO: 806265 - DNA, 25 bp, Homo sapien
ctcagtcttcggctcatcctccctc

SEQ ID NO: 806266 - DNA, 25 bp, Homo sapien
tgggtaccagctccgtctttcccac

SEQ ID NO: 806267 - DNA, 25 bp, Homo sapien
ggtcctccatcctcgtggggtgtct

SEQ ID NO: 806268 - DNA, 25 bp, Homo sapien
ggaggccagagccgtccagattcgg

SEQ ID NO: 806269 - DNA, 25 bp, Homo sapien
actgcagtaaaagatgggtctgggg

SEQ ID NO: 806270 - DNA, 25 bp, Homo sapien
gagccgtccagattcggccccaggg

SEQ ID NO: 806271 - DNA, 25 bp, Homo sapien
aggccagagccgtccagattcggcc

SEQ ID NO: 806272 - DNA, 25 bp, Homo sapien
ccgaagggacagagcccggtgatcc

SEQ ID NO: 806273 - DNA, 25 bp, Homo sapien
tgtctccaggcatccgcgtggggaa

SEQ ID NO: 806274 - DNA, 25 bp, Homo sapien
tgatccggggggaccgcttgtctcc

SEQ ID NO: 806275 - DNA, 25 bp, Homo sapien
ggaccgaagggacagagcccggtga

SEQ ID NO: 806276 - DNA, 25 bp, Homo sapien
ggagaagcgtttcagtgcccggttc

SEQ ID NO: 806277 - DNA, 25 bp, Homo sapien
gcctccaggaatgaaccgggtggcc

SEQ ID NO: 806278 - DNA, 25 bp, Homo sapien
tgatgagatagagccgtgcgctagc

SEQ ID NO: 806279 - DNA, 25 bp, Homo sapien
tggtggtcagaaacaccagcgcccg

SEQ ID NO: 806280 - DNA, 25 bp, Homo sapien
ttgtactccccaaccacctggccca

SEQ ID NO: 806281 - DNA, 25 bp, Homo sapien
caggcctggccccttgtactcccca

SEQ ID NO: 806282 - DNA, 25 bp, Homo sapien
cctggcccagcccatcacagattac

SEQ ID NO: 806283 - DNA, 25 bp, Homo sapien
ctggcagccatgcaggcctggcccc

SEQ ID NO: 806284 - DNA, 25 bp, Homo sapien
ttcttatccacagacacggagcccg

SEQ ID NO: 806285 - DNA, 25 bp, Homo sapien
tcaccaccttgttgacttctcgaag

SEQ ID NO: 806286 - DNA, 25 bp, Homo sapien
cttctcgaagggtcagaaagatgta

SEQ ID NO: 806287 - DNA, 25 bp, Homo sapien
gcttttccaggccgtggtaggctgt

SEQ ID NO: 806288 - DNA, 25 bp, Homo sapien
tcccgttactgagggacacgaccag

SEQ ID NO: 806289 - DNA, 25 bp, Homo sapien
cccgaaagatgtggatggtcccgtt

SEQ ID NO: 806290 - DNA, 25 bp, Homo sapien
ccggagaacggacccgaaagatgtg

SEQ ID NO: 806291 - DNA, 25 bp, Homo sapien
aagatgtggatggtcccgttactga

SEQ ID NO: 806292 - DNA, 25 bp, Homo sapien
ttctgagagttaaggtcacgccacc

SEQ ID NO: 806293 - DNA, 25 bp, Homo sapien
tccatgttgaaaagttgccaacccc

SEQ ID NO: 806294 - DNA, 25 bp, Homo sapien
taaactatatagcagcggcggtggt

SEQ ID NO: 806295 - DNA, 25 bp, Homo sapien
cacactagaagacgggttagcagtt

SEQ ID NO: 806296 - DNA, 25 bp, Homo sapien
gactctgtaggaccctgtgccagtc

SEQ ID NO: 806297 - DNA, 25 bp, Homo sapien
ggatgccgtgatcaaggagcatcct

SEQ ID NO: 806298 - DNA, 25 bp, Homo sapien
tccctcggctactctatcaggaatg

SEQ ID NO: 806299 - DNA, 25 bp, Homo sapien
ttcactgcccattcgaaatctcagg

SEQ ID NO: 806300 - DNA, 25 bp, Homo sapien
cagtagcctattctcttcgcagcct

SEQ ID NO: 806301 - DNA, 25 bp, Homo sapien
gagaatgtggatttttggacgtgaa

SEQ ID NO: 806302 - DNA, 25 bp, Homo sapien
gctacgttgaaaggcatatgctact

SEQ ID NO: 806303 - DNA, 25 bp, Homo sapien
ttcgcagcctttgaacctaacacct

SEQ ID NO: 806304 - DNA, 25 bp, Homo sapien
ggtttgacacctctatccgtcgcag

SEQ ID NO: 806305 - DNA, 25 bp, Homo sapien
cacttatgaaaaggtccggtggtca

SEQ ID NO: 806306 - DNA, 25 bp, Homo sapien
cctagttcagccgagtgaaggccaa

SEQ ID NO: 806307 - DNA, 25 bp, Homo sapien
tggaaagacaccgaagcagaagcgt

SEQ ID NO: 806308 - DNA, 25 bp, Homo sapien
gataatggaatgtgtccacccggac

SEQ ID NO: 806309 - DNA, 25 bp, Homo sapien
tgtgtccacccggactttgatgatg

SEQ ID NO: 806310 - DNA, 25 bp, Homo sapien
aatttgtagataatggaatgtgtcc

SEQ ID NO: 806311 - DNA, 25 bp, Homo sapien
acccggactttgatgatgtcctgca

SEQ ID NO: 806312 - DNA, 25 bp, Homo sapien
ccgtgcctggcgcttggttttctta

SEQ ID NO: 806313 - DNA, 25 bp, Homo sapien
cgtgcctggcgcttggttttcttat

SEQ ID NO: 806314 - DNA, 25 bp, Homo sapien
cagagggagaccgtgaccatggaaa

SEQ ID NO: 806315 - DNA, 25 bp, Homo sapien
agagggagaccgtgaccatggaaag

SEQ ID NO: 806316 - DNA, 25 bp, Homo sapien
tgtattagagaccaaggctttcctc

SEQ ID NO: 806317 - DNA, 25 bp, Homo sapien
ttttactagtccttgcctgcataca

SEQ ID NO: 806318 - DNA, 25 bp, Homo sapien
ggctttcctcgtcaaatcaattctg

SEQ ID NO: 806319 - DNA, 25 bp, Homo sapien
ccagggtacagagcttatgtggttc

SEQ ID NO: 806320 - DNA, 25 bp, Homo sapien
caatgaagacagacaccgttccctg

SEQ ID NO: 806321 - DNA, 25 bp, Homo sapien
tgtattccccaaagtgagacaactg

SEQ ID NO: 806322 - DNA, 25 bp, Homo sapien
caatctagttagctgtcaccctgca

SEQ ID NO: 806323 - DNA, 25 bp, Homo sapien
tactatgaggtatcacagtgctggc

SEQ ID NO: 806324 - DNA, 25 bp, Homo sapien
gatttgcagaaagctctactcgggt

SEQ ID NO: 806325 - DNA, 25 bp, Homo sapien
tatctgcgatataactgggaactct

SEQ ID NO: 806326 - DNA, 25 bp, Homo sapien
taatacggtctgattcttagctggc

SEQ ID NO: 806327 - DNA, 25 bp, Homo sapien
tgagcagggctttctatcaggtccc

SEQ ID NO: 806328 - DNA, 25 bp, Homo sapien
gaaacagaggaaagatacaaaattc

SEQ ID NO: 806329 - DNA, 25 bp, Homo sapien
agaggaaagatacaaaattcccatc

SEQ ID NO: 806330 - DNA, 25 bp, Homo sapien
agatacaaaattcccatctgagaaa

SEQ ID NO: 806331 - DNA, 25 bp, Homo sapien
aagatacaaaattcccatctgagaa

SEQ ID NO: 806332 - DNA, 25 bp, Homo sapien
cttgggggccttgaacaggatgcca

SEQ ID NO: 806333 - DNA, 25 bp, Homo sapien
attcaaagcattccctccccgcttg

SEQ ID NO: 806334 - DNA, 25 bp, Homo sapien
cccgcttgtcattgtgtctctccat

SEQ ID NO: 806335 - DNA, 25 bp, Homo sapien
ccttgaacaggatgccagcagggtg

SEQ ID NO: 806336 - DNA, 25 bp, Homo sapien
tctcctgccatcggccccctcagct

SEQ ID NO: 806337 - DNA, 25 bp, Homo sapien
ccacagcgatctctcctgccatcgg

SEQ ID NO: 806338 - DNA, 25 bp, Homo sapien
ctcctgccatcggccccctcagctg

SEQ ID NO: 806339 - DNA, 25 bp, Homo sapien
ggaccacagcgatctctcctgccat

SEQ ID NO: 806340 - DNA, 25 bp, Homo sapien
aaggaggagagatcgggtctgaggg

SEQ ID NO: 806341 - DNA, 25 bp, Homo sapien
gcaaaggaggagagatcgggtctga

SEQ ID NO: 806342 - DNA, 25 bp, Homo sapien
tgcaaaggaggagagatcgggtctg

SEQ ID NO: 806343 - DNA, 25 bp, Homo sapien
caaaggaggagagatcgggtctgag

SEQ ID NO: 806344 - DNA, 25 bp, Homo sapien
gggagcagacgtgacccctgcgttt

SEQ ID NO: 806345 - DNA, 25 bp, Homo sapien
tggggagcagacgtgacccctgcgt

SEQ ID NO: 806346 - DNA, 25 bp, Homo sapien
gctgtggggagcagacgtgacccct

SEQ ID NO: 806347 - DNA, 25 bp, Homo sapien
tgtggggagcagacgtgacccctgc

SEQ ID NO: 806348 - DNA, 25 bp, Homo sapien
taagtgaataagtggatggaccgtc

SEQ ID NO: 806349 - DNA, 25 bp, Homo sapien
tggactcgggggtctgctgcacctt

SEQ ID NO: 806350 - DNA, 25 bp, Homo sapien
gctgcaccttggcttgctttggctg

SEQ ID NO: 806351 - DNA, 25 bp, Homo sapien
cagcagctctctggactcgggggtc

SEQ ID NO: 806352 - DNA, 25 bp, Homo sapien
cccagcatgtgctcgtgagagacag

SEQ ID NO: 806353 - DNA, 25 bp, Homo sapien
cagcatgtgctcgtgagagacagac

SEQ ID NO: 806354 - DNA, 25 bp, Homo sapien
ctatgcccagcatgtgctcgtgaga

SEQ ID NO: 806355 - DNA, 25 bp, Homo sapien
tgtgctcgtgagagacagacttggc

SEQ ID NO: 806356 - DNA, 25 bp, Homo sapien
tgttgtgtccaaaacaccgggctgg

SEQ ID NO: 806357 - DNA, 25 bp, Homo sapien
ggttgaatcagagccggtcagcagc

SEQ ID NO: 806358 - DNA, 25 bp, Homo sapien
ctggttttccgggttgaatcagagc

SEQ ID NO: 806359 - DNA, 25 bp, Homo sapien
cgagaggcccacaggtaaaaggtca

SEQ ID NO: 806360 - DNA, 25 bp, Homo sapien
catctgtccagtctgggtttgctcc

SEQ ID NO: 806361 - DNA, 25 bp, Homo sapien
tcatctgtccagtctgggtttgctc

SEQ ID NO: 806362 - DNA, 25 bp, Homo sapien
tcaaggtggtaaggtgtgtccccac

SEQ ID NO: 806363 - DNA, 25 bp, Homo sapien
gatttgggagtatgaaattcaaggt

SEQ ID NO: 806364 - DNA, 25 bp, Homo sapien
ctgggagagtcttgcagcaaatggt

SEQ ID NO: 806365 - DNA, 25 bp, Homo sapien
caaatggtgggagaacccgatttgg

SEQ ID NO: 806366 - DNA, 25 bp, Homo sapien
tgtttgctctggacgcagacttctc

SEQ ID NO: 806367 - DNA, 25 bp, Homo sapien
gcatccatccatagaaagtcgttag

SEQ ID NO: 806368 - DNA, 25 bp, Homo sapien
gctgggcgatcgtgaacaggtcctt

SEQ ID NO: 806369 - DNA, 25 bp, Homo sapien
gacagggcacatgtacaagcaggaa

SEQ ID NO: 806370 - DNA, 25 bp, Homo sapien
aaacagagtgtcaattcatggcagg

SEQ ID NO: 806371 - DNA, 25 bp, Homo sapien
gatagattctgtggagcagtggtcc

SEQ ID NO: 806372 - DNA, 25 bp, Homo sapien
ttttttcacagaccagggtgggatg

SEQ ID NO: 806373 - DNA, 25 bp, Homo sapien
ggaggaagagtgaccgatagattct

SEQ ID NO: 806374 - DNA, 25 bp, Homo sapien
gataacctccatcaaaacgtggaag

SEQ ID NO: 806375 - DNA, 25 bp, Homo sapien
caggtcactgtggagttatcaaaga

SEQ ID NO: 806376 - DNA, 25 bp, Homo sapien
ctgcttttcctttggcgaaccaggt

SEQ ID NO: 806377 - DNA, 25 bp, Homo sapien
cagggctgtccacccggtgctctgg

SEQ ID NO: 806378 - DNA, 25 bp, Homo sapien
gcgtgtgggtcttcttgacagcgct

SEQ ID NO: 806379 - DNA, 25 bp, Homo sapien
tgtgggtcttcttgacagcgctctt

SEQ ID NO: 806380 - DNA, 25 bp, Homo sapien
gaggggggcgtgtgggtcttcttga

SEQ ID NO: 806381 - DNA, 25 bp, Homo sapien
ggtcttcttgacagcgctcttggcc

SEQ ID NO: 806382 - DNA, 25 bp, Homo sapien
ttgcgattggcggttcgtcctgctc

SEQ ID NO: 806383 - DNA, 25 bp, Homo sapien
gaggtgccttgcgattggcggttcg

SEQ ID NO: 806384 - DNA, 25 bp, Homo sapien
tgccttgcgattggcggttcgtcct

SEQ ID NO: 806385 - DNA, 25 bp, Homo sapien
attggcggttcgtcctgctctggcg

SEQ ID NO: 806386 - DNA, 25 bp, Homo sapien
taagtgtcttgatgcagagggactg

SEQ ID NO: 806387 - DNA, 25 bp, Homo sapien
ggttgttggtgacgcctgaccatcc

SEQ ID NO: 806388 - DNA, 25 bp, Homo sapien
gagttctctgccttaagcccgaagt

SEQ ID NO: 806389 - DNA, 25 bp, Homo sapien
caaggctgcaggtccgaggaaaaga

SEQ ID NO: 806390 - DNA, 25 bp, Homo sapien
aaagagggctggtgaaggaatcgtt

SEQ ID NO: 806391 - DNA, 25 bp, Homo sapien
ctagagcaatggaaagagggctggt

SEQ ID NO: 806392 - DNA, 25 bp, Homo sapien
atggaaagagggctggtgaaggaat

SEQ ID NO: 806393 - DNA, 25 bp, Homo sapien
tggaaagagggctggtgaaggaatc

SEQ ID NO: 806394 - DNA, 25 bp, Homo sapien
ccaggtgggccacgtaggatggggg

SEQ ID NO: 806395 - DNA, 25 bp, Homo sapien
acccttcaccaaagacaagggccag

SEQ ID NO: 806396 - DNA, 25 bp, Homo sapien
caccccgaagtctgaggccaggtgg

SEQ ID NO: 806397 - DNA, 25 bp, Homo sapien
tgctgaaacaccctcaccccgaagt

SEQ ID NO: 806398 - DNA, 25 bp, Homo sapien
gaggccaccccatagggtgagaaaa

SEQ ID NO: 806399 - DNA, 25 bp, Homo sapien
acaccgaggccaccccatagggtga

SEQ ID NO: 806400 - DNA, 25 bp, Homo sapien
ggagcatggccaacaccgaggccac

SEQ ID NO: 806401 - DNA, 25 bp, Homo sapien
tggagcatggccaacaccgaggcca

SEQ ID NO: 806402 - DNA, 25 bp, Homo sapien
gatggctatgctaagtatttcacaa

SEQ ID NO: 806403 - DNA, 25 bp, Homo sapien
tcacaagtgtaattccatgaattct

SEQ ID NO: 806404 - DNA, 25 bp, Homo sapien
gtatttcacaagtgtaattccatga

SEQ ID NO: 806405 - DNA, 25 bp, Homo sapien
ttttttcctatagtgatggctatgc

SEQ ID NO: 806406 - DNA, 25 bp, Homo sapien
ccctgttgctcagtcttgtctcgaa

SEQ ID NO: 806407 - DNA, 25 bp, Homo sapien
gggtctccctgttgctcagtcttgt

SEQ ID NO: 806408 - DNA, 25 bp, Homo sapien
tctgcctcctggatgaaccctaaat

SEQ ID NO: 806409 - DNA, 25 bp, Homo sapien
tcctggatgaaccctaaatattttc

SEQ ID NO: 806410 - DNA, 25 bp, Homo sapien
tggatgggggctaccgtgctttccc

SEQ ID NO: 806411 - DNA, 25 bp, Homo sapien
agaggacatgtgaggcttatgctga

SEQ ID NO: 806412 - DNA, 25 bp, Homo sapien
gggagatttcattccaggatgaaat

SEQ ID NO: 806413 - DNA, 25 bp, Homo sapien
gcttatgctgaattgagggttccca

SEQ ID NO: 806414 - DNA, 25 bp, Homo sapien
gagctccttgtacagatgccggagg

SEQ ID NO: 806415 - DNA, 25 bp, Homo sapien
tcagatcccgctggacgaagatcgc

SEQ ID NO: 806416 - DNA, 25 bp, Homo sapien
gaaaagtccacttgcttgaccgtgc

SEQ ID NO: 806417 - DNA, 25 bp, Homo sapien
cgaagatcgcgtctgtggtgctgat

SEQ ID NO: 806418 - DNA, 25 bp, Homo sapien
tgtgaactactgcacccaactggga

SEQ ID NO: 806419 - DNA, 25 bp, Homo sapien
cagcctaagatttggttcttaaagc

SEQ ID NO: 806420 - DNA, 25 bp, Homo sapien
ccagccctttgtccatagagaagag

SEQ ID NO: 806421 - DNA, 25 bp, Homo sapien
ggatgtatgtcaaagggctgcagtc

SEQ ID NO: 806422 - DNA, 25 bp, Homo sapien
tcaggaagttagacgattttgttgt

SEQ ID NO: 806423 - DNA, 25 bp, Homo sapien
gaagatcaggaagttagacgatttt

SEQ ID NO: 806424 - DNA, 25 bp, Homo sapien
ctatgggaaaatcaatgatcaggaa

SEQ ID NO: 806425 - DNA, 25 bp, Homo sapien
tcaggaagatcaggaagttagacga

SEQ ID NO: 806426 - DNA, 25 bp, Homo sapien
ccgttgaagtagagggcattcacca

SEQ ID NO: 806427 - DNA, 25 bp, Homo sapien
ctgagccatcatgggcacagagaca

SEQ ID NO: 806428 - DNA, 25 bp, Homo sapien
tagttgaacttgttggtctgagcca

SEQ ID NO: 806429 - DNA, 25 bp, Homo sapien
agagacagtgctgccgtctgatttg

SEQ ID NO: 806430 - DNA, 25 bp, Homo sapien
gcaacacacgaagatgagaccctgg

SEQ ID NO: 806431 - DNA, 25 bp, Homo sapien
ccttcatgggataaacctcctgtct

SEQ ID NO: 806432 - DNA, 25 bp, Homo sapien
aagtggctcaatttcgttcggctca

SEQ ID NO: 806433 - DNA, 25 bp, Homo sapien
caaagctggagtatattctagggtc

SEQ ID NO: 806434 - DNA, 25 bp, Homo sapien
tggccatcgggcgtggtgaactcag

SEQ ID NO: 806435 - DNA, 25 bp, Homo sapien
ccaggatgtcgtagtaatggccatc

SEQ ID NO: 806436 - DNA, 25 bp, Homo sapien
gcagcaatgaacatgctgagggtgt

SEQ ID NO: 806437 - DNA, 25 bp, Homo sapien
cactcagaatgttggtgagggcaga

SEQ ID NO: 806438 - DNA, 25 bp, Homo sapien
tcggggagatagcggggtggcttac

SEQ ID NO: 806439 - DNA, 25 bp, Homo sapien
gtcggggagatagcggggtggctta

SEQ ID NO: 806440 - DNA, 25 bp, Homo sapien
taggtcggggagatagcggggtggc

SEQ ID NO: 806441 - DNA, 25 bp, Homo sapien
caggagagaggggttggtaggtcgg

SEQ ID NO: 806442 - DNA, 25 bp, Homo sapien
tcttggaaccccagctagaagctgc

SEQ ID NO: 806443 - DNA, 25 bp, Homo sapien
gaatcaagtggccagaatagggacg

SEQ ID NO: 806444 - DNA, 25 bp, Homo sapien
gaagctgcgctttgagctgctccgt

SEQ ID NO: 806445 - DNA, 25 bp, Homo sapien
gcctggcattatagcatccggaaat

SEQ ID NO: 806446 - DNA, 25 bp, Homo sapien
gaaagactcgtgaagtcagcctgaa

SEQ ID NO: 806447 - DNA, 25 bp, Homo sapien
gcttcctgaggtcgacttcagtctc

SEQ ID NO: 806448 - DNA, 25 bp, Homo sapien
tgaacatgtcggtcattcccaggtt

SEQ ID NO: 806449 - DNA, 25 bp, Homo sapien
gaggtcgacttcagtctccagggag

SEQ ID NO: 806450 - DNA, 25 bp, Homo sapien
ccactggggtgagaaaatgcaaagg

SEQ ID NO: 806451 - DNA, 25 bp, Homo sapien
tcttaggggcccccgcagtccactg

SEQ ID NO: 806452 - DNA, 25 bp, Homo sapien
gcccccgcagtccactggggtgaga

SEQ ID NO: 806453 - DNA, 25 bp, Homo sapien
gaaaatgcaaaggaaagtcttctta

SEQ ID NO: 806454 - DNA, 25 bp, Homo sapien
aggaggccaccgtgccactctcgtt

SEQ ID NO: 806455 - DNA, 25 bp, Homo sapien
ttcactttctgcagcgcctgcgcga

SEQ ID NO: 806456 - DNA, 25 bp, Homo sapien
cgttcacctcgatcttcactttctg

SEQ ID NO: 806457 - DNA, 25 bp, Homo sapien
ctgcgcgacgtggagaggctcttgg

SEQ ID NO: 806458 - DNA, 25 bp, Homo sapien
cacagtcagggaacttaggagccat

SEQ ID NO: 806459 - DNA, 25 bp, Homo sapien
tcccaagcccgttttccaggctgag

SEQ ID NO: 806460 - DNA, 25 bp, Homo sapien
taggagccatcaggcgaggaaacag

SEQ ID NO: 806461 - DNA, 25 bp, Homo sapien
gaggaaacagggttccatggtccca

SEQ ID NO: 806462 - DNA, 25 bp, Homo sapien
tgatgatctcctcgggggccatgcg

SEQ ID NO: 806463 - DNA, 25 bp, Homo sapien
ctgtggggttgtgccggaccacaaa

SEQ ID NO: 806464 - DNA, 25 bp, Homo sapien
ttgtgccggaccacaaagaggaagg

SEQ ID NO: 806465 - DNA, 25 bp, Homo sapien
catgatgatctcctcgggggccatg

SEQ ID NO: 806466 - DNA, 25 bp, Homo sapien
tggaaggactgagatctaggcagat

SEQ ID NO: 806467 - DNA, 25 bp, Homo sapien
agtgagctgtctggagtcgcagctg

SEQ ID NO: 806468 - DNA, 25 bp, Homo sapien
tgagatctaggcagatgagtgagct

SEQ ID NO: 806469 - DNA, 25 bp, Homo sapien
tgggacagctcatcaggctggatgt

SEQ ID NO: 806470 - DNA, 25 bp, Homo sapien
ccagatgaaggcgtctttccccagg

SEQ ID NO: 806471 - DNA, 25 bp, Homo sapien
ctaaggtagttgaatccgagctgcc

SEQ ID NO: 806472 - DNA, 25 bp, Homo sapien
gacttcctgagatacggtgacacag

SEQ ID NO: 806473 - DNA, 25 bp, Homo sapien
tgaagtgagtcaccaatgcggctgt

SEQ ID NO: 806474 - DNA, 25 bp, Homo sapien
tgggccgtgaaaagggagcagggtg

SEQ ID NO: 806475 - DNA, 25 bp, Homo sapien
gggagtgggccgtgaaaagggagca

SEQ ID NO: 806476 - DNA, 25 bp, Homo sapien
agcagggtgggaattaagtgtaggg

SEQ ID NO: 806477 - DNA, 25 bp, Homo sapien
gagcagggtgggaattaagtgtagg

SEQ ID NO: 806478 - DNA, 25 bp, Homo sapien
gacaataaggtcctcgcgctttgga

SEQ ID NO: 806479 - DNA, 25 bp, Homo sapien
tcgtcatggtaacgcggctgtcctg

SEQ ID NO: 806480 - DNA, 25 bp, Homo sapien
tcattggagttcgaagcagcaggca

SEQ ID NO: 806481 - DNA, 25 bp, Homo sapien
tctaggagcccggtcgtcatggtaa

SEQ ID NO: 806482 - DNA, 25 bp, Homo sapien
gggctggaggcggagaagcggaaac

SEQ ID NO: 806483 - DNA, 25 bp, Homo sapien
ctggaggcggagaagcggaaaccat

SEQ ID NO: 806484 - DNA, 25 bp, Homo sapien
gcaggcgccgacgccgcggggagcg

SEQ ID NO: 806485 - DNA, 25 bp, Homo sapien
gcggggctggaggcggagaagcgga

SEQ ID NO: 806486 - DNA, 25 bp, Homo sapien
tcggcgcgtcccacttcggccaccg

SEQ ID NO: 806487 - DNA, 25 bp, Homo sapien
caccgtaggcgccagtcccactccc

SEQ ID NO: 806488 - DNA, 25 bp, Homo sapien
ggctcggcgcgtcccacttcggcca

SEQ ID NO: 806489 - DNA, 25 bp, Homo sapien
acttcggccaccgtaggcgccagtc

SEQ ID NO: 806490 - DNA, 25 bp, Homo sapien
gatggaagacagaaccctcactgcc

SEQ ID NO: 806491 - DNA, 25 bp, Homo sapien
ccctgggtgtgtggcactgtactag

SEQ ID NO: 806492 - DNA, 25 bp, Homo sapien
gaaggcctggattccggaaagagaa

SEQ ID NO: 806493 - DNA, 25 bp, Homo sapien
aggtgaccaatttccctcagttagg

SEQ ID NO: 806494 - DNA, 25 bp, Homo sapien
tggacattgtacctgccttgcacag

SEQ ID NO: 806495 - DNA, 25 bp, Homo sapien
tgcgcccggccgttagttattacta

SEQ ID NO: 806496 - DNA, 25 bp, Homo sapien
tctactagttatgcaaggccttggc

SEQ ID NO: 806497 - DNA, 25 bp, Homo sapien
caggcaggcagtataacatgttagc

SEQ ID NO: 806498 - DNA, 25 bp, Homo sapien
tccgttccttgtccgaagtggccag

SEQ ID NO: 806499 - DNA, 25 bp, Homo sapien
tatagacaactttgaggtccctcca

SEQ ID NO: 806500 - DNA, 25 bp, Homo sapien
aggacaacctgcatgagctcgcgca

SEQ ID NO: 806501 - DNA, 25 bp, Homo sapien
tcttgggctttcgagccaggacaac

SEQ ID NO: 806502 - DNA, 25 bp, Homo sapien
gagctcattgtcttggccctcgatg

SEQ ID NO: 806503 - DNA, 25 bp, Homo sapien
aagtatttgtctaagagctccacgt

SEQ ID NO: 806504 - DNA, 25 bp, Homo sapien
tcttggccctcgatggcgcagcaga

SEQ ID NO: 806505 - DNA, 25 bp, Homo sapien
tccacgtatcggtggatcagctcca

SEQ ID NO: 806506 - DNA, 25 bp, Homo sapien
gttgaagatgatgtccagctcgcac

SEQ ID NO: 806507 - DNA, 25 bp, Homo sapien
gatgaagtaggccttctcaaagttg

SEQ ID NO: 806508 - DNA, 25 bp, Homo sapien
tgaagatgatgtccagctcgcacac

SEQ ID NO: 806509 - DNA, 25 bp, Homo sapien
cccatcaaaaactcatccaggatga

SEQ ID NO: 806510 - DNA, 25 bp, Homo sapien
tcttgcagtaggtcagcctgctcga

SEQ ID NO: 806511 - DNA, 25 bp, Homo sapien
tcagcctgctcgatggctttcagca

SEQ ID NO: 806512 - DNA, 25 bp, Homo sapien
tcgatggctttcagcacactcttct

SEQ ID NO: 806513 - DNA, 25 bp, Homo sapien
ctcttgcagtaggtcagcctgctcg

SEQ ID NO: 806514 - DNA, 25 bp, Homo sapien
gggctccttggcgacggtgggcagg

SEQ ID NO: 806515 - DNA, 25 bp, Homo sapien
tgtccgccactgtgcgcttcctcct

SEQ ID NO: 806516 - DNA, 25 bp, Homo sapien
tcagataccacagggagggggggct

SEQ ID NO: 806517 - DNA, 25 bp, Homo sapien
tgggcagggcaggccgggtgtccag

SEQ ID NO: 806518 - DNA, 25 bp, Homo sapien
gattccggtgactcatctccctgca

SEQ ID NO: 806519 - DNA, 25 bp, Homo sapien
caccagggctcggtgatggcacagc

SEQ ID NO: 806520 - DNA, 25 bp, Homo sapien
accagggctcggtgatggcacagca

SEQ ID NO: 806521 - DNA, 25 bp, Homo sapien
tcactgcagattccggtgactcatc

SEQ ID NO: 806522 - DNA, 25 bp, Homo sapien
tccagcacactccgtggcgactcat

SEQ ID NO: 806523 - DNA, 25 bp, Homo sapien
gcacactccgtggcgactcatcctc

SEQ ID NO: 806524 - DNA, 25 bp, Homo sapien
agcacactccgtggcgactcatcct

SEQ ID NO: 806525 - DNA, 25 bp, Homo sapien
ccagcacactccgtggcgactcatc

SEQ ID NO: 806526 - DNA, 25 bp, Homo sapien
ttcccgccacgctgccaggacccca

SEQ ID NO: 806527 - DNA, 25 bp, Homo sapien
agccgagtcccaccaagaacagggc

SEQ ID NO: 806528 - DNA, 25 bp, Homo sapien
gaagcagccgttcccgccacgctgc

SEQ ID NO: 806529 - DNA, 25 bp, Homo sapien
gaccccatcgccacaccccggccca

SEQ ID NO: 806530 - DNA, 25 bp, Homo sapien
tggagggagggaatgtttgaagggc

SEQ ID NO: 806531 - DNA, 25 bp, Homo sapien
ataaaagccaaatagcacccccatc

SEQ ID NO: 806532 - DNA, 25 bp, Homo sapien
taaaagccaaatagcacccccatct

SEQ ID NO: 806533 - DNA, 25 bp, Homo sapien
agccaaatagcacccccatctgggt

SEQ ID NO: 806534 - DNA, 25 bp, Homo sapien
aaagccaaatagcacccccatctgg

SEQ ID NO: 806535 - DNA, 25 bp, Homo sapien
agaggacaagaagtgccctgaacac

SEQ ID NO: 806536 - DNA, 25 bp, Homo sapien
gaccagggtcccataaagcttgccc

SEQ ID NO: 806537 - DNA, 25 bp, Homo sapien
tggcactggataaaggccccactgc

SEQ ID NO: 806538 - DNA, 25 bp, Homo sapien
cttccctcaaagtggcaaggttaga

SEQ ID NO: 806539 - DNA, 25 bp, Homo sapien
cattgggcataaaaatccgtttaag

SEQ ID NO: 806540 - DNA, 25 bp, Homo sapien
cgtttggagacgcattgggcataaa

SEQ ID NO: 806541 - DNA, 25 bp, Homo sapien
aggtagggtggccagataaaataca

SEQ ID NO: 806542 - DNA, 25 bp, Homo sapien
ggcagcccgtttggagacgcattgg

SEQ ID NO: 806543 - DNA, 25 bp, Homo sapien
gacccgcatcctgaagagttgctcc

SEQ ID NO: 806544 - DNA, 25 bp, Homo sapien
taaactgggcaaacgaaatcaccca

SEQ ID NO: 806545 - DNA, 25 bp, Homo sapien
cgcaggtacttgtgaactgattcaa

SEQ ID NO: 806546 - DNA, 25 bp, Homo sapien
agccttttctaatcgcaggtacttg

SEQ ID NO: 806547 - DNA, 25 bp, Homo sapien
ggctcgcacccattaagaaacccga

SEQ ID NO: 806548 - DNA, 25 bp, Homo sapien
gaatgtggctcgcacccattaagaa

SEQ ID NO: 806549 - DNA, 25 bp, Homo sapien
tgagggaagcgccagccacagtccc

SEQ ID NO: 806550 - DNA, 25 bp, Homo sapien
agaggagaagaatgtggctcgcacc

SEQ ID NO: 806551 - DNA, 25 bp, Homo sapien
gcgtgagggagggttctctctcctc

SEQ ID NO: 806552 - DNA, 25 bp, Homo sapien
tcgcgtcgtgacaccagctggtaaa

SEQ ID NO: 806553 - DNA, 25 bp, Homo sapien
gcgctcccctttataaggcggtgga

SEQ ID NO: 806554 - DNA, 25 bp, Homo sapien
gctggtaaatactccgctgttcgtc

SEQ ID NO: 806555 - DNA, 25 bp, Homo sapien
ccagcgctgaccgacgttagagtcg

SEQ ID NO: 806556 - DNA, 25 bp, Homo sapien
cgtcgccaacggagctgcggcgctg

SEQ ID NO: 806557 - DNA, 25 bp, Homo sapien
gggtctccgcccctcgaagctgccg

SEQ ID NO: 806558 - DNA, 25 bp, Homo sapien
agcagggcacgagtccgctccggat

SEQ ID NO: 806559 - DNA, 25 bp, Homo sapien
aaaacccgagacaccaccatcctca

SEQ ID NO: 806560 - DNA, 25 bp, Homo sapien
cactccccagccgggacacagggcg

SEQ ID NO: 806561 - DNA, 25 bp, Homo sapien
gtctcgccagtagggcttgaggcca

SEQ ID NO: 806562 - DNA, 25 bp, Homo sapien
cgggacacagggcggagtctcgcca

SEQ ID NO: 806563 - DNA, 25 bp, Homo sapien
gttcctcgagccctgacagtcctga

SEQ ID NO: 806564 - DNA, 25 bp, Homo sapien
tcacacgtagtgattttccctcttt

SEQ ID NO: 806565 - DNA, 25 bp, Homo sapien
cttgcctgattcctgaagttcctgt

SEQ ID NO: 806566 - DNA, 25 bp, Homo sapien
agttcctgtgggtgttcctcgagcc

SEQ ID NO: 806567 - DNA, 25 bp, Homo sapien
ttatcatatacaaagtgatactttg

SEQ ID NO: 806568 - DNA, 25 bp, Homo sapien
tatcatatacaaagtgatactttga

SEQ ID NO: 806569 - DNA, 25 bp, Homo sapien
aaatattctccagataaaaaagtgt

SEQ ID NO: 806570 - DNA, 25 bp, Homo sapien
tattctccagataaaaaagtgttgg

SEQ ID NO: 806571 - DNA, 25 bp, Homo sapien
tccgcgtgcctgaactgaatatgtc

SEQ ID NO: 806572 - DNA, 25 bp, Homo sapien
aagacacggccctctcaggaagctc

SEQ ID NO: 806573 - DNA, 25 bp, Homo sapien
taaattattaatgttccgcagtctc

SEQ ID NO: 806574 - DNA, 25 bp, Homo sapien
ggactccccgcgtgataaattatta

SEQ ID NO: 806575 - DNA, 25 bp, Homo sapien
tgagttccccagagatctgagggtt

SEQ ID NO: 806576 - DNA, 25 bp, Homo sapien
gaaggagcagtacatccacgagaac

SEQ ID NO: 806577 - DNA, 25 bp, Homo sapien
ttctgttcagacaagatgaaggcag

SEQ ID NO: 806578 - DNA, 25 bp, Homo sapien
gaggccgaacagaaaggactcttgc

SEQ ID NO: 806579 - DNA, 25 bp, Homo sapien
agacccggtcaacccaggtgagatc

SEQ ID NO: 806580 - DNA, 25 bp, Homo sapien
cctatgcaaagggactcggaattcc

SEQ ID NO: 806581 - DNA, 25 bp, Homo sapien
cgcgtagcggagatcccaggatcct

SEQ ID NO: 806582 - DNA, 25 bp, Homo sapien
tcttgaggctgagtcgcgccaagcc

SEQ ID NO: 806583 - DNA, 25 bp, Homo sapien
tagcttgtacttctgcgcgtgcgcc

SEQ ID NO: 806584 - DNA, 25 bp, Homo sapien
cattacgtggcgtttccttggagac

SEQ ID NO: 806585 - DNA, 25 bp, Homo sapien
tccgtgggcaatccgaggttcctag

SEQ ID NO: 806586 - DNA, 25 bp, Homo sapien
gtcaaagaaagtggctggcttccgt

SEQ ID NO: 806587 - DNA, 25 bp, Homo sapien
caacacaactgtcggaagaaactgc

SEQ ID NO: 806588 - DNA, 25 bp, Homo sapien
tgtcggaagaaactgctgcgcacgc

SEQ ID NO: 806589 - DNA, 25 bp, Homo sapien
tggcacaacacaactgtcggaagaa

SEQ ID NO: 806590 - DNA, 25 bp, Homo sapien
gaaactgctgcgcacgcgtactaac

SEQ ID NO: 806591 - DNA, 25 bp, Homo sapien
agaggaatgactaggtaagaaaatt

SEQ ID NO: 806592 - DNA, 25 bp, Homo sapien
aagaggaatgactaggtaagaaaat

SEQ ID NO: 806593 - DNA, 25 bp, Homo sapien
gaggaatgactaggtaagaaaattc

SEQ ID NO: 806594 - DNA, 25 bp, Homo sapien
acatagcgagagcccgtcaccacat

SEQ ID NO: 806595 - DNA, 25 bp, Homo sapien
gcgagagcccgtcaccacataacaa

SEQ ID NO: 806596 - DNA, 25 bp, Homo sapien
ggcctcatgcttgcagttccagcca

SEQ ID NO: 806597 - DNA, 25 bp, Homo sapien
gcgtggggcctcatgcttgcagttc

SEQ ID NO: 806598 - DNA, 25 bp, Homo sapien
tttagggatgccaaagcttacagtc

SEQ ID NO: 806599 - DNA, 25 bp, Homo sapien
taacaagtggccaggtcaggagtca

SEQ ID NO: 806600 - DNA, 25 bp, Homo sapien
gcacgtgaggttcccactgagagaa

SEQ ID NO: 806601 - DNA, 25 bp, Homo sapien
taaggcctaactggtgaatgacctg

SEQ ID NO: 806602 - DNA, 25 bp, Homo sapien
gcagattctctctacgcaaatggaa

SEQ ID NO: 806603 - DNA, 25 bp, Homo sapien
gcaaatggaaccgtctatgcagaca

SEQ ID NO: 806604 - DNA, 25 bp, Homo sapien
ttttgactccaaacaaagggctctg

SEQ ID NO: 806605 - DNA, 25 bp, Homo sapien
cacaagcaaatgactcccagagtga

SEQ ID NO: 806606 - DNA, 25 bp, Homo sapien
ccccagagcggctccagtgtgcctt

SEQ ID NO: 806607 - DNA, 25 bp, Homo sapien
cccagagcggctccagtgtgccttc

SEQ ID NO: 806608 - DNA, 25 bp, Homo sapien
ctccttgaaccccaaaatctgacac

SEQ ID NO: 806609 - DNA, 25 bp, Homo sapien
cctctccttgaaccccaaaatctga

SEQ ID NO: 806610 - DNA, 25 bp, Homo sapien
ctctccttgaaccccaaaatctgac

SEQ ID NO: 806611 - DNA, 25 bp, Homo sapien
tctccttgaaccccaaaatctgaca

SEQ ID NO: 806612 - DNA, 25 bp, Homo sapien
tgtctactcggcttcacagctcctt

SEQ ID NO: 806613 - DNA, 25 bp, Homo sapien
acagcaactcacgtgatgtgtcact

SEQ ID NO: 806614 - DNA, 25 bp, Homo sapien
tggcgacgctcatgtgtctactcgg

SEQ ID NO: 806615 - DNA, 25 bp, Homo sapien
tcaaccggcactttccatcaaagag

SEQ ID NO: 806616 - DNA, 25 bp, Homo sapien
agccttcacctccagcccattccct

SEQ ID NO: 806617 - DNA, 25 bp, Homo sapien
cccgagccttcacctccagcccatt

SEQ ID NO: 806618 - DNA, 25 bp, Homo sapien
cgagccttcacctccagcccattcc

SEQ ID NO: 806619 - DNA, 25 bp, Homo sapien
gccttcacctccagcccattccctc

SEQ ID NO: 806620 - DNA, 25 bp, Homo sapien
aacgtgatgccaagtgggcacaccc

SEQ ID NO: 806621 - DNA, 25 bp, Homo sapien
gtgatgccaagtgggcacacccctg

SEQ ID NO: 806622 - DNA, 25 bp, Homo sapien
tggagcgccccaagtcccaccactg

SEQ ID NO: 806623 - DNA, 25 bp, Homo sapien
cacaaacgtgatgccaagtgggcac

SEQ ID NO: 806624 - DNA, 25 bp, Homo sapien
gccacccatgcttggatacgctcat

SEQ ID NO: 806625 - DNA, 25 bp, Homo sapien
cacccatgcttggatacgctcatct

SEQ ID NO: 806626 - DNA, 25 bp, Homo sapien
gggccacccatgcttggatacgctc

SEQ ID NO: 806627 - DNA, 25 bp, Homo sapien
cccatgcttggatacgctcatcttc

SEQ ID NO: 806628 - DNA, 25 bp, Homo sapien
tggagacagctcactgctgactggg

SEQ ID NO: 806629 - DNA, 25 bp, Homo sapien
cacacttcctgtcccgccagctgag

SEQ ID NO: 806630 - DNA, 25 bp, Homo sapien
ccagctgagaccctttcagtttctc

SEQ ID NO: 806631 - DNA, 25 bp, Homo sapien
actggggaggtcacagcgccctggg

SEQ ID NO: 806632 - DNA, 25 bp, Homo sapien
cacgcaaagttacagggcttccaag

SEQ ID NO: 806633 - DNA, 25 bp, Homo sapien
agcagggcacgcaaagttacagggc

SEQ ID NO: 806634 - DNA, 25 bp, Homo sapien
cgcaaagttacagggcttccaagaa

SEQ ID NO: 806635 - DNA, 25 bp, Homo sapien
agggcacgcaaagttacagggcttc

SEQ ID NO: 806636 - DNA, 25 bp, Homo sapien
acgctgccgggcagcccggtccagc

SEQ ID NO: 806637 - DNA, 25 bp, Homo sapien
tgtccgcatcgtcatcaaactgagg

SEQ ID NO: 806638 - DNA, 25 bp, Homo sapien
cagctgccggttgatgcgacgctgc

SEQ ID NO: 806639 - DNA, 25 bp, Homo sapien
aaactgaggcagtctcttgccgagc

SEQ ID NO: 806640 - DNA, 25 bp, Homo sapien
ttcggaagcgaagtttaaaatgatc

SEQ ID NO: 806641 - DNA, 25 bp, Homo sapien
acagcgcacagtgcagtaccgggca

SEQ ID NO: 806642 - DNA, 25 bp, Homo sapien
cccgcacaggccgtcaggtagttag

SEQ ID NO: 806643 - DNA, 25 bp, Homo sapien
gtcaggtagttagggccctcggcca

SEQ ID NO: 806644 - DNA, 25 bp, Homo sapien
gcagtaccgggcaccgcagctgaca

SEQ ID NO: 806645 - DNA, 25 bp, Homo sapien
ggccgggcagtgcacagcggccctt

SEQ ID NO: 806646 - DNA, 25 bp, Homo sapien
gctccccctgcattgggtgatgaaa

SEQ ID NO: 806647 - DNA, 25 bp, Homo sapien
gggcagtgcacagcggcccttcctc

SEQ ID NO: 806648 - DNA, 25 bp, Homo sapien
ctgcattgggtgatgaaattctgtc

SEQ ID NO: 806649 - DNA, 25 bp, Homo sapien
cctggcagataagacacagttttgt

SEQ ID NO: 806650 - DNA, 25 bp, Homo sapien
tcctggcagataagacacagttttg

SEQ ID NO: 806651 - DNA, 25 bp, Homo sapien
tattctaacagcactggggggccca

SEQ ID NO: 806652 - DNA, 25 bp, Homo sapien
tttattctaacagcactggggggcc

SEQ ID NO: 806653 - DNA, 25 bp, Homo sapien
ttattctaacagcactggggggccc

SEQ ID NO: 806654 - DNA, 25 bp, Homo sapien
gtcacccatccctggaacctagctg

SEQ ID NO: 806655 - DNA, 25 bp, Homo sapien
aagtaccttgagaggaagacaggcc

SEQ ID NO: 806656 - DNA, 25 bp, Homo sapien
ctcccctttgcctaagtaccttgag

SEQ ID NO: 806657 - DNA, 25 bp, Homo sapien
ctccgcggtaccattctgcacatgt

SEQ ID NO: 806658 - DNA, 25 bp, Homo sapien
tcccctgagattcgtccttcagccc

SEQ ID NO: 806659 - DNA, 25 bp, Homo sapien
agccccatcatgtgctttgggatga

SEQ ID NO: 806660 - DNA, 25 bp, Homo sapien
tgagattcgtccttcagccccatca

SEQ ID NO: 806661 - DNA, 25 bp, Homo sapien
catcatgtgctttgggatgagtgta

SEQ ID NO: 806662 - DNA, 25 bp, Homo sapien
aaaggatgcctattgaaaatctata

SEQ ID NO: 806663 - DNA, 25 bp, Homo sapien
agcaaaggatgcctattgaaaatct

SEQ ID NO: 806664 - DNA, 25 bp, Homo sapien
cagaatgctgactgtgttagcaaag

SEQ ID NO: 806665 - DNA, 25 bp, Homo sapien
agaatgctgactgtgttagcaaagg

SEQ ID NO: 806666 - DNA, 25 bp, Homo sapien
gaaactgaagccagaggtgtccaca

SEQ ID NO: 806667 - DNA, 25 bp, Homo sapien
tggataagcaaggtaagtctctgcc

SEQ ID NO: 806668 - DNA, 25 bp, Homo sapien
gtctcctatgactacccctgtgtgg

SEQ ID NO: 806669 - DNA, 25 bp, Homo sapien
cgatgaatagtcacgtggcctccaa

SEQ ID NO: 806670 - DNA, 25 bp, Homo sapien
ggcatagaatccatgtgactgtgac

SEQ ID NO: 806671 - DNA, 25 bp, Homo sapien
cacccacctgtctgaatttgagaag

SEQ ID NO: 806672 - DNA, 25 bp, Homo sapien
ggaagtgcaaaataggccccagctg

SEQ ID NO: 806673 - DNA, 25 bp, Homo sapien
ttcttgtgcaaaaggctgaagcggg

SEQ ID NO: 806674 - DNA, 25 bp, Homo sapien
aaagttctcccacgatctgtccaag

SEQ ID NO: 806675 - DNA, 25 bp, Homo sapien
gatgaattggcctgattagtgcctg

SEQ ID NO: 806676 - DNA, 25 bp, Homo sapien
tattaataaaccctgaactcctcca

SEQ ID NO: 806677 - DNA, 25 bp, Homo sapien
tcactgaggattctgtgaaatccaa

SEQ ID NO: 806678 - DNA, 25 bp, Homo sapien
cctaactcacctctattaagaactc

SEQ ID NO: 806679 - DNA, 25 bp, Homo sapien
gaaatctgcaaaacctaactcacct

SEQ ID NO: 806680 - DNA, 25 bp, Homo sapien
agcagagcgaggagccagaaatctg

SEQ ID NO: 806681 - DNA, 25 bp, Homo sapien
gcgaggagccagaaatctgcaaaac

SEQ ID NO: 806682 - DNA, 25 bp, Homo sapien
tcccgtgtgatgctcttgggcgcaa

SEQ ID NO: 806683 - DNA, 25 bp, Homo sapien
gaacgccgttcattgaggacgcagg

SEQ ID NO: 806684 - DNA, 25 bp, Homo sapien
aggacgcaggttctctcccgtgtga

SEQ ID NO: 806685 - DNA, 25 bp, Homo sapien
cgcaagctgtgacgtgggttccacg

SEQ ID NO: 806686 - DNA, 25 bp, Homo sapien
tgttgttgttcaaaagactcttcca

SEQ ID NO: 806687 - DNA, 25 bp, Homo sapien
acaatcagtccggtcaattctctgc

SEQ ID NO: 806688 - DNA, 25 bp, Homo sapien
tatttcgctctaacgattacccaag

SEQ ID NO: 806689 - DNA, 25 bp, Homo sapien
ttaatggccagagtacaacccatga

SEQ ID NO: 806690 - DNA, 25 bp, Homo sapien
gcaggccgtcctagccgatccgatt

SEQ ID NO: 806691 - DNA, 25 bp, Homo sapien
caggccgtcctagccgatccgattt

SEQ ID NO: 806692 - DNA, 25 bp, Homo sapien
gccgtcctagccgatccgatttctc

SEQ ID NO: 806693 - DNA, 25 bp, Homo sapien
ggccgtcctagccgatccgatttct

SEQ ID NO: 806694 - DNA, 25 bp, Homo sapien
caaatgatgcttgtattatgcccac

SEQ ID NO: 806695 - DNA, 25 bp, Homo sapien
tgtgtccttccgttgagatctgtgc

SEQ ID NO: 806696 - DNA, 25 bp, Homo sapien
tcctgtgaaagtggcttcttccaag

SEQ ID NO: 806697 - DNA, 25 bp, Homo sapien
tcctgcagtacggtaactccttcca

SEQ ID NO: 806698 - DNA, 25 bp, Homo sapien
aatttctccgcgcaggctgcctggg

SEQ ID NO: 806699 - DNA, 25 bp, Homo sapien
tctcttagcggatctgctgcaagtg

SEQ ID NO: 806700 - DNA, 25 bp, Homo sapien
gctgcatctaccaggccatcttgag

SEQ ID NO: 806701 - DNA, 25 bp, Homo sapien
cttcggttcccgtcagaggagaggt

SEQ ID NO: 806702 - DNA, 25 bp, Homo sapien
tctgtatctggttggtaaatacctc

SEQ ID NO: 806703 - DNA, 25 bp, Homo sapien
acatttgccatgtgctctggaaaac

SEQ ID NO: 806704 - DNA, 25 bp, Homo sapien
cgtttcccgtgtccttccattgaga

SEQ ID NO: 806705 - DNA, 25 bp, Homo sapien
cattgagatctgcacatcctgtgta

SEQ ID NO: 806706 - DNA, 25 bp, Homo sapien
gacatgtagctgtgtgagcagtcta

SEQ ID NO: 806707 - DNA, 25 bp, Homo sapien
ttttctagaccatgacaattccctg

SEQ ID NO: 806708 - DNA, 25 bp, Homo sapien
gtttgaaccacattcacctgttagg

SEQ ID NO: 806709 - DNA, 25 bp, Homo sapien
ataaaaatgctagggtgtctgtcac

SEQ ID NO: 806710 - DNA, 25 bp, Homo sapien
cacagggcgttcactcagaccatct

SEQ ID NO: 806711 - DNA, 25 bp, Homo sapien
tcagttgagaaaatcctattatcaa

SEQ ID NO: 806712 - DNA, 25 bp, Homo sapien
ctgccctgagttcagttgagaaaat

SEQ ID NO: 806713 - DNA, 25 bp, Homo sapien
aggcacctgtcacacagggcgttca

SEQ ID NO: 806714 - DNA, 25 bp, Homo sapien
tgcttaggcaggtttcgaattcctt

SEQ ID NO: 806715 - DNA, 25 bp, Homo sapien
ggcaggtttcgaattccttgcctca

SEQ ID NO: 806716 - DNA, 25 bp, Homo sapien
aaaaaacacacatatggtgaacagt

SEQ ID NO: 806717 - DNA, 25 bp, Homo sapien
catatggtgaacagtaaaagtggga

SEQ ID NO: 806718 - DNA, 25 bp, Homo sapien
ggagcggggcgagcggtcggagccc

SEQ ID NO: 806719 - DNA, 25 bp, Homo sapien
ccgggtgcgagctggaaatgtgtgg

SEQ ID NO: 806720 - DNA, 25 bp, Homo sapien
gggagcacagcgagaggagcggggc

SEQ ID NO: 806721 - DNA, 25 bp, Homo sapien
acgaggaccggcaggagcgcaccgg

SEQ ID NO: 806722 - DNA, 25 bp, Homo sapien
cagaggcagcaacacgcccagggca

SEQ ID NO: 806723 - DNA, 25 bp, Homo sapien
agcgccgacccgcagaggcagcaac

SEQ ID NO: 806724 - DNA, 25 bp, Homo sapien
ccgggctcggggtagccgtgctgct

SEQ ID NO: 806725 - DNA, 25 bp, Homo sapien
gcggctcgcgtagccgctgccaggg

SEQ ID NO: 806726 - DNA, 25 bp, Homo sapien
ccctgagcgtcccgggggtggccat

SEQ ID NO: 806727 - DNA, 25 bp, Homo sapien
tgagcgtcccgggggtggccatggc

SEQ ID NO: 806728 - DNA, 25 bp, Homo sapien
cagccctgagcgtcccgggggtggc

SEQ ID NO: 806729 - DNA, 25 bp, Homo sapien
gagccgcagccctgagcgtcccggg

SEQ ID NO: 806730 - DNA, 25 bp, Homo sapien
ttataagtattctagcaattacgaa

SEQ ID NO: 806731 - DNA, 25 bp, Homo sapien
ccagggcaccatgtcagttaccatt

SEQ ID NO: 806732 - DNA, 25 bp, Homo sapien
acaggttaggacgaagcacatcccc

SEQ ID NO: 806733 - DNA, 25 bp, Homo sapien
tggcaacaacccaacaacctagaag

SEQ ID NO: 806734 - DNA, 25 bp, Homo sapien
tggtcgcctccaggggccgcacagc

SEQ ID NO: 806735 - DNA, 25 bp, Homo sapien
ggaagcccaagtgagactccagtga

SEQ ID NO: 806736 - DNA, 25 bp, Homo sapien
gactccagtgagtgtttggcaggcc

SEQ ID NO: 806737 - DNA, 25 bp, Homo sapien
ctctcaaaggcttcgtaactacggg

SEQ ID NO: 806738 - DNA, 25 bp, Homo sapien
gacagaaatgcagttagcatttcac

SEQ ID NO: 806739 - DNA, 25 bp, Homo sapien
ggacagaaatgcagttagcatttca

SEQ ID NO: 806740 - DNA, 25 bp, Homo sapien
agaaaataggtggtgattgccaggg

SEQ ID NO: 806741 - DNA, 25 bp, Homo sapien
aagcacacgacgaaaagcagccgct

SEQ ID NO: 806742 - DNA, 25 bp, Homo sapien
ggaagcacacgacgaaaagcagccg

SEQ ID NO: 806743 - DNA, 25 bp, Homo sapien
aaagcagccgctgacacattgattc

SEQ ID NO: 806744 - DNA, 25 bp, Homo sapien
gccgctgacacattgattcttgcca

SEQ ID NO: 806745 - DNA, 25 bp, Homo sapien
tgtccacctgacccgtgtaactgca

SEQ ID NO: 806746 - DNA, 25 bp, Homo sapien
ggcccttgaactcccgtctccgcat

SEQ ID NO: 806747 - DNA, 25 bp, Homo sapien
ctgacccgtgtaactgcagcctgca

SEQ ID NO: 806748 - DNA, 25 bp, Homo sapien
tcgttcgggtttagcgcagggccca

SEQ ID NO: 806749 - DNA, 25 bp, Homo sapien
gcagagaggaaacgtggcttcgaca

SEQ ID NO: 806750 - DNA, 25 bp, Homo sapien
aaacgtggcttcgacaccaccagat

SEQ ID NO: 806751 - DNA, 25 bp, Homo sapien
tttggcagttcacgtaacccccagc

SEQ ID NO: 806752 - DNA, 25 bp, Homo sapien
ctttcaaggtaggaatttttggcag

SEQ ID NO: 806753 - DNA, 25 bp, Homo sapien
gaagggctggcggggccactgatgg

SEQ ID NO: 806754 - DNA, 25 bp, Homo sapien
cacaggcagcatcggctccttgcct

SEQ ID NO: 806755 - DNA, 25 bp, Homo sapien
cttgcctgcgcactggcgggaaggg

SEQ ID NO: 806756 - DNA, 25 bp, Homo sapien
tggaccaccgtctccgagccattct

SEQ ID NO: 806757 - DNA, 25 bp, Homo sapien
accggcagctctggtacacgcgctg

SEQ ID NO: 806758 - DNA, 25 bp, Homo sapien
cgtgtcactgtgtgatggcaccagt

SEQ ID NO: 806759 - DNA, 25 bp, Homo sapien
tgcacctggcaggacaccgtccgtg

SEQ ID NO: 806760 - DNA, 25 bp, Homo sapien
tccaaggagtgagtgagaagaactc

SEQ ID NO: 806761 - DNA, 25 bp, Homo sapien
tcagtgaacaccacatcgaagaccc

SEQ ID NO: 806762 - DNA, 25 bp, Homo sapien
taattagcaaggttcccactagtta

SEQ ID NO: 806763 - DNA, 25 bp, Homo sapien
gggagacttatgacaaattcatgtc

SEQ ID NO: 806764 - DNA, 25 bp, Homo sapien
tggtgcagtggatgcagcccagaca

SEQ ID NO: 806765 - DNA, 25 bp, Homo sapien
gtgagcttctcaacccaaacagtcc

SEQ ID NO: 806766 - DNA, 25 bp, Homo sapien
ggcagccatggtgagcttctcaacc

SEQ ID NO: 806767 - DNA, 25 bp, Homo sapien
tgcggggtggtgcagtggatgcagc

SEQ ID NO: 806768 - DNA, 25 bp, Homo sapien
cctctggcccagggtcacagtccac

SEQ ID NO: 806769 - DNA, 25 bp, Homo sapien
accctctggcccagggtcacagtcc

SEQ ID NO: 806770 - DNA, 25 bp, Homo sapien
ctcaccctctggcccagggtcacag

SEQ ID NO: 806771 - DNA, 25 bp, Homo sapien
caccctctggcccagggtcacagtc

SEQ ID NO: 806772 - DNA, 25 bp, Homo sapien
cctcatcacagttgctcccggtgaa

SEQ ID NO: 806773 - DNA, 25 bp, Homo sapien
catcacagttgctcccggtgaagcc

SEQ ID NO: 806774 - DNA, 25 bp, Homo sapien
ccgtgcggtaggacactctgtaggt

SEQ ID NO: 806775 - DNA, 25 bp, Homo sapien
agcaccgtcaccgtgcggtaggaca

SEQ ID NO: 806776 - DNA, 25 bp, Homo sapien
gaagcaattgtcagagtctctattt

SEQ ID NO: 806777 - DNA, 25 bp, Homo sapien
gagctctttagacagtttacactca

SEQ ID NO: 806778 - DNA, 25 bp, Homo sapien
gtcaattgcgttattctttgtaacc

SEQ ID NO: 806779 - DNA, 25 bp, Homo sapien
ttacactcaaagcatatagatcctg

SEQ ID NO: 806780 - DNA, 25 bp, Homo sapien
cagcccactgctcagaaacctggca

SEQ ID NO: 806781 - DNA, 25 bp, Homo sapien
accttggaggtccttcctgctcctc

SEQ ID NO: 806782 - DNA, 25 bp, Homo sapien
atcccctcaccccttcaccttggag

SEQ ID NO: 806783 - DNA, 25 bp, Homo sapien
tgctcagaaacctggcatcccctca

SEQ ID NO: 806784 - DNA, 25 bp, Homo sapien
ggcaggtccaagtcctggcattgaa

SEQ ID NO: 806785 - DNA, 25 bp, Homo sapien
tgaccagaatggcaggtccaagtcc

SEQ ID NO: 806786 - DNA, 25 bp, Homo sapien
ccaagtcctggcattgaagggctca

SEQ ID NO: 806787 - DNA, 25 bp, Homo sapien
aagggctcaggcctccatgagggac

SEQ ID NO: 806788 - DNA, 25 bp, Homo sapien
ggcaggcctgctccatcccgttggg

SEQ ID NO: 806789 - DNA, 25 bp, Homo sapien
cggcccctggcaggatctagatggc

SEQ ID NO: 806790 - DNA, 25 bp, Homo sapien
ctggcaggatctagatggcaggcct

SEQ ID NO: 806791 - DNA, 25 bp, Homo sapien
gatctagatggcaggcctgctccat

SEQ ID NO: 806792 - DNA, 25 bp, Homo sapien
ttctagcaaggtgtcaaacctaagg

SEQ ID NO: 806793 - DNA, 25 bp, Homo sapien
cacgcccatcctaatctgtatcttt

SEQ ID NO: 806794 - DNA, 25 bp, Homo sapien
accattcccggctaacattgctgat

SEQ ID NO: 806795 - DNA, 25 bp, Homo sapien
ccatgaccatgagcataatagtttt

SEQ ID NO: 806796 - DNA, 25 bp, Homo sapien
atttcctgtcctggttggattcatt

SEQ ID NO: 806797 - DNA, 25 bp, Homo sapien
tcatttcctgtcctggttggattca

SEQ ID NO: 806798 - DNA, 25 bp, Homo sapien
cctgtcctggttggattcatttcca

SEQ ID NO: 806799 - DNA, 25 bp, Homo sapien
ttcctgtcctggttggattcatttc

SEQ ID NO: 806800 - DNA, 25 bp, Homo sapien
tctcaggtttgcacaggagcgcggc

SEQ ID NO: 806801 - DNA, 25 bp, Homo sapien
gtttgcacaggagcgcggcatctca

SEQ ID NO: 806802 - DNA, 25 bp, Homo sapien
cagagtggccgagggtctcaggttt

SEQ ID NO: 806803 - DNA, 25 bp, Homo sapien
ccgagggtctcaggtttgcacagga

SEQ ID NO: 806804 - DNA, 25 bp, Homo sapien
ccatgggcggttcaaaggcaaattc

SEQ ID NO: 806805 - DNA, 25 bp, Homo sapien
taacctggaagagtgcgctagacag

SEQ ID NO: 806806 - DNA, 25 bp, Homo sapien
caaagcagacagatgccatgggcgg

SEQ ID NO: 806807 - DNA, 25 bp, Homo sapien
tcttgcaggcaaacacggaatgctg

SEQ ID NO: 806808 - DNA, 25 bp, Homo sapien
ctgtgggggcatttaggtaccccag

SEQ ID NO: 806809 - DNA, 25 bp, Homo sapien
gctgtgggggcatttaggtacccca

SEQ ID NO: 806810 - DNA, 25 bp, Homo sapien
ctggacaggcaagtgtaacaggtca

SEQ ID NO: 806811 - DNA, 25 bp, Homo sapien
tggacaggcaagtgtaacaggtcat

SEQ ID NO: 806812 - DNA, 25 bp, Homo sapien
tggagatgagtttagctcgcctctt

SEQ ID NO: 806813 - DNA, 25 bp, Homo sapien
ctggagatgagtttagctcgcctct

SEQ ID NO: 806814 - DNA, 25 bp, Homo sapien
tcccaaatgaggctggattcccaag

SEQ ID NO: 806815 - DNA, 25 bp, Homo sapien
ctcccaaatgaggctggattcccaa

SEQ ID NO: 806816 - DNA, 25 bp, Homo sapien
gtcactgagccgggtgcagttcatg

SEQ ID NO: 806817 - DNA, 25 bp, Homo sapien
cactgagccgggtgcagttcatgca

SEQ ID NO: 806818 - DNA, 25 bp, Homo sapien
ctgagccgggtgcagttcatgcatt

SEQ ID NO: 806819 - DNA, 25 bp, Homo sapien
tcactgagccgggtgcagttcatgc

SEQ ID NO: 806820 - DNA, 25 bp, Homo sapien
tccagtgtggtcagtcgctcactca

SEQ ID NO: 806821 - DNA, 25 bp, Homo sapien
ccagtgtggtcagtcgctcactcat

SEQ ID NO: 806822 - DNA, 25 bp, Homo sapien
ctccagtgtggtcagtcgctcactc

SEQ ID NO: 806823 - DNA, 25 bp, Homo sapien
gaggaagtcctcattccaggtcggc

SEQ ID NO: 806824 - DNA, 25 bp, Homo sapien
tccaggtcggcggagtgctctcggg

SEQ ID NO: 806825 - DNA, 25 bp, Homo sapien
tctctgtcgtggcacagggtgagca

SEQ ID NO: 806826 - DNA, 25 bp, Homo sapien
gctggcaggtcgttgtccgggctgg

SEQ ID NO: 806827 - DNA, 25 bp, Homo sapien
tcaaaatgccacatggcatgttgga

SEQ ID NO: 806828 - DNA, 25 bp, Homo sapien
ctagagtgtctagtgtgtggcctct

SEQ ID NO: 806829 - DNA, 25 bp, Homo sapien
gttggaactagagtgtctagtgtgt

SEQ ID NO: 806830 - DNA, 25 bp, Homo sapien
gaggccatgcccaaggtcccttcgg

SEQ ID NO: 806831 - DNA, 25 bp, Homo sapien
ttctctcctgtctggcctcggtcac

SEQ ID NO: 806832 - DNA, 25 bp, Homo sapien
tgtctggcctcggtcacctttagac

SEQ ID NO: 806833 - DNA, 25 bp, Homo sapien
aggcggccccgctggacccttctct

SEQ ID NO: 806834 - DNA, 25 bp, Homo sapien
ctggcctcggtcacctttagacccg

SEQ ID NO: 806835 - DNA, 25 bp, Homo sapien
tgtctgtaggcggctgcagggagta

SEQ ID NO: 806836 - DNA, 25 bp, Homo sapien
gtctgtaggcggctgcagggagtag

SEQ ID NO: 806837 - DNA, 25 bp, Homo sapien
gtctttgtctgtaggcggctgcagg

SEQ ID NO: 806838 - DNA, 25 bp, Homo sapien
tgtctttgtctgtaggcggctgcag

SEQ ID NO: 806839 - DNA, 25 bp, Homo sapien
agcactgtgtccacgatggcagagg

SEQ ID NO: 806840 - DNA, 25 bp, Homo sapien
gcactgtgtccacgatggcagaggc

SEQ ID NO: 806841 - DNA, 25 bp, Homo sapien
tgggacacctgccagcactgtgtcc

SEQ ID NO: 806842 - DNA, 25 bp, Homo sapien
cctgccagcactgtgtccacgatgg

SEQ ID NO: 806843 - DNA, 25 bp, Homo sapien
tgggatccaggtgttcctgggggtc

SEQ ID NO: 806844 - DNA, 25 bp, Homo sapien
ctgggatccaggtgttcctgggggt

SEQ ID NO: 806845 - DNA, 25 bp, Homo sapien
gatccaggtgttcctgggggtcctg

SEQ ID NO: 806846 - DNA, 25 bp, Homo sapien
atccaggtgttcctgggggtcctgg

SEQ ID NO: 806847 - DNA, 25 bp, Homo sapien
tcatccgacaccacacactccattg

SEQ ID NO: 806848 - DNA, 25 bp, Homo sapien
tgggacccgtagataaggccctgcc

SEQ ID NO: 806849 - DNA, 25 bp, Homo sapien
attgctcactacctgccagcctttt

SEQ ID NO: 806850 - DNA, 25 bp, Homo sapien
tgcccactgtgcctcatccgacacc

SEQ ID NO: 806851 - DNA, 25 bp, Homo sapien
ctgtgcctcgctctccagccaggcc

SEQ ID NO: 806852 - DNA, 25 bp, Homo sapien
cactgtgcctcgctctccagccagg

SEQ ID NO: 806853 - DNA, 25 bp, Homo sapien
ggacggccccactgtgcctcgctct

SEQ ID NO: 806854 - DNA, 25 bp, Homo sapien
acggccccactgtgcctcgctctcc

SEQ ID NO: 806855 - DNA, 25 bp, Homo sapien
ctctgcagtggcggctttctctcct

SEQ ID NO: 806856 - DNA, 25 bp, Homo sapien
tcttcccccttcacgccaggttcac

SEQ ID NO: 806857 - DNA, 25 bp, Homo sapien
ttcttcccccttcacgccaggttca

SEQ ID NO: 806858 - DNA, 25 bp, Homo sapien
tgcagtggcggctttctctccttct

SEQ ID NO: 806859 - DNA, 25 bp, Homo sapien
gtcagggccatcctgatacagtgac

SEQ ID NO: 806860 - DNA, 25 bp, Homo sapien
gggtcagggccatcctgatacagtg

SEQ ID NO: 806861 - DNA, 25 bp, Homo sapien
tacagtgacagtgtatgtgtcctca

SEQ ID NO: 806862 - DNA, 25 bp, Homo sapien
gacagtgtatgtgtcctcaaagccc

SEQ ID NO: 806863 - DNA, 25 bp, Homo sapien
tccaggatgaggactcgctctgcca

SEQ ID NO: 806864 - DNA, 25 bp, Homo sapien
ctccaggatgaggactcgctctgcc

SEQ ID NO: 806865 - DNA, 25 bp, Homo sapien
aggatgaggactcgctctgccagga

SEQ ID NO: 806866 - DNA, 25 bp, Homo sapien
caggatgaggactcgctctgccagg

SEQ ID NO: 806867 - DNA, 25 bp, Homo sapien
cttctgtccagggtcgggcccaagc

SEQ ID NO: 806868 - DNA, 25 bp, Homo sapien
aagcagggcagcaaggaccccatcg

SEQ ID NO: 806869 - DNA, 25 bp, Homo sapien
ttcatcttgaggttggctctcaggg

SEQ ID NO: 806870 - DNA, 25 bp, Homo sapien
tcgggttgggcgccacccctcttca

SEQ ID NO: 806871 - DNA, 25 bp, Homo sapien
gcagggtcgagagaacatggcttca

SEQ ID NO: 806872 - DNA, 25 bp, Homo sapien
ggccagttacagcagggactcaata

SEQ ID NO: 806873 - DNA, 25 bp, Homo sapien
tagcaaacctatagagtccactgag

SEQ ID NO: 806874 - DNA, 25 bp, Homo sapien
atctttaggaaacagcggcggctca

SEQ ID NO: 806875 - DNA, 25 bp, Homo sapien
agggctccagtcagagctgttctgg

SEQ ID NO: 806876 - DNA, 25 bp, Homo sapien
ctagggacctggtgcctgccatgga

SEQ ID NO: 806877 - DNA, 25 bp, Homo sapien
gggctgagctgatcacggagaccct

SEQ ID NO: 806878 - DNA, 25 bp, Homo sapien
ctgctagggacctggtgcctgccat

SEQ ID NO: 806879 - DNA, 25 bp, Homo sapien
gccacagccaaacaggagtaccaag

SEQ ID NO: 806880 - DNA, 25 bp, Homo sapien
taataacgctacaggctggtggtcc

SEQ ID NO: 806881 - DNA, 25 bp, Homo sapien
tcaagggccagaagaagatcccagg

SEQ ID NO: 806882 - DNA, 25 bp, Homo sapien
gggagagcacctttattgtcacata

SEQ ID NO: 806883 - DNA, 25 bp, Homo sapien
gggcttgcctatcgtgtgtcactcc

SEQ ID NO: 806884 - DNA, 25 bp, Homo sapien
ggcacctggccggtaagatgcagac

SEQ ID NO: 806885 - DNA, 25 bp, Homo sapien
agagcccttgcaggttaagccccaa

SEQ ID NO: 806886 - DNA, 25 bp, Homo sapien
agggcagagctggacctccctgcca

SEQ ID NO: 806887 - DNA, 25 bp, Homo sapien
gcaaagacctgatgacccggaaata

SEQ ID NO: 806888 - DNA, 25 bp, Homo sapien
aaacagggacagagcggaagcatct

SEQ ID NO: 806889 - DNA, 25 bp, Homo sapien
actctggaggtagggctcagacaca

SEQ ID NO: 806890 - DNA, 25 bp, Homo sapien
gggccaggcccagtttatagacagt

SEQ ID NO: 806891 - DNA, 25 bp, Homo sapien
atcagggtatatgggtctccctggg

SEQ ID NO: 806892 - DNA, 25 bp, Homo sapien
catcagggtatatgggtctccctgg

SEQ ID NO: 806893 - DNA, 25 bp, Homo sapien
tccctggggtctctgatatgtcact

SEQ ID NO: 806894 - DNA, 25 bp, Homo sapien
tggggtctctgatatgtcactgacc

SEQ ID NO: 806895 - DNA, 25 bp, Homo sapien
cttaatacctacaagggtcacaggg

SEQ ID NO: 806896 - DNA, 25 bp, Homo sapien
tacacagggcaagagcttaatacct

SEQ ID NO: 806897 - DNA, 25 bp, Homo sapien
acagacataatacacagggcaagag

SEQ ID NO: 806898 - DNA, 25 bp, Homo sapien
tgattcagcagtggtttgggtctct

SEQ ID NO: 806899 - DNA, 25 bp, Homo sapien
acgcagacgtgacctggcacacagg

SEQ ID NO: 806900 - DNA, 25 bp, Homo sapien
ctgggcacgcagacgtgacctggca

SEQ ID NO: 806901 - DNA, 25 bp, Homo sapien
cctgagctgggcacgcagacgtgac

SEQ ID NO: 806902 - DNA, 25 bp, Homo sapien
ctgccttgtgccagtgattcctttg

SEQ ID NO: 806903 - DNA, 25 bp, Homo sapien
gaaggtgcttgacacccagtttgaa

SEQ ID NO: 806904 - DNA, 25 bp, Homo sapien
atgaaggtgcttgacacccagtttg

SEQ ID NO: 806905 - DNA, 25 bp, Homo sapien
tgaaggtgcttgacacccagtttga

SEQ ID NO: 806906 - DNA, 25 bp, Homo sapien
aaggtgcttgacacccagtttgaat

SEQ ID NO: 806907 - DNA, 25 bp, Homo sapien
aaatgctccctttatcgccacgagg

SEQ ID NO: 806908 - DNA, 25 bp, Homo sapien
tgctgttacatcctgagaaactgga

SEQ ID NO: 806909 - DNA, 25 bp, Homo sapien
catgggcagcaagtgagaaagtgca

SEQ ID NO: 806910 - DNA, 25 bp, Homo sapien
ggctgtcatcaaagtcctcgaatag

SEQ ID NO: 806911 - DNA, 25 bp, Homo sapien
tggtggagttaagtagacatctctt

SEQ ID NO: 806912 - DNA, 25 bp, Homo sapien
gtggtggagttaagtagacatctct

SEQ ID NO: 806913 - DNA, 25 bp, Homo sapien
tctgtataccagtggcataggcccc

SEQ ID NO: 806914 - DNA, 25 bp, Homo sapien
tgtataccagtggcataggccccag

SEQ ID NO: 806915 - DNA, 25 bp, Homo sapien
caagtggcatactctgtataccagt

SEQ ID NO: 806916 - DNA, 25 bp, Homo sapien
ctctgtataccagtggcataggccc

SEQ ID NO: 806917 - DNA, 25 bp, Homo sapien
aggttgcccagtccctgggtggcct

SEQ ID NO: 806918 - DNA, 25 bp, Homo sapien
ctgccagtgaggttgcccagtccct

SEQ ID NO: 806919 - DNA, 25 bp, Homo sapien
gggtggcctgggccacctgacacat

SEQ ID NO: 806920 - DNA, 25 bp, Homo sapien
tgggtggcctgggccacctgacaca

SEQ ID NO: 806921 - DNA, 25 bp, Homo sapien
tgacgtcttcgctctgagttggtgg

SEQ ID NO: 806922 - DNA, 25 bp, Homo sapien
gtccacgaagcaatcctctatccag

SEQ ID NO: 806923 - DNA, 25 bp, Homo sapien
atgtccccagcaaaggtccacgaag

SEQ ID NO: 806924 - DNA, 25 bp, Homo sapien
tctgtgacgtcttcgctctgagttg

SEQ ID NO: 806925 - DNA, 25 bp, Homo sapien
tcttgagtccaaatctccttgaata

SEQ ID NO: 806926 - DNA, 25 bp, Homo sapien
gtcttgagtccaaatctccttgaat

SEQ ID NO: 806927 - DNA, 25 bp, Homo sapien
gtctcgcttgatcaaggtgaagtag

SEQ ID NO: 806928 - DNA, 25 bp, Homo sapien
caaggtctcgcttgatcaaggtgaa

SEQ ID NO: 806929 - DNA, 25 bp, Homo sapien
tctctctcaaacacaaggtctcgct

SEQ ID NO: 806930 - DNA, 25 bp, Homo sapien
caaacacaaggtctcgcttgatcaa

SEQ ID NO: 806931 - DNA, 25 bp, Homo sapien
agaagagctcggaaaagagcagaag

SEQ ID NO: 806932 - DNA, 25 bp, Homo sapien
tacctcgcaggcaccgagaagagct

SEQ ID NO: 806933 - DNA, 25 bp, Homo sapien
aaggccttgtctgctacctcgcagg

SEQ ID NO: 806934 - DNA, 25 bp, Homo sapien
gggccgctgcaaggccttgtctgct

SEQ ID NO: 806935 - DNA, 25 bp, Homo sapien
ccatgcttggacctgccccactcgg

SEQ ID NO: 806936 - DNA, 25 bp, Homo sapien
tctttgctcttgatcccatgcttgg

SEQ ID NO: 806937 - DNA, 25 bp, Homo sapien
acgtgggtcctgatttgagcctctg

SEQ ID NO: 806938 - DNA, 25 bp, Homo sapien
actcgggactcctctccacgtgggt

SEQ ID NO: 806939 - DNA, 25 bp, Homo sapien
cacctgtggaacgtgtggtttttct

SEQ ID NO: 806940 - DNA, 25 bp, Homo sapien
ctgcagaaagcgggctgcacagcat

SEQ ID NO: 806941 - DNA, 25 bp, Homo sapien
ttctccccggagaggaacgccagga

SEQ ID NO: 806942 - DNA, 25 bp, Homo sapien
ttccgcctggcttgttgaacacctg

SEQ ID NO: 806943 - DNA, 25 bp, Homo sapien
ttctccagcatcaacatttccaaca

SEQ ID NO: 806944 - DNA, 25 bp, Homo sapien
gcatcaacatttccaacaatcacca

SEQ ID NO: 806945 - DNA, 25 bp, Homo sapien
cagcatcaacatttccaacaatcac

SEQ ID NO: 806946 - DNA, 25 bp, Homo sapien
tccagcatcaacatttccaacaatc

SEQ ID NO: 806947 - DNA, 25 bp, Homo sapien
tgtccaggaggagcaagtggctgaa

SEQ ID NO: 806948 - DNA, 25 bp, Homo sapien
tccaggaggagcaagtggctgaact

SEQ ID NO: 806949 - DNA, 25 bp, Homo sapien
gctgaactgccacctggagcttcat

SEQ ID NO: 806950 - DNA, 25 bp, Homo sapien
aggaggagcaagtggctgaactgcc

SEQ ID NO: 806951 - DNA, 25 bp, Homo sapien
gcttccacagctgagatagtggcgt

SEQ ID NO: 806952 - DNA, 25 bp, Homo sapien
tttagcctcgggcactgtcttgctc

SEQ ID NO: 806953 - DNA, 25 bp, Homo sapien
catctccttttcgtagagtctcagg

SEQ ID NO: 806954 - DNA, 25 bp, Homo sapien
agatagtggcgtctgttctttagcc

SEQ ID NO: 806955 - DNA, 25 bp, Homo sapien
gaaattcggaggcacaaaggcatag

SEQ ID NO: 806956 - DNA, 25 bp, Homo sapien
tcggaggcacaaaggcatagaccat

SEQ ID NO: 806957 - DNA, 25 bp, Homo sapien
acagatgaaattcggaggcacaaag

SEQ ID NO: 806958 - DNA, 25 bp, Homo sapien
ctatttgacagatgaaattcggagg

SEQ ID NO: 806959 - DNA, 25 bp, Homo sapien
tccactattgaagcccacggagaag

SEQ ID NO: 806960 - DNA, 25 bp, Homo sapien
cagggtggtccccattgctccacta

SEQ ID NO: 806961 - DNA, 25 bp, Homo sapien
gtccagggggtgctaatatggcccc

SEQ ID NO: 806962 - DNA, 25 bp, Homo sapien
gcctcctttcctaggaggtgtccag

SEQ ID NO: 806963 - DNA, 25 bp, Homo sapien
cgtgggtaataggtcatggtgcaca

SEQ ID NO: 806964 - DNA, 25 bp, Homo sapien
atgggacaggcgtgggtaataggtc

SEQ ID NO: 806965 - DNA, 25 bp, Homo sapien
gacaggcgtgggtaataggtcatgg

SEQ ID NO: 806966 - DNA, 25 bp, Homo sapien
ggcgtgggtaataggtcatggtgca

SEQ ID NO: 806967 - DNA, 25 bp, Homo sapien
tccttgctaggaagcagctgactga

SEQ ID NO: 806968 - DNA, 25 bp, Homo sapien
tagcaagctcctcactcaggtgggt

SEQ ID NO: 806969 - DNA, 25 bp, Homo sapien
cagggtgcccttccaatatatagta

SEQ ID NO: 806970 - DNA, 25 bp, Homo sapien
gcagggcactttcctcacggaggct

SEQ ID NO: 806971 - DNA, 25 bp, Homo sapien
cttctggactgttctcagaagcgtg

SEQ ID NO: 806972 - DNA, 25 bp, Homo sapien
ttctggactgttctcagaagcgtgg

SEQ ID NO: 806973 - DNA, 25 bp, Homo sapien
gggcattcattatgggtgacactgt

SEQ ID NO: 806974 - DNA, 25 bp, Homo sapien
ctttctgggttacccaagccaggtg

SEQ ID NO: 806975 - DNA, 25 bp, Homo sapien
ggcattcattatgggtgacactgtc

SEQ ID NO: 806976 - DNA, 25 bp, Homo sapien
agagctttctgggttacccaagcca

SEQ ID NO: 806977 - DNA, 25 bp, Homo sapien
ctgggggttggtggcagccgcagct

SEQ ID NO: 806978 - DNA, 25 bp, Homo sapien
gtgcaggcaaggatgcacctctgca

SEQ ID NO: 806979 - DNA, 25 bp, Homo sapien
cagctccattgggaaccagccagtg

SEQ ID NO: 806980 - DNA, 25 bp, Homo sapien
ggttgcctgctaaaggccagtgcca

SEQ ID NO: 806981 - DNA, 25 bp, Homo sapien
tggtgttggacatggtttgtgcatt

SEQ ID NO: 806982 - DNA, 25 bp, Homo sapien
cccaagagagcagccgccatcccgc

SEQ ID NO: 806983 - DNA, 25 bp, Homo sapien
ttttctcagagccttcgtgggggtg

SEQ ID NO: 806984 - DNA, 25 bp, Homo sapien
gacatggtttgtgcattggtccttt

SEQ ID NO: 806985 - DNA, 25 bp, Homo sapien
catggcagctacagggggtgtcatc

SEQ ID NO: 806986 - DNA, 25 bp, Homo sapien
ctccatggcagctacagggggtgtc

SEQ ID NO: 806987 - DNA, 25 bp, Homo sapien
cagctacagggggtgtcatcatgca

SEQ ID NO: 806988 - DNA, 25 bp, Homo sapien
tacagggggtgtcatcatgcacggc

SEQ ID NO: 806989 - DNA, 25 bp, Homo sapien
caggcaccttgtcctgccctggagg

SEQ ID NO: 806990 - DNA, 25 bp, Homo sapien
tgcaggcaccttgtcctgccctgga

SEQ ID NO: 806991 - DNA, 25 bp, Homo sapien
gcaggcaccttgtcctgccctggag

SEQ ID NO: 806992 - DNA, 25 bp, Homo sapien
ctgcaggcaccttgtcctgccctgg

SEQ ID NO: 806993 - DNA, 25 bp, Homo sapien
taaatcgcgccctgtttggaagacg

SEQ ID NO: 806994 - DNA, 25 bp, Homo sapien
ttcacttggctaaatcgcgccctgt

SEQ ID NO: 806995 - DNA, 25 bp, Homo sapien
aagacggagcctgaaattggcagga

SEQ ID NO: 806996 - DNA, 25 bp, Homo sapien
cctgtttggaagacggagcctgaaa

SEQ ID NO: 806997 - DNA, 25 bp, Homo sapien
ctcagagtggtcagtacgtagtcta

SEQ ID NO: 806998 - DNA, 25 bp, Homo sapien
gcagtcactttgaaggtggcccaag

SEQ ID NO: 806999 - DNA, 25 bp, Homo sapien
tccttctccaaacacggctgggcct

SEQ ID NO: 807000 - DNA, 25 bp, Homo sapien
gggtcttcagtgtgcacctcccaca

SEQ ID NO: 807001 - DNA, 25 bp, Homo sapien
tcaggggcagttccatccattctca

SEQ ID NO: 807002 - DNA, 25 bp, Homo sapien
caggggcagttccatccattctcac

SEQ ID NO: 807003 - DNA, 25 bp, Homo sapien
tggaaggacgtacatctgcaacgca

SEQ ID NO: 807004 - DNA, 25 bp, Homo sapien
gcggcgagttcacgcgaaaggaaaa

SEQ ID NO: 807005 - DNA, 25 bp, Homo sapien
gcaacgcatttgtgcgaggttcacc

SEQ ID NO: 807006 - DNA, 25 bp, Homo sapien
cagctccgcggtagccagaaatgga

SEQ ID NO: 807007 - DNA, 25 bp, Homo sapien
ataggccatgatcattaccaacttc

SEQ ID NO: 807008 - DNA, 25 bp, Homo sapien
tcattaccaacttcacaactttggc

SEQ ID NO: 807009 - DNA, 25 bp, Homo sapien
cattaccaacttcacaactttggcc

SEQ ID NO: 807010 - DNA, 25 bp, Homo sapien
ggagattgggttttatctgcacgcc

SEQ ID NO: 807011 - DNA, 25 bp, Homo sapien
gccatcgcccattctcagtaataag

SEQ ID NO: 807012 - DNA, 25 bp, Homo sapien
gcctgatggaatctcccggagctta

SEQ ID NO: 807013 - DNA, 25 bp, Homo sapien
gctggagacgcttgtcatgtcttcc

SEQ ID NO: 807014 - DNA, 25 bp, Homo sapien
gatggacaatcatccaggccctcac

SEQ ID NO: 807015 - DNA, 25 bp, Homo sapien
ctgctcccatcgctgtgtgcccggt

SEQ ID NO: 807016 - DNA, 25 bp, Homo sapien
gggatcagggtgtgtatcataccct

SEQ ID NO: 807017 - DNA, 25 bp, Homo sapien
agttgaccaaggcaagggtatttgg

SEQ ID NO: 807018 - DNA, 25 bp, Homo sapien
catgctccacattcatgtcatgaca

SEQ ID NO: 807019 - DNA, 25 bp, Homo sapien
cctgagcctgcaaggtgtgaggtgt

SEQ ID NO: 807020 - DNA, 25 bp, Homo sapien
acgtggccacgttctttgcatcatc

SEQ ID NO: 807021 - DNA, 25 bp, Homo sapien
tgagtggatctgccgcatgtcccca

SEQ ID NO: 807022 - DNA, 25 bp, Homo sapien
taatccttgactttacctcttgggc

SEQ ID NO: 807023 - DNA, 25 bp, Homo sapien
gccaggaaccccataaagctgggga

SEQ ID NO: 807024 - DNA, 25 bp, Homo sapien
cataaagctggggataaaccccaag

SEQ ID NO: 807025 - DNA, 25 bp, Homo sapien
tggtaatccttgactttacctcttg

SEQ ID NO: 807026 - DNA, 25 bp, Homo sapien
tgtaccttgattcctgccgatggct

SEQ ID NO: 807027 - DNA, 25 bp, Homo sapien
tcccagcgggctaagtgttctaagt

SEQ ID NO: 807028 - DNA, 25 bp, Homo sapien
tgtgagtttcctgcacgcctgtcgc

SEQ ID NO: 807029 - DNA, 25 bp, Homo sapien
gatgattgaacaggagacggagacc

SEQ ID NO: 807030 - DNA, 25 bp, Homo sapien
tccacctctcttattgtactgatca

SEQ ID NO: 807031 - DNA, 25 bp, Homo sapien
ttgtactgatcacttggtcttcatg

SEQ ID NO: 807032 - DNA, 25 bp, Homo sapien
cctctcttattgtactgatcacttg

SEQ ID NO: 807033 - DNA, 25 bp, Homo sapien
ttattgtactgatcacttggtcttc

SEQ ID NO: 807034 - DNA, 25 bp, Homo sapien
tatcttcataatttaagacccctct

SEQ ID NO: 807035 - DNA, 25 bp, Homo sapien
agacccctctgaaatctcacctccc

SEQ ID NO: 807036 - DNA, 25 bp, Homo sapien
gacccctctgaaatctcacctcccc

SEQ ID NO: 807037 - DNA, 25 bp, Homo sapien
atcttcataatttaagacccctctg

SEQ ID NO: 807038 - DNA, 25 bp, Homo sapien
gcgccagtgtgaaaagagccgggtg

SEQ ID NO: 807039 - DNA, 25 bp, Homo sapien
ctggcgccagtgtgaaaagagccgg

SEQ ID NO: 807040 - DNA, 25 bp, Homo sapien
cagtgtgaaaagagccgggtgaggc

SEQ ID NO: 807041 - DNA, 25 bp, Homo sapien
cgccagtgtgaaaagagccgggtga

SEQ ID NO: 807042 - DNA, 25 bp, Homo sapien
tccacaatttcctgaaaacttccca

SEQ ID NO: 807043 - DNA, 25 bp, Homo sapien
gtctggttttccacaatttcctgaa

SEQ ID NO: 807044 - DNA, 25 bp, Homo sapien
tgaggtctggttttccacaatttcc

SEQ ID NO: 807045 - DNA, 25 bp, Homo sapien
accagcctgaggtctggttttccac

SEQ ID NO: 807046 - DNA, 25 bp, Homo sapien
gctagtcccctgacggatacagcag

SEQ ID NO: 807047 - DNA, 25 bp, Homo sapien
gattcagttgggagctggttcactt

SEQ ID NO: 807048 - DNA, 25 bp, Homo sapien
acttctcttaaatcgtccctgtttg

SEQ ID NO: 807049 - DNA, 25 bp, Homo sapien
ccctgttgttagtatgcataatacc

SEQ ID NO: 807050 - DNA, 25 bp, Homo sapien
ccagacatctctctgcggcggtgga

SEQ ID NO: 807051 - DNA, 25 bp, Homo sapien
cccgtagaggctttgtctccagaca

SEQ ID NO: 807052 - DNA, 25 bp, Homo sapien
ggtggaggctccagacaccccggtc

SEQ ID NO: 807053 - DNA, 25 bp, Homo sapien
ttgccagcaatccttccccgtagag

SEQ ID NO: 807054 - DNA, 25 bp, Homo sapien
ctgagctgtccaaaagggagcctcg

SEQ ID NO: 807055 - DNA, 25 bp, Homo sapien
tgtccaaaagggagcctcgatatcc

SEQ ID NO: 807056 - DNA, 25 bp, Homo sapien
tgagctgtccaaaagggagcctcga

SEQ ID NO: 807057 - DNA, 25 bp, Homo sapien
agctgtccaaaagggagcctcgata

SEQ ID NO: 807058 - DNA, 25 bp, Homo sapien
agtcaggcttctggcgggaagcggc

SEQ ID NO: 807059 - DNA, 25 bp, Homo sapien
tcaggcttctggcgggaagcggcat

SEQ ID NO: 807060 - DNA, 25 bp, Homo sapien
gagtcaggcttctggcgggaagcgg

SEQ ID NO: 807061 - DNA, 25 bp, Homo sapien
gtcaggcttctggcgggaagcggca

SEQ ID NO: 807062 - DNA, 25 bp, Homo sapien
gaacagcccaagaaacttcctgtgg

SEQ ID NO: 807063 - DNA, 25 bp, Homo sapien
ggtttgttgcaactttgggcgcaga

SEQ ID NO: 807064 - DNA, 25 bp, Homo sapien
caagccgttccagtttaggccacga

SEQ ID NO: 807065 - DNA, 25 bp, Homo sapien
taggccacgacaggaaaagtctggg

SEQ ID NO: 807066 - DNA, 25 bp, Homo sapien
gagcgcagcgccttcaagactccgg

SEQ ID NO: 807067 - DNA, 25 bp, Homo sapien
tgggatcgcgatcgcccgcggtggc

SEQ ID NO: 807068 - DNA, 25 bp, Homo sapien
gcagcgccttcaagactccggttgg

SEQ ID NO: 807069 - DNA, 25 bp, Homo sapien
gggtctcccgctgggatcgcgatcg

SEQ ID NO: 807070 - DNA, 25 bp, Homo sapien
gagacggagtgagcggctgatagag

SEQ ID NO: 807071 - DNA, 25 bp, Homo sapien
cggagtgagcggctgatagagaggg

SEQ ID NO: 807072 - DNA, 25 bp, Homo sapien
ttgagacggagtgagcggctgatag

SEQ ID NO: 807073 - DNA, 25 bp, Homo sapien
atattgagacggagtgagcggctga

SEQ ID NO: 807074 - DNA, 25 bp, Homo sapien
gctgtaaatcaaagcgcttccaata

SEQ ID NO: 807075 - DNA, 25 bp, Homo sapien
tgtaaatcaaagcgcttccaatatt

SEQ ID NO: 807076 - DNA, 25 bp, Homo sapien
ctgtaaatcaaagcgcttccaatat

SEQ ID NO: 807077 - DNA, 25 bp, Homo sapien
tgcagagagggcagaagccccgagg

SEQ ID NO: 807078 - DNA, 25 bp, Homo sapien
cagaagccccgaggggacgcaagga

SEQ ID NO: 807079 - DNA, 25 bp, Homo sapien
ggcgccgcaggtcaccgggggccgc

SEQ ID NO: 807080 - DNA, 25 bp, Homo sapien
gcaaggaagggacccggcgccgcag

SEQ ID NO: 807081 - DNA, 25 bp, Homo sapien
tcgccccttgggcacggcggcgact

SEQ ID NO: 807082 - DNA, 25 bp, Homo sapien
cccggcatgccacggtcccaacggg

SEQ ID NO: 807083 - DNA, 25 bp, Homo sapien
tctgctttcgagaacccggcccgag

SEQ ID NO: 807084 - DNA, 25 bp, Homo sapien
ggcggaccctaagggtgcgccgctc

SEQ ID NO: 807085 - DNA, 25 bp, Homo sapien
acctggctccggctacgcacaacat

SEQ ID NO: 807086 - DNA, 25 bp, Homo sapien
cttcaacctggctccggctacgcac

SEQ ID NO: 807087 - DNA, 25 bp, Homo sapien
tcaacctggctccggctacgcacaa

SEQ ID NO: 807088 - DNA, 25 bp, Homo sapien
aacctggctccggctacgcacaaca

SEQ ID NO: 807089 - DNA, 25 bp, Homo sapien
ttgaactttgacattccgtattcga

SEQ ID NO: 807090 - DNA, 25 bp, Homo sapien
ccagattggcctgagacttgaactt

SEQ ID NO: 807091 - DNA, 25 bp, Homo sapien
cagattggcctgagacttgaacttt

SEQ ID NO: 807092 - DNA, 25 bp, Homo sapien
gagacttgaactttgacattccgta

SEQ ID NO: 807093 - DNA, 25 bp, Homo sapien
ccgctgacgtctccaacctggattt

SEQ ID NO: 807094 - DNA, 25 bp, Homo sapien
ggcaacccaatctcagtataaagag

SEQ ID NO: 807095 - DNA, 25 bp, Homo sapien
gcaaagaccgatcagcctctttacc

SEQ ID NO: 807096 - DNA, 25 bp, Homo sapien
tctctgcaaagaccgatcagcctct

SEQ ID NO: 807097 - DNA, 25 bp, Homo sapien
tgttacaattcgtcagatatacctg

SEQ ID NO: 807098 - DNA, 25 bp, Homo sapien
gaaatgtatgagttttcccctaaca

SEQ ID NO: 807099 - DNA, 25 bp, Homo sapien
tttctacaataactcacgatcctgg

SEQ ID NO: 807100 - DNA, 25 bp, Homo sapien
cgatcctggatcctgtatatttgaa

SEQ ID NO: 807101 - DNA, 25 bp, Homo sapien
tcttttaagtcacaagccaggtgct

SEQ ID NO: 807102 - DNA, 25 bp, Homo sapien
caaagctgtttcaggcgcaggacaa

SEQ ID NO: 807103 - DNA, 25 bp, Homo sapien
gaaaagaatggttcaccctcactgt

SEQ ID NO: 807104 - DNA, 25 bp, Homo sapien
tcactgtgtaatacccgaatagggc

SEQ ID NO: 807105 - DNA, 25 bp, Homo sapien
tcctggatcccatggagcagaaacc

SEQ ID NO: 807106 - DNA, 25 bp, Homo sapien
caggctcatcggtgactgcaggctc

SEQ ID NO: 807107 - DNA, 25 bp, Homo sapien
tagctttacgattccgcagcacagc

SEQ ID NO: 807108 - DNA, 25 bp, Homo sapien
cggccagctccggatggtagcttta

SEQ ID NO: 807109 - DNA, 25 bp, Homo sapien
tcaaccataactggcaatatccttc

SEQ ID NO: 807110 - DNA, 25 bp, Homo sapien
ccagtcccacatcgatgctgacaaa

SEQ ID NO: 807111 - DNA, 25 bp, Homo sapien
ccataactggcaatatccttcctct

SEQ ID NO: 807112 - DNA, 25 bp, Homo sapien
cccacatcgatgctgacaaactgcg

SEQ ID NO: 807113 - DNA, 25 bp, Homo sapien
tccagtccaatgataattccccgag

SEQ ID NO: 807114 - DNA, 25 bp, Homo sapien
tctgaatccagagtggcccaaaacc

SEQ ID NO: 807115 - DNA, 25 bp, Homo sapien
tccccgaggaaaagaagctaagatc

SEQ ID NO: 807116 - DNA, 25 bp, Homo sapien
tctcagggatgtcgctgtgaccagg

SEQ ID NO: 807117 - DNA, 25 bp, Homo sapien
aaccagcaggccagaagtatatttc

SEQ ID NO: 807118 - DNA, 25 bp, Homo sapien
cgctgccattggacacctcgcgata

SEQ ID NO: 807119 - DNA, 25 bp, Homo sapien
ctgcattctctgaccaaccagcagg

SEQ ID NO: 807120 - DNA, 25 bp, Homo sapien
gataccccaatgtgtcctgcattct

SEQ ID NO: 807121 - DNA, 25 bp, Homo sapien
accagaggcaccggagcaggccaca

SEQ ID NO: 807122 - DNA, 25 bp, Homo sapien
tccgacgcgcccagaagtggcagtc

SEQ ID NO: 807123 - DNA, 25 bp, Homo sapien
tgtgcagccgctccgacgcgcccag

SEQ ID NO: 807124 - DNA, 25 bp, Homo sapien
gatggggaccagaggcaccggagca

SEQ ID NO: 807125 - DNA, 25 bp, Homo sapien
ctggcttgcctttccgatccttgaa

SEQ ID NO: 807126 - DNA, 25 bp, Homo sapien
aacgcttcacgttcagtcgaacgca

SEQ ID NO: 807127 - DNA, 25 bp, Homo sapien
gaatcagataagaatgctctcaggg

SEQ ID NO: 807128 - DNA, 25 bp, Homo sapien
gaatggcactgtcatacgtcactgc

SEQ ID NO: 807129 - DNA, 25 bp, Homo sapien
catgagtcaatgtgggtgagccccg

SEQ ID NO: 807130 - DNA, 25 bp, Homo sapien
gaaggagtctcgctgctctcagagc

SEQ ID NO: 807131 - DNA, 25 bp, Homo sapien
tgattcccgagacgcatggaggcag

SEQ ID NO: 807132 - DNA, 25 bp, Homo sapien
caaacactgtgctacgtgagagaag

SEQ ID NO: 807133 - DNA, 25 bp, Homo sapien
tcactgtaagtccatgccaagccaa

SEQ ID NO: 807134 - DNA, 25 bp, Homo sapien
tcactgtaacgtatggaacccgcca

SEQ ID NO: 807135 - DNA, 25 bp, Homo sapien
cacggcaagttgctacgacctggat

SEQ ID NO: 807136 - DNA, 25 bp, Homo sapien
aatatacctgcaccccggacaagtg

SEQ ID NO: 807137 - DNA, 25 bp, Homo sapien
agctgggactacaggtgtgtgccac

SEQ ID NO: 807138 - DNA, 25 bp, Homo sapien
catcctcccacctcggctacccaag

SEQ ID NO: 807139 - DNA, 25 bp, Homo sapien
cctcccacctcggctacccaagtag

SEQ ID NO: 807140 - DNA, 25 bp, Homo sapien
atcctcccacctcggctacccaagt

SEQ ID NO: 807141 - DNA, 25 bp, Homo sapien
gactggcaaagctctgattcttagg

SEQ ID NO: 807142 - DNA, 25 bp, Homo sapien
caaccaaaatgcatggtatgcaact

SEQ ID NO: 807143 - DNA, 25 bp, Homo sapien
tacaggtggatgcaattgactggca

SEQ ID NO: 807144 - DNA, 25 bp, Homo sapien
tcctgggtgttcactgtattatatt

SEQ ID NO: 807145 - DNA, 25 bp, Homo sapien
gagcccgagtgaagaggaaaacctg

SEQ ID NO: 807146 - DNA, 25 bp, Homo sapien
ctgtggtacggctggcaggcgtggg

SEQ ID NO: 807147 - DNA, 25 bp, Homo sapien
tttaacgatgacaagggagcccgag

SEQ ID NO: 807148 - DNA, 25 bp, Homo sapien
cgaggccgaaaagggaccacagaat

SEQ ID NO: 807149 - DNA, 25 bp, Homo sapien
aaacgttctgatgacagctggatca

SEQ ID NO: 807150 - DNA, 25 bp, Homo sapien
tgacagctggatcaaacccgccaat

SEQ ID NO: 807151 - DNA, 25 bp, Homo sapien
acggtatttccaaacgttctgatga

SEQ ID NO: 807152 - DNA, 25 bp, Homo sapien
tgatgacagctggatcaaacccgcc

SEQ ID NO: 807153 - DNA, 25 bp, Homo sapien
tgatgaaacgtgttcagggcacact

SEQ ID NO: 807154 - DNA, 25 bp, Homo sapien
tggtctccacaacgagcctgatgat

SEQ ID NO: 807155 - DNA, 25 bp, Homo sapien
aattatgtcagtgtgaaatcccacc

SEQ ID NO: 807156 - DNA, 25 bp, Homo sapien
tacaccaggtttaatatgtccctcg

SEQ ID NO: 807157 - DNA, 25 bp, Homo sapien
tgtggctggggcagacctaacacct

SEQ ID NO: 807158 - DNA, 25 bp, Homo sapien
acacaccacgtgctgaggtgttgtg

SEQ ID NO: 807159 - DNA, 25 bp, Homo sapien
tggggcagacctaacacctgtgcct

SEQ ID NO: 807160 - DNA, 25 bp, Homo sapien
gaagccacacaccacgtgctgaggt

SEQ ID NO: 807161 - DNA, 25 bp, Homo sapien
cttccagaatgcgtgtgacggagcc

SEQ ID NO: 807162 - DNA, 25 bp, Homo sapien
tgtttattaagcgtggccgcacaga

SEQ ID NO: 807163 - DNA, 25 bp, Homo sapien
tcccgctccttcagagggcactttg

SEQ ID NO: 807164 - DNA, 25 bp, Homo sapien
tcccaggcagactgtttattaagcg

SEQ ID NO: 807165 - DNA, 25 bp, Homo sapien
tggtggctaggtccatccaaggcac

SEQ ID NO: 807166 - DNA, 25 bp, Homo sapien
ctgacatgtgcgtggaactaggcga

SEQ ID NO: 807167 - DNA, 25 bp, Homo sapien
taggcgaggcgccttactatttatt

SEQ ID NO: 807168 - DNA, 25 bp, Homo sapien
tactcactaccaattttacaaggca

SEQ ID NO: 807169 - DNA, 25 bp, Homo sapien
gaaccacggatgctaggatcacaca

SEQ ID NO: 807170 - DNA, 25 bp, Homo sapien
cagtcaggaaaatgtagcaggatct

SEQ ID NO: 807171 - DNA, 25 bp, Homo sapien
aagccaggtattcccgggcagagca

SEQ ID NO: 807172 - DNA, 25 bp, Homo sapien
taagcagaggcctgtattctgctga

SEQ ID NO: 807173 - DNA, 25 bp, Homo sapien
cttcttagtcctcactacaggacca

SEQ ID NO: 807174 - DNA, 25 bp, Homo sapien
ttcttagtcctcactacaggaccaa

SEQ ID NO: 807175 - DNA, 25 bp, Homo sapien
tatcatgtaactgagtacatcactt

SEQ ID NO: 807176 - DNA, 25 bp, Homo sapien
aactgagtacatcacttcttagtcc

SEQ ID NO: 807177 - DNA, 25 bp, Homo sapien
taaagccaacataataccaggcatg

SEQ ID NO: 807178 - DNA, 25 bp, Homo sapien
tgtgggcctctttacttcagcagtc

SEQ ID NO: 807179 - DNA, 25 bp, Homo sapien
tagtctaagactacatgaggcaagg

SEQ ID NO: 807180 - DNA, 25 bp, Homo sapien
cagaggcaagtacctatattattct

SEQ ID NO: 807181 - DNA, 25 bp, Homo sapien
gatttaaggaagaatgacccaggac

SEQ ID NO: 807182 - DNA, 25 bp, Homo sapien
agggtgtgtacaaggccccaggcaa

SEQ ID NO: 807183 - DNA, 25 bp, Homo sapien
gacgtcttcctgtcatcaagcagaa

SEQ ID NO: 807184 - DNA, 25 bp, Homo sapien
tgacggtacctgaaagagcttgcaa

SEQ ID NO: 807185 - DNA, 25 bp, Homo sapien
taagcttgcacctgtgtcaaacggt

SEQ ID NO: 807186 - DNA, 25 bp, Homo sapien
gaatgagtcctgcaaatcggcttcc

SEQ ID NO: 807187 - DNA, 25 bp, Homo sapien
ggtgtacgcacaacattcttcaagg

SEQ ID NO: 807188 - DNA, 25 bp, Homo sapien
gaaagaattagcattagggccctgg

SEQ ID NO: 807189 - DNA, 25 bp, Homo sapien
cgcagtaattgtgggctcaggcgca

SEQ ID NO: 807190 - DNA, 25 bp, Homo sapien
agccttagcggcaatgacttcagtt

SEQ ID NO: 807191 - DNA, 25 bp, Homo sapien
taactgcgaggttggtctctaaaag

SEQ ID NO: 807192 - DNA, 25 bp, Homo sapien
gaacaaaactgcatcaaggtgagct

SEQ ID NO: 807193 - DNA, 25 bp, Homo sapien
gacagtagctgatcgtcatcacaaa

SEQ ID NO: 807194 - DNA, 25 bp, Homo sapien
tcaattccaggagggtaggtctctg

SEQ ID NO: 807195 - DNA, 25 bp, Homo sapien
gaagagacacttttgccaactaggc

SEQ ID NO: 807196 - DNA, 25 bp, Homo sapien
gagtgactggtcacgaaattcccta

SEQ ID NO: 807197 - DNA, 25 bp, Homo sapien
gagagtttcaacaccctacaagcga

SEQ ID NO: 807198 - DNA, 25 bp, Homo sapien
tcaagtcactgggatcgcgagagag

SEQ ID NO: 807199 - DNA, 25 bp, Homo sapien
gaaggccgcatttgcaactgcagag

SEQ ID NO: 807200 - DNA, 25 bp, Homo sapien
tacaagcgacttgtaagaaggccgc

SEQ ID NO: 807201 - DNA, 25 bp, Homo sapien
taatgatgagaccatttcctccggc

SEQ ID NO: 807202 - DNA, 25 bp, Homo sapien
gactctcagactgcgtataacgtag

SEQ ID NO: 807203 - DNA, 25 bp, Homo sapien
taaatgagggtaattagaagcccac

SEQ ID NO: 807204 - DNA, 25 bp, Homo sapien
cggaacaaccagaagacactttggg

SEQ ID NO: 807205 - DNA, 25 bp, Homo sapien
gagccttcgaggatgtcaagccaca

SEQ ID NO: 807206 - DNA, 25 bp, Homo sapien
tctagttggagctgacaaaggcgag

SEQ ID NO: 807207 - DNA, 25 bp, Homo sapien
caaaggcgagttctaaagtgagttc

SEQ ID NO: 807208 - DNA, 25 bp, Homo sapien
taaaactctgcgctgtcatccaggg

SEQ ID NO: 807209 - DNA, 25 bp, Homo sapien
aagttcacaccatgctcgatggccc

SEQ ID NO: 807210 - DNA, 25 bp, Homo sapien
aatgacaccacctgttttggcccag

SEQ ID NO: 807211 - DNA, 25 bp, Homo sapien
cccctggaggtaggaaattcatgcc

SEQ ID NO: 807212 - DNA, 25 bp, Homo sapien
gaaggacatctctctatacctgatg

SEQ ID NO: 807213 - DNA, 25 bp, Homo sapien
ggttacactacatgacagctcctgg

SEQ ID NO: 807214 - DNA, 25 bp, Homo sapien
caaggcagagcaagttcatccggag

SEQ ID NO: 807215 - DNA, 25 bp, Homo sapien
gaacgacactcgtatggcagagaga

SEQ ID NO: 807216 - DNA, 25 bp, Homo sapien
taagaggcatctatcaacaaggcag

SEQ ID NO: 807217 - DNA, 25 bp, Homo sapien
ctttctgaaggacgctaaggcgttc

SEQ ID NO: 807218 - DNA, 25 bp, Homo sapien
tgccgccgccccagattgggttgat

SEQ ID NO: 807219 - DNA, 25 bp, Homo sapien
agaaggcgtatggagagtcgtcaca

SEQ ID NO: 807220 - DNA, 25 bp, Homo sapien
tgcccgcagacatatgcaggtcggc

SEQ ID NO: 807221 - DNA, 25 bp, Homo sapien
gccgagtcgctttggcaactaaaga

SEQ ID NO: 807222 - DNA, 25 bp, Homo sapien
tgctgtcgccaccaaaaggcctgtt

SEQ ID NO: 807223 - DNA, 25 bp, Homo sapien
tagctggcttctcacggttgggacc

SEQ ID NO: 807224 - DNA, 25 bp, Homo sapien
tgggatccaaggtggctgctctagc

SEQ ID NO: 807225 - DNA, 25 bp, Homo sapien
tgcgcgggaacgctgaggaccacca

SEQ ID NO: 807226 - DNA, 25 bp, Homo sapien
gcgcgggaacgctgaggaccaccag

SEQ ID NO: 807227 - DNA, 25 bp, Homo sapien
ttgcgcgggaacgctgaggaccacc

SEQ ID NO: 807228 - DNA, 25 bp, Homo sapien
tgaactcccggctctgttcgataag

SEQ ID NO: 807229 - DNA, 25 bp, Homo sapien
gataagccgctttctggactgctca

SEQ ID NO: 807230 - DNA, 25 bp, Homo sapien
taccgttgcggtggcatcgagttct

SEQ ID NO: 807231 - DNA, 25 bp, Homo sapien
gactgctcactttcatcctgccggt

SEQ ID NO: 807232 - DNA, 25 bp, Homo sapien
cttcaaagcgaacacgatggtcacg

SEQ ID NO: 807233 - DNA, 25 bp, Homo sapien
aagatcccttcaaagcgaacacgat

SEQ ID NO: 807234 - DNA, 25 bp, Homo sapien
aagcgaacacgatggtcacgcgcct

SEQ ID NO: 807235 - DNA, 25 bp, Homo sapien
tcccttcaaagcgaacacgatggtc

SEQ ID NO: 807236 - DNA, 25 bp, Homo sapien
aactggcagatgtcacccggaaagc

SEQ ID NO: 807237 - DNA, 25 bp, Homo sapien
tttgaacccttagctggctctgtgg

SEQ ID NO: 807238 - DNA, 25 bp, Homo sapien
gccaagagctacgatacggagaaga

SEQ ID NO: 807239 - DNA, 25 bp, Homo sapien
tgattcatgccagcagtcccttgac

SEQ ID NO: 807240 - DNA, 25 bp, Homo sapien
gaagaaatgccccaagtggcaggta

SEQ ID NO: 807241 - DNA, 25 bp, Homo sapien
tgcagtgagaccctcgttactacag

SEQ ID NO: 807242 - DNA, 25 bp, Homo sapien
aagtggcaggtacctaccaggctgc

SEQ ID NO: 807243 - DNA, 25 bp, Homo sapien
tactacagccaaagatgaggaagtg

SEQ ID NO: 807244 - DNA, 25 bp, Homo sapien
acagcatctcaggaatgtggttctc

SEQ ID NO: 807245 - DNA, 25 bp, Homo sapien
gcaagcctaacacagacgaccattt

SEQ ID NO: 807246 - DNA, 25 bp, Homo sapien
catttattggagagttgagcatcac

SEQ ID NO: 807247 - DNA, 25 bp, Homo sapien
tcacattcaaatagcagagccctga

SEQ ID NO: 807248 - DNA, 25 bp, Homo sapien
aactgtcaatgttaggaggcccagg

SEQ ID NO: 807249 - DNA, 25 bp, Homo sapien
aaactgtcaatgttaggaggcccag

SEQ ID NO: 807250 - DNA, 25 bp, Homo sapien
gcccagggccgacatttccctcgat

SEQ ID NO: 807251 - DNA, 25 bp, Homo sapien
gggccgacatttccctcgatcttaa

SEQ ID NO: 807252 - DNA, 25 bp, Homo sapien
tgtttttagtagaggcgaagtatca

SEQ ID NO: 807253 - DNA, 25 bp, Homo sapien
agtagaggcgaagtatcaccatgtt

SEQ ID NO: 807254 - DNA, 25 bp, Homo sapien
gtagaggcgaagtatcaccatgttg

SEQ ID NO: 807255 - DNA, 25 bp, Homo sapien
tttagtagaggcgaagtatcaccat

SEQ ID NO: 807256 - DNA, 25 bp, Homo sapien
agctaccgcgctcagccccaatttt

SEQ ID NO: 807257 - DNA, 25 bp, Homo sapien
gctaccgcgctcagccccaattttt

SEQ ID NO: 807258 - DNA, 25 bp, Homo sapien
taccgcgctcagccccaatttttgt

SEQ ID NO: 807259 - DNA, 25 bp, Homo sapien
tgagctaccgcgctcagccccaatt

SEQ ID NO: 807260 - DNA, 25 bp, Homo sapien
gaaactgaccagctttgcgaacatt

SEQ ID NO: 807261 - DNA, 25 bp, Homo sapien
gggtgagcttctcttgccaacaaca

SEQ ID NO: 807262 - DNA, 25 bp, Homo sapien
tggtgacaccagattggaaactgac

SEQ ID NO: 807263 - DNA, 25 bp, Homo sapien
tcagggacttcatggagcgtgtctc

SEQ ID NO: 807264 - DNA, 25 bp, Homo sapien
tgaaagtagcactgacgtcagccgc

SEQ ID NO: 807265 - DNA, 25 bp, Homo sapien
tttgagagcgaacaccaagactgca

SEQ ID NO: 807266 - DNA, 25 bp, Homo sapien
gactctcggtatgtaagccgggccc

SEQ ID NO: 807267 - DNA, 25 bp, Homo sapien
caagactgcaccaaagacgctgaaa

SEQ ID NO: 807268 - DNA, 25 bp, Homo sapien
gccaaaaggtgccaacgagactcat

SEQ ID NO: 807269 - DNA, 25 bp, Homo sapien
gaccaatattagatcacgagcctcc

SEQ ID NO: 807270 - DNA, 25 bp, Homo sapien
tatttaacgatatttatggaatggc

SEQ ID NO: 807271 - DNA, 25 bp, Homo sapien
caggtagtgtgctgggtatacagca

SEQ ID NO: 807272 - DNA, 25 bp, Homo sapien
tataaatgtatcaacgccttcctgg

SEQ ID NO: 807273 - DNA, 25 bp, Homo sapien
tgcaggactcttggacacaactacc

SEQ ID NO: 807274 - DNA, 25 bp, Homo sapien
gacagggctccctatggatccatta

SEQ ID NO: 807275 - DNA, 25 bp, Homo sapien
gctgagcccagtcaactgaagaaaa

SEQ ID NO: 807276 - DNA, 25 bp, Homo sapien
gaaagctgccgtctgacccacctgt

SEQ ID NO: 807277 - DNA, 25 bp, Homo sapien
ttctcttcctaagcgcaatcttccc

SEQ ID NO: 807278 - DNA, 25 bp, Homo sapien
ctaagcgcaatcttccctcctgctg

SEQ ID NO: 807279 - DNA, 25 bp, Homo sapien
cctgtcgctccaagactggttttgg

SEQ ID NO: 807280 - DNA, 25 bp, Homo sapien
catttcaaattagcagaagctgtga

SEQ ID NO: 807281 - DNA, 25 bp, Homo sapien
cctggcgtcctgtgagttaattata

SEQ ID NO: 807282 - DNA, 25 bp, Homo sapien
gataatgccaagtttacggagccca

SEQ ID NO: 807283 - DNA, 25 bp, Homo sapien
ttcttggcgcctggccgaatctggc

SEQ ID NO: 807284 - DNA, 25 bp, Homo sapien
ccaccaattatgagggccgggaatg

SEQ ID NO: 807285 - DNA, 25 bp, Homo sapien
cagaaccgcagagaatcaggaaccc

SEQ ID NO: 807286 - DNA, 25 bp, Homo sapien
gtaatttcatcaacgagaaggccga

SEQ ID NO: 807287 - DNA, 25 bp, Homo sapien
aaatgcttcttaccgcaccaagtgg

SEQ ID NO: 807288 - DNA, 25 bp, Homo sapien
ggtcttccagaaccaagagcctaag

SEQ ID NO: 807289 - DNA, 25 bp, Homo sapien
tgtaaaactccaagccataatttca

SEQ ID NO: 807290 - DNA, 25 bp, Homo sapien
ccagaccagagggttacaatttgaa

SEQ ID NO: 807291 - DNA, 25 bp, Homo sapien
tacagacatgctgcccataaagaga

SEQ ID NO: 807292 - DNA, 25 bp, Homo sapien
gtaatgcatccgatcctcagccagg

SEQ ID NO: 807293 - DNA, 25 bp, Homo sapien
tacaaaagacgctaggcaccaagcc

SEQ ID NO: 807294 - DNA, 25 bp, Homo sapien
tcctcatcgctaccatgggcaatgg

SEQ ID NO: 807295 - DNA, 25 bp, Homo sapien
cagactaggtgtgttcatgatgcca

SEQ ID NO: 807296 - DNA, 25 bp, Homo sapien
tcggttactctctggctgaatggct

SEQ ID NO: 807297 - DNA, 25 bp, Homo sapien
tcagcacagtgaatacaagcagcag

SEQ ID NO: 807298 - DNA, 25 bp, Homo sapien
tagaagatctttagccccgtagcac

SEQ ID NO: 807299 - DNA, 25 bp, Homo sapien
ggtggctacaaatccctaggtccaa

SEQ ID NO: 807300 - DNA, 25 bp, Homo sapien
gaagctcaccttctaatcacagggc

SEQ ID NO: 807301 - DNA, 25 bp, Homo sapien
gagaaacctgaagcgggcaagacaa

SEQ ID NO: 807302 - DNA, 25 bp, Homo sapien
gaattatctttgcatgaccaggctc

SEQ ID NO: 807303 - DNA, 25 bp, Homo sapien
tggaatctctctcccggtgagtggc

SEQ ID NO: 807304 - DNA, 25 bp, Homo sapien
tcttggctcaatgcatcctggaact

SEQ ID NO: 807305 - DNA, 25 bp, Homo sapien
tgggtagctgaaagtacaggtgtgc

SEQ ID NO: 807306 - DNA, 25 bp, Homo sapien
ggaactcccaggctcaagcaatcct

SEQ ID NO: 807307 - DNA, 25 bp, Homo sapien
ctcctgggtagctgaaagtacaggt

SEQ ID NO: 807308 - DNA, 25 bp, Homo sapien
cttcgaccgctaaaaagtgtgggat

SEQ ID NO: 807309 - DNA, 25 bp, Homo sapien
tattactgcagatcaggcgcctctt

SEQ ID NO: 807310 - DNA, 25 bp, Homo sapien
tatcaacctgcacgctggaaaggct

SEQ ID NO: 807311 - DNA, 25 bp, Homo sapien
tgctaactccggcaagaagacaagg

SEQ ID NO: 807312 - DNA, 25 bp, Homo sapien
tgtggacagcgtaagtcacatgact

SEQ ID NO: 807313 - DNA, 25 bp, Homo sapien
tggttgccctttttgcattggttgc

SEQ ID NO: 807314 - DNA, 25 bp, Homo sapien
aggagctgtgctttccctcaacaca

SEQ ID NO: 807315 - DNA, 25 bp, Homo sapien
gccagcaacttgtaaccggcaatga

SEQ ID NO: 807316 - DNA, 25 bp, Homo sapien
caaggctgttttcgatgcgggatcc

SEQ ID NO: 807317 - DNA, 25 bp, Homo sapien
tgagggcgcgtgaatacagcagaaa

SEQ ID NO: 807318 - DNA, 25 bp, Homo sapien
tgcgggatccatgacacgcttctct

SEQ ID NO: 807319 - DNA, 25 bp, Homo sapien
tccagcacacgaatacacaggaggt

SEQ ID NO: 807320 - DNA, 25 bp, Homo sapien
ggaaggttttctgagtggtcaacat

SEQ ID NO: 807321 - DNA, 25 bp, Homo sapien
tgcttcttgctcattaaatggacac

SEQ ID NO: 807322 - DNA, 25 bp, Homo sapien
acatgttcccgagagcctacatctg

SEQ ID NO: 807323 - DNA, 25 bp, Homo sapien
gagtggtcaacatgttcccgagagc

SEQ ID NO: 807324 - DNA, 25 bp, Homo sapien
aagctggcctagagcagaagaaggt

SEQ ID NO: 807325 - DNA, 25 bp, Homo sapien
cagagttaggagacggctggctggc

SEQ ID NO: 807326 - DNA, 25 bp, Homo sapien
ctcccctgagtcagaagcgggagag

SEQ ID NO: 807327 - DNA, 25 bp, Homo sapien
gtggtttatgtcaccgcactctccc

SEQ ID NO: 807328 - DNA, 25 bp, Homo sapien
tcgtggacagaacgctcctcttggc

SEQ ID NO: 807329 - DNA, 25 bp, Homo sapien
tgccaccatgatcgtggacagaacg

SEQ ID NO: 807330 - DNA, 25 bp, Homo sapien
cagctgccaccatgatcgtggacag

SEQ ID NO: 807331 - DNA, 25 bp, Homo sapien
catgatcgtggacagaacgctcctc

SEQ ID NO: 807332 - DNA, 25 bp, Homo sapien
tgtcaagagttcgtttagactttct

SEQ ID NO: 807333 - DNA, 25 bp, Homo sapien
ccagcctgaaaaaacgcttcttaca

SEQ ID NO: 807334 - DNA, 25 bp, Homo sapien
aaacgcttcttacaccaacagagtc

SEQ ID NO: 807335 - DNA, 25 bp, Homo sapien
ttttacatctaagtaaggagtaata

SEQ ID NO: 807336 - DNA, 25 bp, Homo sapien
acatcaaggtatggaggcctctttc

SEQ ID NO: 807337 - DNA, 25 bp, Homo sapien
caggagaggcgaggacataccccag

SEQ ID NO: 807338 - DNA, 25 bp, Homo sapien
ctgggaggccacatcaaggtatgga

SEQ ID NO: 807339 - DNA, 25 bp, Homo sapien
ggcgaggacataccccagagaaggc

SEQ ID NO: 807340 - DNA, 25 bp, Homo sapien
actggtcggcgcagacatcgttcca

SEQ ID NO: 807341 - DNA, 25 bp, Homo sapien
gcctgcatgctacagagtcgggcag

SEQ ID NO: 807342 - DNA, 25 bp, Homo sapien
taccacctgaggtctccggttctgc

SEQ ID NO: 807343 - DNA, 25 bp, Homo sapien
ggacacgtggaaccagataccacct

SEQ ID NO: 807344 - DNA, 25 bp, Homo sapien
gtccatgaggctaacccagggctga

SEQ ID NO: 807345 - DNA, 25 bp, Homo sapien
cacaccgagcgtgtacggacagact

SEQ ID NO: 807346 - DNA, 25 bp, Homo sapien
gctgaccttagcatgtgcccactct

SEQ ID NO: 807347 - DNA, 25 bp, Homo sapien
gctccactgtggtgaggctatcaat

SEQ ID NO: 807348 - DNA, 25 bp, Homo sapien
caaacaaacaaaagagatggggtct

SEQ ID NO: 807349 - DNA, 25 bp, Homo sapien
tggcacaatcatagctcactactgc

SEQ ID NO: 807350 - DNA, 25 bp, Homo sapien
gctcactactgccttgaactccagg

SEQ ID NO: 807351 - DNA, 25 bp, Homo sapien
ctctgttgcccagtctggaatgcag

SEQ ID NO: 807352 - DNA, 25 bp, Homo sapien
ttgcaggtgcaaagggctcagagcc

SEQ ID NO: 807353 - DNA, 25 bp, Homo sapien
tttaaaaagcgttgatgagactccg

SEQ ID NO: 807354 - DNA, 25 bp, Homo sapien
gcactgacatttagcagccactgta

SEQ ID NO: 807355 - DNA, 25 bp, Homo sapien
tatctatgggcgctggttcaaatcc

SEQ ID NO: 807356 - DNA, 25 bp, Homo sapien
tcccagaactcatccgctatgctgc

SEQ ID NO: 807357 - DNA, 25 bp, Homo sapien
aaacagagacatgacttgaatccca

SEQ ID NO: 807358 - DNA, 25 bp, Homo sapien
gaattctagcggaagttggtcaaca

SEQ ID NO: 807359 - DNA, 25 bp, Homo sapien
ccaatacataggctagatggctatg

SEQ ID NO: 807360 - DNA, 25 bp, Homo sapien
atggtgcctggctactaactgattt

SEQ ID NO: 807361 - DNA, 25 bp, Homo sapien
actgagttcttgaatgccctccaga

SEQ ID NO: 807362 - DNA, 25 bp, Homo sapien
aaggtaacaagcagattcccgaagg

SEQ ID NO: 807363 - DNA, 25 bp, Homo sapien
ctagacacgtgagatgactgagttc

SEQ ID NO: 807364 - DNA, 25 bp, Homo sapien
agtagaagccttcagcccaggtcca

SEQ ID NO: 807365 - DNA, 25 bp, Homo sapien
gctaatttttgtacttttatagaga

SEQ ID NO: 807366 - DNA, 25 bp, Homo sapien
ggtgatcctcctgccttggcgtccc

SEQ ID NO: 807367 - DNA, 25 bp, Homo sapien
ttacagttgcctgctaccacgccta

SEQ ID NO: 807368 - DNA, 25 bp, Homo sapien
tcaggtgatcctcctgccttggcgt

SEQ ID NO: 807369 - DNA, 25 bp, Homo sapien
ccatcatttgtgcggtcagcgtcat

SEQ ID NO: 807370 - DNA, 25 bp, Homo sapien
accatcatttgtgcggtcagcgtca

SEQ ID NO: 807371 - DNA, 25 bp, Homo sapien
cttttttaagaagtccgcagttctg

SEQ ID NO: 807372 - DNA, 25 bp, Homo sapien
atggaatctagcaccggcagcaagg

SEQ ID NO: 807373 - DNA, 25 bp, Homo sapien
tttcatatcatggaatctagcaccg

SEQ ID NO: 807374 - DNA, 25 bp, Homo sapien
gaagtccgcagttctgagaggtcag

SEQ ID NO: 807375 - DNA, 25 bp, Homo sapien
tgggaaattccatgaccggctaaga

SEQ ID NO: 807376 - DNA, 25 bp, Homo sapien
cacagggccgtaaggattaccgcaa

SEQ ID NO: 807377 - DNA, 25 bp, Homo sapien
cacacatttgggaatcagctgaaaa

SEQ ID NO: 807378 - DNA, 25 bp, Homo sapien
aaaaaccgtggttggtgctgactgc

SEQ ID NO: 807379 - DNA, 25 bp, Homo sapien
tagtgactttcatgcggtcctggaa

SEQ ID NO: 807380 - DNA, 25 bp, Homo sapien
tccatcttgacattagcttcggcga

SEQ ID NO: 807381 - DNA, 25 bp, Homo sapien
tttcttctgaatacacaacatggct

SEQ ID NO: 807382 - DNA, 25 bp, Homo sapien
gctggccctggtagatgaatcatag

SEQ ID NO: 807383 - DNA, 25 bp, Homo sapien
taggaagcggacctaacgtcactgc

SEQ ID NO: 807384 - DNA, 25 bp, Homo sapien
tgagtggtggccataccgagtaccc

SEQ ID NO: 807385 - DNA, 25 bp, Homo sapien
tgtgtctaacagcaacccgcttcga

SEQ ID NO: 807386 - DNA, 25 bp, Homo sapien
tatcccaacctagcaggcgaaggag

SEQ ID NO: 807387 - DNA, 25 bp, Homo sapien
ctggcacaggaatttcctgcaggac

SEQ ID NO: 807388 - DNA, 25 bp, Homo sapien
ggaatttcctgcaggactgtcctca

SEQ ID NO: 807389 - DNA, 25 bp, Homo sapien
gaatttcctgcaggactgtcctcat

SEQ ID NO: 807390 - DNA, 25 bp, Homo sapien
gcacaggaatttcctgcaggactgt

SEQ ID NO: 807391 - DNA, 25 bp, Homo sapien
taagccaacgatcctcaaagcaggg

SEQ ID NO: 807392 - DNA, 25 bp, Homo sapien
gcacagaggccgtgatctggcagca

SEQ ID NO: 807393 - DNA, 25 bp, Homo sapien
cgtggccacggctcaggattatggt

SEQ ID NO: 807394 - DNA, 25 bp, Homo sapien
cggttatctaagtggcaatgcctga

SEQ ID NO: 807395 - DNA, 25 bp, Homo sapien
cattattctcgaaactgctgattca

SEQ ID NO: 807396 - DNA, 25 bp, Homo sapien
cacaactcagtttttaggtcagaga

SEQ ID NO: 807397 - DNA, 25 bp, Homo sapien
gaggaaaccattctgatgtaaaagc

SEQ ID NO: 807398 - DNA, 25 bp, Homo sapien
taatgccaattgctggaggaaacca

SEQ ID NO: 807399 - DNA, 25 bp, Homo sapien
aggcggaggtcaggaagcagccatt

SEQ ID NO: 807400 - DNA, 25 bp, Homo sapien
ggcggaggtcaggaagcagccattt

SEQ ID NO: 807401 - DNA, 25 bp, Homo sapien
gaggcggaggtcaggaagcagccat

SEQ ID NO: 807402 - DNA, 25 bp, Homo sapien
ccttggaaactcttcagcagcggcg

SEQ ID NO: 807403 - DNA, 25 bp, Homo sapien
gcggcgctacctgcttgcgcaaatc

SEQ ID NO: 807404 - DNA, 25 bp, Homo sapien
ttggaaactcttcagcagcggcgct

SEQ ID NO: 807405 - DNA, 25 bp, Homo sapien
cagcggcgctacctgcttgcgcaaa

SEQ ID NO: 807406 - DNA, 25 bp, Homo sapien
atgacgctgggtcggagcagccggg

SEQ ID NO: 807407 - DNA, 25 bp, Homo sapien
tgcccggagcatttctttaatgtga

SEQ ID NO: 807408 - DNA, 25 bp, Homo sapien
cacgaagggtggctcaggatagaaa

SEQ ID NO: 807409 - DNA, 25 bp, Homo sapien
ataaaaagaccaattagccacgaag

SEQ ID NO: 807410 - DNA, 25 bp, Homo sapien
tggaagcccgacaacttgctctaga

SEQ ID NO: 807411 - DNA, 25 bp, Homo sapien
gcccgacaacttgctctagagctct

SEQ ID NO: 807412 - DNA, 25 bp, Homo sapien
tcccaaatggaagcccgacaacttg

SEQ ID NO: 807413 - DNA, 25 bp, Homo sapien
cgacaacttgctctagagctctggg

SEQ ID NO: 807414 - DNA, 25 bp, Homo sapien
actcatcaactacgggcttggagat

SEQ ID NO: 807415 - DNA, 25 bp, Homo sapien
tgggatgcaggtgtcctgctggccg

SEQ ID NO: 807416 - DNA, 25 bp, Homo sapien
gcaggtgtcctgctggccggaccaa

SEQ ID NO: 807417 - DNA, 25 bp, Homo sapien
tcactcatcaactacgggcttggag

SEQ ID NO: 807418 - DNA, 25 bp, Homo sapien
agcccgggatgtcgatacaagcctg

SEQ ID NO: 807419 - DNA, 25 bp, Homo sapien
gcccgggatgtcgatacaagcctgg

SEQ ID NO: 807420 - DNA, 25 bp, Homo sapien
ccgggatgtcgatacaagcctgggc

SEQ ID NO: 807421 - DNA, 25 bp, Homo sapien
cccgggatgtcgatacaagcctggg

SEQ ID NO: 807422 - DNA, 25 bp, Homo sapien
ccatgcgtggccaataagactgact

SEQ ID NO: 807423 - DNA, 25 bp, Homo sapien
gacttcatattaagggtacacctcc

SEQ ID NO: 807424 - DNA, 25 bp, Homo sapien
aactctcttggaaactgtctagacc

SEQ ID NO: 807425 - DNA, 25 bp, Homo sapien
ttggccagactagtggaaagacagc

SEQ ID NO: 807426 - DNA, 25 bp, Homo sapien
gctagctaagatttgcagtacagtg

SEQ ID NO: 807427 - DNA, 25 bp, Homo sapien
tactgaaactgacaaacggcatggt

SEQ ID NO: 807428 - DNA, 25 bp, Homo sapien
ccaccactgggtctgatgattaatg

SEQ ID NO: 807429 - DNA, 25 bp, Homo sapien
taaagttgcaccatcgtaagtcaag

SEQ ID NO: 807430 - DNA, 25 bp, Homo sapien
gaatctatcacggtaaacactgagg

SEQ ID NO: 807431 - DNA, 25 bp, Homo sapien
caaggttaccccacatacaacggtg

SEQ ID NO: 807432 - DNA, 25 bp, Homo sapien
tgaaactgccgcgtcaaggtacagg

SEQ ID NO: 807433 - DNA, 25 bp, Homo sapien
gccaacttggtcaggaggaataact

SEQ ID NO: 807434 - DNA, 25 bp, Homo sapien
ttctactgtacgtctttgaaagggc

SEQ ID NO: 807435 - DNA, 25 bp, Homo sapien
ttcatagactgctgtagttcaccca

SEQ ID NO: 807436 - DNA, 25 bp, Homo sapien
ttgattagaatctgtcaaatcatcc

SEQ ID NO: 807437 - DNA, 25 bp, Homo sapien
gtcaaatcatcctgccggtgcccat

SEQ ID NO: 807438 - DNA, 25 bp, Homo sapien
agatatgggctgcaagatgggcagc

SEQ ID NO: 807439 - DNA, 25 bp, Homo sapien
ttacagctcaacagatatgggctgc

SEQ ID NO: 807440 - DNA, 25 bp, Homo sapien
agatgggcagcagactcgtagtcac

SEQ ID NO: 807441 - DNA, 25 bp, Homo sapien
acagatatgggctgcaagatgggca

SEQ ID NO: 807442 - DNA, 25 bp, Homo sapien
cgggttttgccataagataatgaca

SEQ ID NO: 807443 - DNA, 25 bp, Homo sapien
accacggctaacaccactgtcacct

SEQ ID NO: 807444 - DNA, 25 bp, Homo sapien
aagataatgacagtacagcagccac

SEQ ID NO: 807445 - DNA, 25 bp, Homo sapien
tcaggcttgcgggttttgccataag

SEQ ID NO: 807446 - DNA, 25 bp, Homo sapien
taacttctggagtgcttggctgcgc

SEQ ID NO: 807447 - DNA, 25 bp, Homo sapien
tgcatgagcagaaccaaaccagctg

SEQ ID NO: 807448 - DNA, 25 bp, Homo sapien
ggttagatccctttctgcatgagca

SEQ ID NO: 807449 - DNA, 25 bp, Homo sapien
gcggccgtgattaatagactgctga

SEQ ID NO: 807450 - DNA, 25 bp, Homo sapien
aatgaagcgatcactcaggacagga

SEQ ID NO: 807451 - DNA, 25 bp, Homo sapien
gtcaatcagggtgggaaatgaagcg

SEQ ID NO: 807452 - DNA, 25 bp, Homo sapien
agaggagggctattcaaagacacag

SEQ ID NO: 807453 - DNA, 25 bp, Homo sapien
gaggagggctattcaaagacacaga

SEQ ID NO: 807454 - DNA, 25 bp, Homo sapien
cagtaccagacacaacacagtgact

SEQ ID NO: 807455 - DNA, 25 bp, Homo sapien
ccacatggctaccagccaggaagag

SEQ ID NO: 807456 - DNA, 25 bp, Homo sapien
tggcaagggccccagtaccagacac

SEQ ID NO: 807457 - DNA, 25 bp, Homo sapien
aggtgtccacatggctaccagccag

SEQ ID NO: 807458 - DNA, 25 bp, Homo sapien
ggactgacttgttagaatatttagc

SEQ ID NO: 807459 - DNA, 25 bp, Homo sapien
tggactgacttgttagaatatttag

SEQ ID NO: 807460 - DNA, 25 bp, Homo sapien
gactgacttgttagaatatttagct

SEQ ID NO: 807461 - DNA, 25 bp, Homo sapien
actgacttgttagaatatttagctt

SEQ ID NO: 807462 - DNA, 25 bp, Homo sapien
tatgctggacgcatatgcaaagagc

SEQ ID NO: 807463 - DNA, 25 bp, Homo sapien
gacgtctgttcatcaactatgctgg

SEQ ID NO: 807464 - DNA, 25 bp, Homo sapien
gggattccagattaggcaactggca

SEQ ID NO: 807465 - DNA, 25 bp, Homo sapien
gaaccaggtgaattgaggacggtcc

SEQ ID NO: 807466 - DNA, 25 bp, Homo sapien
tgcttcttttactcagtgcatcaat

SEQ ID NO: 807467 - DNA, 25 bp, Homo sapien
ttttgtagacattcaagaaagctgc

SEQ ID NO: 807468 - DNA, 25 bp, Homo sapien
tccttgcttcttttactcagtgcat

SEQ ID NO: 807469 - DNA, 25 bp, Homo sapien
ctgggacgtcaatcaatcttttgta

SEQ ID NO: 807470 - DNA, 25 bp, Homo sapien
tttccagaataaagaatcggaagcc

SEQ ID NO: 807471 - DNA, 25 bp, Homo sapien
gtgagacctcatcgcactcattgta

SEQ ID NO: 807472 - DNA, 25 bp, Homo sapien
tcacctcttagaatgcctcacaaac

SEQ ID NO: 807473 - DNA, 25 bp, Homo sapien
gtggctcctgcatgtaacctcacag

SEQ ID NO: 807474 - DNA, 25 bp, Homo sapien
tcagatatgcaagctggcactcagg

SEQ ID NO: 807475 - DNA, 25 bp, Homo sapien
tgagagtcaccagtgcaacccttgg

SEQ ID NO: 807476 - DNA, 25 bp, Homo sapien
gaggtgatgctacccgccaaaagaa

SEQ ID NO: 807477 - DNA, 25 bp, Homo sapien
tctgccggacacatcaggtgggtgc

SEQ ID NO: 807478 - DNA, 25 bp, Homo sapien
ttatgttaaatttgactccaaaagc

SEQ ID NO: 807479 - DNA, 25 bp, Homo sapien
tgttaaatttgactccaaaagctat

SEQ ID NO: 807480 - DNA, 25 bp, Homo sapien
tccaaaagctattttggaggccggc

SEQ ID NO: 807481 - DNA, 25 bp, Homo sapien
aaagctattttggaggccggctgca

SEQ ID NO: 807482 - DNA, 25 bp, Homo sapien
tgcacgtatacacagcctataattg

SEQ ID NO: 807483 - DNA, 25 bp, Homo sapien
gtatacacagcctataattgcatct

SEQ ID NO: 807484 - DNA, 25 bp, Homo sapien
agcctataattgcatctctttctgg

SEQ ID NO: 807485 - DNA, 25 bp, Homo sapien
cacgtatacacagcctataattgca

SEQ ID NO: 807486 - DNA, 25 bp, Homo sapien
tatattccgcctgctgggtacctgg

SEQ ID NO: 807487 - DNA, 25 bp, Homo sapien
tcaacgtcagcagatcccgggtgct

SEQ ID NO: 807488 - DNA, 25 bp, Homo sapien
catgcccagcggatcaacaagagta

SEQ ID NO: 807489 - DNA, 25 bp, Homo sapien
tcggttaacgtatccagcaggagcc

SEQ ID NO: 807490 - DNA, 25 bp, Homo sapien
gaagagtcaggggttagcggccgca

SEQ ID NO: 807491 - DNA, 25 bp, Homo sapien
gatcctccttcactaatgaagggtg

SEQ ID NO: 807492 - DNA, 25 bp, Homo sapien
taatgaagggtgttcagaagagtca

SEQ ID NO: 807493 - DNA, 25 bp, Homo sapien
ccttcactaatgaagggtgttcaga

SEQ ID NO: 807494 - DNA, 25 bp, Homo sapien
caacaatctcgagaaagaggcctca

SEQ ID NO: 807495 - DNA, 25 bp, Homo sapien
tgatgcctgagaacgccacacagtt

SEQ ID NO: 807496 - DNA, 25 bp, Homo sapien
tgccgattactcctgcctggtgtga

SEQ ID NO: 807497 - DNA, 25 bp, Homo sapien
tggcaatagccatgagattcactgg

SEQ ID NO: 807498 - DNA, 25 bp, Homo sapien
ttgctgtccgagatccaaagctggt

SEQ ID NO: 807499 - DNA, 25 bp, Homo sapien
ccgagatccaaagctggtacgggat

SEQ ID NO: 807500 - DNA, 25 bp, Homo sapien
tctggttctctgtttcaatatcgtg

SEQ ID NO: 807501 - DNA, 25 bp, Homo sapien
tgcaggcgctgcactttgagctgga

SEQ ID NO: 807502 - DNA, 25 bp, Homo sapien
tgaactgctctgctacgtcaatggt

SEQ ID NO: 807503 - DNA, 25 bp, Homo sapien
cagtggttggtgatacgtctctctc

SEQ ID NO: 807504 - DNA, 25 bp, Homo sapien
tacggacgaggccaaagtgaggcaa

SEQ ID NO: 807505 - DNA, 25 bp, Homo sapien
tcccagagtgctttccgtagagagg

SEQ ID NO: 807506 - DNA, 25 bp, Homo sapien
ccttctcaagagctatggtttcggc

SEQ ID NO: 807507 - DNA, 25 bp, Homo sapien
ctgttccttctcaagagctatggtt

SEQ ID NO: 807508 - DNA, 25 bp, Homo sapien
ggtttcggcttggttcttcagtgtc

SEQ ID NO: 807509 - DNA, 25 bp, Homo sapien
aagagctatggtttcggcttggttc

SEQ ID NO: 807510 - DNA, 25 bp, Homo sapien
tatggaggtggcagcgttacagctc

SEQ ID NO: 807511 - DNA, 25 bp, Homo sapien
gtaggactgccccataggccgtgtg

SEQ ID NO: 807512 - DNA, 25 bp, Homo sapien
accttttgggctgtgagatcattgc

SEQ ID NO: 807513 - DNA, 25 bp, Homo sapien
gaggccttcatgatgctgcagggca

SEQ ID NO: 807514 - DNA, 25 bp, Homo sapien
gaagaggacgaagccaaattggtca

SEQ ID NO: 807515 - DNA, 25 bp, Homo sapien
tgcaaaggaagaggacgaagccaaa

SEQ ID NO: 807516 - DNA, 25 bp, Homo sapien
gccaaattggtcatctcctttacca

SEQ ID NO: 807517 - DNA, 25 bp, Homo sapien
tctcctttaccaactgaaatgcacg

SEQ ID NO: 807518 - DNA, 25 bp, Homo sapien
aggctctgaaccttatgctcagctt

SEQ ID NO: 807519 - DNA, 25 bp, Homo sapien
cacatccatggtactaggaaggaga

SEQ ID NO: 807520 - DNA, 25 bp, Homo sapien
tgaaaatggaatcgagatcctccca

SEQ ID NO: 807521 - DNA, 25 bp, Homo sapien
tgcggaattcttcagcgtgggctcc

SEQ ID NO: 807522 - DNA, 25 bp, Homo sapien
ccgaagagcaacaggtatccgcggg

SEQ ID NO: 807523 - DNA, 25 bp, Homo sapien
tcttcatcgtatttggttttcaggt

SEQ ID NO: 807524 - DNA, 25 bp, Homo sapien
ttcatcgtatttggttttcaggtca

SEQ ID NO: 807525 - DNA, 25 bp, Homo sapien
agtagtttcttcatcgtatttggtt

SEQ ID NO: 807526 - DNA, 25 bp, Homo sapien
catcgtatttggttttcaggtcaaa

SEQ ID NO: 807527 - DNA, 25 bp, Homo sapien
tgagcagagtgcggggacctttgta

SEQ ID NO: 807528 - DNA, 25 bp, Homo sapien
gagcagagtgcggggacctttgtaa

SEQ ID NO: 807529 - DNA, 25 bp, Homo sapien
gtgtgagcagagtgcggggaccttt

SEQ ID NO: 807530 - DNA, 25 bp, Homo sapien
tgtgagcagagtgcggggacctttg

SEQ ID NO: 807531 - DNA, 25 bp, Homo sapien
cttcttgccgatgcccacggaggca

SEQ ID NO: 807532 - DNA, 25 bp, Homo sapien
cgtcttcttgccgatgcccacggag

SEQ ID NO: 807533 - DNA, 25 bp, Homo sapien
ccgtcttcttgccgatgcccacgga

SEQ ID NO: 807534 - DNA, 25 bp, Homo sapien
gtcttcttgccgatgcccacggagg

SEQ ID NO: 807535 - DNA, 25 bp, Homo sapien
ggaaggcttcctcgacaattctttc

SEQ ID NO: 807536 - DNA, 25 bp, Homo sapien
ctctgcaaaacctgacttgactcat

SEQ ID NO: 807537 - DNA, 25 bp, Homo sapien
tgcgctcccctgatgctagggatgt

SEQ ID NO: 807538 - DNA, 25 bp, Homo sapien
ccataccaccctctttaggaaggct

SEQ ID NO: 807539 - DNA, 25 bp, Homo sapien
aattttttaaaaactgattgcatgt

SEQ ID NO: 807540 - DNA, 25 bp, Homo sapien
aaattttttaaaaactgattgcatg

SEQ ID NO: 807541 - DNA, 25 bp, Homo sapien
tttttaaaaactgattgcatgttta

SEQ ID NO: 807542 - DNA, 25 bp, Homo sapien
attttttaaaaactgattgcatgtt

SEQ ID NO: 807543 - DNA, 25 bp, Homo sapien
atatgattgctttattggccaggcg

SEQ ID NO: 807544 - DNA, 25 bp, Homo sapien
ggcttaccttaacagtgaatcagaa

SEQ ID NO: 807545 - DNA, 25 bp, Homo sapien
catatacactgcaagatccctaggc

SEQ ID NO: 807546 - DNA, 25 bp, Homo sapien
gtaaaatctgtaggaatgcacgcca

SEQ ID NO: 807547 - DNA, 25 bp, Homo sapien
tgagtttacctttccagagcgcaaa

SEQ ID NO: 807548 - DNA, 25 bp, Homo sapien
aataagacgtgctatgtcactgaga

SEQ ID NO: 807549 - DNA, 25 bp, Homo sapien
cgcctgctttctgcttaggagccaa

SEQ ID NO: 807550 - DNA, 25 bp, Homo sapien
gactccccgtggtgagtcagaacct

SEQ ID NO: 807551 - DNA, 25 bp, Homo sapien
caggaaggacggttctcctttctgc

SEQ ID NO: 807552 - DNA, 25 bp, Homo sapien
ccgggcagcgtgaggcaagtcactt

SEQ ID NO: 807553 - DNA, 25 bp, Homo sapien
gatctcgggagtattccacaggaag

SEQ ID NO: 807554 - DNA, 25 bp, Homo sapien
tggacacatgtacagtgcctttttt

SEQ ID NO: 807555 - DNA, 25 bp, Homo sapien
gctttccacggaaaccgcagaacag

SEQ ID NO: 807556 - DNA, 25 bp, Homo sapien
gcagaacagccggtcatctatatat

SEQ ID NO: 807557 - DNA, 25 bp, Homo sapien
gaattagccacttaacacaactggt

SEQ ID NO: 807558 - DNA, 25 bp, Homo sapien
ccattggaaaaatcgatcggaaatt

SEQ ID NO: 807559 - DNA, 25 bp, Homo sapien
tcctgagaccgcacagtgcctccag

SEQ ID NO: 807560 - DNA, 25 bp, Homo sapien
tcattcggcttctgctcctgagacc

SEQ ID NO: 807561 - DNA, 25 bp, Homo sapien
gaatgaggctctgatattgcataat

SEQ ID NO: 807562 - DNA, 25 bp, Homo sapien
tattgcataattcattcggcttctg

SEQ ID NO: 807563 - DNA, 25 bp, Homo sapien
tgtgactgtcactcgggcttcagtc

SEQ ID NO: 807564 - DNA, 25 bp, Homo sapien
gtgaccccagcgtgatcgggaacag

SEQ ID NO: 807565 - DNA, 25 bp, Homo sapien
cctgtgactgtcactcgggcttcag

SEQ ID NO: 807566 - DNA, 25 bp, Homo sapien
accccagcgtgatcgggaacagcct

SEQ ID NO: 807567 - DNA, 25 bp, Homo sapien
actcatccccgtgcccaacacggat

SEQ ID NO: 807568 - DNA, 25 bp, Homo sapien
aacacggatctgtgaaccaggtcag

SEQ ID NO: 807569 - DNA, 25 bp, Homo sapien
cacggatctgtgaaccaggtcagga

SEQ ID NO: 807570 - DNA, 25 bp, Homo sapien
ccaacacggatctgtgaaccaggtc

SEQ ID NO: 807571 - DNA, 25 bp, Homo sapien
tcttgacagacagccattcactggc

SEQ ID NO: 807572 - DNA, 25 bp, Homo sapien
tgtcttcttgacagacagccattca

SEQ ID NO: 807573 - DNA, 25 bp, Homo sapien
tcttcttgacagacagccattcact

SEQ ID NO: 807574 - DNA, 25 bp, Homo sapien
ccctgtcttcttgacagacagccat

SEQ ID NO: 807575 - DNA, 25 bp, Homo sapien
gcagtctcatgcgagccagggcaag

SEQ ID NO: 807576 - DNA, 25 bp, Homo sapien
tcgtgccctgatggcgatgggccca

SEQ ID NO: 807577 - DNA, 25 bp, Homo sapien
gggcaagattactcccagcaaaggc

SEQ ID NO: 807578 - DNA, 25 bp, Homo sapien
gacagggaggtctcccaccaataac

SEQ ID NO: 807579 - DNA, 25 bp, Homo sapien
gtaaatgtaatcttggaagcgcagt

SEQ ID NO: 807580 - DNA, 25 bp, Homo sapien
tgcccaggggttaataccacaactg

SEQ ID NO: 807581 - DNA, 25 bp, Homo sapien
cagtaatgaattaaatggcatgtgg

SEQ ID NO: 807582 - DNA, 25 bp, Homo sapien
gaattaatcctgcctgacaaactgt

SEQ ID NO: 807583 - DNA, 25 bp, Homo sapien
ggggtcttacaatgcttcccaagct

SEQ ID NO: 807584 - DNA, 25 bp, Homo sapien
aaaatctgtatgtttgttactcatt

SEQ ID NO: 807585 - DNA, 25 bp, Homo sapien
ggacttataggtgtgcactagcaag

SEQ ID NO: 807586 - DNA, 25 bp, Homo sapien
tataggtgtgcactagcaagcccag

SEQ ID NO: 807587 - DNA, 25 bp, Homo sapien
tctgccgaacataggaaggaaggga

SEQ ID NO: 807588 - DNA, 25 bp, Homo sapien
tctgagatgccttgccgatgactcc

SEQ ID NO: 807589 - DNA, 25 bp, Homo sapien
tctttctggcaatgtacacggtggg

SEQ ID NO: 807590 - DNA, 25 bp, Homo sapien
gcttggcaaccaggaaaaccctctg

SEQ ID NO: 807591 - DNA, 25 bp, Homo sapien
ggtttgccatgttatccgggctggt

SEQ ID NO: 807592 - DNA, 25 bp, Homo sapien
agatgggggtttgccatgttatccg

SEQ ID NO: 807593 - DNA, 25 bp, Homo sapien
atgggggtttgccatgttatccggg

SEQ ID NO: 807594 - DNA, 25 bp, Homo sapien
gggtttgccatgttatccgggctgg

SEQ ID NO: 807595 - DNA, 25 bp, Homo sapien
cacatagagatgcaggcttaggtcc

SEQ ID NO: 807596 - DNA, 25 bp, Homo sapien
tgcgtacccacaacaagatgtgcag

SEQ ID NO: 807597 - DNA, 25 bp, Homo sapien
tgcgcctgtcccaaatcacaagttt

SEQ ID NO: 807598 - DNA, 25 bp, Homo sapien
gaaaatacatagctgctgcgtaccc

SEQ ID NO: 807599 - DNA, 25 bp, Homo sapien
ggcccagcctggtcgtaaaagcaat

SEQ ID NO: 807600 - DNA, 25 bp, Homo sapien
gacagcctgggttcattgctatggc

SEQ ID NO: 807601 - DNA, 25 bp, Homo sapien
aaagcaattgtccaggttctgtctt

SEQ ID NO: 807602 - DNA, 25 bp, Homo sapien
tctgttttgaaagtacttccttgag

SEQ ID NO: 807603 - DNA, 25 bp, Homo sapien
agaaggtggccaactggaggtgagg

SEQ ID NO: 807604 - DNA, 25 bp, Homo sapien
gtgacacaggttgggggactgtaca

SEQ ID NO: 807605 - DNA, 25 bp, Homo sapien
aaggtggccaactggaggtgaggag

SEQ ID NO: 807606 - DNA, 25 bp, Homo sapien
ggcaggtgaggatggtgacacaggt

SEQ ID NO: 807607 - DNA, 25 bp, Homo sapien
ttgccctttcaaggtccgtcatgat

SEQ ID NO: 807608 - DNA, 25 bp, Homo sapien
tggtttgccctttcaaggtccgtca

SEQ ID NO: 807609 - DNA, 25 bp, Homo sapien
gccctttcaaggtccgtcatgatca

SEQ ID NO: 807610 - DNA, 25 bp, Homo sapien
tgccctttcaaggtccgtcatgatc

SEQ ID NO: 807611 - DNA, 25 bp, Homo sapien
ggtgtcatattcctcactgggtgat

SEQ ID NO: 807612 - DNA, 25 bp, Homo sapien
gctccctgggctggtgtcatattcc

SEQ ID NO: 807613 - DNA, 25 bp, Homo sapien
gggctggtgtcatattcctcactgg

SEQ ID NO: 807614 - DNA, 25 bp, Homo sapien
catattcctcactgggtgatttggg

SEQ ID NO: 807615 - DNA, 25 bp, Homo sapien
aattcttcctgttagagtcaagcca

SEQ ID NO: 807616 - DNA, 25 bp, Homo sapien
cagcgacaccgtgtctcaggaattc

SEQ ID NO: 807617 - DNA, 25 bp, Homo sapien
cagagatggtttccaccgtgagacc

SEQ ID NO: 807618 - DNA, 25 bp, Homo sapien
tagcaagcagccagcgacaccgtgt

SEQ ID NO: 807619 - DNA, 25 bp, Homo sapien
gaaattactcttagctggcatcagg

SEQ ID NO: 807620 - DNA, 25 bp, Homo sapien
gcttgcatatcagtggtaacccaga

SEQ ID NO: 807621 - DNA, 25 bp, Homo sapien
tgacactggttttgaggctctggcg

SEQ ID NO: 807622 - DNA, 25 bp, Homo sapien
tggaaccccagatctagcggtggcg

SEQ ID NO: 807623 - DNA, 25 bp, Homo sapien
gccacaaccgactcatttttatatt

SEQ ID NO: 807624 - DNA, 25 bp, Homo sapien
aatgccacaaccgactcatttttat

SEQ ID NO: 807625 - DNA, 25 bp, Homo sapien
tacagacacacaatgccacaaccga

SEQ ID NO: 807626 - DNA, 25 bp, Homo sapien
acacaatgccacaaccgactcattt

SEQ ID NO: 807627 - DNA, 25 bp, Homo sapien
agagctgttcccttaaggtctccgc

SEQ ID NO: 807628 - DNA, 25 bp, Homo sapien
ggccgatgagagctgttcccttaag

SEQ ID NO: 807629 - DNA, 25 bp, Homo sapien
ttaaggtctccgcctctctctgagc

SEQ ID NO: 807630 - DNA, 25 bp, Homo sapien
agtgattggccgatgagagctgttc

SEQ ID NO: 807631 - DNA, 25 bp, Homo sapien
ttttgtgtgcaaagagggtactcct

SEQ ID NO: 807632 - DNA, 25 bp, Homo sapien
gtgtctatgacagccgaatcctggg

SEQ ID NO: 807633 - DNA, 25 bp, Homo sapien
tacaaggcgcaagtcaaagtgaatg

SEQ ID NO: 807634 - DNA, 25 bp, Homo sapien
gaaagcaccgctctgaataatgccg

SEQ ID NO: 807635 - DNA, 25 bp, Homo sapien
gctgtgagatctggctggccgaatt

SEQ ID NO: 807636 - DNA, 25 bp, Homo sapien
ccaactcaacttctaggctggagcg

SEQ ID NO: 807637 - DNA, 25 bp, Homo sapien
ctcccgctccttggcggccaactca

SEQ ID NO: 807638 - DNA, 25 bp, Homo sapien
caacttctaggctggagcgggtcag

SEQ ID NO: 807639 - DNA, 25 bp, Homo sapien
cgatcagaaactccttgttgggttc

SEQ ID NO: 807640 - DNA, 25 bp, Homo sapien
gttcttcgatcagaaactccttgtt

SEQ ID NO: 807641 - DNA, 25 bp, Homo sapien
aaagcctggtttcgaagactctgac

SEQ ID NO: 807642 - DNA, 25 bp, Homo sapien
cagaaagcctggtttcgaagactct

SEQ ID NO: 807643 - DNA, 25 bp, Homo sapien
aacagagaagaatttgatcagtggc

SEQ ID NO: 807644 - DNA, 25 bp, Homo sapien
cagagaagaatttgatcagtggcca

SEQ ID NO: 807645 - DNA, 25 bp, Homo sapien
aaaacagagaagaatttgatcagtg

SEQ ID NO: 807646 - DNA, 25 bp, Homo sapien
tgaaaacagagaagaatttgatcag

SEQ ID NO: 807647 - DNA, 25 bp, Homo sapien
tcttcacctcttcatagtcagcctg

SEQ ID NO: 807648 - DNA, 25 bp, Homo sapien
tttcttcacctcttcatagtcagcc

SEQ ID NO: 807649 - DNA, 25 bp, Homo sapien
cttcatagtcagcctggcctttgag

SEQ ID NO: 807650 - DNA, 25 bp, Homo sapien
catagtcagcctggcctttgagttt

SEQ ID NO: 807651 - DNA, 25 bp, Homo sapien
agagcacaacagaggggttatttta

SEQ ID NO: 807652 - DNA, 25 bp, Homo sapien
caagagcacaacagaggggttattt

SEQ ID NO: 807653 - DNA, 25 bp, Homo sapien
aagagcacaacagaggggttatttt

SEQ ID NO: 807654 - DNA, 25 bp, Homo sapien
ggtgcaaactccatggacttcagaa

SEQ ID NO: 807655 - DNA, 25 bp, Homo sapien
tgtgtcccagcgccctcggacggtg

SEQ ID NO: 807656 - DNA, 25 bp, Homo sapien
gccctcggacggtgcaaactccatg

SEQ ID NO: 807657 - DNA, 25 bp, Homo sapien
tcggacggtgcaaactccatggact

SEQ ID NO: 807658 - DNA, 25 bp, Homo sapien
ggtctcgtagaaacagtggatcatg

SEQ ID NO: 807659 - DNA, 25 bp, Homo sapien
catcggctgtaagtgagaggtctcg

SEQ ID NO: 807660 - DNA, 25 bp, Homo sapien
ctgaccattgaggtgagacacgtac

SEQ ID NO: 807661 - DNA, 25 bp, Homo sapien
atatgccggagggaccagtggtaac

SEQ ID NO: 807662 - DNA, 25 bp, Homo sapien
cagcgcggcgttctcggactgcagc

SEQ ID NO: 807663 - DNA, 25 bp, Homo sapien
cgctcaggtcgctgttggagatgcg

SEQ ID NO: 807664 - DNA, 25 bp, Homo sapien
ctgcagcgagcggttcttctccagc

SEQ ID NO: 807665 - DNA, 25 bp, Homo sapien
atgcgcagcgcggcgttctcggact

SEQ ID NO: 807666 - DNA, 25 bp, Homo sapien
gagacacctgtacgcgttttaccag

SEQ ID NO: 807667 - DNA, 25 bp, Homo sapien
aatggattcgctcgcacctcttgct

SEQ ID NO: 807668 - DNA, 25 bp, Homo sapien
gcaataccattagagcccgagacac

SEQ ID NO: 807669 - DNA, 25 bp, Homo sapien
tgaggcgatgcaccgtaccgagccc

SEQ ID NO: 807670 - DNA, 25 bp, Homo sapien
cccgggcgccgactttcaggctggt

SEQ ID NO: 807671 - DNA, 25 bp, Homo sapien
cgggcgccgactttcaggctggtct

SEQ ID NO: 807672 - DNA, 25 bp, Homo sapien
atcccgggcgccgactttcaggctg

SEQ ID NO: 807673 - DNA, 25 bp, Homo sapien
aaagatcccgggcgccgactttcag

SEQ ID NO: 807674 - DNA, 25 bp, Homo sapien
cccgctggtgagaactggtgtgtac

SEQ ID NO: 807675 - DNA, 25 bp, Homo sapien
tgccagggatgagctgaaaaagtct

SEQ ID NO: 807676 - DNA, 25 bp, Homo sapien
gggatgagctgaaaaagtcttgact

SEQ ID NO: 807677 - DNA, 25 bp, Homo sapien
aagtcttgacttaaccccgctggtg

SEQ ID NO: 807678 - DNA, 25 bp, Homo sapien
agctgccgctggagaagagagttta

SEQ ID NO: 807679 - DNA, 25 bp, Homo sapien
ctgttgaaaaaatcatgcttgtgct

SEQ ID NO: 807680 - DNA, 25 bp, Homo sapien
ccgctggagaagagagtttagtgca

SEQ ID NO: 807681 - DNA, 25 bp, Homo sapien
gaaggactgcattagctgccgctgg

SEQ ID NO: 807682 - DNA, 25 bp, Homo sapien
taatgtccgaaaatacgttgtccga

SEQ ID NO: 807683 - DNA, 25 bp, Homo sapien
gaatctcgctcacggacccttgaga

SEQ ID NO: 807684 - DNA, 25 bp, Homo sapien
ggctccttgccacgaacagtcagtt

SEQ ID NO: 807685 - DNA, 25 bp, Homo sapien
tctgccttggatgctacggagggcc

SEQ ID NO: 807686 - DNA, 25 bp, Homo sapien
cttcagacccatttcttcgtttcgg

SEQ ID NO: 807687 - DNA, 25 bp, Homo sapien
catttcttcgtttcggtacttcctg

SEQ ID NO: 807688 - DNA, 25 bp, Homo sapien
tcagacccatttcttcgtttcggta

SEQ ID NO: 807689 - DNA, 25 bp, Homo sapien
cagttttctgcacttggagctccct

SEQ ID NO: 807690 - DNA, 25 bp, Homo sapien
cttcatcagagccagtctccgaggc

SEQ ID NO: 807691 - DNA, 25 bp, Homo sapien
gttttctgcacttggagctccctct

SEQ ID NO: 807692 - DNA, 25 bp, Homo sapien
gctcggatccgggtggtgatgttac

SEQ ID NO: 807693 - DNA, 25 bp, Homo sapien
taacctgccgggtgagctcgatggt

SEQ ID NO: 807694 - DNA, 25 bp, Homo sapien
tccagtactctgacgacgagggtcc

SEQ ID NO: 807695 - DNA, 25 bp, Homo sapien
tgttctgtggtgtctcgctgcggct

SEQ ID NO: 807696 - DNA, 25 bp, Homo sapien
gatggcgtcatcagagttcccgctg

SEQ ID NO: 807697 - DNA, 25 bp, Homo sapien
tgctggccctggacgggtagaacac

SEQ ID NO: 807698 - DNA, 25 bp, Homo sapien
ttctcggcctttctgcgtcagcttg

SEQ ID NO: 807699 - DNA, 25 bp, Homo sapien
tagctcgccgttcagccagagctgc

SEQ ID NO: 807700 - DNA, 25 bp, Homo sapien
catccggatgaagggttctcggcct

SEQ ID NO: 807701 - DNA, 25 bp, Homo sapien
cctggagcgatgtcacggagtggag

SEQ ID NO: 807702 - DNA, 25 bp, Homo sapien
ggtcctggagcgatgtcacggagtg

SEQ ID NO: 807703 - DNA, 25 bp, Homo sapien
gcgggtcctggagcgatgtcacgga

SEQ ID NO: 807704 - DNA, 25 bp, Homo sapien
ctgcagcgggtcctggagcgatgtc

SEQ ID NO: 807705 - DNA, 25 bp, Homo sapien
acaagtgtggttggagacctcgagg

SEQ ID NO: 807706 - DNA, 25 bp, Homo sapien
cctcggtgggctgtgtccaggcacc

SEQ ID NO: 807707 - DNA, 25 bp, Homo sapien
ggctgtgtccaggcaccatgtggca

SEQ ID NO: 807708 - DNA, 25 bp, Homo sapien
caccatgtggcaaagagaacaagtg

SEQ ID NO: 807709 - DNA, 25 bp, Homo sapien
tgttccgtcacatagaagttgcttc

SEQ ID NO: 807710 - DNA, 25 bp, Homo sapien
tcttcaaggatttgttccgtcacat

SEQ ID NO: 807711 - DNA, 25 bp, Homo sapien
cttctggcatcgatcattagcaggc

SEQ ID NO: 807712 - DNA, 25 bp, Homo sapien
cgtcacatagaagttgcttctggca

SEQ ID NO: 807713 - DNA, 25 bp, Homo sapien
cacaaaaaccactggcaacttctac

SEQ ID NO: 807714 - DNA, 25 bp, Homo sapien
tcacaaaaaccactggcaacttcta

SEQ ID NO: 807715 - DNA, 25 bp, Homo sapien
acaaaaaccactggcaacttctaca

SEQ ID NO: 807716 - DNA, 25 bp, Homo sapien
catgggaagaacagggaatcggaat

SEQ ID NO: 807717 - DNA, 25 bp, Homo sapien
cacggcgagctacttgaggcaagca

SEQ ID NO: 807718 - DNA, 25 bp, Homo sapien
cagacattggttctaccacggcgag

SEQ ID NO: 807719 - DNA, 25 bp, Homo sapien
gcaatcttaggacagaggctcgctc

SEQ ID NO: 807720 - DNA, 25 bp, Homo sapien
gatgaccctggttataactacaccc

SEQ ID NO: 807721 - DNA, 25 bp, Homo sapien
gcctggaatgactgacagacaaaag

SEQ ID NO: 807722 - DNA, 25 bp, Homo sapien
tgcagaatcagtccccaaggaccac

SEQ ID NO: 807723 - DNA, 25 bp, Homo sapien
cactctgagcaaacaagccttaatg

SEQ ID NO: 807724 - DNA, 25 bp, Homo sapien
ccagccgaaaagctgattctttaat

SEQ ID NO: 807725 - DNA, 25 bp, Homo sapien
cccagccgaaaagctgattctttaa

SEQ ID NO: 807726 - DNA, 25 bp, Homo sapien
tcttgtactgaatgcccaatgtgct

SEQ ID NO: 807727 - DNA, 25 bp, Homo sapien
tggggcctgggtgtcggcatggctc

SEQ ID NO: 807728 - DNA, 25 bp, Homo sapien
ctccggggggccgtgacagctgaaa

SEQ ID NO: 807729 - DNA, 25 bp, Homo sapien
gggcaggtccctcgggccagtccgc

SEQ ID NO: 807730 - DNA, 25 bp, Homo sapien
ggtccctcgggccagtccgcatggg

SEQ ID NO: 807731 - DNA, 25 bp, Homo sapien
tagtgaactcagtctggccagattg

SEQ ID NO: 807732 - DNA, 25 bp, Homo sapien
ccagattgctgaagggacactgggt

SEQ ID NO: 807733 - DNA, 25 bp, Homo sapien
caggctcgccttgttccggcttttc

SEQ ID NO: 807734 - DNA, 25 bp, Homo sapien
taaccttattaccaagccagctgtg

SEQ ID NO: 807735 - DNA, 25 bp, Homo sapien
tctaactagaggagacaccatcgtg

SEQ ID NO: 807736 - DNA, 25 bp, Homo sapien
gaggccgaagtcactaagcaggtca

SEQ ID NO: 807737 - DNA, 25 bp, Homo sapien
tctaagttacttgaagatgggacct

SEQ ID NO: 807738 - DNA, 25 bp, Homo sapien
tgccaagcgagtgagaagttgctct

SEQ ID NO: 807739 - DNA, 25 bp, Homo sapien
tgagcagtcaggataaagtcgtttc

SEQ ID NO: 807740 - DNA, 25 bp, Homo sapien
gccataaggcgaactgtgcattcag

SEQ ID NO: 807741 - DNA, 25 bp, Homo sapien
aaatgacagggtactccgtgacatt

SEQ ID NO: 807742 - DNA, 25 bp, Homo sapien
gacatttttactgctggcatgccat

SEQ ID NO: 807743 - DNA, 25 bp, Homo sapien
gggacttgctggttctgcctgcttc

SEQ ID NO: 807744 - DNA, 25 bp, Homo sapien
tgcctgcttctgaaaaccgagctct

SEQ ID NO: 807745 - DNA, 25 bp, Homo sapien
cgagctctttgctggtataagccat

SEQ ID NO: 807746 - DNA, 25 bp, Homo sapien
tccaaccttgggacttgctggttct

SEQ ID NO: 807747 - DNA, 25 bp, Homo sapien
cagctggcggaggtctttggagtgc

SEQ ID NO: 807748 - DNA, 25 bp, Homo sapien
agctggcggaggtctttggagtgct

SEQ ID NO: 807749 - DNA, 25 bp, Homo sapien
ggctgcagctggcggaggtctttgg

SEQ ID NO: 807750 - DNA, 25 bp, Homo sapien
tgcagctggcggaggtctttggagt

SEQ ID NO: 807751 - DNA, 25 bp, Homo sapien
ccgcttggttatgccgtaggtgtcc

SEQ ID NO: 807752 - DNA, 25 bp, Homo sapien
cttggatgctgagggccgagtgtcc

SEQ ID NO: 807753 - DNA, 25 bp, Homo sapien
ggtcaggctcttcaccgactcactg

SEQ ID NO: 807754 - DNA, 25 bp, Homo sapien
gggacatggctactaattcttggat

SEQ ID NO: 807755 - DNA, 25 bp, Homo sapien
gacgaagggctctcgtcctttcaga

SEQ ID NO: 807756 - DNA, 25 bp, Homo sapien
tcctttcagactgagcttatgccag

SEQ ID NO: 807757 - DNA, 25 bp, Homo sapien
agagacagagccttgggtgagccct

SEQ ID NO: 807758 - DNA, 25 bp, Homo sapien
agatggtctccccaaataagcgctg

SEQ ID NO: 807759 - DNA, 25 bp, Homo sapien
agtctccacaacttggtggtagtgg

SEQ ID NO: 807760 - DNA, 25 bp, Homo sapien
cactaccagtctccacaacttggtg

SEQ ID NO: 807761 - DNA, 25 bp, Homo sapien
taccagtctccacaacttggtggta

SEQ ID NO: 807762 - DNA, 25 bp, Homo sapien
ccagtctccacaacttggtggtagt

SEQ ID NO: 807763 - DNA, 25 bp, Homo sapien
tgactgagctgtgccgccgcttcat

SEQ ID NO: 807764 - DNA, 25 bp, Homo sapien
cagttgatgacggtgctggttttca

SEQ ID NO: 807765 - DNA, 25 bp, Homo sapien
ggcttttgctgatacgctcgtttca

SEQ ID NO: 807766 - DNA, 25 bp, Homo sapien
cctggctgtactcggtgccgacaga

SEQ ID NO: 807767 - DNA, 25 bp, Homo sapien
caaggctcgcagaatgccgtggctg

SEQ ID NO: 807768 - DNA, 25 bp, Homo sapien
gaatctgagttcctaactgggtgga

SEQ ID NO: 807769 - DNA, 25 bp, Homo sapien
ccgtggctgcgagggttcagaatct

SEQ ID NO: 807770 - DNA, 25 bp, Homo sapien
tttagggaagtcacacaaggctcgc

SEQ ID NO: 807771 - DNA, 25 bp, Homo sapien
cagctgtcgccctccgagctgggcg

SEQ ID NO: 807772 - DNA, 25 bp, Homo sapien
caatgaacagttctctgcggatccg

SEQ ID NO: 807773 - DNA, 25 bp, Homo sapien
gggtgagtcgctggcgcccgcctgg

SEQ ID NO: 807774 - DNA, 25 bp, Homo sapien
tgactcccggcctgaatttcctcaa

SEQ ID NO: 807775 - DNA, 25 bp, Homo sapien
ctcccgctcggcctctccctgagac

SEQ ID NO: 807776 - DNA, 25 bp, Homo sapien
ctcctcccgctcggcctctccctga

SEQ ID NO: 807777 - DNA, 25 bp, Homo sapien
cctcccgctcggcctctccctgaga

SEQ ID NO: 807778 - DNA, 25 bp, Homo sapien
tcctcccgctcggcctctccctgag

SEQ ID NO: 807779 - DNA, 25 bp, Homo sapien
gggcctccctcgtggtcgtcgtcgc

SEQ ID NO: 807780 - DNA, 25 bp, Homo sapien
ggcctccctcgtggtcgtcgtcgcg

SEQ ID NO: 807781 - DNA, 25 bp, Homo sapien
tcgtcgtcgcgggcgtcgtccgggc

SEQ ID NO: 807782 - DNA, 25 bp, Homo sapien
gctgaggtagcggcgtcctcggggg

SEQ ID NO: 807783 - DNA, 25 bp, Homo sapien
ggtggcggtcgcggaggcggggctg

SEQ ID NO: 807784 - DNA, 25 bp, Homo sapien
cggtggcggtcgcggaggcggggct

SEQ ID NO: 807785 - DNA, 25 bp, Homo sapien
tgaggtagcggcgtcctcgggggcc

SEQ ID NO: 807786 - DNA, 25 bp, Homo sapien
tgttgctgggcggcggcgcggagct

SEQ ID NO: 807787 - DNA, 25 bp, Homo sapien
tgggcggcggcgcggagctcggggc

SEQ ID NO: 807788 - DNA, 25 bp, Homo sapien
gcggcggcgcggagctcggggccgc

SEQ ID NO: 807789 - DNA, 25 bp, Homo sapien
gcggcgcggagctcggggccgcggg

SEQ ID NO: 807790 - DNA, 25 bp, Homo sapien
gggttgtcgcgcgagtcccgggcgc

SEQ ID NO: 807791 - DNA, 25 bp, Homo sapien
gatgctgttcaagttcgcggccttc

SEQ ID NO: 807792 - DNA, 25 bp, Homo sapien
ccattcgataggttcctcccggctg

SEQ ID NO: 807793 - DNA, 25 bp, Homo sapien
tcgataggttcctcccggctggcgg

SEQ ID NO: 807794 - DNA, 25 bp, Homo sapien
tatatgcaccttggcctatggcgat

SEQ ID NO: 807795 - DNA, 25 bp, Homo sapien
cacttcagggtacaaaaaagctcga

SEQ ID NO: 807796 - DNA, 25 bp, Homo sapien
gaacaggaggacacaaggcaaagct

SEQ ID NO: 807797 - DNA, 25 bp, Homo sapien
cttgaaaacacgacatagattgggc

SEQ ID NO: 807798 - DNA, 25 bp, Homo sapien
caacagggtcatcagtgcttgcggt

SEQ ID NO: 807799 - DNA, 25 bp, Homo sapien
gccggcagtctatccctctaaagaa

SEQ ID NO: 807800 - DNA, 25 bp, Homo sapien
gggagggctcagttcatcaggtatc

SEQ ID NO: 807801 - DNA, 25 bp, Homo sapien
aaattatacccaatactgccggcag

SEQ ID NO: 807802 - DNA, 25 bp, Homo sapien
gattaacccttagactccaactgag

SEQ ID NO: 807803 - DNA, 25 bp, Homo sapien
gaatcgagctagatgttgacccgtg

SEQ ID NO: 807804 - DNA, 25 bp, Homo sapien
tactgtttggccactagaatggaca

SEQ ID NO: 807805 - DNA, 25 bp, Homo sapien
tgccatctcggctatcacaagggag

SEQ ID NO: 807806 - DNA, 25 bp, Homo sapien
gaagaatccaattgagctaagctcc

SEQ ID NO: 807807 - DNA, 25 bp, Homo sapien
gatgcctcctaagatcgtctagaag

SEQ ID NO: 807808 - DNA, 25 bp, Homo sapien
gaggcccacagcgatctctttgcag

SEQ ID NO: 807809 - DNA, 25 bp, Homo sapien
cagtccaaccttagtcgggaaggca

SEQ ID NO: 807810 - DNA, 25 bp, Homo sapien
caaaggagtgttcgcagtgacgcta

SEQ ID NO: 807811 - DNA, 25 bp, Homo sapien
cgtgttgcgctcacaaaaggagaga

SEQ ID NO: 807812 - DNA, 25 bp, Homo sapien
gaaacatccgtgtgccttgcagagc

SEQ ID NO: 807813 - DNA, 25 bp, Homo sapien
gatgttcgtgtctgctgcgctggca

SEQ ID NO: 807814 - DNA, 25 bp, Homo sapien
ggatgggaactggcatattcttttg

SEQ ID NO: 807815 - DNA, 25 bp, Homo sapien
tggatgggaactggcatattctttt

SEQ ID NO: 807816 - DNA, 25 bp, Homo sapien
cacggatggcatggacacggttatc

SEQ ID NO: 807817 - DNA, 25 bp, Homo sapien
tgtttcaccagcagaagtcccaatg

SEQ ID NO: 807818 - DNA, 25 bp, Homo sapien
aagaaatcactctctcgcttggagg

SEQ ID NO: 807819 - DNA, 25 bp, Homo sapien
taatgtcgtcgatgcccaggtgaaa

SEQ ID NO: 807820 - DNA, 25 bp, Homo sapien
cacacccaaccttcctccacgttga

SEQ ID NO: 807821 - DNA, 25 bp, Homo sapien
acctgattggcaacaactgggtgtc

SEQ ID NO: 807822 - DNA, 25 bp, Homo sapien
cttcacacctgattggcaacaactg

SEQ ID NO: 807823 - DNA, 25 bp, Homo sapien
tgattggcaacaactgggtgtcctg

SEQ ID NO: 807824 - DNA, 25 bp, Homo sapien
gagatgcccgttttctcaagggaag

SEQ ID NO: 807825 - DNA, 25 bp, Homo sapien
tgctgagaacaaacatcgtatggct

SEQ ID NO: 807826 - DNA, 25 bp, Homo sapien
aagattccgccaccctgtgagtgcg

SEQ ID NO: 807827 - DNA, 25 bp, Homo sapien
tatagggaccgttgtacagtgctga

SEQ ID NO: 807828 - DNA, 25 bp, Homo sapien
cgtagtcctggtcgcccaagtgcca

SEQ ID NO: 807829 - DNA, 25 bp, Homo sapien
ctgcaggccacacggcagaggagac

SEQ ID NO: 807830 - DNA, 25 bp, Homo sapien
tggtcgcccaagtgccatcgattgg

SEQ ID NO: 807831 - DNA, 25 bp, Homo sapien
gagactggccgtagtcctggtcgcc

SEQ ID NO: 807832 - DNA, 25 bp, Homo sapien
agctggcatgttaagaccgtggaga

SEQ ID NO: 807833 - DNA, 25 bp, Homo sapien
gtgatgagctgaagtagacaccagc

SEQ ID NO: 807834 - DNA, 25 bp, Homo sapien
agctgaagtagacaccagcaagctg

SEQ ID NO: 807835 - DNA, 25 bp, Homo sapien
catgttaagaccgtggagaggagca

SEQ ID NO: 807836 - DNA, 25 bp, Homo sapien
cttattttttcaactggagacaggg

SEQ ID NO: 807837 - DNA, 25 bp, Homo sapien
gagccacctacctcttattttttca

SEQ ID NO: 807838 - DNA, 25 bp, Homo sapien
ctcttattttttcaactggagacag

SEQ ID NO: 807839 - DNA, 25 bp, Homo sapien
catgagccacctacctcttattttt

SEQ ID NO: 807840 - DNA, 25 bp, Homo sapien
gtagtcccagctacttgggaggctg

SEQ ID NO: 807841 - DNA, 25 bp, Homo sapien
ttagctgggcatggcagtgtgcacc

SEQ ID NO: 807842 - DNA, 25 bp, Homo sapien
ctgtagtcccagctacttgggaggc

SEQ ID NO: 807843 - DNA, 25 bp, Homo sapien
acctgtagtcccagctacttgggag

SEQ ID NO: 807844 - DNA, 25 bp, Homo sapien
catcgggccgctggatggactgaat

SEQ ID NO: 807845 - DNA, 25 bp, Homo sapien
agtgatacggacttgcagctctgca

SEQ ID NO: 807846 - DNA, 25 bp, Homo sapien
aggcgggcgatcagctctctctgct

SEQ ID NO: 807847 - DNA, 25 bp, Homo sapien
gactgaatgatgctcaggtcctgct

SEQ ID NO: 807848 - DNA, 25 bp, Homo sapien
atgaggaggtgcctccgcacaatgg

SEQ ID NO: 807849 - DNA, 25 bp, Homo sapien
aagcgatgaggaggtgcctccgcac

SEQ ID NO: 807850 - DNA, 25 bp, Homo sapien
cgatgaggaggtgcctccgcacaat

SEQ ID NO: 807851 - DNA, 25 bp, Homo sapien
tgacaggaagcgatgaggaggtgcc

SEQ ID NO: 807852 - DNA, 25 bp, Homo sapien
cttctccaggcggtgctcagcggca

SEQ ID NO: 807853 - DNA, 25 bp, Homo sapien
gcaccgctggctggtgctgcaggtc

SEQ ID NO: 807854 - DNA, 25 bp, Homo sapien
ctgggagggcaccgctggctggtgc

SEQ ID NO: 807855 - DNA, 25 bp, Homo sapien
ggagggcaccgctggctggtgctgc

SEQ ID NO: 807856 - DNA, 25 bp, Homo sapien
ggcaccgctggctggtgctgcaggt

SEQ ID NO: 807857 - DNA, 25 bp, Homo sapien
ctcctggttccgggcacggaagcgc

SEQ ID NO: 807858 - DNA, 25 bp, Homo sapien
gggcacggaagcgctccctctggct

SEQ ID NO: 807859 - DNA, 25 bp, Homo sapien
tggttccgggcacggaagcgctccc

SEQ ID NO: 807860 - DNA, 25 bp, Homo sapien
cctggttccgggcacggaagcgctc

SEQ ID NO: 807861 - DNA, 25 bp, Homo sapien
ccagggtagctctgcaggaacttga

SEQ ID NO: 807862 - DNA, 25 bp, Homo sapien
caaagagcttgatgttgtcggcgcg

SEQ ID NO: 807863 - DNA, 25 bp, Homo sapien
atgttgtcggcgcgcaggctgtcca

SEQ ID NO: 807864 - DNA, 25 bp, Homo sapien
agggtagctctgcaggaacttgatc

SEQ ID NO: 807865 - DNA, 25 bp, Homo sapien
tcctcgtactgggacgagtaccgca

SEQ ID NO: 807866 - DNA, 25 bp, Homo sapien
ggcgctcctcgtactgggacgagta

SEQ ID NO: 807867 - DNA, 25 bp, Homo sapien
tccaggcgctcctcgtactgggacg

SEQ ID NO: 807868 - DNA, 25 bp, Homo sapien
actgggacgagtaccgcagctccgt

SEQ ID NO: 807869 - DNA, 25 bp, Homo sapien
gccctgggcctacattgcactgaag

SEQ ID NO: 807870 - DNA, 25 bp, Homo sapien
tgggcctacattgcactgaagcggt

SEQ ID NO: 807871 - DNA, 25 bp, Homo sapien
gtagtcctcggcaggtgttcctgaa

SEQ ID NO: 807872 - DNA, 25 bp, Homo sapien
cggcaggtgttcctgaatgggccct

SEQ ID NO: 807873 - DNA, 25 bp, Homo sapien
actcaagctcaggtacttcctctgc

SEQ ID NO: 807874 - DNA, 25 bp, Homo sapien
gtggccttgtcccagggactcaagc

SEQ ID NO: 807875 - DNA, 25 bp, Homo sapien
ggactcaagctcaggtacttcctct

SEQ ID NO: 807876 - DNA, 25 bp, Homo sapien
tcaagctcaggtacttcctctgccg

SEQ ID NO: 807877 - DNA, 25 bp, Homo sapien
ggctgcctgggcttcacagaaaggg

SEQ ID NO: 807878 - DNA, 25 bp, Homo sapien
ctgcctgggcttcacagaaagggcc

SEQ ID NO: 807879 - DNA, 25 bp, Homo sapien
agggctgcctgggcttcacagaaag

SEQ ID NO: 807880 - DNA, 25 bp, Homo sapien
cagggctgcctgggcttcacagaaa

SEQ ID NO: 807881 - DNA, 25 bp, Homo sapien
gaagaagccgatggtgcgcgccatc

SEQ ID NO: 807882 - DNA, 25 bp, Homo sapien
aagaccaggcagtgcaggaacagtg

SEQ ID NO: 807883 - DNA, 25 bp, Homo sapien
gaacagtgtgtagaagaagccgatg

SEQ ID NO: 807884 - DNA, 25 bp, Homo sapien
atggtgcgcgccatcttgttggaga

SEQ ID NO: 807885 - DNA, 25 bp, Homo sapien
gacacggtgagctgcccgttcgcct

SEQ ID NO: 807886 - DNA, 25 bp, Homo sapien
ggtgagctgcccgttcgcctcaagg

SEQ ID NO: 807887 - DNA, 25 bp, Homo sapien
ggagacacggtgagctgcccgttcg

SEQ ID NO: 807888 - DNA, 25 bp, Homo sapien
gtgagctgcccgttcgcctcaaggc

SEQ ID NO: 807889 - DNA, 25 bp, Homo sapien
tccatgctctcgctccatgccagct

SEQ ID NO: 807890 - DNA, 25 bp, Homo sapien
gtccctctccatgctctcgctccat

SEQ ID NO: 807891 - DNA, 25 bp, Homo sapien
cacagtccctctccatgctctcgct

SEQ ID NO: 807892 - DNA, 25 bp, Homo sapien
tgctctcgctccatgccagcttgta

SEQ ID NO: 807893 - DNA, 25 bp, Homo sapien
tgtcattctcgtggaacttgtgcag

SEQ ID NO: 807894 - DNA, 25 bp, Homo sapien
cagccccgttgtcattctcgtggaa

SEQ ID NO: 807895 - DNA, 25 bp, Homo sapien
gaacttgtgcaggtggtcagcgaac

SEQ ID NO: 807896 - DNA, 25 bp, Homo sapien
tctcgtggaacttgtgcaggtggtc

SEQ ID NO: 807897 - DNA, 25 bp, Homo sapien
tcttcaggggagtctaagtgattag

SEQ ID NO: 807898 - DNA, 25 bp, Homo sapien
ctggacagcggataagggcagtttc

SEQ ID NO: 807899 - DNA, 25 bp, Homo sapien
tggacagcggataagggcagtttcc

SEQ ID NO: 807900 - DNA, 25 bp, Homo sapien
gtgattagatgcactgagcagtcgg

SEQ ID NO: 807901 - DNA, 25 bp, Homo sapien
gattggctaggagacgttcagaccc

SEQ ID NO: 807902 - DNA, 25 bp, Homo sapien
ggtggtcacccaattagcctcgcag

SEQ ID NO: 807903 - DNA, 25 bp, Homo sapien
tacaaatctaactcaggaaggcctg

SEQ ID NO: 807904 - DNA, 25 bp, Homo sapien
aatagaaactgttccgctggctggg

SEQ ID NO: 807905 - DNA, 25 bp, Homo sapien
gggccggcggcagagcgcctcggac

SEQ ID NO: 807906 - DNA, 25 bp, Homo sapien
agagcgcctcggacccacaaggagg

SEQ ID NO: 807907 - DNA, 25 bp, Homo sapien
ggcagagcgcctcggacccacaagg

SEQ ID NO: 807908 - DNA, 25 bp, Homo sapien
cgcctcggacccacaaggaggaact

SEQ ID NO: 807909 - DNA, 25 bp, Homo sapien
agagtagtgggctgaactccactgc

SEQ ID NO: 807910 - DNA, 25 bp, Homo sapien
ctggttcagagtagtgggctgaact

SEQ ID NO: 807911 - DNA, 25 bp, Homo sapien
gctgggatgatagcggccagagagc

SEQ ID NO: 807912 - DNA, 25 bp, Homo sapien
tccactgctgggatgatagcggcca

SEQ ID NO: 807913 - DNA, 25 bp, Homo sapien
gccctcgatcggagctgcacacagg

SEQ ID NO: 807914 - DNA, 25 bp, Homo sapien
agtgggccagccctcgatcggagct

SEQ ID NO: 807915 - DNA, 25 bp, Homo sapien
gcctgcacgcctggttgggaaccag

SEQ ID NO: 807916 - DNA, 25 bp, Homo sapien
taatgaaagcttcggcagtgggcca

SEQ ID NO: 807917 - DNA, 25 bp, Homo sapien
gcagttctgtcctggtctccttgcc

SEQ ID NO: 807918 - DNA, 25 bp, Homo sapien
agttctgtcctggtctccttgccag

SEQ ID NO: 807919 - DNA, 25 bp, Homo sapien
gtcctggtctccttgccagccggag

SEQ ID NO: 807920 - DNA, 25 bp, Homo sapien
gtctccttgccagccggagctgcct

SEQ ID NO: 807921 - DNA, 25 bp, Homo sapien
gcagaggtgtggaaagggccgctca

SEQ ID NO: 807922 - DNA, 25 bp, Homo sapien
gtggaaagggccgctcagagaagag

SEQ ID NO: 807923 - DNA, 25 bp, Homo sapien
gaaagggccgctcagagaagagagt

SEQ ID NO: 807924 - DNA, 25 bp, Homo sapien
agaggtgtggaaagggccgctcaga

SEQ ID NO: 807925 - DNA, 25 bp, Homo sapien
actcgcctgctttagggcagagacc

SEQ ID NO: 807926 - DNA, 25 bp, Homo sapien
gaaacagtcccgctgggctttgcgg

SEQ ID NO: 807927 - DNA, 25 bp, Homo sapien
gaggaaacagtcccgctgggctttg

SEQ ID NO: 807928 - DNA, 25 bp, Homo sapien
ggctccagaactcgcctgctttagg

SEQ ID NO: 807929 - DNA, 25 bp, Homo sapien
gggcctgatgccacccggagaggtg

SEQ ID NO: 807930 - DNA, 25 bp, Homo sapien
gatgggggcctgatgccacccggag

SEQ ID NO: 807931 - DNA, 25 bp, Homo sapien
cctgatgccacccggagaggtgtca

SEQ ID NO: 807932 - DNA, 25 bp, Homo sapien
gagaggtgtcagagatcatagaggg

SEQ ID NO: 807933 - DNA, 25 bp, Homo sapien
ccctcgttcaccgcctcgaaggctc

SEQ ID NO: 807934 - DNA, 25 bp, Homo sapien
ctcgttcaccgcctcgaaggctcct

SEQ ID NO: 807935 - DNA, 25 bp, Homo sapien
ctccctcgttcaccgcctcgaaggc

SEQ ID NO: 807936 - DNA, 25 bp, Homo sapien
ccctccctcgttcaccgcctcgaag

SEQ ID NO: 807937 - DNA, 25 bp, Homo sapien
caggcgcgcagctgcggccgagcgg

SEQ ID NO: 807938 - DNA, 25 bp, Homo sapien
atcaatggccgaggcccaagggcct

SEQ ID NO: 807939 - DNA, 25 bp, Homo sapien
gcgcagcccgcaggttcatcaatgg

SEQ ID NO: 807940 - DNA, 25 bp, Homo sapien
ctgaatggagggcacgaacccgccc

SEQ ID NO: 807941 - DNA, 25 bp, Homo sapien
ccaagggcctgaatggagggcacga

SEQ ID NO: 807942 - DNA, 25 bp, Homo sapien
ccatctgacacagagagtgcgcagg

SEQ ID NO: 807943 - DNA, 25 bp, Homo sapien
ccagttatagggtacttcaagtgtc

SEQ ID NO: 807944 - DNA, 25 bp, Homo sapien
tccagggaaggtcacgagcccaggc

SEQ ID NO: 807945 - DNA, 25 bp, Homo sapien
tgatccaggccagcacaagtgtctc

SEQ ID NO: 807946 - DNA, 25 bp, Homo sapien
tgtacggacattgaagaccttgctt

SEQ ID NO: 807947 - DNA, 25 bp, Homo sapien
tcacaatggcctgcacgcttctact

SEQ ID NO: 807948 - DNA, 25 bp, Homo sapien
ttttgaatccccaatccaggaatcc

SEQ ID NO: 807949 - DNA, 25 bp, Homo sapien
cattcccacgttctggaatctggct

SEQ ID NO: 807950 - DNA, 25 bp, Homo sapien
agaagagcgcgcagtgactttcagg

SEQ ID NO: 807951 - DNA, 25 bp, Homo sapien
cttcgggcgagaagagcgcgcagtg

SEQ ID NO: 807952 - DNA, 25 bp, Homo sapien
gcgagaagagcgcgcagtgactttc

SEQ ID NO: 807953 - DNA, 25 bp, Homo sapien
cgggcgagaagagcgcgcagtgact

SEQ ID NO: 807954 - DNA, 25 bp, Homo sapien
tccgtcccatcgcagccacctgcgg

SEQ ID NO: 807955 - DNA, 25 bp, Homo sapien
cttccgtcccatcgcagccacctgc

SEQ ID NO: 807956 - DNA, 25 bp, Homo sapien
gcttccgtcccatcgcagccacctg

SEQ ID NO: 807957 - DNA, 25 bp, Homo sapien
ggcttccgtcccatcgcagccacct

SEQ ID NO: 807958 - DNA, 25 bp, Homo sapien
cgggactgggaccggggcggctgcg

SEQ ID NO: 807959 - DNA, 25 bp, Homo sapien
cggggccagggccggcaccattcat

SEQ ID NO: 807960 - DNA, 25 bp, Homo sapien
gactgggaccggggcggctgcggcg

SEQ ID NO: 807961 - DNA, 25 bp, Homo sapien
cggcggggccagggccggcaccatt

SEQ ID NO: 807962 - DNA, 25 bp, Homo sapien
cgtgtcgtaagctgggttgtcccgc

SEQ ID NO: 807963 - DNA, 25 bp, Homo sapien
ctcgccgaagacgtccaggaagttg

SEQ ID NO: 807964 - DNA, 25 bp, Homo sapien
agttggcggcgaagtggcgggagaa

SEQ ID NO: 807965 - DNA, 25 bp, Homo sapien
tcccgcaggaaacggcagaacttgt

SEQ ID NO: 807966 - DNA, 25 bp, Homo sapien
gccgcgccccgagtcgtcggcccag

SEQ ID NO: 807967 - DNA, 25 bp, Homo sapien
cctctgcgctcacggccgcgccccg

SEQ ID NO: 807968 - DNA, 25 bp, Homo sapien
tcacggccgcgccccgagtcgtcgg

SEQ ID NO: 807969 - DNA, 25 bp, Homo sapien
gccccgagtcgtcggcccagccacc

SEQ ID NO: 807970 - DNA, 25 bp, Homo sapien
tttgggcggcacgaagaactccagg

SEQ ID NO: 807971 - DNA, 25 bp, Homo sapien
aactccaggcggaagcgttcctcgg

SEQ ID NO: 807972 - DNA, 25 bp, Homo sapien
cacaggctcatgttgcgcagcgaga

SEQ ID NO: 807973 - DNA, 25 bp, Homo sapien
agaagcccttgcgaacgcgggcctt

SEQ ID NO: 807974 - DNA, 25 bp, Homo sapien
tgacactactgccagggacctgatg

SEQ ID NO: 807975 - DNA, 25 bp, Homo sapien
tcagagggtgggcactattgttaca

SEQ ID NO: 807976 - DNA, 25 bp, Homo sapien
accttggagaagacgtgacactact

SEQ ID NO: 807977 - DNA, 25 bp, Homo sapien
agggtgggcactattgttacagcta

SEQ ID NO: 807978 - DNA, 25 bp, Homo sapien
tccccttctccgagggcagcagaca

SEQ ID NO: 807979 - DNA, 25 bp, Homo sapien
ttccccttctccgagggcagcagac

SEQ ID NO: 807980 - DNA, 25 bp, Homo sapien
tgggactaagcggtggagtggggcg

SEQ ID NO: 807981 - DNA, 25 bp, Homo sapien
tgctgggactaagcggtggagtggg

SEQ ID NO: 807982 - DNA, 25 bp, Homo sapien
gctctgctgggactaagcggtggag

SEQ ID NO: 807983 - DNA, 25 bp, Homo sapien
tctgctgggactaagcggtggagtg

SEQ ID NO: 807984 - DNA, 25 bp, Homo sapien
caggcaatggcttctgagcctgcag

SEQ ID NO: 807985 - DNA, 25 bp, Homo sapien
tgtgagagggaaatctaaggtgcca

SEQ ID NO: 807986 - DNA, 25 bp, Homo sapien
agctcctgactgctccaagggtgca

SEQ ID NO: 807987 - DNA, 25 bp, Homo sapien
actgctccaagggtgcatctaggcc

SEQ ID NO: 807988 - DNA, 25 bp, Homo sapien
cttgaggacgaatgtgttatccttc

SEQ ID NO: 807989 - DNA, 25 bp, Homo sapien
ggacgaatgtgttatccttctctgg

SEQ ID NO: 807990 - DNA, 25 bp, Homo sapien
ggacctcaatgatggctgacagtgg

SEQ ID NO: 807991 - DNA, 25 bp, Homo sapien
caatgatggctgacagtgggatgct

SEQ ID NO: 807992 - DNA, 25 bp, Homo sapien
ggagggttctcggagactgccttta

SEQ ID NO: 807993 - DNA, 25 bp, Homo sapien
ggctgtcatgcatgatcagcagttt

SEQ ID NO: 807994 - DNA, 25 bp, Homo sapien
cagagtgggacccatctccaaacaa

SEQ ID NO: 807995 - DNA, 25 bp, Homo sapien
tttaatcccgctctgaacagatggg

SEQ ID NO: 807996 - DNA, 25 bp, Homo sapien
cctggatgtcagctacccacgagtg

SEQ ID NO: 807997 - DNA, 25 bp, Homo sapien
tggtctccaagatgtattcggctcc

SEQ ID NO: 807998 - DNA, 25 bp, Homo sapien
gcttctgcagagagtcgatggtctc

SEQ ID NO: 807999 - DNA, 25 bp, Homo sapien
ggatgtcagctacccacgagtgctt

SEQ ID NO: 808000 - DNA, 25 bp, Homo sapien
ctggcgattggaggtagggggtatt

SEQ ID NO: 808001 - DNA, 25 bp, Homo sapien
tctgctggcgattggaggtaggggg

SEQ ID NO: 808002 - DNA, 25 bp, Homo sapien
tgctggcgattggaggtagggggta

SEQ ID NO: 808003 - DNA, 25 bp, Homo sapien
gctggcgattggaggtagggggtat

SEQ ID NO: 808004 - DNA, 25 bp, Homo sapien
gacaagacctggtccaacttccttc

SEQ ID NO: 808005 - DNA, 25 bp, Homo sapien
ctcttggggtgaagacaagacctgg

SEQ ID NO: 808006 - DNA, 25 bp, Homo sapien
gggtgaagacaagacctggtccaac

SEQ ID NO: 808007 - DNA, 25 bp, Homo sapien
gaagacaagacctggtccaacttcc

SEQ ID NO: 808008 - DNA, 25 bp, Homo sapien
gttcacagctgaccgtaactgccct

SEQ ID NO: 808009 - DNA, 25 bp, Homo sapien
cttcctgttcacagctgaccgtaac

SEQ ID NO: 808010 - DNA, 25 bp, Homo sapien
tcctgttcacagctgaccgtaactg

SEQ ID NO: 808011 - DNA, 25 bp, Homo sapien
tgttcacagctgaccgtaactgccc

SEQ ID NO: 808012 - DNA, 25 bp, Homo sapien
tcccgatttgtgacatgaggtgtct

SEQ ID NO: 808013 - DNA, 25 bp, Homo sapien
gatcccgtgcagaccctcagagggt

SEQ ID NO: 808014 - DNA, 25 bp, Homo sapien
taagtgaggttcaccttcacagcgg

SEQ ID NO: 808015 - DNA, 25 bp, Homo sapien
tgggaccctgccagctcgaaaattc

SEQ ID NO: 808016 - DNA, 25 bp, Homo sapien
actgagtggacagtccccactgagg

SEQ ID NO: 808017 - DNA, 25 bp, Homo sapien
cactgagtggacagtccccactgag

SEQ ID NO: 808018 - DNA, 25 bp, Homo sapien
cactgagggcccatgatccctgccc

SEQ ID NO: 808019 - DNA, 25 bp, Homo sapien
ccaacccactggtgaagtctatgag

SEQ ID NO: 808020 - DNA, 25 bp, Homo sapien
caatgctgcaatcccggtggctgac

SEQ ID NO: 808021 - DNA, 25 bp, Homo sapien
taattttagagttgggcagggagct

SEQ ID NO: 808022 - DNA, 25 bp, Homo sapien
ctgcaatcccggtggctgactgtaa

SEQ ID NO: 808023 - DNA, 25 bp, Homo sapien
gggatgacagtgtgaggaacatggg

SEQ ID NO: 808024 - DNA, 25 bp, Homo sapien
taaataaatgtgagaagagaggtga

SEQ ID NO: 808025 - DNA, 25 bp, Homo sapien
tgtgaggaacatggggggaaggaga

SEQ ID NO: 808026 - DNA, 25 bp, Homo sapien
aataaatgtgagaagagaggtgacg

SEQ ID NO: 808027 - DNA, 25 bp, Homo sapien
caggccgagtctcactttggcggat

SEQ ID NO: 808028 - DNA, 25 bp, Homo sapien
aagttgaaggtcagcacgtactccc

SEQ ID NO: 808029 - DNA, 25 bp, Homo sapien
gaaccatgggtagtcggatagctcc

SEQ ID NO: 808030 - DNA, 25 bp, Homo sapien
ttgagcagccttgacccgggacagt

SEQ ID NO: 808031 - DNA, 25 bp, Homo sapien
gcatttcaggtcaatatagcaagga

SEQ ID NO: 808032 - DNA, 25 bp, Homo sapien
aagcatttcaggtcaatatagcaag

SEQ ID NO: 808033 - DNA, 25 bp, Homo sapien
tttcaggtcaatatagcaaggaatc

SEQ ID NO: 808034 - DNA, 25 bp, Homo sapien
tcaggtcaatatagcaaggaatcct

SEQ ID NO: 808035 - DNA, 25 bp, Homo sapien
ttgtcggaggaactgtaagggtggc

SEQ ID NO: 808036 - DNA, 25 bp, Homo sapien
gaactgtaagggtggctgcttgcca

SEQ ID NO: 808037 - DNA, 25 bp, Homo sapien
tggaggtgctacctcctgcacggtg

SEQ ID NO: 808038 - DNA, 25 bp, Homo sapien
ccaaggaaatgtccctggtggaggt

SEQ ID NO: 808039 - DNA, 25 bp, Homo sapien
cccaccatttacttatcaggcctgg

SEQ ID NO: 808040 - DNA, 25 bp, Homo sapien
gaagaagcaagttggacgcatccca

SEQ ID NO: 808041 - DNA, 25 bp, Homo sapien
aaggtagtgatcttccctcccagga

SEQ ID NO: 808042 - DNA, 25 bp, Homo sapien
cctcccaggaggtatgtaagctgga

SEQ ID NO: 808043 - DNA, 25 bp, Homo sapien
tgggcagagcctgcgcagggcacag

SEQ ID NO: 808044 - DNA, 25 bp, Homo sapien
cacagcctcatagctgggcagagcc

SEQ ID NO: 808045 - DNA, 25 bp, Homo sapien
ggcagagcctgcgcagggcacagct

SEQ ID NO: 808046 - DNA, 25 bp, Homo sapien
cagagcctgcgcagggcacagctgg

SEQ ID NO: 808047 - DNA, 25 bp, Homo sapien
aaatacagacaatccctggagcggg

SEQ ID NO: 808048 - DNA, 25 bp, Homo sapien
ggtggcggtcccacaagtgagctct

SEQ ID NO: 808049 - DNA, 25 bp, Homo sapien
tgctaggacaatgcagggactcagc

SEQ ID NO: 808050 - DNA, 25 bp, Homo sapien
gggactcagcccgaaagaaacagca

SEQ ID NO: 808051 - DNA, 25 bp, Homo sapien
ggtttgagggtacacgcatagcccc

SEQ ID NO: 808052 - DNA, 25 bp, Homo sapien
gggctggcttctctctaggtctcta

SEQ ID NO: 808053 - DNA, 25 bp, Homo sapien
ccaaaacccggaggcatggaaagct

SEQ ID NO: 808054 - DNA, 25 bp, Homo sapien
tggtctggccacctgcataaaagac

SEQ ID NO: 808055 - DNA, 25 bp, Homo sapien
gctgtgtcagggccgggggcccctc

SEQ ID NO: 808056 - DNA, 25 bp, Homo sapien
gtgtcagggccgggggcccctcaca

SEQ ID NO: 808057 - DNA, 25 bp, Homo sapien
aggggctgtatggggctgtgtcagg

SEQ ID NO: 808058 - DNA, 25 bp, Homo sapien
ggggcccctcacacatgagccccat

SEQ ID NO: 808059 - DNA, 25 bp, Homo sapien
tggcggagcatgtcaagcacagact

SEQ ID NO: 808060 - DNA, 25 bp, Homo sapien
tgctgtacgtgacactggccgtggc

SEQ ID NO: 808061 - DNA, 25 bp, Homo sapien
cacatagctgcgaagggtgatgtcg

SEQ ID NO: 808062 - DNA, 25 bp, Homo sapien
tggaaccacagatgctgtacgtgac

SEQ ID NO: 808063 - DNA, 25 bp, Homo sapien
ctccattccttatgacgtgactgct

SEQ ID NO: 808064 - DNA, 25 bp, Homo sapien
caggaatcattagggacctggctgc

SEQ ID NO: 808065 - DNA, 25 bp, Homo sapien
cttgccaggaatcattagggacctg

SEQ ID NO: 808066 - DNA, 25 bp, Homo sapien
gactgcttgaaattgctgtggctag

SEQ ID NO: 808067 - DNA, 25 bp, Homo sapien
gctcaggtttccgagttgcagccca

SEQ ID NO: 808068 - DNA, 25 bp, Homo sapien
tgtcctcggacacatatgcaagcac

SEQ ID NO: 808069 - DNA, 25 bp, Homo sapien
tacatgtacctaaccacgcgtgtgc

SEQ ID NO: 808070 - DNA, 25 bp, Homo sapien
gtgtgcacgcccatatagccacatg

SEQ ID NO: 808071 - DNA, 25 bp, Homo sapien
acaaggcgacggcagggcgtgagtg

SEQ ID NO: 808072 - DNA, 25 bp, Homo sapien
ggcgtgagtggggacctgggctggc

SEQ ID NO: 808073 - DNA, 25 bp, Homo sapien
ctgcaacaaggcgacggcagggcgt

SEQ ID NO: 808074 - DNA, 25 bp, Homo sapien
aaggcgacggcagggcgtgagtggg

SEQ ID NO: 808075 - DNA, 25 bp, Homo sapien
ggacgcgggcgcggcagggggcgtg

SEQ ID NO: 808076 - DNA, 25 bp, Homo sapien
acgcgggcgcggcagggggcgtggg

SEQ ID NO: 808077 - DNA, 25 bp, Homo sapien
cgctccagcaggccggggacgcggg

SEQ ID NO: 808078 - DNA, 25 bp, Homo sapien
gtcgctccagcaggccggggacgcg

SEQ ID NO: 808079 - DNA, 25 bp, Homo sapien
gccggcggcgtcggagggcgaggca

SEQ ID NO: 808080 - DNA, 25 bp, Homo sapien
cggcggcgtcggagggcgaggcagg

SEQ ID NO: 808081 - DNA, 25 bp, Homo sapien
ggacgacgaggcggaagacgaggag

SEQ ID NO: 808082 - DNA, 25 bp, Homo sapien
cgacgaggcggaagacgaggaggcg

SEQ ID NO: 808083 - DNA, 25 bp, Homo sapien
ggcgctcggcgctgttgctgcggct

SEQ ID NO: 808084 - DNA, 25 bp, Homo sapien
ggagtactggttctccacggcgcgc

SEQ ID NO: 808085 - DNA, 25 bp, Homo sapien
tagaaggagtactggttctccacgg

SEQ ID NO: 808086 - DNA, 25 bp, Homo sapien
ctagtagaaggagtactggttctcc

SEQ ID NO: 808087 - DNA, 25 bp, Homo sapien
ggcttttaataacatcgtgtcttca

SEQ ID NO: 808088 - DNA, 25 bp, Homo sapien
ttttaataacatcgtgtcttcactg

SEQ ID NO: 808089 - DNA, 25 bp, Homo sapien
cttttaataacatcgtgtcttcact

SEQ ID NO: 808090 - DNA, 25 bp, Homo sapien
gcttttaataacatcgtgtcttcac

SEQ ID NO: 808091 - DNA, 25 bp, Homo sapien
ctttcaggtgctgcccgacgcccca

SEQ ID NO: 808092 - DNA, 25 bp, Homo sapien
ttcaggtgctgcccgacgccccatg

SEQ ID NO: 808093 - DNA, 25 bp, Homo sapien
caggtgctgcccgacgccccatggg

SEQ ID NO: 808094 - DNA, 25 bp, Homo sapien
aggtgctgcccgacgccccatgggg

SEQ ID NO: 808095 - DNA, 25 bp, Homo sapien
taggaagacagaccatgaaagcacg

SEQ ID NO: 808096 - DNA, 25 bp, Homo sapien
tcagtaggaagacagaccatgaaag

SEQ ID NO: 808097 - DNA, 25 bp, Homo sapien
aagacagaccatgaaagcacggtca

SEQ ID NO: 808098 - DNA, 25 bp, Homo sapien
ggaagacagaccatgaaagcacggt

SEQ ID NO: 808099 - DNA, 25 bp, Homo sapien
tgcatcttctagttcctctgccagt

SEQ ID NO: 808100 - DNA, 25 bp, Homo sapien
gatgttgcattgtgcggccacttcc

SEQ ID NO: 808101 - DNA, 25 bp, Homo sapien
ccttcgatgacagggactcaaacca

SEQ ID NO: 808102 - DNA, 25 bp, Homo sapien
ccctcagagggtaagtagatgttgc

SEQ ID NO: 808103 - DNA, 25 bp, Homo sapien
tggattgccaaacctaccctgcggt

SEQ ID NO: 808104 - DNA, 25 bp, Homo sapien
agagttctagaaccattcccttgca

SEQ ID NO: 808105 - DNA, 25 bp, Homo sapien
gtgctgtggtaggagccctttcttc

SEQ ID NO: 808106 - DNA, 25 bp, Homo sapien
ttcttccccagctggattgccaaac

SEQ ID NO: 808107 - DNA, 25 bp, Homo sapien
tagtggttaacaccgttgcactttg

SEQ ID NO: 808108 - DNA, 25 bp, Homo sapien
caattagtggttaacaccgttgcac

SEQ ID NO: 808109 - DNA, 25 bp, Homo sapien
gatcaattagtggttaacaccgttg

SEQ ID NO: 808110 - DNA, 25 bp, Homo sapien
gtgatcaattagtggttaacaccgt

SEQ ID NO: 808111 - DNA, 25 bp, Homo sapien
aaaaatggacccatgctagaatggc

SEQ ID NO: 808112 - DNA, 25 bp, Homo sapien
taaaaatggacccatgctagaatgg

SEQ ID NO: 808113 - DNA, 25 bp, Homo sapien
aaaatggacccatgctagaatggca

SEQ ID NO: 808114 - DNA, 25 bp, Homo sapien
tcaatgagatccactccatagtcct

SEQ ID NO: 808115 - DNA, 25 bp, Homo sapien
gaaacttcaatgagatccactccat

SEQ ID NO: 808116 - DNA, 25 bp, Homo sapien
gagatccactccatagtccttaagc

SEQ ID NO: 808117 - DNA, 25 bp, Homo sapien
gtctgaaacttcaatgagatccact

SEQ ID NO: 808118 - DNA, 25 bp, Homo sapien
tcagagcttccccctgaaagccgaa

SEQ ID NO: 808119 - DNA, 25 bp, Homo sapien
caacctcagttaggtcggcaaactc

SEQ ID NO: 808120 - DNA, 25 bp, Homo sapien
agagcttccccctgaaagccgaaag

SEQ ID NO: 808121 - DNA, 25 bp, Homo sapien
tgaaagccgaaagtttcaacctcag

SEQ ID NO: 808122 - DNA, 25 bp, Homo sapien
agtcccaaccttcgccgatgcgtgg

SEQ ID NO: 808123 - DNA, 25 bp, Homo sapien
ccttatggcgcacaggtagtgtaga

SEQ ID NO: 808124 - DNA, 25 bp, Homo sapien
tgcttcacgctgactgtcatccctc

SEQ ID NO: 808125 - DNA, 25 bp, Homo sapien
tagtgatcaaacaccagtcgagtcc

SEQ ID NO: 808126 - DNA, 25 bp, Homo sapien
agaagcatgacctccatccctaatc

SEQ ID NO: 808127 - DNA, 25 bp, Homo sapien
tcccacaagcgctcactcaatatca

SEQ ID NO: 808128 - DNA, 25 bp, Homo sapien
gatcccacaagcgctcactcaatat

SEQ ID NO: 808129 - DNA, 25 bp, Homo sapien
atcccacaagcgctcactcaatatc

SEQ ID NO: 808130 - DNA, 25 bp, Homo sapien
actgacaatcacggcagaaggcgaa

SEQ ID NO: 808131 - DNA, 25 bp, Homo sapien
aaactgacaatcacggcagaaggcg

SEQ ID NO: 808132 - DNA, 25 bp, Homo sapien
ggctgtacaggaagcgtggctgggg

SEQ ID NO: 808133 - DNA, 25 bp, Homo sapien
acaggaagcgtggctggggaggcct

SEQ ID NO: 808134 - DNA, 25 bp, Homo sapien
gctcctggtggatttagatacctcc

SEQ ID NO: 808135 - DNA, 25 bp, Homo sapien
gcctatggctcctggtggatttaga

SEQ ID NO: 808136 - DNA, 25 bp, Homo sapien
gatgcctatggctcctggtggattt

SEQ ID NO: 808137 - DNA, 25 bp, Homo sapien
ggtggatttagatacctcctggtgc

SEQ ID NO: 808138 - DNA, 25 bp, Homo sapien
cctctaatgatccacctgaattggt

SEQ ID NO: 808139 - DNA, 25 bp, Homo sapien
tctaatgatccacctgaattggttt

SEQ ID NO: 808140 - DNA, 25 bp, Homo sapien
tgacctctaatgatccacctgaatt

SEQ ID NO: 808141 - DNA, 25 bp, Homo sapien
gacctctaatgatccacctgaattg

SEQ ID NO: 808142 - DNA, 25 bp, Homo sapien
ttcttacggacttgcagtccaggag

SEQ ID NO: 808143 - DNA, 25 bp, Homo sapien
caatgcaggggctcagattgggaca

SEQ ID NO: 808144 - DNA, 25 bp, Homo sapien
ctggaggtcctgtttcttacggact

SEQ ID NO: 808145 - DNA, 25 bp, Homo sapien
tgcggcaccaccaccctttttatat

SEQ ID NO: 808146 - DNA, 25 bp, Homo sapien
gaacctggaccattcttgatggagc

SEQ ID NO: 808147 - DNA, 25 bp, Homo sapien
tggagctgaatacagtgatcacgtt

SEQ ID NO: 808148 - DNA, 25 bp, Homo sapien
ttcttgatggagctgaatacagtga

SEQ ID NO: 808149 - DNA, 25 bp, Homo sapien
tgatcacgttgtcctcctaggagca

SEQ ID NO: 808150 - DNA, 25 bp, Homo sapien
catttctcaattgacatgggacgtg

SEQ ID NO: 808151 - DNA, 25 bp, Homo sapien
gcatttctcaattgacatgggacgt

SEQ ID NO: 808152 - DNA, 25 bp, Homo sapien
agcctggaaggtcggggccgcacgg

SEQ ID NO: 808153 - DNA, 25 bp, Homo sapien
tggaaggtcggggccgcacggagcc

SEQ ID NO: 808154 - DNA, 25 bp, Homo sapien
cctggaaggtcggggccgcacggag

SEQ ID NO: 808155 - DNA, 25 bp, Homo sapien
ggagcctggaaggtcggggccgcac

SEQ ID NO: 808156 - DNA, 25 bp, Homo sapien
catacccttgctccgtaagcgttgg

SEQ ID NO: 808157 - DNA, 25 bp, Homo sapien
tataccgttccatgaactcgagggc

SEQ ID NO: 808158 - DNA, 25 bp, Homo sapien
taagcgttggttccagttaggccat

SEQ ID NO: 808159 - DNA, 25 bp, Homo sapien
ttaggccattccatgaacccgaggg

SEQ ID NO: 808160 - DNA, 25 bp, Homo sapien
gggaagtgggattccagcctttcat

SEQ ID NO: 808161 - DNA, 25 bp, Homo sapien
tgtcctctttactctgtgtacaaaa

SEQ ID NO: 808162 - DNA, 25 bp, Homo sapien
cctatttgtcctctttactctgtgt

SEQ ID NO: 808163 - DNA, 25 bp, Homo sapien
gagaggattatactatcatagactg

SEQ ID NO: 808164 - DNA, 25 bp, Homo sapien
ccatcccgcaatttccaaatgagta

SEQ ID NO: 808165 - DNA, 25 bp, Homo sapien
atccgaccttcgaatacccctccat

SEQ ID NO: 808166 - DNA, 25 bp, Homo sapien
cctccatcccgcaatttccaaatga

SEQ ID NO: 808167 - DNA, 25 bp, Homo sapien
tccgaccttcgaatacccctccatc

SEQ ID NO: 808168 - DNA, 25 bp, Homo sapien
agagtctagctctgctccccaggat

SEQ ID NO: 808169 - DNA, 25 bp, Homo sapien
cagagtctagctctgctccccagga

SEQ ID NO: 808170 - DNA, 25 bp, Homo sapien
atttttgaaatgtttgtagaaacag

SEQ ID NO: 808171 - DNA, 25 bp, Homo sapien
gctcaactaatttttgaaatgtttg

SEQ ID NO: 808172 - DNA, 25 bp, Homo sapien
gagggcagtgtctcgatcttgactc

SEQ ID NO: 808173 - DNA, 25 bp, Homo sapien
tcactgcagccgatgcgtcctgggt

SEQ ID NO: 808174 - DNA, 25 bp, Homo sapien
tgactcactgcagccgatgcgtcct

SEQ ID NO: 808175 - DNA, 25 bp, Homo sapien
actgcagccgatgcgtcctgggttc

SEQ ID NO: 808176 - DNA, 25 bp, Homo sapien
tgaagtgatcactcatgagggacac

SEQ ID NO: 808177 - DNA, 25 bp, Homo sapien
taggtcaacttgataaaggtcagcg

SEQ ID NO: 808178 - DNA, 25 bp, Homo sapien
gataagaaagcttggtttcgggcca

SEQ ID NO: 808179 - DNA, 25 bp, Homo sapien
caatgggaaaaataggccccagtgg

SEQ ID NO: 808180 - DNA, 25 bp, Homo sapien
ttttgggtcgggctctagtgtgatc

SEQ ID NO: 808181 - DNA, 25 bp, Homo sapien
tgggtcgggctctagtgtgatcaac

SEQ ID NO: 808182 - DNA, 25 bp, Homo sapien
ggtcgggctctagtgtgatcaactg

SEQ ID NO: 808183 - DNA, 25 bp, Homo sapien
gtcgggctctagtgtgatcaactgc

SEQ ID NO: 808184 - DNA, 25 bp, Homo sapien
cccccatgtaggtcccttggctgga

SEQ ID NO: 808185 - DNA, 25 bp, Homo sapien
ccatgtaggtcccttggctggaaaa

SEQ ID NO: 808186 - DNA, 25 bp, Homo sapien
tgtaggtcccttggctggaaaagga

SEQ ID NO: 808187 - DNA, 25 bp, Homo sapien
gagtggtcagatgaatctgaggagg

SEQ ID NO: 808188 - DNA, 25 bp, Homo sapien
gaaggccatggacagaacggagact

SEQ ID NO: 808189 - DNA, 25 bp, Homo sapien
tgagcgagagactcctaggaaagca

SEQ ID NO: 808190 - DNA, 25 bp, Homo sapien
cattaggaaaacgtgtgggaactca

SEQ ID NO: 808191 - DNA, 25 bp, Homo sapien
gattacgggaaagatcacgaccagc

SEQ ID NO: 808192 - DNA, 25 bp, Homo sapien
ctacagccattgttgtatgcaactg

SEQ ID NO: 808193 - DNA, 25 bp, Homo sapien
acagccattgttgtatgcaactgca

SEQ ID NO: 808194 - DNA, 25 bp, Homo sapien
tacagccattgttgtatgcaactgc

SEQ ID NO: 808195 - DNA, 25 bp, Homo sapien
cagccattgttgtatgcaactgcat

SEQ ID NO: 808196 - DNA, 25 bp, Homo sapien
caatgattcatcacaattttttggt

SEQ ID NO: 808197 - DNA, 25 bp, Homo sapien
tctaacagtgttcttgcccagttgt

SEQ ID NO: 808198 - DNA, 25 bp, Homo sapien
tgttcttgcccagttgtttcataaa

SEQ ID NO: 808199 - DNA, 25 bp, Homo sapien
tttttggtgaaatctaacagtgttc

SEQ ID NO: 808200 - DNA, 25 bp, Homo sapien
ccttttagggtcaagtccagggctg

SEQ ID NO: 808201 - DNA, 25 bp, Homo sapien
gagcccaagtcctctgggttagaac

SEQ ID NO: 808202 - DNA, 25 bp, Homo sapien
tccagggctgcgttactgggtcctg

SEQ ID NO: 808203 - DNA, 25 bp, Homo sapien
cctggagcccaagtcctctgggtta

SEQ ID NO: 808204 - DNA, 25 bp, Homo sapien
tgagcctatgcgctccccaagttta

SEQ ID NO: 808205 - DNA, 25 bp, Homo sapien
ccatgagcctatgcgctccccaagt

SEQ ID NO: 808206 - DNA, 25 bp, Homo sapien
agcctatgcgctccccaagtttagg

SEQ ID NO: 808207 - DNA, 25 bp, Homo sapien
ttcccatgagcctatgcgctcccca

SEQ ID NO: 808208 - DNA, 25 bp, Homo sapien
caagcgatgacctgaagaggcgcag

SEQ ID NO: 808209 - DNA, 25 bp, Homo sapien
atgacctgaagaggcgcaggaagcc

SEQ ID NO: 808210 - DNA, 25 bp, Homo sapien
ggaacgagagcaagcgatgacctga

SEQ ID NO: 808211 - DNA, 25 bp, Homo sapien
agagcaagcgatgacctgaagaggc

SEQ ID NO: 808212 - DNA, 25 bp, Homo sapien
cgtacagcgacggccggcgccaggc

SEQ ID NO: 808213 - DNA, 25 bp, Homo sapien
ggtccttctcggggcccagatccgc

SEQ ID NO: 808214 - DNA, 25 bp, Homo sapien
agctgttctgctcccgaggggcccg

SEQ ID NO: 808215 - DNA, 25 bp, Homo sapien
gtctgctcgcgaggtcacctcctgt

SEQ ID NO: 808216 - DNA, 25 bp, Homo sapien
gctgctgtcgctggcgcgcgcgtct

SEQ ID NO: 808217 - DNA, 25 bp, Homo sapien
agcaggtcactgaagtcatgagggc

SEQ ID NO: 808218 - DNA, 25 bp, Homo sapien
gaagcaggtcactgaagtcatgagg

SEQ ID NO: 808219 - DNA, 25 bp, Homo sapien
cagaagcaggtcactgaagtcatga

SEQ ID NO: 808220 - DNA, 25 bp, Homo sapien
gggcagaagcaggtcactgaagtca

SEQ ID NO: 808221 - DNA, 25 bp, Homo sapien
gctgctcttggaaacttgcagagac

SEQ ID NO: 808222 - DNA, 25 bp, Homo sapien
tcttggaaacttgcagagactgtgg

SEQ ID NO: 808223 - DNA, 25 bp, Homo sapien
cttgcagagactgtggctgatagac

SEQ ID NO: 808224 - DNA, 25 bp, Homo sapien
gaaacttgcagagactgtggctgat

SEQ ID NO: 808225 - DNA, 25 bp, Homo sapien
ccacagaaactagatggctgtagtt

SEQ ID NO: 808226 - DNA, 25 bp, Homo sapien
atcacatccccgtatgctatcttct

SEQ ID NO: 808227 - DNA, 25 bp, Homo sapien
ccaacatcacatccccgtatgctat

SEQ ID NO: 808228 - DNA, 25 bp, Homo sapien
tatgctatcttctcatcagggtcca

SEQ ID NO: 808229 - DNA, 25 bp, Homo sapien
cattcagaaagcaagctatcctcac

SEQ ID NO: 808230 - DNA, 25 bp, Homo sapien
gcattcagaaagcaagctatcctca

SEQ ID NO: 808231 - DNA, 25 bp, Homo sapien
gagcattcagaaagcaagctatcct

SEQ ID NO: 808232 - DNA, 25 bp, Homo sapien
tgagagcattcagaaagcaagctat

SEQ ID NO: 808233 - DNA, 25 bp, Homo sapien
agtacaagatgttgccacctcataa

SEQ ID NO: 808234 - DNA, 25 bp, Homo sapien
gtacaagatgttgccacctcataag

SEQ ID NO: 808235 - DNA, 25 bp, Homo sapien
aagtacaagatgttgccacctcata

SEQ ID NO: 808236 - DNA, 25 bp, Homo sapien
ccactccatgatgatgtttggcttg

SEQ ID NO: 808237 - DNA, 25 bp, Homo sapien
tccactccatgatgatgtttggctt

SEQ ID NO: 808238 - DNA, 25 bp, Homo sapien
ctccactccatgatgatgtttggct

SEQ ID NO: 808239 - DNA, 25 bp, Homo sapien
agtgttttttaacatgtgataatct

SEQ ID NO: 808240 - DNA, 25 bp, Homo sapien
gagtgttttttaacatgtgataatc

SEQ ID NO: 808241 - DNA, 25 bp, Homo sapien
gggagtaaataagtgaccgataatg

SEQ ID NO: 808242 - DNA, 25 bp, Homo sapien
atggcgagggagtaaataagtgacc

SEQ ID NO: 808243 - DNA, 25 bp, Homo sapien
cgagggagtaaataagtgaccgata

SEQ ID NO: 808244 - DNA, 25 bp, Homo sapien
ctaatggcgagggagtaaataagtg

SEQ ID NO: 808245 - DNA, 25 bp, Homo sapien
gagggagcgctatatcatcacatca

SEQ ID NO: 808246 - DNA, 25 bp, Homo sapien
tctgtaaggccgaaagcagtggctc

SEQ ID NO: 808247 - DNA, 25 bp, Homo sapien
tctactatggacagagcatgatgcc

SEQ ID NO: 808248 - DNA, 25 bp, Homo sapien
caattcgcaagcataggtagaggac

SEQ ID NO: 808249 - DNA, 25 bp, Homo sapien
atattcaactaggttaaaagtgtca

SEQ ID NO: 808250 - DNA, 25 bp, Homo sapien
taatctatgatagatgattatctaa

SEQ ID NO: 808251 - DNA, 25 bp, Homo sapien
cattttataatctatgatagatgat

SEQ ID NO: 808252 - DNA, 25 bp, Homo sapien
tagccccagctcaagaagtgaaaca

SEQ ID NO: 808253 - DNA, 25 bp, Homo sapien
ggagaggcattacctgacatgggaa

SEQ ID NO: 808254 - DNA, 25 bp, Homo sapien
tgattacccagatctctagccccag

SEQ ID NO: 808255 - DNA, 25 bp, Homo sapien
catgcaggtaaagcagtgtctcacc

SEQ ID NO: 808256 - DNA, 25 bp, Homo sapien
aagggtcccgagtggtacatcgtca

SEQ ID NO: 808257 - DNA, 25 bp, Homo sapien
gaagtggcagcataagcctacttgt

SEQ ID NO: 808258 - DNA, 25 bp, Homo sapien
aactcagactctgccatggaagtgg

SEQ ID NO: 808259 - DNA, 25 bp, Homo sapien
tcgtcatagccggaaacagtcagag

SEQ ID NO: 808260 - DNA, 25 bp, Homo sapien
gcaaaacgaccaccaaaagcaacac

SEQ ID NO: 808261 - DNA, 25 bp, Homo sapien
caccggtgagtcagccagttttctt

SEQ ID NO: 808262 - DNA, 25 bp, Homo sapien
aaagcaacaccggtgagtcagccag

SEQ ID NO: 808263 - DNA, 25 bp, Homo sapien
tttgaatcttgtgggggaagcagcc

SEQ ID NO: 808264 - DNA, 25 bp, Homo sapien
tcaaaatagtagtacatcctgtttt

SEQ ID NO: 808265 - DNA, 25 bp, Homo sapien
aaatagtagtacatcctgttttttg

SEQ ID NO: 808266 - DNA, 25 bp, Homo sapien
taatccatcatccatcgtgtctaaa

SEQ ID NO: 808267 - DNA, 25 bp, Homo sapien
gacatcaaaatagtagtacatcctg

SEQ ID NO: 808268 - DNA, 25 bp, Homo sapien
tcctggccccatagctcctcctcac

SEQ ID NO: 808269 - DNA, 25 bp, Homo sapien
tcctcctcaccaagcatgtcttccc

SEQ ID NO: 808270 - DNA, 25 bp, Homo sapien
cctgcggtcctcgtcttcctggccc

SEQ ID NO: 808271 - DNA, 25 bp, Homo sapien
cctcgtcttcctggccccatagctc

SEQ ID NO: 808272 - DNA, 25 bp, Homo sapien
gaagtgctgtggtaggagccctttc

SEQ ID NO: 808273 - DNA, 25 bp, Homo sapien
gcaaagaaagggactgctcacggct

SEQ ID NO: 808274 - DNA, 25 bp, Homo sapien
ttccccagctggattgccaaaccta

SEQ ID NO: 808275 - DNA, 25 bp, Homo sapien
tagaaccattcccttgcaaagaaag

SEQ ID NO: 808276 - DNA, 25 bp, Homo sapien
gaactcctcggacagtgtagctaga

SEQ ID NO: 808277 - DNA, 25 bp, Homo sapien
cggacccagcgtgatgttttaggaa

SEQ ID NO: 808278 - DNA, 25 bp, Homo sapien
taagagcaacagactaggagaggtg

SEQ ID NO: 808279 - DNA, 25 bp, Homo sapien
taattggcatactgaaccctgttcc

SEQ ID NO: 808280 - DNA, 25 bp, Homo sapien
atagggccccttgccttggcaggtc

SEQ ID NO: 808281 - DNA, 25 bp, Homo sapien
aatagggccccttgccttggcaggt

SEQ ID NO: 808282 - DNA, 25 bp, Homo sapien
tattactaggtacatgcaaatttag

SEQ ID NO: 808283 - DNA, 25 bp, Homo sapien
tactagcgcgatatcagctggttca

SEQ ID NO: 808284 - DNA, 25 bp, Homo sapien
tggtcaatgtcaagctactagcgcg

SEQ ID NO: 808285 - DNA, 25 bp, Homo sapien
tctcatgagaggatacaagccagct

SEQ ID NO: 808286 - DNA, 25 bp, Homo sapien
tcaaattgagatctagacctacagg

SEQ ID NO: 808287 - DNA, 25 bp, Homo sapien
caacccatatgtccatcaaattgag

SEQ ID NO: 808288 - DNA, 25 bp, Homo sapien
cactgactgacctgtatgcaaatac

SEQ ID NO: 808289 - DNA, 25 bp, Homo sapien
ctggtctcaaactagagaaatgaaa

SEQ ID NO: 808290 - DNA, 25 bp, Homo sapien
tgaggccacggactatcagaaagcc

SEQ ID NO: 808291 - DNA, 25 bp, Homo sapien
cagcatctaaccctggcatggtgta

SEQ ID NO: 808292 - DNA, 25 bp, Homo sapien
taataaatgaacatgtgaggccacg

SEQ ID NO: 808293 - DNA, 25 bp, Homo sapien
tgtctgtccggttggtaaaggtctc

SEQ ID NO: 808294 - DNA, 25 bp, Homo sapien
gctgggtcttggtgttctcttgtca

SEQ ID NO: 808295 - DNA, 25 bp, Homo sapien
aagtaatttccaggacaccaacatc

SEQ ID NO: 808296 - DNA, 25 bp, Homo sapien
ttggtgttctcttgtcaaacaaaag

SEQ ID NO: 808297 - DNA, 25 bp, Homo sapien
tagcagctatattgtcagcgaggca

SEQ ID NO: 808298 - DNA, 25 bp, Homo sapien
tgctctattgttaacttctgagcac

SEQ ID NO: 808299 - DNA, 25 bp, Homo sapien
gaaattataggtgttaagtcaccat

SEQ ID NO: 808300 - DNA, 25 bp, Homo sapien
aactagataataccctcacacacag

SEQ ID NO: 808301 - DNA, 25 bp, Homo sapien
ttctgagcacattagatataacttt

SEQ ID NO: 808302 - DNA, 25 bp, Homo sapien
gggcgtcttcgtgccaccgagcagc

SEQ ID NO: 808303 - DNA, 25 bp, Homo sapien
cccgcgggcgtcttcgtgccaccga

SEQ ID NO: 808304 - DNA, 25 bp, Homo sapien
accgagcagccccgctgatgctctc

SEQ ID NO: 808305 - DNA, 25 bp, Homo sapien
acctcctccccgtcggctctcctcg

SEQ ID NO: 808306 - DNA, 25 bp, Homo sapien
gctggcgtgggttattgtgttcaaa

SEQ ID NO: 808307 - DNA, 25 bp, Homo sapien
tcggcgcgcaagtatgacgacacag

SEQ ID NO: 808308 - DNA, 25 bp, Homo sapien
gctagatgctcacgtccctgaaggg

SEQ ID NO: 808309 - DNA, 25 bp, Homo sapien
ggttgcaaggcgcaagcagcctgct

SEQ ID NO: 808310 - DNA, 25 bp, Homo sapien
gtggtcgcaccgaggaggcggctgg

SEQ ID NO: 808311 - DNA, 25 bp, Homo sapien
tctttcttgggcctcggtggtcgca

SEQ ID NO: 808312 - DNA, 25 bp, Homo sapien
gctcctccgccgcattcttggggat

SEQ ID NO: 808313 - DNA, 25 bp, Homo sapien
gatgacgagcgtctgcggctctttc

SEQ ID NO: 808314 - DNA, 25 bp, Homo sapien
tactcttgggtataacacagtccac

SEQ ID NO: 808315 - DNA, 25 bp, Homo sapien
gagtatacccttttgctaacccaca

SEQ ID NO: 808316 - DNA, 25 bp, Homo sapien
gaagttcactatctccgggacagcc

SEQ ID NO: 808317 - DNA, 25 bp, Homo sapien
cagggctacgctttccagagcagaa

SEQ ID NO: 808318 - DNA, 25 bp, Homo sapien
tttctctggaattggaactgctttg

SEQ ID NO: 808319 - DNA, 25 bp, Homo sapien
tctctggaattggaactgctttgtc

SEQ ID NO: 808320 - DNA, 25 bp, Homo sapien
catgacatctcggacaaattctggg

SEQ ID NO: 808321 - DNA, 25 bp, Homo sapien
ggtcgaggtgcccattcactcattt

SEQ ID NO: 808322 - DNA, 25 bp, Homo sapien
tattgcacattaaactacagtagag

SEQ ID NO: 808323 - DNA, 25 bp, Homo sapien
tattgcgacattcactttaactagg

SEQ ID NO: 808324 - DNA, 25 bp, Homo sapien
taggttgcctggaactaaacccgca

SEQ ID NO: 808325 - DNA, 25 bp, Homo sapien
gaaaacttgtatgtgcagtgggaaa

SEQ ID NO: 808326 - DNA, 25 bp, Homo sapien
gatgtctgtacacgtggaactctcc

SEQ ID NO: 808327 - DNA, 25 bp, Homo sapien
gctgatattctctccggcgcagatg

SEQ ID NO: 808328 - DNA, 25 bp, Homo sapien
tctctccggcgcagatgtctgtaca

SEQ ID NO: 808329 - DNA, 25 bp, Homo sapien
tccatgtagtcctgtcgctgatatt

SEQ ID NO: 808330 - DNA, 25 bp, Homo sapien
ttacaagcatgcacctggctaattt

SEQ ID NO: 808331 - DNA, 25 bp, Homo sapien
gggattacaagcatgcacctggcta

SEQ ID NO: 808332 - DNA, 25 bp, Homo sapien
gctgggattacaagcatgcacctgg

SEQ ID NO: 808333 - DNA, 25 bp, Homo sapien
ggattacaagcatgcacctggctaa

SEQ ID NO: 808334 - DNA, 25 bp, Homo sapien
gctgtccgtagaaggcagacctcac

SEQ ID NO: 808335 - DNA, 25 bp, Homo sapien
gactctgcattttgtgctgtccgta

SEQ ID NO: 808336 - DNA, 25 bp, Homo sapien
cagccacaactagcagtatctattc

SEQ ID NO: 808337 - DNA, 25 bp, Homo sapien
cattttgtgctgtccgtagaaggca

SEQ ID NO: 808338 - DNA, 25 bp, Homo sapien
gtgtgcaccactgcgcctggttaat

SEQ ID NO: 808339 - DNA, 25 bp, Homo sapien
ctccaactcctgggttcaagcgatt

SEQ ID NO: 808340 - DNA, 25 bp, Homo sapien
caggtgtgcaccactgcgcctggtt

SEQ ID NO: 808341 - DNA, 25 bp, Homo sapien
tccaactcctgggttcaagcgattc

SEQ ID NO: 808342 - DNA, 25 bp, Homo sapien
caatacataggtctccgatggcgaa

SEQ ID NO: 808343 - DNA, 25 bp, Homo sapien
aatgaatggccggagggtcagaacc

SEQ ID NO: 808344 - DNA, 25 bp, Homo sapien
catggaattttcaagccctaagccc

SEQ ID NO: 808345 - DNA, 25 bp, Homo sapien
tagacacgctctggtctgggcagac

SEQ ID NO: 808346 - DNA, 25 bp, Homo sapien
cggcgctttgcggtctgctcctctg

SEQ ID NO: 808347 - DNA, 25 bp, Homo sapien
tcttccggcgctttgcggtctgctc

SEQ ID NO: 808348 - DNA, 25 bp, Homo sapien
cgcttcttccggcgctttgcggtct

SEQ ID NO: 808349 - DNA, 25 bp, Homo sapien
ttccggcgctttgcggtctgctcct

SEQ ID NO: 808350 - DNA, 25 bp, Homo sapien
gaggaactactactgactgcaagga

SEQ ID NO: 808351 - DNA, 25 bp, Homo sapien
tctgtaaccagttggagggtcataa

SEQ ID NO: 808352 - DNA, 25 bp, Homo sapien
gaagtcctgacttgcaagctctgga

SEQ ID NO: 808353 - DNA, 25 bp, Homo sapien
tgacccctacaggtcatgcagagga

SEQ ID NO: 808354 - DNA, 25 bp, Homo sapien
ctggaaaggtgagaaagctcggtaa

SEQ ID NO: 808355 - DNA, 25 bp, Homo sapien
gtttagactatgaaaacgatgctag

SEQ ID NO: 808356 - DNA, 25 bp, Homo sapien
cattggacaatgacaaattgagagc

SEQ ID NO: 808357 - DNA, 25 bp, Homo sapien
tcgtggccagccatcagtcattgga

SEQ ID NO: 808358 - DNA, 25 bp, Homo sapien
tctgttcaagtttcatcttctttgc

SEQ ID NO: 808359 - DNA, 25 bp, Homo sapien
ttctgttcaagtttcatcttctttg

SEQ ID NO: 808360 - DNA, 25 bp, Homo sapien
caaatcccctaagggcgccctggat

SEQ ID NO: 808361 - DNA, 25 bp, Homo sapien
tcctggcctcgggagggtagacact

SEQ ID NO: 808362 - DNA, 25 bp, Homo sapien
tgcatctggtcgtgtctggagacat

SEQ ID NO: 808363 - DNA, 25 bp, Homo sapien
gatacctgcccctagatcaggagct

SEQ ID NO: 808364 - DNA, 25 bp, Homo sapien
tagacactaggatgccacgagacac

SEQ ID NO: 808365 - DNA, 25 bp, Homo sapien
cagaaatcgtataaggcgccgggca

SEQ ID NO: 808366 - DNA, 25 bp, Homo sapien
gaacttgctgctcgagatctcctat

SEQ ID NO: 808367 - DNA, 25 bp, Homo sapien
gggacccaggctcaaacgtgttctc

SEQ ID NO: 808368 - DNA, 25 bp, Homo sapien
tgctaagtctgtacatagagtaccc

SEQ ID NO: 808369 - DNA, 25 bp, Homo sapien
cgccccatggtgaaactgggcactt

SEQ ID NO: 808370 - DNA, 25 bp, Homo sapien
catcgccccatggtgaaactgggca

SEQ ID NO: 808371 - DNA, 25 bp, Homo sapien
tcatcgccccatggtgaaactgggc

SEQ ID NO: 808372 - DNA, 25 bp, Homo sapien
cccatggtgaaactgggcacttcct

SEQ ID NO: 808373 - DNA, 25 bp, Homo sapien
tattagggctgactctccgtgtccg

SEQ ID NO: 808374 - DNA, 25 bp, Homo sapien
cagagtgtttgcgactcacggtcca

SEQ ID NO: 808375 - DNA, 25 bp, Homo sapien
gaaagccccgacagttgcagtcatg

SEQ ID NO: 808376 - DNA, 25 bp, Homo sapien
caaatacaggactgtgagcggctcg

SEQ ID NO: 808377 - DNA, 25 bp, Homo sapien
gctcggctcccgctcggactgcgtg

SEQ ID NO: 808378 - DNA, 25 bp, Homo sapien
tcggctcccgctcggactgcgtggc

SEQ ID NO: 808379 - DNA, 25 bp, Homo sapien
ctcggactgcgtggccgcgtggcct

SEQ ID NO: 808380 - DNA, 25 bp, Homo sapien
tcccgctcggactgcgtggccgcgt

SEQ ID NO: 808381 - DNA, 25 bp, Homo sapien
caggcccccgcgccgccacactcac

SEQ ID NO: 808382 - DNA, 25 bp, Homo sapien
gcagggaccccgctccccgcgccag

SEQ ID NO: 808383 - DNA, 25 bp, Homo sapien
ggcagcctacagtcgtccccttccc

SEQ ID NO: 808384 - DNA, 25 bp, Homo sapien
tccaattccggcccccccagccgca

SEQ ID NO: 808385 - DNA, 25 bp, Homo sapien
tctccaggtctcgaaggagcagccc

SEQ ID NO: 808386 - DNA, 25 bp, Homo sapien
tgtggaggaaacgatgtctgtctgc

SEQ ID NO: 808387 - DNA, 25 bp, Homo sapien
gctgcctgcatggaaggattccgag

SEQ ID NO: 808388 - DNA, 25 bp, Homo sapien
gaacaagagggatgccccatcagta

SEQ ID NO: 808389 - DNA, 25 bp, Homo sapien
aagatccaagatgaaagaggccaga

SEQ ID NO: 808390 - DNA, 25 bp, Homo sapien
gaattcagagaaacgctgcaatccg

SEQ ID NO: 808391 - DNA, 25 bp, Homo sapien
tgcaatccgtaggttagctccacat

SEQ ID NO: 808392 - DNA, 25 bp, Homo sapien
gatgaccgcagtatacagagactgg

SEQ ID NO: 808393 - DNA, 25 bp, Homo sapien
tacgaatgccaactcaggctctcca

SEQ ID NO: 808394 - DNA, 25 bp, Homo sapien
caggtcatttatacgaatgccaact

SEQ ID NO: 808395 - DNA, 25 bp, Homo sapien
cgcatccaagcacttccatccctgg

SEQ ID NO: 808396 - DNA, 25 bp, Homo sapien
tccttgcgcacatccgcagccagca

SEQ ID NO: 808397 - DNA, 25 bp, Homo sapien
tgctcaggtagagcttccgccacga

SEQ ID NO: 808398 - DNA, 25 bp, Homo sapien
tcgataggcacgttaagctcagcac

SEQ ID NO: 808399 - DNA, 25 bp, Homo sapien
cacgacagggcctgtaccgagtggt

SEQ ID NO: 808400 - DNA, 25 bp, Homo sapien
accagttccaggtagctgcggcgga

SEQ ID NO: 808401 - DNA, 25 bp, Homo sapien
agggcaaggtatggccccaccaggg

SEQ ID NO: 808402 - DNA, 25 bp, Homo sapien
tgcggggacagcagacgagtggtgc

SEQ ID NO: 808403 - DNA, 25 bp, Homo sapien
acagcagacgagtggtgctgggtgt

SEQ ID NO: 808404 - DNA, 25 bp, Homo sapien
gagggcaaggtatggccccaccagg

SEQ ID NO: 808405 - DNA, 25 bp, Homo sapien
aggcccacgggcaccatgatgatgg

SEQ ID NO: 808406 - DNA, 25 bp, Homo sapien
gatctcgcggttgtggcgctccgtt

SEQ ID NO: 808407 - DNA, 25 bp, Homo sapien
gctccgttttgtggcgcaccaggga

SEQ ID NO: 808408 - DNA, 25 bp, Homo sapien
ccaggaagagtaggatgccaagcac

SEQ ID NO: 808409 - DNA, 25 bp, Homo sapien
ggtcttgaactacccggcagccttg

SEQ ID NO: 808410 - DNA, 25 bp, Homo sapien
caaaatgtctgcatctgacaaatcc

SEQ ID NO: 808411 - DNA, 25 bp, Homo sapien
ccagtccttatggtattaagacaag

SEQ ID NO: 808412 - DNA, 25 bp, Homo sapien
gcctctgcggactcccgggcacagg

SEQ ID NO: 808413 - DNA, 25 bp, Homo sapien
acggttctatctcaggagaagtcat

SEQ ID NO: 808414 - DNA, 25 bp, Homo sapien
aaccaaacggttctatctcaggaga

SEQ ID NO: 808415 - DNA, 25 bp, Homo sapien
tgaaccaaacggttctatctcagga

SEQ ID NO: 808416 - DNA, 25 bp, Homo sapien
ccaaacggttctatctcaggagaag

SEQ ID NO: 808417 - DNA, 25 bp, Homo sapien
gccgaagccttcgtgtcatcactgt

SEQ ID NO: 808418 - DNA, 25 bp, Homo sapien
atccttctctgaacgcaaaaccctg

SEQ ID NO: 808419 - DNA, 25 bp, Homo sapien
gatgcccgtgaacatgtcttctccg

SEQ ID NO: 808420 - DNA, 25 bp, Homo sapien
catgaagtccaccacgggtctctgg

SEQ ID NO: 808421 - DNA, 25 bp, Homo sapien
tgagcctagcgtactttgcagcagc

SEQ ID NO: 808422 - DNA, 25 bp, Homo sapien
taagaggcgtttctacaggctgcag

SEQ ID NO: 808423 - DNA, 25 bp, Homo sapien
ccggccccagtgactatttatgaga

SEQ ID NO: 808424 - DNA, 25 bp, Homo sapien
tggtgtcataacaaggagggcactc

SEQ ID NO: 808425 - DNA, 25 bp, Homo sapien
gagtgctaagattacgggcgcgagc

SEQ ID NO: 808426 - DNA, 25 bp, Homo sapien
ccgaggctggtcttaaagtcctgat

SEQ ID NO: 808427 - DNA, 25 bp, Homo sapien
gctaagattacgggcgcgagccatt

SEQ ID NO: 808428 - DNA, 25 bp, Homo sapien
aagattacgggcgcgagccattgca

SEQ ID NO: 808429 - DNA, 25 bp, Homo sapien
catagatcatcagcacgaggcaggt

SEQ ID NO: 808430 - DNA, 25 bp, Homo sapien
caggtggtcaggtactaaacggaga

SEQ ID NO: 808431 - DNA, 25 bp, Homo sapien
caatggtttgcctcatgcctcgaaa

SEQ ID NO: 808432 - DNA, 25 bp, Homo sapien
agccgtttgtttaggagagccagcc

SEQ ID NO: 808433 - DNA, 25 bp, Homo sapien
tgcctccattctagagatgtccacg

SEQ ID NO: 808434 - DNA, 25 bp, Homo sapien
ttttcaggccacgatgtgggtcccc

SEQ ID NO: 808435 - DNA, 25 bp, Homo sapien
gtgtctggacatgagtaccctgcct

SEQ ID NO: 808436 - DNA, 25 bp, Homo sapien
cagagggcgctccaggagtttttca

SEQ ID NO: 808437 - DNA, 25 bp, Homo sapien
gaggcaccctgcgctctcggggcgg

SEQ ID NO: 808438 - DNA, 25 bp, Homo sapien
ggtgggctctgttgtcgctcagcca

SEQ ID NO: 808439 - DNA, 25 bp, Homo sapien
tgggctctgttgtcgctcagccacc

SEQ ID NO: 808440 - DNA, 25 bp, Homo sapien
ctggaaagagagggccctgtctggg

SEQ ID NO: 808441 - DNA, 25 bp, Homo sapien
tggtagctcctctcctcaagggact

SEQ ID NO: 808442 - DNA, 25 bp, Homo sapien
ggactggggggaacgccaagctgac

SEQ ID NO: 808443 - DNA, 25 bp, Homo sapien
tagctcctctcctcaagggactggg

SEQ ID NO: 808444 - DNA, 25 bp, Homo sapien
gggactggggggaacgccaagctga

SEQ ID NO: 808445 - DNA, 25 bp, Homo sapien
gatttgtgttaagccagcctgtccc

SEQ ID NO: 808446 - DNA, 25 bp, Homo sapien
tagcagcctctagggtgaagtgcca

SEQ ID NO: 808447 - DNA, 25 bp, Homo sapien
tgaagctgtgacacgaagacccacg

SEQ ID NO: 808448 - DNA, 25 bp, Homo sapien
tgccctagacgctttccatggagtg

SEQ ID NO: 808449 - DNA, 25 bp, Homo sapien
agatgtgagtcaggtcggagctcca

SEQ ID NO: 808450 - DNA, 25 bp, Homo sapien
agggtctctgcccctgacaggctgg

SEQ ID NO: 808451 - DNA, 25 bp, Homo sapien
gtccactctcgagggggccagtgca

SEQ ID NO: 808452 - DNA, 25 bp, Homo sapien
actggagcagataagccagcccagg

SEQ ID NO: 808453 - DNA, 25 bp, Homo sapien
tttagactaaagagctgggaacagc

SEQ ID NO: 808454 - DNA, 25 bp, Homo sapien
gggccagcaccactctttacagtca

SEQ ID NO: 808455 - DNA, 25 bp, Homo sapien
ggctcagcctgactcatgcttgaca

SEQ ID NO: 808456 - DNA, 25 bp, Homo sapien
cctggtcaactcacttggagcaaga

SEQ ID NO: 808457 - DNA, 25 bp, Homo sapien
gcgtctgcgtcactttccgggagct

SEQ ID NO: 808458 - DNA, 25 bp, Homo sapien
cagacttgactgatcccgggattga

SEQ ID NO: 808459 - DNA, 25 bp, Homo sapien
gccttggtggacagcgtgatagcac

SEQ ID NO: 808460 - DNA, 25 bp, Homo sapien
ttttgatgggaacgtacctccaggc

SEQ ID NO: 808461 - DNA, 25 bp, Homo sapien
cctgtctgatctgcgagcggcagcg

SEQ ID NO: 808462 - DNA, 25 bp, Homo sapien
aatgcggttgcaagggcatccggac

SEQ ID NO: 808463 - DNA, 25 bp, Homo sapien
gaagtccttcgggaatgcggttgca

SEQ ID NO: 808464 - DNA, 25 bp, Homo sapien
cgcgcccacaaacgtcgctctgcat

SEQ ID NO: 808465 - DNA, 25 bp, Homo sapien
cgccgcgcgagcccgtgggcgttaa

SEQ ID NO: 808466 - DNA, 25 bp, Homo sapien
gccgcgcgagcccgtgggcgttaac

SEQ ID NO: 808467 - DNA, 25 bp, Homo sapien
cgcgcgagcccgtgggcgttaacga

SEQ ID NO: 808468 - DNA, 25 bp, Homo sapien
ccgcgcgagcccgtgggcgttaacg

SEQ ID NO: 808469 - DNA, 25 bp, Homo sapien
cgcagcccgcgctgacccagtcggc

SEQ ID NO: 808470 - DNA, 25 bp, Homo sapien
cggcgtgtggcgtcgccctgcgtct

SEQ ID NO: 808471 - DNA, 25 bp, Homo sapien
tgcgtctcctggagcccggcactgg

SEQ ID NO: 808472 - DNA, 25 bp, Homo sapien
cccagtcggccaccccggcgtgtgg

SEQ ID NO: 808473 - DNA, 25 bp, Homo sapien
gggcgcccgcgctgcattagcagcc

SEQ ID NO: 808474 - DNA, 25 bp, Homo sapien
ggatcttccccagccggtcgctctt

SEQ ID NO: 808475 - DNA, 25 bp, Homo sapien
gctgcattagcagccgcgccgagag

SEQ ID NO: 808476 - DNA, 25 bp, Homo sapien
actccggatcttccccagccggtcg

SEQ ID NO: 808477 - DNA, 25 bp, Homo sapien
gcgccactactcccgactccacacc

SEQ ID NO: 808478 - DNA, 25 bp, Homo sapien
cgccactactcccgactccacacca

SEQ ID NO: 808479 - DNA, 25 bp, Homo sapien
ctcgtacaagtgtagccgccccgcc

SEQ ID NO: 808480 - DNA, 25 bp, Homo sapien
cgtacaagtgtagccgccccgccca

SEQ ID NO: 808481 - DNA, 25 bp, Homo sapien
ttctcgtacaagtgtagccgccccg

SEQ ID NO: 808482 - DNA, 25 bp, Homo sapien
atttctcgtacaagtgtagccgccc

SEQ ID NO: 808483 - DNA, 25 bp, Homo sapien
tccaggtgctcggaaagcagctcca

SEQ ID NO: 808484 - DNA, 25 bp, Homo sapien
gcagcgtctccaggtggttgttaga

SEQ ID NO: 808485 - DNA, 25 bp, Homo sapien
tccaggctgagttcctcgagcttgg

SEQ ID NO: 808486 - DNA, 25 bp, Homo sapien
aggcccaggttgtccggcagcgtct

SEQ ID NO: 808487 - DNA, 25 bp, Homo sapien
tgctggtcagctcccgattcaggtt

SEQ ID NO: 808488 - DNA, 25 bp, Homo sapien
gttgaggacgcatccttgccattga

SEQ ID NO: 808489 - DNA, 25 bp, Homo sapien
ccattgaccttacggagcgtgggca

SEQ ID NO: 808490 - DNA, 25 bp, Homo sapien
ggttctccacctgagagtaagttga

SEQ ID NO: 808491 - DNA, 25 bp, Homo sapien
ccagtgtggccatgaacttctccca

SEQ ID NO: 808492 - DNA, 25 bp, Homo sapien
agcggacatccctgacagccgactt

SEQ ID NO: 808493 - DNA, 25 bp, Homo sapien
cactgggtgaactcgctgagggact

SEQ ID NO: 808494 - DNA, 25 bp, Homo sapien
gacttcacaaagtccgcctgggcct

SEQ ID NO: 808495 - DNA, 25 bp, Homo sapien
cagctagagatacgagagccagtga

SEQ ID NO: 808496 - DNA, 25 bp, Homo sapien
cagggacctccaggcagctagagat

SEQ ID NO: 808497 - DNA, 25 bp, Homo sapien
tccaggcagctagagatacgagagc

SEQ ID NO: 808498 - DNA, 25 bp, Homo sapien
tagagatacgagagccagtgactcc

SEQ ID NO: 808499 - DNA, 25 bp, Homo sapien
gtggggccaggccatcaggaagctg

SEQ ID NO: 808500 - DNA, 25 bp, Homo sapien
ggtggggccaggccatcaggaagct

SEQ ID NO: 808501 - DNA, 25 bp, Homo sapien
ggccaccagctcctcagagatcatc

SEQ ID NO: 808502 - DNA, 25 bp, Homo sapien
ccaccagctcctcagagatcatccg

SEQ ID NO: 808503 - DNA, 25 bp, Homo sapien
ccagctcctcagagatcatccgcac

SEQ ID NO: 808504 - DNA, 25 bp, Homo sapien
tggcggccaccagctcctcagagat

SEQ ID NO: 808505 - DNA, 25 bp, Homo sapien
tctctgggctgttagccttttgcac

SEQ ID NO: 808506 - DNA, 25 bp, Homo sapien
ttagccttttgcacctgggtcctac

SEQ ID NO: 808507 - DNA, 25 bp, Homo sapien
ctgttagccttttgcacctgggtcc

SEQ ID NO: 808508 - DNA, 25 bp, Homo sapien
tgggctgttagccttttgcacctgg

SEQ ID NO: 808509 - DNA, 25 bp, Homo sapien
tgggacgtcgtctggccgtttcaag

SEQ ID NO: 808510 - DNA, 25 bp, Homo sapien
tggccgtttcaaggccgccagtctg

SEQ ID NO: 808511 - DNA, 25 bp, Homo sapien
gaggctgagtgggacgtcgtctggc

SEQ ID NO: 808512 - DNA, 25 bp, Homo sapien
cacacgcccgcttgctgggagagag

SEQ ID NO: 808513 - DNA, 25 bp, Homo sapien
gccatcggagcctgccacagggctg

SEQ ID NO: 808514 - DNA, 25 bp, Homo sapien
tgttgttcttgctgtggcactgcag

SEQ ID NO: 808515 - DNA, 25 bp, Homo sapien
cccacagctgggtctcgaggtcctg

SEQ ID NO: 808516 - DNA, 25 bp, Homo sapien
ggcccacagctgggtctcgaggtcc

SEQ ID NO: 808517 - DNA, 25 bp, Homo sapien
tcccaggccggctcgaaggcacagg

SEQ ID NO: 808518 - DNA, 25 bp, Homo sapien
gagcagagacatttcccatctaggt

SEQ ID NO: 808519 - DNA, 25 bp, Homo sapien
ccggttttgagaggtcggatgagca

SEQ ID NO: 808520 - DNA, 25 bp, Homo sapien
tgatggcgccttttaagctctgtct

SEQ ID NO: 808521 - DNA, 25 bp, Homo sapien
ccaggcggccctatttccagcggcc

SEQ ID NO: 808522 - DNA, 25 bp, Homo sapien
ctcgccgggtgccttgtacttgtgg

SEQ ID NO: 808523 - DNA, 25 bp, Homo sapien
tacttgtggagcacgatgcccgtct

SEQ ID NO: 808524 - DNA, 25 bp, Homo sapien
agcacgatgcccgtctggcaatcaa

SEQ ID NO: 808525 - DNA, 25 bp, Homo sapien
tggcaatcaattacgcacacagcct

SEQ ID NO: 808526 - DNA, 25 bp, Homo sapien
accatcagagcggtccaggccacag

SEQ ID NO: 808527 - DNA, 25 bp, Homo sapien
agcggtccaggccacagaaaagaac

SEQ ID NO: 808528 - DNA, 25 bp, Homo sapien
ctgtgtgaccaccatcagagcggtc

SEQ ID NO: 808529 - DNA, 25 bp, Homo sapien
cggtccaggccacagaaaagaactc

SEQ ID NO: 808530 - DNA, 25 bp, Homo sapien
acactccagcgcttcttgtggccag

SEQ ID NO: 808531 - DNA, 25 bp, Homo sapien
agcagccggaccaggccccgtaggc

SEQ ID NO: 808532 - DNA, 25 bp, Homo sapien
gcagcagaagccggcacgcacgtgc

SEQ ID NO: 808533 - DNA, 25 bp, Homo sapien
ttgtgggctcggatgaccccgcagc

SEQ ID NO: 808534 - DNA, 25 bp, Homo sapien
ggatgatccgcttgtcataggaggc

SEQ ID NO: 808535 - DNA, 25 bp, Homo sapien
gaattcgtagtcctggttgggcacc

SEQ ID NO: 808536 - DNA, 25 bp, Homo sapien
ggcctggaattcgtagtcctggttg

SEQ ID NO: 808537 - DNA, 25 bp, Homo sapien
gttgggcaccccgatgtcccagagg

SEQ ID NO: 808538 - DNA, 25 bp, Homo sapien
gcgcagggggatagaggtggtgtcc

SEQ ID NO: 808539 - DNA, 25 bp, Homo sapien
gtccgggcaggaggcgacagggcag

SEQ ID NO: 808540 - DNA, 25 bp, Homo sapien
ggggctggtccagccgcacgtccca

SEQ ID NO: 808541 - DNA, 25 bp, Homo sapien
cagggggatagaggtggtgtccagt

SEQ ID NO: 808542 - DNA, 25 bp, Homo sapien
cccttgccaccttgttctgggctgg

SEQ ID NO: 808543 - DNA, 25 bp, Homo sapien
cgtggctgacgaagcccggcgtgcc

SEQ ID NO: 808544 - DNA, 25 bp, Homo sapien
ggcacccttgccaccttgttctggg

SEQ ID NO: 808545 - DNA, 25 bp, Homo sapien
caggcacccttgccaccttgttctg

SEQ ID NO: 808546 - DNA, 25 bp, Homo sapien
cctgccctgtgtgaaggctgcacag

SEQ ID NO: 808547 - DNA, 25 bp, Homo sapien
gaagatgccaccaaagagatacatt

SEQ ID NO: 808548 - DNA, 25 bp, Homo sapien
ttcacaaatgccagcccatccactc

SEQ ID NO: 808549 - DNA, 25 bp, Homo sapien
atgtcctcattcacaaatgccagcc

SEQ ID NO: 808550 - DNA, 25 bp, Homo sapien
ccgtccagatgcctcggagccctca

SEQ ID NO: 808551 - DNA, 25 bp, Homo sapien
ctctccgtccagatgcctcggagcc

SEQ ID NO: 808552 - DNA, 25 bp, Homo sapien
tggacgaccattgcagccgcgccag

SEQ ID NO: 808553 - DNA, 25 bp, Homo sapien
cgagaagtaggccaactcggtggac

SEQ ID NO: 808554 - DNA, 25 bp, Homo sapien
taggccaactcggtggacgaccatt

SEQ ID NO: 808555 - DNA, 25 bp, Homo sapien
cgctgagcgagaagtaggccaactc

SEQ ID NO: 808556 - DNA, 25 bp, Homo sapien
acgtcgtagagccacacgttgccct

SEQ ID NO: 808557 - DNA, 25 bp, Homo sapien
gctgacgtcgtagagccacacgttg

SEQ ID NO: 808558 - DNA, 25 bp, Homo sapien
tagagccacacgttgccctcctcat

SEQ ID NO: 808559 - DNA, 25 bp, Homo sapien
gtagagccacacgttgccctcctca

SEQ ID NO: 808560 - DNA, 25 bp, Homo sapien
tgtgttcaccatggtcttggtcacc

SEQ ID NO: 808561 - DNA, 25 bp, Homo sapien
ccagatggctacgatgttggagtcc

SEQ ID NO: 808562 - DNA, 25 bp, Homo sapien
ccgtcagggcggtgaggtaggtgaa

SEQ ID NO: 808563 - DNA, 25 bp, Homo sapien
ctacgatgttggagtccgtcagggc

SEQ ID NO: 808564 - DNA, 25 bp, Homo sapien
cggcccaaagctgaataagttagtt

SEQ ID NO: 808565 - DNA, 25 bp, Homo sapien
cctggtcctttgcgatggtgtgagg

SEQ ID NO: 808566 - DNA, 25 bp, Homo sapien
ccccatcggcccaaagctgaataag

SEQ ID NO: 808567 - DNA, 25 bp, Homo sapien
taagttagttagctgtgtccctggt

SEQ ID NO: 808568 - DNA, 25 bp, Homo sapien
tgagcagcggtgacttcgcaagcaa

SEQ ID NO: 808569 - DNA, 25 bp, Homo sapien
ctaataaagtatagcgggagagacc

SEQ ID NO: 808570 - DNA, 25 bp, Homo sapien
aagagtctctgctctagaagcctca

SEQ ID NO: 808571 - DNA, 25 bp, Homo sapien
caaatggattgtcaggcttgatgca

SEQ ID NO: 808572 - DNA, 25 bp, Homo sapien
ctaatgggcaccctgcattggttgg

SEQ ID NO: 808573 - DNA, 25 bp, Homo sapien
gtaggagttctgtggctatccagtg

SEQ ID NO: 808574 - DNA, 25 bp, Homo sapien
ttataccagtgaggtcctagccagg

SEQ ID NO: 808575 - DNA, 25 bp, Homo sapien
aagccaggcttttccccgtctgtga

SEQ ID NO: 808576 - DNA, 25 bp, Homo sapien
actttataataagagacttgaagct

SEQ ID NO: 808577 - DNA, 25 bp, Homo sapien
actgtgcgtggccagaactttataa

SEQ ID NO: 808578 - DNA, 25 bp, Homo sapien
tgggtgtgacggtgcacacctctag

SEQ ID NO: 808579 - DNA, 25 bp, Homo sapien
tggccagaactttataataagagac

SEQ ID NO: 808580 - DNA, 25 bp, Homo sapien
aagttgctgaactggctcgggtctc

SEQ ID NO: 808581 - DNA, 25 bp, Homo sapien
gccacgaggtcaagctgggcatgca

SEQ ID NO: 808582 - DNA, 25 bp, Homo sapien
agttgatcgattcaaggctggcagc

SEQ ID NO: 808583 - DNA, 25 bp, Homo sapien
cacccgaatggagggcatgagcaga

SEQ ID NO: 808584 - DNA, 25 bp, Homo sapien
tggttctcatcagccgagccggggc

SEQ ID NO: 808585 - DNA, 25 bp, Homo sapien
catggcgccagaagccacgacaggt

SEQ ID NO: 808586 - DNA, 25 bp, Homo sapien
ggtttacgttccagccgcagctgca

SEQ ID NO: 808587 - DNA, 25 bp, Homo sapien
gaagccacgacaggtttacgttcca

SEQ ID NO: 808588 - DNA, 25 bp, Homo sapien
ggggctacccggtctgaccccatca

SEQ ID NO: 808589 - DNA, 25 bp, Homo sapien
gcagcgagtggtcgggggctacccg

SEQ ID NO: 808590 - DNA, 25 bp, Homo sapien
gggcagcgagtggtcgggggctacc

SEQ ID NO: 808591 - DNA, 25 bp, Homo sapien
gctacccggtctgaccccatcaaag

SEQ ID NO: 808592 - DNA, 25 bp, Homo sapien
ctgtgaagccttggggagggaatca

SEQ ID NO: 808593 - DNA, 25 bp, Homo sapien
cttggggagggaatcagcttgtcca

SEQ ID NO: 808594 - DNA, 25 bp, Homo sapien
ggagggaatcagcttgtccaagagt

SEQ ID NO: 808595 - DNA, 25 bp, Homo sapien
tctgaagacttgggcagtggggggc

SEQ ID NO: 808596 - DNA, 25 bp, Homo sapien
gctgggagggctttaggggcattcc

SEQ ID NO: 808597 - DNA, 25 bp, Homo sapien
tcctgatcccatctgggggctgcat

SEQ ID NO: 808598 - DNA, 25 bp, Homo sapien
ggctgggagggctttaggggcattc

SEQ ID NO: 808599 - DNA, 25 bp, Homo sapien
tgggagggctttaggggcattccag

SEQ ID NO: 808600 - DNA, 25 bp, Homo sapien
ctagacatgcacagagatgaccagg

SEQ ID NO: 808601 - DNA, 25 bp, Homo sapien
atgcacagagatgaccagggagccc

SEQ ID NO: 808602 - DNA, 25 bp, Homo sapien
gacatgcacagagatgaccagggag

SEQ ID NO: 808603 - DNA, 25 bp, Homo sapien
catgcacagagatgaccagggagcc

SEQ ID NO: 808604 - DNA, 25 bp, Homo sapien
aagacatagagtcccggccatcaag

SEQ ID NO: 808605 - DNA, 25 bp, Homo sapien
tgcagccactgacttcagctagcca

SEQ ID NO: 808606 - DNA, 25 bp, Homo sapien
gccatgctggatgctaagacataga

SEQ ID NO: 808607 - DNA, 25 bp, Homo sapien
tgggcctccctcgggtcactcagtt

SEQ ID NO: 808608 - DNA, 25 bp, Homo sapien
atgttcccatagagggatcctgaga

SEQ ID NO: 808609 - DNA, 25 bp, Homo sapien
cccatagagggatcctgagaatccc

SEQ ID NO: 808610 - DNA, 25 bp, Homo sapien
ttcccatagagggatcctgagaatc

SEQ ID NO: 808611 - DNA, 25 bp, Homo sapien
tcatgttcccatagagggatcctga

SEQ ID NO: 808612 - DNA, 25 bp, Homo sapien
aaaacaacctagaccatgtgggtgg

SEQ ID NO: 808613 - DNA, 25 bp, Homo sapien
tgcttctcctagaccagtatttggg

SEQ ID NO: 808614 - DNA, 25 bp, Homo sapien
gaagaggacgttctagactcactcg

SEQ ID NO: 808615 - DNA, 25 bp, Homo sapien
gaacagagttcagcctagggtcagg

SEQ ID NO: 808616 - DNA, 25 bp, Homo sapien
gcccggcctccacttctctttctaa

SEQ ID NO: 808617 - DNA, 25 bp, Homo sapien
acttctctttctaaacattacgtgc

SEQ ID NO: 808618 - DNA, 25 bp, Homo sapien
tctctttctaaacattacgtgcctc

SEQ ID NO: 808619 - DNA, 25 bp, Homo sapien
tccacttctctttctaaacattacg

SEQ ID NO: 808620 - DNA, 25 bp, Homo sapien
gttgctgctactgacccgtgtccag

SEQ ID NO: 808621 - DNA, 25 bp, Homo sapien
gacagatggacaacagctggaggct

SEQ ID NO: 808622 - DNA, 25 bp, Homo sapien
ggtcctaaaggaagagtcgctacat

SEQ ID NO: 808623 - DNA, 25 bp, Homo sapien
tagacttagcgggattgtccctggg

SEQ ID NO: 808624 - DNA, 25 bp, Homo sapien
acagtacatctggttcccagtgccc

SEQ ID NO: 808625 - DNA, 25 bp, Homo sapien
ccagtgtgatcactttgcatggcct

SEQ ID NO: 808626 - DNA, 25 bp, Homo sapien
gtccagtgtgatcactttgcatggc

SEQ ID NO: 808627 - DNA, 25 bp, Homo sapien
tcacagtacatctggttcccagtgc

SEQ ID NO: 808628 - DNA, 25 bp, Homo sapien
agcctggacagcaaagctagactcc

SEQ ID NO: 808629 - DNA, 25 bp, Homo sapien
tggacagcaaagctagactccatct

SEQ ID NO: 808630 - DNA, 25 bp, Homo sapien
cagcctggacagcaaagctagactc

SEQ ID NO: 808631 - DNA, 25 bp, Homo sapien
cctggacagcaaagctagactccat

SEQ ID NO: 808632 - DNA, 25 bp, Homo sapien
gccgagaccacggcattggactcca

SEQ ID NO: 808633 - DNA, 25 bp, Homo sapien
tgagccgagaccacggcattggact

SEQ ID NO: 808634 - DNA, 25 bp, Homo sapien
gagccgagaccacggcattggactc

SEQ ID NO: 808635 - DNA, 25 bp, Homo sapien
cgagaccacggcattggactccagg

SEQ ID NO: 808636 - DNA, 25 bp, Homo sapien
tttcccctccctgcacaaagtcctg

SEQ ID NO: 808637 - DNA, 25 bp, Homo sapien
tcccctccctgcacaaagtcctggg

SEQ ID NO: 808638 - DNA, 25 bp, Homo sapien
catttcccctccctgcacaaagtcc

SEQ ID NO: 808639 - DNA, 25 bp, Homo sapien
ctgcatttcccctccctgcacaaag

SEQ ID NO: 808640 - DNA, 25 bp, Homo sapien
aaaaaacacatgtaactgccaggct

SEQ ID NO: 808641 - DNA, 25 bp, Homo sapien
atcctgggtgaatggtatctcctgc

SEQ ID NO: 808642 - DNA, 25 bp, Homo sapien
aacacatgtaactgccaggctgatc

SEQ ID NO: 808643 - DNA, 25 bp, Homo sapien
tgggtgaatggtatctcctgccact

SEQ ID NO: 808644 - DNA, 25 bp, Homo sapien
caggaaggtcggaatctctgatgtc

SEQ ID NO: 808645 - DNA, 25 bp, Homo sapien
tcaggaaggtcggaatctctgatgt

SEQ ID NO: 808646 - DNA, 25 bp, Homo sapien
atcaggaaggtcggaatctctgatg

SEQ ID NO: 808647 - DNA, 25 bp, Homo sapien
tccaatcaggaaggtcggaatctct

SEQ ID NO: 808648 - DNA, 25 bp, Homo sapien
tgttgtccaactgatctccaggcac

SEQ ID NO: 808649 - DNA, 25 bp, Homo sapien
aagagtatgttatcaattctcaagc

SEQ ID NO: 808650 - DNA, 25 bp, Homo sapien
agtatgttatcaattctcaagccta

SEQ ID NO: 808651 - DNA, 25 bp, Homo sapien
attctcaagcctaggagaagtcagg

SEQ ID NO: 808652 - DNA, 25 bp, Homo sapien
atctgtcccctcttacggaacctag

SEQ ID NO: 808653 - DNA, 25 bp, Homo sapien
cttacggaacctagtctccgttctg

SEQ ID NO: 808654 - DNA, 25 bp, Homo sapien
tacggaacctagtctccgttctgtc

SEQ ID NO: 808655 - DNA, 25 bp, Homo sapien
cttccttcgtcttagtcaatcctat

SEQ ID NO: 808656 - DNA, 25 bp, Homo sapien
tccttcgtcttagtcaatcctatcc

SEQ ID NO: 808657 - DNA, 25 bp, Homo sapien
gtgtgcaccactacaacttggctaa

SEQ ID NO: 808658 - DNA, 25 bp, Homo sapien
ttcgtcttagtcaatcctatcccac

SEQ ID NO: 808659 - DNA, 25 bp, Homo sapien
ccacacaccctcctcaggttctcct

SEQ ID NO: 808660 - DNA, 25 bp, Homo sapien
ttcttcccacacaccctcctcaggt

SEQ ID NO: 808661 - DNA, 25 bp, Homo sapien
cctgaatttctccattcttcccaca

SEQ ID NO: 808662 - DNA, 25 bp, Homo sapien
ccattcttcccacacaccctcctca

SEQ ID NO: 808663 - DNA, 25 bp, Homo sapien
accaggccaccgtgtaatgcttctg

SEQ ID NO: 808664 - DNA, 25 bp, Homo sapien
aggccaccgtgtaatgcttctgcat

SEQ ID NO: 808665 - DNA, 25 bp, Homo sapien
tgagtaaagaaaccaggccaccgtg

SEQ ID NO: 808666 - DNA, 25 bp, Homo sapien
aagaaaccaggccaccgtgtaatgc

SEQ ID NO: 808667 - DNA, 25 bp, Homo sapien
tgactgttgaagtccttgtggtgct

SEQ ID NO: 808668 - DNA, 25 bp, Homo sapien
tgtggtgctcagggaggatgggtga

SEQ ID NO: 808669 - DNA, 25 bp, Homo sapien
gatgggtgacactcgctgttgcttc

SEQ ID NO: 808670 - DNA, 25 bp, Homo sapien
caagctgactgttgaagtccttgtg

SEQ ID NO: 808671 - DNA, 25 bp, Homo sapien
aagaacaggattggaggtgctctct

SEQ ID NO: 808672 - DNA, 25 bp, Homo sapien
aaagaacaggattggaggtgctctc

SEQ ID NO: 808673 - DNA, 25 bp, Homo sapien
ccagctcatttttgtgcttctagaa

SEQ ID NO: 808674 - DNA, 25 bp, Homo sapien
tgttgttgagaaacagtcttgcttt

SEQ ID NO: 808675 - DNA, 25 bp, Homo sapien
catttttgtgcttctagaagagaca

SEQ ID NO: 808676 - DNA, 25 bp, Homo sapien
cctgcctcagtacctccattcttcc

SEQ ID NO: 808677 - DNA, 25 bp, Homo sapien
ctcaggggcgagcaccttccgtggc

SEQ ID NO: 808678 - DNA, 25 bp, Homo sapien
ggctcaggggcgagcaccttccgtg

SEQ ID NO: 808679 - DNA, 25 bp, Homo sapien
gcaaaaggacctatgcggggggctg

SEQ ID NO: 808680 - DNA, 25 bp, Homo sapien
caaaaggacctatgcggggggctgg

SEQ ID NO: 808681 - DNA, 25 bp, Homo sapien
ccaagaatcttttaatgacaggatc

SEQ ID NO: 808682 - DNA, 25 bp, Homo sapien
gatctttgtcccaggccaagaatct

SEQ ID NO: 808683 - DNA, 25 bp, Homo sapien
ggccaagaatcttttaatgacagga

SEQ ID NO: 808684 - DNA, 25 bp, Homo sapien
ctttgtcccaggccaagaatctttt

SEQ ID NO: 808685 - DNA, 25 bp, Homo sapien
gaaatgaatgcgttggtattgccag

SEQ ID NO: 808686 - DNA, 25 bp, Homo sapien
tggtattgccaggaggggaagccgg

SEQ ID NO: 808687 - DNA, 25 bp, Homo sapien
ggaagccggcccggctgaaatacgc

SEQ ID NO: 808688 - DNA, 25 bp, Homo sapien
agccggcccggctgaaatacgctat

SEQ ID NO: 808689 - DNA, 25 bp, Homo sapien
gaccgtccctagctcaggactggca

SEQ ID NO: 808690 - DNA, 25 bp, Homo sapien
aagggaccgtccctagctcaggact

SEQ ID NO: 808691 - DNA, 25 bp, Homo sapien
aggtaagggaccgtccctagctcag

SEQ ID NO: 808692 - DNA, 25 bp, Homo sapien
gggaccgtccctagctcaggactgg

SEQ ID NO: 808693 - DNA, 25 bp, Homo sapien
ctgaggacagaaatcaggttgctgc

SEQ ID NO: 808694 - DNA, 25 bp, Homo sapien
accaccaggagaggcctccggctga

SEQ ID NO: 808695 - DNA, 25 bp, Homo sapien
aggacagaaatcaggttgctgctca

SEQ ID NO: 808696 - DNA, 25 bp, Homo sapien
caggagaggcctccggctgaggtca

SEQ ID NO: 808697 - DNA, 25 bp, Homo sapien
gaatggcctaactggaaccaacgct

SEQ ID NO: 808698 - DNA, 25 bp, Homo sapien
ctcgggttcatggaatggcctaact

SEQ ID NO: 808699 - DNA, 25 bp, Homo sapien
atggaatggcctaactggaaccaac

SEQ ID NO: 808700 - DNA, 25 bp, Homo sapien
aatggcctaactggaaccaacgctt

SEQ ID NO: 808701 - DNA, 25 bp, Homo sapien
cgagttcatggaacggtataactgg

SEQ ID NO: 808702 - DNA, 25 bp, Homo sapien
ctcgagttcatggaacggtataact

SEQ ID NO: 808703 - DNA, 25 bp, Homo sapien
cagaagaagtggaaccgtcgtttct

SEQ ID NO: 808704 - DNA, 25 bp, Homo sapien
gccctcgagttcatggaacggtata

SEQ ID NO: 808705 - DNA, 25 bp, Homo sapien
ccacacccagtgctctgggtcataa

SEQ ID NO: 808706 - DNA, 25 bp, Homo sapien
tgcacaaatggttcctctcctcctg

SEQ ID NO: 808707 - DNA, 25 bp, Homo sapien
gttcctgctgaaaatccacatctcc

SEQ ID NO: 808708 - DNA, 25 bp, Homo sapien
tagcattggaataaagttcctgctg

SEQ ID NO: 808709 - DNA, 25 bp, Homo sapien
cctgcctggtgtctgccattagcat

SEQ ID NO: 808710 - DNA, 25 bp, Homo sapien
tcagtcacaaacctaaacagcaaat

SEQ ID NO: 808711 - DNA, 25 bp, Homo sapien
tagaagagattattatggaagtatc

SEQ ID NO: 808712 - DNA, 25 bp, Homo sapien
agataaaaagagtgctcgcttcagg

SEQ ID NO: 808713 - DNA, 25 bp, Homo sapien
aaagagtgctcgcttcaggagcaca

SEQ ID NO: 808714 - DNA, 25 bp, Homo sapien
gggccgtggcgtctgaaatttatta

SEQ ID NO: 808715 - DNA, 25 bp, Homo sapien
cataaacaggtaccgaaggaagcag

SEQ ID NO: 808716 - DNA, 25 bp, Homo sapien
attccccagggaagtacctcggctg

SEQ ID NO: 808717 - DNA, 25 bp, Homo sapien
actgcagtcatctgtttaggccttt

SEQ ID NO: 808718 - DNA, 25 bp, Homo sapien
gcagtcaagattagctcccctcatg

SEQ ID NO: 808719 - DNA, 25 bp, Homo sapien
tatcaaaatgacaccgacctccatg

SEQ ID NO: 808720 - DNA, 25 bp, Homo sapien
gcagattccagcacagtaggcctgt

SEQ ID NO: 808721 - DNA, 25 bp, Homo sapien
tgtaaatgaacgagcagcagattcc

SEQ ID NO: 808722 - DNA, 25 bp, Homo sapien
caccactgagttaaacacttaaaat

SEQ ID NO: 808723 - DNA, 25 bp, Homo sapien
catagcaaaacctagtccctaaaat

SEQ ID NO: 808724 - DNA, 25 bp, Homo sapien
actgtgcgtggccagaactttataa

SEQ ID NO: 808725 - DNA, 25 bp, Homo sapien
actttataataagagacttgaagct

SEQ ID NO: 808726 - DNA, 25 bp, Homo sapien
gcgtggccagaactttataataaga

SEQ ID NO: 808727 - DNA, 25 bp, Homo sapien
tggccagaactttataataagagac

SEQ ID NO: 808728 - DNA, 25 bp, Homo sapien
attttcagatgaaggggaactttat

SEQ ID NO: 808729 - DNA, 25 bp, Homo sapien
caattttcagatgaaggggaacttt

SEQ ID NO: 808730 - DNA, 25 bp, Homo sapien
cagatgaaggggaactttatagttt

SEQ ID NO: 808731 - DNA, 25 bp, Homo sapien
aatcacattcaattttcagatgaag

SEQ ID NO: 808732 - DNA, 25 bp, Homo sapien
ccggtgccttccgtggggacaagtg

SEQ ID NO: 808733 - DNA, 25 bp, Homo sapien
catcccggtgccttccgtggggaca

SEQ ID NO: 808734 - DNA, 25 bp, Homo sapien
ggtgccttccgtggggacaagtgga

SEQ ID NO: 808735 - DNA, 25 bp, Homo sapien
cggtgccttccgtggggacaagtgg

SEQ ID NO: 808736 - DNA, 25 bp, Homo sapien
gctgttgatgtttgctccgcccttg

SEQ ID NO: 808737 - DNA, 25 bp, Homo sapien
ttgatgtttgctccgcccttgagcc

SEQ ID NO: 808738 - DNA, 25 bp, Homo sapien
cagctgttgatgtttgctccgccct

SEQ ID NO: 808739 - DNA, 25 bp, Homo sapien
tgttgatgtttgctccgcccttgag

SEQ ID NO: 808740 - DNA, 25 bp, Homo sapien
aggcagtccagaacgtgggcaacat

SEQ ID NO: 808741 - DNA, 25 bp, Homo sapien
ccaccgtgcgccagggcgtggcgca

SEQ ID NO: 808742 - DNA, 25 bp, Homo sapien
agtccagaacgtgggcaacatggac

SEQ ID NO: 808743 - DNA, 25 bp, Homo sapien
gccgctgcagcccaccgtgcgccag

SEQ ID NO: 808744 - DNA, 25 bp, Homo sapien
ctagcagaacctggtccttcctgct

SEQ ID NO: 808745 - DNA, 25 bp, Homo sapien
tagcagaacctggtccttcctgctg

SEQ ID NO: 808746 - DNA, 25 bp, Homo sapien
gcagaacctggtccttcctgctgtc

SEQ ID NO: 808747 - DNA, 25 bp, Homo sapien
agaacctggtccttcctgctgtcac

SEQ ID NO: 808748 - DNA, 25 bp, Homo sapien
tcggtggtgaatcgcgggaccttcc

SEQ ID NO: 808749 - DNA, 25 bp, Homo sapien
cagaatgtaccgttcatcgccgtca

SEQ ID NO: 808750 - DNA, 25 bp, Homo sapien
tcctgttggccaaggtgcgggcctt

SEQ ID NO: 808751 - DNA, 25 bp, Homo sapien
catctcatggataagggaacaggcc

SEQ ID NO: 808752 - DNA, 25 bp, Homo sapien
taacgctgctctgtgcatgaggctt

SEQ ID NO: 808753 - DNA, 25 bp, Homo sapien
ctctgttctgaacttccctatcaga

SEQ ID NO: 808754 - DNA, 25 bp, Homo sapien
gaagctgggaagctcaatctaatgt

SEQ ID NO: 808755 - DNA, 25 bp, Homo sapien
tagaggttcccacttggtccacacc

SEQ ID NO: 808756 - DNA, 25 bp, Homo sapien
gccacagtggttggccttctagtga

SEQ ID NO: 808757 - DNA, 25 bp, Homo sapien
tgtccaggcctctctcagagtgagg

SEQ ID NO: 808758 - DNA, 25 bp, Homo sapien
tgtcctcggcaatgagactcctgct

SEQ ID NO: 808759 - DNA, 25 bp, Homo sapien
ttccaagtcagcctaagaaggtcca

SEQ ID NO: 808760 - DNA, 25 bp, Homo sapien
attcccagattatggaggtgcctca

SEQ ID NO: 808761 - DNA, 25 bp, Homo sapien
ggattcccagattatggaggtgcct

SEQ ID NO: 808762 - DNA, 25 bp, Homo sapien
ggggattcccagattatggaggtgc

SEQ ID NO: 808763 - DNA, 25 bp, Homo sapien
gattcccagattatggaggtgcctc

SEQ ID NO: 808764 - DNA, 25 bp, Homo sapien
gaagccacgacaggtttacgttcca

SEQ ID NO: 808765 - DNA, 25 bp, Homo sapien
ggtttacgttccagccgcagctgca

SEQ ID NO: 808766 - DNA, 25 bp, Homo sapien
tggttctcatcagccgagccggggc

SEQ ID NO: 808767 - DNA, 25 bp, Homo sapien
catggcgccagaagccacgacaggt

SEQ ID NO: 808768 - DNA, 25 bp, Homo sapien
ggggctacccggtctgaccccatca

SEQ ID NO: 808769 - DNA, 25 bp, Homo sapien
gggcagcgagtggtcgggggctacc

SEQ ID NO: 808770 - DNA, 25 bp, Homo sapien
gctacccggtctgaccccatcaaag

SEQ ID NO: 808771 - DNA, 25 bp, Homo sapien
gcagcgagtggtcgggggctacccg

SEQ ID NO: 808772 - DNA, 25 bp, Homo sapien
tctgaagacttgggcagtggggggc

SEQ ID NO: 808773 - DNA, 25 bp, Homo sapien
cttggggagggaatcagcttgtcca

SEQ ID NO: 808774 - DNA, 25 bp, Homo sapien
ctgtgaagccttggggagggaatca

SEQ ID NO: 808775 - DNA, 25 bp, Homo sapien
ggagggaatcagcttgtccaagagt

SEQ ID NO: 808776 - DNA, 25 bp, Homo sapien
catgcacagagatgaccagggagcc

SEQ ID NO: 808777 - DNA, 25 bp, Homo sapien
ctagacatgcacagagatgaccagg

SEQ ID NO: 808778 - DNA, 25 bp, Homo sapien
atgcacagagatgaccagggagccc

SEQ ID NO: 808779 - DNA, 25 bp, Homo sapien
gacatgcacagagatgaccagggag

SEQ ID NO: 808780 - DNA, 25 bp, Homo sapien
tcatgttcccatagagggatcctga

SEQ ID NO: 808781 - DNA, 25 bp, Homo sapien
cccatagagggatcctgagaatccc

SEQ ID NO: 808782 - DNA, 25 bp, Homo sapien
atgttcccatagagggatcctgaga

SEQ ID NO: 808783 - DNA, 25 bp, Homo sapien
ttcccatagagggatcctgagaatc

SEQ ID NO: 808784 - DNA, 25 bp, Homo sapien
cagacagagggctgctaaggctggg

SEQ ID NO: 808785 - DNA, 25 bp, Homo sapien
gggactctgcaggggctgacctctg

SEQ ID NO: 808786 - DNA, 25 bp, Homo sapien
ccagacagagggctgctaaggctgg

SEQ ID NO: 808787 - DNA, 25 bp, Homo sapien
cccagacagagggctgctaaggctg

SEQ ID NO: 808788 - DNA, 25 bp, Homo sapien
gagtgacccaagacagatcactcac

SEQ ID NO: 808789 - DNA, 25 bp, Homo sapien
ctggggctgagtgacccaagacaga

SEQ ID NO: 808790 - DNA, 25 bp, Homo sapien
acccaagacagatcactcacactct

SEQ ID NO: 808791 - DNA, 25 bp, Homo sapien
ggggctgagtgacccaagacagatc

SEQ ID NO: 808792 - DNA, 25 bp, Homo sapien
gcgggtgtccttagcccaaagcttg

SEQ ID NO: 808793 - DNA, 25 bp, Homo sapien
cgagagagattgtttctagatgagg

SEQ ID NO: 808794 - DNA, 25 bp, Homo sapien
tagcccaaagcttgtgccagtctct

SEQ ID NO: 808795 - DNA, 25 bp, Homo sapien
gagccatcaagtctggcgagagaga

SEQ ID NO: 808796 - DNA, 25 bp, Homo sapien
tccacttctctttctaaacattacg

SEQ ID NO: 808797 - DNA, 25 bp, Homo sapien
gcccggcctccacttctctttctaa

SEQ ID NO: 808798 - DNA, 25 bp, Homo sapien
acttctctttctaaacattacgtgc

SEQ ID NO: 808799 - DNA, 25 bp, Homo sapien
tctctttctaaacattacgtgcctc

SEQ ID NO: 808800 - DNA, 25 bp, Homo sapien
tagacttagcgggattgtccctggg

SEQ ID NO: 808801 - DNA, 25 bp, Homo sapien
ggtcctaaaggaagagtcgctacat

SEQ ID NO: 808802 - DNA, 25 bp, Homo sapien
gacagatggacaacagctggaggct

SEQ ID NO: 808803 - DNA, 25 bp, Homo sapien
gttgctgctactgacccgtgtccag

SEQ ID NO: 808804 - DNA, 25 bp, Homo sapien
tcacagtacatctggttcccagtgc

SEQ ID NO: 808805 - DNA, 25 bp, Homo sapien
acagtacatctggttcccagtgccc

SEQ ID NO: 808806 - DNA, 25 bp, Homo sapien
gtccagtgtgatcactttgcatggc

SEQ ID NO: 808807 - DNA, 25 bp, Homo sapien
ccagtgtgatcactttgcatggcct

SEQ ID NO: 808808 - DNA, 25 bp, Homo sapien
cagacccctaggttaacagtgagga

SEQ ID NO: 808809 - DNA, 25 bp, Homo sapien
ggacacagcccactagtgagttaca

SEQ ID NO: 808810 - DNA, 25 bp, Homo sapien
tactgacacctgaacagacagattg

SEQ ID NO: 808811 - DNA, 25 bp, Homo sapien
cacgaaggcgtgaaagactccatga

SEQ ID NO: 808812 - DNA, 25 bp, Homo sapien
gcaaggagacatccctattatctgt

SEQ ID NO: 808813 - DNA, 25 bp, Homo sapien
agacacagagagcaaggagacatcc

SEQ ID NO: 808814 - DNA, 25 bp, Homo sapien
cagagagcaaggagacatccctatt

SEQ ID NO: 808815 - DNA, 25 bp, Homo sapien
ggagacatccctattatctgtcaaa

SEQ ID NO: 808816 - DNA, 25 bp, Homo sapien
cgagaccacggcattggactccagg

SEQ ID NO: 808817 - DNA, 25 bp, Homo sapien
gagccgagaccacggcattggactc

SEQ ID NO: 808818 - DNA, 25 bp, Homo sapien
tgagccgagaccacggcattggact

SEQ ID NO: 808819 - DNA, 25 bp, Homo sapien
gccgagaccacggcattggactcca

SEQ ID NO: 808820 - DNA, 25 bp, Homo sapien
tcccctccctgcacaaagtcctggg

SEQ ID NO: 808821 - DNA, 25 bp, Homo sapien
tttcccctccctgcacaaagtcctg

SEQ ID NO: 808822 - DNA, 25 bp, Homo sapien
catttcccctccctgcacaaagtcc

SEQ ID NO: 808823 - DNA, 25 bp, Homo sapien
ctgcatttcccctccctgcacaaag

SEQ ID NO: 808824 - DNA, 25 bp, Homo sapien
aagagtatgttatcaattctcaagc

SEQ ID NO: 808825 - DNA, 25 bp, Homo sapien
tgttgtccaactgatctccaggcac

SEQ ID NO: 808826 - DNA, 25 bp, Homo sapien
attctcaagcctaggagaagtcagg

SEQ ID NO: 808827 - DNA, 25 bp, Homo sapien
ttgtccaactgatctccaggcacca

SEQ ID NO: 808828 - DNA, 25 bp, Homo sapien
tacggaacctagtctccgttctgtc

SEQ ID NO: 808829 - DNA, 25 bp, Homo sapien
atctgtcccctcttacggaacctag

SEQ ID NO: 808830 - DNA, 25 bp, Homo sapien
cttacggaacctagtctccgttctg

SEQ ID NO: 808831 - DNA, 25 bp, Homo sapien
caacctcttcctcccagtctcaagt

SEQ ID NO: 808832 - DNA, 25 bp, Homo sapien
tgattctcctgtctcagcctcctga

SEQ ID NO: 808833 - DNA, 25 bp, Homo sapien
acctcttcctcccagtctcaagtga

SEQ ID NO: 808834 - DNA, 25 bp, Homo sapien
ctcttcctcccagtctcaagtgatt

SEQ ID NO: 808835 - DNA, 25 bp, Homo sapien
ggattccatttattcttctgcctca

SEQ ID NO: 808836 - DNA, 25 bp, Homo sapien
caacatccatctcctggattccatt

SEQ ID NO: 808837 - DNA, 25 bp, Homo sapien
tcctggattccatttattcttctgc

SEQ ID NO: 808838 - DNA, 25 bp, Homo sapien
ccatctcctggattccatttattct

SEQ ID NO: 808839 - DNA, 25 bp, Homo sapien
aagaaaccaggccaccgtgtaatgc

SEQ ID NO: 808840 - DNA, 25 bp, Homo sapien
tgagtaaagaaaccaggccaccgtg

SEQ ID NO: 808841 - DNA, 25 bp, Homo sapien
aggccaccgtgtaatgcttctgcat

SEQ ID NO: 808842 - DNA, 25 bp, Homo sapien
accaggccaccgtgtaatgcttctg

SEQ ID NO: 808843 - DNA, 25 bp, Homo sapien
ctcagattcatctgaccactccctc

SEQ ID NO: 808844 - DNA, 25 bp, Homo sapien
tcctcctcagattcatctgaccact

SEQ ID NO: 808845 - DNA, 25 bp, Homo sapien
tccggctcctcctcagattcatctg

SEQ ID NO: 808846 - DNA, 25 bp, Homo sapien
ggctcctcctcagattcatctgacc

SEQ ID NO: 808847 - DNA, 25 bp, Homo sapien
caagctgactgttgaagtccttgtg

SEQ ID NO: 808848 - DNA, 25 bp, Homo sapien
ccttgtggtgctcagggaggatgga

SEQ ID NO: 808849 - DNA, 25 bp, Homo sapien
ggatgacactcgctgttgcttcagc

SEQ ID NO: 808850 - DNA, 25 bp, Homo sapien
ggtgctcagggaggatggatgacac

SEQ ID NO: 808851 - DNA, 25 bp, Homo sapien
aagaacaggattggaggtgctctct

SEQ ID NO: 808852 - DNA, 25 bp, Homo sapien
aaagaacaggattggaggtgctctc

SEQ ID NO: 808853 - DNA, 25 bp, Homo sapien
tcaaagcaacctcttccacctgggt

SEQ ID NO: 808854 - DNA, 25 bp, Homo sapien
tgggataacaagcatgcctggctaa

SEQ ID NO: 808855 - DNA, 25 bp, Homo sapien
cgctatattggtctggttggtctcg

SEQ ID NO: 808856 - DNA, 25 bp, Homo sapien
tgttagtataaatgaggtttcgcta

SEQ ID NO: 808857 - DNA, 25 bp, Homo sapien
caaaaggacctatgcggggggctgg

SEQ ID NO: 808858 - DNA, 25 bp, Homo sapien
ggctcaggggcgagcaccttccgtg

SEQ ID NO: 808859 - DNA, 25 bp, Homo sapien
ctcaggggcgagcaccttccgtggc

SEQ ID NO: 808860 - DNA, 25 bp, Homo sapien
gcaaaaggacctatgcggggggctg

SEQ ID NO: 808861 - DNA, 25 bp, Homo sapien
aggccaagaatcttttaatgacagg

SEQ ID NO: 808862 - DNA, 25 bp, Homo sapien
gatctttgtcccaggccaagaatct

SEQ ID NO: 808863 - DNA, 25 bp, Homo sapien
ctttgtcccaggccaagaatctttt

SEQ ID NO: 808864 - DNA, 25 bp, Homo sapien
ccaagaatcttttaatgacaggatc

SEQ ID NO: 808865 - DNA, 25 bp, Homo sapien
agccggcccggctgaaatacgctat

SEQ ID NO: 808866 - DNA, 25 bp, Homo sapien
gaaatgaatgcgttggtattgccag

SEQ ID NO: 808867 - DNA, 25 bp, Homo sapien
ggaagccggcccggctgaaatacgc

SEQ ID NO: 808868 - DNA, 25 bp, Homo sapien
tggtattgccaggaggggaagccgg

SEQ ID NO: 808869 - DNA, 25 bp, Homo sapien
gaccgtccctagctcaggactggca

SEQ ID NO: 808870 - DNA, 25 bp, Homo sapien
aagggaccgtccctagctcaggact

SEQ ID NO: 808871 - DNA, 25 bp, Homo sapien
aggtaagggaccgtccctagctcag

SEQ ID NO: 808872 - DNA, 25 bp, Homo sapien
gggaccgtccctagctcaggactgg

SEQ ID NO: 808873 - DNA, 25 bp, Homo sapien
accaccaggagaggcctccggctga

SEQ ID NO: 808874 - DNA, 25 bp, Homo sapien
aggacagaaatcaggttgctgctca

SEQ ID NO: 808875 - DNA, 25 bp, Homo sapien
caggagaggcctccggctgaggtca

SEQ ID NO: 808876 - DNA, 25 bp, Homo sapien
ctgaggacagaaatcaggttgctgc

SEQ ID NO: 808877 - DNA, 25 bp, Homo sapien
tggaatggcctaactggaaccaagg

SEQ ID NO: 808878 - DNA, 25 bp, Homo sapien
tggcctaactggaaccaaggcttac

SEQ ID NO: 808879 - DNA, 25 bp, Homo sapien
gaatggcctaactggaaccaaggct

SEQ ID NO: 808880 - DNA, 25 bp, Homo sapien
atggaatggcctaactggaaccaag

SEQ ID NO: 808881 - DNA, 25 bp, Homo sapien
cgagttcatggaacggtataactgg

SEQ ID NO: 808882 - DNA, 25 bp, Homo sapien
ctcgagttcatggaacggtataact

SEQ ID NO: 808883 - DNA, 25 bp, Homo sapien
cagaagaagtggaaccgtcgtttct

SEQ ID NO: 808884 - DNA, 25 bp, Homo sapien
gccctcgagttcatggaacggtata

SEQ ID NO: 808885 - DNA, 25 bp, Homo sapien
gggactcgccaggatacccctctct

SEQ ID NO: 808886 - DNA, 25 bp, Homo sapien
gactcgccaggatacccctctctcc

SEQ ID NO: 808887 - DNA, 25 bp, Homo sapien
ctcgccaggatacccctctctcccc

SEQ ID NO: 808888 - DNA, 25 bp, Homo sapien
ggactcgccaggatacccctctctc

SEQ ID NO: 808889 - DNA, 25 bp, Homo sapien
agtgctctgggtcataagcctggat

SEQ ID NO: 808890 - DNA, 25 bp, Homo sapien
ccagtgctctgggtcataagcctgg

SEQ ID NO: 808891 - DNA, 25 bp, Homo sapien
cagtgctctgggtcataagcctgga

SEQ ID NO: 808892 - DNA, 25 bp, Homo sapien
ctaggaaaggtgagcgcgatctcgc

SEQ ID NO: 808893 - DNA, 25 bp, Homo sapien
ggaaaggtgagcgcgatctcgcgcc

SEQ ID NO: 808894 - DNA, 25 bp, Homo sapien
aggtgagcgcgatctcgcgcccaca

SEQ ID NO: 808895 - DNA, 25 bp, Homo sapien
aaaggtgagcgcgatctcgcgccca

SEQ ID NO: 808896 - DNA, 25 bp, Homo sapien
taactcaagtgcgtcaatcataatg

SEQ ID NO: 808897 - DNA, 25 bp, Homo sapien
tgctcaacgtggttagctgcacaag

SEQ ID NO: 808898 - DNA, 25 bp, Homo sapien
tgtaaaccaaagcttcactgaaccc

SEQ ID NO: 808899 - DNA, 25 bp, Homo sapien
ctgaaccctcgacccaaatcagtaa

SEQ ID NO: 808900 - DNA, 25 bp, Homo sapien
cctgcctggtgtctgccattagcat

SEQ ID NO: 808901 - DNA, 25 bp, Homo sapien
gcattggaataaagttcccgctgaa

SEQ ID NO: 808902 - DNA, 25 bp, Homo sapien
agttcccgctgaaaatccacatctc

SEQ ID NO: 808903 - DNA, 25 bp, Homo sapien
ccattagcattggaataaagttccc

SEQ ID NO: 808904 - DNA, 25 bp, Homo sapien
aaagagtgctcgcttcaggagcaca

SEQ ID NO: 808905 - DNA, 25 bp, Homo sapien
tcagtcacaaacctaaacagcaaat

SEQ ID NO: 808906 - DNA, 25 bp, Homo sapien
agataaaaagagtgctcgcttcagg

SEQ ID NO: 808907 - DNA, 25 bp, Homo sapien
tagaagagattattatggaagtatc

SEQ ID NO: 808908 - DNA, 25 bp, Homo sapien
aatagatgtagatgctatgttgctg

SEQ ID NO: 808909 - DNA, 25 bp, Homo sapien
aaaaccctgtagcttgggatcagcc

SEQ ID NO: 808910 - DNA, 25 bp, Homo sapien
catgacctccaaaaccacagggatt

SEQ ID NO: 808911 - DNA, 25 bp, Homo sapien
caaaaccacagggattgtaggtgtg

SEQ ID NO: 808912 - DNA, 25 bp, Homo sapien
tctcaaactcctgctgggatcatgg

SEQ ID NO: 808913 - DNA, 25 bp, Homo sapien
caaactcctgctgggatcatgggcg

SEQ ID NO: 808914 - DNA, 25 bp, Homo sapien
tcaaactcctgctgggatcatgggc

SEQ ID NO: 808915 - DNA, 25 bp, Homo sapien
actcctgctgggatcatgggcgtga

SEQ ID NO: 808916 - DNA, 25 bp, Homo sapien
ttcccagatcacaccacgggcatgg

SEQ ID NO: 808917 - DNA, 25 bp, Homo sapien
gtaggtagacagctacacgtcctgc

SEQ ID NO: 808918 - DNA, 25 bp, Homo sapien
tttccatggcccacgtcaatgccgt

SEQ ID NO: 808919 - DNA, 25 bp, Homo sapien
cttgttgttggcatttagaaggccc

SEQ ID NO: 808920 - DNA, 25 bp, Homo sapien
ttatcaaaatgacaccgacctccat

SEQ ID NO: 808921 - DNA, 25 bp, Homo sapien
tataatcttggtacctttttatcaa

SEQ ID NO: 808922 - DNA, 25 bp, Homo sapien
gggcaaagcacaagttccaagtctt

SEQ ID NO: 808923 - DNA, 25 bp, Homo sapien
aagtttcccgtcacaggctctcagg

SEQ ID NO: 808924 - DNA, 25 bp, Homo sapien
gtgataagatactgcacttggctgg

SEQ ID NO: 808925 - DNA, 25 bp, Homo sapien
taggtgacttacagcaaccaattgc

SEQ ID NO: 808926 - DNA, 25 bp, Homo sapien
cactgatcaactataggatgattgg

SEQ ID NO: 808927 - DNA, 25 bp, Homo sapien
aaggtgtgataagatactgcacttg

SEQ ID NO: 808928 - DNA, 25 bp, Homo sapien
actgtgcgtggccagaactttataa

SEQ ID NO: 808929 - DNA, 25 bp, Homo sapien
tggccagaactttataataagagac

SEQ ID NO: 808930 - DNA, 25 bp, Homo sapien
actttataataagagacttgaagct

SEQ ID NO: 808931 - DNA, 25 bp, Homo sapien
gcgtggccagaactttataataaga

SEQ ID NO: 808932 - DNA, 25 bp, Homo sapien
caattttcagatgaaggggaacttt

SEQ ID NO: 808933 - DNA, 25 bp, Homo sapien
atcacattcaattttcagatgaagg

SEQ ID NO: 808934 - DNA, 25 bp, Homo sapien
attttcagatgaaggggaactttat

SEQ ID NO: 808935 - DNA, 25 bp, Homo sapien
cagatgaaggggaactttatagttt

SEQ ID NO: 808936 - DNA, 25 bp, Homo sapien
ccggtgccttccgtggggacaagtg

SEQ ID NO: 808937 - DNA, 25 bp, Homo sapien
catcccggtgccttccgtggggaca

SEQ ID NO: 808938 - DNA, 25 bp, Homo sapien
ggtgccttccgtggggacaagtgga

SEQ ID NO: 808939 - DNA, 25 bp, Homo sapien
cggtgccttccgtggggacaagtgg

SEQ ID NO: 808940 - DNA, 25 bp, Homo sapien
tagccttgtagaacatctatgcaca

SEQ ID NO: 808941 - DNA, 25 bp, Homo sapien
gaaaagtcagccttctaccccatta

SEQ ID NO: 808942 - DNA, 25 bp, Homo sapien
tctatgcacaaagaagtaagtcgta

SEQ ID NO: 808943 - DNA, 25 bp, Homo sapien
tactggagtagtcactgagcttcag

SEQ ID NO: 808944 - DNA, 25 bp, Homo sapien
tgtgccgcctcaagtcaaataggag

SEQ ID NO: 808945 - DNA, 25 bp, Homo sapien
aacacttcagccacagggagggtca

SEQ ID NO: 808946 - DNA, 25 bp, Homo sapien
tgaaacaagagcgagccggttggct

SEQ ID NO: 808947 - DNA, 25 bp, Homo sapien
aatcgacttggccactgtgccgcct

SEQ ID NO: 808948 - DNA, 25 bp, Homo sapien
agagacggaagcagccaagctccca

SEQ ID NO: 808949 - DNA, 25 bp, Homo sapien
acctgagctgtacggcctggcttgg

SEQ ID NO: 808950 - DNA, 25 bp, Homo sapien
gggacctcagtctccgatccgggcc

SEQ ID NO: 808951 - DNA, 25 bp, Homo sapien
tgtacggcctggcttggcaagccca

SEQ ID NO: 808952 - DNA, 25 bp, Homo sapien
tccttcagagttcggcgcgccgggc

SEQ ID NO: 808953 - DNA, 25 bp, Homo sapien
aggtggcacgggagccgcgcccgca

SEQ ID NO: 808954 - DNA, 25 bp, Homo sapien
accgcgaccagcacgcggtcgccat

SEQ ID NO: 808955 - DNA, 25 bp, Homo sapien
cggtcgccatccgggtaggtgaggg

SEQ ID NO: 808956 - DNA, 25 bp, Homo sapien
atcctcgtcgtacttcacctgcagg

SEQ ID NO: 808957 - DNA, 25 bp, Homo sapien
cacgtcgaccacatttattaagttc

SEQ ID NO: 808958 - DNA, 25 bp, Homo sapien
gcacgtcgaccacatttattaagtt

SEQ ID NO: 808959 - DNA, 25 bp, Homo sapien
gcttcctaggcaggcttaccatgtg

SEQ ID NO: 808960 - DNA, 25 bp, Homo sapien
gactacggcatctactatttgggca

SEQ ID NO: 808961 - DNA, 25 bp, Homo sapien
ggagcccttcctagaaaagtgtgtg

SEQ ID NO: 808962 - DNA, 25 bp, Homo sapien
gctactcatggaaaacttaggccaa

SEQ ID NO: 808963 - DNA, 25 bp, Homo sapien
gcaattatcaccctcaatactttga

SEQ ID NO: 808964 - DNA, 25 bp, Homo sapien
ttatcaccctcaatactttgaactt

SEQ ID NO: 808965 - DNA, 25 bp, Homo sapien
tttgcaattatcaccctcaatactt

SEQ ID NO: 808966 - DNA, 25 bp, Homo sapien
ttcaattttgcaattatcaccctca

SEQ ID NO: 808967 - DNA, 25 bp, Homo sapien
caagaactcttaaccaagctcacat

SEQ ID NO: 808968 - DNA, 25 bp, Homo sapien
cgggaggcgcacacttgttgtttta

SEQ ID NO: 808969 - DNA, 25 bp, Homo sapien
cgacgggaggcgcacacttgttgtt

SEQ ID NO: 808970 - DNA, 25 bp, Homo sapien
ccaagctcacatgaacttacaaaat

SEQ ID NO: 808971 - DNA, 25 bp, Homo sapien
ttcttcacaaaagcaggggccagag

SEQ ID NO: 808972 - DNA, 25 bp, Homo sapien
tgcttcttcacaaaagcaggggcca

SEQ ID NO: 808973 - DNA, 25 bp, Homo sapien
ccagagccaacttcttccccttggc

SEQ ID NO: 808974 - DNA, 25 bp, Homo sapien
ggccagagccaacttcttccccttg

SEQ ID NO: 808975 - DNA, 25 bp, Homo sapien
atttcacaaagcaggtgaggtctct

SEQ ID NO: 808976 - DNA, 25 bp, Homo sapien
cacaaagcaggtgaggtctcttttg

SEQ ID NO: 808977 - DNA, 25 bp, Homo sapien
ttcacaaagcaggtgaggtctcttt

SEQ ID NO: 808978 - DNA, 25 bp, Homo sapien
tagcggggccatttcacaaagcagg

SEQ ID NO: 808979 - DNA, 25 bp, Homo sapien
tatagagtatggatctctgccattg

SEQ ID NO: 808980 - DNA, 25 bp, Homo sapien
tagagtatggatctctgccattgca

SEQ ID NO: 808981 - DNA, 25 bp, Homo sapien
ttatagagtatggatctctgccatt

SEQ ID NO: 808982 - DNA, 25 bp, Homo sapien
gagtatggatctctgccattgcaac

SEQ ID NO: 808983 - DNA, 25 bp, Homo sapien
gagtagctgtttggccttccagggc

SEQ ID NO: 808984 - DNA, 25 bp, Homo sapien
ctgagtagctgtttggccttccagg

SEQ ID NO: 808985 - DNA, 25 bp, Homo sapien
tagctgtttggccttccagggcctg

SEQ ID NO: 808986 - DNA, 25 bp, Homo sapien
cagctgagtagctgtttggccttcc

SEQ ID NO: 808987 - DNA, 25 bp, Homo sapien
ctgcctgggccaacagcctccgctt

SEQ ID NO: 808988 - DNA, 25 bp, Homo sapien
tgcctgggccaacagcctccgcttc

SEQ ID NO: 808989 - DNA, 25 bp, Homo sapien
aactctgcctgggccaacagcctcc

SEQ ID NO: 808990 - DNA, 25 bp, Homo sapien
ctctgcctgggccaacagcctccgc

SEQ ID NO: 808991 - DNA, 25 bp, Homo sapien
gttatccacaaaggtggtgatggtg

SEQ ID NO: 808992 - DNA, 25 bp, Homo sapien
cagcagagctttcttgttatccaca

SEQ ID NO: 808993 - DNA, 25 bp, Homo sapien
agagctttcttgttatccacaaagg

SEQ ID NO: 808994 - DNA, 25 bp, Homo sapien
gcagagctttcttgttatccacaaa

SEQ ID NO: 808995 - DNA, 25 bp, Homo sapien
agtgggtctcatcgtatctggcatt

SEQ ID NO: 808996 - DNA, 25 bp, Homo sapien
tgaaaagactatccacaaagcactt

SEQ ID NO: 808997 - DNA, 25 bp, Homo sapien
gagtctgaagtcaaattatatttaa

SEQ ID NO: 808998 - DNA, 25 bp, Homo sapien
gttaactacgttatgcccagagaca

SEQ ID NO: 808999 - DNA, 25 bp, Homo sapien
ctgtactatagcatggttaactacg

SEQ ID NO: 809000 - DNA, 25 bp, Homo sapien
ataaagagatatggatcacttgagc

SEQ ID NO: 809001 - DNA, 25 bp, Homo sapien
ctacaagcgtatgccatcacgccag

SEQ ID NO: 809002 - DNA, 25 bp, Homo sapien
tatatatgtctttagttttattaca

SEQ ID NO: 809003 - DNA, 25 bp, Homo sapien
tgcacccggcctagtctgatttttt

SEQ ID NO: 809004 - DNA, 25 bp, Homo sapien
tatatttccataaactgttcccaga

SEQ ID NO: 809005 - DNA, 25 bp, Homo sapien
gttcccagacagatcactttgcctc

SEQ ID NO: 809006 - DNA, 25 bp, Homo sapien
taaactgttcccagacagatcactt

SEQ ID NO: 809007 - DNA, 25 bp, Homo sapien
ttgtttgaacatgcaatttttgacc

SEQ ID NO: 809008 - DNA, 25 bp, Homo sapien
caacttggtgagccaaatggaagca

SEQ ID NO: 809009 - DNA, 25 bp, Homo sapien
ccaaatggaagcaaagttgcaatta

SEQ ID NO: 809010 - DNA, 25 bp, Homo sapien
agccaaatggaagcaaagttgcaat

SEQ ID NO: 809011 - DNA, 25 bp, Homo sapien
acttggtgagccaaatggaagcaaa

SEQ ID NO: 809012 - DNA, 25 bp, Homo sapien
tgattccctacctctaattacgaga

SEQ ID NO: 809013 - DNA, 25 bp, Homo sapien
gtggaatcagtggataactacataa

SEQ ID NO: 809014 - DNA, 25 bp, Homo sapien
aattacgagattctgagcaatagtg

SEQ ID NO: 809015 - DNA, 25 bp, Homo sapien
gccaaaatgctacctgtggaatcag

SEQ ID NO: 809016 - DNA, 25 bp, Homo sapien
gtagatacagtaacagaacttccct

SEQ ID NO: 809017 - DNA, 25 bp, Homo sapien
ttcctaatgtaatatccccagcagc

SEQ ID NO: 809018 - DNA, 25 bp, Homo sapien
tgtataaagatacttggctttcagc

SEQ ID NO: 809019 - DNA, 25 bp, Homo sapien
gaacttccctgcagtttatctatgg

SEQ ID NO: 809020 - DNA, 25 bp, Homo sapien
aatttatgctatgtggaaagtctca

SEQ ID NO: 809021 - DNA, 25 bp, Homo sapien
ttttttcaactacagagtcatctct

SEQ ID NO: 809022 - DNA, 25 bp, Homo sapien
tcagatgtattatgcctttgtcagc

SEQ ID NO: 809023 - DNA, 25 bp, Homo sapien
gctatgtggaaagtctcagatgtat

SEQ ID NO: 809024 - DNA, 25 bp, Homo sapien
gctctgtggaaattcaagaagcagc

SEQ ID NO: 809025 - DNA, 25 bp, Homo sapien
tacatagcatgattagcactaacca

SEQ ID NO: 809026 - DNA, 25 bp, Homo sapien
gttttgccagagtgtacagatacca

SEQ ID NO: 809027 - DNA, 25 bp, Homo sapien
cctggaatatggctcaaaaggcatt

SEQ ID NO: 809028 - DNA, 25 bp, Homo sapien
ttgtatttgcaagccacagtgctaa

SEQ ID NO: 809029 - DNA, 25 bp, Homo sapien
ccaaacagagtaatcaagtatcctt

SEQ ID NO: 809030 - DNA, 25 bp, Homo sapien
gattatggttcaagcacatagaact

SEQ ID NO: 809031 - DNA, 25 bp, Homo sapien
gaaagggagacacttgtatttgcaa

SEQ ID NO: 809032 - DNA, 25 bp, Homo sapien
tccttgaagattcaaaggaacaaag

SEQ ID NO: 809033 - DNA, 25 bp, Homo sapien
tactgtgatgttacccatcttgctt

SEQ ID NO: 809034 - DNA, 25 bp, Homo sapien
ccatcttgctttgtaatgttatatt

SEQ ID NO: 809035 - DNA, 25 bp, Homo sapien
tgtgatgttacccatcttgctttgt

SEQ ID NO: 809036 - DNA, 25 bp, Homo sapien
gtgatgttacccatcttgctttgta

SEQ ID NO: 809037 - DNA, 25 bp, Homo sapien
taatcatgatattgtggcaccggca

SEQ ID NO: 809038 - DNA, 25 bp, Homo sapien
gcaccggcataaggctcaccaaata

SEQ ID NO: 809039 - DNA, 25 bp, Homo sapien
tgctaaagtaatccatcagagaaag

SEQ ID NO: 809040 - DNA, 25 bp, Homo sapien
gaattaggaacaagagatcagacat

SEQ ID NO: 809041 - DNA, 25 bp, Homo sapien
gaggcttttagacatccagaagacg

SEQ ID NO: 809042 - DNA, 25 bp, Homo sapien
ttccccagttggctgacataaacat

SEQ ID NO: 809043 - DNA, 25 bp, Homo sapien
ctatggcaccctgattagttgaggc

SEQ ID NO: 809044 - DNA, 25 bp, Homo sapien
tagttgaggcttttagacatccaga

SEQ ID NO: 809045 - DNA, 25 bp, Homo sapien
aaatgttgaagacctaagagactcc

SEQ ID NO: 809046 - DNA, 25 bp, Homo sapien
caagcatagcctggaatgaattaag

SEQ ID NO: 809047 - DNA, 25 bp, Homo sapien
taatgtcccatcgttaacactaact

SEQ ID NO: 809048 - DNA, 25 bp, Homo sapien
taaacttcttcatggttgacatcag

SEQ ID NO: 809049 - DNA, 25 bp, Homo sapien
caggcttttggatacctaaggtaag

SEQ ID NO: 809050 - DNA, 25 bp, Homo sapien
tcatcgtagtacaggacttgtgacc

SEQ ID NO: 809051 - DNA, 25 bp, Homo sapien
tagaacactgagctcttgtgctttc

SEQ ID NO: 809052 - DNA, 25 bp, Homo sapien
gtatttccatacaacctggctgtaa

SEQ ID NO: 809053 - DNA, 25 bp, Homo sapien
gtttgattgtctgaagccttctctc

SEQ ID NO: 809054 - DNA, 25 bp, Homo sapien
ttagctcagagtagtttgattgtct

SEQ ID NO: 809055 - DNA, 25 bp, Homo sapien
cctttagctcagagtagtttgattg

SEQ ID NO: 809056 - DNA, 25 bp, Homo sapien
tcctttagctcagagtagtttgatt

SEQ ID NO: 809057 - DNA, 25 bp, Homo sapien
gatgggaccttgacaataatagaac

SEQ ID NO: 809058 - DNA, 25 bp, Homo sapien
catggacttctgagttcacatcaac

SEQ ID NO: 809059 - DNA, 25 bp, Homo sapien
aatgagcttgaagtgaagatgggac

SEQ ID NO: 809060 - DNA, 25 bp, Homo sapien
caacctctttccctgataactgtaa

SEQ ID NO: 809061 - DNA, 25 bp, Homo sapien
aaaattccgatttactccagtcaca

SEQ ID NO: 809062 - DNA, 25 bp, Homo sapien
tacaaaaacgattcacatttgtggg

SEQ ID NO: 809063 - DNA, 25 bp, Homo sapien
tccagtcacacgaagttagttttaa

SEQ ID NO: 809064 - DNA, 25 bp, Homo sapien
aaaatagtatcagccaccagtgtag

SEQ ID NO: 809065 - DNA, 25 bp, Homo sapien
tccagaagtcatgctgcagataaaa

SEQ ID NO: 809066 - DNA, 25 bp, Homo sapien
cagataaaatccaggcttttagcaa

SEQ ID NO: 809067 - DNA, 25 bp, Homo sapien
ggcttttagcaataagagtatttct

SEQ ID NO: 809068 - DNA, 25 bp, Homo sapien
tccaggcttttagcaataagagtat

SEQ ID NO: 809069 - DNA, 25 bp, Homo sapien
tgccagactgagttatagagtagct

SEQ ID NO: 809070 - DNA, 25 bp, Homo sapien
cacttgccagcatttgaataatcgg

SEQ ID NO: 809071 - DNA, 25 bp, Homo sapien
tccagtttctctgcacacttgccag

SEQ ID NO: 809072 - DNA, 25 bp, Homo sapien
tgcccaggaatataaatgctaggtg

SEQ ID NO: 809073 - DNA, 25 bp, Homo sapien
ttcacaaacaatacctttaacacca

SEQ ID NO: 809074 - DNA, 25 bp, Homo sapien
caatacctttaacaccacatacaat

SEQ ID NO: 809075 - DNA, 25 bp, Homo sapien
ctttaacaccacatacaattccata

SEQ ID NO: 809076 - DNA, 25 bp, Homo sapien
ccacatacaattccataacaaaata

SEQ ID NO: 809077 - DNA, 25 bp, Homo sapien
tttgcggtaccttgcacccatttgc

SEQ ID NO: 809078 - DNA, 25 bp, Homo sapien
tgattttgcggtaccttgcacccat

SEQ ID NO: 809079 - DNA, 25 bp, Homo sapien
gattttgcggtaccttgcacccatt

SEQ ID NO: 809080 - DNA, 25 bp, Homo sapien
cggtaccttgcacccatttgctttt

SEQ ID NO: 809081 - DNA, 25 bp, Homo sapien
ttagatatggtatagatacgtagtc

SEQ ID NO: 809082 - DNA, 25 bp, Homo sapien
gctacaagccttcgtttagatatgg

SEQ ID NO: 809083 - DNA, 25 bp, Homo sapien
gcgagtggacctccgtttggttcaa

SEQ ID NO: 809084 - DNA, 25 bp, Homo sapien
tcttattacgctgggcgagtggacc

SEQ ID NO: 809085 - DNA, 25 bp, Homo sapien
aattcatgacgcgagcctctacacg

SEQ ID NO: 809086 - DNA, 25 bp, Homo sapien
tggtacgggagttgtctgcacagat

SEQ ID NO: 809087 - DNA, 25 bp, Homo sapien
tagtatttcgggtgtctcttgggtc

SEQ ID NO: 809088 - DNA, 25 bp, Homo sapien
gctgctctgtccgtcagagtcagag

SEQ ID NO: 809089 - DNA, 25 bp, Homo sapien
ggttatgaaggtgttatatctcctc

SEQ ID NO: 809090 - DNA, 25 bp, Homo sapien
tctttacaaatcaaggttatgaagg

SEQ ID NO: 809091 - DNA, 25 bp, Homo sapien
gtcaaattgagacagaacagggacc

SEQ ID NO: 809092 - DNA, 25 bp, Homo sapien
acagaacagggaccgcttgtaaggg

SEQ ID NO: 809093 - DNA, 25 bp, Homo sapien
aatccatttttcacgtttgcttgct

SEQ ID NO: 809094 - DNA, 25 bp, Homo sapien
ttcacgtttgcttgcttgattcatg

SEQ ID NO: 809095 - DNA, 25 bp, Homo sapien
ccttttggggcatcagccttaatcc

SEQ ID NO: 809096 - DNA, 25 bp, Homo sapien
cagggactgaaaccaactttgcctt

SEQ ID NO: 809097 - DNA, 25 bp, Homo sapien
tgagaagaactcagcgcatcactgc

SEQ ID NO: 809098 - DNA, 25 bp, Homo sapien
tgatgggccatcactcctatgaatg

SEQ ID NO: 809099 - DNA, 25 bp, Homo sapien
tccctgagcggagaacctagacata

SEQ ID NO: 809100 - DNA, 25 bp, Homo sapien
gaaaacctgtcatgtgagagctaca

SEQ ID NO: 809101 - DNA, 25 bp, Homo sapien
tgtctaagccatgacagccgaaggc

SEQ ID NO: 809102 - DNA, 25 bp, Homo sapien
cacttcgttgtctaaagaggccaca

SEQ ID NO: 809103 - DNA, 25 bp, Homo sapien
gcagctttctgcgatcagctccggg

SEQ ID NO: 809104 - DNA, 25 bp, Homo sapien
tgtccctatgcacaagaagcaggca

SEQ ID NO: 809105 - DNA, 25 bp, Homo sapien
aacaagagccaagcctcacggccta

SEQ ID NO: 809106 - DNA, 25 bp, Homo sapien
attcctttggagagagtaatctagt

SEQ ID NO: 809107 - DNA, 25 bp, Homo sapien
gagtaatctagttgattctgcagca

SEQ ID NO: 809108 - DNA, 25 bp, Homo sapien
agcctcacggcctatgtttttcaga

SEQ ID NO: 809109 - DNA, 25 bp, Homo sapien
tccccttagagctggttggcctagg

SEQ ID NO: 809110 - DNA, 25 bp, Homo sapien
caagggcagtaacacattccaagag

SEQ ID NO: 809111 - DNA, 25 bp, Homo sapien
tccaagaggctaagggctaaaggta

SEQ ID NO: 809112 - DNA, 25 bp, Homo sapien
agctagctgagctgcttcaagggca

SEQ ID NO: 809113 - DNA, 25 bp, Homo sapien
agaagtattgatataaagggaatga

SEQ ID NO: 809114 - DNA, 25 bp, Homo sapien
tataactgctgagttgtaaactttt

SEQ ID NO: 809115 - DNA, 25 bp, Homo sapien
tgtataactgctgagttgtaaactt

SEQ ID NO: 809116 - DNA, 25 bp, Homo sapien
taagaagtattgatataaagggaat

SEQ ID NO: 809117 - DNA, 25 bp, Homo sapien
caattgaatgtttcacaaatctgtg

SEQ ID NO: 809118 - DNA, 25 bp, Homo sapien
aaaacaattgaatgtttcacaaatc

SEQ ID NO: 809119 - DNA, 25 bp, Homo sapien
aggctaatccctgtatttttccaat

SEQ ID NO: 809120 - DNA, 25 bp, Homo sapien
ccaggctaatccctgtatttttcca

SEQ ID NO: 809121 - DNA, 25 bp, Homo sapien
taagaatttgaaagcgcatctcttc

SEQ ID NO: 809122 - DNA, 25 bp, Homo sapien
gggaagactgtagaataaaccacat

SEQ ID NO: 809123 - DNA, 25 bp, Homo sapien
aaccacatttgagctggtttgaagc

SEQ ID NO: 809124 - DNA, 25 bp, Homo sapien
aaagcgcatctcttccacagagaag

SEQ ID NO: 809125 - DNA, 25 bp, Homo sapien
tgttattcccacaccactgatgaga

SEQ ID NO: 809126 - DNA, 25 bp, Homo sapien
gactgtgctcttaaccaaccctgta

SEQ ID NO: 809127 - DNA, 25 bp, Homo sapien
tactgaaccgagtgagaagaaggac

SEQ ID NO: 809128 - DNA, 25 bp, Homo sapien
gatttgaactcaagccagtgggccc

SEQ ID NO: 809129 - DNA, 25 bp, Homo sapien
tgtattaatttcctactttatgagg

SEQ ID NO: 809130 - DNA, 25 bp, Homo sapien
gtggtggttgtcagctaatatcaat

SEQ ID NO: 809131 - DNA, 25 bp, Homo sapien
gaggtaggcaatacttttaattcca

SEQ ID NO: 809132 - DNA, 25 bp, Homo sapien
atcaatttagcccttactacatgtc

SEQ ID NO: 809133 - DNA, 25 bp, Homo sapien
ctgggcatgtggtaatctttcccct

SEQ ID NO: 809134 - DNA, 25 bp, Homo sapien
ctccagcccaattattaagtcccaa

SEQ ID NO: 809135 - DNA, 25 bp, Homo sapien
ttgagatgtttagattatctgcact

SEQ ID NO: 809136 - DNA, 25 bp, Homo sapien
aaataaagtgagtaaattgagatgt

SEQ ID NO: 809137 - DNA, 25 bp, Homo sapien
aaatggattggaaatgtaacaacac

SEQ ID NO: 809138 - DNA, 25 bp, Homo sapien
caaattgaataaattttgtgggtca

SEQ ID NO: 809139 - DNA, 25 bp, Homo sapien
tttgtgggtcacagtagaaaaaaca

SEQ ID NO: 809140 - DNA, 25 bp, Homo sapien
tggattggaaatgtaacaacacata

SEQ ID NO: 809141 - DNA, 25 bp, Homo sapien
cgttcatatacctttgcattctcat

SEQ ID NO: 809142 - DNA, 25 bp, Homo sapien
gaatagtattccataccacaatttc

SEQ ID NO: 809143 - DNA, 25 bp, Homo sapien
cactgtactgtactcaatttgtagt

SEQ ID NO: 809144 - DNA, 25 bp, Homo sapien
ccccaaaatccattgcatcgttcat

SEQ ID NO: 809145 - DNA, 25 bp, Homo sapien
ctgagaaatgggacaacacaagcac

SEQ ID NO: 809146 - DNA, 25 bp, Homo sapien
tgaatgattatctgtctctaggcct

SEQ ID NO: 809147 - DNA, 25 bp, Homo sapien
ccttatctgagtgttgtgccagtaa

SEQ ID NO: 809148 - DNA, 25 bp, Homo sapien
gcatcaataagccacattagtcagt

SEQ ID NO: 809149 - DNA, 25 bp, Homo sapien
tgcagctacttgtatcctagaccaa

SEQ ID NO: 809150 - DNA, 25 bp, Homo sapien
tcctctatcagggttggctatcctc

SEQ ID NO: 809151 - DNA, 25 bp, Homo sapien
gtatcctagaccaataacccatcct

SEQ ID NO: 809152 - DNA, 25 bp, Homo sapien
cctcctctatcagggttggctatcc

SEQ ID NO: 809153 - DNA, 25 bp, Homo sapien
cctgagcctgctttaggcaactgct

SEQ ID NO: 809154 - DNA, 25 bp, Homo sapien
cctttcatcaactgataggcatttg

SEQ ID NO: 809155 - DNA, 25 bp, Homo sapien
tggaactaccactagaatctaattc

SEQ ID NO: 809156 - DNA, 25 bp, Homo sapien
tagcagtcactccttatgcctgtcc

SEQ ID NO: 809157 - DNA, 25 bp, Homo sapien
cctgccaccatgcccggataatttt

SEQ ID NO: 809158 - DNA, 25 bp, Homo sapien
acctgccaccatgcccggataattt

SEQ ID NO: 809159 - DNA, 25 bp, Homo sapien
tacagcttctgcctcctgggttaaa

SEQ ID NO: 809160 - DNA, 25 bp, Homo sapien
actacagcttctgcctcctgggtta

SEQ ID NO: 809161 - DNA, 25 bp, Homo sapien
gatggaggtcccacctctaaaaaga

SEQ ID NO: 809162 - DNA, 25 bp, Homo sapien
ccgaaagaacttggtgattgattat

SEQ ID NO: 809163 - DNA, 25 bp, Homo sapien
gaactaggtcagaggctagaacaag

SEQ ID NO: 809164 - DNA, 25 bp, Homo sapien
atagtcagccttccattttaggtag

SEQ ID NO: 809165 - DNA, 25 bp, Homo sapien
tgtctcatggctttatatcacctac

SEQ ID NO: 809166 - DNA, 25 bp, Homo sapien
taatagtatttgttaaagtgcctct

SEQ ID NO: 809167 - DNA, 25 bp, Homo sapien
tcaatcccttaagcacagagggccc

SEQ ID NO: 809168 - DNA, 25 bp, Homo sapien
cagctatacctactcccttgatgat

SEQ ID NO: 809169 - DNA, 25 bp, Homo sapien
caaagaagcctaccaagagggagag

SEQ ID NO: 809170 - DNA, 25 bp, Homo sapien
taagctagcttatgttgggtctcca

SEQ ID NO: 809171 - DNA, 25 bp, Homo sapien
aactggacttgcgattgaagacacc

SEQ ID NO: 809172 - DNA, 25 bp, Homo sapien
cctggagcgtataggtctaggccac

SEQ ID NO: 809173 - DNA, 25 bp, Homo sapien
tatactaatgctgtgcacggaccgc

SEQ ID NO: 809174 - DNA, 25 bp, Homo sapien
gcattcagccctcacgttatactaa

SEQ ID NO: 809175 - DNA, 25 bp, Homo sapien
tcatctatctggacctctctggctg

SEQ ID NO: 809176 - DNA, 25 bp, Homo sapien
cggaccgcagcacacttttcagagg

SEQ ID NO: 809177 - DNA, 25 bp, Homo sapien
aaataggtaaccaattatttcagca

SEQ ID NO: 809178 - DNA, 25 bp, Homo sapien
taaataggtaaccaattatttcagc

SEQ ID NO: 809179 - DNA, 25 bp, Homo sapien
tagtcaaatctataaagctttccct

SEQ ID NO: 809180 - DNA, 25 bp, Homo sapien
tctagaattaatcttgatagatgaa

SEQ ID NO: 809181 - DNA, 25 bp, Homo sapien
tgtttttttgcagtacctaagctaa

SEQ ID NO: 809182 - DNA, 25 bp, Homo sapien
tcaatctagaattaatcttgataga

SEQ ID NO: 809183 - DNA, 25 bp, Homo sapien
tctgactctaaccattttctgcaaa

SEQ ID NO: 809184 - DNA, 25 bp, Homo sapien
accagcctaagaagtggcaccatat

SEQ ID NO: 809185 - DNA, 25 bp, Homo sapien
tctttatcttctgactctaaccatt

SEQ ID NO: 809186 - DNA, 25 bp, Homo sapien
gcaaatgtaccagcctaagaagtgg

SEQ ID NO: 809187 - DNA, 25 bp, Homo sapien
tcattacagaaaggccagttaggaa

SEQ ID NO: 809188 - DNA, 25 bp, Homo sapien
tcctttgaaaaataacggtgatgag

SEQ ID NO: 809189 - DNA, 25 bp, Homo sapien
cagttaggaagggtatatgatcaca

SEQ ID NO: 809190 - DNA, 25 bp, Homo sapien
tatgatcacactaggagagattcaa

SEQ ID NO: 809191 - DNA, 25 bp, Homo sapien
caacattggacgtgaatattgcttc

SEQ ID NO: 809192 - DNA, 25 bp, Homo sapien
accacctctagggagcttgacactg

SEQ ID NO: 809193 - DNA, 25 bp, Homo sapien
gaccgtttatggagtgttgacaaca

SEQ ID NO: 809194 - DNA, 25 bp, Homo sapien
tctggctacctgttgagactcccac

SEQ ID NO: 809195 - DNA, 25 bp, Homo sapien
ttctgggcattcaagctttctggcc

SEQ ID NO: 809196 - DNA, 25 bp, Homo sapien
gcattcaagctttctggcccttaca

SEQ ID NO: 809197 - DNA, 25 bp, Homo sapien
ttcaagctttctggcccttacattc

SEQ ID NO: 809198 - DNA, 25 bp, Homo sapien
tgggcattcaagctttctggccctt

SEQ ID NO: 809199 - DNA, 25 bp, Homo sapien
taagctggtgcctgaactggtctgc

SEQ ID NO: 809200 - DNA, 25 bp, Homo sapien
tgctctagcattctgcaagggcagt

SEQ ID NO: 809201 - DNA, 25 bp, Homo sapien
gcaatgtgcccagtagcttgagtta

SEQ ID NO: 809202 - DNA, 25 bp, Homo sapien
tatcaccaacaggacgatgcgactc

SEQ ID NO: 809203 - DNA, 25 bp, Homo sapien
tttgtgtctatttcgttaactgcta

SEQ ID NO: 809204 - DNA, 25 bp, Homo sapien
tctcaaataactattctggccaggt

SEQ ID NO: 809205 - DNA, 25 bp, Homo sapien
tgtctccccgctagaaagtaaactc

SEQ ID NO: 809206 - DNA, 25 bp, Homo sapien
atatctccttgataagtatttgttg

SEQ ID NO: 809207 - DNA, 25 bp, Homo sapien
cccagctggggtacgtggagtccct

SEQ ID NO: 809208 - DNA, 25 bp, Homo sapien
ttctggaacaatgagacccagctgg

SEQ ID NO: 809209 - DNA, 25 bp, Homo sapien
ccagctggggtacgtggagtcccta

SEQ ID NO: 809210 - DNA, 25 bp, Homo sapien
cagttctggaacaatgagacccagc

SEQ ID NO: 809211 - DNA, 25 bp, Homo sapien
tacttcgtgttacagacggaacaat

SEQ ID NO: 809212 - DNA, 25 bp, Homo sapien
caattacttcgtgttacagacggaa

SEQ ID NO: 809213 - DNA, 25 bp, Homo sapien
tccagctggccccaattacttcgtg

SEQ ID NO: 809214 - DNA, 25 bp, Homo sapien
gttacagacggaacaatgaaagtat

SEQ ID NO: 809215 - DNA, 25 bp, Homo sapien
gccatgattcactcggcttctcaca

SEQ ID NO: 809216 - DNA, 25 bp, Homo sapien
aagattacaatggtaaccacacgca

SEQ ID NO: 809217 - DNA, 25 bp, Homo sapien
ttgcgcagctcagccgctttgcaaa

SEQ ID NO: 809218 - DNA, 25 bp, Homo sapien
ctgggcttgctttgcgcagctcagc

SEQ ID NO: 809219 - DNA, 25 bp, Homo sapien
caaaaagttgagtccacctcaggct

SEQ ID NO: 809220 - DNA, 25 bp, Homo sapien
taaagacgcaggtagctcaagagag

SEQ ID NO: 809221 - DNA, 25 bp, Homo sapien
tatgtgtacacgtcacacgggaggc

SEQ ID NO: 809222 - DNA, 25 bp, Homo sapien
tgcagcaaatcctgaggccaaccag

SEQ ID NO: 809223 - DNA, 25 bp, Homo sapien
gtggaagtgacatcacgaattccaa

SEQ ID NO: 809224 - DNA, 25 bp, Homo sapien
catggtgggatgtagggaggattat

SEQ ID NO: 809225 - DNA, 25 bp, Homo sapien
ttctggtggaagtgacatcacgaat

SEQ ID NO: 809226 - DNA, 25 bp, Homo sapien
tggtggaagtgacatcacgaattcc

SEQ ID NO: 809227 - DNA, 25 bp, Homo sapien
ctgtgagatccatggtcaagtgact

SEQ ID NO: 809228 - DNA, 25 bp, Homo sapien
tatcttcctggaagttgtagacagc

SEQ ID NO: 809229 - DNA, 25 bp, Homo sapien
tagacagcatgcgtgtgtgggtacc

SEQ ID NO: 809230 - DNA, 25 bp, Homo sapien
tctgtaaatgggaatgttactatct

SEQ ID NO: 809231 - DNA, 25 bp, Homo sapien
tattgtatgacaagtcaagtttaac

SEQ ID NO: 809232 - DNA, 25 bp, Homo sapien
cttcaaattccttgggtcgaagttg

SEQ ID NO: 809233 - DNA, 25 bp, Homo sapien
tggagggatgttgtttggcactttt

SEQ ID NO: 809234 - DNA, 25 bp, Homo sapien
caggatcgatgaattcaatgccatt

SEQ ID NO: 809235 - DNA, 25 bp, Homo sapien
caaggacctttggaatggcttttgc

SEQ ID NO: 809236 - DNA, 25 bp, Homo sapien
tgtagcatactgctgtcccttggga

SEQ ID NO: 809237 - DNA, 25 bp, Homo sapien
gaaggaaattagacacttgcccaag

SEQ ID NO: 809238 - DNA, 25 bp, Homo sapien
taccctggctttgtggacatgacac

SEQ ID NO: 809239 - DNA, 25 bp, Homo sapien
gaaaaggaatccctgcaattatggg

SEQ ID NO: 809240 - DNA, 25 bp, Homo sapien
tggtgaacaagattaaaaggccttc

SEQ ID NO: 809241 - DNA, 25 bp, Homo sapien
gaaaaaagagtaccaccactgatgg

SEQ ID NO: 809242 - DNA, 25 bp, Homo sapien
ggtcattttgccttaactgccaaga

SEQ ID NO: 809243 - DNA, 25 bp, Homo sapien
cattcacgtaagtctacttgcaggg

SEQ ID NO: 809244 - DNA, 25 bp, Homo sapien
aatcattcacgtaagtctacttgca

SEQ ID NO: 809245 - DNA, 25 bp, Homo sapien
aaaatcattcacgtaagtctacttg

SEQ ID NO: 809246 - DNA, 25 bp, Homo sapien
ttcacgtaagtctacttgcagggtt

SEQ ID NO: 809247 - DNA, 25 bp, Homo sapien
gagtcagtgatctcacagatttact

SEQ ID NO: 809248 - DNA, 25 bp, Homo sapien
taactttctattttggtaccaagca

SEQ ID NO: 809249 - DNA, 25 bp, Homo sapien
taccaagcaatgtcttgcgggtagg

SEQ ID NO: 809250 - DNA, 25 bp, Homo sapien
aagatcagcccttgtgttctgaaga

SEQ ID NO: 809251 - DNA, 25 bp, Homo sapien
aaaatgtgccgggtggtgatctgac

SEQ ID NO: 809252 - DNA, 25 bp, Homo sapien
tccagttgatatggaccagccagat

SEQ ID NO: 809253 - DNA, 25 bp, Homo sapien
cttggctacacagggatgagattcc

SEQ ID NO: 809254 - DNA, 25 bp, Homo sapien
cctggttacatagtggcgagagtct

SEQ ID NO: 809255 - DNA, 25 bp, Homo sapien
gcttctttgcggtgtgatctctatg

SEQ ID NO: 809256 - DNA, 25 bp, Homo sapien
caagggttatctctgagccacaaga

SEQ ID NO: 809257 - DNA, 25 bp, Homo sapien
tcttcaggcgttttgcattccaggc

SEQ ID NO: 809258 - DNA, 25 bp, Homo sapien
tgttgtagtcacatctccaagggtt

SEQ ID NO: 809259 - DNA, 25 bp, Homo sapien
ttccacaaatggacaggcaagcagg

SEQ ID NO: 809260 - DNA, 25 bp, Homo sapien
taccagtgtggaattgcatatcacc

SEQ ID NO: 809261 - DNA, 25 bp, Homo sapien
ccaactgctgcaggttaccagtgtg

SEQ ID NO: 809262 - DNA, 25 bp, Homo sapien
tgccatcattaggacccaactgctg

SEQ ID NO: 809263 - DNA, 25 bp, Homo sapien
tttgatcatctttaagtatgcacaa

SEQ ID NO: 809264 - DNA, 25 bp, Homo sapien
tgatcatctttaagtatgcacaaac

SEQ ID NO: 809265 - DNA, 25 bp, Homo sapien
agtatgcacaaacagctatcgaaag

SEQ ID NO: 809266 - DNA, 25 bp, Homo sapien
gcacaaacagctatcgaaaggcatg

SEQ ID NO: 809267 - DNA, 25 bp, Homo sapien
tttatttaatgtataagatgactta

SEQ ID NO: 809268 - DNA, 25 bp, Homo sapien
tatttaatgtataagatgacttact

SEQ ID NO: 809269 - DNA, 25 bp, Homo sapien
atttaatgtataagatgacttactg

SEQ ID NO: 809270 - DNA, 25 bp, Homo sapien
tttaatgtataagatgacttactga

SEQ ID NO: 809271 - DNA, 25 bp, Homo sapien
ctgtctggtcacatccgcctttgga

SEQ ID NO: 809272 - DNA, 25 bp, Homo sapien
tctgtctggtcacatccgcctttgg

SEQ ID NO: 809273 - DNA, 25 bp, Homo sapien
gtctggtcacatccgcctttggatt

SEQ ID NO: 809274 - DNA, 25 bp, Homo sapien
tggtcacatccgcctttggattttt

SEQ ID NO: 809275 - DNA, 25 bp, Homo sapien
caccagcagcaagtgaatttggttt

SEQ ID NO: 809276 - DNA, 25 bp, Homo sapien
gtcaccagcagcaagtgaatttggt

SEQ ID NO: 809277 - DNA, 25 bp, Homo sapien
cagcagcaagtgaatttggttttct

SEQ ID NO: 809278 - DNA, 25 bp, Homo sapien
ccagcagcaagtgaatttggttttc

SEQ ID NO: 809279 - DNA, 25 bp, Homo sapien
tctactattttactggttactcaaa

SEQ ID NO: 809280 - DNA, 25 bp, Homo sapien
ccccacgttttcatcatgatactgt

SEQ ID NO: 809281 - DNA, 25 bp, Homo sapien
taactcttgattactctctctggtg

SEQ ID NO: 809282 - DNA, 25 bp, Homo sapien
aacatgttgtagaagataaccattc

SEQ ID NO: 809283 - DNA, 25 bp, Homo sapien
tatagtcttccgtaaacaggaattg

SEQ ID NO: 809284 - DNA, 25 bp, Homo sapien
cttccgtaaacaggaattgtcccag

SEQ ID NO: 809285 - DNA, 25 bp, Homo sapien
tggtacccagatggcctgtttctcg

SEQ ID NO: 809286 - DNA, 25 bp, Homo sapien
cagtctgatgtaactgctatgtggt

SEQ ID NO: 809287 - DNA, 25 bp, Homo sapien
gtatccgttcaaactcttgagagtg

SEQ ID NO: 809288 - DNA, 25 bp, Homo sapien
ttgagagtgtgccaacagacaacac

SEQ ID NO: 809289 - DNA, 25 bp, Homo sapien
ggtttcggcaccagatgaaagattc

SEQ ID NO: 809290 - DNA, 25 bp, Homo sapien
gaaagattcttgtatccgttcaaac

SEQ ID NO: 809291 - DNA, 25 bp, Homo sapien
gaggctgtatggatttttccttgtt

SEQ ID NO: 809292 - DNA, 25 bp, Homo sapien
ttggattttcagactggagaaacca

SEQ ID NO: 809293 - DNA, 25 bp, Homo sapien
tgttggattttcagactggagaaac

SEQ ID NO: 809294 - DNA, 25 bp, Homo sapien
agagaggctgtatggatttttcctt

SEQ ID NO: 809295 - DNA, 25 bp, Homo sapien
taggagggtttgattggctcaggaa

SEQ ID NO: 809296 - DNA, 25 bp, Homo sapien
caaggcactatcagtcttcagcggc

SEQ ID NO: 809297 - DNA, 25 bp, Homo sapien
tctgttccaaggcactatcagtctt

SEQ ID NO: 809298 - DNA, 25 bp, Homo sapien
tagttgctggggtgtctgttccaag

SEQ ID NO: 809299 - DNA, 25 bp, Homo sapien
cattccttcaagctttcaggccctg

SEQ ID NO: 809300 - DNA, 25 bp, Homo sapien
cctggggagaatccttcattccttt

SEQ ID NO: 809301 - DNA, 25 bp, Homo sapien
tcaggccctggggagaatccttcat

SEQ ID NO: 809302 - DNA, 25 bp, Homo sapien
tattcattccttcaagctttcaggc

SEQ ID NO: 809303 - DNA, 25 bp, Homo sapien
gggtacgtgtctcccagtcagagta

SEQ ID NO: 809304 - DNA, 25 bp, Homo sapien
cgtgtctcccagtcagagtaggtgt

SEQ ID NO: 809305 - DNA, 25 bp, Homo sapien
tctcccagtcagagtaggtgtcttc

SEQ ID NO: 809306 - DNA, 25 bp, Homo sapien
caggggtacgtgtctcccagtcaga

SEQ ID NO: 809307 - DNA, 25 bp, Homo sapien
cccagtctgatgtaactgctatgtg

SEQ ID NO: 809308 - DNA, 25 bp, Homo sapien
aaaatggcgtcagcaccaaatgagt

SEQ ID NO: 809309 - DNA, 25 bp, Homo sapien
tggcgtcagcaccaaatgagtaggg

SEQ ID NO: 809310 - DNA, 25 bp, Homo sapien
cagtctgatgtaactgctatgtggt

SEQ ID NO: 809311 - DNA, 25 bp, Homo sapien
gcattctaggcactgttcacacatg

SEQ ID NO: 809312 - DNA, 25 bp, Homo sapien
cccattttatgagtgagtatgccca

SEQ ID NO: 809313 - DNA, 25 bp, Homo sapien
ccatccttgagcttgtgttgaacca

SEQ ID NO: 809314 - DNA, 25 bp, Homo sapien
gacttgggtcatagcaatgtagtgg

SEQ ID NO: 809315 - DNA, 25 bp, Homo sapien
ctggtttggcttctgatggttgtca

SEQ ID NO: 809316 - DNA, 25 bp, Homo sapien
gattggtccaatttctctcttgaag

SEQ ID NO: 809317 - DNA, 25 bp, Homo sapien
tcttgaaggctaggtattttgtggg

SEQ ID NO: 809318 - DNA, 25 bp, Homo sapien
gtggcacaaatatctgtcatgagcc

SEQ ID NO: 809319 - DNA, 25 bp, Homo sapien
gatggtgcccattagagggcctgcc

SEQ ID NO: 809320 - DNA, 25 bp, Homo sapien
ggctttctgatggtgcccattagag

SEQ ID NO: 809321 - DNA, 25 bp, Homo sapien
tctgatggtgcccattagagggcct

SEQ ID NO: 809322 - DNA, 25 bp, Homo sapien
gtgcccattagagggcctgccacat

SEQ ID NO: 809323 - DNA, 25 bp, Homo sapien
agggaccatggcctcaaggcagatc

SEQ ID NO: 809324 - DNA, 25 bp, Homo sapien
tgcctaaatcgacacagtcccttga

SEQ ID NO: 809325 - DNA, 25 bp, Homo sapien
cagatcttttgatcgtcagttgcca

SEQ ID NO: 809326 - DNA, 25 bp, Homo sapien
taaatcgacacagtcccttgaaggc

SEQ ID NO: 809327 - DNA, 25 bp, Homo sapien
caagcacccatgaagagaactggac

SEQ ID NO: 809328 - DNA, 25 bp, Homo sapien
ttagaggtgtctcacagccaagcac

SEQ ID NO: 809329 - DNA, 25 bp, Homo sapien
catagagagtgtgaattatactccc

SEQ ID NO: 809330 - DNA, 25 bp, Homo sapien
tgagtttggcctactgtataagccc

SEQ ID NO: 809331 - DNA, 25 bp, Homo sapien
tctggaaactcatcctcagtgacag

SEQ ID NO: 809332 - DNA, 25 bp, Homo sapien
ggattcctttaggataacatatccc

SEQ ID NO: 809333 - DNA, 25 bp, Homo sapien
gccttcttgtatcatggtgtttgta

SEQ ID NO: 809334 - DNA, 25 bp, Homo sapien
agtgacagtactcccacttggtttt

SEQ ID NO: 809335 - DNA, 25 bp, Homo sapien
tcttctgcgtagagatacccaggtc

SEQ ID NO: 809336 - DNA, 25 bp, Homo sapien
gagaatgctctgtgctgagactcct

SEQ ID NO: 809337 - DNA, 25 bp, Homo sapien
tctgcatctgctatacaacggcttc

SEQ ID NO: 809338 - DNA, 25 bp, Homo sapien
gaatcagtgggataagcagcctagg

SEQ ID NO: 809339 - DNA, 25 bp, Homo sapien
cttgttctgatatacctgccctggg

SEQ ID NO: 809340 - DNA, 25 bp, Homo sapien
catctggcatggatgtctactctgc

SEQ ID NO: 809341 - DNA, 25 bp, Homo sapien
ttcttgagctcgaaaccctgtgcca

SEQ ID NO: 809342 - DNA, 25 bp, Homo sapien
cctgtgccaggatggcccactgatt

SEQ ID NO: 809343 - DNA, 25 bp, Homo sapien
cttggagctgcagtgaagtcaacac

SEQ ID NO: 809344 - DNA, 25 bp, Homo sapien
gactaagtggtccagacatgtgccc

SEQ ID NO: 809345 - DNA, 25 bp, Homo sapien
taaacaatatgcagcgactgtgaag

SEQ ID NO: 809346 - DNA, 25 bp, Homo sapien
tgtgcccagtgattggattggccag

SEQ ID NO: 809347 - DNA, 25 bp, Homo sapien
aaaggaaatggggtctgagctccgc

SEQ ID NO: 809348 - DNA, 25 bp, Homo sapien
gggcgtgaagcaaccattcctccct

SEQ ID NO: 809349 - DNA, 25 bp, Homo sapien
ctcccggaaacggcctagctcaaag

SEQ ID NO: 809350 - DNA, 25 bp, Homo sapien
aggtctccagcgcacgcgggcctag

SEQ ID NO: 809351 - DNA, 25 bp, Homo sapien
cgggtcagcctgtaaatgcagtagc

SEQ ID NO: 809352 - DNA, 25 bp, Homo sapien
cccgggtcagcctgtaaatgcagta

SEQ ID NO: 809353 - DNA, 25 bp, Homo sapien
cagcctgtaaatgcagtagcaggcg

SEQ ID NO: 809354 - DNA, 25 bp, Homo sapien
gtaaatgcagtagcaggcgcccgcg

SEQ ID NO: 809355 - DNA, 25 bp, Homo sapien
ttcgaagagcgtatcccgagctcgc

SEQ ID NO: 809356 - DNA, 25 bp, Homo sapien
ctgcggacttcgaagagcgtatccc

SEQ ID NO: 809357 - DNA, 25 bp, Homo sapien
ggacttcgaagagcgtatcccgagc

SEQ ID NO: 809358 - DNA, 25 bp, Homo sapien
agagcgtatcccgagctcgcggtcg

SEQ ID NO: 809359 - DNA, 25 bp, Homo sapien
cctctgacgtcccttcttccagggc

SEQ ID NO: 809360 - DNA, 25 bp, Homo sapien
caggctgcgaggtcttggaccactg

SEQ ID NO: 809361 - DNA, 25 bp, Homo sapien
caggtacctcccgtctgaggccggg

SEQ ID NO: 809362 - DNA, 25 bp, Homo sapien
gactcccaggtacctcccgtctgag

SEQ ID NO: 809363 - DNA, 25 bp, Homo sapien
gaggtcttggaccactgtgactccc

SEQ ID NO: 809364 - DNA, 25 bp, Homo sapien
cactaccaagtcttaatcaggacct

SEQ ID NO: 809365 - DNA, 25 bp, Homo sapien
tacactgttggcctcattaacacct

SEQ ID NO: 809366 - DNA, 25 bp, Homo sapien
caagtatagattacacatgggaaac

SEQ ID NO: 809367 - DNA, 25 bp, Homo sapien
tataatatgtgatgccctgaggaag

SEQ ID NO: 809368 - DNA, 25 bp, Homo sapien
tggcaggcacagtattaagcacttt

SEQ ID NO: 809369 - DNA, 25 bp, Homo sapien
gaatacatacttgtatggcaggcac

SEQ ID NO: 809370 - DNA, 25 bp, Homo sapien
caagaaattagtcaatggtcacctg

SEQ ID NO: 809371 - DNA, 25 bp, Homo sapien
gaagtgtaggcttatagataccaag

SEQ ID NO: 809372 - DNA, 25 bp, Homo sapien
tagaacatcatcatatgaaccatca

SEQ ID NO: 809373 - DNA, 25 bp, Homo sapien
catcatatgaaccatcagttaagtc

SEQ ID NO: 809374 - DNA, 25 bp, Homo sapien
tgttacccaaagtaatcaaagctct

SEQ ID NO: 809375 - DNA, 25 bp, Homo sapien
ttgttacccaaagtaatcaaagctc

SEQ ID NO: 809376 - DNA, 25 bp, Homo sapien
ttgcttgctgagttgaggtacttac

SEQ ID NO: 809377 - DNA, 25 bp, Homo sapien
ccgctagtgtgtaagaatggaaaga

SEQ ID NO: 809378 - DNA, 25 bp, Homo sapien
gcttgcttgctgagttgaggtactt

SEQ ID NO: 809379 - DNA, 25 bp, Homo sapien
aatttattcagggtcacaattaccg

SEQ ID NO: 809380 - DNA, 25 bp, Homo sapien
gatgccagtgaccaacttcataggg

SEQ ID NO: 809381 - DNA, 25 bp, Homo sapien
gaatgtgatgccagtgaccaacttc

SEQ ID NO: 809382 - DNA, 25 bp, Homo sapien
gtgatgccagtgaccaacttcatag

SEQ ID NO: 809383 - DNA, 25 bp, Homo sapien
tgccagtgaccaacttcatagggat

SEQ ID NO: 809384 - DNA, 25 bp, Homo sapien
gatgctcatgtgaaccaggcctcaa

SEQ ID NO: 809385 - DNA, 25 bp, Homo sapien
tcgactgatccagaaattgccccgg

SEQ ID NO: 809386 - DNA, 25 bp, Homo sapien
tgccccggagattgatccaaagggt

SEQ ID NO: 809387 - DNA, 25 bp, Homo sapien
taattgatggtgagggcactgaccc

SEQ ID NO: 809388 - DNA, 25 bp, Homo sapien
cactcaggttatttagtgcatttaa

SEQ ID NO: 809389 - DNA, 25 bp, Homo sapien
ttgtttgcaacaattggaataccac

SEQ ID NO: 809390 - DNA, 25 bp, Homo sapien
ggaataccacccaattcacgaataa

SEQ ID NO: 809391 - DNA, 25 bp, Homo sapien
cattcacactcaggttatttagtgc

SEQ ID NO: 809392 - DNA, 25 bp, Homo sapien
taaggctattactgtcaccagtgcc

SEQ ID NO: 809393 - DNA, 25 bp, Homo sapien
tccctgatgtagaggataacctgta

SEQ ID NO: 809394 - DNA, 25 bp, Homo sapien
gcatcggatatgctccctgaatgaa

SEQ ID NO: 809395 - DNA, 25 bp, Homo sapien
tagttctagcgcaaagtcttgtccc

SEQ ID NO: 809396 - DNA, 25 bp, Homo sapien
aagcatgtgctggtggtcattggta

SEQ ID NO: 809397 - DNA, 25 bp, Homo sapien
caggtctgtaatgtaactgtgaagc

SEQ ID NO: 809398 - DNA, 25 bp, Homo sapien
ctggtggtcattggtaacagtcatg

SEQ ID NO: 809399 - DNA, 25 bp, Homo sapien
ccagtaagtaacacctggaacaggt

SEQ ID NO: 809400 - DNA, 25 bp, Homo sapien
tgttccactggagacagacatgctg

SEQ ID NO: 809401 - DNA, 25 bp, Homo sapien
acagatatatacagccccaaggcca

SEQ ID NO: 809402 - DNA, 25 bp, Homo sapien
gatgcacgttggaaactgcctggga

SEQ ID NO: 809403 - DNA, 25 bp, Homo sapien
tggtaggtatgttccaaggcagacc

SEQ ID NO: 809404 - DNA, 25 bp, Homo sapien
gcactccgtggaggtcactatcaga

SEQ ID NO: 809405 - DNA, 25 bp, Homo sapien
tgacccttctttagtgcactccgtg

SEQ ID NO: 809406 - DNA, 25 bp, Homo sapien
gactgactatcagcaacactaggaa

SEQ ID NO: 809407 - DNA, 25 bp, Homo sapien
tggtcctgaacttacgaaataagcc

SEQ ID NO: 809408 - DNA, 25 bp, Homo sapien
ccagaaatgatcacgattaagtgtt

SEQ ID NO: 809409 - DNA, 25 bp, Homo sapien
ttacataaccagaaatgatcacgat

SEQ ID NO: 809410 - DNA, 25 bp, Homo sapien
taaccagaaatgatcacgattaagt

SEQ ID NO: 809411 - DNA, 25 bp, Homo sapien
gaaatgatcacgattaagtgttggt

SEQ ID NO: 809412 - DNA, 25 bp, Homo sapien
tatggccccttttggtaagctacca

SEQ ID NO: 809413 - DNA, 25 bp, Homo sapien
tcctgttaaagtcctgcctaagctt

SEQ ID NO: 809414 - DNA, 25 bp, Homo sapien
gatactggcttatctcagactggca

SEQ ID NO: 809415 - DNA, 25 bp, Homo sapien
gaactcttataacacttggcagcac

SEQ ID NO: 809416 - DNA, 25 bp, Homo sapien
ttgggcacggagaagtccttctgtc

SEQ ID NO: 809417 - DNA, 25 bp, Homo sapien
cacggagaagtccttctgtcatggc

SEQ ID NO: 809418 - DNA, 25 bp, Homo sapien
ggagaagtccttctgtcatggctgg

SEQ ID NO: 809419 - DNA, 25 bp, Homo sapien
ggcacggagaagtccttctgtcatg

SEQ ID NO: 809420 - DNA, 25 bp, Homo sapien
cagattttgggtattattgttacaa

SEQ ID NO: 809421 - DNA, 25 bp, Homo sapien
gaagaatctcctttgctacgtggct

SEQ ID NO: 809422 - DNA, 25 bp, Homo sapien
gtaggctgcacagctaaatggcctt

SEQ ID NO: 809423 - DNA, 25 bp, Homo sapien
tagcgtaagtactcgaagaagaatc

SEQ ID NO: 809424 - DNA, 25 bp, Homo sapien
aaataaatctgagaaccacggcaag

SEQ ID NO: 809425 - DNA, 25 bp, Homo sapien
tcacttggcatcaaaatagtccaaa

SEQ ID NO: 809426 - DNA, 25 bp, Homo sapien
gaaaatacgtttatatccagactgc

SEQ ID NO: 809427 - DNA, 25 bp, Homo sapien
ccacggcaagttatagctgtgttaa

SEQ ID NO: 809428 - DNA, 25 bp, Homo sapien
tatctttccacttaagcacattcgg

SEQ ID NO: 809429 - DNA, 25 bp, Homo sapien
tggcctcaagagcttaggatttcgt

SEQ ID NO: 809430 - DNA, 25 bp, Homo sapien
gtagaacagtgtgtacgtagaaggc

SEQ ID NO: 809431 - DNA, 25 bp, Homo sapien
agtgggtgagtcctaagaaacattc

SEQ ID NO: 809432 - DNA, 25 bp, Homo sapien
gccttaaatactgcttgcatactga

SEQ ID NO: 809433 - DNA, 25 bp, Homo sapien
gctttcattaaatagggaggtagat

SEQ ID NO: 809434 - DNA, 25 bp, Homo sapien
tgttcatgtctagcccactgggaat

SEQ ID NO: 809435 - DNA, 25 bp, Homo sapien
ttacttaatgctaagcatggcaggg

SEQ ID NO: 809436 - DNA, 25 bp, Homo sapien
gctgcacgccgaattgaaaatccat

SEQ ID NO: 809437 - DNA, 25 bp, Homo sapien
tgtgttgccctaatactagccagcg

SEQ ID NO: 809438 - DNA, 25 bp, Homo sapien
taaaagccaacatatgccgtgacct

SEQ ID NO: 809439 - DNA, 25 bp, Homo sapien
tacaccaaatgctacccaggcagtg

SEQ ID NO: 809440 - DNA, 25 bp, Homo sapien
ccacctctccctcatcctgggtatg

SEQ ID NO: 809441 - DNA, 25 bp, Homo sapien
catacccaggatgagggagaggtgg

SEQ ID NO: 809442 - DNA, 25 bp, Homo sapien
taatgaaaaaggcatcatctaagtt

SEQ ID NO: 809443 - DNA, 25 bp, Homo sapien
tcatatcatgatataagcactgcaa

SEQ ID NO: 809444 - DNA, 25 bp, Homo sapien
taacttgcttcctagtatgatcagc

SEQ ID NO: 809445 - DNA, 25 bp, Homo sapien
atgtacactatgagagggttcaggg

SEQ ID NO: 809446 - DNA, 25 bp, Homo sapien
catggtgttggcatgatttctatcc

SEQ ID NO: 809447 - DNA, 25 bp, Homo sapien
tgacttaattcatgactcaaaactg

SEQ ID NO: 809448 - DNA, 25 bp, Homo sapien
tatggtgaaaccgtgatgatttcat

SEQ ID NO: 809449 - DNA, 25 bp, Homo sapien
cagtgatgttcaaagtaagatggca

SEQ ID NO: 809450 - DNA, 25 bp, Homo sapien
acagggttttgccatgttggccagg

SEQ ID NO: 809451 - DNA, 25 bp, Homo sapien
tctcggcgcgctgcaacctccgtct

SEQ ID NO: 809452 - DNA, 25 bp, Homo sapien
ttacaggtgccggccactatgcctg

SEQ ID NO: 809453 - DNA, 25 bp, Homo sapien
tctcctgggttcaagcaattctcct

SEQ ID NO: 809454 - DNA, 25 bp, Homo sapien
agaagggcacccgtcagatgccagc

SEQ ID NO: 809455 - DNA, 25 bp, Homo sapien
tcccagaagggcacccgtcagatgc

SEQ ID NO: 809456 - DNA, 25 bp, Homo sapien
tttgtcccagaagggcacccgtcag

SEQ ID NO: 809457 - DNA, 25 bp, Homo sapien
gattactgcctgtttcttcctctgc

SEQ ID NO: 809458 - DNA, 25 bp, Homo sapien
tagtttttcctgaagaggtccttca

SEQ ID NO: 809459 - DNA, 25 bp, Homo sapien
aaagaaatctatggcaattcactgg

SEQ ID NO: 809460 - DNA, 25 bp, Homo sapien
acaaagaaatctatggcaattcact

SEQ ID NO: 809461 - DNA, 25 bp, Homo sapien
taccagcatgtagacccagaagaag

SEQ ID NO: 809462 - DNA, 25 bp, Homo sapien
tttatgaaataccagcatgtagacc

SEQ ID NO: 809463 - DNA, 25 bp, Homo sapien
aaaccagcagatggtgacagaagtg

SEQ ID NO: 809464 - DNA, 25 bp, Homo sapien
gaaaaaactggcaaaaaccagcaga

SEQ ID NO: 809465 - DNA, 25 bp, Homo sapien
aaactggcaaaaaccagcagatggt

SEQ ID NO: 809466 - DNA, 25 bp, Homo sapien
aaaaccagcagatggtgacagaagt

SEQ ID NO: 809467 - DNA, 25 bp, Homo sapien
cctctcaaaacctgtcaacttatat

SEQ ID NO: 809468 - DNA, 25 bp, Homo sapien
tccttatttggaggggctagatatt

SEQ ID NO: 809469 - DNA, 25 bp, Homo sapien
tatttactaatgcttatttatccct

SEQ ID NO: 809470 - DNA, 25 bp, Homo sapien
ggtctttactcgatgtatgttcctt

SEQ ID NO: 809471 - DNA, 25 bp, Homo sapien
gtcgttccccgtgcacaataagtga

SEQ ID NO: 809472 - DNA, 25 bp, Homo sapien
tacatgggtccaaagcgatttcgtc

SEQ ID NO: 809473 - DNA, 25 bp, Homo sapien
tgtgtccccggacatgataaggtca

SEQ ID NO: 809474 - DNA, 25 bp, Homo sapien
gaccttgcagctattcccatcggag

SEQ ID NO: 809475 - DNA, 25 bp, Homo sapien
aaatgaaagcaaccagtctctgatg

SEQ ID NO: 809476 - DNA, 25 bp, Homo sapien
tctgatgacaagcagccaatatcct

SEQ ID NO: 809477 - DNA, 25 bp, Homo sapien
cacggaattccggagcaagtgattc

SEQ ID NO: 809478 - DNA, 25 bp, Homo sapien
gagatttgtgaatccgtggccaaca

SEQ ID NO: 809479 - DNA, 25 bp, Homo sapien
cattcccccgcttgatgccggaaaa

SEQ ID NO: 809480 - DNA, 25 bp, Homo sapien
agaagaatatctggttagaccccaa

SEQ ID NO: 809481 - DNA, 25 bp, Homo sapien
tatctggttagaccccaatgagacc

SEQ ID NO: 809482 - DNA, 25 bp, Homo sapien
tcccccgcttgatgccggaaaaaca

SEQ ID NO: 809483 - DNA, 25 bp, Homo sapien
cgaggcggcgagagctgaagcgctg

SEQ ID NO: 809484 - DNA, 25 bp, Homo sapien
gactcgccccaacgatggcgaggcg

SEQ ID NO: 809485 - DNA, 25 bp, Homo sapien
ggcgagagctgaagcgctgcctgca

SEQ ID NO: 809486 - DNA, 25 bp, Homo sapien
actcgccccaacgatggcgaggcgg

SEQ ID NO: 809487 - DNA, 25 bp, Homo sapien
catgcgatctgaaagtaagcctctg

SEQ ID NO: 809488 - DNA, 25 bp, Homo sapien
taagcctctggcttaggacagcggg

SEQ ID NO: 809489 - DNA, 25 bp, Homo sapien
gattgagttggctatgacagtccgt

SEQ ID NO: 809490 - DNA, 25 bp, Homo sapien
aatttgatcttaggagggtccctgc

SEQ ID NO: 809491 - DNA, 25 bp, Homo sapien
ttttgccaagataaccccagggaca

SEQ ID NO: 809492 - DNA, 25 bp, Homo sapien
tagatgagaaccgtgtgtaccaggg

SEQ ID NO: 809493 - DNA, 25 bp, Homo sapien
gtaagaaactcagaatcacaatcgt

SEQ ID NO: 809494 - DNA, 25 bp, Homo sapien
gacatgcctgtactttacttcttga

SEQ ID NO: 809495 - DNA, 25 bp, Homo sapien
gcaagcagctcttaatcacccttaa

SEQ ID NO: 809496 - DNA, 25 bp, Homo sapien
tattcaccttatgcagtttcagctc

SEQ ID NO: 809497 - DNA, 25 bp, Homo sapien
cccaggtgcaagcagctcttaatca

SEQ ID NO: 809498 - DNA, 25 bp, Homo sapien
agttcagcagccactctaagctagc

SEQ ID NO: 809499 - DNA, 25 bp, Homo sapien
tccctcagccttaaccaataaagga

SEQ ID NO: 809500 - DNA, 25 bp, Homo sapien
gctgtgtgtgaaaccaatgcccaca

SEQ ID NO: 809501 - DNA, 25 bp, Homo sapien
ggcattagcattcatcttaggggag

SEQ ID NO: 809502 - DNA, 25 bp, Homo sapien
gctggctttcaggtagcactttgac

SEQ ID NO: 809503 - DNA, 25 bp, Homo sapien
cacacactgctgtggtgaggtgtcc

SEQ ID NO: 809504 - DNA, 25 bp, Homo sapien
cacactgctgtggtgaggtgtccca

SEQ ID NO: 809505 - DNA, 25 bp, Homo sapien
agccactgcgttgattctccacggg

SEQ ID NO: 809506 - DNA, 25 bp, Homo sapien
tgctgtggtgaggtgtcccaccggg

SEQ ID NO: 809507 - DNA, 25 bp, Homo sapien
ttaatgtttgactattaggaaagat

SEQ ID NO: 809508 - DNA, 25 bp, Homo sapien
acaatgcttctcacatgatttttat

SEQ ID NO: 809509 - DNA, 25 bp, Homo sapien
tttaatgtttgactattaggaaaga

SEQ ID NO: 809510 - DNA, 25 bp, Homo sapien
gatggtgctccctctactaactagc

SEQ ID NO: 809511 - DNA, 25 bp, Homo sapien
caggggatggtgctccctctactaa

SEQ ID NO: 809512 - DNA, 25 bp, Homo sapien
tctcttccaggggatggtgctccct

SEQ ID NO: 809513 - DNA, 25 bp, Homo sapien
ttccaggggatggtgctccctctac

SEQ ID NO: 809514 - DNA, 25 bp, Homo sapien
gggaatggtgagaggcactgggaaa

SEQ ID NO: 809515 - DNA, 25 bp, Homo sapien
gattcctttggagtaatgaccctta

SEQ ID NO: 809516 - DNA, 25 bp, Homo sapien
ccttaaaccacctttcaggccagca

SEQ ID NO: 809517 - DNA, 25 bp, Homo sapien
acactcagaactgattcctttggag

SEQ ID NO: 809518 - DNA, 25 bp, Homo sapien
gaactgattcctttggagtaatgac

SEQ ID NO: 809519 - DNA, 25 bp, Homo sapien
cattttgacttgtgatcagagagac

SEQ ID NO: 809520 - DNA, 25 bp, Homo sapien
gtgaaacgcacttccacattttgac

SEQ ID NO: 809521 - DNA, 25 bp, Homo sapien
acattttgacttgtgatcagagaga

SEQ ID NO: 809522 - DNA, 25 bp, Homo sapien
gtgtgaaacgcacttccacattttg

SEQ ID NO: 809523 - DNA, 25 bp, Homo sapien
atcagtgccaggaacgaagtcccac

SEQ ID NO: 809524 - DNA, 25 bp, Homo sapien
taattgttgtagagtctacaaaagc

SEQ ID NO: 809525 - DNA, 25 bp, Homo sapien
gagtctacaaaagcggagctcaaat

SEQ ID NO: 809526 - DNA, 25 bp, Homo sapien
caaaagcggagctcaaatagagatc

SEQ ID NO: 809527 - DNA, 25 bp, Homo sapien
gtcttgcaccttgattcacttctcc

SEQ ID NO: 809528 - DNA, 25 bp, Homo sapien
tgagtcctgctctggttgcctgcac

SEQ ID NO: 809529 - DNA, 25 bp, Homo sapien
tcttcatcagctctcagtcttgcac

SEQ ID NO: 809530 - DNA, 25 bp, Homo sapien
atcatcatcacgctctttctgtttc

SEQ ID NO: 809531 - DNA, 25 bp, Homo sapien
gaattgtccatctcacaagacagtg

SEQ ID NO: 809532 - DNA, 25 bp, Homo sapien
tgtaggcgcctgtgagaattaaaca

SEQ ID NO: 809533 - DNA, 25 bp, Homo sapien
tgaaaggatgcatcttgtaggcgcc

SEQ ID NO: 809534 - DNA, 25 bp, Homo sapien
tgtgatatccttagacagtccctag

SEQ ID NO: 809535 - DNA, 25 bp, Homo sapien
gacaggctggtggaagtcaataacc

SEQ ID NO: 809536 - DNA, 25 bp, Homo sapien
catattatatgcacggagacagtca

SEQ ID NO: 809537 - DNA, 25 bp, Homo sapien
gaagacctaaatagctggcggctgg

SEQ ID NO: 809538 - DNA, 25 bp, Homo sapien
gagacagtcaaaagcgctgcccatg

SEQ ID NO: 809539 - DNA, 25 bp, Homo sapien
tctagccccagttccactaagaaat

SEQ ID NO: 809540 - DNA, 25 bp, Homo sapien
cagggcccaacacagttgtctggtt

SEQ ID NO: 809541 - DNA, 25 bp, Homo sapien
cactcagagcttggtgctataaaac

SEQ ID NO: 809542 - DNA, 25 bp, Homo sapien
tcctgagtgctctcagaaagttact

SEQ ID NO: 809543 - DNA, 25 bp, Homo sapien
caggcaaaaataagttggccctcat

SEQ ID NO: 809544 - DNA, 25 bp, Homo sapien
catcttagcgaattggtgttctggg

SEQ ID NO: 809545 - DNA, 25 bp, Homo sapien
cactgcctgcttcatgattgcttac

SEQ ID NO: 809546 - DNA, 25 bp, Homo sapien
taattggcctttgatttcatgacag

SEQ ID NO: 809547 - DNA, 25 bp, Homo sapien
caaaacttgattgggatccaaaatc

SEQ ID NO: 809548 - DNA, 25 bp, Homo sapien
gcagctaaccctcccttatgtagcg

SEQ ID NO: 809549 - DNA, 25 bp, Homo sapien
gaagacccttccaatgcagctaacc

SEQ ID NO: 809550 - DNA, 25 bp, Homo sapien
tatgtagcgtcctccttgagccgag

SEQ ID NO: 809551 - DNA, 25 bp, Homo sapien
gccaaagaagtaagagataaattgt

SEQ ID NO: 809552 - DNA, 25 bp, Homo sapien
aggcatggtgtgttgtgagaactaa

SEQ ID NO: 809553 - DNA, 25 bp, Homo sapien
atgttttagaagaggcatggtgtgt

SEQ ID NO: 809554 - DNA, 25 bp, Homo sapien
aattgttggagttacatgtgaatta

SEQ ID NO: 809555 - DNA, 25 bp, Homo sapien
taggcattcatactctcacagactt

SEQ ID NO: 809556 - DNA, 25 bp, Homo sapien
taagcccctcccagataattatcaa

SEQ ID NO: 809557 - DNA, 25 bp, Homo sapien
gaaatttcacaccttgtgccaggct

SEQ ID NO: 809558 - DNA, 25 bp, Homo sapien
cacagactttgagcagactattgca

SEQ ID NO: 809559 - DNA, 25 bp, Homo sapien
gagttattgatgatggttaaatgag

SEQ ID NO: 809560 - DNA, 25 bp, Homo sapien
aaaaaagatagcctctatcttatag

SEQ ID NO: 809561 - DNA, 25 bp, Homo sapien
aaagatagcctctatcttatagagt

SEQ ID NO: 809562 - DNA, 25 bp, Homo sapien
ttttgctcagaaacagtcaacttat

SEQ ID NO: 809563 - DNA, 25 bp, Homo sapien
caggtctcatatgcaatggtttgaa

SEQ ID NO: 809564 - DNA, 25 bp, Homo sapien
tgtaatcagtctgcaaggctttgtg

SEQ ID NO: 809565 - DNA, 25 bp, Homo sapien
tgtctgtaaaacatcaagaagtacc

SEQ ID NO: 809566 - DNA, 25 bp, Homo sapien
gacagtgcacagaaagcttatgacc

SEQ ID NO: 809567 - DNA, 25 bp, Homo sapien
tatgtgacagttacgaggaatacct

SEQ ID NO: 809568 - DNA, 25 bp, Homo sapien
agtcaccaggcctattctaaattag

SEQ ID NO: 809569 - DNA, 25 bp, Homo sapien
tatccttgagtactggtaaattagg

SEQ ID NO: 809570 - DNA, 25 bp, Homo sapien
tccttggtagtcctgagtgacttcc

SEQ ID NO: 809571 - DNA, 25 bp, Homo sapien
tctgcaaaggcttaggtcagggact

SEQ ID NO: 809572 - DNA, 25 bp, Homo sapien
cagggacttgaggtataactctata

SEQ ID NO: 809573 - DNA, 25 bp, Homo sapien
caggctaaccagaagtacacaattg

SEQ ID NO: 809574 - DNA, 25 bp, Homo sapien
acatcggtgtttttgtccctactca

SEQ ID NO: 809575 - DNA, 25 bp, Homo sapien
tatacttgaatgacagattggccag

SEQ ID NO: 809576 - DNA, 25 bp, Homo sapien
gagataatgtgaaaacccttgttgt

SEQ ID NO: 809577 - DNA, 25 bp, Homo sapien
tccctgtgtagcataaattgagtct

SEQ ID NO: 809578 - DNA, 25 bp, Homo sapien
tccttagtttccatatggaaatggc

SEQ ID NO: 809579 - DNA, 25 bp, Homo sapien
aagaataaaatgattgacagacaaa

SEQ ID NO: 809580 - DNA, 25 bp, Homo sapien
aattagaagaattcaataccatggc

SEQ ID NO: 809581 - DNA, 25 bp, Homo sapien
taccatggctagatataagtttaat

SEQ ID NO: 809582 - DNA, 25 bp, Homo sapien
caaagtagcctagtaatgcaagaaa

SEQ ID NO: 809583 - DNA, 25 bp, Homo sapien
taaaagattagtaactcaagagcag

SEQ ID NO: 809584 - DNA, 25 bp, Homo sapien
atctaaagctcagtactaaggccag

SEQ ID NO: 809585 - DNA, 25 bp, Homo sapien
ccagataaggatagtatgagaaagg

SEQ ID NO: 809586 - DNA, 25 bp, Homo sapien
taatccacttgtgataaatctggct

SEQ ID NO: 809587 - DNA, 25 bp, Homo sapien
ccttaggcatgcaggctttgtagaa

SEQ ID NO: 809588 - DNA, 25 bp, Homo sapien
gccaaggctgcactcaaaggaaaat

SEQ ID NO: 809589 - DNA, 25 bp, Homo sapien
caatagtagactggaaagaacatga

SEQ ID NO: 809590 - DNA, 25 bp, Homo sapien
aatagtagtgtgtccataaacatca

SEQ ID NO: 809591 - DNA, 25 bp, Homo sapien
caggtatagttttgaggaccctagc

SEQ ID NO: 809592 - DNA, 25 bp, Homo sapien
tagttggaaccttattctacaggcc

SEQ ID NO: 809593 - DNA, 25 bp, Homo sapien
tctagtttttgtaatacgggcacac

SEQ ID NO: 809594 - DNA, 25 bp, Homo sapien
tcacatggtagagagagacatcaac

SEQ ID NO: 809595 - DNA, 25 bp, Homo sapien
gtgttacaagttttgatacgttata

SEQ ID NO: 809596 - DNA, 25 bp, Homo sapien
agtgttacaagttttgatacgttat

SEQ ID NO: 809597 - DNA, 25 bp, Homo sapien
gatacgttataaacgtatcactttc

SEQ ID NO: 809598 - DNA, 25 bp, Homo sapien
gttataaacgtatcactttctcttg

SEQ ID NO: 809599 - DNA, 25 bp, Homo sapien
tctgtggagcagaattttacctggc

SEQ ID NO: 809600 - DNA, 25 bp, Homo sapien
tacacagcatgctaagggccaatcc

SEQ ID NO: 809601 - DNA, 25 bp, Homo sapien
ccttctgggtgccaagctacacagc

SEQ ID NO: 809602 - DNA, 25 bp, Homo sapien
tcattgcttaagtgagctgagccca

SEQ ID NO: 809603 - DNA, 25 bp, Homo sapien
cagattggtgagtaaggacaggcat

SEQ ID NO: 809604 - DNA, 25 bp, Homo sapien
aaataaaccgcaaagtgagtgaaga

SEQ ID NO: 809605 - DNA, 25 bp, Homo sapien
gaggatttgcactatcaattgttgc

SEQ ID NO: 809606 - DNA, 25 bp, Homo sapien
gataactgcaatagagtagagccca

SEQ ID NO: 809607 - DNA, 25 bp, Homo sapien
gggatactatccagcacggtaaata

SEQ ID NO: 809608 - DNA, 25 bp, Homo sapien
taagtataaggattggaaaacttga

SEQ ID NO: 809609 - DNA, 25 bp, Homo sapien
gacatagtcagtattgtgccaggga

SEQ ID NO: 809610 - DNA, 25 bp, Homo sapien
aaaagactagcatagaatcaatgaa

SEQ ID NO: 809611 - DNA, 25 bp, Homo sapien
ttttgggaaatctaactgcccatca

SEQ ID NO: 809612 - DNA, 25 bp, Homo sapien
gagagattgcggttgtaaccatcct

SEQ ID NO: 809613 - DNA, 25 bp, Homo sapien
gcccatcactgctgacatccagttt

SEQ ID NO: 809614 - DNA, 25 bp, Homo sapien
tcttcatgtggtcaaggacaccggg

SEQ ID NO: 809615 - DNA, 25 bp, Homo sapien
aaggagtgattaggaagttgtctta

SEQ ID NO: 809616 - DNA, 25 bp, Homo sapien
tttattattcttacttcaagaccat

SEQ ID NO: 809617 - DNA, 25 bp, Homo sapien
tgattaggaagttgtcttattaacc

SEQ ID NO: 809618 - DNA, 25 bp, Homo sapien
ggcttactgaatatcctcttgtaat

SEQ ID NO: 809619 - DNA, 25 bp, Homo sapien
gggacgtggagagtctttatatcta

SEQ ID NO: 809620 - DNA, 25 bp, Homo sapien
ggggacgtggagagtctttatatct

SEQ ID NO: 809621 - DNA, 25 bp, Homo sapien
tggggacgtggagagtctttatatc

SEQ ID NO: 809622 - DNA, 25 bp, Homo sapien
tgccggggggcgccaggaggtcctc

SEQ ID NO: 809623 - DNA, 25 bp, Homo sapien
ctgccggggggcgccaggaggtcct

SEQ ID NO: 809624 - DNA, 25 bp, Homo sapien
gcgccccaccctacatttcacagtc

SEQ ID NO: 809625 - DNA, 25 bp, Homo sapien
gccccaccctacatttcacagtcgc

SEQ ID NO: 809626 - DNA, 25 bp, Homo sapien
cccaccctacatttcacagtcgcca

SEQ ID NO: 809627 - DNA, 25 bp, Homo sapien
ccaccctacatttcacagtcgccat

SEQ ID NO: 809628 - DNA, 25 bp, Homo sapien
gactgcccgcgcgaatggcttccaa

SEQ ID NO: 809629 - DNA, 25 bp, Homo sapien
acacgcagggactgcccgcgcgaat

SEQ ID NO: 809630 - DNA, 25 bp, Homo sapien
tgctgcgcgcgctggggagcacgtg

SEQ ID NO: 809631 - DNA, 25 bp, Homo sapien
ggggctgccctcaccggaagctgca

SEQ ID NO: 809632 - DNA, 25 bp, Homo sapien
ctagggctgatgacttctgaggaac

SEQ ID NO: 809633 - DNA, 25 bp, Homo sapien
gcatgtggcccgtgacagaggacat

SEQ ID NO: 809634 - DNA, 25 bp, Homo sapien
gctgaaagcgcttgagcacaccgct

SEQ ID NO: 809635 - DNA, 25 bp, Homo sapien
tctgaggaaccttattggaaaagca

SEQ ID NO: 809636 - DNA, 25 bp, Homo sapien
agaagactctcgctgaaaccccaga

SEQ ID NO: 809637 - DNA, 25 bp, Homo sapien
tcccgcagcgcctcggattagaaga

SEQ ID NO: 809638 - DNA, 25 bp, Homo sapien
gcctcggattagaagactctcgctg

SEQ ID NO: 809639 - DNA, 25 bp, Homo sapien
gcggatgacaacaccactcgagccg

SEQ ID NO: 809640 - DNA, 25 bp, Homo sapien
tgtgcatgttgagagcccagagtct

SEQ ID NO: 809641 - DNA, 25 bp, Homo sapien
gcctgtgtacttcttaatctgttct

SEQ ID NO: 809642 - DNA, 25 bp, Homo sapien
ccactttctaaacatgttactcttg

SEQ ID NO: 809643 - DNA, 25 bp, Homo sapien
gtcttccgaagctactctgagtcca

SEQ ID NO: 809644 - DNA, 25 bp, Homo sapien
acttccagcatcaatccagagtcca

SEQ ID NO: 809645 - DNA, 25 bp, Homo sapien
tacttccagcatcaatccagagtcc

SEQ ID NO: 809646 - DNA, 25 bp, Homo sapien
aaagccatatgctccagaaagtgtg

SEQ ID NO: 809647 - DNA, 25 bp, Homo sapien
gaaagccatatgctccagaaagtgt

SEQ ID NO: 809648 - DNA, 25 bp, Homo sapien
tgaaagccatatgctccagaaagtg

SEQ ID NO: 809649 - DNA, 25 bp, Homo sapien
aagccatatgctccagaaagtgtgc

SEQ ID NO: 809650 - DNA, 25 bp, Homo sapien
taaagagagtgcatttttgtaaagt

SEQ ID NO: 809651 - DNA, 25 bp, Homo sapien
aaagagagtgcatttttgtaaagtc

SEQ ID NO: 809652 - DNA, 25 bp, Homo sapien
tatctcttaaagagagtgcattttt

SEQ ID NO: 809653 - DNA, 25 bp, Homo sapien
tcttaaagagagtgcatttttgtaa

SEQ ID NO: 809654 - DNA, 25 bp, Homo sapien
taaaagaggaaaaacaaattatgca

SEQ ID NO: 809655 - DNA, 25 bp, Homo sapien
gaggaaaaacaaattatgcaaactc

SEQ ID NO: 809656 - DNA, 25 bp, Homo sapien
agaggaaaaacaaattatgcaaact

SEQ ID NO: 809657 - DNA, 25 bp, Homo sapien
tcaagttccagatctaactgggatc

SEQ ID NO: 809658 - DNA, 25 bp, Homo sapien
tattttcaatctcaagttccagatc

SEQ ID NO: 809659 - DNA, 25 bp, Homo sapien
gaatgctttggcatagtatacagtc

SEQ ID NO: 809660 - DNA, 25 bp, Homo sapien
catagtatacagtctgctctctgga

SEQ ID NO: 809661 - DNA, 25 bp, Homo sapien
cacagaattgtgtgttctcaaaccc

SEQ ID NO: 809662 - DNA, 25 bp, Homo sapien
gaaaaagcgcatacctctccaaaaa

SEQ ID NO: 809663 - DNA, 25 bp, Homo sapien
caatgacagtgctatgttaagaagc

SEQ ID NO: 809664 - DNA, 25 bp, Homo sapien
gaagtggaacatgttatattaggcc

SEQ ID NO: 809665 - DNA, 25 bp, Homo sapien
gctgttttgtattatatcagcaaga

SEQ ID NO: 809666 - DNA, 25 bp, Homo sapien
taaggattactccacgctcacgttc

SEQ ID NO: 809667 - DNA, 25 bp, Homo sapien
tgtccgtccaagtgcagtattttga

SEQ ID NO: 809668 - DNA, 25 bp, Homo sapien
tcagttggtcccaaaattgtccgtc

SEQ ID NO: 809669 - DNA, 25 bp, Homo sapien
tgtggttatataatccactaagtcc

SEQ ID NO: 809670 - DNA, 25 bp, Homo sapien
cactaagtccttacgacttatagat

SEQ ID NO: 809671 - DNA, 25 bp, Homo sapien
tattcttggccccttataatgtgtg

SEQ ID NO: 809672 - DNA, 25 bp, Homo sapien
tcttggccccttataatgtgtggtt

SEQ ID NO: 809673 - DNA, 25 bp, Homo sapien
ctgaagtcacctgcatgtttggatt

SEQ ID NO: 809674 - DNA, 25 bp, Homo sapien
tgaacatacccgttccatgcttgaa

SEQ ID NO: 809675 - DNA, 25 bp, Homo sapien
caaggacgaagttggttctcaagaa

SEQ ID NO: 809676 - DNA, 25 bp, Homo sapien
ttggattcccattcaacattcttat

SEQ ID NO: 809677 - DNA, 25 bp, Homo sapien
cttcctgtgaatttgcagggaggca

SEQ ID NO: 809678 - DNA, 25 bp, Homo sapien
ctcacttcctgtgaatttgcaggga

SEQ ID NO: 809679 - DNA, 25 bp, Homo sapien
tgtgtgtgcataaagagtcaccgaa

SEQ ID NO: 809680 - DNA, 25 bp, Homo sapien
aagagtcaccgaaatgaaactttgc

SEQ ID NO: 809681 - DNA, 25 bp, Homo sapien
cagcgtgtttgcaaccatgagacag

SEQ ID NO: 809682 - DNA, 25 bp, Homo sapien
agacagattgtatctggatgtgccc

SEQ ID NO: 809683 - DNA, 25 bp, Homo sapien
gctattgcaaggtgcgccaaaggca

SEQ ID NO: 809684 - DNA, 25 bp, Homo sapien
caaaagagcgatcccagttgccaat

SEQ ID NO: 809685 - DNA, 25 bp, Homo sapien
gagaattttaattatacatgtccaa

SEQ ID NO: 809686 - DNA, 25 bp, Homo sapien
tttaattatacatgtccaaaataca

SEQ ID NO: 809687 - DNA, 25 bp, Homo sapien
aattatacatgtccaaaatacagaa

SEQ ID NO: 809688 - DNA, 25 bp, Homo sapien
tccaagagaattttaattatacatg

SEQ ID NO: 809689 - DNA, 25 bp, Homo sapien
gaacaacatgtagcatgtctgcaac

SEQ ID NO: 809690 - DNA, 25 bp, Homo sapien
caaagattgccatgacaagtgagct

SEQ ID NO: 809691 - DNA, 25 bp, Homo sapien
tgtctgcaacagtggatgattcaca

SEQ ID NO: 809692 - DNA, 25 bp, Homo sapien
gactgaaagctatggcaaagattgc

SEQ ID NO: 809693 - DNA, 25 bp, Homo sapien
gttttccaagaagctgcgagccttt

SEQ ID NO: 809694 - DNA, 25 bp, Homo sapien
taatgacctaagaatgatgatgcca

SEQ ID NO: 809695 - DNA, 25 bp, Homo sapien
tgctatgggttaagtcagtgggtca

SEQ ID NO: 809696 - DNA, 25 bp, Homo sapien
cctttgaaaacatggcaactactgt

SEQ ID NO: 809697 - DNA, 25 bp, Homo sapien
tgcaacaacatgtttgttttcagaa

SEQ ID NO: 809698 - DNA, 25 bp, Homo sapien
cagaagatttctggctcgtgcaacc

SEQ ID NO: 809699 - DNA, 25 bp, Homo sapien
gctcgtgcaacctcactttctgtga

SEQ ID NO: 809700 - DNA, 25 bp, Homo sapien
tgtgacacttgtacagagtcgcatc

SEQ ID NO: 809701 - DNA, 25 bp, Homo sapien
ggaatacagatcaaccatatgaaaa

SEQ ID NO: 809702 - DNA, 25 bp, Homo sapien
actattggaatacagatcaaccata

SEQ ID NO: 809703 - DNA, 25 bp, Homo sapien
ttggaatacagatcaaccatatgaa

SEQ ID NO: 809704 - DNA, 25 bp, Homo sapien
tattggaatacagatcaaccatatg

SEQ ID NO: 809705 - DNA, 25 bp, Homo sapien
caatatcttcacaaattggagttga

SEQ ID NO: 809706 - DNA, 25 bp, Homo sapien
tcttgcttcaagctcagggatggga

SEQ ID NO: 809707 - DNA, 25 bp, Homo sapien
tattatagcataacatttgcctacc

SEQ ID NO: 809708 - DNA, 25 bp, Homo sapien
ggatgggaatccttctattatagca

SEQ ID NO: 809709 - DNA, 25 bp, Homo sapien
ctcagcttttgtaacaaggatcttt

SEQ ID NO: 809710 - DNA, 25 bp, Homo sapien
tgtcattcagctgtttgtagtaaaa

SEQ ID NO: 809711 - DNA, 25 bp, Homo sapien
ccaatagtaactcaggactacttac

SEQ ID NO: 809712 - DNA, 25 bp, Homo sapien
acaaggatctttttacacatgaccc

SEQ ID NO: 809713 - DNA, 25 bp, Homo sapien
aaatgtatttggtacatacttctcg

SEQ ID NO: 809714 - DNA, 25 bp, Homo sapien
ttctcgaattgtctcagcattcaca

SEQ ID NO: 809715 - DNA, 25 bp, Homo sapien
cagcagcaatagctggactcctatt

SEQ ID NO: 809716 - DNA, 25 bp, Homo sapien
gcaatagctggactcctattataaa

SEQ ID NO: 809717 - DNA, 25 bp, Homo sapien
ggccaactttttgcatagaagaaaa

SEQ ID NO: 809718 - DNA, 25 bp, Homo sapien
ttggccaactttttgcatagaagaa

SEQ ID NO: 809719 - DNA, 25 bp, Homo sapien
agtacttggccaactttttgcatag

SEQ ID NO: 809720 - DNA, 25 bp, Homo sapien
aaagtacttggccaactttttgcat

SEQ ID NO: 809721 - DNA, 25 bp, Homo sapien
acacatgttactgcgtatctgttta

SEQ ID NO: 809722 - DNA, 25 bp, Homo sapien
gccaacacatgttactgcgtatctg

SEQ ID NO: 809723 - DNA, 25 bp, Homo sapien
taatcacgaagccaacacatgttac

SEQ ID NO: 809724 - DNA, 25 bp, Homo sapien
cacgaagccaacacatgttactgcg

SEQ ID NO: 809725 - DNA, 25 bp, Homo sapien
tcaaacaatcttgattaggagcatt

SEQ ID NO: 809726 - DNA, 25 bp, Homo sapien
tatttttctctagctctgttttata

SEQ ID NO: 809727 - DNA, 25 bp, Homo sapien
ctagctctgttttataaatacatgt

SEQ ID NO: 809728 - DNA, 25 bp, Homo sapien
tagctctgttttataaatacatgtg

SEQ ID NO: 809729 - DNA, 25 bp, Homo sapien
ttctctagctctgttttataaatac

SEQ ID NO: 809730 - DNA, 25 bp, Homo sapien
caagtgctgaatgcaagtagagcca

SEQ ID NO: 809731 - DNA, 25 bp, Homo sapien
cacttagcgaatacttgtggaccac

SEQ ID NO: 809732 - DNA, 25 bp, Homo sapien
tatacagacttcaccccttggacaa

SEQ ID NO: 809733 - DNA, 25 bp, Homo sapien
cctaggaacttgtcgagatggtaaa

SEQ ID NO: 809734 - DNA, 25 bp, Homo sapien
tcttattaacactcagagggctata

SEQ ID NO: 809735 - DNA, 25 bp, Homo sapien
gagtccaagagtccaacagtactat

SEQ ID NO: 809736 - DNA, 25 bp, Homo sapien
ttaccagtctggtgagtgtattaca

SEQ ID NO: 809737 - DNA, 25 bp, Homo sapien
tctgggatgtgagctatctgaaatt

SEQ ID NO: 809738 - DNA, 25 bp, Homo sapien
gctatgtgggtatgactcctttgcc

SEQ ID NO: 809739 - DNA, 25 bp, Homo sapien
agcttcttaggcaccttaggtacca

SEQ ID NO: 809740 - DNA, 25 bp, Homo sapien
ttgtaccattaaacagcaagctggc

SEQ ID NO: 809741 - DNA, 25 bp, Homo sapien
gaggtgggccctgatatttgtccag

SEQ ID NO: 809742 - DNA, 25 bp, Homo sapien
taacaaggcagggtttcagaacacc

SEQ ID NO: 809743 - DNA, 25 bp, Homo sapien
caaggcagggtttcagaacacctga

SEQ ID NO: 809744 - DNA, 25 bp, Homo sapien
taagtaacaaggcagggtttcagaa

SEQ ID NO: 809745 - DNA, 25 bp, Homo sapien
cagggtttcagaacacctgaaagac

SEQ ID NO: 809746 - DNA, 25 bp, Homo sapien
ttcaacttaaagatatgagacttac

SEQ ID NO: 809747 - DNA, 25 bp, Homo sapien
tgcttattatcccaaaatttcaact

SEQ ID NO: 809748 - DNA, 25 bp, Homo sapien
tagacttgactatacataagctgtt

SEQ ID NO: 809749 - DNA, 25 bp, Homo sapien
tcttaaactaatcgcagaaagatgc

SEQ ID NO: 809750 - DNA, 25 bp, Homo sapien
gcaaaaaccgtagtccaggcaacag

SEQ ID NO: 809751 - DNA, 25 bp, Homo sapien
catggagtggtacctcaagcagaca

SEQ ID NO: 809752 - DNA, 25 bp, Homo sapien
tagtagcagcataattagaccacca

SEQ ID NO: 809753 - DNA, 25 bp, Homo sapien
tctgtgctgcttggacgtacaagac

SEQ ID NO: 809754 - DNA, 25 bp, Homo sapien
gcacccagccaaaatatttcttgaa

SEQ ID NO: 809755 - DNA, 25 bp, Homo sapien
tgaggcagggtctcagtcactcagg

SEQ ID NO: 809756 - DNA, 25 bp, Homo sapien
gccattctcatgccttggccaccca

SEQ ID NO: 809757 - DNA, 25 bp, Homo sapien
tctcgcactgtcacctggtctggag

SEQ ID NO: 809758 - DNA, 25 bp, Homo sapien
cagactagcgaaattgaaggcaagg

SEQ ID NO: 809759 - DNA, 25 bp, Homo sapien
taatatgcgcaatagttagtggcca

SEQ ID NO: 809760 - DNA, 25 bp, Homo sapien
tagggttaccttcagacttgacaga

SEQ ID NO: 809761 - DNA, 25 bp, Homo sapien
tacaaactggagatgagataaccac

SEQ ID NO: 809762 - DNA, 25 bp, Homo sapien
tccttagatgttttgctagcctagt

SEQ ID NO: 809763 - DNA, 25 bp, Homo sapien
gttgattatatcctagtacagaccc

SEQ ID NO: 809764 - DNA, 25 bp, Homo sapien
gaccctacagttacttattgctatt

SEQ ID NO: 809765 - DNA, 25 bp, Homo sapien
tagcctagtttaaatcaagaagttg

SEQ ID NO: 809766 - DNA, 25 bp, Homo sapien
atgaagttcacttctgtgattatat

SEQ ID NO: 809767 - DNA, 25 bp, Homo sapien
taaaaggatgttcacgtaggagtat

SEQ ID NO: 809768 - DNA, 25 bp, Homo sapien
ctgaggctgtggtaaaaggatgttc

SEQ ID NO: 809769 - DNA, 25 bp, Homo sapien
gttcacgtaggagtatgaaatagtt

SEQ ID NO: 809770 - DNA, 25 bp, Homo sapien
tcatggagaagattaactggtaaac

SEQ ID NO: 809771 - DNA, 25 bp, Homo sapien
aattgtaagtgacacacagagtcag

SEQ ID NO: 809772 - DNA, 25 bp, Homo sapien
aaaaattgttgaccaccagcgataa

SEQ ID NO: 809773 - DNA, 25 bp, Homo sapien
aagaaaaactgagacagcccctcct

SEQ ID NO: 809774 - DNA, 25 bp, Homo sapien
gagttaagtgactagatgcaagaca

SEQ ID NO: 809775 - DNA, 25 bp, Homo sapien
tagtggctacataacgtctcctctg

SEQ ID NO: 809776 - DNA, 25 bp, Homo sapien
tgtctggactagagccgacttggcc

SEQ ID NO: 809777 - DNA, 25 bp, Homo sapien
ttaggagaggcagcatacagacgca

SEQ ID NO: 809778 - DNA, 25 bp, Homo sapien
gatacaggatactcaaaacgtagtg

SEQ ID NO: 809779 - DNA, 25 bp, Homo sapien
aaataagacagtatcccaaactggg

SEQ ID NO: 809780 - DNA, 25 bp, Homo sapien
gaatggatgctcacccagtaagtat

SEQ ID NO: 809781 - DNA, 25 bp, Homo sapien
taaggactggcagctaaatctgtac

SEQ ID NO: 809782 - DNA, 25 bp, Homo sapien
tctaactgttatccagggtggagtg

SEQ ID NO: 809783 - DNA, 25 bp, Homo sapien
tttaagacggagtctaactgttatc

SEQ ID NO: 809784 - DNA, 25 bp, Homo sapien
aagacggagtctaactgttatccag

SEQ ID NO: 809785 - DNA, 25 bp, Homo sapien
gagtctaactgttatccagggtgga

SEQ ID NO: 809786 - DNA, 25 bp, Homo sapien
gatacaaaatactcctccaatggca

SEQ ID NO: 809787 - DNA, 25 bp, Homo sapien
tatcttgtataggaacaggctggct

SEQ ID NO: 809788 - DNA, 25 bp, Homo sapien
tcaaagcagctcgtaagtacttagt

SEQ ID NO: 809789 - DNA, 25 bp, Homo sapien
ctctttagaagtatagcagctgcac

SEQ ID NO: 809790 - DNA, 25 bp, Homo sapien
tatggatcaaacaccatgtcagata

SEQ ID NO: 809791 - DNA, 25 bp, Homo sapien
gccataagctatcaacaggtgctaa

SEQ ID NO: 809792 - DNA, 25 bp, Homo sapien
tacacacagcttatattccagtgac

SEQ ID NO: 809793 - DNA, 25 bp, Homo sapien
tctaggtgtcaaggatactgtactg

SEQ ID NO: 809794 - DNA, 25 bp, Homo sapien
gactcatggattgggctgagcattt

SEQ ID NO: 809795 - DNA, 25 bp, Homo sapien
cgctgctgactcatggattgggctg

SEQ ID NO: 809796 - DNA, 25 bp, Homo sapien
gctgactcatggattgggctgagca

SEQ ID NO: 809797 - DNA, 25 bp, Homo sapien
tcatggattgggctgagcatttcgg

SEQ ID NO: 809798 - DNA, 25 bp, Homo sapien
ctccgctccttaatgattacacagc

SEQ ID NO: 809799 - DNA, 25 bp, Homo sapien
aaacgctttggcacgctggtttttg

SEQ ID NO: 809800 - DNA, 25 bp, Homo sapien
aagtaaattgggctcagacagaccc

SEQ ID NO: 809801 - DNA, 25 bp, Homo sapien
agtgcttcagagtccggacagagcc

SEQ ID NO: 809802 - DNA, 25 bp, Homo sapien
gtcttccgctgatcggcaccgaggt

SEQ ID NO: 809803 - DNA, 25 bp, Homo sapien
ctctttggtcttccgctgatcggca

SEQ ID NO: 809804 - DNA, 25 bp, Homo sapien
ccgctgatcggcaccgaggtaatcc

SEQ ID NO: 809805 - DNA, 25 bp, Homo sapien
gatcggcaccgaggtaatccggcat

SEQ ID NO: 809806 - DNA, 25 bp, Homo sapien
catactgacaaaaacactggcggca

SEQ ID NO: 809807 - DNA, 25 bp, Homo sapien
ggctccagcatagcttctggtgacc

SEQ ID NO: 809808 - DNA, 25 bp, Homo sapien
cgcgggtggctccagcatagcttct

SEQ ID NO: 809809 - DNA, 25 bp, Homo sapien
cccatactgacaaaaacactggcgg

SEQ ID NO: 809810 - DNA, 25 bp, Homo sapien
gcatgaagactatccaacacaccgg

SEQ ID NO: 809811 - DNA, 25 bp, Homo sapien
cctgggtgccaaatctctaacgagc

SEQ ID NO: 809812 - DNA, 25 bp, Homo sapien
tagggaagcacatacagtccaagac

SEQ ID NO: 809813 - DNA, 25 bp, Homo sapien
tgatgcagcattctaaaaggcggag

SEQ ID NO: 809814 - DNA, 25 bp, Homo sapien
gaaacatagtatacacattaggcgg

SEQ ID NO: 809815 - DNA, 25 bp, Homo sapien
gatgcccaggctttggacctaggta

SEQ ID NO: 809816 - DNA, 25 bp, Homo sapien
tctagaatgaggtaatcagggccac

SEQ ID NO: 809817 - DNA, 25 bp, Homo sapien
tgccttaggaagaattagctcgctg

SEQ ID NO: 809818 - DNA, 25 bp, Homo sapien
gtggacagggtttgaatgccagctc

SEQ ID NO: 809819 - DNA, 25 bp, Homo sapien
aaaacacatgtggagagtaacctga

SEQ ID NO: 809820 - DNA, 25 bp, Homo sapien
acaatgaaatacaatgcaggccccg

SEQ ID NO: 809821 - DNA, 25 bp, Homo sapien
taatccaagcagttcaggctttggg

SEQ ID NO: 809822 - DNA, 25 bp, Homo sapien
ttttcaacaaggcaatatccccctc

SEQ ID NO: 809823 - DNA, 25 bp, Homo sapien
taagttttcaacaaggcaatatccc

SEQ ID NO: 809824 - DNA, 25 bp, Homo sapien
acaaggcaatatccccctcatccag

SEQ ID NO: 809825 - DNA, 25 bp, Homo sapien
ttcaacaaggcaatatccccctcat

SEQ ID NO: 809826 - DNA, 25 bp, Homo sapien
taattattttggaaggacaatacca

SEQ ID NO: 809827 - DNA, 25 bp, Homo sapien
cataaaacatctatagtttgtagac

SEQ ID NO: 809828 - DNA, 25 bp, Homo sapien
acatctatagtttgtagacactgaa

SEQ ID NO: 809829 - DNA, 25 bp, Homo sapien
tctaattattttggaaggacaatac

SEQ ID NO: 809830 - DNA, 25 bp, Homo sapien
gagaagttgctgaatgtcatcttca

SEQ ID NO: 809831 - DNA, 25 bp, Homo sapien
tgcttatctgcagccaaatcccaga

SEQ ID NO: 809832 - DNA, 25 bp, Homo sapien
tggagtgtctgcttatctgcagcca

SEQ ID NO: 809833 - DNA, 25 bp, Homo sapien
tgtctgcttatctgcagccaaatcc

SEQ ID NO: 809834 - DNA, 25 bp, Homo sapien
actctggagtgtctgcttatctgca

SEQ ID NO: 809835 - DNA, 25 bp, Homo sapien
gaattccacttgtagtaagctagcc

SEQ ID NO: 809836 - DNA, 25 bp, Homo sapien
catgcaaatacaggaagatacacag

SEQ ID NO: 809837 - DNA, 25 bp, Homo sapien
gatacacagaggattacgagggcca

SEQ ID NO: 809838 - DNA, 25 bp, Homo sapien
aaagggcaacgggaaagcaagtatg

SEQ ID NO: 809839 - DNA, 25 bp, Homo sapien
taacagaattacataggaaggatga

SEQ ID NO: 809840 - DNA, 25 bp, Homo sapien
caagaagtaggaatctataatacac

SEQ ID NO: 809841 - DNA, 25 bp, Homo sapien
gataggaaaggtgtgccttcaaggt

SEQ ID NO: 809842 - DNA, 25 bp, Homo sapien
gcaatatccattagaaccatgaaga

SEQ ID NO: 809843 - DNA, 25 bp, Homo sapien
gaaggaagccatgtactatatgatt

SEQ ID NO: 809844 - DNA, 25 bp, Homo sapien
tattttagaatacggatgaaccttg

SEQ ID NO: 809845 - DNA, 25 bp, Homo sapien
ctgcgcccagtcaaacaaaaacctt

SEQ ID NO: 809846 - DNA, 25 bp, Homo sapien
gaaagagacgggaatgaagactgct

SEQ ID NO: 809847 - DNA, 25 bp, Homo sapien
caaaaatagcctgtggagtgcgcac

SEQ ID NO: 809848 - DNA, 25 bp, Homo sapien
tagcataattgtgtgaaggactctg

SEQ ID NO: 809849 - DNA, 25 bp, Homo sapien
gagtgcgcacataggtagagctaaa

SEQ ID NO: 809850 - DNA, 25 bp, Homo sapien
tgttaccaaccatgtttgctaggga

SEQ ID NO: 809851 - DNA, 25 bp, Homo sapien
ccaacctcaggctagtcaggctggt

SEQ ID NO: 809852 - DNA, 25 bp, Homo sapien
aaaggtccattcgactttagccaag

SEQ ID NO: 809853 - DNA, 25 bp, Homo sapien
taactagattatatcctgagtgtgc

SEQ ID NO: 809854 - DNA, 25 bp, Homo sapien
gaaactgggacactgttaaagatcc

SEQ ID NO: 809855 - DNA, 25 bp, Homo sapien
ttctatacccaactccaaaggtcca

SEQ ID NO: 809856 - DNA, 25 bp, Homo sapien
actaaggtccaccacaaacttggca

SEQ ID NO: 809857 - DNA, 25 bp, Homo sapien
tgtattttgggtcctccgaatcagc

SEQ ID NO: 809858 - DNA, 25 bp, Homo sapien
tcatcccttcttcaatgtcagtagg

SEQ ID NO: 809859 - DNA, 25 bp, Homo sapien
aaactgctttacgttgataatgtat

SEQ ID NO: 809860 - DNA, 25 bp, Homo sapien
aatggactggtaacctcaactctga

SEQ ID NO: 809861 - DNA, 25 bp, Homo sapien
tgtgagacagtatccttagtgaaag

SEQ ID NO: 809862 - DNA, 25 bp, Homo sapien
tgtctaatgtcgcaaacaacctatc

SEQ ID NO: 809863 - DNA, 25 bp, Homo sapien
tctgaggatactaaactacatgtct

SEQ ID NO: 809864 - DNA, 25 bp, Homo sapien
ttaggaggcaatggaatgtgaattt

SEQ ID NO: 809865 - DNA, 25 bp, Homo sapien
tcttaggaggcaatggaatgtgaat

SEQ ID NO: 809866 - DNA, 25 bp, Homo sapien
cttaggaggcaatggaatgtgaatt

SEQ ID NO: 809867 - DNA, 25 bp, Homo sapien
aacatacagtcacaggctttttgga

SEQ ID NO: 809868 - DNA, 25 bp, Homo sapien
cagtgccctggaactacttgctgta

SEQ ID NO: 809869 - DNA, 25 bp, Homo sapien
taaaataaagacaggctgagactct

SEQ ID NO: 809870 - DNA, 25 bp, Homo sapien
gatactgtccaaattcaatagaata

SEQ ID NO: 809871 - DNA, 25 bp, Homo sapien
actgtatgtgacatcaggtttctct

SEQ ID NO: 809872 - DNA, 25 bp, Homo sapien
tagagacacaattttcacacttacc

SEQ ID NO: 809873 - DNA, 25 bp, Homo sapien
gtgatagagacacaattttcacact

SEQ ID NO: 809874 - DNA, 25 bp, Homo sapien
gagacacaattttcacacttaccac

SEQ ID NO: 809875 - DNA, 25 bp, Homo sapien
gacacaattttcacacttaccactt

SEQ ID NO: 809876 - DNA, 25 bp, Homo sapien
tgcccgcgcacagagtgtcttgcct

SEQ ID NO: 809877 - DNA, 25 bp, Homo sapien
cctgtaccgggtggaccaaagagca

SEQ ID NO: 809878 - DNA, 25 bp, Homo sapien
tcagtccgattagcaactgcccgcg

SEQ ID NO: 809879 - DNA, 25 bp, Homo sapien
gtggaccaaagagcagcacgccctt

SEQ ID NO: 809880 - DNA, 25 bp, Homo sapien
agagttcacgaaccattcgagcccc

SEQ ID NO: 809881 - DNA, 25 bp, Homo sapien
gccatttcaaagagttcacgaacca

SEQ ID NO: 809882 - DNA, 25 bp, Homo sapien
tcaaagagttcacgaaccattcgag

SEQ ID NO: 809883 - DNA, 25 bp, Homo sapien
ctggccatttcaaagagttcacgaa

SEQ ID NO: 809884 - DNA, 25 bp, Homo sapien
tcatcaaatctgtgaagccaacaag

SEQ ID NO: 809885 - DNA, 25 bp, Homo sapien
catcaaatctgtgaagccaacaaga

SEQ ID NO: 809886 - DNA, 25 bp, Homo sapien
atcaaatctgtgaagccaacaagaa

SEQ ID NO: 809887 - DNA, 25 bp, Homo sapien
ttcatcaaatctgtgaagccaacaa

SEQ ID NO: 809888 - DNA, 25 bp, Homo sapien
caaagtatcaggtctgttagtggcc

SEQ ID NO: 809889 - DNA, 25 bp, Homo sapien
ctctaggatcaaaaccatcaagctg

SEQ ID NO: 809890 - DNA, 25 bp, Homo sapien
ctctagatcgggcaagctaaattca

SEQ ID NO: 809891 - DNA, 25 bp, Homo sapien
gctgattgatcagttccaacattgt

SEQ ID NO: 809892 - DNA, 25 bp, Homo sapien
cacagtcgtgctaacagttcaaatc

SEQ ID NO: 809893 - DNA, 25 bp, Homo sapien
tgctatttggacacagtcgtgctaa

SEQ ID NO: 809894 - DNA, 25 bp, Homo sapien
tcaaatctgatatctctttcaacac

SEQ ID NO: 809895 - DNA, 25 bp, Homo sapien
gaacgagcgtgaatcttaaatatgt

SEQ ID NO: 809896 - DNA, 25 bp, Homo sapien
ttccaagaaatccttctcggtagca

SEQ ID NO: 809897 - DNA, 25 bp, Homo sapien
agcttccaagaaatccttctcggta

SEQ ID NO: 809898 - DNA, 25 bp, Homo sapien
gcttccaagaaatccttctcggtag

SEQ ID NO: 809899 - DNA, 25 bp, Homo sapien
cttccaagaaatccttctcggtagc

SEQ ID NO: 809900 - DNA, 25 bp, Homo sapien
aacaagtctatataaggttaggatt

SEQ ID NO: 809901 - DNA, 25 bp, Homo sapien
tattaacaagtctatataaggttag

SEQ ID NO: 809902 - DNA, 25 bp, Homo sapien
tggttattaacaagtctatataagg

SEQ ID NO: 809903 - DNA, 25 bp, Homo sapien
ttaacaagtctatataaggttagga

SEQ ID NO: 809904 - DNA, 25 bp, Homo sapien
tattatattacaagaagagatatgg

SEQ ID NO: 809905 - DNA, 25 bp, Homo sapien
aacattagaaatcaccttttattat

SEQ ID NO: 809906 - DNA, 25 bp, Homo sapien
tatattacaagaagagatatggaaa

SEQ ID NO: 809907 - DNA, 25 bp, Homo sapien
cattagaaatcaccttttattatat

SEQ ID NO: 809908 - DNA, 25 bp, Homo sapien
tttatatgtagagcacccggccagc

SEQ ID NO: 809909 - DNA, 25 bp, Homo sapien
catgtggtcatacgcctaagtgagc

SEQ ID NO: 809910 - DNA, 25 bp, Homo sapien
gatagaagccatctaagcaagcgct

SEQ ID NO: 809911 - DNA, 25 bp, Homo sapien
tgagctactttgttgcgggacagaa

SEQ ID NO: 809912 - DNA, 25 bp, Homo sapien
acctgaaaatagtttgctctattta

SEQ ID NO: 809913 - DNA, 25 bp, Homo sapien
tattgtaagcataacctgaaaatag

SEQ ID NO: 809914 - DNA, 25 bp, Homo sapien
ctgaaaatagtttgctctatttaat

SEQ ID NO: 809915 - DNA, 25 bp, Homo sapien
ttattgtaagcataacctgaaaata

SEQ ID NO: 809916 - DNA, 25 bp, Homo sapien
gaatttttctgtggaatatagaccc

SEQ ID NO: 809917 - DNA, 25 bp, Homo sapien
gatggcacttctagcaacacagagg

SEQ ID NO: 809918 - DNA, 25 bp, Homo sapien
taagaaatcctacatgcagcccaag

SEQ ID NO: 809919 - DNA, 25 bp, Homo sapien
aacacagagggcgaagctgactcat

SEQ ID NO: 809920 - DNA, 25 bp, Homo sapien
ataatttactagaaggctaataatg

SEQ ID NO: 809921 - DNA, 25 bp, Homo sapien
ttccacacaacaaaagcgtgatgtt

SEQ ID NO: 809922 - DNA, 25 bp, Homo sapien
gaaggctaataatggaaattcttcc

SEQ ID NO: 809923 - DNA, 25 bp, Homo sapien
caacaaaagcgtgatgttattcaga

SEQ ID NO: 809924 - DNA, 25 bp, Homo sapien
tactcttcttttaatctcctactac

SEQ ID NO: 809925 - DNA, 25 bp, Homo sapien
taatctcctactacctttcatttcc

SEQ ID NO: 809926 - DNA, 25 bp, Homo sapien
tcttttaatctcctactacctttca

SEQ ID NO: 809927 - DNA, 25 bp, Homo sapien
ctcttcttttaatctcctactacct

SEQ ID NO: 809928 - DNA, 25 bp, Homo sapien
tgagctccgagacctacagaagaaa

SEQ ID NO: 809929 - DNA, 25 bp, Homo sapien
caaggctgtggtcccgaaactgggc

SEQ ID NO: 809930 - DNA, 25 bp, Homo sapien
tatccggtcacgaagggactgctca

SEQ ID NO: 809931 - DNA, 25 bp, Homo sapien
tcatagaggctctgacacgctgaac

SEQ ID NO: 809932 - DNA, 25 bp, Homo sapien
cacagcatttttacttcccgtttgc

SEQ ID NO: 809933 - DNA, 25 bp, Homo sapien
cagcccttcgccgtttccagtttgg

SEQ ID NO: 809934 - DNA, 25 bp, Homo sapien
ctcgaatcccttcggtgctaatcca

SEQ ID NO: 809935 - DNA, 25 bp, Homo sapien
tcacgaagctctttcctttgcaacc

SEQ ID NO: 809936 - DNA, 25 bp, Homo sapien
gcctcgagcctctactgatgttcca

SEQ ID NO: 809937 - DNA, 25 bp, Homo sapien
gatgttccacctcaaggcgacagga

SEQ ID NO: 809938 - DNA, 25 bp, Homo sapien
ctaaacgaaccggtgacagggctga

SEQ ID NO: 809939 - DNA, 25 bp, Homo sapien
cggtatgggaagaaagccggtctca

SEQ ID NO: 809940 - DNA, 25 bp, Homo sapien
tgttttcgaaatgttcctgtacgaa

SEQ ID NO: 809941 - DNA, 25 bp, Homo sapien
cgaaatgttcctgtacgaatcggag

SEQ ID NO: 809942 - DNA, 25 bp, Homo sapien
aatgttcctgtacgaatcggagtct

SEQ ID NO: 809943 - DNA, 25 bp, Homo sapien
tttcgaaatgttcctgtacgaatcg

SEQ ID NO: 809944 - DNA, 25 bp, Homo sapien
ggctcctcaggggagacgcgtaaca

SEQ ID NO: 809945 - DNA, 25 bp, Homo sapien
gatttgaggggcttacaagaagcag

SEQ ID NO: 809946 - DNA, 25 bp, Homo sapien
atttgaggggcttacaagaagcagc

SEQ ID NO: 809947 - DNA, 25 bp, Homo sapien
caggggagacgcgtaacattggatt

SEQ ID NO: 809948 - DNA, 25 bp, Homo sapien
tgaaagcccttctcaagaccgagtg

SEQ ID NO: 809949 - DNA, 25 bp, Homo sapien
tttttcacgacaacatgggctcaga

SEQ ID NO: 809950 - DNA, 25 bp, Homo sapien
gaaggtcacttaggcgatacccatg

SEQ ID NO: 809951 - DNA, 25 bp, Homo sapien
tctacaacagaagacgaaggtcact

SEQ ID NO: 809952 - DNA, 25 bp, Homo sapien
tggcagacggagtagatgtattcat

SEQ ID NO: 809953 - DNA, 25 bp, Homo sapien
cctctaagttaataactgaattggc

SEQ ID NO: 809954 - DNA, 25 bp, Homo sapien
taactgaattggcagacggagtaga

SEQ ID NO: 809955 - DNA, 25 bp, Homo sapien
caattctcctctaagttaataactg

SEQ ID NO: 809956 - DNA, 25 bp, Homo sapien
gaagttttgtaaagcacctttgcaa

SEQ ID NO: 809957 - DNA, 25 bp, Homo sapien
tccactagagtaaggtaagtcctcc

SEQ ID NO: 809958 - DNA, 25 bp, Homo sapien
cagtgacaccaaacttaactgagaa

SEQ ID NO: 809959 - DNA, 25 bp, Homo sapien
tgctgtcattggttttccactagag

SEQ ID NO: 809960 - DNA, 25 bp, Homo sapien
tcgacgggttcggactgatggctcc

SEQ ID NO: 809961 - DNA, 25 bp, Homo sapien
agtcttactgcgctggtggcaacca

SEQ ID NO: 809962 - DNA, 25 bp, Homo sapien
tgcaatacagcgtcaacaacgggat

SEQ ID NO: 809963 - DNA, 25 bp, Homo sapien
gaactggaatgcttatgtctcgacg

SEQ ID NO: 809964 - DNA, 25 bp, Homo sapien
cttttataagagtaaatgtgttcct

SEQ ID NO: 809965 - DNA, 25 bp, Homo sapien
ccagctgtctctcaagctgaaactt

SEQ ID NO: 809966 - DNA, 25 bp, Homo sapien
gccagctgtctctcaagctgaaact

SEQ ID NO: 809967 - DNA, 25 bp, Homo sapien
ttataagagtaaatgtgttcctgct

SEQ ID NO: 809968 - DNA, 25 bp, Homo sapien
tgtgctgcttccatagtggctccaa

SEQ ID NO: 809969 - DNA, 25 bp, Homo sapien
tatcatgtggcataacgtaacagca

SEQ ID NO: 809970 - DNA, 25 bp, Homo sapien
gaaatgctgggactagccagaagac

SEQ ID NO: 809971 - DNA, 25 bp, Homo sapien
tgttgtgcggcatatatactcagac

SEQ ID NO: 809972 - DNA, 25 bp, Homo sapien
gataaccattgtcaatattttggca

SEQ ID NO: 809973 - DNA, 25 bp, Homo sapien
gaactttttttagcgcatttacata

SEQ ID NO: 809974 - DNA, 25 bp, Homo sapien
aatcactcaggggataaccattgtc

SEQ ID NO: 809975 - DNA, 25 bp, Homo sapien
tcttgtaaaagtatacatgttcaaa

SEQ ID NO: 809976 - DNA, 25 bp, Homo sapien
taaacaagagcattctgaaaggccc

SEQ ID NO: 809977 - DNA, 25 bp, Homo sapien
cattggtgccacatgcagtagttcc

SEQ ID NO: 809978 - DNA, 25 bp, Homo sapien
gccagatgggcaagcagacataaac

SEQ ID NO: 809979 - DNA, 25 bp, Homo sapien
tgggtacatgtcgtttgcaaaggca

SEQ ID NO: 809980 - DNA, 25 bp, Homo sapien
cagggtttcctttcgggctcatgaa

SEQ ID NO: 809981 - DNA, 25 bp, Homo sapien
cacatattatgtcaatctgtcttta

SEQ ID NO: 809982 - DNA, 25 bp, Homo sapien
aactagatctaagtatatccataca

SEQ ID NO: 809983 - DNA, 25 bp, Homo sapien
tatcatttgccagcgttggaggagg

SEQ ID NO: 809984 - DNA, 25 bp, Homo sapien
cctggctctgtatgcattacatgta

SEQ ID NO: 809985 - DNA, 25 bp, Homo sapien
tattacggtaaataggctactgcac

SEQ ID NO: 809986 - DNA, 25 bp, Homo sapien
gtttgttatgccaactactcaagag

SEQ ID NO: 809987 - DNA, 25 bp, Homo sapien
tataattgctgcaggttcgtgtgct

SEQ ID NO: 809988 - DNA, 25 bp, Homo sapien
gaacttcgacaaagcatgagctgcc

SEQ ID NO: 809989 - DNA, 25 bp, Homo sapien
tgctgttttggctacggcccctgaa

SEQ ID NO: 809990 - DNA, 25 bp, Homo sapien
caagcctgtatttcatgagagccag

SEQ ID NO: 809991 - DNA, 25 bp, Homo sapien
caggcataggcgaggcaaatcaagc

SEQ ID NO: 809992 - DNA, 25 bp, Homo sapien
gctacattctctttgggtccccgat

SEQ ID NO: 809993 - DNA, 25 bp, Homo sapien
tttgttcggtagcccttttgctaca

SEQ ID NO: 809994 - DNA, 25 bp, Homo sapien
ttctctttgggtccccgatctattg

SEQ ID NO: 809995 - DNA, 25 bp, Homo sapien
cccttttgctacattctctttgggt

SEQ ID NO: 809996 - DNA, 25 bp, Homo sapien
cttgccagaacctctcgtatatctg

SEQ ID NO: 809997 - DNA, 25 bp, Homo sapien
ccagaacctctcgtatatctgtgca

SEQ ID NO: 809998 - DNA, 25 bp, Homo sapien
tgccagaacctctcgtatatctgtg

SEQ ID NO: 809999 - DNA, 25 bp, Homo sapien
ccttgccagaacctctcgtatatct

SEQ ID NO: 810000 - DNA, 25 bp, Homo sapien
ctgtactctggtgtgcaattgtgca

SEQ ID NO: 810001 - DNA, 25 bp, Homo sapien
tgggcatcttttctgtgctgtactc

SEQ ID NO: 810002 - DNA, 25 bp, Homo sapien
tatgcagagcatagattccttctac

SEQ ID NO: 810003 - DNA, 25 bp, Homo sapien
gctttgctagggaagtggcccttca

SEQ ID NO: 810004 - DNA, 25 bp, Homo sapien
cacacagcccggctttgtccctgtc

SEQ ID NO: 810005 - DNA, 25 bp, Homo sapien
ctagtccacacagcccggctttgtc

SEQ ID NO: 810006 - DNA, 25 bp, Homo sapien
tagtccacacagcccggctttgtcc

SEQ ID NO: 810007 - DNA, 25 bp, Homo sapien
gtccacacagcccggctttgtccct

SEQ ID NO: 810008 - DNA, 25 bp, Homo sapien
ggtataaaggaggcaaggactgcca

SEQ ID NO: 810009 - DNA, 25 bp, Homo sapien
ctggtataaaggaggcaaggactgc

SEQ ID NO: 810010 - DNA, 25 bp, Homo sapien
gtataaaggaggcaaggactgccat

SEQ ID NO: 810011 - DNA, 25 bp, Homo sapien
tggtataaaggaggcaaggactgcc

SEQ ID NO: 810012 - DNA, 25 bp, Homo sapien
catgcacagaatacatcacagcgtt

SEQ ID NO: 810013 - DNA, 25 bp, Homo sapien
gacttcattacgtgcttgcctgctg

SEQ ID NO: 810014 - DNA, 25 bp, Homo sapien
atattctccctgttctcatgcctga

SEQ ID NO: 810015 - DNA, 25 bp, Homo sapien
tgaggcttcgcgtctgagcatccag

SEQ ID NO: 810016 - DNA, 25 bp, Homo sapien
ccatttgacaattttatgtcgttgc

SEQ ID NO: 810017 - DNA, 25 bp, Homo sapien
aaaagagttgagaaactgggcaaga

SEQ ID NO: 810018 - DNA, 25 bp, Homo sapien
aaagagttgagaaactgggcaagat

SEQ ID NO: 810019 - DNA, 25 bp, Homo sapien
caattttatgtcgttgctaggtttt

SEQ ID NO: 810020 - DNA, 25 bp, Homo sapien
ccagactctttatttcagctggaat

SEQ ID NO: 810021 - DNA, 25 bp, Homo sapien
ctgacaccagactctttatttcagc

SEQ ID NO: 810022 - DNA, 25 bp, Homo sapien
atttcagctggaataagtatgtcct

SEQ ID NO: 810023 - DNA, 25 bp, Homo sapien
tcagctggaataagtatgtccttca

SEQ ID NO: 810024 - DNA, 25 bp, Homo sapien
ctctctctccaacgtcatctccaca

SEQ ID NO: 810025 - DNA, 25 bp, Homo sapien
tctccaacgtcatctccacatttag

SEQ ID NO: 810026 - DNA, 25 bp, Homo sapien
tctctctctctccaacgtcatctcc

SEQ ID NO: 810027 - DNA, 25 bp, Homo sapien
tccaacgtcatctccacatttagat

SEQ ID NO: 810028 - DNA, 25 bp, Homo sapien
aggaacccccgatcttgcttcacgg

SEQ ID NO: 810029 - DNA, 25 bp, Homo sapien
ccaggaacccccgatcttgcttcac

SEQ ID NO: 810030 - DNA, 25 bp, Homo sapien
ccccgatcttgcttcacggtcttac

SEQ ID NO: 810031 - DNA, 25 bp, Homo sapien
cgatcttgcttcacggtcttacaaa

SEQ ID NO: 810032 - DNA, 25 bp, Homo sapien
accagacattatcatcataattcct

SEQ ID NO: 810033 - DNA, 25 bp, Homo sapien
caaccagacattatcatcataattc

SEQ ID NO: 810034 - DNA, 25 bp, Homo sapien
aaccagacattatcatcataattcc

SEQ ID NO: 810035 - DNA, 25 bp, Homo sapien
gataggtaaaaactccttgcaattg

SEQ ID NO: 810036 - DNA, 25 bp, Homo sapien
caatgcgtagagcattttttccaag

SEQ ID NO: 810037 - DNA, 25 bp, Homo sapien
gcaattgtaaaagcttgacttctcc

SEQ ID NO: 810038 - DNA, 25 bp, Homo sapien
aaaactccttgcaattgtaaaagct

SEQ ID NO: 810039 - DNA, 25 bp, Homo sapien
cactttcatttaggttgctgttccg

SEQ ID NO: 810040 - DNA, 25 bp, Homo sapien
gaggttcttatctttagagtcacca

SEQ ID NO: 810041 - DNA, 25 bp, Homo sapien
ctgtctgaacaagtgcatgaggttc

SEQ ID NO: 810042 - DNA, 25 bp, Homo sapien
gttccgacatttccattcaattgcc

SEQ ID NO: 810043 - DNA, 25 bp, Homo sapien
agtgtcattgtagcttacatgatcc

SEQ ID NO: 810044 - DNA, 25 bp, Homo sapien
tcaaggagcaattatggggtgtatc

SEQ ID NO: 810045 - DNA, 25 bp, Homo sapien
tgtcattgtagcttacatgatcccc

SEQ ID NO: 810046 - DNA, 25 bp, Homo sapien
tcattgtagcttacatgatccccaa

SEQ ID NO: 810047 - DNA, 25 bp, Homo sapien
tggggatttgaggaatgttaattgt

SEQ ID NO: 810048 - DNA, 25 bp, Homo sapien
tgttcatggggatttgaggaatgtt

SEQ ID NO: 810049 - DNA, 25 bp, Homo sapien
tcatggggatttgaggaatgttaat

SEQ ID NO: 810050 - DNA, 25 bp, Homo sapien
catggggatttgaggaatgttaatt

SEQ ID NO: 810051 - DNA, 25 bp, Homo sapien
attcttctaccgagagaacagccac

SEQ ID NO: 810052 - DNA, 25 bp, Homo sapien
ttcttctaccgagagaacagccacg

SEQ ID NO: 810053 - DNA, 25 bp, Homo sapien
tcttctaccgagagaacagccacgt

SEQ ID NO: 810054 - DNA, 25 bp, Homo sapien
ttctaccgagagaacagccacgtcc

SEQ ID NO: 810055 - DNA, 25 bp, Homo sapien
tgcccatctagagagcacacacttc

SEQ ID NO: 810056 - DNA, 25 bp, Homo sapien
cacacacttctgagtgaagttgaaa

SEQ ID NO: 810057 - DNA, 25 bp, Homo sapien
cacatggctccagtagtgtgagcat

SEQ ID NO: 810058 - DNA, 25 bp, Homo sapien
agttgaaaagcaagatgtgaatctg

SEQ ID NO: 810059 - DNA, 25 bp, Homo sapien
cctccactgccgcaattatacttgg

SEQ ID NO: 810060 - DNA, 25 bp, Homo sapien
cactgccgcaattatacttggtcct

SEQ ID NO: 810061 - DNA, 25 bp, Homo sapien
ccgcaattatacttggtcctctggg

SEQ ID NO: 810062 - DNA, 25 bp, Homo sapien
cttgatcttggcatgatgaactttc

SEQ ID NO: 810063 - DNA, 25 bp, Homo sapien
caggggccgatgtcacaggaaactt

SEQ ID NO: 810064 - DNA, 25 bp, Homo sapien
aggaaacttgggcagattaaccgag

SEQ ID NO: 810065 - DNA, 25 bp, Homo sapien
aaaccaaaaactgcaggggccgatg

SEQ ID NO: 810066 - DNA, 25 bp, Homo sapien
ttgggcagattaaccgagggctgca

SEQ ID NO: 810067 - DNA, 25 bp, Homo sapien
tccttgcaggtggagacaaagctgc

SEQ ID NO: 810068 - DNA, 25 bp, Homo sapien
ccttgcaggtggagacaaagctgca

SEQ ID NO: 810069 - DNA, 25 bp, Homo sapien
atcacccttccttgaactggacttg

SEQ ID NO: 810070 - DNA, 25 bp, Homo sapien
tctctgggcctgcaagtcttgttct

SEQ ID NO: 810071 - DNA, 25 bp, Homo sapien
gggcctgcaagtcttgttctgccat

SEQ ID NO: 810072 - DNA, 25 bp, Homo sapien
cacccttccttgaactggacttggc

SEQ ID NO: 810073 - DNA, 25 bp, Homo sapien
tttggctcactttgccacattggaa

SEQ ID NO: 810074 - DNA, 25 bp, Homo sapien
cagcccatgacctggcaacctactg

SEQ ID NO: 810075 - DNA, 25 bp, Homo sapien
tgacctggcaacctactgctctgca

SEQ ID NO: 810076 - DNA, 25 bp, Homo sapien
ttgccacattggaagccaacccagc

SEQ ID NO: 810077 - DNA, 25 bp, Homo sapien
tctgcaaaacaccaggggtgagtgg

SEQ ID NO: 810078 - DNA, 25 bp, Homo sapien
gtctgcaaaacaccaggggtgagtg

SEQ ID NO: 810079 - DNA, 25 bp, Homo sapien
aacacccaaagcgtagccagtgtca

SEQ ID NO: 810080 - DNA, 25 bp, Homo sapien
tcaaacacccaaagcgtagccagtg

SEQ ID NO: 810081 - DNA, 25 bp, Homo sapien
cacccaaagcgtagccagtgtcagg

SEQ ID NO: 810082 - DNA, 25 bp, Homo sapien
acccaaagcgtagccagtgtcagga

SEQ ID NO: 810083 - DNA, 25 bp, Homo sapien
caggaatcttggagcttgaatcagc

SEQ ID NO: 810084 - DNA, 25 bp, Homo sapien
gatgaggaagagaacggtagaaacc

SEQ ID NO: 810085 - DNA, 25 bp, Homo sapien
tacgctatgaatgtggatccgaaac

SEQ ID NO: 810086 - DNA, 25 bp, Homo sapien
aaccagacgttggtggctagtcacc

SEQ ID NO: 810087 - DNA, 25 bp, Homo sapien
cacatgcaccaaatgggttggatta

SEQ ID NO: 810088 - DNA, 25 bp, Homo sapien
atgcaccaaatgggttggattatca

SEQ ID NO: 810089 - DNA, 25 bp, Homo sapien
tcacatgcaccaaatgggttggatt

SEQ ID NO: 810090 - DNA, 25 bp, Homo sapien
catgcaccaaatgggttggattatc

SEQ ID NO: 810091 - DNA, 25 bp, Homo sapien
tgttccagccactgttagaaacgct

SEQ ID NO: 810092 - DNA, 25 bp, Homo sapien
ttctgccattaactgccttgttcca

SEQ ID NO: 810093 - DNA, 25 bp, Homo sapien
cacagacactctctcttattacagt

SEQ ID NO: 810094 - DNA, 25 bp, Homo sapien
tctcttattacagtaacttctgcca

SEQ ID NO: 810095 - DNA, 25 bp, Homo sapien
gagctgaaccaagatccgctgaccc

SEQ ID NO: 810096 - DNA, 25 bp, Homo sapien
ccggtagtataggaatgtttcttga

SEQ ID NO: 810097 - DNA, 25 bp, Homo sapien
caaagtttgcggtcagagctgaacc

SEQ ID NO: 810098 - DNA, 25 bp, Homo sapien
gcccttgtctcattctccggtagta

SEQ ID NO: 810099 - DNA, 25 bp, Homo sapien
taggtcggtcataattcttgtatca

SEQ ID NO: 810100 - DNA, 25 bp, Homo sapien
caactatttaggtcggtcataattc

SEQ ID NO: 810101 - DNA, 25 bp, Homo sapien
cttcatatcgctgaattacatggag

SEQ ID NO: 810102 - DNA, 25 bp, Homo sapien
tgtggtcctcccatagaatttcttc

SEQ ID NO: 810103 - DNA, 25 bp, Homo sapien
ctttcctcacccatggtcgttcctt

SEQ ID NO: 810104 - DNA, 25 bp, Homo sapien
cagtattgtgaaaagtgtgatggtt

SEQ ID NO: 810105 - DNA, 25 bp, Homo sapien
gattgaagtctgcacctttcctcac

SEQ ID NO: 810106 - DNA, 25 bp, Homo sapien
cttctcctagggacaaaggcagtat

SEQ ID NO: 810107 - DNA, 25 bp, Homo sapien
gggtgctagcacttaagatagacaa

SEQ ID NO: 810108 - DNA, 25 bp, Homo sapien
tagaaaccattgtccagtaggctcc

SEQ ID NO: 810109 - DNA, 25 bp, Homo sapien
ttggcatggcgggagataatctacg

SEQ ID NO: 810110 - DNA, 25 bp, Homo sapien
tagcctaaataaacgtctcctagag

SEQ ID NO: 810111 - DNA, 25 bp, Homo sapien
ctggtgacagattgaagcgcccagg

SEQ ID NO: 810112 - DNA, 25 bp, Homo sapien
ccgcgccgctcgaccgcaaagttcc

SEQ ID NO: 810113 - DNA, 25 bp, Homo sapien
tgacagattgaagcgcccaggtctg

SEQ ID NO: 810114 - DNA, 25 bp, Homo sapien
tcgaccgcaaagttcccgctgctca

SEQ ID NO: 810115 - DNA, 25 bp, Homo sapien
ggtgcttgtgctaaacgcctgagaa

SEQ ID NO: 810116 - DNA, 25 bp, Homo sapien
tccagggagcgagaataaagttagt

SEQ ID NO: 810117 - DNA, 25 bp, Homo sapien
gaataccatggtaggtaccgcagca

SEQ ID NO: 810118 - DNA, 25 bp, Homo sapien
tacgttccgggacaagaataccatg

SEQ ID NO: 810119 - DNA, 25 bp, Homo sapien
gctgttgctgggggcgacgctgagg

SEQ ID NO: 810120 - DNA, 25 bp, Homo sapien
cgctgttgctgggggcgacgctgag

SEQ ID NO: 810121 - DNA, 25 bp, Homo sapien
agcgctgttgctgggggcgacgctg

SEQ ID NO: 810122 - DNA, 25 bp, Homo sapien
ctagcgctgttgctgggggcgacgc

SEQ ID NO: 810123 - DNA, 25 bp, Homo sapien
tgcctcgatgaatcaagcagggctt

SEQ ID NO: 810124 - DNA, 25 bp, Homo sapien
catcatttttcaaacggaagaaaag

SEQ ID NO: 810125 - DNA, 25 bp, Homo sapien
ctcctgcctcgatgaatcaagcagg

SEQ ID NO: 810126 - DNA, 25 bp, Homo sapien
cgatgaatcaagcagggcttccctt

SEQ ID NO: 810127 - DNA, 25 bp, Homo sapien
tgtcacccctgagtaaggatcagct

SEQ ID NO: 810128 - DNA, 25 bp, Homo sapien
cacccctgagtaaggatcagcttgg

SEQ ID NO: 810129 - DNA, 25 bp, Homo sapien
tgagtaaggatcagcttggccaccc

SEQ ID NO: 810130 - DNA, 25 bp, Homo sapien
cctgagtaaggatcagcttggccac

SEQ ID NO: 810131 - DNA, 25 bp, Homo sapien
gcaggccattgatgctgaaccttta

SEQ ID NO: 810132 - DNA, 25 bp, Homo sapien
aatcacagggcaggccattgatgct

SEQ ID NO: 810133 - DNA, 25 bp, Homo sapien
cagggcaggccattgatgctgaacc

SEQ ID NO: 810134 - DNA, 25 bp, Homo sapien
cacagggcaggccattgatgctgaa

SEQ ID NO: 810135 - DNA, 25 bp, Homo sapien
gcctctcttaagttggcagttgtca

SEQ ID NO: 810136 - DNA, 25 bp, Homo sapien
caggcctctcttaagttggcagttg

SEQ ID NO: 810137 - DNA, 25 bp, Homo sapien
ctcttaagttggcagttgtcatttt

SEQ ID NO: 810138 - DNA, 25 bp, Homo sapien
tcacaggcctctcttaagttggcag

SEQ ID NO: 810139 - DNA, 25 bp, Homo sapien
gcatttccactatggcctttgcaag

SEQ ID NO: 810140 - DNA, 25 bp, Homo sapien
agcatttccactatggcctttgcaa

SEQ ID NO: 810141 - DNA, 25 bp, Homo sapien
ggagtgttgtgctgatggcctctac

SEQ ID NO: 810142 - DNA, 25 bp, Homo sapien
gagtgttgtgctgatggcctctacg

SEQ ID NO: 810143 - DNA, 25 bp, Homo sapien
agtgttgtgctgatggcctctacgt

SEQ ID NO: 810144 - DNA, 25 bp, Homo sapien
caggagtgttgtgctgatggcctct

SEQ ID NO: 810145 - DNA, 25 bp, Homo sapien
aatttcttatagttagaatgatgga

SEQ ID NO: 810146 - DNA, 25 bp, Homo sapien
tcttcaacccgtatcacattctgca

SEQ ID NO: 810147 - DNA, 25 bp, Homo sapien
ggtccactcttcaacccgtatcaca

SEQ ID NO: 810148 - DNA, 25 bp, Homo sapien
gcagtcaaccaatacagagaatttg

SEQ ID NO: 810149 - DNA, 25 bp, Homo sapien
tgtgcctaataagttcattctggtt

SEQ ID NO: 810150 - DNA, 25 bp, Homo sapien
tgcctaataagttcattctggttca

SEQ ID NO: 810151 - DNA, 25 bp, Homo sapien
gcctaataagttcattctggttcat

SEQ ID NO: 810152 - DNA, 25 bp, Homo sapien
gtgcctaataagttcattctggttc

SEQ ID NO: 810153 - DNA, 25 bp, Homo sapien
aacctgtgggaaggtcccagatgca

SEQ ID NO: 810154 - DNA, 25 bp, Homo sapien
cctgtgggaaggtcccagatgcatc

SEQ ID NO: 810155 - DNA, 25 bp, Homo sapien
tgtgggaaggtcccagatgcatctg

SEQ ID NO: 810156 - DNA, 25 bp, Homo sapien
ccaaacctgtgggaaggtcccagat

SEQ ID NO: 810157 - DNA, 25 bp, Homo sapien
tccagcaaaagactgacaagtcaga

SEQ ID NO: 810158 - DNA, 25 bp, Homo sapien
gcaaaagactgacaagtcagagcca

SEQ ID NO: 810159 - DNA, 25 bp, Homo sapien
ccagcaaaagactgacaagtcagag

SEQ ID NO: 810160 - DNA, 25 bp, Homo sapien
aaagactgacaagtcagagccagca

SEQ ID NO: 810161 - DNA, 25 bp, Homo sapien
ggctgtgatttcctcttaaccacaa

SEQ ID NO: 810162 - DNA, 25 bp, Homo sapien
caatgcctcctgtggagtagttgag

SEQ ID NO: 810163 - DNA, 25 bp, Homo sapien
tctggttccctttgggatcgggtga

SEQ ID NO: 810164 - DNA, 25 bp, Homo sapien
atgcctcctgtggagtagttgaggg

SEQ ID NO: 810165 - DNA, 25 bp, Homo sapien
cagcaaaggcgttttatccctttca

SEQ ID NO: 810166 - DNA, 25 bp, Homo sapien
tctgtggaacctttatcagtatgac

SEQ ID NO: 810167 - DNA, 25 bp, Homo sapien
gactttttaatgtcctgacagcaac

SEQ ID NO: 810168 - DNA, 25 bp, Homo sapien
ctggaggatgaagctttgtgtctct

SEQ ID NO: 810169 - DNA, 25 bp, Homo sapien
cgttgactagtagtggtgaaataca

SEQ ID NO: 810170 - DNA, 25 bp, Homo sapien
cctgagtgagaaagtattgaacagt

SEQ ID NO: 810171 - DNA, 25 bp, Homo sapien
agaaagtattgaacagttctgaggc

SEQ ID NO: 810172 - DNA, 25 bp, Homo sapien
gaaagagagttcaaccctgagtgag

SEQ ID NO: 810173 - DNA, 25 bp, Homo sapien
taacttgcagttaccactctttagc

SEQ ID NO: 810174 - DNA, 25 bp, Homo sapien
gataatcctcctcggtctttcctgg

SEQ ID NO: 810175 - DNA, 25 bp, Homo sapien
actcgaatcctgtgggaatctgtgc

SEQ ID NO: 810176 - DNA, 25 bp, Homo sapien
tggacttaggagcagataatcctcc

SEQ ID NO: 810177 - DNA, 25 bp, Homo sapien
gagaggagagggtcaggaaaacgca

SEQ ID NO: 810178 - DNA, 25 bp, Homo sapien
agagaggagagggtcaggaaaacgc

SEQ ID NO: 810179 - DNA, 25 bp, Homo sapien
agaggagagggtcaggaaaacgcac

SEQ ID NO: 810180 - DNA, 25 bp, Homo sapien
acattcctctagaagttggatgtct

SEQ ID NO: 810181 - DNA, 25 bp, Homo sapien
ctaacattcctctagaagttggatg

SEQ ID NO: 810182 - DNA, 25 bp, Homo sapien
gttggatgtcttgggatccctggct

SEQ ID NO: 810183 - DNA, 25 bp, Homo sapien
ttcctctagaagttggatgtcttgg

SEQ ID NO: 810184 - DNA, 25 bp, Homo sapien
gtaatatatctgaggctggaaaaca

SEQ ID NO: 810185 - DNA, 25 bp, Homo sapien
cagtcactttcaaagtaacagattc

SEQ ID NO: 810186 - DNA, 25 bp, Homo sapien
aattaagatcttatctccatttaac

SEQ ID NO: 810187 - DNA, 25 bp, Homo sapien
tcaaagtaacagattctatgtctct

SEQ ID NO: 810188 - DNA, 25 bp, Homo sapien
gaatgagaattcagggtcatactca

SEQ ID NO: 810189 - DNA, 25 bp, Homo sapien
tgaatgagaattcagggtcatactc

SEQ ID NO: 810190 - DNA, 25 bp, Homo sapien
gagtgaatgagaattcagggtcata

SEQ ID NO: 810191 - DNA, 25 bp, Homo sapien
ctgcgaagagagtgaatgagaattc

SEQ ID NO: 810192 - DNA, 25 bp, Homo sapien
gaggctccgtcttgtgcaagggtcc

SEQ ID NO: 810193 - DNA, 25 bp, Homo sapien
aaaacgtggtgctttgtcgcgagtc

SEQ ID NO: 810194 - DNA, 25 bp, Homo sapien
cagacgtttcggtagtcttgcgacc

SEQ ID NO: 810195 - DNA, 25 bp, Homo sapien
cagaatgccccacttggaaaacgtg

SEQ ID NO: 810196 - DNA, 25 bp, Homo sapien
ttgctcctgttgcttaaatagaaaa

SEQ ID NO: 810197 - DNA, 25 bp, Homo sapien
gttgctcctgttgcttaaatagaaa

SEQ ID NO: 810198 - DNA, 25 bp, Homo sapien
tcctgttgcttaaatagaaaatgga

SEQ ID NO: 810199 - DNA, 25 bp, Homo sapien
ctactctggccccaacaccaccagc

SEQ ID NO: 810200 - DNA, 25 bp, Homo sapien
ttcatctctgccgtgtcaccattca

SEQ ID NO: 810201 - DNA, 25 bp, Homo sapien
aatttggactccaacataactttag

SEQ ID NO: 810202 - DNA, 25 bp, Homo sapien
tctttgacacctttcatctctgccg

SEQ ID NO: 810203 - DNA, 25 bp, Homo sapien
atcctctctgttgtacttccagaag

SEQ ID NO: 810204 - DNA, 25 bp, Homo sapien
agggatggaatgaggctccaggtgg

SEQ ID NO: 810205 - DNA, 25 bp, Homo sapien
catcctctctgttgtacttccagaa

SEQ ID NO: 810206 - DNA, 25 bp, Homo sapien
tagagacaaccccaggatcctggtg

SEQ ID NO: 810207 - DNA, 25 bp, Homo sapien
tgaactgtagccaatggatgcccca

SEQ ID NO: 810208 - DNA, 25 bp, Homo sapien
gattcagcgagcatttcatcaccgc

SEQ ID NO: 810209 - DNA, 25 bp, Homo sapien
caagggtggtctcacatcaagcaca

SEQ ID NO: 810210 - DNA, 25 bp, Homo sapien
acacactcacggagcctcgcgcgct

SEQ ID NO: 810211 - DNA, 25 bp, Homo sapien
gagcctcgcgcgctgcaactcccct

SEQ ID NO: 810212 - DNA, 25 bp, Homo sapien
aggagacacactcacggagcctcgc

SEQ ID NO: 810213 - DNA, 25 bp, Homo sapien
agcctcgcgcgctgcaactcccctg

SEQ ID NO: 810214 - DNA, 25 bp, Homo sapien
gtggagaagtccgtgaagctgcccc

SEQ ID NO: 810215 - DNA, 25 bp, Homo sapien
tgatgagcatcatggagaggccgat

SEQ ID NO: 810216 - DNA, 25 bp, Homo sapien
aagccgttgccgatgcagtagtgga

SEQ ID NO: 810217 - DNA, 25 bp, Homo sapien
tggaagagcccgaaatagccggctt

SEQ ID NO: 810218 - DNA, 25 bp, Homo sapien
tccggatggaggagtaaacatattt

SEQ ID NO: 810219 - DNA, 25 bp, Homo sapien
cctccggatggaggagtaaacatat

SEQ ID NO: 810220 - DNA, 25 bp, Homo sapien
ccggatggaggagtaaacatattta

SEQ ID NO: 810221 - DNA, 25 bp, Homo sapien
cacctccggatggaggagtaaacat

SEQ ID NO: 810222 - DNA, 25 bp, Homo sapien
tgctggtacactcagaatgatacag

SEQ ID NO: 810223 - DNA, 25 bp, Homo sapien
tggcacttcttgctggcccttcttg

SEQ ID NO: 810224 - DNA, 25 bp, Homo sapien
gccataaagccttgccatcttggtg

SEQ ID NO: 810225 - DNA, 25 bp, Homo sapien
aatccaatctggatcaggtgtccca

SEQ ID NO: 810226 - DNA, 25 bp, Homo sapien
gaaaaattatcgaatacctactatg

SEQ ID NO: 810227 - DNA, 25 bp, Homo sapien
ccaacactcacagagggcctactta

SEQ ID NO: 810228 - DNA, 25 bp, Homo sapien
tttgcaacagtctcctgacaggtac

SEQ ID NO: 810229 - DNA, 25 bp, Homo sapien
cattagctcatttagtctttgcaac

SEQ ID NO: 810230 - DNA, 25 bp, Homo sapien
tcactctgtcagagagggcttggcc

SEQ ID NO: 810231 - DNA, 25 bp, Homo sapien
gctcagtacattcagaatcactctg

SEQ ID NO: 810232 - DNA, 25 bp, Homo sapien
tgcactgatgcccagtaagaagtgg

SEQ ID NO: 810233 - DNA, 25 bp, Homo sapien
ccccatcagagctcagtacattcag

SEQ ID NO: 810234 - DNA, 25 bp, Homo sapien
tattcaggaggagttagcttttccc

SEQ ID NO: 810235 - DNA, 25 bp, Homo sapien
cattatttgcctatggctgcggtcc

SEQ ID NO: 810236 - DNA, 25 bp, Homo sapien
tccagtgaactgctcaagtcatccc

SEQ ID NO: 810237 - DNA, 25 bp, Homo sapien
acaacaaccaaaatgacctgatggg

SEQ ID NO: 810238 - DNA, 25 bp, Homo sapien
tatctagtatggtataatggccgcc

SEQ ID NO: 810239 - DNA, 25 bp, Homo sapien
gggcatcaactgaccactagtggta

SEQ ID NO: 810240 - DNA, 25 bp, Homo sapien
cagataggctaaggaactggtccaa

SEQ ID NO: 810241 - DNA, 25 bp, Homo sapien
tacaactcgggctataggtgcacta

SEQ ID NO: 810242 - DNA, 25 bp, Homo sapien
acatccgtggaacccagaacccttg

SEQ ID NO: 810243 - DNA, 25 bp, Homo sapien
tggaagtgaggtcacgtgaactgtc

SEQ ID NO: 810244 - DNA, 25 bp, Homo sapien
atgtggaagtgaggtcacgtgaact

SEQ ID NO: 810245 - DNA, 25 bp, Homo sapien
aagtgaggtcacgtgaactgtcctc

SEQ ID NO: 810246 - DNA, 25 bp, Homo sapien
ttgatgctacctcgccctcttcact

SEQ ID NO: 810247 - DNA, 25 bp, Homo sapien
tcttgttgatgctacctcgccctct

SEQ ID NO: 810248 - DNA, 25 bp, Homo sapien
tcatcttgttgatgctacctcgccc

SEQ ID NO: 810249 - DNA, 25 bp, Homo sapien
ttgttgatgctacctcgccctcttc

SEQ ID NO: 810250 - DNA, 25 bp, Homo sapien
gctgtttaacttcgagttcttcctg

SEQ ID NO: 810251 - DNA, 25 bp, Homo sapien
actgggtctgctacaatttctgctg

SEQ ID NO: 810252 - DNA, 25 bp, Homo sapien
taggaagatggcctagctggaaaga

SEQ ID NO: 810253 - DNA, 25 bp, Homo sapien
cccgcccacacattctaggaagatg

SEQ ID NO: 810254 - DNA, 25 bp, Homo sapien
ggtcctggtgtgtcaaataatgaaa

SEQ ID NO: 810255 - DNA, 25 bp, Homo sapien
gatgacccagtcttacatttagatg

SEQ ID NO: 810256 - DNA, 25 bp, Homo sapien
tccaagatgacccagtcttacattt

SEQ ID NO: 810257 - DNA, 25 bp, Homo sapien
caagatgacccagtcttacatttag

SEQ ID NO: 810258 - DNA, 25 bp, Homo sapien
attccaagatgacccagtcttacat

SEQ ID NO: 810259 - DNA, 25 bp, Homo sapien
gtgcccaaagaacgctctctgctct

SEQ ID NO: 810260 - DNA, 25 bp, Homo sapien
tcttgtgcccaaagaacgctctctg

SEQ ID NO: 810261 - DNA, 25 bp, Homo sapien
atctttagggcctcatctttattga

SEQ ID NO: 810262 - DNA, 25 bp, Homo sapien
ctttagggcctcatctttattgagc

SEQ ID NO: 810263 - DNA, 25 bp, Homo sapien
tattgtatttactgaatccctagga

SEQ ID NO: 810264 - DNA, 25 bp, Homo sapien
aagccattcccataaaatgcattca

SEQ ID NO: 810265 - DNA, 25 bp, Homo sapien
ttatcaagaatgtagtcaaagccat

SEQ ID NO: 810266 - DNA, 25 bp, Homo sapien
cctaggaatcactcttttatcaaga

SEQ ID NO: 810267 - DNA, 25 bp, Homo sapien
gcattcaggtagcggatgtctgcaa

SEQ ID NO: 810268 - DNA, 25 bp, Homo sapien
attcaggtagcggatgtctgcaagc

SEQ ID NO: 810269 - DNA, 25 bp, Homo sapien
tcaggtagcggatgtctgcaagcat

SEQ ID NO: 810270 - DNA, 25 bp, Homo sapien
ttcaggtagcggatgtctgcaagca

SEQ ID NO: 810271 - DNA, 25 bp, Homo sapien
tgtgcacgttattaaactattgttt

SEQ ID NO: 810272 - DNA, 25 bp, Homo sapien
ccagtactctctttttcgatgctgg

SEQ ID NO: 810273 - DNA, 25 bp, Homo sapien
tattaaactattgtttcttagcttc

SEQ ID NO: 810274 - DNA, 25 bp, Homo sapien
cagtactctctttttcgatgctggg

SEQ ID NO: 810275 - DNA, 25 bp, Homo sapien
ctgtgaggatggcaaatgaatcagc

SEQ ID NO: 810276 - DNA, 25 bp, Homo sapien
tgaggatggcaaatgaatcagcaaa

SEQ ID NO: 810277 - DNA, 25 bp, Homo sapien
gatggtttaaaccaggcacctgtga

SEQ ID NO: 810278 - DNA, 25 bp, Homo sapien
tcctagggatggtttaaaccaggca

SEQ ID NO: 810279 - DNA, 25 bp, Homo sapien
gagaccccattactagcctcttgga

SEQ ID NO: 810280 - DNA, 25 bp, Homo sapien
ggcagacttacaatcttacaaggga

SEQ ID NO: 810281 - DNA, 25 bp, Homo sapien
gctccttattgccagcttggaacaa

SEQ ID NO: 810282 - DNA, 25 bp, Homo sapien
cccaatgttggcagttagtttcctc

SEQ ID NO: 810283 - DNA, 25 bp, Homo sapien
ctgattttgcatctatgctttagaa

SEQ ID NO: 810284 - DNA, 25 bp, Homo sapien
ctaaaatgctgttgattcataggct

SEQ ID NO: 810285 - DNA, 25 bp, Homo sapien
tctccttacttaatggtttcctgaa

SEQ ID NO: 810286 - DNA, 25 bp, Homo sapien
cataggcttatcttatggagttaaa

SEQ ID NO: 810287 - DNA, 25 bp, Homo sapien
tgggcaggatttggatggttcttgc

SEQ ID NO: 810288 - DNA, 25 bp, Homo sapien
taagtcctccttgctgattcctcta

SEQ ID NO: 810289 - DNA, 25 bp, Homo sapien
gtcctccttgctgattcctctattt

SEQ ID NO: 810290 - DNA, 25 bp, Homo sapien
tgcttaagtcctccttgctgattcc

SEQ ID NO: 810291 - DNA, 25 bp, Homo sapien
accagggccttgtccagctggaaac

SEQ ID NO: 810292 - DNA, 25 bp, Homo sapien
ctgcaccagggccttgtccagctgg

SEQ ID NO: 810293 - DNA, 25 bp, Homo sapien
gcaccagggccttgtccagctggaa

SEQ ID NO: 810294 - DNA, 25 bp, Homo sapien
ctaaatctgcaccagggccttgtcc

SEQ ID NO: 810295 - DNA, 25 bp, Homo sapien
gacagctgtgtttcatttcagagtt

SEQ ID NO: 810296 - DNA, 25 bp, Homo sapien
tcaggacagctgtgtttcatttcag

SEQ ID NO: 810297 - DNA, 25 bp, Homo sapien
tcttaaaaatatcaggacagctgtg

SEQ ID NO: 810298 - DNA, 25 bp, Homo sapien
ctgtgtttcatttcagagttcccca

SEQ ID NO: 810299 - DNA, 25 bp, Homo sapien
ggtcttccacacgactgagttctgg

SEQ ID NO: 810300 - DNA, 25 bp, Homo sapien
tggggtcttccacacgactgagttc

SEQ ID NO: 810301 - DNA, 25 bp, Homo sapien
aaggcttggccaatctaggcaggtg

SEQ ID NO: 810302 - DNA, 25 bp, Homo sapien
gttgtggactagtaaggcttggcca

SEQ ID NO: 810303 - DNA, 25 bp, Homo sapien
catctgattccccaacaaaagtacc

SEQ ID NO: 810304 - DNA, 25 bp, Homo sapien
ctgtgcaacagacaaccatctgatt

SEQ ID NO: 810305 - DNA, 25 bp, Homo sapien
tgtgcaacagacaaccatctgattc

SEQ ID NO: 810306 - DNA, 25 bp, Homo sapien
acaaaagtaccttgagccaagtggg

SEQ ID NO: 810307 - DNA, 25 bp, Homo sapien
ctttctgtaccttcgtacagccgca

SEQ ID NO: 810308 - DNA, 25 bp, Homo sapien
ttcttctttctgtaccttcgtacag

SEQ ID NO: 810309 - DNA, 25 bp, Homo sapien
ttctttctgtaccttcgtacagccg

SEQ ID NO: 810310 - DNA, 25 bp, Homo sapien
ttctgtaccttcgtacagccgcact

SEQ ID NO: 810311 - DNA, 25 bp, Homo sapien
agttctggtgtggatcctgtaagag

SEQ ID NO: 810312 - DNA, 25 bp, Homo sapien
ctagttctggtgtggatcctgtaag

SEQ ID NO: 810313 - DNA, 25 bp, Homo sapien
tctggtgtggatcctgtaagagctc

SEQ ID NO: 810314 - DNA, 25 bp, Homo sapien
tggtgtggatcctgtaagagctcct

SEQ ID NO: 810315 - DNA, 25 bp, Homo sapien
tctgtaatggaaagctgggaccatt

SEQ ID NO: 810316 - DNA, 25 bp, Homo sapien
gaaagctgggaccattttgaaatga

SEQ ID NO: 810317 - DNA, 25 bp, Homo sapien
taatggaaagctgggaccattttga

SEQ ID NO: 810318 - DNA, 25 bp, Homo sapien
tctctgtaatggaaagctgggacca

SEQ ID NO: 810319 - DNA, 25 bp, Homo sapien
tatctccactagaacaagaaacttg

SEQ ID NO: 810320 - DNA, 25 bp, Homo sapien
gtttgaggagccattgagccatttc

SEQ ID NO: 810321 - DNA, 25 bp, Homo sapien
cagctagagcggtttgaggagccat

SEQ ID NO: 810322 - DNA, 25 bp, Homo sapien
cactcagacgatgttgagcagctag

SEQ ID NO: 810323 - DNA, 25 bp, Homo sapien
catccatgcactggagataatggtc

SEQ ID NO: 810324 - DNA, 25 bp, Homo sapien
caatcccttcagtagctgtacaaga

SEQ ID NO: 810325 - DNA, 25 bp, Homo sapien
catccagtgtgggtgttatcgcagt

SEQ ID NO: 810326 - DNA, 25 bp, Homo sapien
gctgatattgcataacactgtgctg

SEQ ID NO: 810327 - DNA, 25 bp, Homo sapien
cttcatataatgtactgtctgtgcc

SEQ ID NO: 810328 - DNA, 25 bp, Homo sapien
gaacctgctagagtaagaccttgaa

SEQ ID NO: 810329 - DNA, 25 bp, Homo sapien
ctgggtaattatagggtcttcatat

SEQ ID NO: 810330 - DNA, 25 bp, Homo sapien
tgaaatttggctacagttatttcta

SEQ ID NO: 810331 - DNA, 25 bp, Homo sapien
tcactatttacttgatgaactgcaa

SEQ ID NO: 810332 - DNA, 25 bp, Homo sapien
tgaactgcaatgtaatggctctgaa

SEQ ID NO: 810333 - DNA, 25 bp, Homo sapien
cagggaattagctgaatgctgtgga

SEQ ID NO: 810334 - DNA, 25 bp, Homo sapien
tgctgtggattgacaggctatcaac

SEQ ID NO: 810335 - DNA, 25 bp, Homo sapien
ttctgaggatcctctgtatgaaagg

SEQ ID NO: 810336 - DNA, 25 bp, Homo sapien
gacagcgaaagcgctaaaaagctca

SEQ ID NO: 810337 - DNA, 25 bp, Homo sapien
tgatttagtgaaggcttttcagaga

SEQ ID NO: 810338 - DNA, 25 bp, Homo sapien
gacggtttgtaggagccacatccat

SEQ ID NO: 810339 - DNA, 25 bp, Homo sapien
gcacaagggtggtaccaagataata

SEQ ID NO: 810340 - DNA, 25 bp, Homo sapien
tatcttgaatataagagctcggtca

SEQ ID NO: 810341 - DNA, 25 bp, Homo sapien
gggtggtaccaagataatatcttga

SEQ ID NO: 810342 - DNA, 25 bp, Homo sapien
ccaacatggcctgcacaagggtggt

SEQ ID NO: 810343 - DNA, 25 bp, Homo sapien
tgtagacatctacccatccacatat

SEQ ID NO: 810344 - DNA, 25 bp, Homo sapien
tacagtgctcatctttctgactcag

SEQ ID NO: 810345 - DNA, 25 bp, Homo sapien
gaacctctgaggcttcaatatctac

SEQ ID NO: 810346 - DNA, 25 bp, Homo sapien
catcagtaggcaatgcatagtcact

SEQ ID NO: 810347 - DNA, 25 bp, Homo sapien
tgacgtcactattaaaacgaaaggc

SEQ ID NO: 810348 - DNA, 25 bp, Homo sapien
atgacgtcactattaaaacgaaagg

SEQ ID NO: 810349 - DNA, 25 bp, Homo sapien
aagaatgacgtcactattaaaacga

SEQ ID NO: 810350 - DNA, 25 bp, Homo sapien
gaatgacgtcactattaaaacgaaa

SEQ ID NO: 810351 - DNA, 25 bp, Homo sapien
cagaaggtgtctagctgcctcagct

SEQ ID NO: 810352 - DNA, 25 bp, Homo sapien
tctgaacacaaaggagggtttactg

SEQ ID NO: 810353 - DNA, 25 bp, Homo sapien
tgcagaggcaagaggtaaataccaa

SEQ ID NO: 810354 - DNA, 25 bp, Homo sapien
tattagcgcaaaaaccacagggacc

SEQ ID NO: 810355 - DNA, 25 bp, Homo sapien
cttgtctcatcagtaaggcagaaat

SEQ ID NO: 810356 - DNA, 25 bp, Homo sapien
tctcatcagtaaggcagaaataagg

SEQ ID NO: 810357 - DNA, 25 bp, Homo sapien
tgtctcatcagtaaggcagaaataa

SEQ ID NO: 810358 - DNA, 25 bp, Homo sapien
ctcatcagtaaggcagaaataaggt

SEQ ID NO: 810359 - DNA, 25 bp, Homo sapien
gctttgggtttattttgctctgctt

SEQ ID NO: 810360 - DNA, 25 bp, Homo sapien
ttgctttgggtttattttgctctgc

SEQ ID NO: 810361 - DNA, 25 bp, Homo sapien
tttattttgctctgctttttctaga

SEQ ID NO: 810362 - DNA, 25 bp, Homo sapien
tattttgctctgctttttctagatt

SEQ ID NO: 810363 - DNA, 25 bp, Homo sapien
atctgggtatttcaatcttcttata

SEQ ID NO: 810364 - DNA, 25 bp, Homo sapien
aagctcccctgatgtacagccaaaa

SEQ ID NO: 810365 - DNA, 25 bp, Homo sapien
tcttggggatgggatccagatattg

SEQ ID NO: 810366 - DNA, 25 bp, Homo sapien
gatgggatccagatattggtatttt

SEQ ID NO: 810367 - DNA, 25 bp, Homo sapien
agctcccctgatgtacagccaaaat

SEQ ID NO: 810368 - DNA, 25 bp, Homo sapien
tcccacatgcttgggtaacatacgc

SEQ ID NO: 810369 - DNA, 25 bp, Homo sapien
ttttcactgctagagcttcttccca

SEQ ID NO: 810370 - DNA, 25 bp, Homo sapien
tgtcacaaccccatgaataacagca

SEQ ID NO: 810371 - DNA, 25 bp, Homo sapien
gaggaggtaacgctggcttttcact

SEQ ID NO: 810372 - DNA, 25 bp, Homo sapien
gtatgtgccgatggcactcgctccc

SEQ ID NO: 810373 - DNA, 25 bp, Homo sapien
cactctctgacaatgtaactattct

SEQ ID NO: 810374 - DNA, 25 bp, Homo sapien
tcgttgaggtatgtgccgatggcac

SEQ ID NO: 810375 - DNA, 25 bp, Homo sapien
tggtcccaaaggtcgttgaggtatg

SEQ ID NO: 810376 - DNA, 25 bp, Homo sapien
ggagagctgtactgactgtgccaat

SEQ ID NO: 810377 - DNA, 25 bp, Homo sapien
cttcctcccgtggtgctgtagggca

SEQ ID NO: 810378 - DNA, 25 bp, Homo sapien
agctgtactgactgtgccaatgagc

SEQ ID NO: 810379 - DNA, 25 bp, Homo sapien
tcctcccgtggtgctgtagggcagt

SEQ ID NO: 810380 - DNA, 25 bp, Homo sapien
ccttacttgagagcctcatcacctt

SEQ ID NO: 810381 - DNA, 25 bp, Homo sapien
caaaaccttacttgagagcctcatc

SEQ ID NO: 810382 - DNA, 25 bp, Homo sapien
ttcctcatggtcaaaaccttacttg

SEQ ID NO: 810383 - DNA, 25 bp, Homo sapien
tcaacaagtcccatagagacttgtt

SEQ ID NO: 810384 - DNA, 25 bp, Homo sapien
taaattcctatctcaacctgtagag

SEQ ID NO: 810385 - DNA, 25 bp, Homo sapien
ttcagagttgaagtaatgtccattt

SEQ ID NO: 810386 - DNA, 25 bp, Homo sapien
caccagcgtaccaggttccttcatt

SEQ ID NO: 810387 - DNA, 25 bp, Homo sapien
tccacaagtccaattactggattct

SEQ ID NO: 810388 - DNA, 25 bp, Homo sapien
taccatgtgcgtaacactgatatat

SEQ ID NO: 810389 - DNA, 25 bp, Homo sapien
catgtgccaaaaggagcatagctca

SEQ ID NO: 810390 - DNA, 25 bp, Homo sapien
gttagtctcttagcctctatcctgg

SEQ ID NO: 810391 - DNA, 25 bp, Homo sapien
cctggttactgcacggagtgtggac

SEQ ID NO: 810392 - DNA, 25 bp, Homo sapien
cagtgcattatgcttgttggctctg

SEQ ID NO: 810393 - DNA, 25 bp, Homo sapien
ggctcttctggttgaaaatgccttt

SEQ ID NO: 810394 - DNA, 25 bp, Homo sapien
gggccttaacagtgcattatgcttg

SEQ ID NO: 810395 - DNA, 25 bp, Homo sapien
gaatggctggccgtgggccttaaca

SEQ ID NO: 810396 - DNA, 25 bp, Homo sapien
cctgaactaagtccttgggtacatc

SEQ ID NO: 810397 - DNA, 25 bp, Homo sapien
tcaacaccagccctagtcatcattt

SEQ ID NO: 810398 - DNA, 25 bp, Homo sapien
gacacgacagttttcttagactgac

SEQ ID NO: 810399 - DNA, 25 bp, Homo sapien
catcatgagcaagccgaaaggaaag

SEQ ID NO: 810400 - DNA, 25 bp, Homo sapien
gcatacatggagtgtcatattttcc

SEQ ID NO: 810401 - DNA, 25 bp, Homo sapien
ttctccaggatctgcatacatggag

SEQ ID NO: 810402 - DNA, 25 bp, Homo sapien
ggatctgcatacatggagtgtcata

SEQ ID NO: 810403 - DNA, 25 bp, Homo sapien
tccaggatctgcatacatggagtgt

SEQ ID NO: 810404 - DNA, 25 bp, Homo sapien
ctgtgacaggcccatgcagcgtcgg

SEQ ID NO: 810405 - DNA, 25 bp, Homo sapien
tgtggtagtcgccaggtaccataaa

SEQ ID NO: 810406 - DNA, 25 bp, Homo sapien
gctgtgacaggcccatgcagcgtcg

SEQ ID NO: 810407 - DNA, 25 bp, Homo sapien
tccttgtggtagtcgccaggtacca

SEQ ID NO: 810408 - DNA, 25 bp, Homo sapien
gaaaccagttctgcatggcctagca

SEQ ID NO: 810409 - DNA, 25 bp, Homo sapien
gctttgacagctgaataattgagta

SEQ ID NO: 810410 - DNA, 25 bp, Homo sapien
ggaggaatttgatcttcctgctatt

SEQ ID NO: 810411 - DNA, 25 bp, Homo sapien
gtcctgatagcttcatctggcagta

SEQ ID NO: 810412 - DNA, 25 bp, Homo sapien
tcttcggtcttcctggacttactca

SEQ ID NO: 810413 - DNA, 25 bp, Homo sapien
aacccctggatcttcggtcttcctg

SEQ ID NO: 810414 - DNA, 25 bp, Homo sapien
cctggatcttcggtcttcctggact

SEQ ID NO: 810415 - DNA, 25 bp, Homo sapien
ttcaataacccctggatcttcggtc

SEQ ID NO: 810416 - DNA, 25 bp, Homo sapien
cacaaggtgtgccatgctgtatttc

SEQ ID NO: 810417 - DNA, 25 bp, Homo sapien
cccacgtggcctgtattgcttggca

SEQ ID NO: 810418 - DNA, 25 bp, Homo sapien
tgctgtccccttctagcaataggaa

SEQ ID NO: 810419 - DNA, 25 bp, Homo sapien
tggaactgaccaatattacatgact

SEQ ID NO: 810420 - DNA, 25 bp, Homo sapien
tcctcctgcagaggttctatcacca

SEQ ID NO: 810421 - DNA, 25 bp, Homo sapien
cctcctgcagaggttctatcaccat

SEQ ID NO: 810422 - DNA, 25 bp, Homo sapien
ttcctcctgcagaggttctatcacc

SEQ ID NO: 810423 - DNA, 25 bp, Homo sapien
tcttgagggacctggtactatgctt

SEQ ID NO: 810424 - DNA, 25 bp, Homo sapien
tactatgcttatcagaggcttcttg

SEQ ID NO: 810425 - DNA, 25 bp, Homo sapien
gcttattggagctaactgaatgact

SEQ ID NO: 810426 - DNA, 25 bp, Homo sapien
tagggacagctggaacttttagctc

SEQ ID NO: 810427 - DNA, 25 bp, Homo sapien
tatgttggtcagtagaaaatctctg

SEQ ID NO: 810428 - DNA, 25 bp, Homo sapien
gggaggaatagcaaataaagcaatt

SEQ ID NO: 810429 - DNA, 25 bp, Homo sapien
ccagattactctaggggaggaatag

SEQ ID NO: 810430 - DNA, 25 bp, Homo sapien
tttattccagaacaaccagattact

SEQ ID NO: 810431 - DNA, 25 bp, Homo sapien
agccagaaagtctgttagggagata

SEQ ID NO: 810432 - DNA, 25 bp, Homo sapien
caccagtacccccatcctcagccag

SEQ ID NO: 810433 - DNA, 25 bp, Homo sapien
aagtctgttagggagatagtcttcc

SEQ ID NO: 810434 - DNA, 25 bp, Homo sapien
tctgttagggagatagtcttcccct

SEQ ID NO: 810435 - DNA, 25 bp, Homo sapien
attggaggcgccctgtacacatcgt

SEQ ID NO: 810436 - DNA, 25 bp, Homo sapien
gccaagttgtagaaacatctccttc

SEQ ID NO: 810437 - DNA, 25 bp, Homo sapien
ttggaggcgccctgtacacatcgtc

SEQ ID NO: 810438 - DNA, 25 bp, Homo sapien
atcgtcatcgttactgtgccaagtt

SEQ ID NO: 810439 - DNA, 25 bp, Homo sapien
gattgctgggttcacgtggtaaacg

SEQ ID NO: 810440 - DNA, 25 bp, Homo sapien
aacatcatagggtaggtttcctaga

SEQ ID NO: 810441 - DNA, 25 bp, Homo sapien
ttctgtaacatcatagggtaggttt

SEQ ID NO: 810442 - DNA, 25 bp, Homo sapien
ctgggttcacgtggtaaacgcactg

SEQ ID NO: 810443 - DNA, 25 bp, Homo sapien
cggccaaaaggaggatcatccctgt

SEQ ID NO: 810444 - DNA, 25 bp, Homo sapien
tatcacggccaaaaggaggatcatc

SEQ ID NO: 810445 - DNA, 25 bp, Homo sapien
acggccaaaaggaggatcatccctg

SEQ ID NO: 810446 - DNA, 25 bp, Homo sapien
caaaaggaggatcatccctgtcttt

SEQ ID NO: 810447 - DNA, 25 bp, Homo sapien
ggtctgaatcataacgatctcgata

SEQ ID NO: 810448 - DNA, 25 bp, Homo sapien
cggtctgaatcataacgatctcgat

SEQ ID NO: 810449 - DNA, 25 bp, Homo sapien
gtctgaatcataacgatctcgatac

SEQ ID NO: 810450 - DNA, 25 bp, Homo sapien
tatcgatccatatcccggcgtgggc

SEQ ID NO: 810451 - DNA, 25 bp, Homo sapien
tgcctcggtcatcatagcgatcccg

SEQ ID NO: 810452 - DNA, 25 bp, Homo sapien
gggaatcatagcctctatcatagtc

SEQ ID NO: 810453 - DNA, 25 bp, Homo sapien
gatcccggccaccatatcgatccat

SEQ ID NO: 810454 - DNA, 25 bp, Homo sapien
ctgcgatacccactgccaaatgctc

SEQ ID NO: 810455 - DNA, 25 bp, Homo sapien
tgcgatacccactgccaaatgctct

SEQ ID NO: 810456 - DNA, 25 bp, Homo sapien
ccactgccaaatgctcttctgccac

SEQ ID NO: 810457 - DNA, 25 bp, Homo sapien
ctgccaaatgctcttctgccactgc

SEQ ID NO: 810458 - DNA, 25 bp, Homo sapien
catattggtcttcatagcagtccct

SEQ ID NO: 810459 - DNA, 25 bp, Homo sapien
atattggtcttcatagcagtccctg

SEQ ID NO: 810460 - DNA, 25 bp, Homo sapien
ggggggggacctctatcatcacgcc

SEQ ID NO: 810461 - DNA, 25 bp, Homo sapien
gggggggggacctctatcatcacgc

SEQ ID NO: 810462 - DNA, 25 bp, Homo sapien
cacgcctataatcatcccgagagta

SEQ ID NO: 810463 - DNA, 25 bp, Homo sapien
gcctataatcatcccgagagtaatc

SEQ ID NO: 810464 - DNA, 25 bp, Homo sapien
ctagcagaggaatcatcttccttag

SEQ ID NO: 810465 - DNA, 25 bp, Homo sapien
tagcagaggaatcatcttccttagg

SEQ ID NO: 810466 - DNA, 25 bp, Homo sapien
gaggaatcatcttccttaggagtac

SEQ ID NO: 810467 - DNA, 25 bp, Homo sapien
gcagaggaatcatcttccttaggag

SEQ ID NO: 810468 - DNA, 25 bp, Homo sapien
cctccaaagatagaagcagctcgag

SEQ ID NO: 810469 - DNA, 25 bp, Homo sapien
ccaaagatagaagcagctcgagtgg

SEQ ID NO: 810470 - DNA, 25 bp, Homo sapien
tccaaagatagaagcagctcgagtg

SEQ ID NO: 810471 - DNA, 25 bp, Homo sapien
cccctccaaagatagaagcagctcg

SEQ ID NO: 810472 - DNA, 25 bp, Homo sapien
ttgggtgtctctcccgaggccgtcg

SEQ ID NO: 810473 - DNA, 25 bp, Homo sapien
tgtcctcgaccgttcccgttcctga

SEQ ID NO: 810474 - DNA, 25 bp, Homo sapien
ctgtcctcgaccgttcccgttcctg

SEQ ID NO: 810475 - DNA, 25 bp, Homo sapien
gagtttcttcactttgccagcttgg

SEQ ID NO: 810476 - DNA, 25 bp, Homo sapien
tccttcatgcatttctgccagatgt

SEQ ID NO: 810477 - DNA, 25 bp, Homo sapien
tcatgcatttctgccagatgtggtg

SEQ ID NO: 810478 - DNA, 25 bp, Homo sapien
atgcatttctgccagatgtggtgga

SEQ ID NO: 810479 - DNA, 25 bp, Homo sapien
ctctccttcatgcatttctgccaga

SEQ ID NO: 810480 - DNA, 25 bp, Homo sapien
aggtttagaagttggagagtggcaa

SEQ ID NO: 810481 - DNA, 25 bp, Homo sapien
tagaagttggagagtggcaatcttc

SEQ ID NO: 810482 - DNA, 25 bp, Homo sapien
ctgatcaggtttgggaggtttagaa

SEQ ID NO: 810483 - DNA, 25 bp, Homo sapien
gaagttggagagtggcaatcttcct

SEQ ID NO: 810484 - DNA, 25 bp, Homo sapien
gagggttagaacttcgcttcaccca

SEQ ID NO: 810485 - DNA, 25 bp, Homo sapien
atttggcataatcttctccctcatt

SEQ ID NO: 810486 - DNA, 25 bp, Homo sapien
tgcagatctggagtcttgatccttt

SEQ ID NO: 810487 - DNA, 25 bp, Homo sapien
ccatcaacagagagagcagcatact

SEQ ID NO: 810488 - DNA, 25 bp, Homo sapien
gcagaactgaacttggaagctggat

SEQ ID NO: 810489 - DNA, 25 bp, Homo sapien
ttgtcttgtctggatagaggttttg

SEQ ID NO: 810490 - DNA, 25 bp, Homo sapien
ggttttgatttgctctcgaatgttc

SEQ ID NO: 810491 - DNA, 25 bp, Homo sapien
tcttgtctggatagaggttttgatt

SEQ ID NO: 810492 - DNA, 25 bp, Homo sapien
atttgctctcgaatgttccagggtg

SEQ ID NO: 810493 - DNA, 25 bp, Homo sapien
gagaattcatatatgccacaatagg

SEQ ID NO: 810494 - DNA, 25 bp, Homo sapien
tctccagttacttcaatactttaaa

SEQ ID NO: 810495 - DNA, 25 bp, Homo sapien
ctttatggcctatagtctcactccc

SEQ ID NO: 810496 - DNA, 25 bp, Homo sapien
taccatttctgctaaatggagaccc

SEQ ID NO: 810497 - DNA, 25 bp, Homo sapien
taaaagcccacttcttagctactgg

SEQ ID NO: 810498 - DNA, 25 bp, Homo sapien
caagtttagctactgtgttgcaaga

SEQ ID NO: 810499 - DNA, 25 bp, Homo sapien
gacttagatactgctttttgggagg

SEQ ID NO: 810500 - DNA, 25 bp, Homo sapien
catgaagagggcaaaccctagcttt

SEQ ID NO: 810501 - DNA, 25 bp, Homo sapien
gagtcagagtgagccagttttcagg

SEQ ID NO: 810502 - DNA, 25 bp, Homo sapien
tgtcctccagaaaatgtgtaccact

SEQ ID NO: 810503 - DNA, 25 bp, Homo sapien
catctttgtagttgaatctgccctc

SEQ ID NO: 810504 - DNA, 25 bp, Homo sapien
ttttacatctcctagtcaactctgg

SEQ ID NO: 810505 - DNA, 25 bp, Homo sapien
tatgcatgtatgaattctcgcgctg

SEQ ID NO: 810506 - DNA, 25 bp, Homo sapien
ggtgctgtttactctgggcgtcaga

SEQ ID NO: 810507 - DNA, 25 bp, Homo sapien
gcgtcagagtcttgcctgtaataca

SEQ ID NO: 810508 - DNA, 25 bp, Homo sapien
gaattctctctttaccagggctcag

SEQ ID NO: 810509 - DNA, 25 bp, Homo sapien
tcttgatgtgtggaaatcatgcagc

SEQ ID NO: 810510 - DNA, 25 bp, Homo sapien
tctactcctgttaagtatgatttca

SEQ ID NO: 810511 - DNA, 25 bp, Homo sapien
agtgaattccacttctctactcctg

SEQ ID NO: 810512 - DNA, 25 bp, Homo sapien
gctgctcccacacctgcattgcagt

SEQ ID NO: 810513 - DNA, 25 bp, Homo sapien
aattttctaattgagtgagtgcagt

SEQ ID NO: 810514 - DNA, 25 bp, Homo sapien
actacttggacactgccaccttggg

SEQ ID NO: 810515 - DNA, 25 bp, Homo sapien
taattgagtgagtgcagttcccact

SEQ ID NO: 810516 - DNA, 25 bp, Homo sapien
ttgcctttgacagttgagtgccact

SEQ ID NO: 810517 - DNA, 25 bp, Homo sapien
agaatgagtccggggaccaaatgga

SEQ ID NO: 810518 - DNA, 25 bp, Homo sapien
gaatgagtccggggaccaaatggac

SEQ ID NO: 810519 - DNA, 25 bp, Homo sapien
cacagaatgagtccggggaccaaat

SEQ ID NO: 810520 - DNA, 25 bp, Homo sapien
catcacagaatgagtccggggacca

SEQ ID NO: 810521 - DNA, 25 bp, Homo sapien
cgtttgtgccacttccattagatga

SEQ ID NO: 810522 - DNA, 25 bp, Homo sapien
cccaattacgtttgtgccacttcca

SEQ ID NO: 810523 - DNA, 25 bp, Homo sapien
cttctggacctgcttaagcccaatt

SEQ ID NO: 810524 - DNA, 25 bp, Homo sapien
gcttaagcccaattacgtttgtgcc

SEQ ID NO: 810525 - DNA, 25 bp, Homo sapien
taatccattacctgagtgttctctc

SEQ ID NO: 810526 - DNA, 25 bp, Homo sapien
ccccagatcccttggatgctaatcc

SEQ ID NO: 810527 - DNA, 25 bp, Homo sapien
gctccatgagcacaaatggaagcat

SEQ ID NO: 810528 - DNA, 25 bp, Homo sapien
gttgctgttgctccatgagcacaaa

SEQ ID NO: 810529 - DNA, 25 bp, Homo sapien
tctggttcacctctcggtggtgaca

SEQ ID NO: 810530 - DNA, 25 bp, Homo sapien
gatgctgagtcatcggccagagcta

SEQ ID NO: 810531 - DNA, 25 bp, Homo sapien
tgtcagaggcttgtgagtaatatcc

SEQ ID NO: 810532 - DNA, 25 bp, Homo sapien
tatagtcagtgtccttgtcagaggc

SEQ ID NO: 810533 - DNA, 25 bp, Homo sapien
cacgtatctcttctcctctaatgca

SEQ ID NO: 810534 - DNA, 25 bp, Homo sapien
cctgcactggatagggaatcgtaat

SEQ ID NO: 810535 - DNA, 25 bp, Homo sapien
tccttcctgcactggatagggaatc

SEQ ID NO: 810536 - DNA, 25 bp, Homo sapien
tagggaatcgtaatggttctttaca

SEQ ID NO: 810537 - DNA, 25 bp, Homo sapien
accgcgaaagttggcaaagaccttg

SEQ ID NO: 810538 - DNA, 25 bp, Homo sapien
ctcttgggcctttctatatggcgat

SEQ ID NO: 810539 - DNA, 25 bp, Homo sapien
ctatggaccgcgaaagttggcaaag

SEQ ID NO: 810540 - DNA, 25 bp, Homo sapien
tatggcgatgggtatttggttgttt

SEQ ID NO: 810541 - DNA, 25 bp, Homo sapien
aggtctacaaaggtatccagtgtaa

SEQ ID NO: 810542 - DNA, 25 bp, Homo sapien
agggacttgagagaaaaggtctaca

SEQ ID NO: 810543 - DNA, 25 bp, Homo sapien
tctacaaaggtatccagtgtaactg

SEQ ID NO: 810544 - DNA, 25 bp, Homo sapien
caagggacttgagagaaaaggtcta

SEQ ID NO: 810545 - DNA, 25 bp, Homo sapien
cttgaccaaggctaatgatgttcag

SEQ ID NO: 810546 - DNA, 25 bp, Homo sapien
ttgaccaaggctaatgatgttcaga

SEQ ID NO: 810547 - DNA, 25 bp, Homo sapien
taaatatcttttagtgctcaagcca

SEQ ID NO: 810548 - DNA, 25 bp, Homo sapien
gctcaagccaaatgcaatatcctcc

SEQ ID NO: 810549 - DNA, 25 bp, Homo sapien
cttttagtgctcaagccaaatgcaa

SEQ ID NO: 810550 - DNA, 25 bp, Homo sapien
tgttaaatatcttttagtgctcaag

SEQ ID NO: 810551 - DNA, 25 bp, Homo sapien
cacttgggttgaacctcacatgact

SEQ ID NO: 810552 - DNA, 25 bp, Homo sapien
cttgggttgaacctcacatgactcc

SEQ ID NO: 810553 - DNA, 25 bp, Homo sapien
acacttgggttgaacctcacatgac

SEQ ID NO: 810554 - DNA, 25 bp, Homo sapien
tgggttgaacctcacatgactccaa

SEQ ID NO: 810555 - DNA, 25 bp, Homo sapien
caaatttctccgagctaaagaggaa

SEQ ID NO: 810556 - DNA, 25 bp, Homo sapien
aaatttctccgagctaaagaggaag

SEQ ID NO: 810557 - DNA, 25 bp, Homo sapien
gatcaaatttctccgagctaaagag

SEQ ID NO: 810558 - DNA, 25 bp, Homo sapien
tcaaatttctccgagctaaagagga

SEQ ID NO: 810559 - DNA, 25 bp, Homo sapien
tccaataatagccaggatgtatgcc

SEQ ID NO: 810560 - DNA, 25 bp, Homo sapien
tgtcgattaccaagcacaaatgcta

SEQ ID NO: 810561 - DNA, 25 bp, Homo sapien
tcatacagccaagcacaaggcaggc

SEQ ID NO: 810562 - DNA, 25 bp, Homo sapien
gatgtatgcccagcggactgagcaa

SEQ ID NO: 810563 - DNA, 25 bp, Homo sapien
tcatgaaaattactcgctatcatga

SEQ ID NO: 810564 - DNA, 25 bp, Homo sapien
ctcatgaaaattactcgctatcatg

SEQ ID NO: 810565 - DNA, 25 bp, Homo sapien
ttgtgacgattaatttatggttcag

SEQ ID NO: 810566 - DNA, 25 bp, Homo sapien
tttgtgacgattaatttatggttca

SEQ ID NO: 810567 - DNA, 25 bp, Homo sapien
ctttgtgacgattaatttatggttc

SEQ ID NO: 810568 - DNA, 25 bp, Homo sapien
tgtgacgattaatttatggttcagc

SEQ ID NO: 810569 - DNA, 25 bp, Homo sapien
taagacaacagttgtgtcttcaaac

SEQ ID NO: 810570 - DNA, 25 bp, Homo sapien
aagacaacagttgtgtcttcaaact

SEQ ID NO: 810571 - DNA, 25 bp, Homo sapien
atgattcagtttatctcttataaag

SEQ ID NO: 810572 - DNA, 25 bp, Homo sapien
ggtcgagctcttcaaccagttagag

SEQ ID NO: 810573 - DNA, 25 bp, Homo sapien
cggagcaggattgcgaaaaatttgc

SEQ ID NO: 810574 - DNA, 25 bp, Homo sapien
cgtaaacgccgtaattcaacccatg

SEQ ID NO: 810575 - DNA, 25 bp, Homo sapien
tttaccatccctctggcggagcagg

SEQ ID NO: 810576 - DNA, 25 bp, Homo sapien
cagaacaaggaactttagatctaaa

SEQ ID NO: 810577 - DNA, 25 bp, Homo sapien
cagctttagaaccatttcaaacaga

SEQ ID NO: 810578 - DNA, 25 bp, Homo sapien
taggaagggtaatatcattccactt

SEQ ID NO: 810579 - DNA, 25 bp, Homo sapien
caagcaggtaggaagggtaatatca

SEQ ID NO: 810580 - DNA, 25 bp, Homo sapien
ttttgtcaagatccacaccaggaag

SEQ ID NO: 810581 - DNA, 25 bp, Homo sapien
ggaagattcttgatacctgtgaagc

SEQ ID NO: 810582 - DNA, 25 bp, Homo sapien
gcaggaattaggtactcataaaatt

SEQ ID NO: 810583 - DNA, 25 bp, Homo sapien
agaagtagccactgagctatttgct

SEQ ID NO: 810584 - DNA, 25 bp, Homo sapien
attcttgttgacagcgctgttaaca

SEQ ID NO: 810585 - DNA, 25 bp, Homo sapien
ctctttgtgttgctgtcagcaagca

SEQ ID NO: 810586 - DNA, 25 bp, Homo sapien
gcactccgaataaggtaattaccca

SEQ ID NO: 810587 - DNA, 25 bp, Homo sapien
gtgttgctgtcagcaagcacatctc

SEQ ID NO: 810588 - DNA, 25 bp, Homo sapien
tgggccactgcatttacattcaagc

SEQ ID NO: 810589 - DNA, 25 bp, Homo sapien
tggatgacaacgaggctgggccact

SEQ ID NO: 810590 - DNA, 25 bp, Homo sapien
tccttggttagcttgccaggatggg

SEQ ID NO: 810591 - DNA, 25 bp, Homo sapien
cagaggcagctaatgtggatgacaa

SEQ ID NO: 810592 - DNA, 25 bp, Homo sapien
taggactgtgccctccagatgacac

SEQ ID NO: 810593 - DNA, 25 bp, Homo sapien
ttagagccagataggactgtgccct

SEQ ID NO: 810594 - DNA, 25 bp, Homo sapien
agccagataggactgtgccctccag

SEQ ID NO: 810595 - DNA, 25 bp, Homo sapien
tgtgccctccagatgacactggacc

SEQ ID NO: 810596 - DNA, 25 bp, Homo sapien
taatattccctggtaacttcttgaa

SEQ ID NO: 810597 - DNA, 25 bp, Homo sapien
tcttgaaccctgttttctaggagcc

SEQ ID NO: 810598 - DNA, 25 bp, Homo sapien
cctagcagcatcagggtcagagctg

SEQ ID NO: 810599 - DNA, 25 bp, Homo sapien
gcatctcccagatgacttcagggct

SEQ ID NO: 810600 - DNA, 25 bp, Homo sapien
tagacaaaaccacatctgtacagat

SEQ ID NO: 810601 - DNA, 25 bp, Homo sapien
tggggtggggccctatccttgtgga

SEQ ID NO: 810602 - DNA, 25 bp, Homo sapien
ccttgtggatgagggagctctgcct

SEQ ID NO: 810603 - DNA, 25 bp, Homo sapien
ctctgcctgtagacaaaaccacatc

SEQ ID NO: 810604 - DNA, 25 bp, Homo sapien
ctttgatttcgaatgagaatgtgat

SEQ ID NO: 810605 - DNA, 25 bp, Homo sapien
tcatcaccagtattgaaaccttgct

SEQ ID NO: 810606 - DNA, 25 bp, Homo sapien
tgttttgaacttcttaaagatccaa

SEQ ID NO: 810607 - DNA, 25 bp, Homo sapien
taaagatccaatatctctccataac

SEQ ID NO: 810608 - DNA, 25 bp, Homo sapien
gagccgggttttctaagacctagca

SEQ ID NO: 810609 - DNA, 25 bp, Homo sapien
tggtagcccttgactccaatttggc

SEQ ID NO: 810610 - DNA, 25 bp, Homo sapien
aatgacttggatcactcctagcctg

SEQ ID NO: 810611 - DNA, 25 bp, Homo sapien
gactgcctacctttggacttctggt

SEQ ID NO: 810612 - DNA, 25 bp, Homo sapien
gacagcatgtgtcattactggaaag

SEQ ID NO: 810613 - DNA, 25 bp, Homo sapien
taccaaagactgtcgtagttcctgc

SEQ ID NO: 810614 - DNA, 25 bp, Homo sapien
cctgcattgtcagtcgtacgcacta

SEQ ID NO: 810615 - DNA, 25 bp, Homo sapien
tctgaaaacttgtatgagccacagc

SEQ ID NO: 810616 - DNA, 25 bp, Homo sapien
gagatctgggctgacttaaaagaaa

SEQ ID NO: 810617 - DNA, 25 bp, Homo sapien
gaatccagggcatgagactctactg

SEQ ID NO: 810618 - DNA, 25 bp, Homo sapien
tgaccagatccagaagagaatccag

SEQ ID NO: 810619 - DNA, 25 bp, Homo sapien
cacaggggagatctgggctgactta

SEQ ID NO: 810620 - DNA, 25 bp, Homo sapien
tcacacgaggcagttcacaactttc

SEQ ID NO: 810621 - DNA, 25 bp, Homo sapien
cgaggcagttcacaactttcctgtg

SEQ ID NO: 810622 - DNA, 25 bp, Homo sapien
gcttctttgccctagtactcacacg

SEQ ID NO: 810623 - DNA, 25 bp, Homo sapien
gccctagtactcacacgaggcagtt

SEQ ID NO: 810624 - DNA, 25 bp, Homo sapien
gagctctttgccacgttgagtggcc

SEQ ID NO: 810625 - DNA, 25 bp, Homo sapien
ttaaaagtgagttgctcccaaacca

SEQ ID NO: 810626 - DNA, 25 bp, Homo sapien
ttgagtggcctgaaaatgaaactgc

SEQ ID NO: 810627 - DNA, 25 bp, Homo sapien
caaaggctgtttagacctgagctct

SEQ ID NO: 810628 - DNA, 25 bp, Homo sapien
tttacataccatgggagagactgct

SEQ ID NO: 810629 - DNA, 25 bp, Homo sapien
tttaaagagagctaactcaactcgg

SEQ ID NO: 810630 - DNA, 25 bp, Homo sapien
ccttccttgaagataggtatgggca

SEQ ID NO: 810631 - DNA, 25 bp, Homo sapien
gcaatgtgtccagctaaagtcctaa

SEQ ID NO: 810632 - DNA, 25 bp, Homo sapien
gcttcagtttctgttatcctgatgt

SEQ ID NO: 810633 - DNA, 25 bp, Homo sapien
tggactgcgctgatgcagggctgct

SEQ ID NO: 810634 - DNA, 25 bp, Homo sapien
cactctgtagcttcagtttctgtta

SEQ ID NO: 810635 - DNA, 25 bp, Homo sapien
atgagggatgctgcgtgggatggac

SEQ ID NO: 810636 - DNA, 25 bp, Homo sapien
tcctgaatcatactcctggagggat

SEQ ID NO: 810637 - DNA, 25 bp, Homo sapien
gaagaatcagaggtgaaacagcctc

SEQ ID NO: 810638 - DNA, 25 bp, Homo sapien
cagccatttgagtggcttggacaca

SEQ ID NO: 810639 - DNA, 25 bp, Homo sapien
ttggacacagatccattccattgga

SEQ ID NO: 810640 - DNA, 25 bp, Homo sapien
cacagggtttgagattatgggtcca

SEQ ID NO: 810641 - DNA, 25 bp, Homo sapien
accacagggtttgagattatgggtc

SEQ ID NO: 810642 - DNA, 25 bp, Homo sapien
tcaaaccacagggtttgagattatg

SEQ ID NO: 810643 - DNA, 25 bp, Homo sapien
tcctcccttccataactgggctgtc

SEQ ID NO: 810644 - DNA, 25 bp, Homo sapien
tagaccccactgacataaatgggtg

SEQ ID NO: 810645 - DNA, 25 bp, Homo sapien
cataaatgggtgatttcaataagca

SEQ ID NO: 810646 - DNA, 25 bp, Homo sapien
tcttctgcttagctagaccccactg

SEQ ID NO: 810647 - DNA, 25 bp, Homo sapien
cagaatatttaaggtcagaaggcaa

SEQ ID NO: 810648 - DNA, 25 bp, Homo sapien
tatagagtactattaaaggaatccc

SEQ ID NO: 810649 - DNA, 25 bp, Homo sapien
tgtttgtctccacttgacaagggca

SEQ ID NO: 810650 - DNA, 25 bp, Homo sapien
tgttccaccgaaaccatcatgaagc

SEQ ID NO: 810651 - DNA, 25 bp, Homo sapien
gacaagggcaactgcgacacttcag

SEQ ID NO: 810652 - DNA, 25 bp, Homo sapien
ataatgatctcccacctgcaccaaa

SEQ ID NO: 810653 - DNA, 25 bp, Homo sapien
ggctgataatgatctcccacctgca

SEQ ID NO: 810654 - DNA, 25 bp, Homo sapien
ctacctctccaaggttacaatggac

SEQ ID NO: 810655 - DNA, 25 bp, Homo sapien
tctacctctccaaggttacaatgga

SEQ ID NO: 810656 - DNA, 25 bp, Homo sapien
cacatctatctgagtttgataggtc

SEQ ID NO: 810657 - DNA, 25 bp, Homo sapien
tttgagatgaccaaaccggagcttg

SEQ ID NO: 810658 - DNA, 25 bp, Homo sapien
caaaccggagcttgccacatctatc

SEQ ID NO: 810659 - DNA, 25 bp, Homo sapien
aactactgaaattggcagatttgag

SEQ ID NO: 810660 - DNA, 25 bp, Homo sapien
ggctgctgcagactagatgtgttat

SEQ ID NO: 810661 - DNA, 25 bp, Homo sapien
tcctcccaccagatttcgaatcagt

SEQ ID NO: 810662 - DNA, 25 bp, Homo sapien
tggaaaaagttgtgtattcggctaa

SEQ ID NO: 810663 - DNA, 25 bp, Homo sapien
gatttcgaatcagtgtcagattcag

SEQ ID NO: 810664 - DNA, 25 bp, Homo sapien
atcttctaaaagggaaggcatctct

SEQ ID NO: 810665 - DNA, 25 bp, Homo sapien
tgctttttagggaagatcttctaaa

SEQ ID NO: 810666 - DNA, 25 bp, Homo sapien
gttctccaagtgtgcgtttgaccat

SEQ ID NO: 810667 - DNA, 25 bp, Homo sapien
ggttctccaagtgtgcgtttgacca

SEQ ID NO: 810668 - DNA, 25 bp, Homo sapien
tcagcagcgtggacagcagcactca

SEQ ID NO: 810669 - DNA, 25 bp, Homo sapien
cagcagcgtggacagcagcactcat

SEQ ID NO: 810670 - DNA, 25 bp, Homo sapien
ttcaccaaagcctgtggattcctgc

SEQ ID NO: 810671 - DNA, 25 bp, Homo sapien
gttcaccaaagcctgtggattcctg

SEQ ID NO: 810672 - DNA, 25 bp, Homo sapien
caccaaagcctgtggattcctgcca

SEQ ID NO: 810673 - DNA, 25 bp, Homo sapien
tcaccaaagcctgtggattcctgcc

SEQ ID NO: 810674 - DNA, 25 bp, Homo sapien
gtgtctagctttgagctttgcaggg

SEQ ID NO: 810675 - DNA, 25 bp, Homo sapien
tagctggatctggtacccagtcagg

SEQ ID NO: 810676 - DNA, 25 bp, Homo sapien
tgcttacttcccaggttgtggtgag

SEQ ID NO: 810677 - DNA, 25 bp, Homo sapien
tacttcccaggttgtggtgagggcc

SEQ ID NO: 810678 - DNA, 25 bp, Homo sapien
atccaagtggtaactgggcctgacc

SEQ ID NO: 810679 - DNA, 25 bp, Homo sapien
tcacccatccaagtggtaactgggc

SEQ ID NO: 810680 - DNA, 25 bp, Homo sapien
caagtggtaactgggcctgaccctg

SEQ ID NO: 810681 - DNA, 25 bp, Homo sapien
gcatgttcaggtgggtatggctgca

SEQ ID NO: 810682 - DNA, 25 bp, Homo sapien
gtaacatgtcatgggctcggagttg

SEQ ID NO: 810683 - DNA, 25 bp, Homo sapien
tgggctcggagttgcccatgttaca

SEQ ID NO: 810684 - DNA, 25 bp, Homo sapien
atttgtccttgtaacatgtcatggg

SEQ ID NO: 810685 - DNA, 25 bp, Homo sapien
ctcggagttgcccatgttacatttc

SEQ ID NO: 810686 - DNA, 25 bp, Homo sapien
aggactagctcttcaaacagatttg

SEQ ID NO: 810687 - DNA, 25 bp, Homo sapien
aggcttggcaaggactagctcttca

SEQ ID NO: 810688 - DNA, 25 bp, Homo sapien
tggcaaggactagctcttcaaacag

SEQ ID NO: 810689 - DNA, 25 bp, Homo sapien
ggactagctcttcaaacagatttgt

SEQ ID NO: 810690 - DNA, 25 bp, Homo sapien
gtatctaaggctgcatcccagtcag

SEQ ID NO: 810691 - DNA, 25 bp, Homo sapien
tcccagtcagggtaagacctgttct

SEQ ID NO: 810692 - DNA, 25 bp, Homo sapien
gaaaagtaagattgccaagaaggaa

SEQ ID NO: 810693 - DNA, 25 bp, Homo sapien
agaccccagggtagtgacacccata

SEQ ID NO: 810694 - DNA, 25 bp, Homo sapien
ttctagagaatattggcttagcaga

SEQ ID NO: 810695 - DNA, 25 bp, Homo sapien
tctagagaatattggcttagcagaa

SEQ ID NO: 810696 - DNA, 25 bp, Homo sapien
tagataaagtagacaggtacctccc

SEQ ID NO: 810697 - DNA, 25 bp, Homo sapien
taatattacacgtgagcttccaagg

SEQ ID NO: 810698 - DNA, 25 bp, Homo sapien
gatggcccgtaccagaaacatttgg

SEQ ID NO: 810699 - DNA, 25 bp, Homo sapien
cactgttagtgatgtaggactcccg

SEQ ID NO: 810700 - DNA, 25 bp, Homo sapien
tccagggaggtcaccctcttgatgc

SEQ ID NO: 810701 - DNA, 25 bp, Homo sapien
gctggcctgagagctaatcattgat

SEQ ID NO: 810702 - DNA, 25 bp, Homo sapien
gagagctaatcattgatttagcagc

SEQ ID NO: 810703 - DNA, 25 bp, Homo sapien
ccctttcatgcgctttccaggggag

SEQ ID NO: 810704 - DNA, 25 bp, Homo sapien
tttcatgcgctttccaggggagctg

SEQ ID NO: 810705 - DNA, 25 bp, Homo sapien
agttttcccctgaggatatgcagct

SEQ ID NO: 810706 - DNA, 25 bp, Homo sapien
caggcattgcacaggattgggaaag

SEQ ID NO: 810707 - DNA, 25 bp, Homo sapien
agaatacaatgtaccactcaggcat

SEQ ID NO: 810708 - DNA, 25 bp, Homo sapien
ctctgggaagtgaagcctatcagta

SEQ ID NO: 810709 - DNA, 25 bp, Homo sapien
gagacagggagagccctcaaaacac

SEQ ID NO: 810710 - DNA, 25 bp, Homo sapien
tcaaaacacttctcactcctttcag

SEQ ID NO: 810711 - DNA, 25 bp, Homo sapien
cacttctcactcctttcagatgtac

SEQ ID NO: 810712 - DNA, 25 bp, Homo sapien
ctgggatcacaagagagaggtgcag

SEQ ID NO: 810713 - DNA, 25 bp, Homo sapien
gaatcagtgatgactagccattgac

SEQ ID NO: 810714 - DNA, 25 bp, Homo sapien
taacgcctgtgaccacgaatcagtg

SEQ ID NO: 810715 - DNA, 25 bp, Homo sapien
tgagcatttggccttttggttgaaa

SEQ ID NO: 810716 - DNA, 25 bp, Homo sapien
caaaaattccattagaggacaggga

SEQ ID NO: 810717 - DNA, 25 bp, Homo sapien
taagctgtaaccaaggcctcactgt

SEQ ID NO: 810718 - DNA, 25 bp, Homo sapien
cagtgtcgcctgagtaattcctgac

SEQ ID NO: 810719 - DNA, 25 bp, Homo sapien
tccacatatgtggttgagtcgagcc

SEQ ID NO: 810720 - DNA, 25 bp, Homo sapien
gagtcgagccacagtgacattagtc

SEQ ID NO: 810721 - DNA, 25 bp, Homo sapien
tttctggagcgcagcaacttcggcg

SEQ ID NO: 810722 - DNA, 25 bp, Homo sapien
gcagctcaccattgcgttgcagaag

SEQ ID NO: 810723 - DNA, 25 bp, Homo sapien
ttcggcgtgttcatgagctcaacag

SEQ ID NO: 810724 - DNA, 25 bp, Homo sapien
taacagttgaaagcttagagaggct

SEQ ID NO: 810725 - DNA, 25 bp, Homo sapien
tctacatgagtctggcttacatggc

SEQ ID NO: 810726 - DNA, 25 bp, Homo sapien
tggttcctggatcactccgaagtgc

SEQ ID NO: 810727 - DNA, 25 bp, Homo sapien
gaactcgatggcctacagtaagctt

SEQ ID NO: 810728 - DNA, 25 bp, Homo sapien
ttcgaagatgcccagaaagacacag

SEQ ID NO: 810729 - DNA, 25 bp, Homo sapien
cactggtggaggcagtcaatttcta

SEQ ID NO: 810730 - DNA, 25 bp, Homo sapien
ccagtatgggattaacaaggcctta

SEQ ID NO: 810731 - DNA, 25 bp, Homo sapien
tacagatcaattcgaagcagactca

SEQ ID NO: 810732 - DNA, 25 bp, Homo sapien
gaattacacactatttgaacagacc

SEQ ID NO: 810733 - DNA, 25 bp, Homo sapien
caattcctaggctcaggcaatactc

SEQ ID NO: 810734 - DNA, 25 bp, Homo sapien
cctcaattcctaggctcaggcaata

SEQ ID NO: 810735 - DNA, 25 bp, Homo sapien
catgtagctcagaccacaggtgtgt

SEQ ID NO: 810736 - DNA, 25 bp, Homo sapien
cccatgtagctcagaccacaggtgt

SEQ ID NO: 810737 - DNA, 25 bp, Homo sapien
ccatcttggccgtagagggagagaa

SEQ ID NO: 810738 - DNA, 25 bp, Homo sapien
tatggcatctcagaattccagacag

SEQ ID NO: 810739 - DNA, 25 bp, Homo sapien
tgggaattctgcttaagcaccctgg

SEQ ID NO: 810740 - DNA, 25 bp, Homo sapien
tgatagaggctctggcacttgcagc

SEQ ID NO: 810741 - DNA, 25 bp, Homo sapien
tacatcttagactgccagctgacag

SEQ ID NO: 810742 - DNA, 25 bp, Homo sapien
tgatgactccagtagttatctgtgc

SEQ ID NO: 810743 - DNA, 25 bp, Homo sapien
gaaaatgggtatgaaacatcttccc

SEQ ID NO: 810744 - DNA, 25 bp, Homo sapien
gatgggaggtgtctgaaaaacagca

SEQ ID NO: 810745 - DNA, 25 bp, Homo sapien
gtgtgcccagaggaaagaactactc

SEQ ID NO: 810746 - DNA, 25 bp, Homo sapien
tgtcctgtgtgcccagaggaaagaa

SEQ ID NO: 810747 - DNA, 25 bp, Homo sapien
tcctgtgtgcccagaggaaagaact

SEQ ID NO: 810748 - DNA, 25 bp, Homo sapien
ctgtgtgcccagaggaaagaactac

SEQ ID NO: 810749 - DNA, 25 bp, Homo sapien
tgagacaccgtcagctcactccgag

SEQ ID NO: 810750 - DNA, 25 bp, Homo sapien
aaaaaagcagtctgctgccgctccc

SEQ ID NO: 810751 - DNA, 25 bp, Homo sapien
gctcccgacttttctcgctgagaca

SEQ ID NO: 810752 - DNA, 25 bp, Homo sapien
tcttcggtaaattctggcagcagcc

SEQ ID NO: 810753 - DNA, 25 bp, Homo sapien
cagggcgcgtcctaggccggttcat

SEQ ID NO: 810754 - DNA, 25 bp, Homo sapien
cgcccagcgctttctgtggctaggg

SEQ ID NO: 810755 - DNA, 25 bp, Homo sapien
taggccggttcatttccgcccagcg

SEQ ID NO: 810756 - DNA, 25 bp, Homo sapien
cttttcccttattcgggctcttatg

SEQ ID NO: 810757 - DNA, 25 bp, Homo sapien
ggtaacaacccataatccgatcctg

SEQ ID NO: 810758 - DNA, 25 bp, Homo sapien
tccgatcctgtcttcgggatcagaa

SEQ ID NO: 810759 - DNA, 25 bp, Homo sapien
ggtgcagctcgtctccaggaaccgg

SEQ ID NO: 810760 - DNA, 25 bp, Homo sapien
cagaagagcccagtaaactgcaggg

SEQ ID NO: 810761 - DNA, 25 bp, Homo sapien
ttgtctgccccggtctgaatacccc

SEQ ID NO: 810762 - DNA, 25 bp, Homo sapien
tctgccccggtctgaataccccagg

SEQ ID NO: 810763 - DNA, 25 bp, Homo sapien
agggccttgtctgccccggtctgaa

SEQ ID NO: 810764 - DNA, 25 bp, Homo sapien
tgccccggtctgaataccccaggcg

SEQ ID NO: 810765 - DNA, 25 bp, Homo sapien
tagtaaactaccaagcagtccgaac

SEQ ID NO: 810766 - DNA, 25 bp, Homo sapien
cgttagggcaatccagactggccgg

SEQ ID NO: 810767 - DNA, 25 bp, Homo sapien
tggacaccgaagatccactgcaagg

SEQ ID NO: 810768 - DNA, 25 bp, Homo sapien
tcctctggaagaccgagttgtgggc

SEQ ID NO: 810769 - DNA, 25 bp, Homo sapien
tatcttgattaaggtcctgtctggg

SEQ ID NO: 810770 - DNA, 25 bp, Homo sapien
cctgtctgggcctacaaaggttcaa

SEQ ID NO: 810771 - DNA, 25 bp, Homo sapien
atattcgaataacaaagcactggtg

SEQ ID NO: 810772 - DNA, 25 bp, Homo sapien
ctcaacatggaggtccttagtcaac

SEQ ID NO: 810773 - DNA, 25 bp, Homo sapien
gaagtgtcacatagtcaatatcctt

SEQ ID NO: 810774 - DNA, 25 bp, Homo sapien
cataatcttacgtactagtcagcct

SEQ ID NO: 810775 - DNA, 25 bp, Homo sapien
tagtcagccttcttagaagtgtcac

SEQ ID NO: 810776 - DNA, 25 bp, Homo sapien
taagtaaattgtgagctgaggccta

SEQ ID NO: 810777 - DNA, 25 bp, Homo sapien
tcatcaaagggttcagttcagtcag

SEQ ID NO: 810778 - DNA, 25 bp, Homo sapien
tgcacttggaagtcagagaccttgc

SEQ ID NO: 810779 - DNA, 25 bp, Homo sapien
tatatgattgtacccatgtggcagt

SEQ ID NO: 810780 - DNA, 25 bp, Homo sapien
cagaagccagcttagccaagagtca

SEQ ID NO: 810781 - DNA, 25 bp, Homo sapien
gtttcactggataggagatgggaca

SEQ ID NO: 810782 - DNA, 25 bp, Homo sapien
tatcaagttggctgtgtttcactgg

SEQ ID NO: 810783 - DNA, 25 bp, Homo sapien
gcatttggctaccttgaaagtcatc

SEQ ID NO: 810784 - DNA, 25 bp, Homo sapien
gctaaacagagtctttccctgcaca

SEQ ID NO: 810785 - DNA, 25 bp, Homo sapien
tattcagaagattagccaggaacag

SEQ ID NO: 810786 - DNA, 25 bp, Homo sapien
tcaacaagttaatacagccaaagca

SEQ ID NO: 810787 - DNA, 25 bp, Homo sapien
cacaaccagattacttgactcccta

SEQ ID NO: 810788 - DNA, 25 bp, Homo sapien
tgactccctatgtttgaagtcccca

SEQ ID NO: 810789 - DNA, 25 bp, Homo sapien
tggagcacgtgaggtcatgagacca

SEQ ID NO: 810790 - DNA, 25 bp, Homo sapien
gaatagcagatctggctcgctgtgg

SEQ ID NO: 810791 - DNA, 25 bp, Homo sapien
taagcatagtaagagttcaccctac

SEQ ID NO: 810792 - DNA, 25 bp, Homo sapien
gagatcctgaggtgcaactcaagag

SEQ ID NO: 810793 - DNA, 25 bp, Homo sapien
gtatctcgtcgaaaagcgcccgtct

SEQ ID NO: 810794 - DNA, 25 bp, Homo sapien
gaaaagcgcccgtctccatccgatg

SEQ ID NO: 810795 - DNA, 25 bp, Homo sapien
tctccatccgatgcctttccaagct

SEQ ID NO: 810796 - DNA, 25 bp, Homo sapien
tcccagagcaagtggcgggtatctc

SEQ ID NO: 810797 - DNA, 25 bp, Homo sapien
tttatgtgaccaagacattactgtg

SEQ ID NO: 810798 - DNA, 25 bp, Homo sapien
tatctggccacatatataaccattg

SEQ ID NO: 810799 - DNA, 25 bp, Homo sapien
tagtcatatggagacagttctgatt

SEQ ID NO: 810800 - DNA, 25 bp, Homo sapien
cattactgtgaaactgaatactatc

SEQ ID NO: 810801 - DNA, 25 bp, Homo sapien
tgatgggtgagctcatgacatggtt

SEQ ID NO: 810802 - DNA, 25 bp, Homo sapien
caaaccaggttgctactacttccaa

SEQ ID NO: 810803 - DNA, 25 bp, Homo sapien
gacatggtttagctccgtatcaaac

SEQ ID NO: 810804 - DNA, 25 bp, Homo sapien
gcaaagtaactcgaatgatgggtga

SEQ ID NO: 810805 - DNA, 25 bp, Homo sapien
tctaagttattacagaaacatccgt

SEQ ID NO: 810806 - DNA, 25 bp, Homo sapien
gaagagactggcttttagagccctc

SEQ ID NO: 810807 - DNA, 25 bp, Homo sapien
tcaatgtagcaagaagagcctgaat

SEQ ID NO: 810808 - DNA, 25 bp, Homo sapien
gcctgaatcagagcaggagtgataa

SEQ ID NO: 810809 - DNA, 25 bp, Homo sapien
gatgcaattataagcacttccggtg

SEQ ID NO: 810810 - DNA, 25 bp, Homo sapien
tcatcatgaaatttgaagcactttt

SEQ ID NO: 810811 - DNA, 25 bp, Homo sapien
tagtagtacaaactatacttttagc

SEQ ID NO: 810812 - DNA, 25 bp, Homo sapien
gcattagtaatacggaataaaagcc

SEQ ID NO: 810813 - DNA, 25 bp, Homo sapien
gagatgactgttggaaagcgttccc

SEQ ID NO: 810814 - DNA, 25 bp, Homo sapien
gaggaagagatgactgttggaaagc

SEQ ID NO: 810815 - DNA, 25 bp, Homo sapien
tgactgttggaaagcgttcccctcc

SEQ ID NO: 810816 - DNA, 25 bp, Homo sapien
gaagagatgactgttggaaagcgtt

SEQ ID NO: 810817 - DNA, 25 bp, Homo sapien
tgtaactgcgtcagggcaagatggc

SEQ ID NO: 810818 - DNA, 25 bp, Homo sapien
atgtgaccgggctgcattcctgtgg

SEQ ID NO: 810819 - DNA, 25 bp, Homo sapien
gggagaggcacgtccaccgccgcag

SEQ ID NO: 810820 - DNA, 25 bp, Homo sapien
ccgcagcgcatgtgaccgggctgca

SEQ ID NO: 810821 - DNA, 25 bp, Homo sapien
cgcggccgatatggaacccaagcag

SEQ ID NO: 810822 - DNA, 25 bp, Homo sapien
aagtgacgatggtgatcgttgctgc

SEQ ID NO: 810823 - DNA, 25 bp, Homo sapien
ccaagcagtggcgaagggaatcgca

SEQ ID NO: 810824 - DNA, 25 bp, Homo sapien
cattttctactgtccctgcgcgagg

SEQ ID NO: 810825 - DNA, 25 bp, Homo sapien
gccaatcagcgcctgatgtgtcctg

SEQ ID NO: 810826 - DNA, 25 bp, Homo sapien
aaatgacacggcgattccggctctt

SEQ ID NO: 810827 - DNA, 25 bp, Homo sapien
cctgatgtgtcctgtcgggcgcgtc

SEQ ID NO: 810828 - DNA, 25 bp, Homo sapien
cgcgtcgtggttggctggcgatgac

SEQ ID NO: 810829 - DNA, 25 bp, Homo sapien
gggacagacagtgatctcgaagaaa

SEQ ID NO: 810830 - DNA, 25 bp, Homo sapien
tatatggcggtgattaaacgaggga

SEQ ID NO: 810831 - DNA, 25 bp, Homo sapien
ttccccaccggtgggacaatgtgcg

SEQ ID NO: 810832 - DNA, 25 bp, Homo sapien
cgttgccgtcggtgcagttgccgtc

SEQ ID NO: 810833 - DNA, 25 bp, Homo sapien
gagctggcgagtctagtgctgtctc

SEQ ID NO: 810834 - DNA, 25 bp, Homo sapien
tctagtgctgtctcgatggaggagc

SEQ ID NO: 810835 - DNA, 25 bp, Homo sapien
caccggataaaagcggagctggcga

SEQ ID NO: 810836 - DNA, 25 bp, Homo sapien
gagaagcagccggaaaaatgcagcc

SEQ ID NO: 810837 - DNA, 25 bp, Homo sapien
cattttgcttgtgggctgccgcccg

SEQ ID NO: 810838 - DNA, 25 bp, Homo sapien
tcgaagatagcaaactggaggcggt

SEQ ID NO: 810839 - DNA, 25 bp, Homo sapien
gatgcattcaacaatccaccgaagg

SEQ ID NO: 810840 - DNA, 25 bp, Homo sapien
catgccagtattgggtgcacgaaca

SEQ ID NO: 810841 - DNA, 25 bp, Homo sapien
cgaggctgctcggagtgtctatgcc

SEQ ID NO: 810842 - DNA, 25 bp, Homo sapien
tgtctatgcccactctgttgccgct

SEQ ID NO: 810843 - DNA, 25 bp, Homo sapien
tgccgctcccgaactccggcacggt

SEQ ID NO: 810844 - DNA, 25 bp, Homo sapien
gcctctcgctctgggaaaatggcgg

SEQ ID NO: 810845 - DNA, 25 bp, Homo sapien
caggcagtcaacaggaacgcagaga

SEQ ID NO: 810846 - DNA, 25 bp, Homo sapien
gcagccaggcagtcaacaggaacgc

SEQ ID NO: 810847 - DNA, 25 bp, Homo sapien
cttcaccaggaaccgaggagtaggg

SEQ ID NO: 810848 - DNA, 25 bp, Homo sapien
cagtcaacaggaacgcagagacgac

SEQ ID NO: 810849 - DNA, 25 bp, Homo sapien
gacagcagccactgcggacacagga

SEQ ID NO: 810850 - DNA, 25 bp, Homo sapien
cactgcggacacaggacccggctcc

SEQ ID NO: 810851 - DNA, 25 bp, Homo sapien
gccactgcggacacaggacccggct

SEQ ID NO: 810852 - DNA, 25 bp, Homo sapien
gcgaacaggcgaccccccgacagca

SEQ ID NO: 810853 - DNA, 25 bp, Homo sapien
cacgagacacccgaaccccgttatg

SEQ ID NO: 810854 - DNA, 25 bp, Homo sapien
gatgttcacacacgagacacccgaa

SEQ ID NO: 810855 - DNA, 25 bp, Homo sapien
cacacacgagacacccgaaccccgt

SEQ ID NO: 810856 - DNA, 25 bp, Homo sapien
gagacacccgaaccccgttatgtgc

SEQ ID NO: 810857 - DNA, 25 bp, Homo sapien
taaggccagtagaagagagcactct

SEQ ID NO: 810858 - DNA, 25 bp, Homo sapien
taaggctccggcacagtaaaggacg

SEQ ID NO: 810859 - DNA, 25 bp, Homo sapien
tagaatttgtgccaatcccttggtc

SEQ ID NO: 810860 - DNA, 25 bp, Homo sapien
ccatattgtagatcctaaggctccg

SEQ ID NO: 810861 - DNA, 25 bp, Homo sapien
ccagcctcgagttgaatgcacctca

SEQ ID NO: 810862 - DNA, 25 bp, Homo sapien
ggtctccagaactccaaacacctta

SEQ ID NO: 810863 - DNA, 25 bp, Homo sapien
caaaacgaggtttactctagagcta

SEQ ID NO: 810864 - DNA, 25 bp, Homo sapien
tagagctaactctagcgattcctct

SEQ ID NO: 810865 - DNA, 25 bp, Homo sapien
ggaggacccgagctgattagattac

SEQ ID NO: 810866 - DNA, 25 bp, Homo sapien
tgctgcagacaaacgcactgcatgg

SEQ ID NO: 810867 - DNA, 25 bp, Homo sapien
ttaatcagctaaaacacagcactgt

SEQ ID NO: 810868 - DNA, 25 bp, Homo sapien
tagattaccacaacatcagcctggg

SEQ ID NO: 810869 - DNA, 25 bp, Homo sapien
aatgatgatagtatgctgtaagacg

SEQ ID NO: 810870 - DNA, 25 bp, Homo sapien
tcctataataggtaaatgggcatat

SEQ ID NO: 810871 - DNA, 25 bp, Homo sapien
tccagaatcggagccttacttttaa

SEQ ID NO: 810872 - DNA, 25 bp, Homo sapien
tgttaaaggcagcatgaagcttcac

SEQ ID NO: 810873 - DNA, 25 bp, Homo sapien
gaacaggtagtaaatacgagccact

SEQ ID NO: 810874 - DNA, 25 bp, Homo sapien
ggaaacaagtctcacagaatacaag

SEQ ID NO: 810875 - DNA, 25 bp, Homo sapien
catttaagtcccagtagtagtagct

SEQ ID NO: 810876 - DNA, 25 bp, Homo sapien
tctaacacataacagggaacagtcc

SEQ ID NO: 810877 - DNA, 25 bp, Homo sapien
taaaaagcatcctagttaccaatgg

SEQ ID NO: 810878 - DNA, 25 bp, Homo sapien
tctcgtgaaatataagaccaactgc

SEQ ID NO: 810879 - DNA, 25 bp, Homo sapien
gacgtagtgtctgttttgatggcat

SEQ ID NO: 810880 - DNA, 25 bp, Homo sapien
gatcattgcttatcacgttgacctg

SEQ ID NO: 810881 - DNA, 25 bp, Homo sapien
tgcctcgccctcctgagtaggtagg

SEQ ID NO: 810882 - DNA, 25 bp, Homo sapien
ccaaagtagtgaaattacaggtatg

SEQ ID NO: 810883 - DNA, 25 bp, Homo sapien
aaagtagtgaaattacaggtatgag

SEQ ID NO: 810884 - DNA, 25 bp, Homo sapien
cctcgccctcctgagtaggtaggat

SEQ ID NO: 810885 - DNA, 25 bp, Homo sapien
gaatagtggctctttgacaccttgc

SEQ ID NO: 810886 - DNA, 25 bp, Homo sapien
tttactctgagaaacgccactctac

SEQ ID NO: 810887 - DNA, 25 bp, Homo sapien
caaagcagggacagtctcatctctc

SEQ ID NO: 810888 - DNA, 25 bp, Homo sapien
aactacgggttctctcaaagcaggg

SEQ ID NO: 810889 - DNA, 25 bp, Homo sapien
cttcgtgtatttacaaccaacacag

SEQ ID NO: 810890 - DNA, 25 bp, Homo sapien
aaaaaccctggtgtatatgtgtatg

SEQ ID NO: 810891 - DNA, 25 bp, Homo sapien
tcaacagacgctacatcttgaagag

SEQ ID NO: 810892 - DNA, 25 bp, Homo sapien
aaaagcagcccatatgccttacaga

SEQ ID NO: 810893 - DNA, 25 bp, Homo sapien
tcatctattggatgtatatctatat

SEQ ID NO: 810894 - DNA, 25 bp, Homo sapien
catctattggatgtatatctatatc

SEQ ID NO: 810895 - DNA, 25 bp, Homo sapien
ctcatctattggatgtatatctata

SEQ ID NO: 810896 - DNA, 25 bp, Homo sapien
gatttcggctgactgtaacctgtct

SEQ ID NO: 810897 - DNA, 25 bp, Homo sapien
tttcggctgactgtaacctgtctcc

SEQ ID NO: 810898 - DNA, 25 bp, Homo sapien
ttcggctgactgtaacctgtctcct

SEQ ID NO: 810899 - DNA, 25 bp, Homo sapien
atttcggctgactgtaacctgtctc

SEQ ID NO: 810900 - DNA, 25 bp, Homo sapien
ataaaaaaaattaggccaggcgcag

SEQ ID NO: 810901 - DNA, 25 bp, Homo sapien
tgtaatcccagcactttgggaggcc

SEQ ID NO: 810902 - DNA, 25 bp, Homo sapien
tggctcacgcctgtaatcccagcac

SEQ ID NO: 810903 - DNA, 25 bp, Homo sapien
tcagctaatcaggagactgaggcac

SEQ ID NO: 810904 - DNA, 25 bp, Homo sapien
tacttaagtatctcactccagaaca

SEQ ID NO: 810905 - DNA, 25 bp, Homo sapien
cacaaacgtgggcaaatacagtctc

SEQ ID NO: 810906 - DNA, 25 bp, Homo sapien
gaattgcgtttcctctgattattaa

SEQ ID NO: 810907 - DNA, 25 bp, Homo sapien
catttaatctgtaacaatgcattaa

SEQ ID NO: 810908 - DNA, 25 bp, Homo sapien
ttcacaaaacctgcttatccagaat

SEQ ID NO: 810909 - DNA, 25 bp, Homo sapien
aaatctgaggtccaagaaagaataa

SEQ ID NO: 810910 - DNA, 25 bp, Homo sapien
gagatgtctggtaaatctgaggtcc

SEQ ID NO: 810911 - DNA, 25 bp, Homo sapien
tcttcacaaaacctgcttatccaga

SEQ ID NO: 810912 - DNA, 25 bp, Homo sapien
gcagtgagctgcgatcgcgccactg

SEQ ID NO: 810913 - DNA, 25 bp, Homo sapien
cactccagcctggtgacagagcgag

SEQ ID NO: 810914 - DNA, 25 bp, Homo sapien
gcctggtgacagagcgagactccgt

SEQ ID NO: 810915 - DNA, 25 bp, Homo sapien
tcgcttgaactagggagtcagaggc

SEQ ID NO: 810916 - DNA, 25 bp, Homo sapien
agacaatgacttctatttgtgctat

SEQ ID NO: 810917 - DNA, 25 bp, Homo sapien
cagacaatgacttctatttgtgcta

SEQ ID NO: 810918 - DNA, 25 bp, Homo sapien
tagtaatctggtagctctcctccag

SEQ ID NO: 810919 - DNA, 25 bp, Homo sapien
ccacaagaagattactacggcatat

SEQ ID NO: 810920 - DNA, 25 bp, Homo sapien
taatcaaggctactccacttaagag

SEQ ID NO: 810921 - DNA, 25 bp, Homo sapien
ggctaataccgaaaagcactgtgta

SEQ ID NO: 810922 - DNA, 25 bp, Homo sapien
caaacatctaagtgcatccacaaac

SEQ ID NO: 810923 - DNA, 25 bp, Homo sapien
gcaaacatctaagtgcatccacaaa

SEQ ID NO: 810924 - DNA, 25 bp, Homo sapien
aaacatctaagtgcatccacaaacc

SEQ ID NO: 810925 - DNA, 25 bp, Homo sapien
taaattcgattactatggagtccta

SEQ ID NO: 810926 - DNA, 25 bp, Homo sapien
actatggagtcctatgcattggtat

SEQ ID NO: 810927 - DNA, 25 bp, Homo sapien
gacgttcgcctctggtaaattcgat

SEQ ID NO: 810928 - DNA, 25 bp, Homo sapien
gagtcctatgcattggtatccaaaa

SEQ ID NO: 810929 - DNA, 25 bp, Homo sapien
tctgctgtatcaacccccaatggga

SEQ ID NO: 810930 - DNA, 25 bp, Homo sapien
agccatttccaagtatgacgtctct

SEQ ID NO: 810931 - DNA, 25 bp, Homo sapien
caagtatgacgtctctgctgtatca

SEQ ID NO: 810932 - DNA, 25 bp, Homo sapien
acccccaatgggatcactatgctca

SEQ ID NO: 810933 - DNA, 25 bp, Homo sapien
ttttggtacattctaggcagatgcc

SEQ ID NO: 810934 - DNA, 25 bp, Homo sapien
cagagggtagaaaggccgccttaca

SEQ ID NO: 810935 - DNA, 25 bp, Homo sapien
gagaagcctcatagaattttgcacc

SEQ ID NO: 810936 - DNA, 25 bp, Homo sapien
tgtgcagacaagagttaccagaggg

SEQ ID NO: 810937 - DNA, 25 bp, Homo sapien
gaaatagtacttgcttaagccaata

SEQ ID NO: 810938 - DNA, 25 bp, Homo sapien
aaatagtactcttcgttggaaacag

SEQ ID NO: 810939 - DNA, 25 bp, Homo sapien
tcttaacttcttatggcccctaggc

SEQ ID NO: 810940 - DNA, 25 bp, Homo sapien
gcctggccagcacttatttcactta

SEQ ID NO: 810941 - DNA, 25 bp, Homo sapien
ggtaaatttcctctgctcaatctaa

SEQ ID NO: 810942 - DNA, 25 bp, Homo sapien
cactcacaaataggtaaatttcctc

SEQ ID NO: 810943 - DNA, 25 bp, Homo sapien
gtaaatttcctctgctcaatctaat

SEQ ID NO: 810944 - DNA, 25 bp, Homo sapien
cctcactcacaaataggtaaatttc

SEQ ID NO: 810945 - DNA, 25 bp, Homo sapien
cctagattcagtaggctcaggagaa

SEQ ID NO: 810946 - DNA, 25 bp, Homo sapien
gtaagtggagtagtagtatgacaaa

SEQ ID NO: 810947 - DNA, 25 bp, Homo sapien
caggagaagccctgaaactgatcag

SEQ ID NO: 810948 - DNA, 25 bp, Homo sapien
cagagccactaatgggttgtctctc

SEQ ID NO: 810949 - DNA, 25 bp, Homo sapien
taaaccactttgatagcactgatta

SEQ ID NO: 810950 - DNA, 25 bp, Homo sapien
tattgagggcttaatgttcactagc

SEQ ID NO: 810951 - DNA, 25 bp, Homo sapien
tgttcactagcaaccatcagagata

SEQ ID NO: 810952 - DNA, 25 bp, Homo sapien
cagagacccctggagactacatcca

SEQ ID NO: 810953 - DNA, 25 bp, Homo sapien
tgcaccaacctagtagcaggtaatg

SEQ ID NO: 810954 - DNA, 25 bp, Homo sapien
gaaattattcccaatatataagcaa

SEQ ID NO: 810955 - DNA, 25 bp, Homo sapien
aagatattcattgcatactccaaga

SEQ ID NO: 810956 - DNA, 25 bp, Homo sapien
tcattgcatactccaagaattcaaa

SEQ ID NO: 810957 - DNA, 25 bp, Homo sapien
agctgtttgggcctagaagtttgag

SEQ ID NO: 810958 - DNA, 25 bp, Homo sapien
ggttaattcctattgatcaacaagg

SEQ ID NO: 810959 - DNA, 25 bp, Homo sapien
aagtctcaatttagctctcagtggc

SEQ ID NO: 810960 - DNA, 25 bp, Homo sapien
caaggttgtgaacctacatctgagg

SEQ ID NO: 810961 - DNA, 25 bp, Homo sapien
tctgattagtcatgagactagcagc

SEQ ID NO: 810962 - DNA, 25 bp, Homo sapien
ttaataaaccctacggcactgagaa

SEQ ID NO: 810963 - DNA, 25 bp, Homo sapien
tctatatggacctcaaatggaactg

SEQ ID NO: 810964 - DNA, 25 bp, Homo sapien
tctacttacagcaggtggatacact

SEQ ID NO: 810965 - DNA, 25 bp, Homo sapien
tgacttacaagctccctggcctagc

SEQ ID NO: 810966 - DNA, 25 bp, Homo sapien
gggaaaaagttgcatcaaagagaat

SEQ ID NO: 810967 - DNA, 25 bp, Homo sapien
gaaaaagttgcatcaaagagaattc

SEQ ID NO: 810968 - DNA, 25 bp, Homo sapien
gggggaaaaagttgcatcaaagaga

SEQ ID NO: 810969 - DNA, 25 bp, Homo sapien
ggaaaaagttgcatcaaagagaatt

SEQ ID NO: 810970 - DNA, 25 bp, Homo sapien
aactgttggatttctcaactaccac

SEQ ID NO: 810971 - DNA, 25 bp, Homo sapien
cacagggctagcttctacggattct

SEQ ID NO: 810972 - DNA, 25 bp, Homo sapien
tgagctgctggtatataactggtgg

SEQ ID NO: 810973 - DNA, 25 bp, Homo sapien
actaccacagggctagcttctacgg

SEQ ID NO: 810974 - DNA, 25 bp, Homo sapien
gcatttgtcacaacagatcatgtat

SEQ ID NO: 810975 - DNA, 25 bp, Homo sapien
aattaggagtggtaaatatgcctac

SEQ ID NO: 810976 - DNA, 25 bp, Homo sapien
tatgcacctggttacatcagtacca

SEQ ID NO: 810977 - DNA, 25 bp, Homo sapien
tagtagcactggaagtttcatcaaa

SEQ ID NO: 810978 - DNA, 25 bp, Homo sapien
gaggcctttcttggtggctgaacca

SEQ ID NO: 810979 - DNA, 25 bp, Homo sapien
aggaggcctttcttggtggctgaac

SEQ ID NO: 810980 - DNA, 25 bp, Homo sapien
ggcctttcttggtggctgaaccagg

SEQ ID NO: 810981 - DNA, 25 bp, Homo sapien
aggcctttcttggtggctgaaccag

SEQ ID NO: 810982 - DNA, 25 bp, Homo sapien
gataaactcagtaactttcaggctg

SEQ ID NO: 810983 - DNA, 25 bp, Homo sapien
aatgcactgcgtaagtactctgcgc

SEQ ID NO: 810984 - DNA, 25 bp, Homo sapien
gggtatatgccatactgcatcacat

SEQ ID NO: 810985 - DNA, 25 bp, Homo sapien
cataatgaccagacccaggaaattc

SEQ ID NO: 810986 - DNA, 25 bp, Homo sapien
gatatatatgcctgactccaaaaag

SEQ ID NO: 810987 - DNA, 25 bp, Homo sapien
cacttgagttaaaggagggcagaac

SEQ ID NO: 810988 - DNA, 25 bp, Homo sapien
gaaactgcaagcagaaagaccaact

SEQ ID NO: 810989 - DNA, 25 bp, Homo sapien
tacatggaccagtttgaggcaaatt

SEQ ID NO: 810990 - DNA, 25 bp, Homo sapien
tgaacttgactcgaacctcgtttgg

SEQ ID NO: 810991 - DNA, 25 bp, Homo sapien
catagaaacgtgtcttcaaggcgat

SEQ ID NO: 810992 - DNA, 25 bp, Homo sapien
caccttggagaataatgaacttgac

SEQ ID NO: 810993 - DNA, 25 bp, Homo sapien
ggccacaaggcgctcaacatatatg

SEQ ID NO: 810994 - DNA, 25 bp, Homo sapien
catgcagtcaatatgttgccaaacg

SEQ ID NO: 810995 - DNA, 25 bp, Homo sapien
cacatagatatgtatcaggaatatg

SEQ ID NO: 810996 - DNA, 25 bp, Homo sapien
taggctgacaacgttcacatagata

SEQ ID NO: 810997 - DNA, 25 bp, Homo sapien
tatcaggaatatgctgcctatcaat

SEQ ID NO: 810998 - DNA, 25 bp, Homo sapien
tataaagggtagcatgactcctggc

SEQ ID NO: 810999 - DNA, 25 bp, Homo sapien
gaaagggcatgactagctctccaat

SEQ ID NO: 811000 - DNA, 25 bp, Homo sapien
gagggctctctagggaatcacgctg

SEQ ID NO: 811001 - DNA, 25 bp, Homo sapien
cagcttgaagaggttcctactgacc

SEQ ID NO: 811002 - DNA, 25 bp, Homo sapien
gccattccggaaaatagtctgacaa

SEQ ID NO: 811003 - DNA, 25 bp, Homo sapien
ctcacacaggcggagtgcagctgtg

SEQ ID NO: 811004 - DNA, 25 bp, Homo sapien
tttggtagcaatggtgccttgccat

SEQ ID NO: 811005 - DNA, 25 bp, Homo sapien
gtaggaatataaaatcgaatagcca

SEQ ID NO: 811006 - DNA, 25 bp, Homo sapien
taggcatgagcatttaacagttaag

SEQ ID NO: 811007 - DNA, 25 bp, Homo sapien
tacccatgaactacatcatccatag

SEQ ID NO: 811008 - DNA, 25 bp, Homo sapien
aactaactgccctcctaatggtaag

SEQ ID NO: 811009 - DNA, 25 bp, Homo sapien
tctcaggtgggaaaataagagctct

SEQ ID NO: 811010 - DNA, 25 bp, Homo sapien
caatctaatagtagcagtagatgcc

SEQ ID NO: 811011 - DNA, 25 bp, Homo sapien
aaatcccttgcaatacagtttacat

SEQ ID NO: 811012 - DNA, 25 bp, Homo sapien
cagtttacatacaatctaatagtag

SEQ ID NO: 811013 - DNA, 25 bp, Homo sapien
agtagatgccagatagatgactcca

SEQ ID NO: 811014 - DNA, 25 bp, Homo sapien
ccttttccggcgttgtagtagcact

SEQ ID NO: 811015 - DNA, 25 bp, Homo sapien
tcccttttccggcgttgtagtagca

SEQ ID NO: 811016 - DNA, 25 bp, Homo sapien
gttgtagtagcactgccctctcttt

SEQ ID NO: 811017 - DNA, 25 bp, Homo sapien
gtagtagcactgccctctctttatc

SEQ ID NO: 811018 - DNA, 25 bp, Homo sapien
aaaaattattgcacatttaatactt

SEQ ID NO: 811019 - DNA, 25 bp, Homo sapien
tcagacaaaataaaaattattgcac

SEQ ID NO: 811020 - DNA, 25 bp, Homo sapien
gacaaaataaaaattattgcacatt

SEQ ID NO: 811021 - DNA, 25 bp, Homo sapien
ataaaaattattgcacatttaatac

SEQ ID NO: 811022 - DNA, 25 bp, Homo sapien
taactttggaaactcttgaagcagt

SEQ ID NO: 811023 - DNA, 25 bp, Homo sapien
gatgttggagtatgctgaaatgcag

SEQ ID NO: 811024 - DNA, 25 bp, Homo sapien
ctcttgaagcagttaaagtaattga

SEQ ID NO: 811025 - DNA, 25 bp, Homo sapien
gaaatgcagtatataattccacagg

SEQ ID NO: 811026 - DNA, 25 bp, Homo sapien
ctaaaataaacatggaattctagtt

SEQ ID NO: 811027 - DNA, 25 bp, Homo sapien
tcttgatgacttcctagatccttca

SEQ ID NO: 811028 - DNA, 25 bp, Homo sapien
gacttcctagatccttcacgaaatg

SEQ ID NO: 811029 - DNA, 25 bp, Homo sapien
cttaactcttgatgacttcctagat

SEQ ID NO: 811030 - DNA, 25 bp, Homo sapien
gatgacttcctagatccttcacgaa

SEQ ID NO: 811031 - DNA, 25 bp, Homo sapien
taactctctagaatcccaactatgc

SEQ ID NO: 811032 - DNA, 25 bp, Homo sapien
atactaactggcatcagagacatgg

SEQ ID NO: 811033 - DNA, 25 bp, Homo sapien
tagaactaaggtcccactcctggta

SEQ ID NO: 811034 - DNA, 25 bp, Homo sapien
tggtcaagcaagcatgtagctcctg

SEQ ID NO: 811035 - DNA, 25 bp, Homo sapien
caaattgttggtattcaaatcggat

SEQ ID NO: 811036 - DNA, 25 bp, Homo sapien
taatctcagagctattctttgtgcc

SEQ ID NO: 811037 - DNA, 25 bp, Homo sapien
gcttcttcatatcgatccatccatg

SEQ ID NO: 811038 - DNA, 25 bp, Homo sapien
gaaggatcaatctctggagctgaac

SEQ ID NO: 811039 - DNA, 25 bp, Homo sapien
gctttacaatttttggacaaatgat

SEQ ID NO: 811040 - DNA, 25 bp, Homo sapien
taaaatcagagtaaatgttgagatt

SEQ ID NO: 811041 - DNA, 25 bp, Homo sapien
tacaatttttggacaaatgatgtat

SEQ ID NO: 811042 - DNA, 25 bp, Homo sapien
aaatcagagtaaatgttgagattaa

SEQ ID NO: 811043 - DNA, 25 bp, Homo sapien
tccctctgtattcaatgataagtgc

SEQ ID NO: 811044 - DNA, 25 bp, Homo sapien
tcaatgataagtgcatcaggaggca

SEQ ID NO: 811045 - DNA, 25 bp, Homo sapien
gcttcaaactgttctctcagcataa

SEQ ID NO: 811046 - DNA, 25 bp, Homo sapien
aagaaatacccatttgcttcaaact

SEQ ID NO: 811047 - DNA, 25 bp, Homo sapien
ttacctacagaaaatgaacatggga

SEQ ID NO: 811048 - DNA, 25 bp, Homo sapien
tctaggtaaaacagccaaaagttca

SEQ ID NO: 811049 - DNA, 25 bp, Homo sapien
tatcatcagtcactgttcaaccaca

SEQ ID NO: 811050 - DNA, 25 bp, Homo sapien
gtacatataatcacaacatctaggt

SEQ ID NO: 811051 - DNA, 25 bp, Homo sapien
tctgcattgggtgtacaagaccgcc

SEQ ID NO: 811052 - DNA, 25 bp, Homo sapien
tagagtagaataacacaaaagggta

SEQ ID NO: 811053 - DNA, 25 bp, Homo sapien
gatgaatcgagcctcattcccaaaa

SEQ ID NO: 811054 - DNA, 25 bp, Homo sapien
caaaagtccttgcatcaacacacat

SEQ ID NO: 811055 - DNA, 25 bp, Homo sapien
taaatcatcgcatgtattgagccat

SEQ ID NO: 811056 - DNA, 25 bp, Homo sapien
aaaaacacctacattcttggctgca

SEQ ID NO: 811057 - DNA, 25 bp, Homo sapien
ttccaagatagaaggaaagtcgtcc

SEQ ID NO: 811058 - DNA, 25 bp, Homo sapien
caacacgattttctactccacacta

SEQ ID NO: 811059 - DNA, 25 bp, Homo sapien
gcaataatggttgagcaaacgctac

SEQ ID NO: 811060 - DNA, 25 bp, Homo sapien
tggttccaaaatctgtactcttagc

SEQ ID NO: 811061 - DNA, 25 bp, Homo sapien
caaacgctacttttctatgacaaga

SEQ ID NO: 811062 - DNA, 25 bp, Homo sapien
caggagtcttataactggtggcatc

SEQ ID NO: 811063 - DNA, 25 bp, Homo sapien
taaagatgtatggttccatcttgaa

SEQ ID NO: 811064 - DNA, 25 bp, Homo sapien
tggaatactgtgtatagaataaata

SEQ ID NO: 811065 - DNA, 25 bp, Homo sapien
ttccatagtcaaaatcaaaggcaat

SEQ ID NO: 811066 - DNA, 25 bp, Homo sapien
aatataaagatgtatggttccatct

SEQ ID NO: 811067 - DNA, 25 bp, Homo sapien
aaccccgcattgtgcaagggccaac

SEQ ID NO: 811068 - DNA, 25 bp, Homo sapien
aaaatgtatacgcagattgtggact

SEQ ID NO: 811069 - DNA, 25 bp, Homo sapien
gagtttctttgtaggatctccaaca

SEQ ID NO: 811070 - DNA, 25 bp, Homo sapien
ttgtcattggtaacacttccagtca

SEQ ID NO: 811071 - DNA, 25 bp, Homo sapien
atcctggctacgcgataggctaagg

SEQ ID NO: 811072 - DNA, 25 bp, Homo sapien
tcctggctacgcgataggctaaggc

SEQ ID NO: 811073 - DNA, 25 bp, Homo sapien
cctggctacgcgataggctaaggca

SEQ ID NO: 811074 - DNA, 25 bp, Homo sapien
tgaccagatattaggccttcaatca

SEQ ID NO: 811075 - DNA, 25 bp, Homo sapien
caaaaagtttaggatggccaggcac

SEQ ID NO: 811076 - DNA, 25 bp, Homo sapien
gccttacctgaaatgcttaggacca

SEQ ID NO: 811077 - DNA, 25 bp, Homo sapien
taactggtacaggttaagcatgcct

SEQ ID NO: 811078 - DNA, 25 bp, Homo sapien
tggattcagaactacgttttagaac

SEQ ID NO: 811079 - DNA, 25 bp, Homo sapien
tagaacagggcactctgggttttct

SEQ ID NO: 811080 - DNA, 25 bp, Homo sapien
cgtctggtctcataaccactattga

SEQ ID NO: 811081 - DNA, 25 bp, Homo sapien
gaggcatgcacagtccaccttgtac

SEQ ID NO: 811082 - DNA, 25 bp, Homo sapien
ggtcgttccttcacaatccaaagta

SEQ ID NO: 811083 - DNA, 25 bp, Homo sapien
tactgatagtctcagtggagaaagc

SEQ ID NO: 811084 - DNA, 25 bp, Homo sapien
tttgtttagtttctgggctcttcat

SEQ ID NO: 811085 - DNA, 25 bp, Homo sapien
aagtaatattctgattttgtgtatc

SEQ ID NO: 811086 - DNA, 25 bp, Homo sapien
ctatatcatcaataaaatctggttc

SEQ ID NO: 811087 - DNA, 25 bp, Homo sapien
tcttctatatcatcaataaaatctg

SEQ ID NO: 811088 - DNA, 25 bp, Homo sapien
atttctacttcattactaataggag

SEQ ID NO: 811089 - DNA, 25 bp, Homo sapien
tctacttcattactaataggagttt

SEQ ID NO: 811090 - DNA, 25 bp, Homo sapien
catgtaaaggcagcaacaattacca

SEQ ID NO: 811091 - DNA, 25 bp, Homo sapien
taagcccaaactactggcttcccaa

SEQ ID NO: 811092 - DNA, 25 bp, Homo sapien
agcccatgtaaaggcagcaacaatt

SEQ ID NO: 811093 - DNA, 25 bp, Homo sapien
agcagctgtcactaagcccaaacta

SEQ ID NO: 811094 - DNA, 25 bp, Homo sapien
tatttaaatggcaatgaccaaacca

SEQ ID NO: 811095 - DNA, 25 bp, Homo sapien
ttaaatggcaatgaccaaaccaaat

SEQ ID NO: 811096 - DNA, 25 bp, Homo sapien
tacaagattaatggaatttatttaa

SEQ ID NO: 811097 - DNA, 25 bp, Homo sapien
aatggcaatgaccaaaccaaataaa

SEQ ID NO: 811098 - DNA, 25 bp, Homo sapien
tatttcaaatcatgagaggatacat

SEQ ID NO: 811099 - DNA, 25 bp, Homo sapien
tatttggtgctatagtaaggtttaa

SEQ ID NO: 811100 - DNA, 25 bp, Homo sapien
tgtacgatagcagtgtgagactgta

SEQ ID NO: 811101 - DNA, 25 bp, Homo sapien
tgtagaaatagctaccagtggtagg

SEQ ID NO: 811102 - DNA, 25 bp, Homo sapien
catcttactatagcatactaataag

SEQ ID NO: 811103 - DNA, 25 bp, Homo sapien
aatggattccaagtaagtaagccaa

SEQ ID NO: 811104 - DNA, 25 bp, Homo sapien
ctaagttccaccaagtttaacattg

SEQ ID NO: 811105 - DNA, 25 bp, Homo sapien
tatccaccttagtggcagatgacag

SEQ ID NO: 811106 - DNA, 25 bp, Homo sapien
gaccaccaaagcatgcctgaaactg

SEQ ID NO: 811107 - DNA, 25 bp, Homo sapien
tcaagctgtactacaaaaggatagg

SEQ ID NO: 811108 - DNA, 25 bp, Homo sapien
agtagatcccacttattcacaaggg

SEQ ID NO: 811109 - DNA, 25 bp, Homo sapien
aatattgtgaacctcagtgggtaac

SEQ ID NO: 811110 - DNA, 25 bp, Homo sapien
ctgtttttatcagggcttctctaaa

SEQ ID NO: 811111 - DNA, 25 bp, Homo sapien
tgtcttgtggttctctgtaaaactg

SEQ ID NO: 811112 - DNA, 25 bp, Homo sapien
cttgtggttctctgtaaaactgttt

SEQ ID NO: 811113 - DNA, 25 bp, Homo sapien
tttgtcttgtggttctctgtaaaac

SEQ ID NO: 811114 - DNA, 25 bp, Homo sapien
cctgaggctcagatccatttgtctt

SEQ ID NO: 811115 - DNA, 25 bp, Homo sapien
gagcatcagttctctatccaaagag

SEQ ID NO: 811116 - DNA, 25 bp, Homo sapien
cagagccttgacagatgcttcagct

SEQ ID NO: 811117 - DNA, 25 bp, Homo sapien
tcagctctaaaccagaaccaggaac

SEQ ID NO: 811118 - DNA, 25 bp, Homo sapien
ctttgagcatcagttctctatccaa

SEQ ID NO: 811119 - DNA, 25 bp, Homo sapien
ttcaagtctggcaaaagcttgcaaa

SEQ ID NO: 811120 - DNA, 25 bp, Homo sapien
tgtgctgatcctttccaaagcttgt

SEQ ID NO: 811121 - DNA, 25 bp, Homo sapien
cactgacaatctgtgtatctttaca

SEQ ID NO: 811122 - DNA, 25 bp, Homo sapien
aataacttcagcatcactgacaatc

SEQ ID NO: 811123 - DNA, 25 bp, Homo sapien
tcagttttggctgtgctgatccttt

SEQ ID NO: 811124 - DNA, 25 bp, Homo sapien
gctggatatctgaacacatgctgac

SEQ ID NO: 811125 - DNA, 25 bp, Homo sapien
tccgacgctgctgtccaatgtgagt

SEQ ID NO: 811126 - DNA, 25 bp, Homo sapien
caatgtgagtcctactccgagaaaa

SEQ ID NO: 811127 - DNA, 25 bp, Homo sapien
tgacagttctgtgtctccgacgctg

SEQ ID NO: 811128 - DNA, 25 bp, Homo sapien
taaagaaatcatgaattgcaatacc

SEQ ID NO: 811129 - DNA, 25 bp, Homo sapien
tgcaataccataaaagtcctgataa

SEQ ID NO: 811130 - DNA, 25 bp, Homo sapien
taaaaccagtttcagagaagtatat

SEQ ID NO: 811131 - DNA, 25 bp, Homo sapien
aattttcatagtacattctgtggaa

SEQ ID NO: 811132 - DNA, 25 bp, Homo sapien
ggctgtaagtgagacctggtaaaga

SEQ ID NO: 811133 - DNA, 25 bp, Homo sapien
tttctgaaaggccatctgaaggttt

SEQ ID NO: 811134 - DNA, 25 bp, Homo sapien
gagttgtgtagctaacacttcagga

SEQ ID NO: 811135 - DNA, 25 bp, Homo sapien
ctgtagttatgcgtagaggcctttc

SEQ ID NO: 811136 - DNA, 25 bp, Homo sapien
cttccagagcttgtttcaaccatcg

SEQ ID NO: 811137 - DNA, 25 bp, Homo sapien
cagggtgaattaaatctatgtaaaa

SEQ ID NO: 811138 - DNA, 25 bp, Homo sapien
ttcttgacagggtgaattaaatcta

SEQ ID NO: 811139 - DNA, 25 bp, Homo sapien
ggacttctggatctttcttgacagg

SEQ ID NO: 811140 - DNA, 25 bp, Homo sapien
aacagctgtcatttaatagtagtgg

SEQ ID NO: 811141 - DNA, 25 bp, Homo sapien
gctgtcatttaatagtagtggactt

SEQ ID NO: 811142 - DNA, 25 bp, Homo sapien
cagctgtcatttaatagtagtggac

SEQ ID NO: 811143 - DNA, 25 bp, Homo sapien
gaacagctgtcatttaatagtagtg

SEQ ID NO: 811144 - DNA, 25 bp, Homo sapien
gattttatccgtggaggcgtggcaa

SEQ ID NO: 811145 - DNA, 25 bp, Homo sapien
gatgggtccataggagtaatatcgg

SEQ ID NO: 811146 - DNA, 25 bp, Homo sapien
aatatcggtgtgagttggtgtagca

SEQ ID NO: 811147 - DNA, 25 bp, Homo sapien
gagtaaaccgaatctagcaactgat

SEQ ID NO: 811148 - DNA, 25 bp, Homo sapien
tcttgactataagtgcgtctcttta

SEQ ID NO: 811149 - DNA, 25 bp, Homo sapien
ttgactataagtgcgtctctttatt

SEQ ID NO: 811150 - DNA, 25 bp, Homo sapien
tgactataagtgcgtctctttattt

SEQ ID NO: 811151 - DNA, 25 bp, Homo sapien
cttgactataagtgcgtctctttat

SEQ ID NO: 811152 - DNA, 25 bp, Homo sapien
cagagtgagtcgagtccagttggct

SEQ ID NO: 811153 - DNA, 25 bp, Homo sapien
caactgatgcgagggtgtcaggtcc

SEQ ID NO: 811154 - DNA, 25 bp, Homo sapien
gaagaatacattgtgccccgtccag

SEQ ID NO: 811155 - DNA, 25 bp, Homo sapien
caactgcatcgagtcctagctgaag

SEQ ID NO: 811156 - DNA, 25 bp, Homo sapien
aaattgtcattaacagtccgtccga

SEQ ID NO: 811157 - DNA, 25 bp, Homo sapien
gggtgtgcaattcccgtcgatcaaa

SEQ ID NO: 811158 - DNA, 25 bp, Homo sapien
gtccgtccgaaaccagatacaagcc

SEQ ID NO: 811159 - DNA, 25 bp, Homo sapien
gatacaagcccatcttcggaagtac

SEQ ID NO: 811160 - DNA, 25 bp, Homo sapien
taagcctactaacaaaataagtgct

SEQ ID NO: 811161 - DNA, 25 bp, Homo sapien
tacattgcttcccacaaagttgcca

SEQ ID NO: 811162 - DNA, 25 bp, Homo sapien
taggtcttacttgaaagcccgtgct

SEQ ID NO: 811163 - DNA, 25 bp, Homo sapien
cacgaaaattcttggacttgcaaag

SEQ ID NO: 811164 - DNA, 25 bp, Homo sapien
aggcattgtacttagatgatttaca

SEQ ID NO: 811165 - DNA, 25 bp, Homo sapien
caggcattgtacttagatgatttac

SEQ ID NO: 811166 - DNA, 25 bp, Homo sapien
tgaggaaattgagtaactcactcac

SEQ ID NO: 811167 - DNA, 25 bp, Homo sapien
cacttttcctagcttcacgttgtct

SEQ ID NO: 811168 - DNA, 25 bp, Homo sapien
gggtgatacactaatgagtggaaag

SEQ ID NO: 811169 - DNA, 25 bp, Homo sapien
gcttcacgttgtctcttacggtatt

SEQ ID NO: 811170 - DNA, 25 bp, Homo sapien
gaaagttctctgtcttagagccact

SEQ ID NO: 811171 - DNA, 25 bp, Homo sapien
ttgtcattactgctggcacagccat

SEQ ID NO: 811172 - DNA, 25 bp, Homo sapien
gttcattcttctcactagcagtagc

SEQ ID NO: 811173 - DNA, 25 bp, Homo sapien
aaggtaggctagcagtgtggtccac

SEQ ID NO: 811174 - DNA, 25 bp, Homo sapien
gcagtagcatccttaacagggcagt

SEQ ID NO: 811175 - DNA, 25 bp, Homo sapien
gaagtaaagctctctgataactcct

SEQ ID NO: 811176 - DNA, 25 bp, Homo sapien
ctgacttgttccactgaagttgagg

SEQ ID NO: 811177 - DNA, 25 bp, Homo sapien
tctctgacttgttccactgaagttg

SEQ ID NO: 811178 - DNA, 25 bp, Homo sapien
tctttatcttttcggtgatcactga

SEQ ID NO: 811179 - DNA, 25 bp, Homo sapien
tgatttgaatgagatgaaggtgaag

SEQ ID NO: 811180 - DNA, 25 bp, Homo sapien
acatgactcggtgaacatgagacac

SEQ ID NO: 811181 - DNA, 25 bp, Homo sapien
gaagactgaacatgactcggtgaac

SEQ ID NO: 811182 - DNA, 25 bp, Homo sapien
gggtatgtgatttgaatgagatgaa

SEQ ID NO: 811183 - DNA, 25 bp, Homo sapien
aagggactgggcccttagcttgcaa

SEQ ID NO: 811184 - DNA, 25 bp, Homo sapien
tccataagttcactgaaagaaggga

SEQ ID NO: 811185 - DNA, 25 bp, Homo sapien
ctgaaagaagggactgggcccttag

SEQ ID NO: 811186 - DNA, 25 bp, Homo sapien
taagttcactgaaagaagggactgg

SEQ ID NO: 811187 - DNA, 25 bp, Homo sapien
agtatctggggatggacattcattc

SEQ ID NO: 811188 - DNA, 25 bp, Homo sapien
attcattcgtagttgtgggttctgg

SEQ ID NO: 811189 - DNA, 25 bp, Homo sapien
ggacattcattcgtagttgtgggtt

SEQ ID NO: 811190 - DNA, 25 bp, Homo sapien
tatctggggatggacattcattcgt

SEQ ID NO: 811191 - DNA, 25 bp, Homo sapien
ggaaaagtgtccagaagtcacaagt

SEQ ID NO: 811192 - DNA, 25 bp, Homo sapien
gaatgtttggtcagagttatccatc

SEQ ID NO: 811193 - DNA, 25 bp, Homo sapien
gaaccaggatgaagatgtcattcct

SEQ ID NO: 811194 - DNA, 25 bp, Homo sapien
tttggaacccatcgaaaggtcaatg

SEQ ID NO: 811195 - DNA, 25 bp, Homo sapien
gctctcgctgaggtgttccaacttg

SEQ ID NO: 811196 - DNA, 25 bp, Homo sapien
gaattacagatccaggtgaaccagg

SEQ ID NO: 811197 - DNA, 25 bp, Homo sapien
tagggagatcctaactgctgtgaag

SEQ ID NO: 811198 - DNA, 25 bp, Homo sapien
aatattttcccgtgtgcttgagcag

SEQ ID NO: 811199 - DNA, 25 bp, Homo sapien
gcttgatttggtcctgatgtaaaca

SEQ ID NO: 811200 - DNA, 25 bp, Homo sapien
aatgttccagaagttgcctgctgag

SEQ ID NO: 811201 - DNA, 25 bp, Homo sapien
tgctgaagattgtcctgagggtgtc

SEQ ID NO: 811202 - DNA, 25 bp, Homo sapien
caaaaaatgccctggagtcacgtgg

SEQ ID NO: 811203 - DNA, 25 bp, Homo sapien
tacatgtgctacagagtgttgctga

SEQ ID NO: 811204 - DNA, 25 bp, Homo sapien
cagtttgagaatgaatatgcgaccc

SEQ ID NO: 811205 - DNA, 25 bp, Homo sapien
tgaacaggccctactacatgtgcta

SEQ ID NO: 811206 - DNA, 25 bp, Homo sapien
catgctggtgttgtgcttgtagacc

SEQ ID NO: 811207 - DNA, 25 bp, Homo sapien
ggtatgatgcccagaagccaaaaca

SEQ ID NO: 811208 - DNA, 25 bp, Homo sapien
tagcttgtgagggatacggtggtac

SEQ ID NO: 811209 - DNA, 25 bp, Homo sapien
tgagcactcgaaggaaaaagtggag

SEQ ID NO: 811210 - DNA, 25 bp, Homo sapien
ccggtcccaaagtggtatgatgtgt

SEQ ID NO: 811211 - DNA, 25 bp, Homo sapien
tgacaggtaatggacaatgtggccc

SEQ ID NO: 811212 - DNA, 25 bp, Homo sapien
gtgacaggtaatggacaatgtggcc

SEQ ID NO: 811213 - DNA, 25 bp, Homo sapien
tgtgacaggtaatggacaatgtggc

SEQ ID NO: 811214 - DNA, 25 bp, Homo sapien
ctgtgacaggtaatggacaatgtgg

SEQ ID NO: 811215 - DNA, 25 bp, Homo sapien
ctgtgaattggaatctgtccaggca

SEQ ID NO: 811216 - DNA, 25 bp, Homo sapien
cctgaagcagtaggtgttggaatac

SEQ ID NO: 811217 - DNA, 25 bp, Homo sapien
atactgtttggtccttggggctgga

SEQ ID NO: 811218 - DNA, 25 bp, Homo sapien
gcacctgtgctctgtgaattggaat

SEQ ID NO: 811219 - DNA, 25 bp, Homo sapien
ttatacctaagatgcattcacagaa

SEQ ID NO: 811220 - DNA, 25 bp, Homo sapien
aaaatgcccaaccagtgcttcagtg

SEQ ID NO: 811221 - DNA, 25 bp, Homo sapien
gatacctaatactggcttaacagca

SEQ ID NO: 811222 - DNA, 25 bp, Homo sapien
gcagtatttacagtttgtcaggaga

SEQ ID NO: 811223 - DNA, 25 bp, Homo sapien
tcctcagaggtagaagacaaaggct

SEQ ID NO: 811224 - DNA, 25 bp, Homo sapien
cactgagagatctaggaataatgcc

SEQ ID NO: 811225 - DNA, 25 bp, Homo sapien
cctaagtgagctgcgttaatgtacc

SEQ ID NO: 811226 - DNA, 25 bp, Homo sapien
tactgtaatgcattagtggtctggc

SEQ ID NO: 811227 - DNA, 25 bp, Homo sapien
tctgtgatagatagtggctgtagac

SEQ ID NO: 811228 - DNA, 25 bp, Homo sapien
ggctgtagactggtgatgctatccg

SEQ ID NO: 811229 - DNA, 25 bp, Homo sapien
tccttacaagaaccatagggcataa

SEQ ID NO: 811230 - DNA, 25 bp, Homo sapien
cactgtgaggtagaatggatcattc

SEQ ID NO: 811231 - DNA, 25 bp, Homo sapien
tgcagtgggcagaatacttctcaca

SEQ ID NO: 811232 - DNA, 25 bp, Homo sapien
cattccataggtagctttacgtgtg

SEQ ID NO: 811233 - DNA, 25 bp, Homo sapien
aatccattgtttgaggtgcttgcag

SEQ ID NO: 811234 - DNA, 25 bp, Homo sapien
tagttgtagaacatgcattgaggcg

SEQ ID NO: 811235 - DNA, 25 bp, Homo sapien
gtagcggactttaactgctccaagg

SEQ ID NO: 811236 - DNA, 25 bp, Homo sapien
tacattggacctaaacggtgactct

SEQ ID NO: 811237 - DNA, 25 bp, Homo sapien
tcccctgtaggagaactgcgacaca

SEQ ID NO: 811238 - DNA, 25 bp, Homo sapien
tggttccagaaaaacgagcctcagc

SEQ ID NO: 811239 - DNA, 25 bp, Homo sapien
cttctttgcacagtctttaccttgt

SEQ ID NO: 811240 - DNA, 25 bp, Homo sapien
catatactgttgtttatagactgct

SEQ ID NO: 811241 - DNA, 25 bp, Homo sapien
gtgttttgttatattgcagtgctgc

SEQ ID NO: 811242 - DNA, 25 bp, Homo sapien
gctcaggaccataggtgtttaggac

SEQ ID NO: 811243 - DNA, 25 bp, Homo sapien
gccaggctcatgtttgcttgtgtgt

SEQ ID NO: 811244 - DNA, 25 bp, Homo sapien
taagaaactaaaattgtcacagttg

SEQ ID NO: 811245 - DNA, 25 bp, Homo sapien
tcttggggaccacacaattggctgc

SEQ ID NO: 811246 - DNA, 25 bp, Homo sapien
taaaattgtcacagttgtctagtta

SEQ ID NO: 811247 - DNA, 25 bp, Homo sapien
ctgcagaaccgaggaggaggttttg

SEQ ID NO: 811248 - DNA, 25 bp, Homo sapien
cagaaccgaggaggaggttttgcat

SEQ ID NO: 811249 - DNA, 25 bp, Homo sapien
gcagaaccgaggaggaggttttgca

SEQ ID NO: 811250 - DNA, 25 bp, Homo sapien
tgcagaaccgaggaggaggttttgc

SEQ ID NO: 811251 - DNA, 25 bp, Homo sapien
tgcctgtgttggtaacacactgaga

SEQ ID NO: 811252 - DNA, 25 bp, Homo sapien
atggtggtggtctttccaaggctat

SEQ ID NO: 811253 - DNA, 25 bp, Homo sapien
aattttgcctgtgttggtaacacac

SEQ ID NO: 811254 - DNA, 25 bp, Homo sapien
ggtggtctttccaaggctatatggt

SEQ ID NO: 811255 - DNA, 25 bp, Homo sapien
ccctacattaggatgagtctctcga

SEQ ID NO: 811256 - DNA, 25 bp, Homo sapien
tctctcgatgtcaccataggccagg

SEQ ID NO: 811257 - DNA, 25 bp, Homo sapien
gacggtcacctcgttcatagtgaag

SEQ ID NO: 811258 - DNA, 25 bp, Homo sapien
gcaggacctactgttgatgcagcag

SEQ ID NO: 811259 - DNA, 25 bp, Homo sapien
atcacactcctcagattcttctttg

SEQ ID NO: 811260 - DNA, 25 bp, Homo sapien
caaagcccatgccatcatcacactc

SEQ ID NO: 811261 - DNA, 25 bp, Homo sapien
atgccatcatcacactcctcagatt

SEQ ID NO: 811262 - DNA, 25 bp, Homo sapien
tcacactcctcagattcttctttgt

SEQ ID NO: 811263 - DNA, 25 bp, Homo sapien
tgctaaggctaaaagaaaaccattc

SEQ ID NO: 811264 - DNA, 25 bp, Homo sapien
gatgctttgtaaagaccaagagtta

SEQ ID NO: 811265 - DNA, 25 bp, Homo sapien
tcagctatgatttcacggaagacac

SEQ ID NO: 811266 - DNA, 25 bp, Homo sapien
tcctggcattgtacttaacgaaaaa

SEQ ID NO: 811267 - DNA, 25 bp, Homo sapien
caagcttgttcttctagacgcagca

SEQ ID NO: 811268 - DNA, 25 bp, Homo sapien
gcttgttcttctagacgcagcaggc

SEQ ID NO: 811269 - DNA, 25 bp, Homo sapien
gtcaagcttgttcttctagacgcag

SEQ ID NO: 811270 - DNA, 25 bp, Homo sapien
gtttgtcaagcttgttcttctagac

SEQ ID NO: 811271 - DNA, 25 bp, Homo sapien
ttcagtgtggccctcactggaggaa

SEQ ID NO: 811272 - DNA, 25 bp, Homo sapien
gctggcttttaagaagctttctgtc

SEQ ID NO: 811273 - DNA, 25 bp, Homo sapien
tgcctacacacttagactgcagggt

SEQ ID NO: 811274 - DNA, 25 bp, Homo sapien
ggaggaatgagaagtgcctacacac

SEQ ID NO: 811275 - DNA, 25 bp, Homo sapien
tatatgaaatagcttccttacggct

SEQ ID NO: 811276 - DNA, 25 bp, Homo sapien
gataacctgtcatgtcttggtcttc

SEQ ID NO: 811277 - DNA, 25 bp, Homo sapien
ccttacggctttcattaggattgat

SEQ ID NO: 811278 - DNA, 25 bp, Homo sapien
tgagtatgtatttggtgagataacc

SEQ ID NO: 811279 - DNA, 25 bp, Homo sapien
ttggaaaggctttggcttccagctg

SEQ ID NO: 811280 - DNA, 25 bp, Homo sapien
tggaaaggctttggcttccagctgc

SEQ ID NO: 811281 - DNA, 25 bp, Homo sapien
atgcttggaaaggctttggcttcca

SEQ ID NO: 811282 - DNA, 25 bp, Homo sapien
gcttggaaaggctttggcttccagc

SEQ ID NO: 811283 - DNA, 25 bp, Homo sapien
ttggcttgttgctccatccagtgct

SEQ ID NO: 811284 - DNA, 25 bp, Homo sapien
tttcctggagacaaccattattggc

SEQ ID NO: 811285 - DNA, 25 bp, Homo sapien
gttgctccatccagtgcttaggatg

SEQ ID NO: 811286 - DNA, 25 bp, Homo sapien
ggagacaaccattattggcttgttg

SEQ ID NO: 811287 - DNA, 25 bp, Homo sapien
cctagtgagtaaaacataagtcttc

SEQ ID NO: 811288 - DNA, 25 bp, Homo sapien
tacttagtaaacagggagtggcttc

SEQ ID NO: 811289 - DNA, 25 bp, Homo sapien
taagtacgtagggactaaggctcag

SEQ ID NO: 811290 - DNA, 25 bp, Homo sapien
cagtctgttcttaggcacatagcta

SEQ ID NO: 811291 - DNA, 25 bp, Homo sapien
ctttcgtaaaccagatcatcaggca

SEQ ID NO: 811292 - DNA, 25 bp, Homo sapien
caagaagggcatgaggactgttgta

SEQ ID NO: 811293 - DNA, 25 bp, Homo sapien
caaagtagcatttggcgttggtgtg

SEQ ID NO: 811294 - DNA, 25 bp, Homo sapien
tcatcaggcagtgtagattcttgtc

SEQ ID NO: 811295 - DNA, 25 bp, Homo sapien
ccagtgtcggtgtccaccacctttg

SEQ ID NO: 811296 - DNA, 25 bp, Homo sapien
tggtggttatggtctccagtgtcgg

SEQ ID NO: 811297 - DNA, 25 bp, Homo sapien
tccaccacctttgcagctacattca

SEQ ID NO: 811298 - DNA, 25 bp, Homo sapien
cagtgtgagagcctggtggttatgg

SEQ ID NO: 811299 - DNA, 25 bp, Homo sapien
tattactgggtgtgtacctagagga

SEQ ID NO: 811300 - DNA, 25 bp, Homo sapien
tagacctggaggctattacccttag

SEQ ID NO: 811301 - DNA, 25 bp, Homo sapien
tatggtgatccctcaaagagctaaa

SEQ ID NO: 811302 - DNA, 25 bp, Homo sapien
tgtaaatgccgatcagtgaccgact

SEQ ID NO: 811303 - DNA, 25 bp, Homo sapien
gctgggttcttgtttgccagtaccc

SEQ ID NO: 811304 - DNA, 25 bp, Homo sapien
ttaaagagcctgtcagtccattatc

SEQ ID NO: 811305 - DNA, 25 bp, Homo sapien
aaagtagttgagagcttcacctctt

SEQ ID NO: 811306 - DNA, 25 bp, Homo sapien
ctacagttgttagttggtctgctgg

SEQ ID NO: 811307 - DNA, 25 bp, Homo sapien
gtttggcttgtagctttaccacagc

SEQ ID NO: 811308 - DNA, 25 bp, Homo sapien
ttcatgtttggcttgtagctttacc

SEQ ID NO: 811309 - DNA, 25 bp, Homo sapien
ttgtagctttaccacagcactcaga

SEQ ID NO: 811310 - DNA, 25 bp, Homo sapien
gttcttcatgtttggcttgtagctt

SEQ ID NO: 811311 - DNA, 25 bp, Homo sapien
ctccaaagtggtcgtgggtatttcg

SEQ ID NO: 811312 - DNA, 25 bp, Homo sapien
ggaagaaagcttagaagagtgtgct

SEQ ID NO: 811313 - DNA, 25 bp, Homo sapien
ttggaagaaagcttagaagagtgtg

SEQ ID NO: 811314 - DNA, 25 bp, Homo sapien
tgctccaaagtggtcgtgggtattt

SEQ ID NO: 811315 - DNA, 25 bp, Homo sapien
gccttcgtgctttgttctcttgtca

SEQ ID NO: 811316 - DNA, 25 bp, Homo sapien
caagtttgcttactgccttcgtgct

SEQ ID NO: 811317 - DNA, 25 bp, Homo sapien
tgactccgtagaccacaagtttgct

SEQ ID NO: 811318 - DNA, 25 bp, Homo sapien
tgccccggcctaatgactccgtaga

SEQ ID NO: 811319 - DNA, 25 bp, Homo sapien
aaaggcggccctggcgcgctggggc

SEQ ID NO: 811320 - DNA, 25 bp, Homo sapien
tgctgctctccaaaggcggccctgg

SEQ ID NO: 811321 - DNA, 25 bp, Homo sapien
tgctctccaaaggcggccctggcgc

SEQ ID NO: 811322 - DNA, 25 bp, Homo sapien
gctggggctggcgccgcgtggaact

SEQ ID NO: 811323 - DNA, 25 bp, Homo sapien
ttgtacggggcgaagccacatgcct

SEQ ID NO: 811324 - DNA, 25 bp, Homo sapien
cagtaactccttggcgtgctgcttg

SEQ ID NO: 811325 - DNA, 25 bp, Homo sapien
agacctttcagtaactccttggcgt

SEQ ID NO: 811326 - DNA, 25 bp, Homo sapien
gaagccacatgcctccgggatcatg

SEQ ID NO: 811327 - DNA, 25 bp, Homo sapien
cggccaggacgttgctttgctcctc

SEQ ID NO: 811328 - DNA, 25 bp, Homo sapien
ggcggccaggacgttgctttgctcc

SEQ ID NO: 811329 - DNA, 25 bp, Homo sapien
tggcggccaggacgttgctttgctc

SEQ ID NO: 811330 - DNA, 25 bp, Homo sapien
atggcggccaggacgttgctttgct

SEQ ID NO: 811331 - DNA, 25 bp, Homo sapien
ttctttatttcagggagagggcagg

SEQ ID NO: 811332 - DNA, 25 bp, Homo sapien
caagctgttctttatttcagggaga

SEQ ID NO: 811333 - DNA, 25 bp, Homo sapien
tgttctttatttcagggagagggca

SEQ ID NO: 811334 - DNA, 25 bp, Homo sapien
gctgttctttatttcagggagaggg

SEQ ID NO: 811335 - DNA, 25 bp, Homo sapien
tatctaaagtcctcactgatcctgc

SEQ ID NO: 811336 - DNA, 25 bp, Homo sapien
tatcttcataatgtgtacttccctc

SEQ ID NO: 811337 - DNA, 25 bp, Homo sapien
ttaaaacaggtcgttcacagtctgg

SEQ ID NO: 811338 - DNA, 25 bp, Homo sapien
tcgttcacagtctggtggtcctctt

SEQ ID NO: 811339 - DNA, 25 bp, Homo sapien
gccaggcttcctactcatgctagtt

SEQ ID NO: 811340 - DNA, 25 bp, Homo sapien
tagtaaggatttttgccgatgtaac

SEQ ID NO: 811341 - DNA, 25 bp, Homo sapien
gccgatgtaaccttccagcttttct

SEQ ID NO: 811342 - DNA, 25 bp, Homo sapien
tgcagcagctgctagagccattatc

SEQ ID NO: 811343 - DNA, 25 bp, Homo sapien
cttgacagccatactaaggaaataa

SEQ ID NO: 811344 - DNA, 25 bp, Homo sapien
cttcttgacagccatactaaggaaa

SEQ ID NO: 811345 - DNA, 25 bp, Homo sapien
agcttcttgacagccatactaagga

SEQ ID NO: 811346 - DNA, 25 bp, Homo sapien
aagcttcttgacagccatactaagg

SEQ ID NO: 811347 - DNA, 25 bp, Homo sapien
cgcacctggcctcatatcatgcttt

SEQ ID NO: 811348 - DNA, 25 bp, Homo sapien
gcacctggcctcatatcatgctttc

SEQ ID NO: 811349 - DNA, 25 bp, Homo sapien
aactggactatttctgaacatgagc

SEQ ID NO: 811350 - DNA, 25 bp, Homo sapien
tgaggaggattagaagtagaaactg

SEQ ID NO: 811351 - DNA, 25 bp, Homo sapien
ttagaagtagaaactggactatttc

SEQ ID NO: 811352 - DNA, 25 bp, Homo sapien
ggactatttctgaacatgagcgttc

SEQ ID NO: 811353 - DNA, 25 bp, Homo sapien
ggtggctctaccagtgttacccaga

SEQ ID NO: 811354 - DNA, 25 bp, Homo sapien
tctaccagtgttacccagagtttgc

SEQ ID NO: 811355 - DNA, 25 bp, Homo sapien
tgttagcattctggtggctctacca

SEQ ID NO: 811356 - DNA, 25 bp, Homo sapien
ttttccttgttagcattctggtggc

SEQ ID NO: 811357 - DNA, 25 bp, Homo sapien
cactgcatgcagtaatggttcatgc

SEQ ID NO: 811358 - DNA, 25 bp, Homo sapien
tcactgcatgcagtaatggttcatg

SEQ ID NO: 811359 - DNA, 25 bp, Homo sapien
tgtgtgacagctgttgaaggcttta

SEQ ID NO: 811360 - DNA, 25 bp, Homo sapien
gctgcagcatgcacaccataacaca

SEQ ID NO: 811361 - DNA, 25 bp, Homo sapien
cagaccgctggttcatgtgtgacag

SEQ ID NO: 811362 - DNA, 25 bp, Homo sapien
aatagtggagcctgatcagctgcag

SEQ ID NO: 811363 - DNA, 25 bp, Homo sapien
gaaatcaagcagaagattgagctgc

SEQ ID NO: 811364 - DNA, 25 bp, Homo sapien
tgagctgctgatgtcagttaactct

SEQ ID NO: 811365 - DNA, 25 bp, Homo sapien
aagggcaggcaatcttggttgtgaa

SEQ ID NO: 811366 - DNA, 25 bp, Homo sapien
tcattctgaacaaaagggattagag

SEQ ID NO: 811367 - DNA, 25 bp, Homo sapien
ggtaacagctcacagttatctaaga

SEQ ID NO: 811368 - DNA, 25 bp, Homo sapien
ctaacgggagtaattgtgaggctaa

SEQ ID NO: 811369 - DNA, 25 bp, Homo sapien
gatactttgtcatagtgagaaacct

SEQ ID NO: 811370 - DNA, 25 bp, Homo sapien
caccacatttcattgctaacgggag

SEQ ID NO: 811371 - DNA, 25 bp, Homo sapien
gtgatctcagtcttcgctctcactg

SEQ ID NO: 811372 - DNA, 25 bp, Homo sapien
taatatctggtatgaaaaaactgtc

SEQ ID NO: 811373 - DNA, 25 bp, Homo sapien
tttgactttgtacatcccaatatca

SEQ ID NO: 811374 - DNA, 25 bp, Homo sapien
gtacatcccaatatcagtgaaccaa

SEQ ID NO: 811375 - DNA, 25 bp, Homo sapien
gcccctggccctttgataatgtctt

SEQ ID NO: 811376 - DNA, 25 bp, Homo sapien
cccctggccctttgataatgtcttt

SEQ ID NO: 811377 - DNA, 25 bp, Homo sapien
cagatgtttaccactaaacctggct

SEQ ID NO: 811378 - DNA, 25 bp, Homo sapien
attacagatgtttaccactaaacct

SEQ ID NO: 811379 - DNA, 25 bp, Homo sapien
gcagcttcctaagtcagtgtctaga

SEQ ID NO: 811380 - DNA, 25 bp, Homo sapien
ttttgtggtacgcagcagcttccta

SEQ ID NO: 811381 - DNA, 25 bp, Homo sapien
tctttattgtggtagcccttttgtg

SEQ ID NO: 811382 - DNA, 25 bp, Homo sapien
tgtggtagcccttttgtggtacgca

SEQ ID NO: 811383 - DNA, 25 bp, Homo sapien
ttctgaaagcttcgttattgagaga

SEQ ID NO: 811384 - DNA, 25 bp, Homo sapien
aaagtagtctcagtccaaatgtcag

SEQ ID NO: 811385 - DNA, 25 bp, Homo sapien
ggcttcatttcttaccagtaccgac

SEQ ID NO: 811386 - DNA, 25 bp, Homo sapien
gatggtgcacatgataggttctctg

SEQ ID NO: 811387 - DNA, 25 bp, Homo sapien
caaatgtcagacagagttaggcttt

SEQ ID NO: 811388 - DNA, 25 bp, Homo sapien
atcagccaattagaagggtacacag

SEQ ID NO: 811389 - DNA, 25 bp, Homo sapien
gatggcaacataaggcaatagtctg

SEQ ID NO: 811390 - DNA, 25 bp, Homo sapien
aaatcagccaattagaagggtacac

SEQ ID NO: 811391 - DNA, 25 bp, Homo sapien
atggcaacataaggcaatagtctgt

SEQ ID NO: 811392 - DNA, 25 bp, Homo sapien
ctggtggaacgtagagggcattcat

SEQ ID NO: 811393 - DNA, 25 bp, Homo sapien
gacatggcagatcttaacgtttcag

SEQ ID NO: 811394 - DNA, 25 bp, Homo sapien
cttctggagacatggcagatcttaa

SEQ ID NO: 811395 - DNA, 25 bp, Homo sapien
taacgtttcagtgcatatggatggg

SEQ ID NO: 811396 - DNA, 25 bp, Homo sapien
tgcagaacacaggactgtagagaaa

SEQ ID NO: 811397 - DNA, 25 bp, Homo sapien
tcattctcagttccaacaggaggaa

SEQ ID NO: 811398 - DNA, 25 bp, Homo sapien
agaacacaggactgtagagaaacag

SEQ ID NO: 811399 - DNA, 25 bp, Homo sapien
tctcagttccaacaggaggaagagt

SEQ ID NO: 811400 - DNA, 25 bp, Homo sapien
ttaggaagataacttcccagtcttc

SEQ ID NO: 811401 - DNA, 25 bp, Homo sapien
taggaagataacttcccagtcttca

SEQ ID NO: 811402 - DNA, 25 bp, Homo sapien
attgggatggtgagactgtgtggcc

SEQ ID NO: 811403 - DNA, 25 bp, Homo sapien
tgccagcggtgggctgtgggctcgg

SEQ ID NO: 811404 - DNA, 25 bp, Homo sapien
gccagcggtgggctgtgggctcgga

SEQ ID NO: 811405 - DNA, 25 bp, Homo sapien
ccagcggtgggctgtgggctcggac

SEQ ID NO: 811406 - DNA, 25 bp, Homo sapien
ggtgccaatcgtgcgtgcccctggc

SEQ ID NO: 811407 - DNA, 25 bp, Homo sapien
ctggcaggtgccaatcgtgcgtgcc

SEQ ID NO: 811408 - DNA, 25 bp, Homo sapien
gcaggtgccaatcgtgcgtgcccct

SEQ ID NO: 811409 - DNA, 25 bp, Homo sapien
tggcaggtgccaatcgtgcgtgccc

SEQ ID NO: 811410 - DNA, 25 bp, Homo sapien
cctcctgagtggacggtgcttgcaa

SEQ ID NO: 811411 - DNA, 25 bp, Homo sapien
cggtgcttgcaacaacgaagacaaa

SEQ ID NO: 811412 - DNA, 25 bp, Homo sapien
tcgtcacaccggttgcggggcgcct

SEQ ID NO: 811413 - DNA, 25 bp, Homo sapien
tcctcgttggcactcgtcacaccgg

SEQ ID NO: 811414 - DNA, 25 bp, Homo sapien
aggtcatagcggttccaagattagc

SEQ ID NO: 811415 - DNA, 25 bp, Homo sapien
atgggattgtgattctccatgaact

SEQ ID NO: 811416 - DNA, 25 bp, Homo sapien
gctgtattaggagtttcaattgaga

SEQ ID NO: 811417 - DNA, 25 bp, Homo sapien
caattgagatgatattgcttatcga

SEQ ID NO: 811418 - DNA, 25 bp, Homo sapien
atcaacccagttccagcctcgagga

SEQ ID NO: 811419 - DNA, 25 bp, Homo sapien
aacccagttccagcctcgaggaagt

SEQ ID NO: 811420 - DNA, 25 bp, Homo sapien
agcctcgaggaagttctcctttgtg

SEQ ID NO: 811421 - DNA, 25 bp, Homo sapien
gttccagcctcgaggaagttctcct

SEQ ID NO: 811422 - DNA, 25 bp, Homo sapien
cacctttctgtctaaaagcaggcta

SEQ ID NO: 811423 - DNA, 25 bp, Homo sapien
tattcagagatgatccgtcaggttc

SEQ ID NO: 811424 - DNA, 25 bp, Homo sapien
tggcttcaaaaactacatcagatgc

SEQ ID NO: 811425 - DNA, 25 bp, Homo sapien
ggttctagtgatacgtactttgcaa

SEQ ID NO: 811426 - DNA, 25 bp, Homo sapien
caaatttgaataaccaaggcttgtc

SEQ ID NO: 811427 - DNA, 25 bp, Homo sapien
tcatacgcttttgagaaaaatgtct

SEQ ID NO: 811428 - DNA, 25 bp, Homo sapien
gattgcacaggtgtttttcctggag

SEQ ID NO: 811429 - DNA, 25 bp, Homo sapien
aaagcaacaagctcatttcatacgc

SEQ ID NO: 811430 - DNA, 25 bp, Homo sapien
tgtaataatcgcttgtgacaccttg

SEQ ID NO: 811431 - DNA, 25 bp, Homo sapien
gagggatcaacagggttccttagcc

SEQ ID NO: 811432 - DNA, 25 bp, Homo sapien
gatggcacgtgaacttgtcttgaca

SEQ ID NO: 811433 - DNA, 25 bp, Homo sapien
gcatagccactagtttcaaaggtgc

SEQ ID NO: 811434 - DNA, 25 bp, Homo sapien
taagaagccttcagtcgtagtccca

SEQ ID NO: 811435 - DNA, 25 bp, Homo sapien
gacttaagaagccttcagtcgtagt

SEQ ID NO: 811436 - DNA, 25 bp, Homo sapien
ttctgacttaagaagccttcagtcg

SEQ ID NO: 811437 - DNA, 25 bp, Homo sapien
ccttcagtcgtagtcccacagatgg

SEQ ID NO: 811438 - DNA, 25 bp, Homo sapien
tgtgcggtagggcagtgtcccgccg

SEQ ID NO: 811439 - DNA, 25 bp, Homo sapien
ccgtgtccccgtgtgcggtagggca

SEQ ID NO: 811440 - DNA, 25 bp, Homo sapien
gggaccggtagccaaggctatccga

SEQ ID NO: 811441 - DNA, 25 bp, Homo sapien
aaggctatccgaggcccctcagcat

SEQ ID NO: 811442 - DNA, 25 bp, Homo sapien
ggggccatgctaatcttttctgtat

SEQ ID NO: 811443 - DNA, 25 bp, Homo sapien
aaaattactagaacacttcatgaat

SEQ ID NO: 811444 - DNA, 25 bp, Homo sapien
tatatatgctgctgaagcaagcact

SEQ ID NO: 811445 - DNA, 25 bp, Homo sapien
tgaatttgtgagtcatccttgggca

SEQ ID NO: 811446 - DNA, 25 bp, Homo sapien
aaatcagtcagccgtggtggtgctg

SEQ ID NO: 811447 - DNA, 25 bp, Homo sapien
ctactcaccttttatttttgccttg

SEQ ID NO: 811448 - DNA, 25 bp, Homo sapien
tatttttgccttgtaataatttcaa

SEQ ID NO: 811449 - DNA, 25 bp, Homo sapien
taaagatggtaaagtttctactcac

SEQ ID NO: 811450 - DNA, 25 bp, Homo sapien
tcctttcaaaatcagggacaatatt

SEQ ID NO: 811451 - DNA, 25 bp, Homo sapien
tttttgttgtgtagtattatggtat

SEQ ID NO: 811452 - DNA, 25 bp, Homo sapien
ggtatttagtagtgttagtgcaatc

SEQ ID NO: 811453 - DNA, 25 bp, Homo sapien
tatttagtagtgttagtgcaatcag

SEQ ID NO: 811454 - DNA, 25 bp, Homo sapien
tagtcaaatctttaagttagagtgt

SEQ ID NO: 811455 - DNA, 25 bp, Homo sapien
aaactgtggattgctggccagatat

SEQ ID NO: 811456 - DNA, 25 bp, Homo sapien
gatatagcctgtcatgtgtgtttgt

SEQ ID NO: 811457 - DNA, 25 bp, Homo sapien
aatagtggaagggttgtatagtcaa

SEQ ID NO: 811458 - DNA, 25 bp, Homo sapien
tgggatttgggcgttgcctttagga

SEQ ID NO: 811459 - DNA, 25 bp, Homo sapien
tctccctggggagaagtttggcctc

SEQ ID NO: 811460 - DNA, 25 bp, Homo sapien
gggaggagtgttatgataagaacat

SEQ ID NO: 811461 - DNA, 25 bp, Homo sapien
gataagaacattggctctcagtctc

SEQ ID NO: 811462 - DNA, 25 bp, Homo sapien
tccctggggagaagtttggcctcac

SEQ ID NO: 811463 - DNA, 25 bp, Homo sapien
tggcctgaacgctgcatctgttgtg

SEQ ID NO: 811464 - DNA, 25 bp, Homo sapien
tctgttgtgtgacagccacaactgc

SEQ ID NO: 811465 - DNA, 25 bp, Homo sapien
ctgcatctgttgtgtgacagccaca

SEQ ID NO: 811466 - DNA, 25 bp, Homo sapien
aggttctggcctgaacgctgcatct

SEQ ID NO: 811467 - DNA, 25 bp, Homo sapien
caaacccatctctgattgacttggt

SEQ ID NO: 811468 - DNA, 25 bp, Homo sapien
cccatctctgattgacttggttgct

SEQ ID NO: 811469 - DNA, 25 bp, Homo sapien
aacccatctctgattgacttggttg

SEQ ID NO: 811470 - DNA, 25 bp, Homo sapien
acccatctctgattgacttggttgc

SEQ ID NO: 811471 - DNA, 25 bp, Homo sapien
aaagcatctctgagtacagggtgga

SEQ ID NO: 811472 - DNA, 25 bp, Homo sapien
cccaggtggtgagtcttaaggataa

SEQ ID NO: 811473 - DNA, 25 bp, Homo sapien
gagctggatgagctgccgggcaaga

SEQ ID NO: 811474 - DNA, 25 bp, Homo sapien
taaggtggaatttgccccatagctg

SEQ ID NO: 811475 - DNA, 25 bp, Homo sapien
cctgtggcctttgtggccaggactg

SEQ ID NO: 811476 - DNA, 25 bp, Homo sapien
ctgtggcctttgtggccaggactgt

SEQ ID NO: 811477 - DNA, 25 bp, Homo sapien
cctttgtggccaggactgtgggcta

SEQ ID NO: 811478 - DNA, 25 bp, Homo sapien
tggcctttgtggccaggactgtggg

SEQ ID NO: 811479 - DNA, 25 bp, Homo sapien
agaggatgtgaaatagaggtattga

SEQ ID NO: 811480 - DNA, 25 bp, Homo sapien
aaatagaggtattgaagccattttg

SEQ ID NO: 811481 - DNA, 25 bp, Homo sapien
cctttgcatgaggatttgggagagg

SEQ ID NO: 811482 - DNA, 25 bp, Homo sapien
agggcctttgcatgaggatttggga

SEQ ID NO: 811483 - DNA, 25 bp, Homo sapien
agtggcatgacctcgtcctactgca

SEQ ID NO: 811484 - DNA, 25 bp, Homo sapien
tggatccctcttgaatggcttgagg

SEQ ID NO: 811485 - DNA, 25 bp, Homo sapien
tcactgaaattaggtgctggtgcca

SEQ ID NO: 811486 - DNA, 25 bp, Homo sapien
gcctgcaaaaccatgagccacatac

SEQ ID NO: 811487 - DNA, 25 bp, Homo sapien
ttgaagtccattgccctaaaccatt

SEQ ID NO: 811488 - DNA, 25 bp, Homo sapien
actctgagagaattggcaggtgaga

SEQ ID NO: 811489 - DNA, 25 bp, Homo sapien
tgtataaagcggaaaaggtggctct

SEQ ID NO: 811490 - DNA, 25 bp, Homo sapien
caggtgagagcttggtccttgccgc

SEQ ID NO: 811491 - DNA, 25 bp, Homo sapien
tcagcaggagtaggactaattaact

SEQ ID NO: 811492 - DNA, 25 bp, Homo sapien
gaacacaagaggtagacgttgcagg

SEQ ID NO: 811493 - DNA, 25 bp, Homo sapien
ccctattgctagacagatgtttcca

SEQ ID NO: 811494 - DNA, 25 bp, Homo sapien
gactaggtggaatcctgcaaatgga

SEQ ID NO: 811495 - DNA, 25 bp, Homo sapien
agttcagccccgagacctgtgcgtt

SEQ ID NO: 811496 - DNA, 25 bp, Homo sapien
tcggctctcgggtttggattcgaaa

SEQ ID NO: 811497 - DNA, 25 bp, Homo sapien
gatttaccagcgttcgacatcgtta

SEQ ID NO: 811498 - DNA, 25 bp, Homo sapien
taagctggttgtcaagtggtttgcc

SEQ ID NO: 811499 - DNA, 25 bp, Homo sapien
tagggtagaacttagttttggatca

SEQ ID NO: 811500 - DNA, 25 bp, Homo sapien
aacttagttttggatcatgaacacc

SEQ ID NO: 811501 - DNA, 25 bp, Homo sapien
agttttggatcatgaacaccttgga

SEQ ID NO: 811502 - DNA, 25 bp, Homo sapien
tagaacttagttttggatcatgaac

SEQ ID NO: 811503 - DNA, 25 bp, Homo sapien
tctggcattgcataaacttctctgg

SEQ ID NO: 811504 - DNA, 25 bp, Homo sapien
ccctttgtcaccagtggctttggta

SEQ ID NO: 811505 - DNA, 25 bp, Homo sapien
gcataaacttctctggtgtgaaagg

SEQ ID NO: 811506 - DNA, 25 bp, Homo sapien
tttcttctatcagtagcgtttaccc

SEQ ID NO: 811507 - DNA, 25 bp, Homo sapien
taaataatttgagagctgccaccca

SEQ ID NO: 811508 - DNA, 25 bp, Homo sapien
gctacattctcaaaagacagcagga

SEQ ID NO: 811509 - DNA, 25 bp, Homo sapien
tatagactttttggttgcggtggct

SEQ ID NO: 811510 - DNA, 25 bp, Homo sapien
tatcaatgccttgcaggaacgttgc

SEQ ID NO: 811511 - DNA, 25 bp, Homo sapien
gagcagtaccttgtccacagattag

SEQ ID NO: 811512 - DNA, 25 bp, Homo sapien
caccatggccattcgagaagtgcta

SEQ ID NO: 811513 - DNA, 25 bp, Homo sapien
tacaacctggcttcgctgagcagta

SEQ ID NO: 811514 - DNA, 25 bp, Homo sapien
tacatgtacacaaatcctgaggttc

SEQ ID NO: 811515 - DNA, 25 bp, Homo sapien
agggaagacaccaccagtttttgct

SEQ ID NO: 811516 - DNA, 25 bp, Homo sapien
ttctggtaagtttactcagtcatca

SEQ ID NO: 811517 - DNA, 25 bp, Homo sapien
cagatgtggacaacctagaagggaa

SEQ ID NO: 811518 - DNA, 25 bp, Homo sapien
gaagtcgttgcatatgatgatccca

SEQ ID NO: 811519 - DNA, 25 bp, Homo sapien
cattattgtcaactgcgtggtcggt

SEQ ID NO: 811520 - DNA, 25 bp, Homo sapien
ccatcaagccagagcggtaagaagt

SEQ ID NO: 811521 - DNA, 25 bp, Homo sapien
cccaggatcaaatgtagaacaatat

SEQ ID NO: 811522 - DNA, 25 bp, Homo sapien
ttttagatccactacattcccagga

SEQ ID NO: 811523 - DNA, 25 bp, Homo sapien
tcacagtcgtgttcatcgatatagg

SEQ ID NO: 811524 - DNA, 25 bp, Homo sapien
cagtcgtgttcatcgatataggacg

SEQ ID NO: 811525 - DNA, 25 bp, Homo sapien
ggctcacagtcgtgttcatcgatat

SEQ ID NO: 811526 - DNA, 25 bp, Homo sapien
cgtgttcatcgatataggacgccat

SEQ ID NO: 811527 - DNA, 25 bp, Homo sapien
atgttggttcgagtctcctgcttga

SEQ ID NO: 811528 - DNA, 25 bp, Homo sapien
agcaccatgttggttcgagtctcct

SEQ ID NO: 811529 - DNA, 25 bp, Homo sapien
accatgttggttcgagtctcctgct

SEQ ID NO: 811530 - DNA, 25 bp, Homo sapien
ccagcaccatgttggttcgagtctc

SEQ ID NO: 811531 - DNA, 25 bp, Homo sapien
gcaggtggtggtcccaatctactac

SEQ ID NO: 811532 - DNA, 25 bp, Homo sapien
gaggcaggtggtggtcccaatctac

SEQ ID NO: 811533 - DNA, 25 bp, Homo sapien
ggtggtggtcccaatctactaccaa

SEQ ID NO: 811534 - DNA, 25 bp, Homo sapien
atctactaccaaccccaagtcttca

SEQ ID NO: 811535 - DNA, 25 bp, Homo sapien
cttgcttagccagggcagaatgcaa

SEQ ID NO: 811536 - DNA, 25 bp, Homo sapien
ggcggcacaagggacaggaatttgt

SEQ ID NO: 811537 - DNA, 25 bp, Homo sapien
ctcatggcggcacaagggacaggaa

SEQ ID NO: 811538 - DNA, 25 bp, Homo sapien
atggcggcacaagggacaggaattt

SEQ ID NO: 811539 - DNA, 25 bp, Homo sapien
catggcggcacaagggacaggaatt

SEQ ID NO: 811540 - DNA, 25 bp, Homo sapien
tgtgttcctcataagtgtagtcatc

SEQ ID NO: 811541 - DNA, 25 bp, Homo sapien
gagccttatctcgtctgtgttcctc

SEQ ID NO: 811542 - DNA, 25 bp, Homo sapien
gccttatctcgtctgtgttcctcat

SEQ ID NO: 811543 - DNA, 25 bp, Homo sapien
cataagtgtagtcatcagtgggcag

SEQ ID NO: 811544 - DNA, 25 bp, Homo sapien
tgtacatggctccatggaggttctc

SEQ ID NO: 811545 - DNA, 25 bp, Homo sapien
gtgtacatggctccatggaggttct

SEQ ID NO: 811546 - DNA, 25 bp, Homo sapien
aggccgtaggactgagtgccacagc

SEQ ID NO: 811547 - DNA, 25 bp, Homo sapien
cgacttcctctcgatgtctcactgg

SEQ ID NO: 811548 - DNA, 25 bp, Homo sapien
ggactgagtgccacagcgacttcct

SEQ ID NO: 811549 - DNA, 25 bp, Homo sapien
agccgccggccgtgctctgttcctc

SEQ ID NO: 811550 - DNA, 25 bp, Homo sapien
tcgcctccgcgcgagtcctcggctc

SEQ ID NO: 811551 - DNA, 25 bp, Homo sapien
tcggctccattcgcagccagcgtgg

SEQ ID NO: 811552 - DNA, 25 bp, Homo sapien
cgagtcctcggctccattcgcagcc

SEQ ID NO: 811553 - DNA, 25 bp, Homo sapien
agtcctcggctccattcgcagccag

SEQ ID NO: 811554 - DNA, 25 bp, Homo sapien
ggctgcaggagaggcgccgatctcg

SEQ ID NO: 811555 - DNA, 25 bp, Homo sapien
cgccgatctcgccggctggtagcat

SEQ ID NO: 811556 - DNA, 25 bp, Homo sapien
aggcgccgatctcgccggctggtag

SEQ ID NO: 811557 - DNA, 25 bp, Homo sapien
aggagaggcgccgatctcgccggct

SEQ ID NO: 811558 - DNA, 25 bp, Homo sapien
aggaggtcttacaagggcctctaat

SEQ ID NO: 811559 - DNA, 25 bp, Homo sapien
tctaggaggtcttacaagggcctct

SEQ ID NO: 811560 - DNA, 25 bp, Homo sapien
cacttcacggggactaccgcctcct

SEQ ID NO: 811561 - DNA, 25 bp, Homo sapien
cggggactaccgcctcctctaggag

SEQ ID NO: 811562 - DNA, 25 bp, Homo sapien
tcctttcgtcaccactttcagagca

SEQ ID NO: 811563 - DNA, 25 bp, Homo sapien
tctcctcgaggttcttcctttcgtc

SEQ ID NO: 811564 - DNA, 25 bp, Homo sapien
cgaggttcttcctttcgtcaccact

SEQ ID NO: 811565 - DNA, 25 bp, Homo sapien
tcttcctttcgtcaccactttcaga

SEQ ID NO: 811566 - DNA, 25 bp, Homo sapien
gtcatcagtattaccatataagcat

SEQ ID NO: 811567 - DNA, 25 bp, Homo sapien
acggtactgcatctaaaagataggc

SEQ ID NO: 811568 - DNA, 25 bp, Homo sapien
aaagataggcaaagaacctttctat

SEQ ID NO: 811569 - DNA, 25 bp, Homo sapien
catattgtgcagaaaacggtactgc

SEQ ID NO: 811570 - DNA, 25 bp, Homo sapien
gttatccgttgtgctcttgccagag

SEQ ID NO: 811571 - DNA, 25 bp, Homo sapien
tccagaacccaagttatccgttgtg

SEQ ID NO: 811572 - DNA, 25 bp, Homo sapien
cgttgtgctcttgccagagcaattt

SEQ ID NO: 811573 - DNA, 25 bp, Homo sapien
cctgtccagtccaagatccagaacc

SEQ ID NO: 811574 - DNA, 25 bp, Homo sapien
gggagatcaccattatctgtacctt

SEQ ID NO: 811575 - DNA, 25 bp, Homo sapien
gaatgcagacacataagaagggaga

SEQ ID NO: 811576 - DNA, 25 bp, Homo sapien
gaagggagatcaccattatctgtac

SEQ ID NO: 811577 - DNA, 25 bp, Homo sapien
gacacataagaagggagatcaccat

SEQ ID NO: 811578 - DNA, 25 bp, Homo sapien
aactgcattttacttactgtcctct

SEQ ID NO: 811579 - DNA, 25 bp, Homo sapien
actgcattttacttactgtcctctg

SEQ ID NO: 811580 - DNA, 25 bp, Homo sapien
ctgcattttacttactgtcctctgt

SEQ ID NO: 811581 - DNA, 25 bp, Homo sapien
tgcacatgctgaagggataggactg

SEQ ID NO: 811582 - DNA, 25 bp, Homo sapien
gaatatacgatgaccaaaaacctgg

SEQ ID NO: 811583 - DNA, 25 bp, Homo sapien
cacaagtttactgaggtggcagaga

SEQ ID NO: 811584 - DNA, 25 bp, Homo sapien
agctgcatgacttcctccaactggg

SEQ ID NO: 811585 - DNA, 25 bp, Homo sapien
caacagtgggattaatgcaataaaa

SEQ ID NO: 811586 - DNA, 25 bp, Homo sapien
gcatttctacaaagctcccaatctg

SEQ ID NO: 811587 - DNA, 25 bp, Homo sapien
taacatggtatcagcaagagtggga

SEQ ID NO: 811588 - DNA, 25 bp, Homo sapien
gaaggccaagatccactttcgggca

SEQ ID NO: 811589 - DNA, 25 bp, Homo sapien
gaggtctgcctccataggctcagca

SEQ ID NO: 811590 - DNA, 25 bp, Homo sapien
gaaagggacttaactcactggctcc

SEQ ID NO: 811591 - DNA, 25 bp, Homo sapien
tccagtaagcatctagaggtctgcc

SEQ ID NO: 811592 - DNA, 25 bp, Homo sapien
gctcagcagaggatccagctagaga

SEQ ID NO: 811593 - DNA, 25 bp, Homo sapien
cgaattcttttaggaatttctgatg

SEQ ID NO: 811594 - DNA, 25 bp, Homo sapien
taaggcacttcgaattcttttagga

SEQ ID NO: 811595 - DNA, 25 bp, Homo sapien
gaattcttttaggaatttctgatga

SEQ ID NO: 811596 - DNA, 25 bp, Homo sapien
attcttttaggaatttctgatgaaa

SEQ ID NO: 811597 - DNA, 25 bp, Homo sapien
caatctggctaatcatggttccaag

SEQ ID NO: 811598 - DNA, 25 bp, Homo sapien
gcaaatggctgttaatggcgctgaa

SEQ ID NO: 811599 - DNA, 25 bp, Homo sapien
tggttccaagatcgtccatccaagg

SEQ ID NO: 811600 - DNA, 25 bp, Homo sapien
ggtaagcaagatgacgttcgatctc

SEQ ID NO: 811601 - DNA, 25 bp, Homo sapien
cattattggtcatcagatattgctg

SEQ ID NO: 811602 - DNA, 25 bp, Homo sapien
ccagaatttaactgtggctctcatg

SEQ ID NO: 811603 - DNA, 25 bp, Homo sapien
gatgattcctgaagtttaatgtcaa

SEQ ID NO: 811604 - DNA, 25 bp, Homo sapien
tggaggctgcctccggtacattatt

SEQ ID NO: 811605 - DNA, 25 bp, Homo sapien
caatgaagctgtgctaaaatttcct

SEQ ID NO: 811606 - DNA, 25 bp, Homo sapien
ctccaggtaactgtatatctccggg

SEQ ID NO: 811607 - DNA, 25 bp, Homo sapien
taagccaacagtttgtgattgaggg

SEQ ID NO: 811608 - DNA, 25 bp, Homo sapien
gggcactggcaggtcgacttaagcc

SEQ ID NO: 811609 - DNA, 25 bp, Homo sapien
gaggtttgtagtttcaaaagctgac

SEQ ID NO: 811610 - DNA, 25 bp, Homo sapien
gggagttgctttggctcagtaagta

SEQ ID NO: 811611 - DNA, 25 bp, Homo sapien
gaggcaggaagagagtatttttctg

SEQ ID NO: 811612 - DNA, 25 bp, Homo sapien
gctttggctcagtaagtaattcatc

SEQ ID NO: 811613 - DNA, 25 bp, Homo sapien
ttctgggagttgctttggctcagta

SEQ ID NO: 811614 - DNA, 25 bp, Homo sapien
gaacctcttctgaagaggagtcagc

SEQ ID NO: 811615 - DNA, 25 bp, Homo sapien
cctcttctgaagaggagtcagcata

SEQ ID NO: 811616 - DNA, 25 bp, Homo sapien
acctcttctgaagaggagtcagcat

SEQ ID NO: 811617 - DNA, 25 bp, Homo sapien
ctgaacctcttctgaagaggagtca

SEQ ID NO: 811618 - DNA, 25 bp, Homo sapien
gcttaacacattagtctgccggttc

SEQ ID NO: 811619 - DNA, 25 bp, Homo sapien
ttaacacattagtctgccggttccc

SEQ ID NO: 811620 - DNA, 25 bp, Homo sapien
cttgcttaacacattagtctgccgg

SEQ ID NO: 811621 - DNA, 25 bp, Homo sapien
ttgcttaacacattagtctgccggt

SEQ ID NO: 811622 - DNA, 25 bp, Homo sapien
aatccacataagtacttgagccaag

SEQ ID NO: 811623 - DNA, 25 bp, Homo sapien
cctactttgtctaatattggctgaa

SEQ ID NO: 811624 - DNA, 25 bp, Homo sapien
ggtttccaatccacataagtacttg

SEQ ID NO: 811625 - DNA, 25 bp, Homo sapien
ccttgcgtttaccaaagagcctact

SEQ ID NO: 811626 - DNA, 25 bp, Homo sapien
tatgcatacaactagcaaaagtgcc

SEQ ID NO: 811627 - DNA, 25 bp, Homo sapien
tgtgtagctccctttcaaacaagag

SEQ ID NO: 811628 - DNA, 25 bp, Homo sapien
cagaagagattgtcatcatatagca

SEQ ID NO: 811629 - DNA, 25 bp, Homo sapien
caaaagtgccaggatagccatgaac

SEQ ID NO: 811630 - DNA, 25 bp, Homo sapien
catccacgtcagtgatatccttata

SEQ ID NO: 811631 - DNA, 25 bp, Homo sapien
cataaaagtttctgcacaatctgga

SEQ ID NO: 811632 - DNA, 25 bp, Homo sapien
cttatattgcgatacccaggcagct

SEQ ID NO: 811633 - DNA, 25 bp, Homo sapien
taaccaagagtagagtcataaaagt

SEQ ID NO: 811634 - DNA, 25 bp, Homo sapien
agaattgcacagtatcgaaagccaa

SEQ ID NO: 811635 - DNA, 25 bp, Homo sapien
gcccaatctgctagtactgttgaga

SEQ ID NO: 811636 - DNA, 25 bp, Homo sapien
tcatcacttgtgttaatcgtatcct

SEQ ID NO: 811637 - DNA, 25 bp, Homo sapien
gagatgtagttcacagcattaagaa

SEQ ID NO: 811638 - DNA, 25 bp, Homo sapien
aaactgatcattaccctctatctta

SEQ ID NO: 811639 - DNA, 25 bp, Homo sapien
taaacaaactgatcattaccctcta

SEQ ID NO: 811640 - DNA, 25 bp, Homo sapien
aacaaactgatcattaccctctatc

SEQ ID NO: 811641 - DNA, 25 bp, Homo sapien
tgatcattaccctctatcttataat

SEQ ID NO: 811642 - DNA, 25 bp, Homo sapien
tcttaaacagactatagcaccaagt

SEQ ID NO: 811643 - DNA, 25 bp, Homo sapien
tctggcacaagaatcaagaataaca

SEQ ID NO: 811644 - DNA, 25 bp, Homo sapien
ggtgctgagagaatacttacttaaa

SEQ ID NO: 811645 - DNA, 25 bp, Homo sapien
aacgcttagcagaatatggagctgt

SEQ ID NO: 811646 - DNA, 25 bp, Homo sapien
tctccatagaggctagctgtcctag

SEQ ID NO: 811647 - DNA, 25 bp, Homo sapien
catgtcatcaaagacagagctctcc

SEQ ID NO: 811648 - DNA, 25 bp, Homo sapien
tctctaaaaacgtggtctacttgac

SEQ ID NO: 811649 - DNA, 25 bp, Homo sapien
gacgggtcaacatatcatgctttaa

SEQ ID NO: 811650 - DNA, 25 bp, Homo sapien
gtagatgtatacatccagcttctct

SEQ ID NO: 811651 - DNA, 25 bp, Homo sapien
aaagctgctgctccaactgaagtaa

SEQ ID NO: 811652 - DNA, 25 bp, Homo sapien
tctcgtaacgtcagcagcaacgggc

SEQ ID NO: 811653 - DNA, 25 bp, Homo sapien
tctgactgagatggcaaggacaacc

SEQ ID NO: 811654 - DNA, 25 bp, Homo sapien
agaataattcatataacagttgtct

SEQ ID NO: 811655 - DNA, 25 bp, Homo sapien
tatcacagcccaaaaacagtctatt

SEQ ID NO: 811656 - DNA, 25 bp, Homo sapien
cagcccaaaaacagtctattcttac

SEQ ID NO: 811657 - DNA, 25 bp, Homo sapien
gaataattcatataacagttgtctt

SEQ ID NO: 811658 - DNA, 25 bp, Homo sapien
tccttcattgaagtgattagcaaga

SEQ ID NO: 811659 - DNA, 25 bp, Homo sapien
cgagtcatatcaaactgcagctggg

SEQ ID NO: 811660 - DNA, 25 bp, Homo sapien
attttctggtctcttgcaatagtga

SEQ ID NO: 811661 - DNA, 25 bp, Homo sapien
cttgcaatagtgagaaaacaaaggg

SEQ ID NO: 811662 - DNA, 25 bp, Homo sapien
gagccagtttgtaaattccaacttc

SEQ ID NO: 811663 - DNA, 25 bp, Homo sapien
gcagtagtgcagaaccgacgttcaa

SEQ ID NO: 811664 - DNA, 25 bp, Homo sapien
tgccctgaagctgactgcagtacat

SEQ ID NO: 811665 - DNA, 25 bp, Homo sapien
taggccaatttgtcctcaaattaag

SEQ ID NO: 811666 - DNA, 25 bp, Homo sapien
gaaggaaatatggtcagcattttaa

SEQ ID NO: 811667 - DNA, 25 bp, Homo sapien
tgaaatccaattggcttcctctttc

SEQ ID NO: 811668 - DNA, 25 bp, Homo sapien
gaatttcccttaattagcacaggaa

SEQ ID NO: 811669 - DNA, 25 bp, Homo sapien
taatatctctgctcgtcttcaacag

SEQ ID NO: 811670 - DNA, 25 bp, Homo sapien
attggctatgtttgattatccacaa

SEQ ID NO: 811671 - DNA, 25 bp, Homo sapien
ttattggctatgtttgattatccac

SEQ ID NO: 811672 - DNA, 25 bp, Homo sapien
atttattggctatgtttgattatcc

SEQ ID NO: 811673 - DNA, 25 bp, Homo sapien
aaaatttattggctatgtttgatta

SEQ ID NO: 811674 - DNA, 25 bp, Homo sapien
ggatgttttcgcactcctgcctcaa

SEQ ID NO: 811675 - DNA, 25 bp, Homo sapien
tcatccagaaagaaagggttgccca

SEQ ID NO: 811676 - DNA, 25 bp, Homo sapien
cacacagaatgaaactaggaagcat

SEQ ID NO: 811677 - DNA, 25 bp, Homo sapien
tattattgaatataccccaaggaca

SEQ ID NO: 811678 - DNA, 25 bp, Homo sapien
ccaatatgctaggacaactaacaaa

SEQ ID NO: 811679 - DNA, 25 bp, Homo sapien
ccagctccattctaaataggaagcc

SEQ ID NO: 811680 - DNA, 25 bp, Homo sapien
aagtaaatgtttatcagaagcatag

SEQ ID NO: 811681 - DNA, 25 bp, Homo sapien
gctcaacacactagctggaaactct

SEQ ID NO: 811682 - DNA, 25 bp, Homo sapien
tgtctgcaacttatagtcacttggg

SEQ ID NO: 811683 - DNA, 25 bp, Homo sapien
attgcaaaagtaacaggcgtggcgt

SEQ ID NO: 811684 - DNA, 25 bp, Homo sapien
aaaaccctgggtctatgcactgaag

SEQ ID NO: 811685 - DNA, 25 bp, Homo sapien
ctattggaacgactgagaattgcaa

SEQ ID NO: 811686 - DNA, 25 bp, Homo sapien
tccctaaagaactctgagggctctg

SEQ ID NO: 811687 - DNA, 25 bp, Homo sapien
tgaagtaaatcacgcacagaagaat

SEQ ID NO: 811688 - DNA, 25 bp, Homo sapien
cttttgtaaacaacgataccagcca

SEQ ID NO: 811689 - DNA, 25 bp, Homo sapien
agtcttaaaagacggacatcctgtc

SEQ ID NO: 811690 - DNA, 25 bp, Homo sapien
aaagtctacttctggtttcaacaca

SEQ ID NO: 811691 - DNA, 25 bp, Homo sapien
taatatccaaaacatgtcagacctc

SEQ ID NO: 811692 - DNA, 25 bp, Homo sapien
tgctagagcctatttgtacaagtaa

SEQ ID NO: 811693 - DNA, 25 bp, Homo sapien
caatatcactaatcgggtgaatgca

SEQ ID NO: 811694 - DNA, 25 bp, Homo sapien
gcctaaaggatacacaataagcctg

SEQ ID NO: 811695 - DNA, 25 bp, Homo sapien
gtaacatcccatgcagcctaaagga

SEQ ID NO: 811696 - DNA, 25 bp, Homo sapien
cagaagacctcatacaaaatgtgac

SEQ ID NO: 811697 - DNA, 25 bp, Homo sapien
tcatcaaagtggtacaccaagttcc

SEQ ID NO: 811698 - DNA, 25 bp, Homo sapien
tgccccggtacagccatacctccat

SEQ ID NO: 811699 - DNA, 25 bp, Homo sapien
tgaccgcgccgggtagagggagaca

SEQ ID NO: 811700 - DNA, 25 bp, Homo sapien
agccacagggcagtcaggcgtgtca

SEQ ID NO: 811701 - DNA, 25 bp, Homo sapien
ctagaaattccaggtccgggtcgca

SEQ ID NO: 811702 - DNA, 25 bp, Homo sapien
agacagagtcgcacggctgagacgc

SEQ ID NO: 811703 - DNA, 25 bp, Homo sapien
tccactaggtggcatccggacactt

SEQ ID NO: 811704 - DNA, 25 bp, Homo sapien
gatgcagaaaggacccagccttgtt

SEQ ID NO: 811705 - DNA, 25 bp, Homo sapien
gatggcaccaacagagaatagctaa

SEQ ID NO: 811706 - DNA, 25 bp, Homo sapien
cacagtgtcgttcctctgatgcaga

SEQ ID NO: 811707 - DNA, 25 bp, Homo sapien
caggagattgtgtttcacggcctga

SEQ ID NO: 811708 - DNA, 25 bp, Homo sapien
caatagagctgttaaagcaacaaca

SEQ ID NO: 811709 - DNA, 25 bp, Homo sapien
cacggcctgaaatgggcacagatac

SEQ ID NO: 811710 - DNA, 25 bp, Homo sapien
tggttctaaggtgttgcccggactg

SEQ ID NO: 811711 - DNA, 25 bp, Homo sapien
gaggctcgaaagctctggttgtgaa

SEQ ID NO: 811712 - DNA, 25 bp, Homo sapien
taacgcaatgcatagacctgtcagc

SEQ ID NO: 811713 - DNA, 25 bp, Homo sapien
ggttgtgaagcataacgcaatgcat

SEQ ID NO: 811714 - DNA, 25 bp, Homo sapien
ctcctgacttgtcgccagccataga

SEQ ID NO: 811715 - DNA, 25 bp, Homo sapien
tcaaaagactggctatgaccaaggt

SEQ ID NO: 811716 - DNA, 25 bp, Homo sapien
taatgtctcaaggactaaaggagca

SEQ ID NO: 811717 - DNA, 25 bp, Homo sapien
taatggagttaaactggagcagcct

SEQ ID NO: 811718 - DNA, 25 bp, Homo sapien
tcttccttggcagtcaaccacaggt

SEQ ID NO: 811719 - DNA, 25 bp, Homo sapien
taggaaagtttaagcaatgtttata

SEQ ID NO: 811720 - DNA, 25 bp, Homo sapien
gctaactgaccagaatagtttcaga

SEQ ID NO: 811721 - DNA, 25 bp, Homo sapien
cagagctaactgaccagaatagttt

SEQ ID NO: 811722 - DNA, 25 bp, Homo sapien
ttactatattacagagctaactgac

SEQ ID NO: 811723 - DNA, 25 bp, Homo sapien
ccatgaggaggcacggtgaccacag

SEQ ID NO: 811724 - DNA, 25 bp, Homo sapien
ctccatgaggaggcacggtgaccac

SEQ ID NO: 811725 - DNA, 25 bp, Homo sapien
taaaggttcttaggctgccttcctg

SEQ ID NO: 811726 - DNA, 25 bp, Homo sapien
caggaaaaaggtcgtgagaacccag

SEQ ID NO: 811727 - DNA, 25 bp, Homo sapien
ccaggaatcagtgtgccagtgccca

SEQ ID NO: 811728 - DNA, 25 bp, Homo sapien
tccaggaatcagtgtgccagtgccc

SEQ ID NO: 811729 - DNA, 25 bp, Homo sapien
caggaatcagtgtgccagtgcccac

SEQ ID NO: 811730 - DNA, 25 bp, Homo sapien
tgggtaggagatgatccctaaaaaa

SEQ ID NO: 811731 - DNA, 25 bp, Homo sapien
ttagtgatgtggtttacctaatacc

SEQ ID NO: 811732 - DNA, 25 bp, Homo sapien
atggtgggtaggagatgatccctaa

SEQ ID NO: 811733 - DNA, 25 bp, Homo sapien
gattgagaacagtggccgtttagtg

SEQ ID NO: 811734 - DNA, 25 bp, Homo sapien
catgtgctttcctgcaaaatcacga

SEQ ID NO: 811735 - DNA, 25 bp, Homo sapien
cacgaacaaacgtccctgtggccgt

SEQ ID NO: 811736 - DNA, 25 bp, Homo sapien
tgtgctttcctgcaaaatcacgaac

SEQ ID NO: 811737 - DNA, 25 bp, Homo sapien
aaaatcacgaacaaacgtccctgtg

SEQ ID NO: 811738 - DNA, 25 bp, Homo sapien
gctccaccaaagtgcaggccaaaag

SEQ ID NO: 811739 - DNA, 25 bp, Homo sapien
gatccctttggtctgacgttttcaa

SEQ ID NO: 811740 - DNA, 25 bp, Homo sapien
tcatggccattgtgagtttggcaac

SEQ ID NO: 811741 - DNA, 25 bp, Homo sapien
tcctctggattctaccctaaagatg

SEQ ID NO: 811742 - DNA, 25 bp, Homo sapien
tattcgcatctgtgggctttagtgt

SEQ ID NO: 811743 - DNA, 25 bp, Homo sapien
cctgggccagtgtgcaaagcttaaa

SEQ ID NO: 811744 - DNA, 25 bp, Homo sapien
tgtcagtaatttattcgcatctgtg

SEQ ID NO: 811745 - DNA, 25 bp, Homo sapien
tgcaaagcttaaaccagggcacagc

SEQ ID NO: 811746 - DNA, 25 bp, Homo sapien
gcatggttgcgttcgtgtggtctct

SEQ ID NO: 811747 - DNA, 25 bp, Homo sapien
gttgcgttcgtgtggtctctgcctc

SEQ ID NO: 811748 - DNA, 25 bp, Homo sapien
tggttgcgttcgtgtggtctctgcc

SEQ ID NO: 811749 - DNA, 25 bp, Homo sapien
caccaggagtgtagggcatggttgc

SEQ ID NO: 811750 - DNA, 25 bp, Homo sapien
gcattccctcgcagttgcctttcat

SEQ ID NO: 811751 - DNA, 25 bp, Homo sapien
tgcacctggattaactctagcattc

SEQ ID NO: 811752 - DNA, 25 bp, Homo sapien
tgggttctgcgctgaagctcgtcat

SEQ ID NO: 811753 - DNA, 25 bp, Homo sapien
tttcatgggttctgcgctgaagctc

SEQ ID NO: 811754 - DNA, 25 bp, Homo sapien
tgtctgggccgaatcgagcctccca

SEQ ID NO: 811755 - DNA, 25 bp, Homo sapien
gtctgggccgaatcgagcctcccac

SEQ ID NO: 811756 - DNA, 25 bp, Homo sapien
cagggtgtggaacctcgacatgacc

SEQ ID NO: 811757 - DNA, 25 bp, Homo sapien
tgtcgaaatgtttgcatgccactct

SEQ ID NO: 811758 - DNA, 25 bp, Homo sapien
ggaaatgctttcttctcgtccatgg

SEQ ID NO: 811759 - DNA, 25 bp, Homo sapien
tcgtccatggtagcagagtgcctgc

SEQ ID NO: 811760 - DNA, 25 bp, Homo sapien
gatgggtatagaaagagcaggctcc

SEQ ID NO: 811761 - DNA, 25 bp, Homo sapien
gacccaagatgggtatagaaagagc

SEQ ID NO: 811762 - DNA, 25 bp, Homo sapien
tagaagtaacctccgcacaagctgt

SEQ ID NO: 811763 - DNA, 25 bp, Homo sapien
aagagcaggctccttagaagtaacc

SEQ ID NO: 811764 - DNA, 25 bp, Homo sapien
tgtaaccccatctgaagttgtctgg

SEQ ID NO: 811765 - DNA, 25 bp, Homo sapien
catccccagaaaaccggtaggcgtg

SEQ ID NO: 811766 - DNA, 25 bp, Homo sapien
ggaaagcttggtttcactcttcaga

SEQ ID NO: 811767 - DNA, 25 bp, Homo sapien
catagcagaagcacggccgtggctt

SEQ ID NO: 811768 - DNA, 25 bp, Homo sapien
tatgtgtcagtgtcgtcagggtctg

SEQ ID NO: 811769 - DNA, 25 bp, Homo sapien
gctgttatcattaagcaggtctgtt

SEQ ID NO: 811770 - DNA, 25 bp, Homo sapien
ccataacgaaggagtgatgtgctgt

SEQ ID NO: 811771 - DNA, 25 bp, Homo sapien
tgattagactgaaagggagtcgcag

SEQ ID NO: 811772 - DNA, 25 bp, Homo sapien
attctgccaaccaccatagacaaga

SEQ ID NO: 811773 - DNA, 25 bp, Homo sapien
tgccaaccaccatagacaagaaaca

SEQ ID NO: 811774 - DNA, 25 bp, Homo sapien
caaccaccatagacaagaaacacca

SEQ ID NO: 811775 - DNA, 25 bp, Homo sapien
accaccatagacaagaaacaccaaa

SEQ ID NO: 811776 - DNA, 25 bp, Homo sapien
ctccacaaccactactgcagtttct

SEQ ID NO: 811777 - DNA, 25 bp, Homo sapien
tcctttaattaagcctgtcctgatg

SEQ ID NO: 811778 - DNA, 25 bp, Homo sapien
tccacaaccactactgcagtttctg

SEQ ID NO: 811779 - DNA, 25 bp, Homo sapien
tttaattaagcctgtcctgatgtcc

SEQ ID NO: 811780 - DNA, 25 bp, Homo sapien
ccttctcttcttgctagctgtccat

SEQ ID NO: 811781 - DNA, 25 bp, Homo sapien
aagaactagatctggaacttgcaag

SEQ ID NO: 811782 - DNA, 25 bp, Homo sapien
tgcccaggtactagagcaccttctc

SEQ ID NO: 811783 - DNA, 25 bp, Homo sapien
gaactaacttggcttcacaaagaaa

SEQ ID NO: 811784 - DNA, 25 bp, Homo sapien
gagcacattcagagcctgacgttga

SEQ ID NO: 811785 - DNA, 25 bp, Homo sapien
ggctgccttaaggagcacattcaga

SEQ ID NO: 811786 - DNA, 25 bp, Homo sapien
gccttaaggagcacattcagagcct

SEQ ID NO: 811787 - DNA, 25 bp, Homo sapien
ggagcacattcagagcctgacgttg

SEQ ID NO: 811788 - DNA, 25 bp, Homo sapien
ctttgaaacattcttgatcagactt

SEQ ID NO: 811789 - DNA, 25 bp, Homo sapien
tcttcaatccagaggactgcacgtg

SEQ ID NO: 811790 - DNA, 25 bp, Homo sapien
gctccaatttcgcatccagctgagt

SEQ ID NO: 811791 - DNA, 25 bp, Homo sapien
ggactgcacgtgaggctgtctttcc

SEQ ID NO: 811792 - DNA, 25 bp, Homo sapien
tcttaaagccagaggacccgccttg

SEQ ID NO: 811793 - DNA, 25 bp, Homo sapien
ttaaagccagaggacccgccttgat

SEQ ID NO: 811794 - DNA, 25 bp, Homo sapien
cttaaagccagaggacccgccttga

SEQ ID NO: 811795 - DNA, 25 bp, Homo sapien
gcaatggcaccgtcatgagtctcca

SEQ ID NO: 811796 - DNA, 25 bp, Homo sapien
tggctcttgcaatggcaccgtcatg

SEQ ID NO: 811797 - DNA, 25 bp, Homo sapien
accgtcatgagtctccacctctgtt

SEQ ID NO: 811798 - DNA, 25 bp, Homo sapien
gcacattggtggctcttgcaatggc

SEQ ID NO: 811799 - DNA, 25 bp, Homo sapien
atcaaagaatatagatcatgatcac

SEQ ID NO: 811800 - DNA, 25 bp, Homo sapien
tcagaaccattctcttaaggcattt

SEQ ID NO: 811801 - DNA, 25 bp, Homo sapien
aggcatttctgttgataatcaaaga

SEQ ID NO: 811802 - DNA, 25 bp, Homo sapien
attctcttaaggcatttctgttgat

SEQ ID NO: 811803 - DNA, 25 bp, Homo sapien
cgctatgagcggacacttcaccttt

SEQ ID NO: 811804 - DNA, 25 bp, Homo sapien
taggtgtgcagcatgtgccgctatg

SEQ ID NO: 811805 - DNA, 25 bp, Homo sapien
tgctcatgcatggtaggtgtgcagc

SEQ ID NO: 811806 - DNA, 25 bp, Homo sapien
cagcatgtgccgctatgagcggaca

SEQ ID NO: 811807 - DNA, 25 bp, Homo sapien
ctggggctgagggagtgtaagcact

SEQ ID NO: 811808 - DNA, 25 bp, Homo sapien
ggctgagggagtgtaagcactctgg

SEQ ID NO: 811809 - DNA, 25 bp, Homo sapien
tggggctgagggagtgtaagcactc

SEQ ID NO: 811810 - DNA, 25 bp, Homo sapien
gctgagggagtgtaagcactctgga

SEQ ID NO: 811811 - DNA, 25 bp, Homo sapien
agtccctgctcagccatgggaccag

SEQ ID NO: 811812 - DNA, 25 bp, Homo sapien
gggaactcagacccacagttgtagg

SEQ ID NO: 811813 - DNA, 25 bp, Homo sapien
acttcggtaaccctggtctggcctg

SEQ ID NO: 811814 - DNA, 25 bp, Homo sapien
cacagtgaccgagtcagccagtctg

SEQ ID NO: 811815 - DNA, 25 bp, Homo sapien
catcagtgtagacgtgggcatggaa

SEQ ID NO: 811816 - DNA, 25 bp, Homo sapien
ccaggactagagagtcatcagtgta

SEQ ID NO: 811817 - DNA, 25 bp, Homo sapien
aaggatgagttcagctgggaagtca

SEQ ID NO: 811818 - DNA, 25 bp, Homo sapien
cactgggtctgctaagcccggtgtc

SEQ ID NO: 811819 - DNA, 25 bp, Homo sapien
ttcaaagcggtgttaaaggagcagt

SEQ ID NO: 811820 - DNA, 25 bp, Homo sapien
gagtgaggcccagattatgaagttc

SEQ ID NO: 811821 - DNA, 25 bp, Homo sapien
ggtcaccttgacagccacgtagaat

SEQ ID NO: 811822 - DNA, 25 bp, Homo sapien
cattacgacagcagagttgtggtcc

SEQ ID NO: 811823 - DNA, 25 bp, Homo sapien
tggcttctgacagcacctctatgct

SEQ ID NO: 811824 - DNA, 25 bp, Homo sapien
gacagcacctctatgcttatctttc

SEQ ID NO: 811825 - DNA, 25 bp, Homo sapien
agtacttaaggaactggcttctgac

SEQ ID NO: 811826 - DNA, 25 bp, Homo sapien
acttaaggaactggcttctgacagc

SEQ ID NO: 811827 - DNA, 25 bp, Homo sapien
ctacccgcaacactgggtcccaggt

SEQ ID NO: 811828 - DNA, 25 bp, Homo sapien
cctggtgtggagcaagaccacggcc

SEQ ID NO: 811829 - DNA, 25 bp, Homo sapien
gaagagaagctctggtgtaaaatca

SEQ ID NO: 811830 - DNA, 25 bp, Homo sapien
ccaccccagtgaagagaagctctgg

SEQ ID NO: 811831 - DNA, 25 bp, Homo sapien
gcgaaaggatcaagggataaaccat

SEQ ID NO: 811832 - DNA, 25 bp, Homo sapien
tgcgaaaggatcaagggataaacca

SEQ ID NO: 811833 - DNA, 25 bp, Homo sapien
ctgcgaaaggatcaagggataaacc

SEQ ID NO: 811834 - DNA, 25 bp, Homo sapien
cagcagcaaacagcacacagtcttt

SEQ ID NO: 811835 - DNA, 25 bp, Homo sapien
tccagcagcaaacagcacacagtct

SEQ ID NO: 811836 - DNA, 25 bp, Homo sapien
agcagcaaacagcacacagtctttc

SEQ ID NO: 811837 - DNA, 25 bp, Homo sapien
ctccagcagcaaacagcacacagtc

SEQ ID NO: 811838 - DNA, 25 bp, Homo sapien
gatgctgtgctgagttctctacttt

SEQ ID NO: 811839 - DNA, 25 bp, Homo sapien
gctacagatgctgtgctgagttctc

SEQ ID NO: 811840 - DNA, 25 bp, Homo sapien
acagatgctgtgctgagttctctac

SEQ ID NO: 811841 - DNA, 25 bp, Homo sapien
gctgtgctgagttctctactttctg

SEQ ID NO: 811842 - DNA, 25 bp, Homo sapien
gcctgctggtccgtcttactttagt

SEQ ID NO: 811843 - DNA, 25 bp, Homo sapien
ttcctcgcttgcaaagtcctttcga

SEQ ID NO: 811844 - DNA, 25 bp, Homo sapien
gtcctttcgattcaagcctgctggt

SEQ ID NO: 811845 - DNA, 25 bp, Homo sapien
tcaagcgttgacatcctcctgcatg

SEQ ID NO: 811846 - DNA, 25 bp, Homo sapien
caacgcaaaactgtgtaagtccact

SEQ ID NO: 811847 - DNA, 25 bp, Homo sapien
aacgcaaaactgtgtaagtccacta

SEQ ID NO: 811848 - DNA, 25 bp, Homo sapien
ccagatcctgcccaatagtggtgat

SEQ ID NO: 811849 - DNA, 25 bp, Homo sapien
tagtggtgatgccagaaatttgcac

SEQ ID NO: 811850 - DNA, 25 bp, Homo sapien
aatgcccttgtaagaatcatcccag

SEQ ID NO: 811851 - DNA, 25 bp, Homo sapien
taatcccttgaaagtaccgctggca

SEQ ID NO: 811852 - DNA, 25 bp, Homo sapien
cagtgctctgggggcgatatcagct

SEQ ID NO: 811853 - DNA, 25 bp, Homo sapien
tctgggggcgatatcagctgtgtca

SEQ ID NO: 811854 - DNA, 25 bp, Homo sapien
tgctctgggggcgatatcagctgtg

SEQ ID NO: 811855 - DNA, 25 bp, Homo sapien
catcagtgctctgggggcgatatca

SEQ ID NO: 811856 - DNA, 25 bp, Homo sapien
tctgagcgacaccatgagcttagca

SEQ ID NO: 811857 - DNA, 25 bp, Homo sapien
aaatggttccgttattagtggctgc

SEQ ID NO: 811858 - DNA, 25 bp, Homo sapien
tgctgtgggaccacgacagtctgtg

SEQ ID NO: 811859 - DNA, 25 bp, Homo sapien
agtgagtggagacttttcaccttct

SEQ ID NO: 811860 - DNA, 25 bp, Homo sapien
gttccctgctgctgatactcaggtt

SEQ ID NO: 811861 - DNA, 25 bp, Homo sapien
ttccctgctgctgatactcaggttc

SEQ ID NO: 811862 - DNA, 25 bp, Homo sapien
ggttccctgctgctgatactcaggt

SEQ ID NO: 811863 - DNA, 25 bp, Homo sapien
tgaatgtggagtcccagtctaatgg

SEQ ID NO: 811864 - DNA, 25 bp, Homo sapien
agtaagtagcgcgttcatcagcata

SEQ ID NO: 811865 - DNA, 25 bp, Homo sapien
agcgcgttcatcagcataatgaatg

SEQ ID NO: 811866 - DNA, 25 bp, Homo sapien
tcccagtctaatggtccgggagaac

SEQ ID NO: 811867 - DNA, 25 bp, Homo sapien
gagtctgccgctcttggaatttgca

SEQ ID NO: 811868 - DNA, 25 bp, Homo sapien
agtctgccgctcttggaatttgcat

SEQ ID NO: 811869 - DNA, 25 bp, Homo sapien
ctctgagtctgccgctcttggaatt

SEQ ID NO: 811870 - DNA, 25 bp, Homo sapien
ctgagtctgccgctcttggaatttg

SEQ ID NO: 811871 - DNA, 25 bp, Homo sapien
tagcatcagattaagttggcagcct

SEQ ID NO: 811872 - DNA, 25 bp, Homo sapien
tgtttacagtcgtcgtagcatcaga

SEQ ID NO: 811873 - DNA, 25 bp, Homo sapien
tctccacttagagaaacggcggtgt

SEQ ID NO: 811874 - DNA, 25 bp, Homo sapien
tccgtgctaatgtggatcgcttcag

SEQ ID NO: 811875 - DNA, 25 bp, Homo sapien
gcaccgtgcagaataccgtatcacg

SEQ ID NO: 811876 - DNA, 25 bp, Homo sapien
gtgcagaataccgtatcacgttgct

SEQ ID NO: 811877 - DNA, 25 bp, Homo sapien
ctgtgcaccgtgcagaataccgtat

SEQ ID NO: 811878 - DNA, 25 bp, Homo sapien
ccgtgcagaataccgtatcacgttg

SEQ ID NO: 811879 - DNA, 25 bp, Homo sapien
taacaagtgcgtgtagtcaaaacag

SEQ ID NO: 811880 - DNA, 25 bp, Homo sapien
gaacttctggtgtccaactggtagg

SEQ ID NO: 811881 - DNA, 25 bp, Homo sapien
caagcgcggatagctggtattgact

SEQ ID NO: 811882 - DNA, 25 bp, Homo sapien
aaaacagttggcgtgtgcaagcgcg

SEQ ID NO: 811883 - DNA, 25 bp, Homo sapien
gaagtgtgacaggcagatttataag

SEQ ID NO: 811884 - DNA, 25 bp, Homo sapien
tgcattctacattcaatatctttga

SEQ ID NO: 811885 - DNA, 25 bp, Homo sapien
ggcagaacgttctgtaacttcctaa

SEQ ID NO: 811886 - DNA, 25 bp, Homo sapien
cattcaatatctttgatcttggccc

SEQ ID NO: 811887 - DNA, 25 bp, Homo sapien
tgcagagcatttccagtcaacagga

SEQ ID NO: 811888 - DNA, 25 bp, Homo sapien
acttccctgaccttcgggtgtatgt

SEQ ID NO: 811889 - DNA, 25 bp, Homo sapien
cattagtcttcatgaccttcataac

SEQ ID NO: 811890 - DNA, 25 bp, Homo sapien
cataacagtcaacgtgaagtccacc

SEQ ID NO: 811891 - DNA, 25 bp, Homo sapien
tggtttggccacataggcctcttgg

SEQ ID NO: 811892 - DNA, 25 bp, Homo sapien
cagttgccagcgtaaaaggttgtaa

SEQ ID NO: 811893 - DNA, 25 bp, Homo sapien
gttctctctggtaggacacagttgc

SEQ ID NO: 811894 - DNA, 25 bp, Homo sapien
taaaagatagatgtggtgagggtca

SEQ ID NO: 811895 - DNA, 25 bp, Homo sapien
tggatcgagctatagctctgctcag

SEQ ID NO: 811896 - DNA, 25 bp, Homo sapien
gctatagctctgctcaggtcatttg

SEQ ID NO: 811897 - DNA, 25 bp, Homo sapien
ccacagttggatcgagctatagctc

SEQ ID NO: 811898 - DNA, 25 bp, Homo sapien
cgagctatagctctgctcaggtcat

SEQ ID NO: 811899 - DNA, 25 bp, Homo sapien
cagaatcgatgactttcttggcttc

SEQ ID NO: 811900 - DNA, 25 bp, Homo sapien
gctgttggagctgtccagaatcgat

SEQ ID NO: 811901 - DNA, 25 bp, Homo sapien
actagaaactttaagctgttggagc

SEQ ID NO: 811902 - DNA, 25 bp, Homo sapien
ggcttctttggtatgccctgcatac

SEQ ID NO: 811903 - DNA, 25 bp, Homo sapien
caattaggacgctccagtcacagca

SEQ ID NO: 811904 - DNA, 25 bp, Homo sapien
tggtgccaattaggacgctccagtc

SEQ ID NO: 811905 - DNA, 25 bp, Homo sapien
gcctgctggtgccaattaggacgct

SEQ ID NO: 811906 - DNA, 25 bp, Homo sapien
tgctggtgccaattaggacgctcca

SEQ ID NO: 811907 - DNA, 25 bp, Homo sapien
tggttttgtttttctgggccagcat

SEQ ID NO: 811908 - DNA, 25 bp, Homo sapien
ttggttttgtttttctgggccagca

SEQ ID NO: 811909 - DNA, 25 bp, Homo sapien
gatttgtatgggtggtgttttctta

SEQ ID NO: 811910 - DNA, 25 bp, Homo sapien
atttgtatgggtggtgttttcttat

SEQ ID NO: 811911 - DNA, 25 bp, Homo sapien
ttgtatgggtggtgttttcttattg

SEQ ID NO: 811912 - DNA, 25 bp, Homo sapien
tgtatgggtggtgttttcttattgt

SEQ ID NO: 811913 - DNA, 25 bp, Homo sapien
ctatagctgattaactgggaaggtg

SEQ ID NO: 811914 - DNA, 25 bp, Homo sapien
gttggacagtgcccacgtgcacttt

SEQ ID NO: 811915 - DNA, 25 bp, Homo sapien
tagcatagctacaggactcgatcca

SEQ ID NO: 811916 - DNA, 25 bp, Homo sapien
tcgatccaaggtgccgctctatcat

SEQ ID NO: 811917 - DNA, 25 bp, Homo sapien
gccacattttttgctcctgccgtca

SEQ ID NO: 811918 - DNA, 25 bp, Homo sapien
tgattagtaacctgggttggcccca

SEQ ID NO: 811919 - DNA, 25 bp, Homo sapien
catgcctccatcagttgtcaccctt

SEQ ID NO: 811920 - DNA, 25 bp, Homo sapien
caagccgaaggtggttccatgcctc

SEQ ID NO: 811921 - DNA, 25 bp, Homo sapien
caaaaatagtaaagccagcctgggc

SEQ ID NO: 811922 - DNA, 25 bp, Homo sapien
taccaaaaatagtaaagccagcctg

SEQ ID NO: 811923 - DNA, 25 bp, Homo sapien
ggcaatgtaatgagatctcatctct

SEQ ID NO: 811924 - DNA, 25 bp, Homo sapien
aacactgcactgctgtctgagcaac

SEQ ID NO: 811925 - DNA, 25 bp, Homo sapien
ctgtgagtccagtcagggaccccgt

SEQ ID NO: 811926 - DNA, 25 bp, Homo sapien
catgatggccatgaacagagtcaga

SEQ ID NO: 811927 - DNA, 25 bp, Homo sapien
tccagtcagggaccccgtgttctgg

SEQ ID NO: 811928 - DNA, 25 bp, Homo sapien
cttcacacccggcagcaacatttgg

SEQ ID NO: 811929 - DNA, 25 bp, Homo sapien
tctcaaaggagtttggtctgagaga

SEQ ID NO: 811930 - DNA, 25 bp, Homo sapien
ttctcaaaggagtttggtctgagag

SEQ ID NO: 811931 - DNA, 25 bp, Homo sapien
ccaatccatgcactggggaatgttg

SEQ ID NO: 811932 - DNA, 25 bp, Homo sapien
ctgccaatccatgcactggggaatg

SEQ ID NO: 811933 - DNA, 25 bp, Homo sapien
tggggaatgttgtagactacaccat

SEQ ID NO: 811934 - DNA, 25 bp, Homo sapien
actggggaatgttgtagactacacc

SEQ ID NO: 811935 - DNA, 25 bp, Homo sapien
ctgaggaaaggactgtagttgggtt

SEQ ID NO: 811936 - DNA, 25 bp, Homo sapien
tgagtgatggcagattggcctcgcc

SEQ ID NO: 811937 - DNA, 25 bp, Homo sapien
tgatggcagattggcctcgccagct

SEQ ID NO: 811938 - DNA, 25 bp, Homo sapien
cccgggctctgaggcccactgagag

SEQ ID NO: 811939 - DNA, 25 bp, Homo sapien
ggaatttctgagtgatggcagattg

SEQ ID NO: 811940 - DNA, 25 bp, Homo sapien
taattttatacccaaggcagcacat

SEQ ID NO: 811941 - DNA, 25 bp, Homo sapien
agctccacgctgttgttactccttc

SEQ ID NO: 811942 - DNA, 25 bp, Homo sapien
gcttacgagctttgagcaggaacct

SEQ ID NO: 811943 - DNA, 25 bp, Homo sapien
aatttggggttagctatgacatcac

SEQ ID NO: 811944 - DNA, 25 bp, Homo sapien
ttccagctttcccaaccagtgtccc

SEQ ID NO: 811945 - DNA, 25 bp, Homo sapien
tccttatgggttggacaggtcagca

SEQ ID NO: 811946 - DNA, 25 bp, Homo sapien
gatcagctgccccttgggttcctta

SEQ ID NO: 811947 - DNA, 25 bp, Homo sapien
gtccctttgttgtagtttcacatgt

SEQ ID NO: 811948 - DNA, 25 bp, Homo sapien
gcattttcaccacggaggcatcgta

SEQ ID NO: 811949 - DNA, 25 bp, Homo sapien
ccacggaggcatcgtactgatactt

SEQ ID NO: 811950 - DNA, 25 bp, Homo sapien
tccacacgggctgaaaaatcattct

SEQ ID NO: 811951 - DNA, 25 bp, Homo sapien
gaaaaatcattcttcgactgcattt

SEQ ID NO: 811952 - DNA, 25 bp, Homo sapien
aattcctccacccatgtctgaattg

SEQ ID NO: 811953 - DNA, 25 bp, Homo sapien
ttcctccacccatgtctgaattgct

SEQ ID NO: 811954 - DNA, 25 bp, Homo sapien
tggccgatccatcacccctctcttc

SEQ ID NO: 811955 - DNA, 25 bp, Homo sapien
ttccagctggccgatccatcacccc

SEQ ID NO: 811956 - DNA, 25 bp, Homo sapien
tggcacagggaaccttggagagctc

SEQ ID NO: 811957 - DNA, 25 bp, Homo sapien
tgtggccacctcctaggctgctgca

SEQ ID NO: 811958 - DNA, 25 bp, Homo sapien
tgtaacattcagcatagtcacggac

SEQ ID NO: 811959 - DNA, 25 bp, Homo sapien
gaaaggaagctgtgccgcatttggc

SEQ ID NO: 811960 - DNA, 25 bp, Homo sapien
aaggggatcggttgcacctgccact

SEQ ID NO: 811961 - DNA, 25 bp, Homo sapien
cgtggccatgcagtgtgaagtaggg

SEQ ID NO: 811962 - DNA, 25 bp, Homo sapien
cagagagtaagaccgggactccagg

SEQ ID NO: 811963 - DNA, 25 bp, Homo sapien
aacaggcccagcatcgtcccaaagg

SEQ ID NO: 811964 - DNA, 25 bp, Homo sapien
gtaagtgcccagaatacagccaaca

SEQ ID NO: 811965 - DNA, 25 bp, Homo sapien
aagtgcccagaatacagccaacagt

SEQ ID NO: 811966 - DNA, 25 bp, Homo sapien
aggcagtaagtgcccagaatacagc

SEQ ID NO: 811967 - DNA, 25 bp, Homo sapien
cagtaagtgcccagaatacagccaa

SEQ ID NO: 811968 - DNA, 25 bp, Homo sapien
tgcaaattcgtgagcacactctggt

SEQ ID NO: 811969 - DNA, 25 bp, Homo sapien
gaagtgtggacaagcttccattcac

SEQ ID NO: 811970 - DNA, 25 bp, Homo sapien
gaaagatctcagaggactggcattg

SEQ ID NO: 811971 - DNA, 25 bp, Homo sapien
gagagcagccaagccatagagaagc

SEQ ID NO: 811972 - DNA, 25 bp, Homo sapien
ggctgcagttttacgccgaatgcca

SEQ ID NO: 811973 - DNA, 25 bp, Homo sapien
tgcaagtcctgctaaaggctgcagt

SEQ ID NO: 811974 - DNA, 25 bp, Homo sapien
cagtgcacgtgtttctggtgaagcc

SEQ ID NO: 811975 - DNA, 25 bp, Homo sapien
tggtgaagcctgcacaaagcacttg

SEQ ID NO: 811976 - DNA, 25 bp, Homo sapien
tggtgtgtccttgccatacaggctg

SEQ ID NO: 811977 - DNA, 25 bp, Homo sapien
cactggtgtgtccttgccatacagg

SEQ ID NO: 811978 - DNA, 25 bp, Homo sapien
tgtgtccttgccatacaggctgctc

SEQ ID NO: 811979 - DNA, 25 bp, Homo sapien
tgtccttgccatacaggctgctcca

SEQ ID NO: 811980 - DNA, 25 bp, Homo sapien
acatggctgcttgaaagagaatgac

SEQ ID NO: 811981 - DNA, 25 bp, Homo sapien
ctggagggctctcgctgtaacgtga

SEQ ID NO: 811982 - DNA, 25 bp, Homo sapien
actctgttgagacgcagttggaaag

SEQ ID NO: 811983 - DNA, 25 bp, Homo sapien
gctgtaacgtgacccctggcttctg

SEQ ID NO: 811984 - DNA, 25 bp, Homo sapien
tgagcctagtggttgagtgtaacct

SEQ ID NO: 811985 - DNA, 25 bp, Homo sapien
ggcgtgtgagcctagtggttgagtg

SEQ ID NO: 811986 - DNA, 25 bp, Homo sapien
tgtgagcctagtggttgagtgtaac

SEQ ID NO: 811987 - DNA, 25 bp, Homo sapien
agcctagtggttgagtgtaacctct

SEQ ID NO: 811988 - DNA, 25 bp, Homo sapien
agtcccagttccactctgcaggcat

SEQ ID NO: 811989 - DNA, 25 bp, Homo sapien
cttgggagtcccagttccactctgc

SEQ ID NO: 811990 - DNA, 25 bp, Homo sapien
gggagtcccagttccactctgcagg

SEQ ID NO: 811991 - DNA, 25 bp, Homo sapien
gagtcccagttccactctgcaggca

SEQ ID NO: 811992 - DNA, 25 bp, Homo sapien
agagagtgcaaagcagaggttagaa

SEQ ID NO: 811993 - DNA, 25 bp, Homo sapien
tttatcaagacccagagagtgcaaa

SEQ ID NO: 811994 - DNA, 25 bp, Homo sapien
cctagtgctctgtaccaaatgaccc

SEQ ID NO: 811995 - DNA, 25 bp, Homo sapien
agaaactgtcagctggtaccaccag

SEQ ID NO: 811996 - DNA, 25 bp, Homo sapien
tagtgctctgtaccaaatgaccctc

SEQ ID NO: 811997 - DNA, 25 bp, Homo sapien
ctagtgctctgtaccaaatgaccct

SEQ ID NO: 811998 - DNA, 25 bp, Homo sapien
ggtgctgccccaaggaaatggtgca

SEQ ID NO: 811999 - DNA, 25 bp, Homo sapien
tacattccaattcacctttcccaag

SEQ ID NO: 812000 - DNA, 25 bp, Homo sapien
aaaaaggagggctgcggccaagcac

SEQ ID NO: 812001 - DNA, 25 bp, Homo sapien
cagtaaaaccttacattccaattca

SEQ ID NO: 812002 - DNA, 25 bp, Homo sapien
tctatctcgtagtgtgcagtgcctg

SEQ ID NO: 812003 - DNA, 25 bp, Homo sapien
gtaaccaggtcgtcaagccacaggt

SEQ ID NO: 812004 - DNA, 25 bp, Homo sapien
agggtctcgccatgtcttgtctcag

SEQ ID NO: 812005 - DNA, 25 bp, Homo sapien
caggttttccagtcgcactgcggta

SEQ ID NO: 812006 - DNA, 25 bp, Homo sapien
cagatatgcacttatttggccatta

SEQ ID NO: 812007 - DNA, 25 bp, Homo sapien
ccacagatatgcacttatttggcca

SEQ ID NO: 812008 - DNA, 25 bp, Homo sapien
cacagatatgcacttatttggccat

SEQ ID NO: 812009 - DNA, 25 bp, Homo sapien
ccccacagatatgcacttatttggc

SEQ ID NO: 812010 - DNA, 25 bp, Homo sapien
tgccagtgttcatggctgccctctc

SEQ ID NO: 812011 - DNA, 25 bp, Homo sapien
tggctgccctctcaaagccagtcag

SEQ ID NO: 812012 - DNA, 25 bp, Homo sapien
gtgttcatggctgccctctcaaagc

SEQ ID NO: 812013 - DNA, 25 bp, Homo sapien
cagtgttcatggctgccctctcaaa

SEQ ID NO: 812014 - DNA, 25 bp, Homo sapien
tccgctcactgacataacagatgtg

SEQ ID NO: 812015 - DNA, 25 bp, Homo sapien
cttccgctcactgacataacagatg

SEQ ID NO: 812016 - DNA, 25 bp, Homo sapien
ctcactgacataacagatgtgtgtg

SEQ ID NO: 812017 - DNA, 25 bp, Homo sapien
cgctcactgacataacagatgtgtg

SEQ ID NO: 812018 - DNA, 25 bp, Homo sapien
cagtctctaaggagccgaaccttta

SEQ ID NO: 812019 - DNA, 25 bp, Homo sapien
gccacagtctctaaggagccgaacc

SEQ ID NO: 812020 - DNA, 25 bp, Homo sapien
cacagtctctaaggagccgaacctt

SEQ ID NO: 812021 - DNA, 25 bp, Homo sapien
gtggccacagtctctaaggagccga

SEQ ID NO: 812022 - DNA, 25 bp, Homo sapien
ggctgtccgactgccttcaaagtag

SEQ ID NO: 812023 - DNA, 25 bp, Homo sapien
cactgattgccaataggctgtccga

SEQ ID NO: 812024 - DNA, 25 bp, Homo sapien
tagcgactgaggtagtttcacaacc

SEQ ID NO: 812025 - DNA, 25 bp, Homo sapien
tctctatggtgagcgtagatatcac

SEQ ID NO: 812026 - DNA, 25 bp, Homo sapien
tgtagtaatagcttgacagctgagg

SEQ ID NO: 812027 - DNA, 25 bp, Homo sapien
catgttctggatgacatttgtagta

SEQ ID NO: 812028 - DNA, 25 bp, Homo sapien
tgctgcgatgcagtcccactggcaa

SEQ ID NO: 812029 - DNA, 25 bp, Homo sapien
ttcatgtggtctccatcacatgttc

SEQ ID NO: 812030 - DNA, 25 bp, Homo sapien
ccacagcactaagggccctggcaag

SEQ ID NO: 812031 - DNA, 25 bp, Homo sapien
agcactaagggccctggcaagttct

SEQ ID NO: 812032 - DNA, 25 bp, Homo sapien
actaagggccctggcaagttctcgc

SEQ ID NO: 812033 - DNA, 25 bp, Homo sapien
caccccacagcactaagggccctgg

SEQ ID NO: 812034 - DNA, 25 bp, Homo sapien
tggactgcagatcagtttctcacac

SEQ ID NO: 812035 - DNA, 25 bp, Homo sapien
ggactgcagatcagtttctcacact

SEQ ID NO: 812036 - DNA, 25 bp, Homo sapien
ttggactgcagatcagtttctcaca

SEQ ID NO: 812037 - DNA, 25 bp, Homo sapien
tcttgttatttattggtgttcccca

SEQ ID NO: 812038 - DNA, 25 bp, Homo sapien
caacactgtttcacagggagactgt

SEQ ID NO: 812039 - DNA, 25 bp, Homo sapien
aattctagccttaaccctgttgtca

SEQ ID NO: 812040 - DNA, 25 bp, Homo sapien
gtcagacaacactgtttcacaggga

SEQ ID NO: 812041 - DNA, 25 bp, Homo sapien
cacaagtaagcagttttcagaacgt

SEQ ID NO: 812042 - DNA, 25 bp, Homo sapien
tgactctcagatggtcttgcacctg

SEQ ID NO: 812043 - DNA, 25 bp, Homo sapien
ggttcttcaggcacaagtaagcagt

SEQ ID NO: 812044 - DNA, 25 bp, Homo sapien
cctcttcgctccataatacctggtt

SEQ ID NO: 812045 - DNA, 25 bp, Homo sapien
ggccaggaacaggtatggtgaaggt

SEQ ID NO: 812046 - DNA, 25 bp, Homo sapien
actggggcctccacttgggccagga

SEQ ID NO: 812047 - DNA, 25 bp, Homo sapien
tgggccaggaacaggtatggtgaag

SEQ ID NO: 812048 - DNA, 25 bp, Homo sapien
ccaggaacaggtatggtgaaggtgg

SEQ ID NO: 812049 - DNA, 25 bp, Homo sapien
gagcattccagctcccagctggagg

SEQ ID NO: 812050 - DNA, 25 bp, Homo sapien
agctcccagctggaggtgagacagc

SEQ ID NO: 812051 - DNA, 25 bp, Homo sapien
cagctcccagctggaggtgagacag

SEQ ID NO: 812052 - DNA, 25 bp, Homo sapien
cttccagagcattccagctcccagc

SEQ ID NO: 812053 - DNA, 25 bp, Homo sapien
gttcttggcttgtcctgcataggaa

SEQ ID NO: 812054 - DNA, 25 bp, Homo sapien
tggcttgtcctgcataggaacgaac

SEQ ID NO: 812055 - DNA, 25 bp, Homo sapien
tcttggcttgtcctgcataggaacg

SEQ ID NO: 812056 - DNA, 25 bp, Homo sapien
ttggcttgtcctgcataggaacgaa

SEQ ID NO: 812057 - DNA, 25 bp, Homo sapien
tggcctcgaccatcaagcaccagga

SEQ ID NO: 812058 - DNA, 25 bp, Homo sapien
ttagccacgatggccgccaggcggc

SEQ ID NO: 812059 - DNA, 25 bp, Homo sapien
gagatggcctcgaccatcaagcacc

SEQ ID NO: 812060 - DNA, 25 bp, Homo sapien
cgaccatcaagcaccaggacctgcc

SEQ ID NO: 812061 - DNA, 25 bp, Homo sapien
ggccagaaatgatgatgccctcaca

SEQ ID NO: 812062 - DNA, 25 bp, Homo sapien
atgatgccctcacagcgtacgacct

SEQ ID NO: 812063 - DNA, 25 bp, Homo sapien
aaatggccagaaatgatgatgccct

SEQ ID NO: 812064 - DNA, 25 bp, Homo sapien
tggccagaaatgatgatgccctcac

SEQ ID NO: 812065 - DNA, 25 bp, Homo sapien
ggtgcggctagaggcccggaagtgg

SEQ ID NO: 812066 - DNA, 25 bp, Homo sapien
cgaggtcagccggaaggtgcggcta

SEQ ID NO: 812067 - DNA, 25 bp, Homo sapien
cggaaggtgcggctagaggcccgga

SEQ ID NO: 812068 - DNA, 25 bp, Homo sapien
tcagccggaaggtgcggctagaggc

SEQ ID NO: 812069 - DNA, 25 bp, Homo sapien
cgctccagggcggcccggccttgct

SEQ ID NO: 812070 - DNA, 25 bp, Homo sapien
tccagggcggcccggccttgctttg

SEQ ID NO: 812071 - DNA, 25 bp, Homo sapien
accttgaggcgctccagggcggccc

SEQ ID NO: 812072 - DNA, 25 bp, Homo sapien
ttgaggcgctccagggcggcccggc

SEQ ID NO: 812073 - DNA, 25 bp, Homo sapien
atccgctttttcatgtcatagggcg

SEQ ID NO: 812074 - DNA, 25 bp, Homo sapien
cgctttttcatgtcatagggcggtg

SEQ ID NO: 812075 - DNA, 25 bp, Homo sapien
accatccgctttttcatgtcatagg

SEQ ID NO: 812076 - DNA, 25 bp, Homo sapien
ccatccgctttttcatgtcataggg

SEQ ID NO: 812077 - DNA, 25 bp, Homo sapien
agccaggcgccccacgtaggcaaag

SEQ ID NO: 812078 - DNA, 25 bp, Homo sapien
cgccccacgtaggcaaagtttcttg

SEQ ID NO: 812079 - DNA, 25 bp, Homo sapien
tcgtgagccaggcgccccacgtagg

SEQ ID NO: 812080 - DNA, 25 bp, Homo sapien
ccacgtaggcaaagtttcttgtagg

SEQ ID NO: 812081 - DNA, 25 bp, Homo sapien
gatcaggagtccatgggtcttgaga

SEQ ID NO: 812082 - DNA, 25 bp, Homo sapien
ttttcacccggtttccatagcctca

SEQ ID NO: 812083 - DNA, 25 bp, Homo sapien
ctcttctccttcagggtagatgcca

SEQ ID NO: 812084 - DNA, 25 bp, Homo sapien
cttgagagcttctgtgtatttgtca

SEQ ID NO: 812085 - DNA, 25 bp, Homo sapien
tatcagcaggactctgcttggttct

SEQ ID NO: 812086 - DNA, 25 bp, Homo sapien
catatcagcaggactctgcttggtt

SEQ ID NO: 812087 - DNA, 25 bp, Homo sapien
atatcagcaggactctgcttggttc

SEQ ID NO: 812088 - DNA, 25 bp, Homo sapien
ctatggacaactccacgccttgggc

SEQ ID NO: 812089 - DNA, 25 bp, Homo sapien
ggttcaagatcttctatggacaact

SEQ ID NO: 812090 - DNA, 25 bp, Homo sapien
tggacaactccacgccttgggcttc

SEQ ID NO: 812091 - DNA, 25 bp, Homo sapien
tttccaagatgctgtgtgtgcctgg

SEQ ID NO: 812092 - DNA, 25 bp, Homo sapien
ttttgataatgcatgctgaaatcta

SEQ ID NO: 812093 - DNA, 25 bp, Homo sapien
tgattttggttacgttgaagatggg

SEQ ID NO: 812094 - DNA, 25 bp, Homo sapien
agtgtggatcttctcaatgagtgta

SEQ ID NO: 812095 - DNA, 25 bp, Homo sapien
ctcaatgagtgtatatttgtgggtg

SEQ ID NO: 812096 - DNA, 25 bp, Homo sapien
taaacaactcttctagtcacaggta

SEQ ID NO: 812097 - DNA, 25 bp, Homo sapien
gtttgaaggatagaatcattttcca

SEQ ID NO: 812098 - DNA, 25 bp, Homo sapien
gggaattaaacaactcttctagtca

SEQ ID NO: 812099 - DNA, 25 bp, Homo sapien
attaaacaactcttctagtcacagg

SEQ ID NO: 812100 - DNA, 25 bp, Homo sapien
aggcactgtcctaatctccctttcc

SEQ ID NO: 812101 - DNA, 25 bp, Homo sapien
gcaggaatgttggttctagctgcct

SEQ ID NO: 812102 - DNA, 25 bp, Homo sapien
tgctctgcagaagtgaaacactctt

SEQ ID NO: 812103 - DNA, 25 bp, Homo sapien
aagtgcaggtcccatggaaggccac

SEQ ID NO: 812104 - DNA, 25 bp, Homo sapien
cccagaatgaactgagatacttcca

SEQ ID NO: 812105 - DNA, 25 bp, Homo sapien
cagagccctctgtataaaacgcaaa

SEQ ID NO: 812106 - DNA, 25 bp, Homo sapien
aagaggaactgttgtggttgaagaa

SEQ ID NO: 812107 - DNA, 25 bp, Homo sapien
ggcagatgcccccagaatgaactga

SEQ ID NO: 812108 - DNA, 25 bp, Homo sapien
ggctttctcctggttagtgcctggt

SEQ ID NO: 812109 - DNA, 25 bp, Homo sapien
ccaatccagctttactgtctccagc

SEQ ID NO: 812110 - DNA, 25 bp, Homo sapien
agcccccgttctctaggaccttcat

SEQ ID NO: 812111 - DNA, 25 bp, Homo sapien
tcctcttcgccacagcagcaggcta

SEQ ID NO: 812112 - DNA, 25 bp, Homo sapien
ctcttcgccacagcagcaggctatc

SEQ ID NO: 812113 - DNA, 25 bp, Homo sapien
agcaggctatccaagcccccgttct

SEQ ID NO: 812114 - DNA, 25 bp, Homo sapien
ctctctggcccagcatttgacagct

SEQ ID NO: 812115 - DNA, 25 bp, Homo sapien
tctgtagacagaatcaagtgggaag

SEQ ID NO: 812116 - DNA, 25 bp, Homo sapien
tctggccctggagccgttggagatg

SEQ ID NO: 812117 - DNA, 25 bp, Homo sapien
ttttgtatttagaaggcggtctgta

SEQ ID NO: 812118 - DNA, 25 bp, Homo sapien
gatgtggcacctttcagccagtcgg

SEQ ID NO: 812119 - DNA, 25 bp, Homo sapien
tcggtgcttagaccgccgcgtgtcc

SEQ ID NO: 812120 - DNA, 25 bp, Homo sapien
gatgtttaaatcgatgtggcacctt

SEQ ID NO: 812121 - DNA, 25 bp, Homo sapien
ggctgccgcggccttatagggaaaa

SEQ ID NO: 812122 - DNA, 25 bp, Homo sapien
aggtggtcccaccagttgcattttg

SEQ ID NO: 812123 - DNA, 25 bp, Homo sapien
gtcccaccagttgcattttgcaggg

SEQ ID NO: 812124 - DNA, 25 bp, Homo sapien
gtggtcccaccagttgcattttgca

SEQ ID NO: 812125 - DNA, 25 bp, Homo sapien
tggtcccaccagttgcattttgcag

SEQ ID NO: 812126 - DNA, 25 bp, Homo sapien
ttttgtgagcatctgtctcgagccg

SEQ ID NO: 812127 - DNA, 25 bp, Homo sapien
tgtgagcatctgtctcgagccgttc

SEQ ID NO: 812128 - DNA, 25 bp, Homo sapien
gagcatctgtctcgagccgttcagc

SEQ ID NO: 812129 - DNA, 25 bp, Homo sapien
gcccctgacagacgctcagcagcct

SEQ ID NO: 812130 - DNA, 25 bp, Homo sapien
gcacagtatttagcctgggtctggt

SEQ ID NO: 812131 - DNA, 25 bp, Homo sapien
gaagtcatgatgagtgatgctctgc

SEQ ID NO: 812132 - DNA, 25 bp, Homo sapien
ccactgaagttaaatgggaagtcat

SEQ ID NO: 812133 - DNA, 25 bp, Homo sapien
tgctgactgcgtagaaagtgaccag

SEQ ID NO: 812134 - DNA, 25 bp, Homo sapien
tacccactggtttcagctcctagag

SEQ ID NO: 812135 - DNA, 25 bp, Homo sapien
tttcagaacgacatctacccactgg

SEQ ID NO: 812136 - DNA, 25 bp, Homo sapien
ggctgcctgcaaaactttcggtcct

SEQ ID NO: 812137 - DNA, 25 bp, Homo sapien
agcggcaactctgcgggaaagacca

SEQ ID NO: 812138 - DNA, 25 bp, Homo sapien
aaatctttggcaatttccaagatgc

SEQ ID NO: 812139 - DNA, 25 bp, Homo sapien
cattacaaatctttggcaatttcca

SEQ ID NO: 812140 - DNA, 25 bp, Homo sapien
ttggcaatttccaagatgcagagca

SEQ ID NO: 812141 - DNA, 25 bp, Homo sapien
ctttggcaatttccaagatgcagag

SEQ ID NO: 812142 - DNA, 25 bp, Homo sapien
tacaactgaaacaagctggagatga

SEQ ID NO: 812143 - DNA, 25 bp, Homo sapien
tgaacactctaaaagaaaggtaggc

SEQ ID NO: 812144 - DNA, 25 bp, Homo sapien
gaaatacaaatcatcaataagcaga

SEQ ID NO: 812145 - DNA, 25 bp, Homo sapien
cagcacctatgaggccatgaggaaa

SEQ ID NO: 812146 - DNA, 25 bp, Homo sapien
ccacaggctatataaaaaggtatgt

SEQ ID NO: 812147 - DNA, 25 bp, Homo sapien
gtttgcaaatccttataatagtgaa

SEQ ID NO: 812148 - DNA, 25 bp, Homo sapien
tagtgaaaatggaaacggtatgcat

SEQ ID NO: 812149 - DNA, 25 bp, Homo sapien
aaggtatgtagaacaattgtttgca

SEQ ID NO: 812150 - DNA, 25 bp, Homo sapien
ttcactccagaccacgttatggcca

SEQ ID NO: 812151 - DNA, 25 bp, Homo sapien
ttgccactcacttgggttctccttc

SEQ ID NO: 812152 - DNA, 25 bp, Homo sapien
tatggccacggctcaggtactttcc

SEQ ID NO: 812153 - DNA, 25 bp, Homo sapien
tccagaccacgttatggccacggct

SEQ ID NO: 812154 - DNA, 25 bp, Homo sapien
aacaatcttagagaagttgggtggc

SEQ ID NO: 812155 - DNA, 25 bp, Homo sapien
aactcagatctgctcagcttgaaag

SEQ ID NO: 812156 - DNA, 25 bp, Homo sapien
tctctagcgctatatgggtcttcag

SEQ ID NO: 812157 - DNA, 25 bp, Homo sapien
tcttaagcattcagccatactggga

SEQ ID NO: 812158 - DNA, 25 bp, Homo sapien
caccgacagttggtatcatccgatt

SEQ ID NO: 812159 - DNA, 25 bp, Homo sapien
aaattactgggttgtgtaccatgca

SEQ ID NO: 812160 - DNA, 25 bp, Homo sapien
cactgtttctgaggccatgatagca

SEQ ID NO: 812161 - DNA, 25 bp, Homo sapien
tgttgtactgtatcctcaccgacag

SEQ ID NO: 812162 - DNA, 25 bp, Homo sapien
ttataagttaacaatgggactgtag

SEQ ID NO: 812163 - DNA, 25 bp, Homo sapien
tgaacctgcgattcgaaagtgggat

SEQ ID NO: 812164 - DNA, 25 bp, Homo sapien
actgtagagtgaacctgcgattcga

SEQ ID NO: 812165 - DNA, 25 bp, Homo sapien
cgaaagtgggatctcccaaccagca

SEQ ID NO: 812166 - DNA, 25 bp, Homo sapien
tgtaggtgtattaagacttcattcc

SEQ ID NO: 812167 - DNA, 25 bp, Homo sapien
caggacacacctttacaaaaagaag

SEQ ID NO: 812168 - DNA, 25 bp, Homo sapien
ccagttgtaggtgtattaagacttc

SEQ ID NO: 812169 - DNA, 25 bp, Homo sapien
caaatctgaggttcctcaggacaca

SEQ ID NO: 812170 - DNA, 25 bp, Homo sapien
tgtggtttgcccaaggagacacagc

SEQ ID NO: 812171 - DNA, 25 bp, Homo sapien
tgatatgggtcaagtcagtttgcac

SEQ ID NO: 812172 - DNA, 25 bp, Homo sapien
tgatttaattggtctcgggcgcagc

SEQ ID NO: 812173 - DNA, 25 bp, Homo sapien
ggtctgacactggtaaagctgggaa

SEQ ID NO: 812174 - DNA, 25 bp, Homo sapien
ctttcatgcagtttagactgtttct

SEQ ID NO: 812175 - DNA, 25 bp, Homo sapien
catgcagtttagactgtttctcctt

SEQ ID NO: 812176 - DNA, 25 bp, Homo sapien
gtacgagatacagcagtaccaggac

SEQ ID NO: 812177 - DNA, 25 bp, Homo sapien
ggagaaaactgaacttatagtacga

SEQ ID NO: 812178 - DNA, 25 bp, Homo sapien
gttatcactaactcctgatccaaac

SEQ ID NO: 812179 - DNA, 25 bp, Homo sapien
taactcctgatccaaacgtatctct

SEQ ID NO: 812180 - DNA, 25 bp, Homo sapien
cgtatctctccctggcttatgaagt

SEQ ID NO: 812181 - DNA, 25 bp, Homo sapien
tgatccaaacgtatctctccctggc

SEQ ID NO: 812182 - DNA, 25 bp, Homo sapien
caaaaaggattattattgggctcac

SEQ ID NO: 812183 - DNA, 25 bp, Homo sapien
gcatgagcgcaaaaaggattattat

SEQ ID NO: 812184 - DNA, 25 bp, Homo sapien
catctgagcatgagcgcaaaaagga

SEQ ID NO: 812185 - DNA, 25 bp, Homo sapien
aaaaacatctgagcatgagcgcaaa

SEQ ID NO: 812186 - DNA, 25 bp, Homo sapien
ggtacaaagactccttgtccaggca

SEQ ID NO: 812187 - DNA, 25 bp, Homo sapien
atgagttaccccatccctgcgacaa

SEQ ID NO: 812188 - DNA, 25 bp, Homo sapien
taggaccagggtatctttgaaggaa

SEQ ID NO: 812189 - DNA, 25 bp, Homo sapien
cgacaacccaggcaccactagggta

SEQ ID NO: 812190 - DNA, 25 bp, Homo sapien
catgcccttatagacaagactgaat

SEQ ID NO: 812191 - DNA, 25 bp, Homo sapien
aattcccctacaagtgctcaaagac

SEQ ID NO: 812192 - DNA, 25 bp, Homo sapien
gatataatggatcacaaccaacaag

SEQ ID NO: 812193 - DNA, 25 bp, Homo sapien
tgtagcccaggagtattaattgatt

SEQ ID NO: 812194 - DNA, 25 bp, Homo sapien
gcactagggatcctaagatattttc

SEQ ID NO: 812195 - DNA, 25 bp, Homo sapien
actagggatcctaagatattttctg

SEQ ID NO: 812196 - DNA, 25 bp, Homo sapien
gctaagcactagggatcctaagata

SEQ ID NO: 812197 - DNA, 25 bp, Homo sapien
taagcactagggatcctaagatatt

SEQ ID NO: 812198 - DNA, 25 bp, Homo sapien
tagctgcccagatgtgcatatgaaa

SEQ ID NO: 812199 - DNA, 25 bp, Homo sapien
tatgaatcctcctaatcggactgct

SEQ ID NO: 812200 - DNA, 25 bp, Homo sapien
gaaacctacagtggctatagctgcc

SEQ ID NO: 812201 - DNA, 25 bp, Homo sapien
tggctaaggtattcaccaacagggc

SEQ ID NO: 812202 - DNA, 25 bp, Homo sapien
cattctactgtgcacgagtcactgc

SEQ ID NO: 812203 - DNA, 25 bp, Homo sapien
tccagatgggtcaacaccatgctct

SEQ ID NO: 812204 - DNA, 25 bp, Homo sapien
ggctacggctaccatattaaatagg

SEQ ID NO: 812205 - DNA, 25 bp, Homo sapien
catgctctgtgatgtgccccttgaa

SEQ ID NO: 812206 - DNA, 25 bp, Homo sapien
gctctgcagagaatacgtttccttc

SEQ ID NO: 812207 - DNA, 25 bp, Homo sapien
ggtcagaagcccaatacaggtctca

SEQ ID NO: 812208 - DNA, 25 bp, Homo sapien
aaaaggtgtattcatttcccattgc

SEQ ID NO: 812209 - DNA, 25 bp, Homo sapien
tagtcatcctccactgtataaaagg

SEQ ID NO: 812210 - DNA, 25 bp, Homo sapien
gaaaatttgtcagctacccagtggg

SEQ ID NO: 812211 - DNA, 25 bp, Homo sapien
aattccgagtcacaacagtttgagc

SEQ ID NO: 812212 - DNA, 25 bp, Homo sapien
agggatcttcgtggcagtcgttaca

SEQ ID NO: 812213 - DNA, 25 bp, Homo sapien
ggccctgtcctagtataattccgag

SEQ ID NO: 812214 - DNA, 25 bp, Homo sapien
gttatgacatcctatatcgtccttg

SEQ ID NO: 812215 - DNA, 25 bp, Homo sapien
tgttgatgccttaacactgctctga

SEQ ID NO: 812216 - DNA, 25 bp, Homo sapien
tgagaattgattaggcgttatgaca

SEQ ID NO: 812217 - DNA, 25 bp, Homo sapien
taaagtgaaggtacattctctgtcc

SEQ ID NO: 812218 - DNA, 25 bp, Homo sapien
tcctcttggctttccgcagtaacag

SEQ ID NO: 812219 - DNA, 25 bp, Homo sapien
catgtctagcaaaactcagtgagga

SEQ ID NO: 812220 - DNA, 25 bp, Homo sapien
cacttcattggcactttgggtcacc

SEQ ID NO: 812221 - DNA, 25 bp, Homo sapien
gatgcttagggcagtatctctccaa

SEQ ID NO: 812222 - DNA, 25 bp, Homo sapien
tcaggccaagtacagaaacgtttca

SEQ ID NO: 812223 - DNA, 25 bp, Homo sapien
caggtagaccgagtcagatccagca

SEQ ID NO: 812224 - DNA, 25 bp, Homo sapien
tgtctggctgaattcccacttgccc

SEQ ID NO: 812225 - DNA, 25 bp, Homo sapien
tgagctttctcagaccattgcggaa

SEQ ID NO: 812226 - DNA, 25 bp, Homo sapien
cattgcggaaagctcaaattcgcta

SEQ ID NO: 812227 - DNA, 25 bp, Homo sapien
cccaagggcacagtacataggtggc

SEQ ID NO: 812228 - DNA, 25 bp, Homo sapien
cataggtggctttcctgaggtcctc

SEQ ID NO: 812229 - DNA, 25 bp, Homo sapien
acataggtggctttcctgaggtcct

SEQ ID NO: 812230 - DNA, 25 bp, Homo sapien
ctcccaagggcacagtacataggtg

SEQ ID NO: 812231 - DNA, 25 bp, Homo sapien
tggacagtcctgaggaagggcctga

SEQ ID NO: 812232 - DNA, 25 bp, Homo sapien
tcaccatggctggacagtcctgagg

SEQ ID NO: 812233 - DNA, 25 bp, Homo sapien
aggagtggaggtggatggccactac

SEQ ID NO: 812234 - DNA, 25 bp, Homo sapien
ccatggctggacagtcctgaggaag

SEQ ID NO: 812235 - DNA, 25 bp, Homo sapien
ccagctgattccttcttcccccttc

SEQ ID NO: 812236 - DNA, 25 bp, Homo sapien
cagctgattccttcttcccccttct

SEQ ID NO: 812237 - DNA, 25 bp, Homo sapien
gctgattccttcttcccccttctcc

SEQ ID NO: 812238 - DNA, 25 bp, Homo sapien
gccagctgattccttcttccccctt

SEQ ID NO: 812239 - DNA, 25 bp, Homo sapien
ctgccactttgttcaaacatcttca

SEQ ID NO: 812240 - DNA, 25 bp, Homo sapien
tctgccactttgttcaaacatcttc

SEQ ID NO: 812241 - DNA, 25 bp, Homo sapien
tgccactttgttcaaacatcttcat

SEQ ID NO: 812242 - DNA, 25 bp, Homo sapien
gaagtactgtgcaatggctgggctc

SEQ ID NO: 812243 - DNA, 25 bp, Homo sapien
tccacgagcattggtgggctggcct

SEQ ID NO: 812244 - DNA, 25 bp, Homo sapien
tgttcatggtccgtttgttcaggac

SEQ ID NO: 812245 - DNA, 25 bp, Homo sapien
tattacagccttaagatgagacaca

SEQ ID NO: 812246 - DNA, 25 bp, Homo sapien
ccagccccgaggttgtttctgccat

SEQ ID NO: 812247 - DNA, 25 bp, Homo sapien
attgccgcgggctgctgcccatgtg

SEQ ID NO: 812248 - DNA, 25 bp, Homo sapien
tggaattcattgtgggtgttttctc

SEQ ID NO: 812249 - DNA, 25 bp, Homo sapien
catctccctccgaaagcacctagtc

SEQ ID NO: 812250 - DNA, 25 bp, Homo sapien
cctggcaagggctgaaacatagtag

SEQ ID NO: 812251 - DNA, 25 bp, Homo sapien
ccctggcaagggctgaaacatagta

SEQ ID NO: 812252 - DNA, 25 bp, Homo sapien
ctggcaagggctgaaacatagtagg

SEQ ID NO: 812253 - DNA, 25 bp, Homo sapien
gaccctggcaagggctgaaacatag

SEQ ID NO: 812254 - DNA, 25 bp, Homo sapien
atgatggtctcggtcgccctgtagc

SEQ ID NO: 812255 - DNA, 25 bp, Homo sapien
gacgtgcgtagtccacccatgatgg

SEQ ID NO: 812256 - DNA, 25 bp, Homo sapien
tcaaaagagaaaaccgagacacgga

SEQ ID NO: 812257 - DNA, 25 bp, Homo sapien
gacacggagaccacactaagagctg

SEQ ID NO: 812258 - DNA, 25 bp, Homo sapien
tcacaactgtgcgtgcttccagcac

SEQ ID NO: 812259 - DNA, 25 bp, Homo sapien
gccacagcctgaatcccgtctcaca

SEQ ID NO: 812260 - DNA, 25 bp, Homo sapien
atcccgtctcacacccaaagtttat

SEQ ID NO: 812261 - DNA, 25 bp, Homo sapien
atggtcacaactgtgcgtgcttcca

SEQ ID NO: 812262 - DNA, 25 bp, Homo sapien
gagagccaggagaatgattgcttcc

SEQ ID NO: 812263 - DNA, 25 bp, Homo sapien
gccaggagaatgattgcttcctgca

SEQ ID NO: 812264 - DNA, 25 bp, Homo sapien
gagccaggagaatgattgcttcctg

SEQ ID NO: 812265 - DNA, 25 bp, Homo sapien
ccaggagaatgattgcttcctgcat

SEQ ID NO: 812266 - DNA, 25 bp, Homo sapien
gaaaacttgtgcactgaagtcccag

SEQ ID NO: 812267 - DNA, 25 bp, Homo sapien
ggagaattctctgccacattgcctg

SEQ ID NO: 812268 - DNA, 25 bp, Homo sapien
caaagtaggtgcctgacagccaatt

SEQ ID NO: 812269 - DNA, 25 bp, Homo sapien
gacaatgatgctgataacttcacag

SEQ ID NO: 812270 - DNA, 25 bp, Homo sapien
cagctgttaaagacaagctgaatgt

SEQ ID NO: 812271 - DNA, 25 bp, Homo sapien
gcagcagctgttaaagacaagctga

SEQ ID NO: 812272 - DNA, 25 bp, Homo sapien
cagcagctgttaaagacaagctgaa

SEQ ID NO: 812273 - DNA, 25 bp, Homo sapien
gcagcagcagctgttaaagacaagc

SEQ ID NO: 812274 - DNA, 25 bp, Homo sapien
tctctctgtgcgtcattttccccat

SEQ ID NO: 812275 - DNA, 25 bp, Homo sapien
aatctctctgtgcgtcattttcccc

SEQ ID NO: 812276 - DNA, 25 bp, Homo sapien
atctctctgtgcgtcattttcccca

SEQ ID NO: 812277 - DNA, 25 bp, Homo sapien
gaatgtcaaggctatccaaggaggg

SEQ ID NO: 812278 - DNA, 25 bp, Homo sapien
aagaaatggtgacccagactcgcca

SEQ ID NO: 812279 - DNA, 25 bp, Homo sapien
gaaggctgcaggagtaactcttgtg

SEQ ID NO: 812280 - DNA, 25 bp, Homo sapien
caatttcggttggagagtaggatct

SEQ ID NO: 812281 - DNA, 25 bp, Homo sapien
acatctgttacctggacagtcagga

SEQ ID NO: 812282 - DNA, 25 bp, Homo sapien
tttcaaaatctagttgttccatccc

SEQ ID NO: 812283 - DNA, 25 bp, Homo sapien
acctcatccttcacataaatctgca

SEQ ID NO: 812284 - DNA, 25 bp, Homo sapien
aggtctgtgacaccaacctcatcct

SEQ ID NO: 812285 - DNA, 25 bp, Homo sapien
ccagggccctccctgatgccactgt

SEQ ID NO: 812286 - DNA, 25 bp, Homo sapien
ggaaacagctgcttgtttatttact

SEQ ID NO: 812287 - DNA, 25 bp, Homo sapien
ccctgatgccactgtctgggctgca

SEQ ID NO: 812288 - DNA, 25 bp, Homo sapien
gcagtgcacatcctggtgtatccta

SEQ ID NO: 812289 - DNA, 25 bp, Homo sapien
aggtagggtcatgtttgaggcattt

SEQ ID NO: 812290 - DNA, 25 bp, Homo sapien
aaaatgctgaggtagggtcatgttt

SEQ ID NO: 812291 - DNA, 25 bp, Homo sapien
ggtcatgtttgaggcatttgcagat

SEQ ID NO: 812292 - DNA, 25 bp, Homo sapien
catttgcagatcagtaagggggcca

SEQ ID NO: 812293 - DNA, 25 bp, Homo sapien
gaccagtgtccaaagtggaataaga

SEQ ID NO: 812294 - DNA, 25 bp, Homo sapien
ctagaccagtgtccaaagtggaata

SEQ ID NO: 812295 - DNA, 25 bp, Homo sapien
tagaccagtgtccaaagtggaataa

SEQ ID NO: 812296 - DNA, 25 bp, Homo sapien
cagtgtccaaagtggaataagaaac

SEQ ID NO: 812297 - DNA, 25 bp, Homo sapien
cggcttgtgtcttctggatcgaagg

SEQ ID NO: 812298 - DNA, 25 bp, Homo sapien
cgaaggcctcaacctggtaaatgaa

SEQ ID NO: 812299 - DNA, 25 bp, Homo sapien
ctttctactatgtagaggtgtagac

SEQ ID NO: 812300 - DNA, 25 bp, Homo sapien
ggtaaatgaatccagggtttgctct

SEQ ID NO: 812301 - DNA, 25 bp, Homo sapien
tgtaatactcacagcttctctactg

SEQ ID NO: 812302 - DNA, 25 bp, Homo sapien
caaatgggcctagatcacacagagc

SEQ ID NO: 812303 - DNA, 25 bp, Homo sapien
agtagctgctggtactcttctttgt

SEQ ID NO: 812304 - DNA, 25 bp, Homo sapien
aagtggacgcacattcccctgactg

SEQ ID NO: 812305 - DNA, 25 bp, Homo sapien
tgaggattggtggttatacttgccc

SEQ ID NO: 812306 - DNA, 25 bp, Homo sapien
tggtgttaccaattccccgagtgtc

SEQ ID NO: 812307 - DNA, 25 bp, Homo sapien
tatattcgtcctggtattcccaagg

SEQ ID NO: 812308 - DNA, 25 bp, Homo sapien
tgcagcaaacagtagaaacagcctc

SEQ ID NO: 812309 - DNA, 25 bp, Homo sapien
cctgatctaggaggtgtttttaaag

SEQ ID NO: 812310 - DNA, 25 bp, Homo sapien
ctacctgatctaggaggtgttttta

SEQ ID NO: 812311 - DNA, 25 bp, Homo sapien
ctgatctaggaggtgtttttaaagg

SEQ ID NO: 812312 - DNA, 25 bp, Homo sapien
tctgaaagggtagctacctgatcta

SEQ ID NO: 812313 - DNA, 25 bp, Homo sapien
tagccactaccctcacgtacgtgtg

SEQ ID NO: 812314 - DNA, 25 bp, Homo sapien
cgtgtgactatgagcattgaaatgt

SEQ ID NO: 812315 - DNA, 25 bp, Homo sapien
aatgcagtagccactaccctcacgt

SEQ ID NO: 812316 - DNA, 25 bp, Homo sapien
gggaaccaatgctagatctaagcct

SEQ ID NO: 812317 - DNA, 25 bp, Homo sapien
taatgtaatccttcaccgataaagc

SEQ ID NO: 812318 - DNA, 25 bp, Homo sapien
tcaccgataaagctgcagatcctat

SEQ ID NO: 812319 - DNA, 25 bp, Homo sapien
tgcaagtccttaacgtggctcctgc

SEQ ID NO: 812320 - DNA, 25 bp, Homo sapien
gctaagtgggttacaggcaagtact

SEQ ID NO: 812321 - DNA, 25 bp, Homo sapien
tatttgccgcccctttgcagctagg

SEQ ID NO: 812322 - DNA, 25 bp, Homo sapien
ctaaaaatattgtgtcatgtggcca

SEQ ID NO: 812323 - DNA, 25 bp, Homo sapien
agtcctggctaagaaaagtcctgag

SEQ ID NO: 812324 - DNA, 25 bp, Homo sapien
tggccatttgccagcgactcagcaa

SEQ ID NO: 812325 - DNA, 25 bp, Homo sapien
tatgaaggatcgcagcaacgctaga

SEQ ID NO: 812326 - DNA, 25 bp, Homo sapien
tatcctcaaggccttagatctctgg

SEQ ID NO: 812327 - DNA, 25 bp, Homo sapien
tagggctgatgtgaccaattgctcc

SEQ ID NO: 812328 - DNA, 25 bp, Homo sapien
gatacttgcatctcatcctcacgag

SEQ ID NO: 812329 - DNA, 25 bp, Homo sapien
tatagcagggcgcaaaatgcatgag

SEQ ID NO: 812330 - DNA, 25 bp, Homo sapien
aatatagcagggcgcaaaatgcatg

SEQ ID NO: 812331 - DNA, 25 bp, Homo sapien
atatagcagggcgcaaaatgcatga

SEQ ID NO: 812332 - DNA, 25 bp, Homo sapien
atagcagggcgcaaaatgcatgagc

SEQ ID NO: 812333 - DNA, 25 bp, Homo sapien
tggagaagagggtgccattagcaga

SEQ ID NO: 812334 - DNA, 25 bp, Homo sapien
tctgaagctctttgggggagaaatc

SEQ ID NO: 812335 - DNA, 25 bp, Homo sapien
gccattagcagacattctgaagctc

SEQ ID NO: 812336 - DNA, 25 bp, Homo sapien
tctttgggggagaaatcaggaaata

SEQ ID NO: 812337 - DNA, 25 bp, Homo sapien
tctgtgtcctgcttcaaagtccaat

SEQ ID NO: 812338 - DNA, 25 bp, Homo sapien
ctgtgtcctgcttcaaagtccaatt

SEQ ID NO: 812339 - DNA, 25 bp, Homo sapien
cgttgaggttcacgatgttcacctg

SEQ ID NO: 812340 - DNA, 25 bp, Homo sapien
ccctcacctccacgatgagatggaa

SEQ ID NO: 812341 - DNA, 25 bp, Homo sapien
gagctctgtggaggctttgaggcct

SEQ ID NO: 812342 - DNA, 25 bp, Homo sapien
taaagcgagggacttcgtcgttgag

SEQ ID NO: 812343 - DNA, 25 bp, Homo sapien
tggtcaggctactggccacgatgca

SEQ ID NO: 812344 - DNA, 25 bp, Homo sapien
aaggctcatctagtccatgctgggt

SEQ ID NO: 812345 - DNA, 25 bp, Homo sapien
gatccccacgaagggaactggtcag

SEQ ID NO: 812346 - DNA, 25 bp, Homo sapien
cacgatgcagctcctcaggcgaaat

SEQ ID NO: 812347 - DNA, 25 bp, Homo sapien
gcagggaatcaatagctaagtcagg

SEQ ID NO: 812348 - DNA, 25 bp, Homo sapien
aggcaggaaccagggcttcacccca

SEQ ID NO: 812349 - DNA, 25 bp, Homo sapien
atctattcacaaggtggacttctgt

SEQ ID NO: 812350 - DNA, 25 bp, Homo sapien
ttctgtgggtatactccattgctgg

SEQ ID NO: 812351 - DNA, 25 bp, Homo sapien
acggcattcctttcgtgagctcaga

SEQ ID NO: 812352 - DNA, 25 bp, Homo sapien
tcagatctaagtgacggcattcctt

SEQ ID NO: 812353 - DNA, 25 bp, Homo sapien
tgagctcagaatatttctgctgtgc

SEQ ID NO: 812354 - DNA, 25 bp, Homo sapien
ctctcagatctaagtgacggcattc

SEQ ID NO: 812355 - DNA, 25 bp, Homo sapien
caggaagtccttttgctgagggaaa

SEQ ID NO: 812356 - DNA, 25 bp, Homo sapien
cacagaactcgtgcacctttccaag

SEQ ID NO: 812357 - DNA, 25 bp, Homo sapien
tctgaactgagaaataggtcccctg

SEQ ID NO: 812358 - DNA, 25 bp, Homo sapien
ttacccaagtggaggtcttcccatg

SEQ ID NO: 812359 - DNA, 25 bp, Homo sapien
tccgctgtgatattggccacgatgg

SEQ ID NO: 812360 - DNA, 25 bp, Homo sapien
catcatcaggatcctccgctgtgat

SEQ ID NO: 812361 - DNA, 25 bp, Homo sapien
tggtaatgctgtagaggaggtggct

SEQ ID NO: 812362 - DNA, 25 bp, Homo sapien
ccaggactgtgtacactcgtgtcgg

SEQ ID NO: 812363 - DNA, 25 bp, Homo sapien
tgatttatcatgaaatatttgctaa

SEQ ID NO: 812364 - DNA, 25 bp, Homo sapien
gatttatcatgaaatatttgctaac

SEQ ID NO: 812365 - DNA, 25 bp, Homo sapien
ctgatttatcatgaaatatttgcta

SEQ ID NO: 812366 - DNA, 25 bp, Homo sapien
tgtcttttgcccgaaagcctaagga

SEQ ID NO: 812367 - DNA, 25 bp, Homo sapien
tgaatttcgcaacactagagtgaac

SEQ ID NO: 812368 - DNA, 25 bp, Homo sapien
gcctaaggagccaacaggacattgt

SEQ ID NO: 812369 - DNA, 25 bp, Homo sapien
cccgaggaatcaggcagcttaggtt

SEQ ID NO: 812370 - DNA, 25 bp, Homo sapien
tcgttgacgtcttccacaatgaagg

SEQ ID NO: 812371 - DNA, 25 bp, Homo sapien
gaaggttatctggatgcgattctcc

SEQ ID NO: 812372 - DNA, 25 bp, Homo sapien
catgtggcaggattgtcgttgacgt

SEQ ID NO: 812373 - DNA, 25 bp, Homo sapien
gcatctcggtctatcctttgggcca

SEQ ID NO: 812374 - DNA, 25 bp, Homo sapien
acatcgatttattctactgagctgt

SEQ ID NO: 812375 - DNA, 25 bp, Homo sapien
aaggacgataacaaggaaacctgtg

SEQ ID NO: 812376 - DNA, 25 bp, Homo sapien
ggacgataacaaggaaacctgtgga

SEQ ID NO: 812377 - DNA, 25 bp, Homo sapien
catcgatttattctactgagctgtt

SEQ ID NO: 812378 - DNA, 25 bp, Homo sapien
tgccacccgtggcaataaacaaaga

SEQ ID NO: 812379 - DNA, 25 bp, Homo sapien
acagtccagggagggcctaacaagt

SEQ ID NO: 812380 - DNA, 25 bp, Homo sapien
tattataactgctaactaacagccc

SEQ ID NO: 812381 - DNA, 25 bp, Homo sapien
gggagttcctattcactgatcctaa

SEQ ID NO: 812382 - DNA, 25 bp, Homo sapien
gaaaacagtctaatacggtatccat

SEQ ID NO: 812383 - DNA, 25 bp, Homo sapien
gtatccatccaggtcagcgtcttgg

SEQ ID NO: 812384 - DNA, 25 bp, Homo sapien
taatacggtatccatccaggtcagc

SEQ ID NO: 812385 - DNA, 25 bp, Homo sapien
cagtctaatacggtatccatccagg

SEQ ID NO: 812386 - DNA, 25 bp, Homo sapien
aatatggaacacagtctgcaaactg

SEQ ID NO: 812387 - DNA, 25 bp, Homo sapien
agtctgcaaactgtcctcccatact

SEQ ID NO: 812388 - DNA, 25 bp, Homo sapien
ctctggactgcaggaagccaaatat

SEQ ID NO: 812389 - DNA, 25 bp, Homo sapien
ggactgcaggaagccaaatatacaa

SEQ ID NO: 812390 - DNA, 25 bp, Homo sapien
cagctacggatttcacattggcctt

SEQ ID NO: 812391 - DNA, 25 bp, Homo sapien
taaatgcagttagtccagctacgga

SEQ ID NO: 812392 - DNA, 25 bp, Homo sapien
aagagcccaaagagggaacttgagc

SEQ ID NO: 812393 - DNA, 25 bp, Homo sapien
catagggtggctgagagttcctccc

SEQ ID NO: 812394 - DNA, 25 bp, Homo sapien
ggctgggctttaggctgaagacctc

SEQ ID NO: 812395 - DNA, 25 bp, Homo sapien
ttatgcagccttgggacgcgaggct

SEQ ID NO: 812396 - DNA, 25 bp, Homo sapien
cgcccttatgcagccttgggacgcg

SEQ ID NO: 812397 - DNA, 25 bp, Homo sapien
gggctttaggctgaagacctccgcc

SEQ ID NO: 812398 - DNA, 25 bp, Homo sapien
cttgcgtgcttggctttgacatagt

SEQ ID NO: 812399 - DNA, 25 bp, Homo sapien
gcttgcgtgcttggctttgacatag

SEQ ID NO: 812400 - DNA, 25 bp, Homo sapien
tgcttgcgtgcttggctttgacata

SEQ ID NO: 812401 - DNA, 25 bp, Homo sapien
tggtgaggccacgtaccaacaactg

SEQ ID NO: 812402 - DNA, 25 bp, Homo sapien
caacaactggtcatggcaaagatac

SEQ ID NO: 812403 - DNA, 25 bp, Homo sapien
tgagagcataactgaccatcggcct

SEQ ID NO: 812404 - DNA, 25 bp, Homo sapien
gaatgtgcctggaagacctttaacc

SEQ ID NO: 812405 - DNA, 25 bp, Homo sapien
catctcttgatggagctaatagcaa

SEQ ID NO: 812406 - DNA, 25 bp, Homo sapien
tcattgcatggaggtctctggttcc

SEQ ID NO: 812407 - DNA, 25 bp, Homo sapien
aagcctccgttgtgccatgtttgtg

SEQ ID NO: 812408 - DNA, 25 bp, Homo sapien
ggtcaaagcaattcacgtggtcaag

SEQ ID NO: 812409 - DNA, 25 bp, Homo sapien
aagaagcaacgtccccttggctgtt

SEQ ID NO: 812410 - DNA, 25 bp, Homo sapien
taggtcaagaagcaacgtccccttg

SEQ ID NO: 812411 - DNA, 25 bp, Homo sapien
tcaagaagcaacgtccccttggctg

SEQ ID NO: 812412 - DNA, 25 bp, Homo sapien
agcaacgtccccttggctgttcttt

SEQ ID NO: 812413 - DNA, 25 bp, Homo sapien
agccagctggatcctgtaaaaatct

SEQ ID NO: 812414 - DNA, 25 bp, Homo sapien
gagccagctggatcctgtaaaaatc

SEQ ID NO: 812415 - DNA, 25 bp, Homo sapien
gaaggacatgtaccaaactactaac

SEQ ID NO: 812416 - DNA, 25 bp, Homo sapien
caccttccagcagtagctctgtaag

SEQ ID NO: 812417 - DNA, 25 bp, Homo sapien
tcattgggacccacttttcatgccc

SEQ ID NO: 812418 - DNA, 25 bp, Homo sapien
gctctgtaaggaaaggtctaactca

SEQ ID NO: 812419 - DNA, 25 bp, Homo sapien
caaaattgaatcttatatgcagggc

SEQ ID NO: 812420 - DNA, 25 bp, Homo sapien
cactttgcccataaaaattaggagc

SEQ ID NO: 812421 - DNA, 25 bp, Homo sapien
tcagattcgttgaagaaaagcacaa

SEQ ID NO: 812422 - DNA, 25 bp, Homo sapien
tattgggctgcgagagacattttca

SEQ ID NO: 812423 - DNA, 25 bp, Homo sapien
ttggattttcgtagtctagatcacc

SEQ ID NO: 812424 - DNA, 25 bp, Homo sapien
tttcgtagtctagatcaccaatcag

SEQ ID NO: 812425 - DNA, 25 bp, Homo sapien
gattttcgtagtctagatcaccaat

SEQ ID NO: 812426 - DNA, 25 bp, Homo sapien
ggattttcgtagtctagatcaccaa

SEQ ID NO: 812427 - DNA, 25 bp, Homo sapien
cgtatatttattgccggctgctagg

SEQ ID NO: 812428 - DNA, 25 bp, Homo sapien
ttatcaccgtatatttattgccggc

SEQ ID NO: 812429 - DNA, 25 bp, Homo sapien
tcaccgtatatttattgccggctgc

SEQ ID NO: 812430 - DNA, 25 bp, Homo sapien
tggattatcaccgtatatttattgc

SEQ ID NO: 812431 - DNA, 25 bp, Homo sapien
tagtaagggggggccacatcctgca

SEQ ID NO: 812432 - DNA, 25 bp, Homo sapien
tatagtaagggggggccacatcctg

SEQ ID NO: 812433 - DNA, 25 bp, Homo sapien
agtaagggggggccacatcctgcac

SEQ ID NO: 812434 - DNA, 25 bp, Homo sapien
atagtaagggggggccacatcctgc

SEQ ID NO: 812435 - DNA, 25 bp, Homo sapien
atcatgaaataaaacaaaatgatac

SEQ ID NO: 812436 - DNA, 25 bp, Homo sapien
tttgataagcgcatgagcacacaga

SEQ ID NO: 812437 - DNA, 25 bp, Homo sapien
ttttagatgccgagggtgttcaccc

SEQ ID NO: 812438 - DNA, 25 bp, Homo sapien
ctgtgtacaggctttgcgcataggg

SEQ ID NO: 812439 - DNA, 25 bp, Homo sapien
caggtggctaagacatgggagctcc

SEQ ID NO: 812440 - DNA, 25 bp, Homo sapien
tctgggcttgttaggatataaacgt

SEQ ID NO: 812441 - DNA, 25 bp, Homo sapien
ttctgggcttgttaggatataaacg

SEQ ID NO: 812442 - DNA, 25 bp, Homo sapien
tttctgggcttgttaggatataaac

SEQ ID NO: 812443 - DNA, 25 bp, Homo sapien
tgacacatcaaatacataggatggc

SEQ ID NO: 812444 - DNA, 25 bp, Homo sapien
ccttctttctgacacatcaaataca

SEQ ID NO: 812445 - DNA, 25 bp, Homo sapien
gggccttctttctgacacatcaaat

SEQ ID NO: 812446 - DNA, 25 bp, Homo sapien
ctgacacatcaaatacataggatgg

SEQ ID NO: 812447 - DNA, 25 bp, Homo sapien
cattgacagcactctggtctgtgtc

SEQ ID NO: 812448 - DNA, 25 bp, Homo sapien
cacgtttggatggagtccattgaca

SEQ ID NO: 812449 - DNA, 25 bp, Homo sapien
ttccactccacagaacacacgtttg

SEQ ID NO: 812450 - DNA, 25 bp, Homo sapien
gtgcaaaacagcatgcgaggcctcc

SEQ ID NO: 812451 - DNA, 25 bp, Homo sapien
taaaagaaataagaggtgcaataaa

SEQ ID NO: 812452 - DNA, 25 bp, Homo sapien
ctgaagggctcctcagcagcgagga

SEQ ID NO: 812453 - DNA, 25 bp, Homo sapien
cctcagcagcgaggaaaatttaaaa

SEQ ID NO: 812454 - DNA, 25 bp, Homo sapien
tttcaaaagtccaagtttcacctga

SEQ ID NO: 812455 - DNA, 25 bp, Homo sapien
ggcagaaaagaaggccttcagggaa

SEQ ID NO: 812456 - DNA, 25 bp, Homo sapien
taaagggcagaaaagaaggccttca

SEQ ID NO: 812457 - DNA, 25 bp, Homo sapien
tgcaaaaagcagggtgttgtaaagg

SEQ ID NO: 812458 - DNA, 25 bp, Homo sapien
cagggtgttgtaaagggcagaaaag

SEQ ID NO: 812459 - DNA, 25 bp, Homo sapien
caaactgagagagcgagagggaggc

SEQ ID NO: 812460 - DNA, 25 bp, Homo sapien
ggcagaaagtgaagctggaagtggg

SEQ ID NO: 812461 - DNA, 25 bp, Homo sapien
cttcaaactgagagagcgagaggga

SEQ ID NO: 812462 - DNA, 25 bp, Homo sapien
agggaggcagaaagtgaagctggaa

SEQ ID NO: 812463 - DNA, 25 bp, Homo sapien
cttgtgtcttcgttgttggtggcct

SEQ ID NO: 812464 - DNA, 25 bp, Homo sapien
acagtccactttagttaccagctgg

SEQ ID NO: 812465 - DNA, 25 bp, Homo sapien
gaggtctttatcagtggctcgcacc

SEQ ID NO: 812466 - DNA, 25 bp, Homo sapien
cccctccagtggagatggagtacag

SEQ ID NO: 812467 - DNA, 25 bp, Homo sapien
cggcactataccaagcagcaccact

SEQ ID NO: 812468 - DNA, 25 bp, Homo sapien
ctgcagatgacaccgagttgttttt

SEQ ID NO: 812469 - DNA, 25 bp, Homo sapien
gatttacggtgtctccatgtgccac

SEQ ID NO: 812470 - DNA, 25 bp, Homo sapien
tccaggaaggtgtggatttacggtg

SEQ ID NO: 812471 - DNA, 25 bp, Homo sapien
agatgacaccgagttgtttttccag

SEQ ID NO: 812472 - DNA, 25 bp, Homo sapien
gaatatttgtgccaactttcagatc

SEQ ID NO: 812473 - DNA, 25 bp, Homo sapien
gccaatggaataacggaaagatctg

SEQ ID NO: 812474 - DNA, 25 bp, Homo sapien
ggctggaatcaaggtcggtacatgt

SEQ ID NO: 812475 - DNA, 25 bp, Homo sapien
gtcggtacatgtcagcttgaaattc

SEQ ID NO: 812476 - DNA, 25 bp, Homo sapien
gacaagtagcttgtagtcccagatc

SEQ ID NO: 812477 - DNA, 25 bp, Homo sapien
aacccaccagcatagtcaaagcgag

SEQ ID NO: 812478 - DNA, 25 bp, Homo sapien
cagcaggcgtgtgacattggaacca

SEQ ID NO: 812479 - DNA, 25 bp, Homo sapien
tcaaagcgagatgtaagcagcaggc

SEQ ID NO: 812480 - DNA, 25 bp, Homo sapien
ttgtgaaggtagcaactggcagcat

SEQ ID NO: 812481 - DNA, 25 bp, Homo sapien
gttgtgaaggtagcaactggcagca

SEQ ID NO: 812482 - DNA, 25 bp, Homo sapien
ggatattgacttgcaaagactcttc

SEQ ID NO: 812483 - DNA, 25 bp, Homo sapien
tcatggatattgacttgcaaagact

SEQ ID NO: 812484 - DNA, 25 bp, Homo sapien
tggagcccaaagtgatgacaaacgg

SEQ ID NO: 812485 - DNA, 25 bp, Homo sapien
gacaaacggcacgtaccatgcagat

SEQ ID NO: 812486 - DNA, 25 bp, Homo sapien
ccatgcagatggagagtaaacgttt

SEQ ID NO: 812487 - DNA, 25 bp, Homo sapien
tttggccaataggacgaccaggtac

SEQ ID NO: 812488 - DNA, 25 bp, Homo sapien
cctgccttgtagagaaatcctgatt

SEQ ID NO: 812489 - DNA, 25 bp, Homo sapien
ggcaacctgccttgtagagaaatcc

SEQ ID NO: 812490 - DNA, 25 bp, Homo sapien
aacctgccttgtagagaaatcctga

SEQ ID NO: 812491 - DNA, 25 bp, Homo sapien
tccaggcaacctgccttgtagagaa

SEQ ID NO: 812492 - DNA, 25 bp, Homo sapien
cagaggtggtcacttgctcaaagcc

SEQ ID NO: 812493 - DNA, 25 bp, Homo sapien
ttggtcacacaaaaacccggctgag

SEQ ID NO: 812494 - DNA, 25 bp, Homo sapien
taagagcacggcatattctatcgct

SEQ ID NO: 812495 - DNA, 25 bp, Homo sapien
tacaacccttaagagtgagagactg

SEQ ID NO: 812496 - DNA, 25 bp, Homo sapien
cagcagatgctcgaggatttcttac

SEQ ID NO: 812497 - DNA, 25 bp, Homo sapien
caaggtgcatatttaacgtttagcc

SEQ ID NO: 812498 - DNA, 25 bp, Homo sapien
cttgaagtcaaggttgccaatagca

SEQ ID NO: 812499 - DNA, 25 bp, Homo sapien
tatggcaaaatgcaacgcacatctt

SEQ ID NO: 812500 - DNA, 25 bp, Homo sapien
aaatgctccaagatgtgatcgcggc

SEQ ID NO: 812501 - DNA, 25 bp, Homo sapien
gatcgcggcctgattctttgccgag

SEQ ID NO: 812502 - DNA, 25 bp, Homo sapien
tccaagatgtgatcgcggcctgatt

SEQ ID NO: 812503 - DNA, 25 bp, Homo sapien
gcctgattctttgccgagtaggaac

SEQ ID NO: 812504 - DNA, 25 bp, Homo sapien
caagggacagacctaggtgttcagc

SEQ ID NO: 812505 - DNA, 25 bp, Homo sapien
ggtcctgtctacatttaacacacgg

SEQ ID NO: 812506 - DNA, 25 bp, Homo sapien
tttcaaaagaggcctgtgtccagca

SEQ ID NO: 812507 - DNA, 25 bp, Homo sapien
gcacaaagcattagctgtcctcagg

SEQ ID NO: 812508 - DNA, 25 bp, Homo sapien
tataatcaaatttctaaccctgttg

SEQ ID NO: 812509 - DNA, 25 bp, Homo sapien
accctgttgagacatgccttaagca

SEQ ID NO: 812510 - DNA, 25 bp, Homo sapien
tctgtcaatatgatcaataaccact

SEQ ID NO: 812511 - DNA, 25 bp, Homo sapien
ggctagagtgcggtcacaactcgct

SEQ ID NO: 812512 - DNA, 25 bp, Homo sapien
caccacgacgtctctctctgcagtc

SEQ ID NO: 812513 - DNA, 25 bp, Homo sapien
tgcctaggccaatgcagtgtcgcat

SEQ ID NO: 812514 - DNA, 25 bp, Homo sapien
tctgcctaatgcacctgtcccttgt

SEQ ID NO: 812515 - DNA, 25 bp, Homo sapien
ggacctgacttctgcctaatgcacc

SEQ ID NO: 812516 - DNA, 25 bp, Homo sapien
agtgtcgcatctgggcctcacctaa

SEQ ID NO: 812517 - DNA, 25 bp, Homo sapien
ctggatctatggcttctccatcaaa

SEQ ID NO: 812518 - DNA, 25 bp, Homo sapien
agatagtgttcatctggatagtttc

SEQ ID NO: 812519 - DNA, 25 bp, Homo sapien
tctccatcaaagatagtgttcatct

SEQ ID NO: 812520 - DNA, 25 bp, Homo sapien
ccatcaaagatagtgttcatctgga

SEQ ID NO: 812521 - DNA, 25 bp, Homo sapien
ctaaatttggagctgatttcacggg

SEQ ID NO: 812522 - DNA, 25 bp, Homo sapien
tatgttcatcttgccgaccaagagg

SEQ ID NO: 812523 - DNA, 25 bp, Homo sapien
aattgagcctttgtaagcagaggga

SEQ ID NO: 812524 - DNA, 25 bp, Homo sapien
ggaggccagctctaccttatgttca

SEQ ID NO: 812525 - DNA, 25 bp, Homo sapien
tttgccactcagctcatcttcttcc

SEQ ID NO: 812526 - DNA, 25 bp, Homo sapien
tgggttagtggatctttccactttc

SEQ ID NO: 812527 - DNA, 25 bp, Homo sapien
tcccagttggcacttctcagtgacc

SEQ ID NO: 812528 - DNA, 25 bp, Homo sapien
cagtgactctgcgtggggcagctcc

SEQ ID NO: 812529 - DNA, 25 bp, Homo sapien
tggtttggggtaagccctgttcatg

SEQ ID NO: 812530 - DNA, 25 bp, Homo sapien
gttctttgggttgcccagcttgcca

SEQ ID NO: 812531 - DNA, 25 bp, Homo sapien
tcatgaaggctggatttctgttctt

SEQ ID NO: 812532 - DNA, 25 bp, Homo sapien
tgttctttgggttgcccagcttgcc

SEQ ID NO: 812533 - DNA, 25 bp, Homo sapien
aatttagggtgaggcagcatctcag

SEQ ID NO: 812534 - DNA, 25 bp, Homo sapien
cacatgcaggatgctgatccggaca

SEQ ID NO: 812535 - DNA, 25 bp, Homo sapien
gaagagaactgaactactgctagac

SEQ ID NO: 812536 - DNA, 25 bp, Homo sapien
actgctagacaggacaacgtggatg

SEQ ID NO: 812537 - DNA, 25 bp, Homo sapien
gttggcaaggatagagagcaattgc

SEQ ID NO: 812538 - DNA, 25 bp, Homo sapien
gctggaatgtgaatcagagccacca

SEQ ID NO: 812539 - DNA, 25 bp, Homo sapien
ggatagagagcaattgcaactctca

SEQ ID NO: 812540 - DNA, 25 bp, Homo sapien
gatttcacttcaatagtaattttaa

SEQ ID NO: 812541 - DNA, 25 bp, Homo sapien
ttagggttactggactagggtcgca

SEQ ID NO: 812542 - DNA, 25 bp, Homo sapien
ctggactagggtcgcagcagctggg

SEQ ID NO: 812543 - DNA, 25 bp, Homo sapien
agctcgagtgaagcttgctcaggct

SEQ ID NO: 812544 - DNA, 25 bp, Homo sapien
agggcatagagctcgagtgaagctt

SEQ ID NO: 812545 - DNA, 25 bp, Homo sapien
cttaatgggcttataagcagttatt

SEQ ID NO: 812546 - DNA, 25 bp, Homo sapien
cacctcacccggcccttttaatcat

SEQ ID NO: 812547 - DNA, 25 bp, Homo sapien
ctcacccggcccttttaatcattct

SEQ ID NO: 812548 - DNA, 25 bp, Homo sapien
catacctgtttaaggccttgagagg

SEQ ID NO: 812549 - DNA, 25 bp, Homo sapien
caaaacctggtcaacgctgggaaat

SEQ ID NO: 812550 - DNA, 25 bp, Homo sapien
caatgagaaccccagatgtgaaagg

SEQ ID NO: 812551 - DNA, 25 bp, Homo sapien
gattgccagccgagtcttcgttgca

SEQ ID NO: 812552 - DNA, 25 bp, Homo sapien
gagtccagacctcgaaatcaccctg

SEQ ID NO: 812553 - DNA, 25 bp, Homo sapien
tgatgtggccggaacactgaccggt

SEQ ID NO: 812554 - DNA, 25 bp, Homo sapien
gactgagagccaatcgaatgcaccg

SEQ ID NO: 812555 - DNA, 25 bp, Homo sapien
tcatcgactggaatcttgccgggaa

SEQ ID NO: 812556 - DNA, 25 bp, Homo sapien
tgtgattcagctgccctttgttggc

SEQ ID NO: 812557 - DNA, 25 bp, Homo sapien
ctgtgattcagctgccctttgttgg

SEQ ID NO: 812558 - DNA, 25 bp, Homo sapien
gtgattcagctgccctttgttggcc

SEQ ID NO: 812559 - DNA, 25 bp, Homo sapien
gctgctggacagctgctcgcccatt

SEQ ID NO: 812560 - DNA, 25 bp, Homo sapien
ctgagagccggtctgggtctctggg

SEQ ID NO: 812561 - DNA, 25 bp, Homo sapien
gctggacagctgctcgcccattcat

SEQ ID NO: 812562 - DNA, 25 bp, Homo sapien
gagagccggtctgggtctctgggca

SEQ ID NO: 812563 - DNA, 25 bp, Homo sapien
agtagctctagggactacagggacg

SEQ ID NO: 812564 - DNA, 25 bp, Homo sapien
tcctgctgaattgacgtgctcttta

SEQ ID NO: 812565 - DNA, 25 bp, Homo sapien
ggcttctctaagacctatcactaga

SEQ ID NO: 812566 - DNA, 25 bp, Homo sapien
cctaggtattccaaattgttcagca

SEQ ID NO: 812567 - DNA, 25 bp, Homo sapien
aatgtctgtaacaagttagtctccc

SEQ ID NO: 812568 - DNA, 25 bp, Homo sapien
catgctgtttaagtgcaggctgaga

SEQ ID NO: 812569 - DNA, 25 bp, Homo sapien
gagacccagcctctttgtaagtaca

SEQ ID NO: 812570 - DNA, 25 bp, Homo sapien
aatgacccgtggtacttaataggtg

SEQ ID NO: 812571 - DNA, 25 bp, Homo sapien
gtagaacgtggctcaactagatatc

SEQ ID NO: 812572 - DNA, 25 bp, Homo sapien
tgaccaagtgggcaagctatatagc

SEQ ID NO: 812573 - DNA, 25 bp, Homo sapien
tgtgcattgcagagctccaggtggc

SEQ ID NO: 812574 - DNA, 25 bp, Homo sapien
ccattcgcttagagtgcagtgtgac

SEQ ID NO: 812575 - DNA, 25 bp, Homo sapien
caaaatgcatgtacttccgtgttca

SEQ ID NO: 812576 - DNA, 25 bp, Homo sapien
tgcgggcttccttcaaacttcgcgg

SEQ ID NO: 812577 - DNA, 25 bp, Homo sapien
cactgcgggcttccttcaaacttcg

SEQ ID NO: 812578 - DNA, 25 bp, Homo sapien
gcgggcttccttcaaacttcgcggc

SEQ ID NO: 812579 - DNA, 25 bp, Homo sapien
ggcttccttcaaacttcgcggccca

SEQ ID NO: 812580 - DNA, 25 bp, Homo sapien
ggcccctaacacatgccttgaaaca

SEQ ID NO: 812581 - DNA, 25 bp, Homo sapien
ccacagcacggtagccagaagtctg

SEQ ID NO: 812582 - DNA, 25 bp, Homo sapien
gaaacacaacttcatctgtgccaat

SEQ ID NO: 812583 - DNA, 25 bp, Homo sapien
ttggtgattcacactttcgaggcac

SEQ ID NO: 812584 - DNA, 25 bp, Homo sapien
cattccagctgtccaggaactttcc

SEQ ID NO: 812585 - DNA, 25 bp, Homo sapien
ccttggaagctggtttttcatatac

SEQ ID NO: 812586 - DNA, 25 bp, Homo sapien
aagccaggaaggagatcacactacc

SEQ ID NO: 812587 - DNA, 25 bp, Homo sapien
gctcccgtaactgcgtgccaagagg

SEQ ID NO: 812588 - DNA, 25 bp, Homo sapien
gattccaagactatctctttcttgc

SEQ ID NO: 812589 - DNA, 25 bp, Homo sapien
cttcctgggatggtgcccagattcc

SEQ ID NO: 812590 - DNA, 25 bp, Homo sapien
tcttgctctactcccattaaaactc

SEQ ID NO: 812591 - DNA, 25 bp, Homo sapien
ttactgccaggagaaaaatattcag

SEQ ID NO: 812592 - DNA, 25 bp, Homo sapien
cttcaccttcgttgctcttcctgcc

SEQ ID NO: 812593 - DNA, 25 bp, Homo sapien
tgtccggattccagctcaatgtctt

SEQ ID NO: 812594 - DNA, 25 bp, Homo sapien
catagttgtccggattccagctcaa

SEQ ID NO: 812595 - DNA, 25 bp, Homo sapien
tagttgtccggattccagctcaatg

SEQ ID NO: 812596 - DNA, 25 bp, Homo sapien
tctcgtgaccatccagccaagccag

SEQ ID NO: 812597 - DNA, 25 bp, Homo sapien
tccatctcgtgaccatccagccaag

SEQ ID NO: 812598 - DNA, 25 bp, Homo sapien
tcgtgaccatccagccaagccaggc

SEQ ID NO: 812599 - DNA, 25 bp, Homo sapien
gtgaccatccagccaagccaggcat

SEQ ID NO: 812600 - DNA, 25 bp, Homo sapien
gagagtagccaggatctttggatgc

SEQ ID NO: 812601 - DNA, 25 bp, Homo sapien
tttggatgctttgccaagcaactca

SEQ ID NO: 812602 - DNA, 25 bp, Homo sapien
ctagaaaggagagtagccaggatct

SEQ ID NO: 812603 - DNA, 25 bp, Homo sapien
gccaggatctttggatgctttgcca

SEQ ID NO: 812604 - DNA, 25 bp, Homo sapien
ttgtattatacggatacatttcagc

SEQ ID NO: 812605 - DNA, 25 bp, Homo sapien
tgagcacgtattccctgtacaaaac

SEQ ID NO: 812606 - DNA, 25 bp, Homo sapien
tatacggatacatttcagctgagtc

SEQ ID NO: 812607 - DNA, 25 bp, Homo sapien
cctgtacaaaaccttcatgtgcttg

SEQ ID NO: 812608 - DNA, 25 bp, Homo sapien
gtactgtagtcctgtcggaagcaca

SEQ ID NO: 812609 - DNA, 25 bp, Homo sapien
gtagtcctgtcggaagcacaacttc

SEQ ID NO: 812610 - DNA, 25 bp, Homo sapien
gtcctgtcggaagcacaacttccca

SEQ ID NO: 812611 - DNA, 25 bp, Homo sapien
ctgtagtcctgtcggaagcacaact

SEQ ID NO: 812612 - DNA, 25 bp, Homo sapien
tgttctcatatctaagataaccttt

SEQ ID NO: 812613 - DNA, 25 bp, Homo sapien
gaggagtagcttgcctcatatcata

SEQ ID NO: 812614 - DNA, 25 bp, Homo sapien
gactgtatttgttctcatatctaag

SEQ ID NO: 812615 - DNA, 25 bp, Homo sapien
agataacctttttcagaggagtagc

SEQ ID NO: 812616 - DNA, 25 bp, Homo sapien
ttacacacataacatgttgctttca

SEQ ID NO: 812617 - DNA, 25 bp, Homo sapien
cacataacatgttgctttcactttg

SEQ ID NO: 812618 - DNA, 25 bp, Homo sapien
tatggaccattacatgagtgcacgc

SEQ ID NO: 812619 - DNA, 25 bp, Homo sapien
atatggaccattacatgagtgcacg

SEQ ID NO: 812620 - DNA, 25 bp, Homo sapien
gatgtcaatgacgagctatcggttg

SEQ ID NO: 812621 - DNA, 25 bp, Homo sapien
gattcacttcctctcatcgacaagc

SEQ ID NO: 812622 - DNA, 25 bp, Homo sapien
agcattagctttccataggtaactg

SEQ ID NO: 812623 - DNA, 25 bp, Homo sapien
tgttcctgaattgggctgtagacag

SEQ ID NO: 812624 - DNA, 25 bp, Homo sapien
gcaaatgattcaggccagaggatct

SEQ ID NO: 812625 - DNA, 25 bp, Homo sapien
tgaagtccccgatgcctgaatgtgg

SEQ ID NO: 812626 - DNA, 25 bp, Homo sapien
ggtgttaagcgctgccatcctgcaa

SEQ ID NO: 812627 - DNA, 25 bp, Homo sapien
tgaatgtgggtgaatccatccagct

SEQ ID NO: 812628 - DNA, 25 bp, Homo sapien
cctcctcagggatttagctctgagt

SEQ ID NO: 812629 - DNA, 25 bp, Homo sapien
tcctcagggatttagctctgagttc

SEQ ID NO: 812630 - DNA, 25 bp, Homo sapien
ctttaagcaggccaccattcaggtg

SEQ ID NO: 812631 - DNA, 25 bp, Homo sapien
taagcaggccaccattcaggtggcc

SEQ ID NO: 812632 - DNA, 25 bp, Homo sapien
ccagtctaaggaattttgttaacag

SEQ ID NO: 812633 - DNA, 25 bp, Homo sapien
agtctgagcggactaagacaatgag

SEQ ID NO: 812634 - DNA, 25 bp, Homo sapien
actaagacaatgagtacctactata

SEQ ID NO: 812635 - DNA, 25 bp, Homo sapien
ttgttaacagtctgagcggactaag

SEQ ID NO: 812636 - DNA, 25 bp, Homo sapien
ttttgaagcatgagtgtagacactt

SEQ ID NO: 812637 - DNA, 25 bp, Homo sapien
gggacctagttcctgctacctaagc

SEQ ID NO: 812638 - DNA, 25 bp, Homo sapien
cagtggtgtcctgatgagactgtca

SEQ ID NO: 812639 - DNA, 25 bp, Homo sapien
tttactgagcgctatgatctgaatg

SEQ ID NO: 812640 - DNA, 25 bp, Homo sapien
ttaatcagtcaagaagattgccctc

SEQ ID NO: 812641 - DNA, 25 bp, Homo sapien
ggccttcaaataggaacatgggttc

SEQ ID NO: 812642 - DNA, 25 bp, Homo sapien
taaggataattctctagcagactgt

SEQ ID NO: 812643 - DNA, 25 bp, Homo sapien
gaatggtcctcatccaactacttga

SEQ ID NO: 812644 - DNA, 25 bp, Homo sapien
tctcaggcacccattttcaaatttc

SEQ ID NO: 812645 - DNA, 25 bp, Homo sapien
gccaaaggagagatcaaaatcacct

SEQ ID NO: 812646 - DNA, 25 bp, Homo sapien
tcagattcagttcctttatgtccac

SEQ ID NO: 812647 - DNA, 25 bp, Homo sapien
gattttccttaccacctatttcaga

SEQ ID NO: 812648 - DNA, 25 bp, Homo sapien
gtgactttagcgactgtcaaaagaa

SEQ ID NO: 812649 - DNA, 25 bp, Homo sapien
tgtctgtgactttagcgactgtcaa

SEQ ID NO: 812650 - DNA, 25 bp, Homo sapien
gtcaaaagaatgcaggcaggcccaa

SEQ ID NO: 812651 - DNA, 25 bp, Homo sapien
tctgtgactttagcgactgtcaaaa

SEQ ID NO: 812652 - DNA, 25 bp, Homo sapien
agagaacatctattagcccaaaatg

SEQ ID NO: 812653 - DNA, 25 bp, Homo sapien
gcacagagaacatctattagcccaa

SEQ ID NO: 812654 - DNA, 25 bp, Homo sapien
ggcacagagaacatctattagccca

SEQ ID NO: 812655 - DNA, 25 bp, Homo sapien
tctgcctcctggaaagccaccttcc

SEQ ID NO: 812656 - DNA, 25 bp, Homo sapien
tgaagcaaccttcctcctgactcag

SEQ ID NO: 812657 - DNA, 25 bp, Homo sapien
ctgaagcaaccttcctcctgactca

SEQ ID NO: 812658 - DNA, 25 bp, Homo sapien
gcctcctggaaagccaccttccttc

SEQ ID NO: 812659 - DNA, 25 bp, Homo sapien
gggatctgtacttgttctaagttca

SEQ ID NO: 812660 - DNA, 25 bp, Homo sapien
tcatagttctgatgggatctgtact

SEQ ID NO: 812661 - DNA, 25 bp, Homo sapien
gatctgaaagagatcatagttctga

SEQ ID NO: 812662 - DNA, 25 bp, Homo sapien
tgagcctctttgatctgaaagagat

SEQ ID NO: 812663 - DNA, 25 bp, Homo sapien
cttttttaacagtcatgttgctcat

SEQ ID NO: 812664 - DNA, 25 bp, Homo sapien
gcttttttaacagtcatgttgctca

SEQ ID NO: 812665 - DNA, 25 bp, Homo sapien
tgcttttttaacagtcatgttgctc

SEQ ID NO: 812666 - DNA, 25 bp, Homo sapien
ttttttaacagtcatgttgctcatt

SEQ ID NO: 812667 - DNA, 25 bp, Homo sapien
cctgatctctagctgaatgtgagcc

SEQ ID NO: 812668 - DNA, 25 bp, Homo sapien
tcctgcaagcagagagtacataact

SEQ ID NO: 812669 - DNA, 25 bp, Homo sapien
ggtgctctctcatgggatatatctg

SEQ ID NO: 812670 - DNA, 25 bp, Homo sapien
gggtgtccacgttgcaatcattaag

SEQ ID NO: 812671 - DNA, 25 bp, Homo sapien
ttactatcataatgtctgcagcatc

SEQ ID NO: 812672 - DNA, 25 bp, Homo sapien
taagccttccaatttatctgcaaaa

SEQ ID NO: 812673 - DNA, 25 bp, Homo sapien
aatcttagctcattgatgtggagcc

SEQ ID NO: 812674 - DNA, 25 bp, Homo sapien
ggtgtcattttagctgtacctcaca

SEQ ID NO: 812675 - DNA, 25 bp, Homo sapien
tttagaaggagacttgtgctaagca

SEQ ID NO: 812676 - DNA, 25 bp, Homo sapien
agggccaggtgaagccagtcaggga

SEQ ID NO: 812677 - DNA, 25 bp, Homo sapien
gggaggtcgcatgccttcagcatag

SEQ ID NO: 812678 - DNA, 25 bp, Homo sapien
cagcatagcatgaggaagtgacccc

SEQ ID NO: 812679 - DNA, 25 bp, Homo sapien
gcattgctaattctccaaccgccat

SEQ ID NO: 812680 - DNA, 25 bp, Homo sapien
ggcattgctaattctccaaccgcca

SEQ ID NO: 812681 - DNA, 25 bp, Homo sapien
actgtgctctctgcactgaaaatga

SEQ ID NO: 812682 - DNA, 25 bp, Homo sapien
ggactgatctgggtgctagaagcag

SEQ ID NO: 812683 - DNA, 25 bp, Homo sapien
tgggactgatctgggtgctagaagc

SEQ ID NO: 812684 - DNA, 25 bp, Homo sapien
gggactgatctgggtgctagaagca

SEQ ID NO: 812685 - DNA, 25 bp, Homo sapien
ctgggactgatctgggtgctagaag

SEQ ID NO: 812686 - DNA, 25 bp, Homo sapien
gctaggccaccaaccagaggggcat

SEQ ID NO: 812687 - DNA, 25 bp, Homo sapien
taggccaccaaccagaggggcattc

SEQ ID NO: 812688 - DNA, 25 bp, Homo sapien
gccaccaaccagaggggcattcctg

SEQ ID NO: 812689 - DNA, 25 bp, Homo sapien
tgctaggccaccaaccagaggggca

SEQ ID NO: 812690 - DNA, 25 bp, Homo sapien
cagttttgcacacgcatctgcttgc

SEQ ID NO: 812691 - DNA, 25 bp, Homo sapien
tgcttggccagagggactatcgact

SEQ ID NO: 812692 - DNA, 25 bp, Homo sapien
ggactatcgactccacagcacacat

SEQ ID NO: 812693 - DNA, 25 bp, Homo sapien
cagggaactttcagaggtcatgggc

SEQ ID NO: 812694 - DNA, 25 bp, Homo sapien
ctcaaggccgcctgccccatctctg

SEQ ID NO: 812695 - DNA, 25 bp, Homo sapien
tctcctcccctcaaggccgcctgcc

SEQ ID NO: 812696 - DNA, 25 bp, Homo sapien
cctccacatgcatctcctctcctct

SEQ ID NO: 812697 - DNA, 25 bp, Homo sapien
ctacaacccccctccacatgcatct

SEQ ID NO: 812698 - DNA, 25 bp, Homo sapien
tgaagaagaaaatatgcagcgctcc

SEQ ID NO: 812699 - DNA, 25 bp, Homo sapien
gaagaagaaaatatgcagcgctccc

SEQ ID NO: 812700 - DNA, 25 bp, Homo sapien
ctgaagaagaaaatatgcagcgctc

SEQ ID NO: 812701 - DNA, 25 bp, Homo sapien
aagaagaaaatatgcagcgctcccg

SEQ ID NO: 812702 - DNA, 25 bp, Homo sapien
caaaacaatcaacccaggtgtttgc

SEQ ID NO: 812703 - DNA, 25 bp, Homo sapien
cacatgctccgcgtgctcctcagtc

SEQ ID NO: 812704 - DNA, 25 bp, Homo sapien
agaggtgacgctgctgccacagtca

SEQ ID NO: 812705 - DNA, 25 bp, Homo sapien
agcagtcagccggacactccacatg

SEQ ID NO: 812706 - DNA, 25 bp, Homo sapien
atcacctggaagtcaccgcaacatc

SEQ ID NO: 812707 - DNA, 25 bp, Homo sapien
agcccggggctgtttctctcgccgt

SEQ ID NO: 812708 - DNA, 25 bp, Homo sapien
ggggctgtttctctcgccgtcacca

SEQ ID NO: 812709 - DNA, 25 bp, Homo sapien
gtttctctcgccgtcaccatgacat

SEQ ID NO: 812710 - DNA, 25 bp, Homo sapien
taccatcatacgtctgcaaaagttg

SEQ ID NO: 812711 - DNA, 25 bp, Homo sapien
tattcaacgcacaatccataaatgg

SEQ ID NO: 812712 - DNA, 25 bp, Homo sapien
tcctaatgaatgacgctgacacaat

SEQ ID NO: 812713 - DNA, 25 bp, Homo sapien
gaaggactttcatgcacgtatgcct

SEQ ID NO: 812714 - DNA, 25 bp, Homo sapien
gatgctatctctggtccttcatggc

SEQ ID NO: 812715 - DNA, 25 bp, Homo sapien
ttgatcctatgccatggagatgcta

SEQ ID NO: 812716 - DNA, 25 bp, Homo sapien
tctggtccttcatggctatacagca

SEQ ID NO: 812717 - DNA, 25 bp, Homo sapien
tcctcctgtcaatctatcccctttc

SEQ ID NO: 812718 - DNA, 25 bp, Homo sapien
agcccatagctgactctgccctgaa

SEQ ID NO: 812719 - DNA, 25 bp, Homo sapien
gttttatctccttggtatttggaga

SEQ ID NO: 812720 - DNA, 25 bp, Homo sapien
ataaatactatgtcctcaccaagcc

SEQ ID NO: 812721 - DNA, 25 bp, Homo sapien
tttggagagtatgtcataaatacta

SEQ ID NO: 812722 - DNA, 25 bp, Homo sapien
ccactttctgtactcattctccctt

SEQ ID NO: 812723 - DNA, 25 bp, Homo sapien
tcaagctcctagggccccatttcct

SEQ ID NO: 812724 - DNA, 25 bp, Homo sapien
atttcctgctttcccactttctgta

SEQ ID NO: 812725 - DNA, 25 bp, Homo sapien
cccatttcctgctttcccactttct

SEQ ID NO: 812726 - DNA, 25 bp, Homo sapien
tctctcagtctcattccaattttgg

SEQ ID NO: 812727 - DNA, 25 bp, Homo sapien
atgaatttttgtgtcctctttgcac

SEQ ID NO: 812728 - DNA, 25 bp, Homo sapien
gccatgctaatctctcagtctcatt

SEQ ID NO: 812729 - DNA, 25 bp, Homo sapien
acacttcatgaatttttgtgtcctc

SEQ ID NO: 812730 - DNA, 25 bp, Homo sapien
ggtctgctcaatccaactcttctgc

SEQ ID NO: 812731 - DNA, 25 bp, Homo sapien
ttttactagtagctgcccattcctc

SEQ ID NO: 812732 - DNA, 25 bp, Homo sapien
tgtgaaccagggtctgctcaatcca

SEQ ID NO: 812733 - DNA, 25 bp, Homo sapien
cacaaagttactgagggagaagcca

SEQ ID NO: 812734 - DNA, 25 bp, Homo sapien
tgtaatttgtacacacgcagttctt

SEQ ID NO: 812735 - DNA, 25 bp, Homo sapien
tacacacgcagttcttttgttctgc

SEQ ID NO: 812736 - DNA, 25 bp, Homo sapien
ggctaccaacaatttcacctgtaat

SEQ ID NO: 812737 - DNA, 25 bp, Homo sapien
agcccatccccaggctaccaacaat

SEQ ID NO: 812738 - DNA, 25 bp, Homo sapien
tgtactcaacatcaagttataaaca

SEQ ID NO: 812739 - DNA, 25 bp, Homo sapien
aagtctattctaatatgtactcaac

SEQ ID NO: 812740 - DNA, 25 bp, Homo sapien
cccaagttgtatgttaagtctattc

SEQ ID NO: 812741 - DNA, 25 bp, Homo sapien
taatttagaactcacacttaagtat

SEQ ID NO: 812742 - DNA, 25 bp, Homo sapien
tccgatactggaagactgatttaga

SEQ ID NO: 812743 - DNA, 25 bp, Homo sapien
tacatcacatctgactagagaccag

SEQ ID NO: 812744 - DNA, 25 bp, Homo sapien
gagtgattagctactagattctgaa

SEQ ID NO: 812745 - DNA, 25 bp, Homo sapien
tactccagcctaaggtaaacagctg

SEQ ID NO: 812746 - DNA, 25 bp, Homo sapien
taggtagtcattcaatctggtattg

SEQ ID NO: 812747 - DNA, 25 bp, Homo sapien
tcaatctggtattgatcttttcaca

SEQ ID NO: 812748 - DNA, 25 bp, Homo sapien
caatctggtattgatcttttcacaa

SEQ ID NO: 812749 - DNA, 25 bp, Homo sapien
cctttgccaataggtagtcattcaa

SEQ ID NO: 812750 - DNA, 25 bp, Homo sapien
catgagactggatttgcgtgcatcc

SEQ ID NO: 812751 - DNA, 25 bp, Homo sapien
ttaaaacagagtcagcctttccagt

SEQ ID NO: 812752 - DNA, 25 bp, Homo sapien
ggtaactttgatacacataaggctg

SEQ ID NO: 812753 - DNA, 25 bp, Homo sapien
taggttcaggtacaataaagacatg

SEQ ID NO: 812754 - DNA, 25 bp, Homo sapien
ttgtcagtgtagaggaaacagcctt

SEQ ID NO: 812755 - DNA, 25 bp, Homo sapien
gctttgaaaggacatgctaactctc

SEQ ID NO: 812756 - DNA, 25 bp, Homo sapien
agcaaggccctcgtttcaattctgt

SEQ ID NO: 812757 - DNA, 25 bp, Homo sapien
taactagagagaagacaacatctgc

SEQ ID NO: 812758 - DNA, 25 bp, Homo sapien
ccttccggctgacatagtgggtggc

SEQ ID NO: 812759 - DNA, 25 bp, Homo sapien
agatactggaaaccctcatgcaggg

SEQ ID NO: 812760 - DNA, 25 bp, Homo sapien
gactagacagagagtgccagagcaa

SEQ ID NO: 812761 - DNA, 25 bp, Homo sapien
agtagtgaccccttaactgtaggag

SEQ ID NO: 812762 - DNA, 25 bp, Homo sapien
ttaaatgtttgccaaaccttatcac

SEQ ID NO: 812763 - DNA, 25 bp, Homo sapien
gactacctcgaggagtaaacgaaca

SEQ ID NO: 812764 - DNA, 25 bp, Homo sapien
gatccaagtccacattaagtacaga

SEQ ID NO: 812765 - DNA, 25 bp, Homo sapien
gtactatatctggaatgcacacagc

SEQ ID NO: 812766 - DNA, 25 bp, Homo sapien
tgcagtccacggaccaatgctggtt

SEQ ID NO: 812767 - DNA, 25 bp, Homo sapien
tttatagagttgcaagtatgctacc

SEQ ID NO: 812768 - DNA, 25 bp, Homo sapien
tatgctaccattggcaaggaaacag

SEQ ID NO: 812769 - DNA, 25 bp, Homo sapien
tgggatcagtccctggattctaacc

SEQ ID NO: 812770 - DNA, 25 bp, Homo sapien
cttttgatgagtcttccctgtacct

SEQ ID NO: 812771 - DNA, 25 bp, Homo sapien
tgactcttcgtcttctcagaaaaag

SEQ ID NO: 812772 - DNA, 25 bp, Homo sapien
tacctgaacagtaagggtcaaactg

SEQ ID NO: 812773 - DNA, 25 bp, Homo sapien
tacaaacttgtgctataagatccac

SEQ ID NO: 812774 - DNA, 25 bp, Homo sapien
tatacttttagaccaagatacagag

SEQ ID NO: 812775 - DNA, 25 bp, Homo sapien
taatccaggccggagacaaaggtga

SEQ ID NO: 812776 - DNA, 25 bp, Homo sapien
caaaggatcaaagagctcagccata

SEQ ID NO: 812777 - DNA, 25 bp, Homo sapien
tgataaaagtcagtgtcgcaccctg

SEQ ID NO: 812778 - DNA, 25 bp, Homo sapien
ttaaacatgcggacaaagggaatct

SEQ ID NO: 812779 - DNA, 25 bp, Homo sapien
ctcaaaatagaaataataatttgtt

SEQ ID NO: 812780 - DNA, 25 bp, Homo sapien
gtctcaaaatagaaataataatttg

SEQ ID NO: 812781 - DNA, 25 bp, Homo sapien
tctcaaaatagaaataataatttgt

SEQ ID NO: 812782 - DNA, 25 bp, Homo sapien
ccgtctcaaaatagaaataataatt

SEQ ID NO: 812783 - DNA, 25 bp, Homo sapien
tggcaacaggagtggcacagataca

SEQ ID NO: 812784 - DNA, 25 bp, Homo sapien
gaaaaacagtttctcaggtcctcta

SEQ ID NO: 812785 - DNA, 25 bp, Homo sapien
tctttcatagcactctgagggaggg

SEQ ID NO: 812786 - DNA, 25 bp, Homo sapien
tgaacaaatatatgagccctaggtc

SEQ ID NO: 812787 - DNA, 25 bp, Homo sapien
tcttatatggaggatgtgaaaacag

SEQ ID NO: 812788 - DNA, 25 bp, Homo sapien
cagcatataggttagggaaaggtaa

SEQ ID NO: 812789 - DNA, 25 bp, Homo sapien
agacctgcttgcagtcattctgctt

SEQ ID NO: 812790 - DNA, 25 bp, Homo sapien
gacatatagcctttcatgttcagct

SEQ ID NO: 812791 - DNA, 25 bp, Homo sapien
tatctgtgcagaatccagtccatgt

SEQ ID NO: 812792 - DNA, 25 bp, Homo sapien
tatatctgtgcagaatccagtccat

SEQ ID NO: 812793 - DNA, 25 bp, Homo sapien
taatatatctgtgcagaatccagtc

SEQ ID NO: 812794 - DNA, 25 bp, Homo sapien
gtgtaatatatctgtgcagaatcca

SEQ ID NO: 812795 - DNA, 25 bp, Homo sapien
gggcctgatgcatgtttctcatctc

SEQ ID NO: 812796 - DNA, 25 bp, Homo sapien
ggcctgcagtcatcactgggtggaa

SEQ ID NO: 812797 - DNA, 25 bp, Homo sapien
tcatggcctgcagtcatcactgggt

SEQ ID NO: 812798 - DNA, 25 bp, Homo sapien
ccatgacctcatggcctgcagtcat

SEQ ID NO: 812799 - DNA, 25 bp, Homo sapien
aagtaggagcttctggagtagagga

SEQ ID NO: 812800 - DNA, 25 bp, Homo sapien
taggagcttctggagtagaggatcc

SEQ ID NO: 812801 - DNA, 25 bp, Homo sapien
ggagtagaggatcccaatcagtggt

SEQ ID NO: 812802 - DNA, 25 bp, Homo sapien
gtagaggatcccaatcagtggtagg

SEQ ID NO: 812803 - DNA, 25 bp, Homo sapien
gacacatctctaggcattgcctgaa

SEQ ID NO: 812804 - DNA, 25 bp, Homo sapien
cagtatatttctttggacgcagtgg

SEQ ID NO: 812805 - DNA, 25 bp, Homo sapien
tccaaggctctagtccaagtcagag

SEQ ID NO: 812806 - DNA, 25 bp, Homo sapien
gacgcagtggacttccaattcttgg

SEQ ID NO: 812807 - DNA, 25 bp, Homo sapien
catcatcagatactggtgttgagtc

SEQ ID NO: 812808 - DNA, 25 bp, Homo sapien
tctatttgttgcgtctgttcatcaa

SEQ ID NO: 812809 - DNA, 25 bp, Homo sapien
ggatatagttgacttgatacatcat

SEQ ID NO: 812810 - DNA, 25 bp, Homo sapien
cttctggaggatatagttgacttga

SEQ ID NO: 812811 - DNA, 25 bp, Homo sapien
tcaatttcataatctgaatcattac

SEQ ID NO: 812812 - DNA, 25 bp, Homo sapien
catcaatttcataatctgaatcatt

SEQ ID NO: 812813 - DNA, 25 bp, Homo sapien
gctcatcaatttcataatctgaatc

SEQ ID NO: 812814 - DNA, 25 bp, Homo sapien
tcagctcatcaatttcataatctga

SEQ ID NO: 812815 - DNA, 25 bp, Homo sapien
ttaacaagggccataatgatgtccc

SEQ ID NO: 812816 - DNA, 25 bp, Homo sapien
agtccgagaactccagacatttgtc

SEQ ID NO: 812817 - DNA, 25 bp, Homo sapien
gttgggcaggaagtccgagaactcc

SEQ ID NO: 812818 - DNA, 25 bp, Homo sapien
gacctttgcatgtttccgctctctc

SEQ ID NO: 812819 - DNA, 25 bp, Homo sapien
ctgatgtccagtgaagggattaggt

SEQ ID NO: 812820 - DNA, 25 bp, Homo sapien
tggtccctctactccaacctgaaca

SEQ ID NO: 812821 - DNA, 25 bp, Homo sapien
gcactgatgtccagtgaagggatta

SEQ ID NO: 812822 - DNA, 25 bp, Homo sapien
gtgaagggattaggtgtgtggtggc

SEQ ID NO: 812823 - DNA, 25 bp, Homo sapien
cagctcccaattaagcatgtggaga

SEQ ID NO: 812824 - DNA, 25 bp, Homo sapien
gctcccaattaagcatgtggagaag

SEQ ID NO: 812825 - DNA, 25 bp, Homo sapien
agcagctcccaattaagcatgtgga

SEQ ID NO: 812826 - DNA, 25 bp, Homo sapien
ctagcagctcccaattaagcatgtg

SEQ ID NO: 812827 - DNA, 25 bp, Homo sapien
ccttgtaacagcaaacctaggagca

SEQ ID NO: 812828 - DNA, 25 bp, Homo sapien
gactgacttgagtcttataccaaag

SEQ ID NO: 812829 - DNA, 25 bp, Homo sapien
tttaccttaatggtaggttcagcca

SEQ ID NO: 812830 - DNA, 25 bp, Homo sapien
cctaggagcattcaggagcccaaag

SEQ ID NO: 812831 - DNA, 25 bp, Homo sapien
cgaagactgagatgtctcatggaag

SEQ ID NO: 812832 - DNA, 25 bp, Homo sapien
gtacactctggcttgcaagtaacag

SEQ ID NO: 812833 - DNA, 25 bp, Homo sapien
tgaactagctgactccgaagactga

SEQ ID NO: 812834 - DNA, 25 bp, Homo sapien
ggcatgcccctgtgtttggtacact

SEQ ID NO: 812835 - DNA, 25 bp, Homo sapien
cgggcatgggcatctttctgctgct

SEQ ID NO: 812836 - DNA, 25 bp, Homo sapien
gggcatgggcatctttctgctgctt

SEQ ID NO: 812837 - DNA, 25 bp, Homo sapien
gcatgggcatctttctgctgcttcc

SEQ ID NO: 812838 - DNA, 25 bp, Homo sapien
gcgggcatgggcatctttctgctgc

SEQ ID NO: 812839 - DNA, 25 bp, Homo sapien
tagtttccaggagactccaatggag

SEQ ID NO: 812840 - DNA, 25 bp, Homo sapien
ttgaacacaacccttgcaggtcagg

SEQ ID NO: 812841 - DNA, 25 bp, Homo sapien
gaggttgtggcgtcttgtccttcag

SEQ ID NO: 812842 - DNA, 25 bp, Homo sapien
ccaatggagctaggacattgaatgg

SEQ ID NO: 812843 - DNA, 25 bp, Homo sapien
ggacacagtgaatcatgtaaacaat

SEQ ID NO: 812844 - DNA, 25 bp, Homo sapien
ttcaggacacagtgaatcatgtaaa

SEQ ID NO: 812845 - DNA, 25 bp, Homo sapien
caggacacagtgaatcatgtaaaca

SEQ ID NO: 812846 - DNA, 25 bp, Homo sapien
tccttcaggacacagtgaatcatgt

SEQ ID NO: 812847 - DNA, 25 bp, Homo sapien
ctgctcaaaggtagcttttgctttc

SEQ ID NO: 812848 - DNA, 25 bp, Homo sapien
ggtgcttattccactggttctgctc

SEQ ID NO: 812849 - DNA, 25 bp, Homo sapien
cttctctttggtgcttattccactg

SEQ ID NO: 812850 - DNA, 25 bp, Homo sapien
tgaactgactaagcgctgcttctct

SEQ ID NO: 812851 - DNA, 25 bp, Homo sapien
cagttttgccggttcacataaagta

SEQ ID NO: 812852 - DNA, 25 bp, Homo sapien
ggtaccagttttgccggttcacata

SEQ ID NO: 812853 - DNA, 25 bp, Homo sapien
ttgccggttcacataaagtatttca

SEQ ID NO: 812854 - DNA, 25 bp, Homo sapien
ttggtaccagttttgccggttcaca

SEQ ID NO: 812855 - DNA, 25 bp, Homo sapien
tcatcattagaagctggaggcatgt

SEQ ID NO: 812856 - DNA, 25 bp, Homo sapien
gagacccctggaaactccgtgagga

SEQ ID NO: 812857 - DNA, 25 bp, Homo sapien
tggatggtgccacagatcccgcatc

SEQ ID NO: 812858 - DNA, 25 bp, Homo sapien
ccaggaaaggaaaggctctgtccaa

SEQ ID NO: 812859 - DNA, 25 bp, Homo sapien
taataaccctctgccactactggtg

SEQ ID NO: 812860 - DNA, 25 bp, Homo sapien
tatcactccatagggttgggatgag

SEQ ID NO: 812861 - DNA, 25 bp, Homo sapien
tagctgaaaacaacgtgtggatctg

SEQ ID NO: 812862 - DNA, 25 bp, Homo sapien
agatgtagcctgttcatttgaggac

SEQ ID NO: 812863 - DNA, 25 bp, Homo sapien
tgctgaagggcacacttctgcttca

SEQ ID NO: 812864 - DNA, 25 bp, Homo sapien
gctgaagggcacacttctgcttcat

SEQ ID NO: 812865 - DNA, 25 bp, Homo sapien
cttgatgctgaagggcacacttctg

SEQ ID NO: 812866 - DNA, 25 bp, Homo sapien
gatgctgaagggcacacttctgctt

SEQ ID NO: 812867 - DNA, 25 bp, Homo sapien
gtctgagctcgaatatcctcctgtg

SEQ ID NO: 812868 - DNA, 25 bp, Homo sapien
ctgtctgagctcgaatatcctcctg

SEQ ID NO: 812869 - DNA, 25 bp, Homo sapien
aatatcctcctgtgttggttctgtc

SEQ ID NO: 812870 - DNA, 25 bp, Homo sapien
cctgtgttggttctgtcagagcctc

SEQ ID NO: 812871 - DNA, 25 bp, Homo sapien
caaggcaagttgatcttttctagct

SEQ ID NO: 812872 - DNA, 25 bp, Homo sapien
tgattgagttttgcccattcaaggc

SEQ ID NO: 812873 - DNA, 25 bp, Homo sapien
tctggagccctgctcaatgctggca

SEQ ID NO: 812874 - DNA, 25 bp, Homo sapien
cagtagtggtgggatgattgagttt

SEQ ID NO: 812875 - DNA, 25 bp, Homo sapien
cttttaccatgaaccaaaggggcag

SEQ ID NO: 812876 - DNA, 25 bp, Homo sapien
tgtggggctgccttttaccatgaac

SEQ ID NO: 812877 - DNA, 25 bp, Homo sapien
ccactgtaataggaactcttgacac

SEQ ID NO: 812878 - DNA, 25 bp, Homo sapien
gtaataggaactcttgacacattgt

SEQ ID NO: 812879 - DNA, 25 bp, Homo sapien
atttgtccacccacaaagttcctgt

SEQ ID NO: 812880 - DNA, 25 bp, Homo sapien
catttgtccacccacaaagttcctg

SEQ ID NO: 812881 - DNA, 25 bp, Homo sapien
caggttcctgcttcccatttgtcca

SEQ ID NO: 812882 - DNA, 25 bp, Homo sapien
ttatttcctcctgatcccaggttcc

SEQ ID NO: 812883 - DNA, 25 bp, Homo sapien
gtttttctaaaagccagatgatgcc

SEQ ID NO: 812884 - DNA, 25 bp, Homo sapien
ctggtttttctaaaagccagatgat

SEQ ID NO: 812885 - DNA, 25 bp, Homo sapien
ggtttttctaaaagccagatgatgc

SEQ ID NO: 812886 - DNA, 25 bp, Homo sapien
tttttctaaaagccagatgatgcct

SEQ ID NO: 812887 - DNA, 25 bp, Homo sapien
caatactattctctgtgctccaaag

SEQ ID NO: 812888 - DNA, 25 bp, Homo sapien
cctagttacctactctgtggaatat

SEQ ID NO: 812889 - DNA, 25 bp, Homo sapien
gagactatgattcggagaggcctcc

SEQ ID NO: 812890 - DNA, 25 bp, Homo sapien
tacacattgtcataagtgctaagaa

SEQ ID NO: 812891 - DNA, 25 bp, Homo sapien
ggttcctggtatgtgataagtaaag

SEQ ID NO: 812892 - DNA, 25 bp, Homo sapien
cttgtctatacagtccctgcatggg

SEQ ID NO: 812893 - DNA, 25 bp, Homo sapien
ttgggaaaattgacctcacaccttg

SEQ ID NO: 812894 - DNA, 25 bp, Homo sapien
ggaaaggaatttactcaactcatag

SEQ ID NO: 812895 - DNA, 25 bp, Homo sapien
tgtccgctctgccaaagcaaggcat

SEQ ID NO: 812896 - DNA, 25 bp, Homo sapien
ttcacctgcacttcgtgtcagctca

SEQ ID NO: 812897 - DNA, 25 bp, Homo sapien
ctggaaacagccatggtccctgtgg

SEQ ID NO: 812898 - DNA, 25 bp, Homo sapien
caaggactatgattgtgtccaccca

SEQ ID NO: 812899 - DNA, 25 bp, Homo sapien
tttttccgagcggagagatactacc

SEQ ID NO: 812900 - DNA, 25 bp, Homo sapien
ggagaagtgagatgaaaggagatgc

SEQ ID NO: 812901 - DNA, 25 bp, Homo sapien
tttccgagcggagagatactaccca

SEQ ID NO: 812902 - DNA, 25 bp, Homo sapien
tcatttttttccgagcggagagata

SEQ ID NO: 812903 - DNA, 25 bp, Homo sapien
tttaatttctccagttttgtcagac

SEQ ID NO: 812904 - DNA, 25 bp, Homo sapien
ggatgaagaaaatgaaagctgaaaa

SEQ ID NO: 812905 - DNA, 25 bp, Homo sapien
ctgaaaaagaatttaatttctccag

SEQ ID NO: 812906 - DNA, 25 bp, Homo sapien
ggggatgaagaaaatgaaagctgaa

SEQ ID NO: 812907 - DNA, 25 bp, Homo sapien
ggtgttcagcctcttgtaagtcaga

SEQ ID NO: 812908 - DNA, 25 bp, Homo sapien
gggtgttcagcctcttgtaagtcag

SEQ ID NO: 812909 - DNA, 25 bp, Homo sapien
taaaacgctgaggtagatctctgtg

SEQ ID NO: 812910 - DNA, 25 bp, Homo sapien
taatgagttgatgatcacaggaccc

SEQ ID NO: 812911 - DNA, 25 bp, Homo sapien
cacaggacccaggaatgctctacta

SEQ ID NO: 812912 - DNA, 25 bp, Homo sapien
ctggcacactgggatggattatgaa

SEQ ID NO: 812913 - DNA, 25 bp, Homo sapien
tggacacagattctggaacatgagc

SEQ ID NO: 812914 - DNA, 25 bp, Homo sapien
tggtgtgcctggcaaagccacctgt

SEQ ID NO: 812915 - DNA, 25 bp, Homo sapien
acagattctggaacatgagcctggg

SEQ ID NO: 812916 - DNA, 25 bp, Homo sapien
gcaaagccacctgtgctggacacag

SEQ ID NO: 812917 - DNA, 25 bp, Homo sapien
tggtcagcaagtcgtggagaagtac

SEQ ID NO: 812918 - DNA, 25 bp, Homo sapien
aatttccctctgagtttttcaggat

SEQ ID NO: 812919 - DNA, 25 bp, Homo sapien
aactggcttggaagtgccagggcac

SEQ ID NO: 812920 - DNA, 25 bp, Homo sapien
gcaagtcgtggagaagtacaaaatg

SEQ ID NO: 812921 - DNA, 25 bp, Homo sapien
gtggagtagccttccactgagacat

SEQ ID NO: 812922 - DNA, 25 bp, Homo sapien
ggtggagtagccttccactgagaca

SEQ ID NO: 812923 - DNA, 25 bp, Homo sapien
ctcagaccacctgtagatgaaggtg

SEQ ID NO: 812924 - DNA, 25 bp, Homo sapien
ctgtttctcttataggaaacctgag

SEQ ID NO: 812925 - DNA, 25 bp, Homo sapien
tcttataggaaacctgagaactgtc

SEQ ID NO: 812926 - DNA, 25 bp, Homo sapien
attctccccaaccaaagcatccctc

SEQ ID NO: 812927 - DNA, 25 bp, Homo sapien
ctgagaactgtcctgacaggtagga

SEQ ID NO: 812928 - DNA, 25 bp, Homo sapien
aaaagaccactagatgaatcaggaa

SEQ ID NO: 812929 - DNA, 25 bp, Homo sapien
atgtggtcaaaagaccactagatga

SEQ ID NO: 812930 - DNA, 25 bp, Homo sapien
atgcaggtatgtttcacactcaaac

SEQ ID NO: 812931 - DNA, 25 bp, Homo sapien
gctcagctcccaaagcaatgtggtc

SEQ ID NO: 812932 - DNA, 25 bp, Homo sapien
aaagcaacgaggtgctgtgtgccag

SEQ ID NO: 812933 - DNA, 25 bp, Homo sapien
ccacaaagcaacgaggtgctgtgtg

SEQ ID NO: 812934 - DNA, 25 bp, Homo sapien
acaaagcaacgaggtgctgtgtgcc

SEQ ID NO: 812935 - DNA, 25 bp, Homo sapien
caaagcaacgaggtgctgtgtgcca

SEQ ID NO: 812936 - DNA, 25 bp, Homo sapien
cctcaggtaagccaattgtggactt

SEQ ID NO: 812937 - DNA, 25 bp, Homo sapien
ttgtggacttggttaaagactggcc

SEQ ID NO: 812938 - DNA, 25 bp, Homo sapien
gactggccttcatgggaagcctttg

SEQ ID NO: 812939 - DNA, 25 bp, Homo sapien
aggacagctcgaccttgcccttcat

SEQ ID NO: 812940 - DNA, 25 bp, Homo sapien
caacattctgcggtatacactgagc

SEQ ID NO: 812941 - DNA, 25 bp, Homo sapien
gagctcacataatggccagcctcca

SEQ ID NO: 812942 - DNA, 25 bp, Homo sapien
cctccatttttattgcggattgcca

SEQ ID NO: 812943 - DNA, 25 bp, Homo sapien
gacatggccaacattctgcggtata

SEQ ID NO: 812944 - DNA, 25 bp, Homo sapien
ctggtaattctgttccagtctcttg

SEQ ID NO: 812945 - DNA, 25 bp, Homo sapien
aattctgttccagtctcttgaggtc

SEQ ID NO: 812946 - DNA, 25 bp, Homo sapien
gctggggtccctggtaattctgttc

SEQ ID NO: 812947 - DNA, 25 bp, Homo sapien
ggtccctggtaattctgttccagtc

SEQ ID NO: 812948 - DNA, 25 bp, Homo sapien
gtgctgctgcttgcctacccgtttg

SEQ ID NO: 812949 - DNA, 25 bp, Homo sapien
gctgcttgcctacccgtttgccttt

SEQ ID NO: 812950 - DNA, 25 bp, Homo sapien
gctgctgcttgcctacccgtttgcc

SEQ ID NO: 812951 - DNA, 25 bp, Homo sapien
tgctgcttgcctacccgtttgcctt

SEQ ID NO: 812952 - DNA, 25 bp, Homo sapien
cagatgagagccacatgctccaaac

SEQ ID NO: 812953 - DNA, 25 bp, Homo sapien
tatcacccagtcatttgtgaagcag

SEQ ID NO: 812954 - DNA, 25 bp, Homo sapien
cagaggacagctatcacccagtcat

SEQ ID NO: 812955 - DNA, 25 bp, Homo sapien
atgctccaaaccctctgggcctttg

SEQ ID NO: 812956 - DNA, 25 bp, Homo sapien
actgtcccatgcctgagcatggtga

SEQ ID NO: 812957 - DNA, 25 bp, Homo sapien
acccaggtgcgggactgtcccatgc

SEQ ID NO: 812958 - DNA, 25 bp, Homo sapien
aggtgcgggactgtcccatgcctga

SEQ ID NO: 812959 - DNA, 25 bp, Homo sapien
ctgagcatggtgacggcgaggaggg

SEQ ID NO: 812960 - DNA, 25 bp, Homo sapien
aaaagtaggtctgactgtgggtctg

SEQ ID NO: 812961 - DNA, 25 bp, Homo sapien
tctgtccagaaaagtaggtctgact

SEQ ID NO: 812962 - DNA, 25 bp, Homo sapien
tgtctgtcatggcaggagccagaat

SEQ ID NO: 812963 - DNA, 25 bp, Homo sapien
tccagaaaagtaggtctgactgtgg

SEQ ID NO: 812964 - DNA, 25 bp, Homo sapien
tcctctgctgaatccgccttgtgga

SEQ ID NO: 812965 - DNA, 25 bp, Homo sapien
tgatgagttccactgtcaaccccct

SEQ ID NO: 812966 - DNA, 25 bp, Homo sapien
cctctgctgaatccgccttgtggat

SEQ ID NO: 812967 - DNA, 25 bp, Homo sapien
tgttcacactcagcccactgaactg

SEQ ID NO: 812968 - DNA, 25 bp, Homo sapien
tacggtgggcgagacaattctttca

SEQ ID NO: 812969 - DNA, 25 bp, Homo sapien
tgagcttgaacgaaatcacctatag

SEQ ID NO: 812970 - DNA, 25 bp, Homo sapien
gatgcagagaaaccagccaaggaaa

SEQ ID NO: 812971 - DNA, 25 bp, Homo sapien
cgacagagaattggagacaggcact

SEQ ID NO: 812972 - DNA, 25 bp, Homo sapien
tacttctatgctcatacccaatgtg

SEQ ID NO: 812973 - DNA, 25 bp, Homo sapien
cgagtcatcaggtgtaggacccact

SEQ ID NO: 812974 - DNA, 25 bp, Homo sapien
taaatccaatgttagcctttgcctt

SEQ ID NO: 812975 - DNA, 25 bp, Homo sapien
tcccttagaagcacacgagtcatca

SEQ ID NO: 812976 - DNA, 25 bp, Homo sapien
caaatgcagattgtgctacagagcc

SEQ ID NO: 812977 - DNA, 25 bp, Homo sapien
gacagtcggctgagggctccatagt

SEQ ID NO: 812978 - DNA, 25 bp, Homo sapien
catagtgtgctctcaagagcatggc

SEQ ID NO: 812979 - DNA, 25 bp, Homo sapien
cctctgagtgtggagcttgacagtc

SEQ ID NO: 812980 - DNA, 25 bp, Homo sapien
ccatttgagtaccagtggtatgggc

SEQ ID NO: 812981 - DNA, 25 bp, Homo sapien
tgaaaggaagtaagagtgctccatt

SEQ ID NO: 812982 - DNA, 25 bp, Homo sapien
gggctgttccacagaataagggcag

SEQ ID NO: 812983 - DNA, 25 bp, Homo sapien
ggtatgggctgttccacagaataag

SEQ ID NO: 812984 - DNA, 25 bp, Homo sapien
gcttctttggattacatgggctatc

SEQ ID NO: 812985 - DNA, 25 bp, Homo sapien
tatctcatatggcacaagtagaggg

SEQ ID NO: 812986 - DNA, 25 bp, Homo sapien
taattcctgagtgcctaaatgtggt

SEQ ID NO: 812987 - DNA, 25 bp, Homo sapien
taaatgtggtgaccggcacctcaca

SEQ ID NO: 812988 - DNA, 25 bp, Homo sapien
tcctgcgagtgaacctggaacccat

SEQ ID NO: 812989 - DNA, 25 bp, Homo sapien
tttacgcgcgaagaagttgccggat

SEQ ID NO: 812990 - DNA, 25 bp, Homo sapien
cgagtgtttacagatccggccagga

SEQ ID NO: 812991 - DNA, 25 bp, Homo sapien
ttgagacgtctccaggaccttaggg

SEQ ID NO: 812992 - DNA, 25 bp, Homo sapien
ccgccgccccccgaggagagctgcc

SEQ ID NO: 812993 - DNA, 25 bp, Homo sapien
cgccccccgaggagagctgcccggc

SEQ ID NO: 812994 - DNA, 25 bp, Homo sapien
gccgccccccgaggagagctgcccg

SEQ ID NO: 812995 - DNA, 25 bp, Homo sapien
gccgccgccccccgaggagagctgc

SEQ ID NO: 812996 - DNA, 25 bp, Homo sapien
tgtactcgcggtcgcaactgtcgct

SEQ ID NO: 812997 - DNA, 25 bp, Homo sapien
gcagcaaggacgtctacggctactc

SEQ ID NO: 812998 - DNA, 25 bp, Homo sapien
agcggccttcgatgcggcgcagtat

SEQ ID NO: 812999 - DNA, 25 bp, Homo sapien
tgccccgcagcacggagttcatgag

SEQ ID NO: 813000 - DNA, 25 bp, Homo sapien
ctcttactctagacgtggcagccct

SEQ ID NO: 813001 - DNA, 25 bp, Homo sapien
cactcttcccatggtgtagccaaca

SEQ ID NO: 813002 - DNA, 25 bp, Homo sapien
aattccctagctgtgatgataccag

SEQ ID NO: 813003 - DNA, 25 bp, Homo sapien
gaatgattctggattactactggct

SEQ ID NO: 813004 - DNA, 25 bp, Homo sapien
gactaaaggatgtccactactctcc

SEQ ID NO: 813005 - DNA, 25 bp, Homo sapien
tgtccactacctgacaggaactgag

SEQ ID NO: 813006 - DNA, 25 bp, Homo sapien
tatctgttgtctgcgatgatgcatc

SEQ ID NO: 813007 - DNA, 25 bp, Homo sapien
tcattcggcaaacacattgagtgtc

SEQ ID NO: 813008 - DNA, 25 bp, Homo sapien
tgttactgaacctctatggtacaga

SEQ ID NO: 813009 - DNA, 25 bp, Homo sapien
cacatgcccacctcaaagttctaag

SEQ ID NO: 813010 - DNA, 25 bp, Homo sapien
gcaaaataagatgtttcctgggtaa

SEQ ID NO: 813011 - DNA, 25 bp, Homo sapien
tccttagagtctggacagcacagtt

SEQ ID NO: 813012 - DNA, 25 bp, Homo sapien
cagcatgcgtaaagaagctgtccaa

SEQ ID NO: 813013 - DNA, 25 bp, Homo sapien
acagcatgcgtaaagaagctgtcca

SEQ ID NO: 813014 - DNA, 25 bp, Homo sapien
aacagcatgcgtaaagaagctgtcc

SEQ ID NO: 813015 - DNA, 25 bp, Homo sapien
tcagagggggtggattgtatagttt

SEQ ID NO: 813016 - DNA, 25 bp, Homo sapien
agagggggtggattgtatagtttct

SEQ ID NO: 813017 - DNA, 25 bp, Homo sapien
cagagggggtggattgtatagtttc

SEQ ID NO: 813018 - DNA, 25 bp, Homo sapien
cttcagagggggtggattgtatagt

SEQ ID NO: 813019 - DNA, 25 bp, Homo sapien
ccaacttctgccttcgtgttgacat

SEQ ID NO: 813020 - DNA, 25 bp, Homo sapien
tgttgatggagttggtaccatgtag

SEQ ID NO: 813021 - DNA, 25 bp, Homo sapien
cttcgtgttgacatggtgttctccc

SEQ ID NO: 813022 - DNA, 25 bp, Homo sapien
ttggtaccatgtagggggctgcccc

SEQ ID NO: 813023 - DNA, 25 bp, Homo sapien
gtttaatccgagcacctgcgtccag

SEQ ID NO: 813024 - DNA, 25 bp, Homo sapien
tgtgaatctcagtcgagggccagag

SEQ ID NO: 813025 - DNA, 25 bp, Homo sapien
tgtagttcagtccaagtcaaaatgc

SEQ ID NO: 813026 - DNA, 25 bp, Homo sapien
gactgtgtgagctgcagcatgcact

SEQ ID NO: 813027 - DNA, 25 bp, Homo sapien
catttggagagcctaggataaaaat

SEQ ID NO: 813028 - DNA, 25 bp, Homo sapien
taataatatagattccttgaacccc

SEQ ID NO: 813029 - DNA, 25 bp, Homo sapien
gagacctttagactcccatttggag

SEQ ID NO: 813030 - DNA, 25 bp, Homo sapien
ccatccttagatccagaccggaggg

SEQ ID NO: 813031 - DNA, 25 bp, Homo sapien
taggaagctggctaactacgcctga

SEQ ID NO: 813032 - DNA, 25 bp, Homo sapien
aatttcatgggaaaggcaggaccct

SEQ ID NO: 813033 - DNA, 25 bp, Homo sapien
tctgggcttaacttcctgaggacca

SEQ ID NO: 813034 - DNA, 25 bp, Homo sapien
catctgatctaggaagctaagccca

SEQ ID NO: 813035 - DNA, 25 bp, Homo sapien
tttttaggtccataagcaagacgcc

SEQ ID NO: 813036 - DNA, 25 bp, Homo sapien
gttgtcaacagataggccaatagtt

SEQ ID NO: 813037 - DNA, 25 bp, Homo sapien
taggtctctgttcacagtcaaggag

SEQ ID NO: 813038 - DNA, 25 bp, Homo sapien
ggaggacctacccaagttgtcaaca

SEQ ID NO: 813039 - DNA, 25 bp, Homo sapien
taggaccccagcctgtgacctcatt

SEQ ID NO: 813040 - DNA, 25 bp, Homo sapien
gtcacattaagggttaagccttcaa

SEQ ID NO: 813041 - DNA, 25 bp, Homo sapien
acaccagtcctagtgaagtaggacc

SEQ ID NO: 813042 - DNA, 25 bp, Homo sapien
ggcacatgaacgagagcatctggca

SEQ ID NO: 813043 - DNA, 25 bp, Homo sapien
tattaactgtggcaaagaggaggtg

SEQ ID NO: 813044 - DNA, 25 bp, Homo sapien
gtctctcacagacgtgcactccagg

SEQ ID NO: 813045 - DNA, 25 bp, Homo sapien
cacagggcatcaatggctctagcat

SEQ ID NO: 813046 - DNA, 25 bp, Homo sapien
ccaggagcaaggaatgatggtcaaa

SEQ ID NO: 813047 - DNA, 25 bp, Homo sapien
attcataaccatggatccagtagaa

SEQ ID NO: 813048 - DNA, 25 bp, Homo sapien
ttgcggaagctggattgtagagtca

SEQ ID NO: 813049 - DNA, 25 bp, Homo sapien
tctgcagagaagcatcagtaacttg

SEQ ID NO: 813050 - DNA, 25 bp, Homo sapien
taacttgtgggcgtctcacttcctg

SEQ ID NO: 813051 - DNA, 25 bp, Homo sapien
cttcctgggatttgagttgaggagc

SEQ ID NO: 813052 - DNA, 25 bp, Homo sapien
catggcccaccttgtttccagatct

SEQ ID NO: 813053 - DNA, 25 bp, Homo sapien
ttccagatcttgcagcttttgagca

SEQ ID NO: 813054 - DNA, 25 bp, Homo sapien
agatcttgcagcttttgagcaagag

SEQ ID NO: 813055 - DNA, 25 bp, Homo sapien
cttttgagcaagaggtttttctgga

SEQ ID NO: 813056 - DNA, 25 bp, Homo sapien
tggaatgtggcacccctaaactcag

SEQ ID NO: 813057 - DNA, 25 bp, Homo sapien
ccacccagtgagagccatattaagg

SEQ ID NO: 813058 - DNA, 25 bp, Homo sapien
aaggatgcaaggatccaaccccagt

SEQ ID NO: 813059 - DNA, 25 bp, Homo sapien
ctctgccggtaggatccaaggatgc

SEQ ID NO: 813060 - DNA, 25 bp, Homo sapien
aggaatctgcaggttcagttgtctg

SEQ ID NO: 813061 - DNA, 25 bp, Homo sapien
ggctgcacaccagagaggcacttgg

SEQ ID NO: 813062 - DNA, 25 bp, Homo sapien
gactgggtgatttgtaaaaactaga

SEQ ID NO: 813063 - DNA, 25 bp, Homo sapien
tggttaaagaagactcctctaagga

SEQ ID NO: 813064 - DNA, 25 bp, Homo sapien
ggatctcctcccggactgagggtga

SEQ ID NO: 813065 - DNA, 25 bp, Homo sapien
atctcctcccggactgagggtgagg

SEQ ID NO: 813066 - DNA, 25 bp, Homo sapien
tggatctcctcccggactgagggtg

SEQ ID NO: 813067 - DNA, 25 bp, Homo sapien
gatctcctcccggactgagggtgag

SEQ ID NO: 813068 - DNA, 25 bp, Homo sapien
ccgagatgatttggcagcgtcagtc

SEQ ID NO: 813069 - DNA, 25 bp, Homo sapien
aggaatcagccaggagccttagctt

SEQ ID NO: 813070 - DNA, 25 bp, Homo sapien
tgtaggagttatccgaagctcggca

SEQ ID NO: 813071 - DNA, 25 bp, Homo sapien
caagttggatggtccgacttccagt

SEQ ID NO: 813072 - DNA, 25 bp, Homo sapien
gttatctcttacaggcagggatggg

SEQ ID NO: 813073 - DNA, 25 bp, Homo sapien
aggtggttatctcttacaggcaggg

SEQ ID NO: 813074 - DNA, 25 bp, Homo sapien
taaaggtggttatctcttacaggca

SEQ ID NO: 813075 - DNA, 25 bp, Homo sapien
atgatggcttactttgggctcacag

SEQ ID NO: 813076 - DNA, 25 bp, Homo sapien
gatggcatcaacatctacatggcca

SEQ ID NO: 813077 - DNA, 25 bp, Homo sapien
gagacctcagaaccatcgtcagtgc

SEQ ID NO: 813078 - DNA, 25 bp, Homo sapien
tctctgaattgtggccgctctgctc

SEQ ID NO: 813079 - DNA, 25 bp, Homo sapien
ctacatggccaactgagctagagac

SEQ ID NO: 813080 - DNA, 25 bp, Homo sapien
tcatcatcacaaagcatggcatgta

SEQ ID NO: 813081 - DNA, 25 bp, Homo sapien
tccgggctgtacagggaaagggctg

SEQ ID NO: 813082 - DNA, 25 bp, Homo sapien
cagaaaggccgcagtagaagtggca

SEQ ID NO: 813083 - DNA, 25 bp, Homo sapien
agcatggcatgtaagaagtgtcctc

SEQ ID NO: 813084 - DNA, 25 bp, Homo sapien
tctggaattacccatcatgtgtgtc

SEQ ID NO: 813085 - DNA, 25 bp, Homo sapien
ctatacctaggaggaatatttttgc

SEQ ID NO: 813086 - DNA, 25 bp, Homo sapien
ctgccttgctctatacctaggagga

SEQ ID NO: 813087 - DNA, 25 bp, Homo sapien
gtgtctgttgaatcaagtgagaatt

SEQ ID NO: 813088 - DNA, 25 bp, Homo sapien
tctctgatgggtagacaaggacctt

SEQ ID NO: 813089 - DNA, 25 bp, Homo sapien
ttattccagtggcctctgtactgct

SEQ ID NO: 813090 - DNA, 25 bp, Homo sapien
tagacaaggaccttgcgggccacgg

SEQ ID NO: 813091 - DNA, 25 bp, Homo sapien
tctgatgggtagacaaggaccttgc

SEQ ID NO: 813092 - DNA, 25 bp, Homo sapien
agctgattgcaataagggagtagtt

SEQ ID NO: 813093 - DNA, 25 bp, Homo sapien
tcataggattttccctgttcaagag

SEQ ID NO: 813094 - DNA, 25 bp, Homo sapien
aagctgattgcaataagggagtagt

SEQ ID NO: 813095 - DNA, 25 bp, Homo sapien
taggattttccctgttcaagagcat

SEQ ID NO: 813096 - DNA, 25 bp, Homo sapien
gtgtgcgtctaaattcttccgcttt

SEQ ID NO: 813097 - DNA, 25 bp, Homo sapien
ccagtgtgcgtctaaattcttccgc

SEQ ID NO: 813098 - DNA, 25 bp, Homo sapien
cagtgtgcgtctaaattcttccgct

SEQ ID NO: 813099 - DNA, 25 bp, Homo sapien
gtgcgtctaaattcttccgcttttc

SEQ ID NO: 813100 - DNA, 25 bp, Homo sapien
ataaagcagcggaggcgatgatgct

SEQ ID NO: 813101 - DNA, 25 bp, Homo sapien
gataaagcagcggaggcgatgatgc

SEQ ID NO: 813102 - DNA, 25 bp, Homo sapien
ctgataaagcagcggaggcgatgat

SEQ ID NO: 813103 - DNA, 25 bp, Homo sapien
tgataaagcagcggaggcgatgatg

SEQ ID NO: 813104 - DNA, 25 bp, Homo sapien
gacattcggtggtagtatcatctca

SEQ ID NO: 813105 - DNA, 25 bp, Homo sapien
aacacagacattcggtggtagtatc

SEQ ID NO: 813106 - DNA, 25 bp, Homo sapien
tcaagaaccgacaacagtttcagat

SEQ ID NO: 813107 - DNA, 25 bp, Homo sapien
ggtagtatcatctcaagaaccgaca

SEQ ID NO: 813108 - DNA, 25 bp, Homo sapien
aaactattgccggaacgttgtagat

SEQ ID NO: 813109 - DNA, 25 bp, Homo sapien
ctgcaaaactattgccggaacgttg

SEQ ID NO: 813110 - DNA, 25 bp, Homo sapien
gccggaacgttgtagatatccacaa

SEQ ID NO: 813111 - DNA, 25 bp, Homo sapien
tgtagatatccacaatacaggttgg

SEQ ID NO: 813112 - DNA, 25 bp, Homo sapien
tgtaggaatatgaagcctggctgcc

SEQ ID NO: 813113 - DNA, 25 bp, Homo sapien
tggttgaggctatgaagctttcccc

SEQ ID NO: 813114 - DNA, 25 bp, Homo sapien
taagtacagtaatcttgaagcatgc

SEQ ID NO: 813115 - DNA, 25 bp, Homo sapien
ccccttttatgagaagatgttggaa

SEQ ID NO: 813116 - DNA, 25 bp, Homo sapien
gaaacggtggtctatcagcagcagg

SEQ ID NO: 813117 - DNA, 25 bp, Homo sapien
tagatctggaggttcagtagagccc

SEQ ID NO: 813118 - DNA, 25 bp, Homo sapien
aggacgtattctccacggcgcagga

SEQ ID NO: 813119 - DNA, 25 bp, Homo sapien
taagctgctcatggtagccggtgac

SEQ ID NO: 813120 - DNA, 25 bp, Homo sapien
gtttctgaactgcaatggctcttac

SEQ ID NO: 813121 - DNA, 25 bp, Homo sapien
agaacatcatcgtcctccaagctct

SEQ ID NO: 813122 - DNA, 25 bp, Homo sapien
ctggaccaattgtagaaggtaatgc

SEQ ID NO: 813123 - DNA, 25 bp, Homo sapien
ggtaatgcagaacatcatcgtcctc

SEQ ID NO: 813124 - DNA, 25 bp, Homo sapien
tcttaaaccacgcttcagcagaaat

SEQ ID NO: 813125 - DNA, 25 bp, Homo sapien
ctggcaagggcgctatcatggtatg

SEQ ID NO: 813126 - DNA, 25 bp, Homo sapien
agggcgctatcatggtatggttcaa

SEQ ID NO: 813127 - DNA, 25 bp, Homo sapien
cagaaatctggcaagggcgctatca

SEQ ID NO: 813128 - DNA, 25 bp, Homo sapien
gaacctctgctgatagtgtctggac

SEQ ID NO: 813129 - DNA, 25 bp, Homo sapien
tctggactgggctatctcacttctc

SEQ ID NO: 813130 - DNA, 25 bp, Homo sapien
gacgtcatacttttcagcagagagc

SEQ ID NO: 813131 - DNA, 25 bp, Homo sapien
ttgggtaaagtcgtgcagcatggct

SEQ ID NO: 813132 - DNA, 25 bp, Homo sapien
aagtacacaagagttatgtgagttc

SEQ ID NO: 813133 - DNA, 25 bp, Homo sapien
ttcagtccaggatcatatggaactc

SEQ ID NO: 813134 - DNA, 25 bp, Homo sapien
ggagttgagaattctgcaggttttc

SEQ ID NO: 813135 - DNA, 25 bp, Homo sapien
tgccagcgctcctgctttcagtcca

SEQ ID NO: 813136 - DNA, 25 bp, Homo sapien
tcatatggaactctaaagctttcgg

SEQ ID NO: 813137 - DNA, 25 bp, Homo sapien
acatcttcaagacataaagaccaca

SEQ ID NO: 813138 - DNA, 25 bp, Homo sapien
cttcaagacataaagaccacatgga

SEQ ID NO: 813139 - DNA, 25 bp, Homo sapien
ccacatggagacatccaagtgatac

SEQ ID NO: 813140 - DNA, 25 bp, Homo sapien
agaccacatggagacatccaagtga

SEQ ID NO: 813141 - DNA, 25 bp, Homo sapien
gcttttaagtactgggccccagcaa

SEQ ID NO: 813142 - DNA, 25 bp, Homo sapien
ataaacattagcttttaagtactgg

SEQ ID NO: 813143 - DNA, 25 bp, Homo sapien
tagcttttaagtactgggccccagc

SEQ ID NO: 813144 - DNA, 25 bp, Homo sapien
gcataaacattagcttttaagtact

SEQ ID NO: 813145 - DNA, 25 bp, Homo sapien
aactcaagccatagtggttttttct

SEQ ID NO: 813146 - DNA, 25 bp, Homo sapien
cttggaggccattactttacatttt

SEQ ID NO: 813147 - DNA, 25 bp, Homo sapien
catttgatagggctgtaggatcggc

SEQ ID NO: 813148 - DNA, 25 bp, Homo sapien
gtcttggcgcagatcatcaccatgt

SEQ ID NO: 813149 - DNA, 25 bp, Homo sapien
ccatatggcaggaggcatagatcca

SEQ ID NO: 813150 - DNA, 25 bp, Homo sapien
gaaatgcaaccatatggcaggaggc

SEQ ID NO: 813151 - DNA, 25 bp, Homo sapien
caggaggcatagatccaaagattca

SEQ ID NO: 813152 - DNA, 25 bp, Homo sapien
gtcaccagttgaaatgcaaccatat

SEQ ID NO: 813153 - DNA, 25 bp, Homo sapien
tcctcagatggcaatctgtgccttt

SEQ ID NO: 813154 - DNA, 25 bp, Homo sapien
actaaaataagtgacagatctttcc

SEQ ID NO: 813155 - DNA, 25 bp, Homo sapien
gatatgttttcaatatcccagaatg

SEQ ID NO: 813156 - DNA, 25 bp, Homo sapien
cctgatagtagagtgtgtaatagct

SEQ ID NO: 813157 - DNA, 25 bp, Homo sapien
acagaaggatgcacagagtctgatg

SEQ ID NO: 813158 - DNA, 25 bp, Homo sapien
tacagaaggatgcacagagtctgat

SEQ ID NO: 813159 - DNA, 25 bp, Homo sapien
ctacagaaggatgcacagagtctga

SEQ ID NO: 813160 - DNA, 25 bp, Homo sapien
ttctttgagccagtgattcaggact

SEQ ID NO: 813161 - DNA, 25 bp, Homo sapien
gaattttggcaattgtcgtggcgtc

SEQ ID NO: 813162 - DNA, 25 bp, Homo sapien
aaatgctcccgtgttgcccactgtg

SEQ ID NO: 813163 - DNA, 25 bp, Homo sapien
tgtcgtggcgtctttcacaatctcg

SEQ ID NO: 813164 - DNA, 25 bp, Homo sapien
tgtctcggtgatcataatattgtca

SEQ ID NO: 813165 - DNA, 25 bp, Homo sapien
tgtctgtcgcctattccaagaacaa

SEQ ID NO: 813166 - DNA, 25 bp, Homo sapien
tccaagaacaaaggttgccacacag

SEQ ID NO: 813167 - DNA, 25 bp, Homo sapien
cagtagcctgcacaggaataaacaa

SEQ ID NO: 813168 - DNA, 25 bp, Homo sapien
agaatgtgcccgaagtcaatatgaa

SEQ ID NO: 813169 - DNA, 25 bp, Homo sapien
gcactctctctttattaatgcccag

SEQ ID NO: 813170 - DNA, 25 bp, Homo sapien
ccgaagtcaatatgaaataggtttc

SEQ ID NO: 813171 - DNA, 25 bp, Homo sapien
aagtcaggggttagcacaaatggca

SEQ ID NO: 813172 - DNA, 25 bp, Homo sapien
gttccaggaagttgtcaaaacatgt

SEQ ID NO: 813173 - DNA, 25 bp, Homo sapien
tctctgacaacaccactggaactgt

SEQ ID NO: 813174 - DNA, 25 bp, Homo sapien
ggagggtaagtcttgtaatcaccaa

SEQ ID NO: 813175 - DNA, 25 bp, Homo sapien
acaggactgaaatgtgtcaagtccc

SEQ ID NO: 813176 - DNA, 25 bp, Homo sapien
gacaatattctatgttagacaaaat

SEQ ID NO: 813177 - DNA, 25 bp, Homo sapien
ctgacaatattctatgttagacaaa

SEQ ID NO: 813178 - DNA, 25 bp, Homo sapien
acaatattctatgttagacaaaatg

SEQ ID NO: 813179 - DNA, 25 bp, Homo sapien
tgacaatattctatgttagacaaaa

SEQ ID NO: 813180 - DNA, 25 bp, Homo sapien
agtttaactgcacgtcccatgcttg

SEQ ID NO: 813181 - DNA, 25 bp, Homo sapien
tgatgggctgtacacacttagagac

SEQ ID NO: 813182 - DNA, 25 bp, Homo sapien
catgcttgtcaaacacagtgtcgag

SEQ ID NO: 813183 - DNA, 25 bp, Homo sapien
tactaatcaataccacgaggagctg

SEQ ID NO: 813184 - DNA, 25 bp, Homo sapien
cctccctgttcaccaagaagcggga

SEQ ID NO: 813185 - DNA, 25 bp, Homo sapien
ggagacttgtgtgggctgttgctgc

SEQ ID NO: 813186 - DNA, 25 bp, Homo sapien
cagccatcacttgtcccctggaagt

SEQ ID NO: 813187 - DNA, 25 bp, Homo sapien
gttcaccaagaagcgggagacttgt

SEQ ID NO: 813188 - DNA, 25 bp, Homo sapien
tgcttgacacaagacaggaaacccc

SEQ ID NO: 813189 - DNA, 25 bp, Homo sapien
taaaaaatgctatggctcatggtcc

SEQ ID NO: 813190 - DNA, 25 bp, Homo sapien
cagtgcgaaccagtaagtagtcttc

SEQ ID NO: 813191 - DNA, 25 bp, Homo sapien
tccgaggagtgccaagtcatgatct

SEQ ID NO: 813192 - DNA, 25 bp, Homo sapien
tctgcaaacttcgatctgatcaaga

SEQ ID NO: 813193 - DNA, 25 bp, Homo sapien
taaactgcacagtccatcctttgtc

SEQ ID NO: 813194 - DNA, 25 bp, Homo sapien
gagggcatcccggatatattcaatg

SEQ ID NO: 813195 - DNA, 25 bp, Homo sapien
tgtgatgacgaagggctagataagc

SEQ ID NO: 813196 - DNA, 25 bp, Homo sapien
ctgccatgctggagaaagctatact

SEQ ID NO: 813197 - DNA, 25 bp, Homo sapien
tgtaaagagttgtgggagcatcgca

SEQ ID NO: 813198 - DNA, 25 bp, Homo sapien
aaagaggccctgtagttacttcctg

SEQ ID NO: 813199 - DNA, 25 bp, Homo sapien
gaaggtcaaggcacaacggtttaga

SEQ ID NO: 813200 - DNA, 25 bp, Homo sapien
tgattttaaaaggacaggttgccaa

SEQ ID NO: 813201 - DNA, 25 bp, Homo sapien
gaatcatctagaccttcaaaggcca

SEQ ID NO: 813202 - DNA, 25 bp, Homo sapien
aatattgatgtctgggtctcatccc

SEQ ID NO: 813203 - DNA, 25 bp, Homo sapien
gaatagttggtccagaagtgccaca

SEQ ID NO: 813204 - DNA, 25 bp, Homo sapien
ttgaagaggaaatatgtatgcacat

SEQ ID NO: 813205 - DNA, 25 bp, Homo sapien
tataaatgtattcctctctaatctt

SEQ ID NO: 813206 - DNA, 25 bp, Homo sapien
gcacatgtgccaataagctaaatat

SEQ ID NO: 813207 - DNA, 25 bp, Homo sapien
tgaagaggaaatatgtatgcacatg

SEQ ID NO: 813208 - DNA, 25 bp, Homo sapien
tgcaaattatgtcgccagtcctaga

SEQ ID NO: 813209 - DNA, 25 bp, Homo sapien
tagaccgcgtgtgctaaactgaaca

SEQ ID NO: 813210 - DNA, 25 bp, Homo sapien
actcatgcagacgtggtagaccgcg

SEQ ID NO: 813211 - DNA, 25 bp, Homo sapien
caatgggccactgttctaggtccta

SEQ ID NO: 813212 - DNA, 25 bp, Homo sapien
ccaagcagcaggcaatgagctttac

SEQ ID NO: 813213 - DNA, 25 bp, Homo sapien
tgaaaatgaggctgtctgcacctcc

SEQ ID NO: 813214 - DNA, 25 bp, Homo sapien
gctccgcatggccaactggctgcat

SEQ ID NO: 813215 - DNA, 25 bp, Homo sapien
tgagctttactcatactaatgagca

SEQ ID NO: 813216 - DNA, 25 bp, Homo sapien
ctgctgtgagaggtagagaatcgcc

SEQ ID NO: 813217 - DNA, 25 bp, Homo sapien
gagaatcgccactgaggtgctgcaa

SEQ ID NO: 813218 - DNA, 25 bp, Homo sapien
tctgagtttgattctccgagtataa

SEQ ID NO: 813219 - DNA, 25 bp, Homo sapien
ggtgctgcaaatggactctgtgttc

SEQ ID NO: 813220 - DNA, 25 bp, Homo sapien
tctctgccaggtagtaaggacccat

SEQ ID NO: 813221 - DNA, 25 bp, Homo sapien
tgataatgatgggtggatctctgcc

SEQ ID NO: 813222 - DNA, 25 bp, Homo sapien
tgcacacagtggtgataatgatggg

SEQ ID NO: 813223 - DNA, 25 bp, Homo sapien
taatgatgggtggatctctgccagg

SEQ ID NO: 813224 - DNA, 25 bp, Homo sapien
cctgtagaatgtgccctgccacttt

SEQ ID NO: 813225 - DNA, 25 bp, Homo sapien
gccactttaagcaggtagtgcctga

SEQ ID NO: 813226 - DNA, 25 bp, Homo sapien
taagcaggtagtgcctgagcaagga

SEQ ID NO: 813227 - DNA, 25 bp, Homo sapien
gtcttctctgaaccatagattgggg

SEQ ID NO: 813228 - DNA, 25 bp, Homo sapien
tctccaggatctcacgagtctcata

SEQ ID NO: 813229 - DNA, 25 bp, Homo sapien
ttatccccgaattgctggcttaagg

SEQ ID NO: 813230 - DNA, 25 bp, Homo sapien
cttaaggtcaccttgtgtccacagc

SEQ ID NO: 813231 - DNA, 25 bp, Homo sapien
gccacacatgctcactctgagtttt

SEQ ID NO: 813232 - DNA, 25 bp, Homo sapien
ctctgtaagccattggttcctccat

SEQ ID NO: 813233 - DNA, 25 bp, Homo sapien
gtcgccgggccctccgatctgacat

SEQ ID NO: 813234 - DNA, 25 bp, Homo sapien
agctcacaatgtgagcatgtttgtg

SEQ ID NO: 813235 - DNA, 25 bp, Homo sapien
ggtgggcagatcaggtcgccgggcc

SEQ ID NO: 813236 - DNA, 25 bp, Homo sapien
tctctgagcaagctcacaatgtgag

SEQ ID NO: 813237 - DNA, 25 bp, Homo sapien
gtagaggcgggtggagtgtgcagca

SEQ ID NO: 813238 - DNA, 25 bp, Homo sapien
tggagtgtgcagcagatcctgcagc

SEQ ID NO: 813239 - DNA, 25 bp, Homo sapien
tttcacgagaaatgccatttatggg

SEQ ID NO: 813240 - DNA, 25 bp, Homo sapien
ttctcccatactggcaggaggaagg

SEQ ID NO: 813241 - DNA, 25 bp, Homo sapien
tagctctaatctgagctgcagaggg

SEQ ID NO: 813242 - DNA, 25 bp, Homo sapien
gagtgtttttcacatagcctcaggc

SEQ ID NO: 813243 - DNA, 25 bp, Homo sapien
caggcaacttgcaggctctgtagct

SEQ ID NO: 813244 - DNA, 25 bp, Homo sapien
catcagtgagtgacgctccagaaga

SEQ ID NO: 813245 - DNA, 25 bp, Homo sapien
gcaaagtcattttaggatcggcctg

SEQ ID NO: 813246 - DNA, 25 bp, Homo sapien
tgaggctcagatcattataactcgt

SEQ ID NO: 813247 - DNA, 25 bp, Homo sapien
gggctccctcagagcagtatctaac

SEQ ID NO: 813248 - DNA, 25 bp, Homo sapien
gatcggcctgagtgttagatttgct

SEQ ID NO: 813249 - DNA, 25 bp, Homo sapien
gcagctggttcccttatgtctttat

SEQ ID NO: 813250 - DNA, 25 bp, Homo sapien
agatcttaatcttgagtcatttgca

SEQ ID NO: 813251 - DNA, 25 bp, Homo sapien
gctgctccctatctcaagtaaaatt

SEQ ID NO: 813252 - DNA, 25 bp, Homo sapien
actctggtggtttagaggtgcctca

SEQ ID NO: 813253 - DNA, 25 bp, Homo sapien
tcagtgtgcattatccttgggcggc

SEQ ID NO: 813254 - DNA, 25 bp, Homo sapien
gcagctgaggcacaaagtttctcaa

SEQ ID NO: 813255 - DNA, 25 bp, Homo sapien
tactgctaccggactgaagttcctg

SEQ ID NO: 813256 - DNA, 25 bp, Homo sapien
gaccaattaatcagagtcactgagg

SEQ ID NO: 813257 - DNA, 25 bp, Homo sapien
catcttttatctgtcagacccaggg

SEQ ID NO: 813258 - DNA, 25 bp, Homo sapien
gcttaattctatgggaaccacacat

SEQ ID NO: 813259 - DNA, 25 bp, Homo sapien
ggaatttaaattgtgccagccatct

SEQ ID NO: 813260 - DNA, 25 bp, Homo sapien
ccgcattttcatactgggacatagt

SEQ ID NO: 813261 - DNA, 25 bp, Homo sapien
tgtcatgttcccatagttgtctctg

SEQ ID NO: 813262 - DNA, 25 bp, Homo sapien
gaagctgccactgttgtaactgctg

SEQ ID NO: 813263 - DNA, 25 bp, Homo sapien
gaccgagatagggaaggctatcgaa

SEQ ID NO: 813264 - DNA, 25 bp, Homo sapien
gctatcgaagctgccactgttgtaa

SEQ ID NO: 813265 - DNA, 25 bp, Homo sapien
cgcgtctgctccgtgtggtggcggc

SEQ ID NO: 813266 - DNA, 25 bp, Homo sapien
taccggctgcgagcgcggcgcactg

SEQ ID NO: 813267 - DNA, 25 bp, Homo sapien
cgagcgagcgcctacggcgctggcg

SEQ ID NO: 813268 - DNA, 25 bp, Homo sapien
ggcgctggcgcgctaccggctgcga

SEQ ID NO: 813269 - DNA, 25 bp, Homo sapien
ctgcctccggggcggcaggcgcctg

SEQ ID NO: 813270 - DNA, 25 bp, Homo sapien
gcggcaggcgcctgggcgccgccct

SEQ ID NO: 813271 - DNA, 25 bp, Homo sapien
aggcgcctgggcgccgccctcgccc

SEQ ID NO: 813272 - DNA, 25 bp, Homo sapien
cctgcctccggggcggcaggcgcct

SEQ ID NO: 813273 - DNA, 25 bp, Homo sapien
gtgaagtgctgcagcgcgaactcca

SEQ ID NO: 813274 - DNA, 25 bp, Homo sapien
ggtgcctttgcgctcgttctcctgc

SEQ ID NO: 813275 - DNA, 25 bp, Homo sapien
ctcatggccgaagcgcgcggtgcct

SEQ ID NO: 813276 - DNA, 25 bp, Homo sapien
aggtccgcgggctggtgcctcagca

SEQ ID NO: 813277 - DNA, 25 bp, Homo sapien
ctccccgtcctcggagtcggactgc

SEQ ID NO: 813278 - DNA, 25 bp, Homo sapien
ccccgtcctcggagtcggactgcat

SEQ ID NO: 813279 - DNA, 25 bp, Homo sapien
tccccgtcctcggagtcggactgca

SEQ ID NO: 813280 - DNA, 25 bp, Homo sapien
cattgaacgcccctgcgtccgcggg

SEQ ID NO: 813281 - DNA, 25 bp, Homo sapien
aaatacctccaaccacagcgaaagt

SEQ ID NO: 813282 - DNA, 25 bp, Homo sapien
agcgggccagtttctttatgcacaa

SEQ ID NO: 813283 - DNA, 25 bp, Homo sapien
taagagggaagcgtaacatcccagc

SEQ ID NO: 813284 - DNA, 25 bp, Homo sapien
taaatacaagggctgaaagaagacg

SEQ ID NO: 813285 - DNA, 25 bp, Homo sapien
ttcttttagcgaatctaccgtccta

SEQ ID NO: 813286 - DNA, 25 bp, Homo sapien
ttcatgcttcttttagcgaatctac

SEQ ID NO: 813287 - DNA, 25 bp, Homo sapien
ccaatttcatgcttcttttagcgaa

SEQ ID NO: 813288 - DNA, 25 bp, Homo sapien
gcttcttttagcgaatctaccgtcc

SEQ ID NO: 813289 - DNA, 25 bp, Homo sapien
tgtactattgccaaagtttctgtta

SEQ ID NO: 813290 - DNA, 25 bp, Homo sapien
tatgtgcctcctggataatgatcaa

SEQ ID NO: 813291 - DNA, 25 bp, Homo sapien
tgtatttggttgcagtcaaaaagtt

SEQ ID NO: 813292 - DNA, 25 bp, Homo sapien
tctgttatacagatgtatgtgcctc

SEQ ID NO: 813293 - DNA, 25 bp, Homo sapien
cattcacaagagaggatatgaacca

SEQ ID NO: 813294 - DNA, 25 bp, Homo sapien
ttcacaagagaggatatgaaccaac

SEQ ID NO: 813295 - DNA, 25 bp, Homo sapien
gacattcacaagagaggatatgaac

SEQ ID NO: 813296 - DNA, 25 bp, Homo sapien
aaagacattcacaagagaggatatg

SEQ ID NO: 813297 - DNA, 25 bp, Homo sapien
agttgcatggtcaaaaacttgcctt

SEQ ID NO: 813298 - DNA, 25 bp, Homo sapien
gcatggtcaaaaacttgccttttaa

SEQ ID NO: 813299 - DNA, 25 bp, Homo sapien
tcaatgggcacaagttgcatggtca

SEQ ID NO: 813300 - DNA, 25 bp, Homo sapien
aactccaacctctcataaataccat

SEQ ID NO: 813301 - DNA, 25 bp, Homo sapien
tgccacataagctcattccctgctt

SEQ ID NO: 813302 - DNA, 25 bp, Homo sapien
ctgcttcacctcgccaagaagtgca

SEQ ID NO: 813303 - DNA, 25 bp, Homo sapien
ttcacctcgccaagaagtgcaatac

SEQ ID NO: 813304 - DNA, 25 bp, Homo sapien
aactgccacataagctcattccctg

SEQ ID NO: 813305 - DNA, 25 bp, Homo sapien
tactggcttgagagcaatctctagc

SEQ ID NO: 813306 - DNA, 25 bp, Homo sapien
ggacataagatttaaagaactgcaa

SEQ ID NO: 813307 - DNA, 25 bp, Homo sapien
taaaagtactattactatactggct

SEQ ID NO: 813308 - DNA, 25 bp, Homo sapien
tttaacacacattaatgcttagcgt

SEQ ID NO: 813309 - DNA, 25 bp, Homo sapien
atgtccataacacgcaaatctgtcc

SEQ ID NO: 813310 - DNA, 25 bp, Homo sapien
tgaaagctgcaatctcatcctggtg

SEQ ID NO: 813311 - DNA, 25 bp, Homo sapien
gacttgtgtcacttaatagggtaaa

SEQ ID NO: 813312 - DNA, 25 bp, Homo sapien
gatagtatatccttgaaagtctcag

SEQ ID NO: 813313 - DNA, 25 bp, Homo sapien
ccttgtgaatcggtttattactgga

SEQ ID NO: 813314 - DNA, 25 bp, Homo sapien
cacgccttgtgaatcggtttattac

SEQ ID NO: 813315 - DNA, 25 bp, Homo sapien
ctgaggcacgccttgtgaatcggtt

SEQ ID NO: 813316 - DNA, 25 bp, Homo sapien
gaggcacgccttgtgaatcggttta

SEQ ID NO: 813317 - DNA, 25 bp, Homo sapien
tcttgtgagttaggtattatcccca

SEQ ID NO: 813318 - DNA, 25 bp, Homo sapien
tatacccagagaaactaagccttag

SEQ ID NO: 813319 - DNA, 25 bp, Homo sapien
cgcaactttgcgtccctggttcaag

SEQ ID NO: 813320 - DNA, 25 bp, Homo sapien
cgtagataggtgagtaacagagcta

SEQ ID NO: 813321 - DNA, 25 bp, Homo sapien
ttctcagtccattaattatgaacct

SEQ ID NO: 813322 - DNA, 25 bp, Homo sapien
tttctcagtccattaattatgaacc

SEQ ID NO: 813323 - DNA, 25 bp, Homo sapien
ccttgtttctcagtccattaattat

SEQ ID NO: 813324 - DNA, 25 bp, Homo sapien
tccttgtttctcagtccattaatta

SEQ ID NO: 813325 - DNA, 25 bp, Homo sapien
gacacttcagtctcaccaactatac

SEQ ID NO: 813326 - DNA, 25 bp, Homo sapien
gaccaaggcgggcactggattcttt

SEQ ID NO: 813327 - DNA, 25 bp, Homo sapien
aaaacaatcattatgccaggcacgg

SEQ ID NO: 813328 - DNA, 25 bp, Homo sapien
tatacagtctaacaccaagatccct

SEQ ID NO: 813329 - DNA, 25 bp, Homo sapien
taaatgcttcacctataacagtatg

SEQ ID NO: 813330 - DNA, 25 bp, Homo sapien
tagctaaaaactaggtttggccaga

SEQ ID NO: 813331 - DNA, 25 bp, Homo sapien
taatcaagactgtgacggtcctact

SEQ ID NO: 813332 - DNA, 25 bp, Homo sapien
tcaaaaacacttgcatgatctggtc

SEQ ID NO: 813333 - DNA, 25 bp, Homo sapien
catagaatgcacatatgaatgtctt

SEQ ID NO: 813334 - DNA, 25 bp, Homo sapien
gtctcatagaatgcacatatgaatg

SEQ ID NO: 813335 - DNA, 25 bp, Homo sapien
aatgtcttgcaaatggtgaataatt

SEQ ID NO: 813336 - DNA, 25 bp, Homo sapien
tgcaaatggtgaataattataaatg

SEQ ID NO: 813337 - DNA, 25 bp, Homo sapien
tgcttgtgctctctgtggcataggt

SEQ ID NO: 813338 - DNA, 25 bp, Homo sapien
tgagtggaatgtgcacgcagctcct

SEQ ID NO: 813339 - DNA, 25 bp, Homo sapien
cacgcagctcctttgtgcttgtgct

SEQ ID NO: 813340 - DNA, 25 bp, Homo sapien
gaatcagggtaggtgacatttgtca

SEQ ID NO: 813341 - DNA, 25 bp, Homo sapien
gccactgctggagactgtcacatag

SEQ ID NO: 813342 - DNA, 25 bp, Homo sapien
tgtcacatagccctacaagaagtcc

SEQ ID NO: 813343 - DNA, 25 bp, Homo sapien
gattcgcatcttacatgggtgataa

SEQ ID NO: 813344 - DNA, 25 bp, Homo sapien
gaggcaaaaatcttctatcgtccag

SEQ ID NO: 813345 - DNA, 25 bp, Homo sapien
tggcagaaattctggcactgttcat

SEQ ID NO: 813346 - DNA, 25 bp, Homo sapien
ctgttcatgaaatagtacttaagtg

SEQ ID NO: 813347 - DNA, 25 bp, Homo sapien
aattctggcactgttcatgaaatag

SEQ ID NO: 813348 - DNA, 25 bp, Homo sapien
ggcactgttcatgaaatagtactta

SEQ ID NO: 813349 - DNA, 25 bp, Homo sapien
caaaataaagtatttgcagttctgt

SEQ ID NO: 813350 - DNA, 25 bp, Homo sapien
aaagtatttgcagttctgtaaagct

SEQ ID NO: 813351 - DNA, 25 bp, Homo sapien
tatttgcagttctgtaaagctgtca

SEQ ID NO: 813352 - DNA, 25 bp, Homo sapien
cttctgcagccaaatcaaaataaag

SEQ ID NO: 813353 - DNA, 25 bp, Homo sapien
cctggactctgcatcatcttcttct

SEQ ID NO: 813354 - DNA, 25 bp, Homo sapien
catcaggattataagcttctgcaca

SEQ ID NO: 813355 - DNA, 25 bp, Homo sapien
tgcaagcctcttgcaacctatttct

SEQ ID NO: 813356 - DNA, 25 bp, Homo sapien
cagcaggatgtctttgcaagcctct

SEQ ID NO: 813357 - DNA, 25 bp, Homo sapien
ctttgatcatcagtttttggatgta

SEQ ID NO: 813358 - DNA, 25 bp, Homo sapien
tgatcatcagtttttggatgtataa

SEQ ID NO: 813359 - DNA, 25 bp, Homo sapien
gaaagagcctatcatatagcctaag

SEQ ID NO: 813360 - DNA, 25 bp, Homo sapien
catgataactgacaactactgtagg

SEQ ID NO: 813361 - DNA, 25 bp, Homo sapien
caggtagagggtgaacatcagcttt

SEQ ID NO: 813362 - DNA, 25 bp, Homo sapien
tttccccataattatgcacagagtg

SEQ ID NO: 813363 - DNA, 25 bp, Homo sapien
ggcatctaatacttgagacatctgc

SEQ ID NO: 813364 - DNA, 25 bp, Homo sapien
gctccccatctttgaccaatttttc

SEQ ID NO: 813365 - DNA, 25 bp, Homo sapien
ccatcgtcaccttgatcaattacat

SEQ ID NO: 813366 - DNA, 25 bp, Homo sapien
tccccatctttgaccaatttttcaa

SEQ ID NO: 813367 - DNA, 25 bp, Homo sapien
acataaaagttgtcaccatcgtcac

SEQ ID NO: 813368 - DNA, 25 bp, Homo sapien
tcgactgacgcatgaaagataccac

SEQ ID NO: 813369 - DNA, 25 bp, Homo sapien
cccagagagcaaacgtaacccagta

SEQ ID NO: 813370 - DNA, 25 bp, Homo sapien
cagccacaggtcaccaggaatttgg

SEQ ID NO: 813371 - DNA, 25 bp, Homo sapien
aacgaaatgaggcttcaggagacca

SEQ ID NO: 813372 - DNA, 25 bp, Homo sapien
tctgggtgtattgtacattaaggcc

SEQ ID NO: 813373 - DNA, 25 bp, Homo sapien
cagttcgccgaaactcccacgatta

SEQ ID NO: 813374 - DNA, 25 bp, Homo sapien
cacgattatcatagttaccaacaca

SEQ ID NO: 813375 - DNA, 25 bp, Homo sapien
caccaggagaggtagcagtgattgt

SEQ ID NO: 813376 - DNA, 25 bp, Homo sapien
caaagatttaaggaatggcagtgac

SEQ ID NO: 813377 - DNA, 25 bp, Homo sapien
aaagatttaaggaatggcagtgact

SEQ ID NO: 813378 - DNA, 25 bp, Homo sapien
aattattctcctgaaggttaccctg

SEQ ID NO: 813379 - DNA, 25 bp, Homo sapien
ttattctcctgaaggttaccctgtc

SEQ ID NO: 813380 - DNA, 25 bp, Homo sapien
tgatttgttctccatcgttgtatac

SEQ ID NO: 813381 - DNA, 25 bp, Homo sapien
tctactactttcaggcgttcagaaa

SEQ ID NO: 813382 - DNA, 25 bp, Homo sapien
tttggtgcctatcacatctactact

SEQ ID NO: 813383 - DNA, 25 bp, Homo sapien
ccatcgttgtatactttggtgccta

SEQ ID NO: 813384 - DNA, 25 bp, Homo sapien
ggacaattatgtagtaatgatttca

SEQ ID NO: 813385 - DNA, 25 bp, Homo sapien
gggaacaagctgtctcggtttctaa

SEQ ID NO: 813386 - DNA, 25 bp, Homo sapien
ccgagcccggccctaaatgaagagg

SEQ ID NO: 813387 - DNA, 25 bp, Homo sapien
aaagtacacatattcacctgaaaag

SEQ ID NO: 813388 - DNA, 25 bp, Homo sapien
tgaaaaaagaatcagccgaatctcc

SEQ ID NO: 813389 - DNA, 25 bp, Homo sapien
gacagtcccaatggcgtgggcagaa

SEQ ID NO: 813390 - DNA, 25 bp, Homo sapien
tcgaggtttgttagttaccagggca

SEQ ID NO: 813391 - DNA, 25 bp, Homo sapien
tccaaagtactgtccccgcgagcat

SEQ ID NO: 813392 - DNA, 25 bp, Homo sapien
gagcatcgagcgatttctactgcac

SEQ ID NO: 813393 - DNA, 25 bp, Homo sapien
gtaaggattctcacaacatctcagc

SEQ ID NO: 813394 - DNA, 25 bp, Homo sapien
gacatttctgccaagctactctggt

SEQ ID NO: 813395 - DNA, 25 bp, Homo sapien
cattccccgcagatcttaataacgg

SEQ ID NO: 813396 - DNA, 25 bp, Homo sapien
gaacctttgtgtcccaatactgtaa

SEQ ID NO: 813397 - DNA, 25 bp, Homo sapien
tgttcttcataggtagcgatgttcc

SEQ ID NO: 813398 - DNA, 25 bp, Homo sapien
taggtagcgatgttccttttcataa

SEQ ID NO: 813399 - DNA, 25 bp, Homo sapien
tcataggtagcgatgttccttttca

SEQ ID NO: 813400 - DNA, 25 bp, Homo sapien
tcttcataggtagcgatgttccttt

SEQ ID NO: 813401 - DNA, 25 bp, Homo sapien
tccatgttcgttccaaacagggcaa

SEQ ID NO: 813402 - DNA, 25 bp, Homo sapien
caatatccatgttcgttccaaacag

SEQ ID NO: 813403 - DNA, 25 bp, Homo sapien
tcaacaatatccatgttcgttccaa

SEQ ID NO: 813404 - DNA, 25 bp, Homo sapien
tgttcgttccaaacagggcaactaa

SEQ ID NO: 813405 - DNA, 25 bp, Homo sapien
tatgcaggcctagtgaagaacaaag

SEQ ID NO: 813406 - DNA, 25 bp, Homo sapien
caatgagattgtgggttggcaacca

SEQ ID NO: 813407 - DNA, 25 bp, Homo sapien
taccatttcaccaataggccaaggc

SEQ ID NO: 813408 - DNA, 25 bp, Homo sapien
tggcaaccatcctaagaaagaacgg

SEQ ID NO: 813409 - DNA, 25 bp, Homo sapien
atttaaatataaccaacaatactga

SEQ ID NO: 813410 - DNA, 25 bp, Homo sapien
taaaagtgtgctttattgtaaggaa

SEQ ID NO: 813411 - DNA, 25 bp, Homo sapien
ataaaagtgtgctttattgtaagga

SEQ ID NO: 813412 - DNA, 25 bp, Homo sapien
caatactgaaaataatgtacgtggc

SEQ ID NO: 813413 - DNA, 25 bp, Homo sapien
ctttcttactatgttatgccctggg

SEQ ID NO: 813414 - DNA, 25 bp, Homo sapien
gcattatgcacgtcagaaaacttta

SEQ ID NO: 813415 - DNA, 25 bp, Homo sapien
tacacataaattcctagttagccag

SEQ ID NO: 813416 - DNA, 25 bp, Homo sapien
gggttcgcttccacatgccacattg

SEQ ID NO: 813417 - DNA, 25 bp, Homo sapien
gtattaaatgtcagcccttggccta

SEQ ID NO: 813418 - DNA, 25 bp, Homo sapien
tgatgaagtttcagggatgcagagt

SEQ ID NO: 813419 - DNA, 25 bp, Homo sapien
tcagcccttggcctaagagaggtga

SEQ ID NO: 813420 - DNA, 25 bp, Homo sapien
tcctcagcaagatctaggaaggttt

SEQ ID NO: 813421 - DNA, 25 bp, Homo sapien
aagccgcgtaacaaatcaagaaatc

SEQ ID NO: 813422 - DNA, 25 bp, Homo sapien
gaaagccgcgtaacaaatcaagaaa

SEQ ID NO: 813423 - DNA, 25 bp, Homo sapien
agccgcgtaacaaatcaagaaatcc

SEQ ID NO: 813424 - DNA, 25 bp, Homo sapien
ctgaaagccgcgtaacaaatcaaga

SEQ ID NO: 813425 - DNA, 25 bp, Homo sapien
tcatagggacacgtgtatcagctcg

SEQ ID NO: 813426 - DNA, 25 bp, Homo sapien
tcgcacagcgcagtcttgatagtaa

SEQ ID NO: 813427 - DNA, 25 bp, Homo sapien
gaagagctggactacgtatcccaga

SEQ ID NO: 813428 - DNA, 25 bp, Homo sapien
ggttcgtagtctcaagccttggtcc

SEQ ID NO: 813429 - DNA, 25 bp, Homo sapien
caaacccgtcgccattaccaagtct

SEQ ID NO: 813430 - DNA, 25 bp, Homo sapien
ccgtcgccattaccaagtctttcaa

SEQ ID NO: 813431 - DNA, 25 bp, Homo sapien
cccgtcgccattaccaagtctttca

SEQ ID NO: 813432 - DNA, 25 bp, Homo sapien
tccggccacgacaacaccaccagca

SEQ ID NO: 813433 - DNA, 25 bp, Homo sapien
cgcgcgggttactgctcccgcggca

SEQ ID NO: 813434 - DNA, 25 bp, Homo sapien
gcgggccgctccggccacgacaaca

SEQ ID NO: 813435 - DNA, 25 bp, Homo sapien
agcagctctcgtaccccctctccga

SEQ ID NO: 813436 - DNA, 25 bp, Homo sapien
tgcacagcggagagtgaaacaccct

SEQ ID NO: 813437 - DNA, 25 bp, Homo sapien
gttttgtttcaatcggcctgcggtg

SEQ ID NO: 813438 - DNA, 25 bp, Homo sapien
tttgggtcacacagagcggtgcctc

SEQ ID NO: 813439 - DNA, 25 bp, Homo sapien
aaacgactgtagctgaaaactccct

SEQ ID NO: 813440 - DNA, 25 bp, Homo sapien
aaaattcctggcattgactcttttt

SEQ ID NO: 813441 - DNA, 25 bp, Homo sapien
tggagaggaagtctcgttctgatgc

SEQ ID NO: 813442 - DNA, 25 bp, Homo sapien
taaaattcctggcattgactctttt

SEQ ID NO: 813443 - DNA, 25 bp, Homo sapien
aaattcctggcattgactctttttt

SEQ ID NO: 813444 - DNA, 25 bp, Homo sapien
atgatgactaaatgggatcattttc

SEQ ID NO: 813445 - DNA, 25 bp, Homo sapien
ttaaactcagaacaactctgtgaat

SEQ ID NO: 813446 - DNA, 25 bp, Homo sapien
ttttaaactcagaacaactctgtga

SEQ ID NO: 813447 - DNA, 25 bp, Homo sapien
gatgactaaatgggatcattttctt

SEQ ID NO: 813448 - DNA, 25 bp, Homo sapien
tagtacactaacgtctctttgcaac

SEQ ID NO: 813449 - DNA, 25 bp, Homo sapien
ttagaagctgcactacacaggtatc

SEQ ID NO: 813450 - DNA, 25 bp, Homo sapien
gcagtttccaacattcaccaagtat

SEQ ID NO: 813451 - DNA, 25 bp, Homo sapien
cctctgtgtatgaacagtgctgttc

SEQ ID NO: 813452 - DNA, 25 bp, Homo sapien
agtctctatgaaagccacccgtctc

SEQ ID NO: 813453 - DNA, 25 bp, Homo sapien
gcaatggttctcagtgcagattcct

SEQ ID NO: 813454 - DNA, 25 bp, Homo sapien
gaatatccgtactatgcttcacata

SEQ ID NO: 813455 - DNA, 25 bp, Homo sapien
tactgtatgagtatgcaggaacacc

SEQ ID NO: 813456 - DNA, 25 bp, Homo sapien
tcaagccatgcaatttgggcagtac

SEQ ID NO: 813457 - DNA, 25 bp, Homo sapien
ttgggcagtacacaaacctaaaata

SEQ ID NO: 813458 - DNA, 25 bp, Homo sapien
gagacatgacaatgttgttttgttt

SEQ ID NO: 813459 - DNA, 25 bp, Homo sapien
taagaaatgatgtcaagccatgcaa

SEQ ID NO: 813460 - DNA, 25 bp, Homo sapien
tcatcacaggagttatatccaggtg

SEQ ID NO: 813461 - DNA, 25 bp, Homo sapien
tccaggtgaagatggcaaattctca

SEQ ID NO: 813462 - DNA, 25 bp, Homo sapien
gcagcaactccaatgagtcattcat

SEQ ID NO: 813463 - DNA, 25 bp, Homo sapien
tgttcatcacaggagttatatccag

SEQ ID NO: 813464 - DNA, 25 bp, Homo sapien
tggactggtcgcgatatttgccaat

SEQ ID NO: 813465 - DNA, 25 bp, Homo sapien
tctgaactcagctggtacatgccag

SEQ ID NO: 813466 - DNA, 25 bp, Homo sapien
tgccaattctgttagccagtccacc

SEQ ID NO: 813467 - DNA, 25 bp, Homo sapien
tacatgccagattgggtaggatcac

SEQ ID NO: 813468 - DNA, 25 bp, Homo sapien
gagggcgtgcataggaatgtaaact

SEQ ID NO: 813469 - DNA, 25 bp, Homo sapien
ttcgtgtcttactggtgtttcctcc

SEQ ID NO: 813470 - DNA, 25 bp, Homo sapien
tcttcgaagaagaggacactggtgg

SEQ ID NO: 813471 - DNA, 25 bp, Homo sapien
cctccttccaatggtgatgagggaa

SEQ ID NO: 813472 - DNA, 25 bp, Homo sapien
attgcaccatcccaaatcatcatca

SEQ ID NO: 813473 - DNA, 25 bp, Homo sapien
aggaattgcaccatcccaaatcatc

SEQ ID NO: 813474 - DNA, 25 bp, Homo sapien
gcaccatcccaaatcatcatcatct

SEQ ID NO: 813475 - DNA, 25 bp, Homo sapien
ggaattgcaccatcccaaatcatca

SEQ ID NO: 813476 - DNA, 25 bp, Homo sapien
gccttcagctctagcaaaatcttca

SEQ ID NO: 813477 - DNA, 25 bp, Homo sapien
ttgccattccttattgcttccctta

SEQ ID NO: 813478 - DNA, 25 bp, Homo sapien
tcccttatgaaagcacagtcgtgtg

SEQ ID NO: 813479 - DNA, 25 bp, Homo sapien
cacagccttcagctctagcaaaatc

SEQ ID NO: 813480 - DNA, 25 bp, Homo sapien
tcagactaagcaatgagtggtcata

SEQ ID NO: 813481 - DNA, 25 bp, Homo sapien
tgtataaaacacgaagaagcaccaa

SEQ ID NO: 813482 - DNA, 25 bp, Homo sapien
aatgctctacctaaaatgtacgatg

SEQ ID NO: 813483 - DNA, 25 bp, Homo sapien
tccaagaaagcatgttagaaaggca

SEQ ID NO: 813484 - DNA, 25 bp, Homo sapien
tgctcatcgacttagaaaatgctag

SEQ ID NO: 813485 - DNA, 25 bp, Homo sapien
tatcctaatattgctcgctactgct

SEQ ID NO: 813486 - DNA, 25 bp, Homo sapien
tcttgcctacaggagagatggagaa

SEQ ID NO: 813487 - DNA, 25 bp, Homo sapien
ggaattaatcactttgtagattacc

SEQ ID NO: 813488 - DNA, 25 bp, Homo sapien
aaagtcaacttcagtacagactcgc

SEQ ID NO: 813489 - DNA, 25 bp, Homo sapien
agggtggtccagcttacactctacg

SEQ ID NO: 813490 - DNA, 25 bp, Homo sapien
gactcgccaaatgatacactttctt

SEQ ID NO: 813491 - DNA, 25 bp, Homo sapien
tctacggtaagtaaaccatcttcta

SEQ ID NO: 813492 - DNA, 25 bp, Homo sapien
gaacttcacaacatggaatgccatg

SEQ ID NO: 813493 - DNA, 25 bp, Homo sapien
catgctgtaccacagtcaagcttgg

SEQ ID NO: 813494 - DNA, 25 bp, Homo sapien
tccaggaggtagacatacatcgcca

SEQ ID NO: 813495 - DNA, 25 bp, Homo sapien
tcaagcttggataaaatgatgacca

SEQ ID NO: 813496 - DNA, 25 bp, Homo sapien
gtggcttgtgtcaggccctatgcaa

SEQ ID NO: 813497 - DNA, 25 bp, Homo sapien
gcaacgtgatctcaggaataaccac

SEQ ID NO: 813498 - DNA, 25 bp, Homo sapien
tgttaaaccatgcaactaatgccct

SEQ ID NO: 813499 - DNA, 25 bp, Homo sapien
gagcaaggtggccaattgttccagt

SEQ ID NO: 813500 - DNA, 25 bp, Homo sapien
tttagggacccctgacataattata

SEQ ID NO: 813501 - DNA, 25 bp, Homo sapien
ccataataagtcacagccatgagca

SEQ ID NO: 813502 - DNA, 25 bp, Homo sapien
tatgtgcagagtcttgtgaattctc

SEQ ID NO: 813503 - DNA, 25 bp, Homo sapien
gaattctctgagcaaatcatcaaac

SEQ ID NO: 813504 - DNA, 25 bp, Homo sapien
gaagaaacctacgtgactgctctca

SEQ ID NO: 813505 - DNA, 25 bp, Homo sapien
ccctgggagacgacatttcatatat

SEQ ID NO: 813506 - DNA, 25 bp, Homo sapien
caagtgcgcctaacaagcttccctg

SEQ ID NO: 813507 - DNA, 25 bp, Homo sapien
taaaaaccctaggtgccaagtgcgc

SEQ ID NO: 813508 - DNA, 25 bp, Homo sapien
gaagaatccataggtgtgaagtcat

SEQ ID NO: 813509 - DNA, 25 bp, Homo sapien
cagaagaatccataggtgtgaagtc

SEQ ID NO: 813510 - DNA, 25 bp, Homo sapien
gcagaagaatccataggtgtgaagt

SEQ ID NO: 813511 - DNA, 25 bp, Homo sapien
agaatccataggtgtgaagtcatag

SEQ ID NO: 813512 - DNA, 25 bp, Homo sapien
acttattaggagaagtggcactcac

SEQ ID NO: 813513 - DNA, 25 bp, Homo sapien
tccagatcttgcaaagtcttgacca

SEQ ID NO: 813514 - DNA, 25 bp, Homo sapien
tgatgatccaggtgagccacagttt

SEQ ID NO: 813515 - DNA, 25 bp, Homo sapien
aagacaaagatgcacgacgctggcg

SEQ ID NO: 813516 - DNA, 25 bp, Homo sapien
tcaccgttttgacaactctggcagc

SEQ ID NO: 813517 - DNA, 25 bp, Homo sapien
gttagaaccgtgtcctccaacagat

SEQ ID NO: 813518 - DNA, 25 bp, Homo sapien
tgccagttccccgtacaatccatag

SEQ ID NO: 813519 - DNA, 25 bp, Homo sapien
tgcagcctgggctatggcacaaata

SEQ ID NO: 813520 - DNA, 25 bp, Homo sapien
acttgactggtttgagagggattca

SEQ ID NO: 813521 - DNA, 25 bp, Homo sapien
gatgagtaagggtacaggcaacaga

SEQ ID NO: 813522 - DNA, 25 bp, Homo sapien
tgatcctcagggtacaaagactgga

SEQ ID NO: 813523 - DNA, 25 bp, Homo sapien
cacacttatgtgtctaaaggaacta

SEQ ID NO: 813524 - DNA, 25 bp, Homo sapien
cagtatatcacatgggagcaatgct

SEQ ID NO: 813525 - DNA, 25 bp, Homo sapien
catccagatggacatttatagcaac

SEQ ID NO: 813526 - DNA, 25 bp, Homo sapien
aaatgagctacatgtctctgacctg

SEQ ID NO: 813527 - DNA, 25 bp, Homo sapien
ggtggcacttgcgaaacatttatta

SEQ ID NO: 813528 - DNA, 25 bp, Homo sapien
taaatctcatgtcaagtgctgctac

SEQ ID NO: 813529 - DNA, 25 bp, Homo sapien
cataaggtcctggaaattttgcaca

SEQ ID NO: 813530 - DNA, 25 bp, Homo sapien
taatccattgttccgtatcagcagc

SEQ ID NO: 813531 - DNA, 25 bp, Homo sapien
tgtgcccgtaacctatcaaatagtt

SEQ ID NO: 813532 - DNA, 25 bp, Homo sapien
tgtcaccaaggatcacacttatggc

SEQ ID NO: 813533 - DNA, 25 bp, Homo sapien
ctgtcaccaaggatcacacttatgg

SEQ ID NO: 813534 - DNA, 25 bp, Homo sapien
gtcaccaaggatcacacttatggct

SEQ ID NO: 813535 - DNA, 25 bp, Homo sapien
agccaaagcctttgcttctaatgtg

SEQ ID NO: 813536 - DNA, 25 bp, Homo sapien
tttgcttctaatgtgtacattcttc

SEQ ID NO: 813537 - DNA, 25 bp, Homo sapien
aacagtcaggatttaaacgtttctg

SEQ ID NO: 813538 - DNA, 25 bp, Homo sapien
ttcctcttccaacagtcaggattta

SEQ ID NO: 813539 - DNA, 25 bp, Homo sapien
ggttgtaacaactgctccaacatgc

SEQ ID NO: 813540 - DNA, 25 bp, Homo sapien
cctcttaaaggttgtaacaactgct

SEQ ID NO: 813541 - DNA, 25 bp, Homo sapien
taaaggttgtaacaactgctccaac

SEQ ID NO: 813542 - DNA, 25 bp, Homo sapien
tcttaaaggttgtaacaactgctcc

SEQ ID NO: 813543 - DNA, 25 bp, Homo sapien
gagatttcgacttgccatgctatga

SEQ ID NO: 813544 - DNA, 25 bp, Homo sapien
taaaaacgctgaacctaaaagatgc

SEQ ID NO: 813545 - DNA, 25 bp, Homo sapien
tggccagccctcctactataaaaat

SEQ ID NO: 813546 - DNA, 25 bp, Homo sapien
gatatctgatggctcaagcatccag

SEQ ID NO: 813547 - DNA, 25 bp, Homo sapien
tatcttatggtcacacgaattgagg

SEQ ID NO: 813548 - DNA, 25 bp, Homo sapien
tcttggcactgaccagactaggagc

SEQ ID NO: 813549 - DNA, 25 bp, Homo sapien
taggagcgcctatgtttggcacaga

SEQ ID NO: 813550 - DNA, 25 bp, Homo sapien
ttactagaggaaaggccgactccca

SEQ ID NO: 813551 - DNA, 25 bp, Homo sapien
ggaaataataacggatggctgctgc

SEQ ID NO: 813552 - DNA, 25 bp, Homo sapien
aataataacggatggctgctgccac

SEQ ID NO: 813553 - DNA, 25 bp, Homo sapien
ataataacggatggctgctgccacc

SEQ ID NO: 813554 - DNA, 25 bp, Homo sapien
attggaaataataacggatggctgc

SEQ ID NO: 813555 - DNA, 25 bp, Homo sapien
tatttaagatacatggctgaggaga

SEQ ID NO: 813556 - DNA, 25 bp, Homo sapien
gttaatagcaccattacagtgacta

SEQ ID NO: 813557 - DNA, 25 bp, Homo sapien
tgaggagatacagaacacgaagtta

SEQ ID NO: 813558 - DNA, 25 bp, Homo sapien
actgcagtaagtgcaaagtctgccc

SEQ ID NO: 813559 - DNA, 25 bp, Homo sapien
tgaaaagccatgattgtagctcaga

SEQ ID NO: 813560 - DNA, 25 bp, Homo sapien
cacttggtaagtaacatgaaaagcc

SEQ ID NO: 813561 - DNA, 25 bp, Homo sapien
cagctgtattgccaatgtatttgct

SEQ ID NO: 813562 - DNA, 25 bp, Homo sapien
gctgtgattcctaaccagaaacacc

SEQ ID NO: 813563 - DNA, 25 bp, Homo sapien
gatcaagttataacatgtaccctgc

SEQ ID NO: 813564 - DNA, 25 bp, Homo sapien
taaccaagtcctcctatgggtacat

SEQ ID NO: 813565 - DNA, 25 bp, Homo sapien
gctgcacattcataccaatcaccag

SEQ ID NO: 813566 - DNA, 25 bp, Homo sapien
tcttcactaaataagcatgtagctc

SEQ ID NO: 813567 - DNA, 25 bp, Homo sapien
gccttcaggaattccacaatgctgg

SEQ ID NO: 813568 - DNA, 25 bp, Homo sapien
tgctggatcctgctaagtcaaggct

SEQ ID NO: 813569 - DNA, 25 bp, Homo sapien
caaggctgttgatacagaagtcaga

SEQ ID NO: 813570 - DNA, 25 bp, Homo sapien
tattcagttgggttgagtctaggca

SEQ ID NO: 813571 - DNA, 25 bp, Homo sapien
acttcaatgcagatcagtagctatg

SEQ ID NO: 813572 - DNA, 25 bp, Homo sapien
accattatttgatggttccagggaa

SEQ ID NO: 813573 - DNA, 25 bp, Homo sapien
ggtcaatagttctagacactaaggt

SEQ ID NO: 813574 - DNA, 25 bp, Homo sapien
ctgtacctagccacaatggaaagtt

SEQ ID NO: 813575 - DNA, 25 bp, Homo sapien
ctcccttcaagggtgtccgtagcat

SEQ ID NO: 813576 - DNA, 25 bp, Homo sapien
cttcaagggtgtccgtagcatctgc

SEQ ID NO: 813577 - DNA, 25 bp, Homo sapien
atgttctttatcgtttcttctccct

SEQ ID NO: 813578 - DNA, 25 bp, Homo sapien
cttctcccttcaagggtgtccgtag

SEQ ID NO: 813579 - DNA, 25 bp, Homo sapien
tgtccagccttttgggttgtattcc

SEQ ID NO: 813580 - DNA, 25 bp, Homo sapien
aagaactgtcctctaactggtttag

SEQ ID NO: 813581 - DNA, 25 bp, Homo sapien
actggtttagaaatttgtccagcct

SEQ ID NO: 813582 - DNA, 25 bp, Homo sapien
gttttttgtcttcgagcagttttca

SEQ ID NO: 813583 - DNA, 25 bp, Homo sapien
gccagacttccattaatcttttaaa

SEQ ID NO: 813584 - DNA, 25 bp, Homo sapien
aactaagatcaagtacagcatcaag

SEQ ID NO: 813585 - DNA, 25 bp, Homo sapien
tttcacacctagatgagtttttcaa

SEQ ID NO: 813586 - DNA, 25 bp, Homo sapien
gaaacagtattatctgtagtccaga

SEQ ID NO: 813587 - DNA, 25 bp, Homo sapien
tattaaggaagtgcaaccatctgca

SEQ ID NO: 813588 - DNA, 25 bp, Homo sapien
tctgcagagttgaggattacacaca

SEQ ID NO: 813589 - DNA, 25 bp, Homo sapien
tttttatagcacatacagtccctga

SEQ ID NO: 813590 - DNA, 25 bp, Homo sapien
cagtccctgaagtgtactgtagtac

SEQ ID NO: 813591 - DNA, 25 bp, Homo sapien
ccttttgcctcaaaggtgtctgctt

SEQ ID NO: 813592 - DNA, 25 bp, Homo sapien
cccttttgcctcaaaggtgtctgct

SEQ ID NO: 813593 - DNA, 25 bp, Homo sapien
cttttgcctcaaaggtgtctgcttc

SEQ ID NO: 813594 - DNA, 25 bp, Homo sapien
cccccttttgcctcaaaggtgtctg

SEQ ID NO: 813595 - DNA, 25 bp, Homo sapien
gctaactggtaatggcaatgtcttg

SEQ ID NO: 813596 - DNA, 25 bp, Homo sapien
tagtattcataaaggcactacatac

SEQ ID NO: 813597 - DNA, 25 bp, Homo sapien
aatgattttattccaccgtcactaa

SEQ ID NO: 813598 - DNA, 25 bp, Homo sapien
gagacagctgcagattgttacagta

SEQ ID NO: 813599 - DNA, 25 bp, Homo sapien
gaagtggccgctggatttgactctg

SEQ ID NO: 813600 - DNA, 25 bp, Homo sapien
tggatttgactctgtagccctccat

SEQ ID NO: 813601 - DNA, 25 bp, Homo sapien
tgtttatggtctacaaaacgtgctt

SEQ ID NO: 813602 - DNA, 25 bp, Homo sapien
agttgtttatggtctacaaaacgtg

SEQ ID NO: 813603 - DNA, 25 bp, Homo sapien
tttatggtctacaaaacgtgcttca

SEQ ID NO: 813604 - DNA, 25 bp, Homo sapien
tatggtctacaaaacgtgcttcatg

SEQ ID NO: 813605 - DNA, 25 bp, Homo sapien
tgtttttctaagtgtgttccatggg

SEQ ID NO: 813606 - DNA, 25 bp, Homo sapien
ccagtatgaagtagtcactgtgttt

SEQ ID NO: 813607 - DNA, 25 bp, Homo sapien
aaccagtatgaagtagtcactgtgt

SEQ ID NO: 813608 - DNA, 25 bp, Homo sapien
ctaaaccagtatgaagtagtcactg

SEQ ID NO: 813609 - DNA, 25 bp, Homo sapien
accatacaatctgttagaagaaaac

SEQ ID NO: 813610 - DNA, 25 bp, Homo sapien
cctcataccatgcaaaaaaggaact

SEQ ID NO: 813611 - DNA, 25 bp, Homo sapien
tcatatacctaaagatctaaaacca

SEQ ID NO: 813612 - DNA, 25 bp, Homo sapien
tcctgggacaaccagtgtctacatg

SEQ ID NO: 813613 - DNA, 25 bp, Homo sapien
gatccctaactgcttgtttcttcat

SEQ ID NO: 813614 - DNA, 25 bp, Homo sapien
ggcattgtagatccaggcaccatca

SEQ ID NO: 813615 - DNA, 25 bp, Homo sapien
agtgtaagatccctaactgcttgtt

SEQ ID NO: 813616 - DNA, 25 bp, Homo sapien
tggtggaagtggcattgtagatcca

SEQ ID NO: 813617 - DNA, 25 bp, Homo sapien
gaaccgataggttagcaatattctg

SEQ ID NO: 813618 - DNA, 25 bp, Homo sapien
tgcctgctgtctaatatctgaaaag

SEQ ID NO: 813619 - DNA, 25 bp, Homo sapien
tagcaattatgaactaccttgaggc

SEQ ID NO: 813620 - DNA, 25 bp, Homo sapien
ggatcacagtcctgcattgcctgct

SEQ ID NO: 813621 - DNA, 25 bp, Homo sapien
ccttagtatcattttggcgttccat

SEQ ID NO: 813622 - DNA, 25 bp, Homo sapien
ctggccttagtatcattttggcgtt

SEQ ID NO: 813623 - DNA, 25 bp, Homo sapien
ggccttagtatcattttggcgttcc

SEQ ID NO: 813624 - DNA, 25 bp, Homo sapien
gccttagtatcattttggcgttcca

SEQ ID NO: 813625 - DNA, 25 bp, Homo sapien
tgtgccattgtttcagcagtactgc

SEQ ID NO: 813626 - DNA, 25 bp, Homo sapien
agagggtcataaacatctcttcgaa

SEQ ID NO: 813627 - DNA, 25 bp, Homo sapien
catgtagtgctgcttagaggctgct

SEQ ID NO: 813628 - DNA, 25 bp, Homo sapien
gcagtactgctaatgtatggaacat

SEQ ID NO: 813629 - DNA, 25 bp, Homo sapien
cagtttggattgattcattttgttc

SEQ ID NO: 813630 - DNA, 25 bp, Homo sapien
tttggattgattcattttgttcact

SEQ ID NO: 813631 - DNA, 25 bp, Homo sapien
tccagtttggattgattcattttgt

SEQ ID NO: 813632 - DNA, 25 bp, Homo sapien
ttccagtttggattgattcattttg

SEQ ID NO: 813633 - DNA, 25 bp, Homo sapien
agttcagacagctagggagatgctc

SEQ ID NO: 813634 - DNA, 25 bp, Homo sapien
catcttgcagttcgtagttcagaca

SEQ ID NO: 813635 - DNA, 25 bp, Homo sapien
aagtcacggccaagaggaatttcct

SEQ ID NO: 813636 - DNA, 25 bp, Homo sapien
tcagtaatgtagacctattccctgg

SEQ ID NO: 813637 - DNA, 25 bp, Homo sapien
cagattaaacatcaggtctttgtca

SEQ ID NO: 813638 - DNA, 25 bp, Homo sapien
gtgtgccaaattttctgaactgaca

SEQ ID NO: 813639 - DNA, 25 bp, Homo sapien
tgggccttttggttcactatgacag

SEQ ID NO: 813640 - DNA, 25 bp, Homo sapien
tattcgagtaagttaaggtcttagc

SEQ ID NO: 813641 - DNA, 25 bp, Homo sapien
ttcaaaattcatgttaactttcact

SEQ ID NO: 813642 - DNA, 25 bp, Homo sapien
aatgtcagttaatcagtatattcat

SEQ ID NO: 813643 - DNA, 25 bp, Homo sapien
gaactcatacaaccaactatatttc

SEQ ID NO: 813644 - DNA, 25 bp, Homo sapien
caactgcaaaatcatattcaacata

SEQ ID NO: 813645 - DNA, 25 bp, Homo sapien
tttccagaatgggagaaaaacacat

SEQ ID NO: 813646 - DNA, 25 bp, Homo sapien
gatttccagaatgggagaaaaacac

SEQ ID NO: 813647 - DNA, 25 bp, Homo sapien
gttgatttccagaatgggagaaaaa

SEQ ID NO: 813648 - DNA, 25 bp, Homo sapien
tgatttccagaatgggagaaaaaca

SEQ ID NO: 813649 - DNA, 25 bp, Homo sapien
tgcaaaagatacacaagcctcatgg

SEQ ID NO: 813650 - DNA, 25 bp, Homo sapien
tcgccggagggcaattattacagaa

SEQ ID NO: 813651 - DNA, 25 bp, Homo sapien
tacagtgaggttgctgccaagtccc

SEQ ID NO: 813652 - DNA, 25 bp, Homo sapien
aatccggtgagagacacttgaaagc

SEQ ID NO: 813653 - DNA, 25 bp, Homo sapien
tacaacataaccaatacttaaaata

SEQ ID NO: 813654 - DNA, 25 bp, Homo sapien
catgatagtactttaacaaactgcc

SEQ ID NO: 813655 - DNA, 25 bp, Homo sapien
tggcagtaatatcagtttttacaat

SEQ ID NO: 813656 - DNA, 25 bp, Homo sapien
ctcatttgaatgtggatttggtgaa

SEQ ID NO: 813657 - DNA, 25 bp, Homo sapien
tattaatccagagcatttggcttag

SEQ ID NO: 813658 - DNA, 25 bp, Homo sapien
aataaagcaaggatacctatgtcag

SEQ ID NO: 813659 - DNA, 25 bp, Homo sapien
tagtttgtggcttagaaacaatgca

SEQ ID NO: 813660 - DNA, 25 bp, Homo sapien
tataccaggaaacatagcatagtgg

SEQ ID NO: 813661 - DNA, 25 bp, Homo sapien
taggagctggtctgtgccaaatgta

SEQ ID NO: 813662 - DNA, 25 bp, Homo sapien
tagtgagttcaagctactgcatggt

SEQ ID NO: 813663 - DNA, 25 bp, Homo sapien
gacagaaggaaattgggcttttgcc

SEQ ID NO: 813664 - DNA, 25 bp, Homo sapien
gattttcccacatgaattgagggtg

SEQ ID NO: 813665 - DNA, 25 bp, Homo sapien
tatgcttgggagtccaattataaaa

SEQ ID NO: 813666 - DNA, 25 bp, Homo sapien
attttaatttatgcttgggagtcca

SEQ ID NO: 813667 - DNA, 25 bp, Homo sapien
cttgggagtccaattataaaattca

SEQ ID NO: 813668 - DNA, 25 bp, Homo sapien
taatttatgcttgggagtccaatta

SEQ ID NO: 813669 - DNA, 25 bp, Homo sapien
gagttgatattggtgtcagtgacag

SEQ ID NO: 813670 - DNA, 25 bp, Homo sapien
tacttgatgcttcggggtttgatag

SEQ ID NO: 813671 - DNA, 25 bp, Homo sapien
tgctggtgcaagtacaaagctgtca

SEQ ID NO: 813672 - DNA, 25 bp, Homo sapien
gtggcagggagttgatattggtgtc

SEQ ID NO: 813673 - DNA, 25 bp, Homo sapien
ttctcaagtttatccagagtcgctt

SEQ ID NO: 813674 - DNA, 25 bp, Homo sapien
cttctcaagtttatccagagtcgct

SEQ ID NO: 813675 - DNA, 25 bp, Homo sapien
acttctcaagtttatccagagtcgc

SEQ ID NO: 813676 - DNA, 25 bp, Homo sapien
tcacttctcaagtttatccagagtc

SEQ ID NO: 813677 - DNA, 25 bp, Homo sapien
catctccacaaaaaatacaattagc

SEQ ID NO: 813678 - DNA, 25 bp, Homo sapien
cacctgagcccagtagtttgagagc

SEQ ID NO: 813679 - DNA, 25 bp, Homo sapien
ttcacctgagcccagtagtttgaga

SEQ ID NO: 813680 - DNA, 25 bp, Homo sapien
cctgagcccagtagtttgagagcag

SEQ ID NO: 813681 - DNA, 25 bp, Homo sapien
tttatgtttgagtatggtgtatgca

SEQ ID NO: 813682 - DNA, 25 bp, Homo sapien
catacggtgtattgcttgtgagtgc

SEQ ID NO: 813683 - DNA, 25 bp, Homo sapien
catgtttaatacttgattggctttg

SEQ ID NO: 813684 - DNA, 25 bp, Homo sapien
tgtatgcatacatacggtgtattgc

SEQ ID NO: 813685 - DNA, 25 bp, Homo sapien
ctattatgtgtgtttcagatattcc

SEQ ID NO: 813686 - DNA, 25 bp, Homo sapien
taccctgaagctatgaagatattgt

SEQ ID NO: 813687 - DNA, 25 bp, Homo sapien
cctcttgtaagtcatctattatgtg

SEQ ID NO: 813688 - DNA, 25 bp, Homo sapien
caaaagcacgtattgttttgcctca

SEQ ID NO: 813689 - DNA, 25 bp, Homo sapien
tggacccaacccgttgctttgcaga

SEQ ID NO: 813690 - DNA, 25 bp, Homo sapien
tgctccgcacctggacagcgaggtg

SEQ ID NO: 813691 - DNA, 25 bp, Homo sapien
ttttccagtctggacgtgaccactc

SEQ ID NO: 813692 - DNA, 25 bp, Homo sapien
tgggtactgttctagccaacctatt

SEQ ID NO: 813693 - DNA, 25 bp, Homo sapien
caggcttagcccaggcgcgggctga

SEQ ID NO: 813694 - DNA, 25 bp, Homo sapien
caggcgcgggctgagagtcagttcg

SEQ ID NO: 813695 - DNA, 25 bp, Homo sapien
gctgagagtcagttcgccaggtggg

SEQ ID NO: 813696 - DNA, 25 bp, Homo sapien
gagtcagttcgccaggtgggcctgg

SEQ ID NO: 813697 - DNA, 25 bp, Homo sapien
ttctccttggctagggcacgacgcc

SEQ ID NO: 813698 - DNA, 25 bp, Homo sapien
gagacagctgaaagcgccggcccga

SEQ ID NO: 813699 - DNA, 25 bp, Homo sapien
ggccttggctccctcggtgcgctgg

SEQ ID NO: 813700 - DNA, 25 bp, Homo sapien
gccctgagctgctgcgagagacagc

SEQ ID NO: 813701 - DNA, 25 bp, Homo sapien
cacagataagcgctgcggccacgtt

SEQ ID NO: 813702 - DNA, 25 bp, Homo sapien
cagataagcgctgcggccacgttcc

SEQ ID NO: 813703 - DNA, 25 bp, Homo sapien
ttcacagataagcgctgcggccacg

SEQ ID NO: 813704 - DNA, 25 bp, Homo sapien
aagcgctgcggccacgttccggtgc

SEQ ID NO: 813705 - DNA, 25 bp, Homo sapien
tgtggagggcaaacgaagctccctg

SEQ ID NO: 813706 - DNA, 25 bp, Homo sapien
caactaacgcgtgactcttgtgagt

SEQ ID NO: 813707 - DNA, 25 bp, Homo sapien
gataaagctgtgtagcaactaacgc

SEQ ID NO: 813708 - DNA, 25 bp, Homo sapien
tcaaggcgtggaacagataaagctg

SEQ ID NO: 813709 - DNA, 25 bp, Homo sapien
ctgatgctcttacagcgtcaatact

SEQ ID NO: 813710 - DNA, 25 bp, Homo sapien
tactgttagttgagatgtggaccat

SEQ ID NO: 813711 - DNA, 25 bp, Homo sapien
gttgagatgtggaccatctatcagt

SEQ ID NO: 813712 - DNA, 25 bp, Homo sapien
tacagcgtcaatactgttagttgag

SEQ ID NO: 813713 - DNA, 25 bp, Homo sapien
aatatcgaaccattggggcacagac

SEQ ID NO: 813714 - DNA, 25 bp, Homo sapien
ttggggcacagacttttaccagctg

SEQ ID NO: 813715 - DNA, 25 bp, Homo sapien
aatgaaacatttctatgggatcttt

SEQ ID NO: 813716 - DNA, 25 bp, Homo sapien
tgaaacatttctatgggatcttttt

SEQ ID NO: 813717 - DNA, 25 bp, Homo sapien
gttttagagatcagatgcacaacaa

SEQ ID NO: 813718 - DNA, 25 bp, Homo sapien
aatgatcgagaggtaaattttatgt

SEQ ID NO: 813719 - DNA, 25 bp, Homo sapien
ttagagatcagatgcacaacaatgt

SEQ ID NO: 813720 - DNA, 25 bp, Homo sapien
aagagttttagagatcagatgcaca

SEQ ID NO: 813721 - DNA, 25 bp, Homo sapien
aatggggagtcacagtttaatgtga

SEQ ID NO: 813722 - DNA, 25 bp, Homo sapien
aacagtggaatggggagtcacagtt

SEQ ID NO: 813723 - DNA, 25 bp, Homo sapien
gaatggggagtcacagtttaatgtg

SEQ ID NO: 813724 - DNA, 25 bp, Homo sapien
acagtggaatggggagtcacagttt

SEQ ID NO: 813725 - DNA, 25 bp, Homo sapien
tcagagacctgttacgaaccatggg

SEQ ID NO: 813726 - DNA, 25 bp, Homo sapien
tcaacacggcgctgaaacttctagt

SEQ ID NO: 813727 - DNA, 25 bp, Homo sapien
tatcctagacttgaagaagctggcc

SEQ ID NO: 813728 - DNA, 25 bp, Homo sapien
gaaagtcagttcttcccaagttgag

SEQ ID NO: 813729 - DNA, 25 bp, Homo sapien
tcttactagtgtcctaaaagccaac

SEQ ID NO: 813730 - DNA, 25 bp, Homo sapien
aaatcagcggcaacaatcattggtg

SEQ ID NO: 813731 - DNA, 25 bp, Homo sapien
ttgtggtaaattcgctgtctctggc

SEQ ID NO: 813732 - DNA, 25 bp, Homo sapien
ggtgtgtaacacagatcacaactat

SEQ ID NO: 813733 - DNA, 25 bp, Homo sapien
agtcagtacactcggtttcacatac

SEQ ID NO: 813734 - DNA, 25 bp, Homo sapien
aagtcagtacactcggtttcacata

SEQ ID NO: 813735 - DNA, 25 bp, Homo sapien
ccattcgcataaggacagactatac

SEQ ID NO: 813736 - DNA, 25 bp, Homo sapien
catcagataaaagtcttgcatcgtt

SEQ ID NO: 813737 - DNA, 25 bp, Homo sapien
gacagactatacgagcagcatcaga

SEQ ID NO: 813738 - DNA, 25 bp, Homo sapien
cttgcatcgttagcagcaaactgaa

SEQ ID NO: 813739 - DNA, 25 bp, Homo sapien
aatgtaagtgcatccatttctctag

SEQ ID NO: 813740 - DNA, 25 bp, Homo sapien
aagcactgaaatgtaagtgcatcca

SEQ ID NO: 813741 - DNA, 25 bp, Homo sapien
agagaagacaaaattctgaaagcac

SEQ ID NO: 813742 - DNA, 25 bp, Homo sapien
ctgaaatgtaagtgcatccatttct

SEQ ID NO: 813743 - DNA, 25 bp, Homo sapien
aacacatgaacaagtgaattataaa

SEQ ID NO: 813744 - DNA, 25 bp, Homo sapien
cacatgaacaagtgaattataaata

SEQ ID NO: 813745 - DNA, 25 bp, Homo sapien
caaacacatgaacaagtgaattata

SEQ ID NO: 813746 - DNA, 25 bp, Homo sapien
acacatgaacaagtgaattataaat

SEQ ID NO: 813747 - DNA, 25 bp, Homo sapien
atgtcttgaacaagctctggcttgt

SEQ ID NO: 813748 - DNA, 25 bp, Homo sapien
tctggcttgtttattaagcaagccc

SEQ ID NO: 813749 - DNA, 25 bp, Homo sapien
ttaagcaagccccataaccttctgc

SEQ ID NO: 813750 - DNA, 25 bp, Homo sapien
tgtttattaagcaagccccataacc

SEQ ID NO: 813751 - DNA, 25 bp, Homo sapien
attttaatagaaactgaaaatccag

SEQ ID NO: 813752 - DNA, 25 bp, Homo sapien
atccaggggtttccacttgatttct

SEQ ID NO: 813753 - DNA, 25 bp, Homo sapien
ctgaaaatccaggggtttccacttg

SEQ ID NO: 813754 - DNA, 25 bp, Homo sapien
tattttaatagaaactgaaaatcca

SEQ ID NO: 813755 - DNA, 25 bp, Homo sapien
acattaactgactaaaatggtattt

SEQ ID NO: 813756 - DNA, 25 bp, Homo sapien
cttaatgctaacattaactgactaa

SEQ ID NO: 813757 - DNA, 25 bp, Homo sapien
taacattaactgactaaaatggtat

SEQ ID NO: 813758 - DNA, 25 bp, Homo sapien
cacaaatcttaatgctaacattaac

SEQ ID NO: 813759 - DNA, 25 bp, Homo sapien
gactgtaatccatgaaactcctgtt

SEQ ID NO: 813760 - DNA, 25 bp, Homo sapien
tcagccttttgacaaagatctacag

SEQ ID NO: 813761 - DNA, 25 bp, Homo sapien
gatgtctccattagcaattacaggt

SEQ ID NO: 813762 - DNA, 25 bp, Homo sapien
tacagttcttttaaggtcatcatgg

SEQ ID NO: 813763 - DNA, 25 bp, Homo sapien
catctgtcccagtaatccgccacac

SEQ ID NO: 813764 - DNA, 25 bp, Homo sapien
cataaattgggctgcttaaagttca

SEQ ID NO: 813765 - DNA, 25 bp, Homo sapien
gcatagcagttctgggattccttta

SEQ ID NO: 813766 - DNA, 25 bp, Homo sapien
catctagcaattatagggcttggca

SEQ ID NO: 813767 - DNA, 25 bp, Homo sapien
tcactggtcactagatatgatggtg

SEQ ID NO: 813768 - DNA, 25 bp, Homo sapien
aagagcaatgtcaacccagtcccag

SEQ ID NO: 813769 - DNA, 25 bp, Homo sapien
taaggagtcccgagttcaagagcaa

SEQ ID NO: 813770 - DNA, 25 bp, Homo sapien
ctcatatccagcaaacatggccggg

SEQ ID NO: 813771 - DNA, 25 bp, Homo sapien
catggccgggtttgctaagagtcct

SEQ ID NO: 813772 - DNA, 25 bp, Homo sapien
taatggtctgtaaggtaatctatga

SEQ ID NO: 813773 - DNA, 25 bp, Homo sapien
taatctatgattgctgatgtgcttg

SEQ ID NO: 813774 - DNA, 25 bp, Homo sapien
gccataatggtctgtaaggtaatct

SEQ ID NO: 813775 - DNA, 25 bp, Homo sapien
gatgtgcttgacagagcattaaata

SEQ ID NO: 813776 - DNA, 25 bp, Homo sapien
tctatagaacaggattcagagcagt

SEQ ID NO: 813777 - DNA, 25 bp, Homo sapien
gagagctactggtttaaggtacaaa

SEQ ID NO: 813778 - DNA, 25 bp, Homo sapien
aactgtgtatttctgggtctactcc

SEQ ID NO: 813779 - DNA, 25 bp, Homo sapien
aatctctgagggtggtgtctacaac

SEQ ID NO: 813780 - DNA, 25 bp, Homo sapien
tacaatcaacggctgagaggcacaa

SEQ ID NO: 813781 - DNA, 25 bp, Homo sapien
gctttcaatctttggaggacctaga

SEQ ID NO: 813782 - DNA, 25 bp, Homo sapien
tattaataacactccaaaaccatgg

SEQ ID NO: 813783 - DNA, 25 bp, Homo sapien
gcagtgcatgcccaccgataacaaa

SEQ ID NO: 813784 - DNA, 25 bp, Homo sapien
tgtttccttataacagttttcatgt

SEQ ID NO: 813785 - DNA, 25 bp, Homo sapien
tggtgcaaattcagcgaacgcgctt

SEQ ID NO: 813786 - DNA, 25 bp, Homo sapien
tatgtcacaacatattccgtaggcg

SEQ ID NO: 813787 - DNA, 25 bp, Homo sapien
ggcggcgcgaccacgtttattggca

SEQ ID NO: 813788 - DNA, 25 bp, Homo sapien
gaggtcggagcgcaacttcttcagg

SEQ ID NO: 813789 - DNA, 25 bp, Homo sapien
acgcgcgggacgtcagacgccgcgg

SEQ ID NO: 813790 - DNA, 25 bp, Homo sapien
cgacgcgcgggacgtcagacgccgc

SEQ ID NO: 813791 - DNA, 25 bp, Homo sapien
ccgccgacgcgcgggacgtcagacg

SEQ ID NO: 813792 - DNA, 25 bp, Homo sapien
gccgacgcgcgggacgtcagacgcc

SEQ ID NO: 813793 - DNA, 25 bp, Homo sapien
cacctccctgggagtcgtgggaact

SEQ ID NO: 813794 - DNA, 25 bp, Homo sapien
tgggaactggcgaggcggctcgctg

SEQ ID NO: 813795 - DNA, 25 bp, Homo sapien
ggaagcgggtgtcgccacctccctg

SEQ ID NO: 813796 - DNA, 25 bp, Homo sapien
ttttccgccagcttcgcggcgacag

SEQ ID NO: 813797 - DNA, 25 bp, Homo sapien
cgtttttgtccaggggatggacagt

SEQ ID NO: 813798 - DNA, 25 bp, Homo sapien
ggccccgaggcgcagcgtttttgtc

SEQ ID NO: 813799 - DNA, 25 bp, Homo sapien
ccgaggcgcagcgtttttgtccagg

SEQ ID NO: 813800 - DNA, 25 bp, Homo sapien
tcaaggccccgaggcgcagcgtttt

SEQ ID NO: 813801 - DNA, 25 bp, Homo sapien
tggaaaaacacttattttctcttgc

SEQ ID NO: 813802 - DNA, 25 bp, Homo sapien
tttctcttgcttcctttcaaacaaa

SEQ ID NO: 813803 - DNA, 25 bp, Homo sapien
tattttctcttgcttcctttcaaac

SEQ ID NO: 813804 - DNA, 25 bp, Homo sapien
atggaaaaacacttattttctcttg

SEQ ID NO: 813805 - DNA, 25 bp, Homo sapien
aaatgagtcctatttcggcataaag

SEQ ID NO: 813806 - DNA, 25 bp, Homo sapien
gattaaaatgagtcctatttcggca

SEQ ID NO: 813807 - DNA, 25 bp, Homo sapien
taaaatgagtcctatttcggcataa

SEQ ID NO: 813808 - DNA, 25 bp, Homo sapien
tgagtcctatttcggcataaagaaa

SEQ ID NO: 813809 - DNA, 25 bp, Homo sapien
tagaaatagaacaatcaataggatg

SEQ ID NO: 813810 - DNA, 25 bp, Homo sapien
gataatggtaaggaaagccttgttc

SEQ ID NO: 813811 - DNA, 25 bp, Homo sapien
caatcaataggatgataatggtaag

SEQ ID NO: 813812 - DNA, 25 bp, Homo sapien
taggatgataatggtaaggaaagcc

SEQ ID NO: 813813 - DNA, 25 bp, Homo sapien
tagataactggtactagctggtcca

SEQ ID NO: 813814 - DNA, 25 bp, Homo sapien
tacgtctggaatgggtaccacacct

SEQ ID NO: 813815 - DNA, 25 bp, Homo sapien
ttctgagggaaaacatactctgtgc

SEQ ID NO: 813816 - DNA, 25 bp, Homo sapien
gaattaacccttgcatacgtctgga

SEQ ID NO: 813817 - DNA, 25 bp, Homo sapien
taatatagtaagagcatgccaacca

SEQ ID NO: 813818 - DNA, 25 bp, Homo sapien
taatactcctgaatccattatgcag

SEQ ID NO: 813819 - DNA, 25 bp, Homo sapien
catactaatttgcttgatgctgcac

SEQ ID NO: 813820 - DNA, 25 bp, Homo sapien
tatgcttcgtgattcatcttccttg

SEQ ID NO: 813821 - DNA, 25 bp, Homo sapien
gtgatgaggctcatactccaaactc

SEQ ID NO: 813822 - DNA, 25 bp, Homo sapien
caagcccctctaacgtgatgaggct

SEQ ID NO: 813823 - DNA, 25 bp, Homo sapien
ccctctaacgtgatgaggctcatac

SEQ ID NO: 813824 - DNA, 25 bp, Homo sapien
tctaacgtgatgaggctcatactcc

SEQ ID NO: 813825 - DNA, 25 bp, Homo sapien
tgtttccaatcttatgggggaagac

SEQ ID NO: 813826 - DNA, 25 bp, Homo sapien
tgttcataggcatcaggtctgctgg

SEQ ID NO: 813827 - DNA, 25 bp, Homo sapien
gtgtgtgttcataggcatcaggtct

SEQ ID NO: 813828 - DNA, 25 bp, Homo sapien
tggtggagctcttctcaatggtatg

SEQ ID NO: 813829 - DNA, 25 bp, Homo sapien
gcatcaggtctgctggtggagctct

SEQ ID NO: 813830 - DNA, 25 bp, Homo sapien
gaaaggaaagcataagtcatgtttt

SEQ ID NO: 813831 - DNA, 25 bp, Homo sapien
aaggaaagcataagtcatgttttta

SEQ ID NO: 813832 - DNA, 25 bp, Homo sapien
aaaggaaagcataagtcatgttttt

SEQ ID NO: 813833 - DNA, 25 bp, Homo sapien
aggaaagcataagtcatgtttttaa

SEQ ID NO: 813834 - DNA, 25 bp, Homo sapien
tcttttgccagttgagtaataagcg

SEQ ID NO: 813835 - DNA, 25 bp, Homo sapien
taataagcgtaaccagacgtctcaa

SEQ ID NO: 813836 - DNA, 25 bp, Homo sapien
taagtacacctttgtttgacagttc

SEQ ID NO: 813837 - DNA, 25 bp, Homo sapien
gttgagtaataagcgtaaccagacg

SEQ ID NO: 813838 - DNA, 25 bp, Homo sapien
gcaacccatagtctcttcagccctg

SEQ ID NO: 813839 - DNA, 25 bp, Homo sapien
caacccatagtctcttcagccctga

SEQ ID NO: 813840 - DNA, 25 bp, Homo sapien
aacccatagtctcttcagccctgac

SEQ ID NO: 813841 - DNA, 25 bp, Homo sapien
tgcaacccatagtctcttcagccct

SEQ ID NO: 813842 - DNA, 25 bp, Homo sapien
ctacaatgtacttttgctaacagaa

SEQ ID NO: 813843 - DNA, 25 bp, Homo sapien
tctacaatgtacttttgctaacaga

SEQ ID NO: 813844 - DNA, 25 bp, Homo sapien
catctttaccatggcttttcaaaat

SEQ ID NO: 813845 - DNA, 25 bp, Homo sapien
tcttcatctttaccatggcttttca

SEQ ID NO: 813846 - DNA, 25 bp, Homo sapien
ttcatctttaccatggcttttcaaa

SEQ ID NO: 813847 - DNA, 25 bp, Homo sapien
attcttcatctttaccatggctttt

SEQ ID NO: 813848 - DNA, 25 bp, Homo sapien
atctgaagtcttccttaattcagtt

SEQ ID NO: 813849 - DNA, 25 bp, Homo sapien
catctgaagtcttccttaattcagt

SEQ ID NO: 813850 - DNA, 25 bp, Homo sapien
gaaatgttgcaaatcatcaagccac

SEQ ID NO: 813851 - DNA, 25 bp, Homo sapien
gaggtttctcagtgtctggccaaca

SEQ ID NO: 813852 - DNA, 25 bp, Homo sapien
tacaccctgattgaagtaaacccta

SEQ ID NO: 813853 - DNA, 25 bp, Homo sapien
tgttatgtgggaaggaggcactcaa

SEQ ID NO: 813854 - DNA, 25 bp, Homo sapien
tgaaatgtctgttgtaaacggtagg

SEQ ID NO: 813855 - DNA, 25 bp, Homo sapien
tgatcatgttcgaaatcttttggaa

SEQ ID NO: 813856 - DNA, 25 bp, Homo sapien
aaaaagaacactagtttctcttctg

SEQ ID NO: 813857 - DNA, 25 bp, Homo sapien
ttcttggtggatacagaaaaaagaa

SEQ ID NO: 813858 - DNA, 25 bp, Homo sapien
cagggttaagagaagtgtagcacac

SEQ ID NO: 813859 - DNA, 25 bp, Homo sapien
cactcgaacaggtaaaatctgcctt

SEQ ID NO: 813860 - DNA, 25 bp, Homo sapien
tggaaccaaacaggacacactcgaa

SEQ ID NO: 813861 - DNA, 25 bp, Homo sapien
acatttttgagtggtactgtgcaca

SEQ ID NO: 813862 - DNA, 25 bp, Homo sapien
gaacagacatttccacatgcagctc

SEQ ID NO: 813863 - DNA, 25 bp, Homo sapien
gaagacatatactgctaattcaacc

SEQ ID NO: 813864 - DNA, 25 bp, Homo sapien
tactacaagattggcaagccctaag

SEQ ID NO: 813865 - DNA, 25 bp, Homo sapien
cttttatcattgcttggatgcatac

SEQ ID NO: 813866 - DNA, 25 bp, Homo sapien
tcttaacactgaagaggcaggaatt

SEQ ID NO: 813867 - DNA, 25 bp, Homo sapien
ggtccctatgttaactggcaataaa

SEQ ID NO: 813868 - DNA, 25 bp, Homo sapien
ggtatacagatcagcaattcccctg

SEQ ID NO: 813869 - DNA, 25 bp, Homo sapien
caagggtatcaaagttggtctgcaa

SEQ ID NO: 813870 - DNA, 25 bp, Homo sapien
aaagataactaagttcacgtccaca

SEQ ID NO: 813871 - DNA, 25 bp, Homo sapien
agataactaagttcacgtccacaaa

SEQ ID NO: 813872 - DNA, 25 bp, Homo sapien
gataactaagttcacgtccacaaaa

SEQ ID NO: 813873 - DNA, 25 bp, Homo sapien
taaaagataactaagttcacgtcca

SEQ ID NO: 813874 - DNA, 25 bp, Homo sapien
tcagttgatacaagaagggacaaag

SEQ ID NO: 813875 - DNA, 25 bp, Homo sapien
ttttttcagttgatacaagaaggga

SEQ ID NO: 813876 - DNA, 25 bp, Homo sapien
ctaactaaaaggattggtcatgagt

SEQ ID NO: 813877 - DNA, 25 bp, Homo sapien
tacaagaagggacaaaggtgtcaaa

SEQ ID NO: 813878 - DNA, 25 bp, Homo sapien
aaaacgggctgctatcacttgccag

SEQ ID NO: 813879 - DNA, 25 bp, Homo sapien
caacagctgtaaggactgagccaga

SEQ ID NO: 813880 - DNA, 25 bp, Homo sapien
ttcgtgcactaataaaaagaggccc

SEQ ID NO: 813881 - DNA, 25 bp, Homo sapien
tctacgaatcacgaaacaggccctc

SEQ ID NO: 813882 - DNA, 25 bp, Homo sapien
acatcattttgtgccttagaaaggg

SEQ ID NO: 813883 - DNA, 25 bp, Homo sapien
cacatcattttgtgccttagaaagg

SEQ ID NO: 813884 - DNA, 25 bp, Homo sapien
ttctttcaggagttgatcatattct

SEQ ID NO: 813885 - DNA, 25 bp, Homo sapien
agagtgttctttcaggagttgatca

SEQ ID NO: 813886 - DNA, 25 bp, Homo sapien
tgatcatattctttcgaaagtctct

SEQ ID NO: 813887 - DNA, 25 bp, Homo sapien
ttctttcgaaagtctctctgactgc

SEQ ID NO: 813888 - DNA, 25 bp, Homo sapien
ttttctagaaccagtctgttttcca

SEQ ID NO: 813889 - DNA, 25 bp, Homo sapien
tccaatgctgccatttttgtggctt

SEQ ID NO: 813890 - DNA, 25 bp, Homo sapien
ttttccaatgctgccatttttgtgg

SEQ ID NO: 813891 - DNA, 25 bp, Homo sapien
tgttttccaatgctgccatttttgt

SEQ ID NO: 813892 - DNA, 25 bp, Homo sapien
tacttcctttaccaagaatgcagca

SEQ ID NO: 813893 - DNA, 25 bp, Homo sapien
cttcctttaccaagaatgcagcagc

SEQ ID NO: 813894 - DNA, 25 bp, Homo sapien
tttctacttcctttaccaagaatgc

SEQ ID NO: 813895 - DNA, 25 bp, Homo sapien
tctacttcctttaccaagaatgcag

SEQ ID NO: 813896 - DNA, 25 bp, Homo sapien
gcgaaggccagtatgtagaagctgc

SEQ ID NO: 813897 - DNA, 25 bp, Homo sapien
tgggattatcaatagcagaaaagcc

SEQ ID NO: 813898 - DNA, 25 bp, Homo sapien
ctctgggattatcaatagcagaaaa

SEQ ID NO: 813899 - DNA, 25 bp, Homo sapien
gatgagggttatggagcccaggtgc

SEQ ID NO: 813900 - DNA, 25 bp, Homo sapien
gaagtggtaaactatggagctgaga

SEQ ID NO: 813901 - DNA, 25 bp, Homo sapien
cacctgtgggttacagaagtggtaa

SEQ ID NO: 813902 - DNA, 25 bp, Homo sapien
catagatgtcaaatgagtcacctgt

SEQ ID NO: 813903 - DNA, 25 bp, Homo sapien
taagtagtaaagtacctgaggagca

SEQ ID NO: 813904 - DNA, 25 bp, Homo sapien
taaagtgctttcttatacaggatct

SEQ ID NO: 813905 - DNA, 25 bp, Homo sapien
atatataaagtgctttcttatacag

SEQ ID NO: 813906 - DNA, 25 bp, Homo sapien
aagtgctttcttatacaggatctgg

SEQ ID NO: 813907 - DNA, 25 bp, Homo sapien
atataaagtgctttcttatacagga

SEQ ID NO: 813908 - DNA, 25 bp, Homo sapien
gttcaggctgaacattaatgcttcc

SEQ ID NO: 813909 - DNA, 25 bp, Homo sapien
gacaaaaacctcagctagggtggct

SEQ ID NO: 813910 - DNA, 25 bp, Homo sapien
tgtgcagccaataatctctagttag

SEQ ID NO: 813911 - DNA, 25 bp, Homo sapien
gacaagtcccttaagtgatggctga

SEQ ID NO: 813912 - DNA, 25 bp, Homo sapien
tcacagtcttttcttgttgcctctt

SEQ ID NO: 813913 - DNA, 25 bp, Homo sapien
gtcttttcttgttgcctctttctaa

SEQ ID NO: 813914 - DNA, 25 bp, Homo sapien
tcttgttgcctctttctaaacgatc

SEQ ID NO: 813915 - DNA, 25 bp, Homo sapien
tttcttgttgcctctttctaaacga

SEQ ID NO: 813916 - DNA, 25 bp, Homo sapien
taaattttctagaggctaacataac

SEQ ID NO: 813917 - DNA, 25 bp, Homo sapien
tacaatacaacctatgtgtggcatt

SEQ ID NO: 813918 - DNA, 25 bp, Homo sapien
tattggtaaacagccaccatatacc

SEQ ID NO: 813919 - DNA, 25 bp, Homo sapien
tacgaaccggtcatagtgcattttt

SEQ ID NO: 813920 - DNA, 25 bp, Homo sapien
caaggaaatagaggcctaggctagc

SEQ ID NO: 813921 - DNA, 25 bp, Homo sapien
aaaagaccaaaatgtgcaagggcac

SEQ ID NO: 813922 - DNA, 25 bp, Homo sapien
cacatagtaggctaggattccaagc

SEQ ID NO: 813923 - DNA, 25 bp, Homo sapien
cacggtggtaaagggcacagactct

SEQ ID NO: 813924 - DNA, 25 bp, Homo sapien
gggaaggaaagtaatttaatatgca

SEQ ID NO: 813925 - DNA, 25 bp, Homo sapien
ttattgacaatgggaaggaaagtaa

SEQ ID NO: 813926 - DNA, 25 bp, Homo sapien
tgacaatgggaaggaaagtaattta

SEQ ID NO: 813927 - DNA, 25 bp, Homo sapien
atgggaaggaaagtaatttaatatg

SEQ ID NO: 813928 - DNA, 25 bp, Homo sapien
taatatttagagatccaggcaggct

SEQ ID NO: 813929 - DNA, 25 bp, Homo sapien
gactctgtcactgaaagggaatcct

SEQ ID NO: 813930 - DNA, 25 bp, Homo sapien
taaagaccagaacctccaggcagat

SEQ ID NO: 813931 - DNA, 25 bp, Homo sapien
ggcatcaggctaatatctcagagag

SEQ ID NO: 813932 - DNA, 25 bp, Homo sapien
tagaagagaacatttccaggttcca

SEQ ID NO: 813933 - DNA, 25 bp, Homo sapien
gaagtcataattaagcctaccacag

SEQ ID NO: 813934 - DNA, 25 bp, Homo sapien
ggcactcccagattacccagaataa

SEQ ID NO: 813935 - DNA, 25 bp, Homo sapien
gatgtagctgcatttagggcactcc

SEQ ID NO: 813936 - DNA, 25 bp, Homo sapien
tatcggtatctgtagggccatgctc

SEQ ID NO: 813937 - DNA, 25 bp, Homo sapien
tttgctgcggctccatcactccaat

SEQ ID NO: 813938 - DNA, 25 bp, Homo sapien
aatatcagttttatcggtatctgta

SEQ ID NO: 813939 - DNA, 25 bp, Homo sapien
tcctcttctgtgtggtaatatctcc

SEQ ID NO: 813940 - DNA, 25 bp, Homo sapien
aatagggtaagaaggcagacaggcc

SEQ ID NO: 813941 - DNA, 25 bp, Homo sapien
cagcatatgtttcaagcagcaggac

SEQ ID NO: 813942 - DNA, 25 bp, Homo sapien
tgcttatggcgtcagggacacagct

SEQ ID NO: 813943 - DNA, 25 bp, Homo sapien
tacacatgcaaacgtactgacaggg

SEQ ID NO: 813944 - DNA, 25 bp, Homo sapien
ttctcaccggtggtagtggtaaaca

SEQ ID NO: 813945 - DNA, 25 bp, Homo sapien
ctcaccggtggtagtggtaaacagg

SEQ ID NO: 813946 - DNA, 25 bp, Homo sapien
tctcaccggtggtagtggtaaacag

SEQ ID NO: 813947 - DNA, 25 bp, Homo sapien
cttgtcataggacgatgggtctcat

SEQ ID NO: 813948 - DNA, 25 bp, Homo sapien
catactggatggttatggcagtctc

SEQ ID NO: 813949 - DNA, 25 bp, Homo sapien
ggcagtctcattactaacactgtta

SEQ ID NO: 813950 - DNA, 25 bp, Homo sapien
gggtctcatccaccttttttgctct

SEQ ID NO: 813951 - DNA, 25 bp, Homo sapien
gagcaaatggggctctgtgctttct

SEQ ID NO: 813952 - DNA, 25 bp, Homo sapien
ctgagcaaatggggctctgtgcttt

SEQ ID NO: 813953 - DNA, 25 bp, Homo sapien
tgagcaaatggggctctgtgctttc

SEQ ID NO: 813954 - DNA, 25 bp, Homo sapien
taccagagttcctagcagtagttgc

SEQ ID NO: 813955 - DNA, 25 bp, Homo sapien
attggtatgcactcaggcttcctta

SEQ ID NO: 813956 - DNA, 25 bp, Homo sapien
tagctttgattattggtatgcactc

SEQ ID NO: 813957 - DNA, 25 bp, Homo sapien
cagccagagctaccagagttcctag

SEQ ID NO: 813958 - DNA, 25 bp, Homo sapien
gcttggcggtggtggccaatgtagc

SEQ ID NO: 813959 - DNA, 25 bp, Homo sapien
ggccaatgtagcagcagctaaggat

SEQ ID NO: 813960 - DNA, 25 bp, Homo sapien
gccaatgtagcagcagctaaggatg

SEQ ID NO: 813961 - DNA, 25 bp, Homo sapien
cttggcggtggtggccaatgtagca

SEQ ID NO: 813962 - DNA, 25 bp, Homo sapien
gagttggaggctggctcaccacttc

SEQ ID NO: 813963 - DNA, 25 bp, Homo sapien
gctcaccacttcctcataaggaggt

SEQ ID NO: 813964 - DNA, 25 bp, Homo sapien
ggagttggaggctggctcaccactt

SEQ ID NO: 813965 - DNA, 25 bp, Homo sapien
cctcataaggaggtagttaagtagt

SEQ ID NO: 813966 - DNA, 25 bp, Homo sapien
gctgctgcgtagctggaagtcactg

SEQ ID NO: 813967 - DNA, 25 bp, Homo sapien
tgctgcgtagctggaagtcactgta

SEQ ID NO: 813968 - DNA, 25 bp, Homo sapien
ctgctgctgcgtagctggaagtcac

SEQ ID NO: 813969 - DNA, 25 bp, Homo sapien
ctgcgtagctggaagtcactgtatg

SEQ ID NO: 813970 - DNA, 25 bp, Homo sapien
tggtgggattggcgctgggggactg

SEQ ID NO: 813971 - DNA, 25 bp, Homo sapien
gtgggattggcgctgggggactgcc

SEQ ID NO: 813972 - DNA, 25 bp, Homo sapien
ggtgggattggcgctgggggactgc

SEQ ID NO: 813973 - DNA, 25 bp, Homo sapien
ctggtgggattggcgctgggggact

SEQ ID NO: 813974 - DNA, 25 bp, Homo sapien
gggctcagacaagggattcccttgg

SEQ ID NO: 813975 - DNA, 25 bp, Homo sapien
gtggcaatgtctcctgagcatcttc

SEQ ID NO: 813976 - DNA, 25 bp, Homo sapien
aatgcccgcgtcaccagtgaagtgg

SEQ ID NO: 813977 - DNA, 25 bp, Homo sapien
tccccagggctttggtggctactcg

SEQ ID NO: 813978 - DNA, 25 bp, Homo sapien
ctttaaggctatgatcatggtggcc

SEQ ID NO: 813979 - DNA, 25 bp, Homo sapien
ccagtgcatcagcgatgagcatgtt

SEQ ID NO: 813980 - DNA, 25 bp, Homo sapien
atccagtgcatcagcgatgagcatg

SEQ ID NO: 813981 - DNA, 25 bp, Homo sapien
tccagtgcatcagcgatgagcatgt

SEQ ID NO: 813982 - DNA, 25 bp, Homo sapien
cagtgcatcagcgatgagcatgttg

SEQ ID NO: 813983 - DNA, 25 bp, Homo sapien
cttggagggctggaagaggccttcc

SEQ ID NO: 813984 - DNA, 25 bp, Homo sapien
gagggctggaagaggccttcctcct

SEQ ID NO: 813985 - DNA, 25 bp, Homo sapien
tcaagcctgctccttggagggctgg

SEQ ID NO: 813986 - DNA, 25 bp, Homo sapien
tccttggagggctggaagaggcctt

SEQ ID NO: 813987 - DNA, 25 bp, Homo sapien
cttgggtgctggcagagcctgatct

SEQ ID NO: 813988 - DNA, 25 bp, Homo sapien
gatgtttagcagcaggcatgcaggt

SEQ ID NO: 813989 - DNA, 25 bp, Homo sapien
ctggcagagcctgatctagctgcgg

SEQ ID NO: 813990 - DNA, 25 bp, Homo sapien
caagttcttgggtgctggcagagcc

SEQ ID NO: 813991 - DNA, 25 bp, Homo sapien
gccacctgctcacggagatttcaga

SEQ ID NO: 813992 - DNA, 25 bp, Homo sapien
gagacataaagacccgcggagcatg

SEQ ID NO: 813993 - DNA, 25 bp, Homo sapien
gcgacaaagcctaggcctctgcagg

SEQ ID NO: 813994 - DNA, 25 bp, Homo sapien
gaaagggcctcttagtgatgcacac

SEQ ID NO: 813995 - DNA, 25 bp, Homo sapien
aacatcagttacttagagagggccg

SEQ ID NO: 813996 - DNA, 25 bp, Homo sapien
acaatggacaggcacgcagggttca

SEQ ID NO: 813997 - DNA, 25 bp, Homo sapien
cagacatgtggtttgcctgaggaga

SEQ ID NO: 813998 - DNA, 25 bp, Homo sapien
gagagggccgtttgtgctccagaca

SEQ ID NO: 813999 - DNA, 25 bp, Homo sapien
ttagaaggaggtctggtctcttgtc

SEQ ID NO: 814000 - DNA, 25 bp, Homo sapien
tgattagaaggaggtctggtctctt

SEQ ID NO: 814001 - DNA, 25 bp, Homo sapien
tgcttctcttctaccatgattataa

SEQ ID NO: 814002 - DNA, 25 bp, Homo sapien
tagaaggaggtctggtctcttgtct

SEQ ID NO: 814003 - DNA, 25 bp, Homo sapien
cattcaagagtggtgtgacgccttc

SEQ ID NO: 814004 - DNA, 25 bp, Homo sapien
gaggaagatcttgcccaggtatggc

SEQ ID NO: 814005 - DNA, 25 bp, Homo sapien
caggtatggctgaaggacacaagta

SEQ ID NO: 814006 - DNA, 25 bp, Homo sapien
ccaggactgctttggatgcattcaa

SEQ ID NO: 814007 - DNA, 25 bp, Homo sapien
tgggccatagtaatgtgctcaataa

SEQ ID NO: 814008 - DNA, 25 bp, Homo sapien
tgctcaataaagttaaatcctttcc

SEQ ID NO: 814009 - DNA, 25 bp, Homo sapien
tttctgggccatagtaatgtgctca

SEQ ID NO: 814010 - DNA, 25 bp, Homo sapien
tctccttcgttttgtggtctcctcc

SEQ ID NO: 814011 - DNA, 25 bp, Homo sapien
tacttccctggattgagacaacgtg

SEQ ID NO: 814012 - DNA, 25 bp, Homo sapien
caacgtgttactgatctgagaaggc

SEQ ID NO: 814013 - DNA, 25 bp, Homo sapien
taaaaatgagcgtgcgtgcatgcgc

SEQ ID NO: 814014 - DNA, 25 bp, Homo sapien
tatttgctgaacatcgcagttggct

SEQ ID NO: 814015 - DNA, 25 bp, Homo sapien
tggacaatcagggaaggaataaact

SEQ ID NO: 814016 - DNA, 25 bp, Homo sapien
tttctcattctcctggacaatcagg

SEQ ID NO: 814017 - DNA, 25 bp, Homo sapien
aaactggactacatggaaatcaaga

SEQ ID NO: 814018 - DNA, 25 bp, Homo sapien
ttctcctggacaatcagggaaggaa

SEQ ID NO: 814019 - DNA, 25 bp, Homo sapien
tcccaaccgatcctatcaggaaaga

SEQ ID NO: 814020 - DNA, 25 bp, Homo sapien
tatttacggagcaacagacaccttg

SEQ ID NO: 814021 - DNA, 25 bp, Homo sapien
gctgcctttatagcgctctcagaag

SEQ ID NO: 814022 - DNA, 25 bp, Homo sapien
acaggctgcggtctttcccaaccga

SEQ ID NO: 814023 - DNA, 25 bp, Homo sapien
ctgatccgtgaccacttaagagtcc

SEQ ID NO: 814024 - DNA, 25 bp, Homo sapien
cctcgaggcctccccgggagtggag

SEQ ID NO: 814025 - DNA, 25 bp, Homo sapien
gagtcccatccgcaaccctcgaggc

SEQ ID NO: 814026 - DNA, 25 bp, Homo sapien
tcgaggcctccccgggagtggagcc

SEQ ID NO: 814027 - DNA, 25 bp, Homo sapien
gacccgggacgcagctccaggtgcg

SEQ ID NO: 814028 - DNA, 25 bp, Homo sapien
ctgacccgggacgcagctccaggtg

SEQ ID NO: 814029 - DNA, 25 bp, Homo sapien
cccgggacgcagctccaggtgcgca

SEQ ID NO: 814030 - DNA, 25 bp, Homo sapien
tgacccgggacgcagctccaggtgc

SEQ ID NO: 814031 - DNA, 25 bp, Homo sapien
gcgctgtccgcgttctgaaatctcc

SEQ ID NO: 814032 - DNA, 25 bp, Homo sapien
tgcaggggggcacctgagaaccttc

SEQ ID NO: 814033 - DNA, 25 bp, Homo sapien
agaaccttcgggtctcgtggcctgc

SEQ ID NO: 814034 - DNA, 25 bp, Homo sapien
ttgaagcgagtaagcccctgctctg

SEQ ID NO: 814035 - DNA, 25 bp, Homo sapien
tagctgcagccaggcccccctgcac

SEQ ID NO: 814036 - DNA, 25 bp, Homo sapien
ctgttagctgcagccaggcccccct

SEQ ID NO: 814037 - DNA, 25 bp, Homo sapien
gttagctgcagccaggcccccctgc

SEQ ID NO: 814038 - DNA, 25 bp, Homo sapien
ttagctgcagccaggcccccctgca

SEQ ID NO: 814039 - DNA, 25 bp, Homo sapien
cgaggaacagaaagaacgggatcac

SEQ ID NO: 814040 - DNA, 25 bp, Homo sapien
agagcgaggaacagaaagaacggga

SEQ ID NO: 814041 - DNA, 25 bp, Homo sapien
cagcgaggagggaggacacgcggta

SEQ ID NO: 814042 - DNA, 25 bp, Homo sapien
cacgcggtaagcgaggacgatcgga

SEQ ID NO: 814043 - DNA, 25 bp, Homo sapien
aaagcgagctcgctgtagaccggcc

SEQ ID NO: 814044 - DNA, 25 bp, Homo sapien
ccatgtagctgcagctgtactcggg

SEQ ID NO: 814045 - DNA, 25 bp, Homo sapien
gcgccgctcgtgctgttgctggaaa

SEQ ID NO: 814046 - DNA, 25 bp, Homo sapien
agaccggccgcgacaccatgtagct

SEQ ID NO: 814047 - DNA, 25 bp, Homo sapien
ctcccaccagaagggcggcgtggag

SEQ ID NO: 814048 - DNA, 25 bp, Homo sapien
ccggagaccgaaagtcgggcctctg

SEQ ID NO: 814049 - DNA, 25 bp, Homo sapien
ttctctctacgcaggcccgcgcggc

SEQ ID NO: 814050 - DNA, 25 bp, Homo sapien
ctccccaaggcgtggacgccccgct

SEQ ID NO: 814051 - DNA, 25 bp, Homo sapien
tgctacttggtagtttttaaattca

SEQ ID NO: 814052 - DNA, 25 bp, Homo sapien
tagcccagtactaactcccgaaatg

SEQ ID NO: 814053 - DNA, 25 bp, Homo sapien
caagagtctttagcacaccaaaggc

SEQ ID NO: 814054 - DNA, 25 bp, Homo sapien
ccgaaatgacgtcactaagcagcca

SEQ ID NO: 814055 - DNA, 25 bp, Homo sapien
gccattccttgactcggtatttggg

SEQ ID NO: 814056 - DNA, 25 bp, Homo sapien
caactgagatatgtcttgatgttcc

SEQ ID NO: 814057 - DNA, 25 bp, Homo sapien
aaagcagagtagagaccatatccga

SEQ ID NO: 814058 - DNA, 25 bp, Homo sapien
tagagaccatatccgacaggaactg

SEQ ID NO: 814059 - DNA, 25 bp, Homo sapien
caggaactgcagctagtagggcata

SEQ ID NO: 814060 - DNA, 25 bp, Homo sapien
ccattgctgctggatacgagaaagt

SEQ ID NO: 814061 - DNA, 25 bp, Homo sapien
caaccagcagagtcagggcactggc

SEQ ID NO: 814062 - DNA, 25 bp, Homo sapien
cattaaactcaccactggaaaaggt

SEQ ID NO: 814063 - DNA, 25 bp, Homo sapien
ctggcaatcaggactctagctgtat

SEQ ID NO: 814064 - DNA, 25 bp, Homo sapien
aaggcagcagctgttgtgaagccac

SEQ ID NO: 814065 - DNA, 25 bp, Homo sapien
gacaatctttagctgtgagaccagc

SEQ ID NO: 814066 - DNA, 25 bp, Homo sapien
ggatctgccaagtacctcactatga

SEQ ID NO: 814067 - DNA, 25 bp, Homo sapien
tatgaatccaatctgcaagccacca

SEQ ID NO: 814068 - DNA, 25 bp, Homo sapien
cacaattacttctataggaataggg

SEQ ID NO: 814069 - DNA, 25 bp, Homo sapien
gacgacaatggtgagcaatccagca

SEQ ID NO: 814070 - DNA, 25 bp, Homo sapien
gggattttgtgtctaaaccgatcat

SEQ ID NO: 814071 - DNA, 25 bp, Homo sapien
ttaactgccatacagacgacaatgg

SEQ ID NO: 814072 - DNA, 25 bp, Homo sapien
ggatggatttaacaatgccagcatt

SEQ ID NO: 814073 - DNA, 25 bp, Homo sapien
ttgggatggatttaacaatgccagc

SEQ ID NO: 814074 - DNA, 25 bp, Homo sapien
tatgaaatggcagtagcaattatcg

SEQ ID NO: 814075 - DNA, 25 bp, Homo sapien
tttttccaggttggctccatatgaa

SEQ ID NO: 814076 - DNA, 25 bp, Homo sapien
gagaacaagctcacaggtggaagtt

SEQ ID NO: 814077 - DNA, 25 bp, Homo sapien
ccgagaacaagctcacaggtggaag

SEQ ID NO: 814078 - DNA, 25 bp, Homo sapien
cgagaacaagctcacaggtggaagt

SEQ ID NO: 814079 - DNA, 25 bp, Homo sapien
gaacaagctcacaggtggaagttca

SEQ ID NO: 814080 - DNA, 25 bp, Homo sapien
ggtggcatatacttttcctactgac

SEQ ID NO: 814081 - DNA, 25 bp, Homo sapien
ctggttcccatcgatggtgtaatca

SEQ ID NO: 814082 - DNA, 25 bp, Homo sapien
gacactgcaatagcataagccacca

SEQ ID NO: 814083 - DNA, 25 bp, Homo sapien
gatggtgtaatcatacttggtggca

SEQ ID NO: 814084 - DNA, 25 bp, Homo sapien
tccagtgctctcctggacggccgtg

SEQ ID NO: 814085 - DNA, 25 bp, Homo sapien
cggccgtgcgggaaagagcagtggt

SEQ ID NO: 814086 - DNA, 25 bp, Homo sapien
gaagatgttgctgatcccaaaggca

SEQ ID NO: 814087 - DNA, 25 bp, Homo sapien
cctgagaagatgttgctgatcccaa

SEQ ID NO: 814088 - DNA, 25 bp, Homo sapien
gagcttgtcagtgctccgtctcaaa

SEQ ID NO: 814089 - DNA, 25 bp, Homo sapien
catcagcagtttgagatttgcctgc

SEQ ID NO: 814090 - DNA, 25 bp, Homo sapien
taacatcaggagaatggacatcagc

SEQ ID NO: 814091 - DNA, 25 bp, Homo sapien
tgcacccgctgaagaccatgtgctc

SEQ ID NO: 814092 - DNA, 25 bp, Homo sapien
gggacagccagcccatgcctcattt

SEQ ID NO: 814093 - DNA, 25 bp, Homo sapien
cagccagcccatgcctcatttgagc

SEQ ID NO: 814094 - DNA, 25 bp, Homo sapien
acagccagcccatgcctcatttgag

SEQ ID NO: 814095 - DNA, 25 bp, Homo sapien
gacagccagcccatgcctcatttga

SEQ ID NO: 814096 - DNA, 25 bp, Homo sapien
atctcactgtggatggggagctctg

SEQ ID NO: 814097 - DNA, 25 bp, Homo sapien
ggggacaaggaccacagtcagctgc

SEQ ID NO: 814098 - DNA, 25 bp, Homo sapien
ctctgtgaactggagaaagatatgg

SEQ ID NO: 814099 - DNA, 25 bp, Homo sapien
gccacttgcatctcactgtggatgg

SEQ ID NO: 814100 - DNA, 25 bp, Homo sapien
cacaatcgcagcagagatgatgcca

SEQ ID NO: 814101 - DNA, 25 bp, Homo sapien
atcgcagcagagatgatgccagcaa

SEQ ID NO: 814102 - DNA, 25 bp, Homo sapien
gcttccccagggcaagaatggcgat

SEQ ID NO: 814103 - DNA, 25 bp, Homo sapien
gaatggcgatcatcacaatcgcagc

SEQ ID NO: 814104 - DNA, 25 bp, Homo sapien
cagctgcataaacatccctttcagg

SEQ ID NO: 814105 - DNA, 25 bp, Homo sapien
tctgtctccacagacgaggaatgtc

SEQ ID NO: 814106 - DNA, 25 bp, Homo sapien
cagacgaggaatgtcacacagctgc

SEQ ID NO: 814107 - DNA, 25 bp, Homo sapien
gtcacacagctgcataaacatccct

SEQ ID NO: 814108 - DNA, 25 bp, Homo sapien
gacactatacacgtaaacacccaga

SEQ ID NO: 814109 - DNA, 25 bp, Homo sapien
tcaacagtccaaatataaggccagc

SEQ ID NO: 814110 - DNA, 25 bp, Homo sapien
taaggccagctagtaaaccgagatc

SEQ ID NO: 814111 - DNA, 25 bp, Homo sapien
aaccgagatccagccccagaatgat

SEQ ID NO: 814112 - DNA, 25 bp, Homo sapien
ttttgtagatatctgtgctagggat

SEQ ID NO: 814113 - DNA, 25 bp, Homo sapien
tttgtagatatctgtgctagggatg

SEQ ID NO: 814114 - DNA, 25 bp, Homo sapien
gaatcttcactccttgaggttcttc

SEQ ID NO: 814115 - DNA, 25 bp, Homo sapien
gactggaaaatctaagaatcttcac

SEQ ID NO: 814116 - DNA, 25 bp, Homo sapien
aaaccatcgacattgccatagaaaa

SEQ ID NO: 814117 - DNA, 25 bp, Homo sapien
ttttttaaaaccatcgacattgcca

SEQ ID NO: 814118 - DNA, 25 bp, Homo sapien
agcgctttcagcctcttattatata

SEQ ID NO: 814119 - DNA, 25 bp, Homo sapien
gcctcttattatatactctaatggc

SEQ ID NO: 814120 - DNA, 25 bp, Homo sapien
atactctaatggcatcaaatccaac

SEQ ID NO: 814121 - DNA, 25 bp, Homo sapien
gttgctcttaattgtccacttttta

SEQ ID NO: 814122 - DNA, 25 bp, Homo sapien
gtgatctcactccaacaacgtccag

SEQ ID NO: 814123 - DNA, 25 bp, Homo sapien
tggttgggatatcaagttcctccag

SEQ ID NO: 814124 - DNA, 25 bp, Homo sapien
ggaaagatatagctccacagtcaag

SEQ ID NO: 814125 - DNA, 25 bp, Homo sapien
ggaacgttcactttgactggaagct

SEQ ID NO: 814126 - DNA, 25 bp, Homo sapien
atcaattctttggaattctttgaca

SEQ ID NO: 814127 - DNA, 25 bp, Homo sapien
atacacattcacatcaattctttgg

SEQ ID NO: 814128 - DNA, 25 bp, Homo sapien
tgaagtgatgcaaaatacacattca

SEQ ID NO: 814129 - DNA, 25 bp, Homo sapien
cttgaagtgatgcaaaatacacatt

SEQ ID NO: 814130 - DNA, 25 bp, Homo sapien
cttcaaaagaaagacacaatgtttt

SEQ ID NO: 814131 - DNA, 25 bp, Homo sapien
gaaagacacaatgttttgttagttc

SEQ ID NO: 814132 - DNA, 25 bp, Homo sapien
aaagaaagacacaatgttttgttag

SEQ ID NO: 814133 - DNA, 25 bp, Homo sapien
tcaaaagaaagacacaatgttttgt

SEQ ID NO: 814134 - DNA, 25 bp, Homo sapien
gatagagtatagcatcatggaccgt

SEQ ID NO: 814135 - DNA, 25 bp, Homo sapien
aatggaaccttgaccctcttgagat

SEQ ID NO: 814136 - DNA, 25 bp, Homo sapien
catggaccgtcaaaaagaatgtgtc

SEQ ID NO: 814137 - DNA, 25 bp, Homo sapien
taatgttgtcgtcaaagaacccgca

SEQ ID NO: 814138 - DNA, 25 bp, Homo sapien
aaatgatttgaagctttcctggtgc

SEQ ID NO: 814139 - DNA, 25 bp, Homo sapien
aaaggtgaactggtatagttctcca

SEQ ID NO: 814140 - DNA, 25 bp, Homo sapien
ttttgcacattgaaaggtgaactgg

SEQ ID NO: 814141 - DNA, 25 bp, Homo sapien
tcagaatcctcttcagctgtattgt

SEQ ID NO: 814142 - DNA, 25 bp, Homo sapien
ttaattcaagggtatctttacaatc

SEQ ID NO: 814143 - DNA, 25 bp, Homo sapien
caagggtatctttacaatcctgaat

SEQ ID NO: 814144 - DNA, 25 bp, Homo sapien
attcaagggtatctttacaatcctg

SEQ ID NO: 814145 - DNA, 25 bp, Homo sapien
gtatctttacaatcctgaatgagag

SEQ ID NO: 814146 - DNA, 25 bp, Homo sapien
tcagatgctacaagttcagacaagt

SEQ ID NO: 814147 - DNA, 25 bp, Homo sapien
tgagaagccgctagtggccaatgtc

SEQ ID NO: 814148 - DNA, 25 bp, Homo sapien
tgttcacctcttatccagtggcgaa

SEQ ID NO: 814149 - DNA, 25 bp, Homo sapien
cactaggtggttactacagaaaggc

SEQ ID NO: 814150 - DNA, 25 bp, Homo sapien
aataaagcctagaagcagtcttagt

SEQ ID NO: 814151 - DNA, 25 bp, Homo sapien
gcttctctttcaatggcttaataga

SEQ ID NO: 814152 - DNA, 25 bp, Homo sapien
gaatgagtgttttgagtctgaagaa

SEQ ID NO: 814153 - DNA, 25 bp, Homo sapien
tccttgctcatagagacctcccgaa

SEQ ID NO: 814154 - DNA, 25 bp, Homo sapien
caaatcgtctgaataattctagcca

SEQ ID NO: 814155 - DNA, 25 bp, Homo sapien
gctgccaaatcgtctgaataattct

SEQ ID NO: 814156 - DNA, 25 bp, Homo sapien
gacgctgccaaatcgtctgaataat

SEQ ID NO: 814157 - DNA, 25 bp, Homo sapien
cctggacgctgccaaatcgtctgaa

SEQ ID NO: 814158 - DNA, 25 bp, Homo sapien
tcagtgcagctcatggatatccagg

SEQ ID NO: 814159 - DNA, 25 bp, Homo sapien
aagagacagtattcccgcagtttgc

SEQ ID NO: 814160 - DNA, 25 bp, Homo sapien
gccagggcccacgtgaacattatta

SEQ ID NO: 814161 - DNA, 25 bp, Homo sapien
tcgtgactcgcttgaccacagaggc

SEQ ID NO: 814162 - DNA, 25 bp, Homo sapien
aggtgacctttacatgctccccagt

SEQ ID NO: 814163 - DNA, 25 bp, Homo sapien
aaaggtgacctttacatgctcccca

SEQ ID NO: 814164 - DNA, 25 bp, Homo sapien
taaaaggtgacctttacatgctccc

SEQ ID NO: 814165 - DNA, 25 bp, Homo sapien
gacctttacatgctccccagtatca

SEQ ID NO: 814166 - DNA, 25 bp, Homo sapien
taggaccttcagtgcagtctccacc

SEQ ID NO: 814167 - DNA, 25 bp, Homo sapien
tcctaggaccttcagtgcagtctcc

SEQ ID NO: 814168 - DNA, 25 bp, Homo sapien
ggaaagtgccaaggggcgattccta

SEQ ID NO: 814169 - DNA, 25 bp, Homo sapien
agtctccaccttgcggacttggctc

SEQ ID NO: 814170 - DNA, 25 bp, Homo sapien
ctagttccagttcttggtcccagga

SEQ ID NO: 814171 - DNA, 25 bp, Homo sapien
agttccagttcttggtcccaggagt

SEQ ID NO: 814172 - DNA, 25 bp, Homo sapien
tcttggtcccaggagtttgtggttg

SEQ ID NO: 814173 - DNA, 25 bp, Homo sapien
ccagttcttggtcccaggagtttgt

SEQ ID NO: 814174 - DNA, 25 bp, Homo sapien
agagagttaccacaacaagcagtac

SEQ ID NO: 814175 - DNA, 25 bp, Homo sapien
gaagagagcgcgaaggcttggccgg

SEQ ID NO: 814176 - DNA, 25 bp, Homo sapien
ctaacgggagcggatagaaaccgag

SEQ ID NO: 814177 - DNA, 25 bp, Homo sapien
gcgcgaaggcttggccggaaggaga

SEQ ID NO: 814178 - DNA, 25 bp, Homo sapien
ggaggggaagagagcgcgaaggctt

SEQ ID NO: 814179 - DNA, 25 bp, Homo sapien
tcttaacggggacaccttgcaggaa

SEQ ID NO: 814180 - DNA, 25 bp, Homo sapien
ccagggccggatggagggtggagag

SEQ ID NO: 814181 - DNA, 25 bp, Homo sapien
tggagagccagtgcggcgcagctgc

SEQ ID NO: 814182 - DNA, 25 bp, Homo sapien
acaccttgcaggaatgtgcggagtg

SEQ ID NO: 814183 - DNA, 25 bp, Homo sapien
gagagcgcttgtgacgctacgaacc

SEQ ID NO: 814184 - DNA, 25 bp, Homo sapien
gcgcttgtgacgctacgaacctctc

SEQ ID NO: 814185 - DNA, 25 bp, Homo sapien
tttctagggagagcgcttgtgacgc

SEQ ID NO: 814186 - DNA, 25 bp, Homo sapien
tgtgacgctacgaacctctcgaaca

SEQ ID NO: 814187 - DNA, 25 bp, Homo sapien
cagaaagagcgagcgcgcgaagaac

SEQ ID NO: 814188 - DNA, 25 bp, Homo sapien
ttgtcccaattttggcctgcaaaga

SEQ ID NO: 814189 - DNA, 25 bp, Homo sapien
aggcggaagtccaagcaggttgtcc

SEQ ID NO: 814190 - DNA, 25 bp, Homo sapien
ctcaggcatagttcgggcggaggca

SEQ ID NO: 814191 - DNA, 25 bp, Homo sapien
gagtcgcagcgagcgcgtgcgcact

SEQ ID NO: 814192 - DNA, 25 bp, Homo sapien
acagtgggagcggaagtcaaccgcg

SEQ ID NO: 814193 - DNA, 25 bp, Homo sapien
agcggaagtcaaccgcgccggagtc

SEQ ID NO: 814194 - DNA, 25 bp, Homo sapien
cggagtcgcagcgagcgcgtgcgca

SEQ ID NO: 814195 - DNA, 25 bp, Homo sapien
cagacggtaggccaggaaaccgcag

SEQ ID NO: 814196 - DNA, 25 bp, Homo sapien
atcgcccactggtccgggctcggag

SEQ ID NO: 814197 - DNA, 25 bp, Homo sapien
aaccagagtaggagcggttgttgcc

SEQ ID NO: 814198 - DNA, 25 bp, Homo sapien
gcacggaggaggtaggtaccacacc

SEQ ID NO: 814199 - DNA, 25 bp, Homo sapien
gctaaataaaacagagccggggctc

SEQ ID NO: 814200 - DNA, 25 bp, Homo sapien
tctccataacgtaggccagagcagc

SEQ ID NO: 814201 - DNA, 25 bp, Homo sapien
cgtaaagaggattccgcgactcgga

SEQ ID NO: 814202 - DNA, 25 bp, Homo sapien
gcgactcggagaccgcaatctaccc

SEQ ID NO: 814203 - DNA, 25 bp, Homo sapien
gtctgcgaacatcaagaccacccaa

SEQ ID NO: 814204 - DNA, 25 bp, Homo sapien
gaccacccaaggatccagaactatt

SEQ ID NO: 814205 - DNA, 25 bp, Homo sapien
gctttataggaattcgtctgcgaac

SEQ ID NO: 814206 - DNA, 25 bp, Homo sapien
tagttctttgagttcgcggtgcagg

SEQ ID NO: 814207 - DNA, 25 bp, Homo sapien
ttcttcttcattataatcaaatcct

SEQ ID NO: 814208 - DNA, 25 bp, Homo sapien
cgttcttcttcattataatcaaatc

SEQ ID NO: 814209 - DNA, 25 bp, Homo sapien
tcttcttcattataatcaaatcctt

SEQ ID NO: 814210 - DNA, 25 bp, Homo sapien
gttcttcttcattataatcaaatcc

SEQ ID NO: 814211 - DNA, 25 bp, Homo sapien
atcttcgctgatttgcaaacagctc

SEQ ID NO: 814212 - DNA, 25 bp, Homo sapien
tgatataattaaaattaccttctta

SEQ ID NO: 814213 - DNA, 25 bp, Homo sapien
tgaaatgatataattaaaattacct

SEQ ID NO: 814214 - DNA, 25 bp, Homo sapien
aatgatataattaaaattaccttct

SEQ ID NO: 814215 - DNA, 25 bp, Homo sapien
ctgttgaaatgatataattaaaatt

SEQ ID NO: 814216 - DNA, 25 bp, Homo sapien
tgaactggtgtatcatccttttcac

SEQ ID NO: 814217 - DNA, 25 bp, Homo sapien
ttttaataggcaatccacacttgtc

SEQ ID NO: 814218 - DNA, 25 bp, Homo sapien
aatgaactggtgtatcatccttttc

SEQ ID NO: 814219 - DNA, 25 bp, Homo sapien
attttaataggcaatccacacttgt

SEQ ID NO: 814220 - DNA, 25 bp, Homo sapien
agcctccagaatagcgaggaacaca

SEQ ID NO: 814221 - DNA, 25 bp, Homo sapien
gcctccagaatagcgaggaacacag

SEQ ID NO: 814222 - DNA, 25 bp, Homo sapien
tccagaatagcgaggaacacaggtg

SEQ ID NO: 814223 - DNA, 25 bp, Homo sapien
ctccagaatagcgaggaacacaggt

SEQ ID NO: 814224 - DNA, 25 bp, Homo sapien
cctggacacatcttatctccctttt

SEQ ID NO: 814225 - DNA, 25 bp, Homo sapien
tgtaaaatagcacagtcatagcaaa

SEQ ID NO: 814226 - DNA, 25 bp, Homo sapien
tatataccaagtgaggagtacctgc

SEQ ID NO: 814227 - DNA, 25 bp, Homo sapien
cataatatgatgagggtgcgatacc

SEQ ID NO: 814228 - DNA, 25 bp, Homo sapien
tgtctggtggcattataaaacgctc

SEQ ID NO: 814229 - DNA, 25 bp, Homo sapien
catcatgatgtgctgctttggcgga

SEQ ID NO: 814230 - DNA, 25 bp, Homo sapien
tggtggtggccctcttggtgcaggc

SEQ ID NO: 814231 - DNA, 25 bp, Homo sapien
gtggtggccctcttggtgcaggcca

SEQ ID NO: 814232 - DNA, 25 bp, Homo sapien
gtggtggtggccctcttggtgcagg

SEQ ID NO: 814233 - DNA, 25 bp, Homo sapien
gaggtggtggtggccctcttggtgc

SEQ ID NO: 814234 - DNA, 25 bp, Homo sapien
tcattggtaatacggtctatatctt

SEQ ID NO: 814235 - DNA, 25 bp, Homo sapien
gtctgatctggatgatgtggtccag

SEQ ID NO: 814236 - DNA, 25 bp, Homo sapien
tggtaatacggtctatatcttgtct

SEQ ID NO: 814237 - DNA, 25 bp, Homo sapien
tgtctgatctggatgatgtggtcca

SEQ ID NO: 814238 - DNA, 25 bp, Homo sapien
gataagaggtactcttccttcccaa

SEQ ID NO: 814239 - DNA, 25 bp, Homo sapien
tgttttatactacctcgataagagg

SEQ ID NO: 814240 - DNA, 25 bp, Homo sapien
attttttacaaatggtcacctctgg

SEQ ID NO: 814241 - DNA, 25 bp, Homo sapien
cctctgggtcaatttactaaactag

SEQ ID NO: 814242 - DNA, 25 bp, Homo sapien
ttcagactgctttaccgacaaaagg

SEQ ID NO: 814243 - DNA, 25 bp, Homo sapien
tgtaaaagctgactcgaaaggcacc

SEQ ID NO: 814244 - DNA, 25 bp, Homo sapien
gattccgaccattcagtaaaaaagc

SEQ ID NO: 814245 - DNA, 25 bp, Homo sapien
ttggtgctcctgaggctgcctaaaa

SEQ ID NO: 814246 - DNA, 25 bp, Homo sapien
gaatcaagtttgcaccagtccaagt

SEQ ID NO: 814247 - DNA, 25 bp, Homo sapien
gattttctcgtccaatacataggct

SEQ ID NO: 814248 - DNA, 25 bp, Homo sapien
ccagtcaaggttgaaacggccattt

SEQ ID NO: 814249 - DNA, 25 bp, Homo sapien
taatatgatagaagcactcaccacc

SEQ ID NO: 814250 - DNA, 25 bp, Homo sapien
gcatcactgccaagtattttacctg

SEQ ID NO: 814251 - DNA, 25 bp, Homo sapien
tcgttaagcctagtgtatctgatac

SEQ ID NO: 814252 - DNA, 25 bp, Homo sapien
gcaaactgattggtttctaggccat

SEQ ID NO: 814253 - DNA, 25 bp, Homo sapien
caaagccttcggcagttcggtatac

SEQ ID NO: 814254 - DNA, 25 bp, Homo sapien
tctaaattagatagtcacaggtggt

SEQ ID NO: 814255 - DNA, 25 bp, Homo sapien
aaagagtccccaataatgtcagtac

SEQ ID NO: 814256 - DNA, 25 bp, Homo sapien
gaagactcaaagagcaagtaactag

SEQ ID NO: 814257 - DNA, 25 bp, Homo sapien
tggacagtctaactctatacaaccc

SEQ ID NO: 814258 - DNA, 25 bp, Homo sapien
gacagatttccatcctagtcactac

SEQ ID NO: 814259 - DNA, 25 bp, Homo sapien
taggtttagcagtatagtggcgcca

SEQ ID NO: 814260 - DNA, 25 bp, Homo sapien
tagtcactaccttcatgcataggtt

SEQ ID NO: 814261 - DNA, 25 bp, Homo sapien
aacaagatggttctagcatggcata

SEQ ID NO: 814262 - DNA, 25 bp, Homo sapien
tatgttccattttggcagaatccca

SEQ ID NO: 814263 - DNA, 25 bp, Homo sapien
aaggtgaaattactagcctcaaggg

SEQ ID NO: 814264 - DNA, 25 bp, Homo sapien
taaagaaccacagcatatcactggt

SEQ ID NO: 814265 - DNA, 25 bp, Homo sapien
tcattaagcagggagatcaattcac

SEQ ID NO: 814266 - DNA, 25 bp, Homo sapien
ggctgagacccctgacattgaatat

SEQ ID NO: 814267 - DNA, 25 bp, Homo sapien
tcagttattcactagatgtggcttc

SEQ ID NO: 814268 - DNA, 25 bp, Homo sapien
ggctctgggaagttgagaaagtcat

SEQ ID NO: 814269 - DNA, 25 bp, Homo sapien
cagagaagaagacgtagtggagaga

SEQ ID NO: 814270 - DNA, 25 bp, Homo sapien
gatggatcaccacactcaactcaaa

SEQ ID NO: 814271 - DNA, 25 bp, Homo sapien
aacatagacaccacgcagctgatgg

SEQ ID NO: 814272 - DNA, 25 bp, Homo sapien
ggtcttcgacactagcaaacagcca

SEQ ID NO: 814273 - DNA, 25 bp, Homo sapien
gaagggctgtcactcacataagggc

SEQ ID NO: 814274 - DNA, 25 bp, Homo sapien
caatgatggccgtgttcaaggacaa

SEQ ID NO: 814275 - DNA, 25 bp, Homo sapien
ggacaatgtgatggctacaacggca

SEQ ID NO: 814276 - DNA, 25 bp, Homo sapien
tacaacggcagcattggtgccacag

SEQ ID NO: 814277 - DNA, 25 bp, Homo sapien
tgaagactaacacagcacagatggt

SEQ ID NO: 814278 - DNA, 25 bp, Homo sapien
tagaaactagagaaggacgaagagg

SEQ ID NO: 814279 - DNA, 25 bp, Homo sapien
gatagaaactagagaaggacgaaga

SEQ ID NO: 814280 - DNA, 25 bp, Homo sapien
aaactagagaaggacgaagaggatg

SEQ ID NO: 814281 - DNA, 25 bp, Homo sapien
tgagatagaaactagagaaggacga

SEQ ID NO: 814282 - DNA, 25 bp, Homo sapien
tcaatattgaatacctggcagagcc

SEQ ID NO: 814283 - DNA, 25 bp, Homo sapien
taatctgtcctatgagcacatccag

SEQ ID NO: 814284 - DNA, 25 bp, Homo sapien
taagggcgcctatggagaattttgg

SEQ ID NO: 814285 - DNA, 25 bp, Homo sapien
gccctgaaggttcaaggccaatgga

SEQ ID NO: 814286 - DNA, 25 bp, Homo sapien
taatgttattctgcaaggatttatt

SEQ ID NO: 814287 - DNA, 25 bp, Homo sapien
aatgttattctgcaaggatttattt

SEQ ID NO: 814288 - DNA, 25 bp, Homo sapien
tttaatgttattctgcaaggattta

SEQ ID NO: 814289 - DNA, 25 bp, Homo sapien
tgttattctgcaaggatttatttac

SEQ ID NO: 814290 - DNA, 25 bp, Homo sapien
cccaagatgtgcgaaataatattca

SEQ ID NO: 814291 - DNA, 25 bp, Homo sapien
gatggaaccaaatcgtgtccatcat

SEQ ID NO: 814292 - DNA, 25 bp, Homo sapien
gctgcactgaaacccaagatgtgcg

SEQ ID NO: 814293 - DNA, 25 bp, Homo sapien
tccatggggtttggatggaaccaaa

SEQ ID NO: 814294 - DNA, 25 bp, Homo sapien
tatgccgtcaggaaacgggtaaaga

SEQ ID NO: 814295 - DNA, 25 bp, Homo sapien
ccatctccagacagcatagaattca

SEQ ID NO: 814296 - DNA, 25 bp, Homo sapien
actggagtctatgccgtcaggaaac

SEQ ID NO: 814297 - DNA, 25 bp, Homo sapien
tgtaacatattgtgtgaataacagt

SEQ ID NO: 814298 - DNA, 25 bp, Homo sapien
gatgtcttcgatgctgacatgctca

SEQ ID NO: 814299 - DNA, 25 bp, Homo sapien
caggagccatctgaactggtctcca

SEQ ID NO: 814300 - DNA, 25 bp, Homo sapien
ttctggatgtgataggcccaggaag

SEQ ID NO: 814301 - DNA, 25 bp, Homo sapien
gacatgctcacatcccctagagcag

SEQ ID NO: 814302 - DNA, 25 bp, Homo sapien
tttgtgaggcctaggaagaccccag

SEQ ID NO: 814303 - DNA, 25 bp, Homo sapien
ttgtgaggcctaggaagaccccaga

SEQ ID NO: 814304 - DNA, 25 bp, Homo sapien
gaaatgaagaacagccgatgacctg

SEQ ID NO: 814305 - DNA, 25 bp, Homo sapien
aagaacagccgatgacctgggtgca

SEQ ID NO: 814306 - DNA, 25 bp, Homo sapien
atgaagaacagccgatgacctgggt

SEQ ID NO: 814307 - DNA, 25 bp, Homo sapien
agaaatgaagaacagccgatgacct

SEQ ID NO: 814308 - DNA, 25 bp, Homo sapien
ccttatcaaagtactttcatggccc

SEQ ID NO: 814309 - DNA, 25 bp, Homo sapien
ttatcaaagtactttcatggccctc

SEQ ID NO: 814310 - DNA, 25 bp, Homo sapien
tcccttatcaaagtactttcatggc

SEQ ID NO: 814311 - DNA, 25 bp, Homo sapien
tatcaaagtactttcatggccctca

SEQ ID NO: 814312 - DNA, 25 bp, Homo sapien
tgggaagacacttgcattggtcttg

SEQ ID NO: 814313 - DNA, 25 bp, Homo sapien
ctgggaagacacttgcattggtctt

SEQ ID NO: 814314 - DNA, 25 bp, Homo sapien
gggaagacacttgcattggtcttgt

SEQ ID NO: 814315 - DNA, 25 bp, Homo sapien
aatgagttgacaaatgagttatagc

SEQ ID NO: 814316 - DNA, 25 bp, Homo sapien
ctaaatgagttgacaaatgagttat

SEQ ID NO: 814317 - DNA, 25 bp, Homo sapien
tgagttgacaaatgagttatagccc

SEQ ID NO: 814318 - DNA, 25 bp, Homo sapien
agttgacaaatgagttatagcccat

SEQ ID NO: 814319 - DNA, 25 bp, Homo sapien
ggctcattaggtactaacagttgct

SEQ ID NO: 814320 - DNA, 25 bp, Homo sapien
tgctgagctttaacatctgacccaa

SEQ ID NO: 814321 - DNA, 25 bp, Homo sapien
gacccaatctcaataatctgtattt

SEQ ID NO: 814322 - DNA, 25 bp, Homo sapien
ttccttgtttacatcacttgcttgg

SEQ ID NO: 814323 - DNA, 25 bp, Homo sapien
tctgaaacccatagatgccttctcg

SEQ ID NO: 814324 - DNA, 25 bp, Homo sapien
taatatgattgagttgctggtcgaa

SEQ ID NO: 814325 - DNA, 25 bp, Homo sapien
tacgggacttgaaccaacacaatta

SEQ ID NO: 814326 - DNA, 25 bp, Homo sapien
gctggtcgaagcttacaagtctgac

SEQ ID NO: 814327 - DNA, 25 bp, Homo sapien
ctgcgcatgcacaggcgcagcctac

SEQ ID NO: 814328 - DNA, 25 bp, Homo sapien
gcgcatgcacaggcgcagcctacgt

SEQ ID NO: 814329 - DNA, 25 bp, Homo sapien
tgcgcatgcacaggcgcagcctacg

SEQ ID NO: 814330 - DNA, 25 bp, Homo sapien
actttcacctccgctgggcgcctcc

SEQ ID NO: 814331 - DNA, 25 bp, Homo sapien
ctgtattttcctttccgccaatact

SEQ ID NO: 814332 - DNA, 25 bp, Homo sapien
cgccgctccgccaaggtctcccctc

SEQ ID NO: 814333 - DNA, 25 bp, Homo sapien
tcctttccgccaatactttcacctc

SEQ ID NO: 814334 - DNA, 25 bp, Homo sapien
cttggccaaggagcagtacacacga

SEQ ID NO: 814335 - DNA, 25 bp, Homo sapien
tggccaaggagcagtacacacgact

SEQ ID NO: 814336 - DNA, 25 bp, Homo sapien
ttggccaaggagcagtacacacgac

SEQ ID NO: 814337 - DNA, 25 bp, Homo sapien
ggccaaggagcagtacacacgactc

SEQ ID NO: 814338 - DNA, 25 bp, Homo sapien
tgagcgggaccttccgtgcctctgg

SEQ ID NO: 814339 - DNA, 25 bp, Homo sapien
cggacccactgagcgggaccttccg

SEQ ID NO: 814340 - DNA, 25 bp, Homo sapien
gtgcctctggctcaacacgacctca

SEQ ID NO: 814341 - DNA, 25 bp, Homo sapien
acgacctcacctactcggccctcac

SEQ ID NO: 814342 - DNA, 25 bp, Homo sapien
gtcacacaacccgaaaggactcgcc

SEQ ID NO: 814343 - DNA, 25 bp, Homo sapien
caaggtagaggcctatgtgtgaccg

SEQ ID NO: 814344 - DNA, 25 bp, Homo sapien
ctgcaggatgagcggccacctcgga

SEQ ID NO: 814345 - DNA, 25 bp, Homo sapien
tggcatgtgtgaccgccggccgtca

SEQ ID NO: 814346 - DNA, 25 bp, Homo sapien
gagatattcgattgaaatggcctct

SEQ ID NO: 814347 - DNA, 25 bp, Homo sapien
cggctgatctgcgtaagttctcaga

SEQ ID NO: 814348 - DNA, 25 bp, Homo sapien
gatctgcgtaagttctcagaggcac

SEQ ID NO: 814349 - DNA, 25 bp, Homo sapien
gcagaaagtccctgtaggccatgag

SEQ ID NO: 814350 - DNA, 25 bp, Homo sapien
caggtgaatagcaatctgtgtttca

SEQ ID NO: 814351 - DNA, 25 bp, Homo sapien
tggcaaatgacaggtgaatagcaat

SEQ ID NO: 814352 - DNA, 25 bp, Homo sapien
tgaaatgtgtgctcctaccaggttt

SEQ ID NO: 814353 - DNA, 25 bp, Homo sapien
ctgtgtttcagtgaagtgattcaaa

SEQ ID NO: 814354 - DNA, 25 bp, Homo sapien
gcacatatgtggtactgtaagcaca

SEQ ID NO: 814355 - DNA, 25 bp, Homo sapien
tacctctcacctgtaccaaaggatg

SEQ ID NO: 814356 - DNA, 25 bp, Homo sapien
tacaggagggtataagccaggaaca

SEQ ID NO: 814357 - DNA, 25 bp, Homo sapien
ggaagtatacacacgtctgcactga

SEQ ID NO: 814358 - DNA, 25 bp, Homo sapien
gagcaaacaaataacccgatactta

SEQ ID NO: 814359 - DNA, 25 bp, Homo sapien
agagcaaacaaataacccgatactt

SEQ ID NO: 814360 - DNA, 25 bp, Homo sapien
cttaaacctcttacagtacaaatca

SEQ ID NO: 814361 - DNA, 25 bp, Homo sapien
aaacctcttacagtacaaatcagca

SEQ ID NO: 814362 - DNA, 25 bp, Homo sapien
aattgatataaaatagtaaattgct

SEQ ID NO: 814363 - DNA, 25 bp, Homo sapien
ttgatataaaatagtaaattgctta

SEQ ID NO: 814364 - DNA, 25 bp, Homo sapien
tgcttaatatttaccaaaaagagct

SEQ ID NO: 814365 - DNA, 25 bp, Homo sapien
tagtaaattgcttaatatttaccaa

SEQ ID NO: 814366 - DNA, 25 bp, Homo sapien
tccaggaccagaacctataactgtt

SEQ ID NO: 814367 - DNA, 25 bp, Homo sapien
cttgaagcctaactgggcagcttta

SEQ ID NO: 814368 - DNA, 25 bp, Homo sapien
tatcctccaggaccagaacctataa

SEQ ID NO: 814369 - DNA, 25 bp, Homo sapien
cagaacctataactgttacatcagc

SEQ ID NO: 814370 - DNA, 25 bp, Homo sapien
gcatgttccaccaagtgtttcattt

SEQ ID NO: 814371 - DNA, 25 bp, Homo sapien
ttagaaggaatacaaccaacattca

SEQ ID NO: 814372 - DNA, 25 bp, Homo sapien
caacattcaagcatgttccaccaag

SEQ ID NO: 814373 - DNA, 25 bp, Homo sapien
cattcaagcatgttccaccaagtgt

SEQ ID NO: 814374 - DNA, 25 bp, Homo sapien
gccatatggtaataatgagagttgt

SEQ ID NO: 814375 - DNA, 25 bp, Homo sapien
catatggtaataatgagagttgttc

SEQ ID NO: 814376 - DNA, 25 bp, Homo sapien
atatggtaataatgagagttgttca

SEQ ID NO: 814377 - DNA, 25 bp, Homo sapien
gggccatatggtaataatgagagtt

SEQ ID NO: 814378 - DNA, 25 bp, Homo sapien
tccccatagtactcaggaatccagc

SEQ ID NO: 814379 - DNA, 25 bp, Homo sapien
ggaatccagccttctcagtgatttc

SEQ ID NO: 814380 - DNA, 25 bp, Homo sapien
caaggttatgactaggtcctgccca

SEQ ID NO: 814381 - DNA, 25 bp, Homo sapien
gaagagactacctttctggaagtat

SEQ ID NO: 814382 - DNA, 25 bp, Homo sapien
tcctctgaacactttacgatggtta

SEQ ID NO: 814383 - DNA, 25 bp, Homo sapien
caacatcattgtatcacagaaacag

SEQ ID NO: 814384 - DNA, 25 bp, Homo sapien
aataaaacattatatcccactgtga

SEQ ID NO: 814385 - DNA, 25 bp, Homo sapien
tagttgacaaaaggccaacatcatt

SEQ ID NO: 814386 - DNA, 25 bp, Homo sapien
tgtaatttgttcaattaatctttag

SEQ ID NO: 814387 - DNA, 25 bp, Homo sapien
ttagctaaattcttgaagcaatatg

SEQ ID NO: 814388 - DNA, 25 bp, Homo sapien
ctttagttcttagctaaattcttga

SEQ ID NO: 814389 - DNA, 25 bp, Homo sapien
gttcttagctaaattcttgaagcaa

SEQ ID NO: 814390 - DNA, 25 bp, Homo sapien
ttgtctaaattcaagcgaacttcgg

SEQ ID NO: 814391 - DNA, 25 bp, Homo sapien
tctgtttgaataagtgggcaattcc

SEQ ID NO: 814392 - DNA, 25 bp, Homo sapien
taagtgggcaattccacctgttaaa

SEQ ID NO: 814393 - DNA, 25 bp, Homo sapien
gtctaaattcaagcgaacttcggac

SEQ ID NO: 814394 - DNA, 25 bp, Homo sapien
ctttgtatcaataacctgagtgccg

SEQ ID NO: 814395 - DNA, 25 bp, Homo sapien
aacccgtggctataagaatgttctt

SEQ ID NO: 814396 - DNA, 25 bp, Homo sapien
aggagtaacttctgaacccgtggct

SEQ ID NO: 814397 - DNA, 25 bp, Homo sapien
gagtgccgccatcagctttcgtagc

SEQ ID NO: 814398 - DNA, 25 bp, Homo sapien
cacctgtagatgacactattgtatc

SEQ ID NO: 814399 - DNA, 25 bp, Homo sapien
tcctgcaccaataacaaccatcttt

SEQ ID NO: 814400 - DNA, 25 bp, Homo sapien
caattctacacctattactcctgca

SEQ ID NO: 814401 - DNA, 25 bp, Homo sapien
gataaagcacctgtagatgacacta

SEQ ID NO: 814402 - DNA, 25 bp, Homo sapien
aatgtgccatatccatagaatgaga

SEQ ID NO: 814403 - DNA, 25 bp, Homo sapien
tacacatccagttatatacccaaga

SEQ ID NO: 814404 - DNA, 25 bp, Homo sapien
aagtgtaacggtgttccttgagaag

SEQ ID NO: 814405 - DNA, 25 bp, Homo sapien
aaccccacagtgagttactactaca

SEQ ID NO: 814406 - DNA, 25 bp, Homo sapien
caactccacctacatgacctaaaaa

SEQ ID NO: 814407 - DNA, 25 bp, Homo sapien
gatatctccatatcaattccaactc

SEQ ID NO: 814408 - DNA, 25 bp, Homo sapien
cgttgaaagtttttagatatctcca

SEQ ID NO: 814409 - DNA, 25 bp, Homo sapien
tgtttttgaaggatgcgttgaaagt

SEQ ID NO: 814410 - DNA, 25 bp, Homo sapien
aaattcaactactgactgccaccca

SEQ ID NO: 814411 - DNA, 25 bp, Homo sapien
tataagaaggcacaacaatgagaat

SEQ ID NO: 814412 - DNA, 25 bp, Homo sapien
agaatacaggtctttgagtcacaga

SEQ ID NO: 814413 - DNA, 25 bp, Homo sapien
tatttaatcagtagagtaccagaca

SEQ ID NO: 814414 - DNA, 25 bp, Homo sapien
ggaattctacctctgggatctagtt

SEQ ID NO: 814415 - DNA, 25 bp, Homo sapien
tgaaatctggtattgactggaattc

SEQ ID NO: 814416 - DNA, 25 bp, Homo sapien
taacttcagctttaccaccagaagc

SEQ ID NO: 814417 - DNA, 25 bp, Homo sapien
ttagtaaagggtcgtcggccaatgc

SEQ ID NO: 814418 - DNA, 25 bp, Homo sapien
gccagcattggaccagcaactacat

SEQ ID NO: 814419 - DNA, 25 bp, Homo sapien
cacaattgtagtcaatgtgcacagc

SEQ ID NO: 814420 - DNA, 25 bp, Homo sapien
caagcaacttcagggtgtgtgtaaa

SEQ ID NO: 814421 - DNA, 25 bp, Homo sapien
gcaactacatcaccaatggcataga

SEQ ID NO: 814422 - DNA, 25 bp, Homo sapien
tactctgtctgtcgatttctgccca

SEQ ID NO: 814423 - DNA, 25 bp, Homo sapien
ccaaggatcttcaccatgccatctg

SEQ ID NO: 814424 - DNA, 25 bp, Homo sapien
ggtccaagaatatgtgctcccagta

SEQ ID NO: 814425 - DNA, 25 bp, Homo sapien
tgttagcagcaaatgggaatttccc

SEQ ID NO: 814426 - DNA, 25 bp, Homo sapien
tctagaaatgatgcacagagagcca

SEQ ID NO: 814427 - DNA, 25 bp, Homo sapien
gctgcaggacaaagtagatgataca

SEQ ID NO: 814428 - DNA, 25 bp, Homo sapien
cagtgaggccttggatgtaacaatc

SEQ ID NO: 814429 - DNA, 25 bp, Homo sapien
tgtgagagtgctgctggtatccttc

SEQ ID NO: 814430 - DNA, 25 bp, Homo sapien
ccatattccaaagcaagagcagctt

SEQ ID NO: 814431 - DNA, 25 bp, Homo sapien
gcatgacagactctagctatatctt

SEQ ID NO: 814432 - DNA, 25 bp, Homo sapien
tctagctatatcttcacaggatgct

SEQ ID NO: 814433 - DNA, 25 bp, Homo sapien
atgtgcatgacagactctagctata

SEQ ID NO: 814434 - DNA, 25 bp, Homo sapien
caaaagttgattgatttgccaaatg

SEQ ID NO: 814435 - DNA, 25 bp, Homo sapien
caaatgacgcagcaagatttgcttc

SEQ ID NO: 814436 - DNA, 25 bp, Homo sapien
tgatttgccaaatgacgcagcaaga

SEQ ID NO: 814437 - DNA, 25 bp, Homo sapien
gttgattgatttgccaaatgacgca

SEQ ID NO: 814438 - DNA, 25 bp, Homo sapien
tgtgacttctacaaaagctcccagg

SEQ ID NO: 814439 - DNA, 25 bp, Homo sapien
cctagaaattcttggagctgtgaga

SEQ ID NO: 814440 - DNA, 25 bp, Homo sapien
gctgtgagaatatcctgttcaggaa

SEQ ID NO: 814441 - DNA, 25 bp, Homo sapien
tgcccacgtatttgagttccgtaaa

SEQ ID NO: 814442 - DNA, 25 bp, Homo sapien
tacacacttgcatgggaaagacttc

SEQ ID NO: 814443 - DNA, 25 bp, Homo sapien
taaacagtcattaacccagccaagg

SEQ ID NO: 814444 - DNA, 25 bp, Homo sapien
cagaatccagggtcattatgtcact

SEQ ID NO: 814445 - DNA, 25 bp, Homo sapien
taaacagcacttcacatgataccgg

SEQ ID NO: 814446 - DNA, 25 bp, Homo sapien
gtggacaattaatttcactcttcac

SEQ ID NO: 814447 - DNA, 25 bp, Homo sapien
aagtggacaattaatttcactcttc

SEQ ID NO: 814448 - DNA, 25 bp, Homo sapien
agtggacaattaatttcactcttca

SEQ ID NO: 814449 - DNA, 25 bp, Homo sapien
tggacaattaatttcactcttcaca

SEQ ID NO: 814450 - DNA, 25 bp, Homo sapien
taactagcaaaaatggtcatacccc

SEQ ID NO: 814451 - DNA, 25 bp, Homo sapien
cataccccatcatctactagagcaa

SEQ ID NO: 814452 - DNA, 25 bp, Homo sapien
taaacaactaaagatctcactttga

SEQ ID NO: 814453 - DNA, 25 bp, Homo sapien
tacttagaacagtagaaacactctc

SEQ ID NO: 814454 - DNA, 25 bp, Homo sapien
caagaattagcaagactggaaggag

SEQ ID NO: 814455 - DNA, 25 bp, Homo sapien
taaaggatataagccagaaagttgc

SEQ ID NO: 814456 - DNA, 25 bp, Homo sapien
gagaagtccgttcactcctaaagga

SEQ ID NO: 814457 - DNA, 25 bp, Homo sapien
caagtttactgcgtccatgaagacc

SEQ ID NO: 814458 - DNA, 25 bp, Homo sapien
gctgcaactgctcaaaggtgggtct

SEQ ID NO: 814459 - DNA, 25 bp, Homo sapien
gaactatagactttagatggtgaac

SEQ ID NO: 814460 - DNA, 25 bp, Homo sapien
ttagctcaagcaaatagcaagctgc

SEQ ID NO: 814461 - DNA, 25 bp, Homo sapien
gccagaaggaaagccgaaatgctac

SEQ ID NO: 814462 - DNA, 25 bp, Homo sapien
gcagtactgaggacacaaatttctc

SEQ ID NO: 814463 - DNA, 25 bp, Homo sapien
tctcaagtactctgcttcagggcat

SEQ ID NO: 814464 - DNA, 25 bp, Homo sapien
tgggcttctctaatgtctaatctac

SEQ ID NO: 814465 - DNA, 25 bp, Homo sapien
caatgagaaaagttcactgccacaa

SEQ ID NO: 814466 - DNA, 25 bp, Homo sapien
tacaagcaggttggaacagagaaca

SEQ ID NO: 814467 - DNA, 25 bp, Homo sapien
tagtaattatcaggccatttgagaa

SEQ ID NO: 814468 - DNA, 25 bp, Homo sapien
ggtagtcagttaaattcttcatggc

SEQ ID NO: 814469 - DNA, 25 bp, Homo sapien
gggcttaaaaccattgaatcactgg

SEQ ID NO: 814470 - DNA, 25 bp, Homo sapien
gcgcatcagcgagttagagaggaat

SEQ ID NO: 814471 - DNA, 25 bp, Homo sapien
gtggaaatccctcttcgcacagctg

SEQ ID NO: 814472 - DNA, 25 bp, Homo sapien
ttggtctagagcaaaatggcacagc

SEQ ID NO: 814473 - DNA, 25 bp, Homo sapien
tagccaaagtttgcaggtgtcctta

SEQ ID NO: 814474 - DNA, 25 bp, Homo sapien
tacaaggtagctgccaaagttccag

SEQ ID NO: 814475 - DNA, 25 bp, Homo sapien
agctttaagctctggccctctatgg

SEQ ID NO: 814476 - DNA, 25 bp, Homo sapien
tactttcccgtaacatactctgccg

SEQ ID NO: 814477 - DNA, 25 bp, Homo sapien
gataattttacctgacttagaggca

SEQ ID NO: 814478 - DNA, 25 bp, Homo sapien
aactttatagcaaatagggagcaaa

SEQ ID NO: 814479 - DNA, 25 bp, Homo sapien
tgtaaattgcagctaacaggagaca

SEQ ID NO: 814480 - DNA, 25 bp, Homo sapien
tcttgaaccggaggcatctccgtgg

SEQ ID NO: 814481 - DNA, 25 bp, Homo sapien
caaacaagttctgtgtgacctacaa

SEQ ID NO: 814482 - DNA, 25 bp, Homo sapien
catttgagtggatccgaataaagga

SEQ ID NO: 814483 - DNA, 25 bp, Homo sapien
taggacccgaagacaccaaatatag

SEQ ID NO: 814484 - DNA, 25 bp, Homo sapien
ccagatgtttgccatactcgagctg

SEQ ID NO: 814485 - DNA, 25 bp, Homo sapien
ggaacctacaaatatggagggctac

SEQ ID NO: 814486 - DNA, 25 bp, Homo sapien
gactcaattcctgagcctgtatttt

SEQ ID NO: 814487 - DNA, 25 bp, Homo sapien
ctcaattcctgagcctgtattttct

SEQ ID NO: 814488 - DNA, 25 bp, Homo sapien
aattcctgagcctgtattttctctc

SEQ ID NO: 814489 - DNA, 25 bp, Homo sapien
atgactcaattcctgagcctgtatt

SEQ ID NO: 814490 - DNA, 25 bp, Homo sapien
ctgaatcagaattctggcgtggcct

SEQ ID NO: 814491 - DNA, 25 bp, Homo sapien
tagagtcaggtacgtaaagagcttc

SEQ ID NO: 814492 - DNA, 25 bp, Homo sapien
tagactccggagttgcaaagaactg

SEQ ID NO: 814493 - DNA, 25 bp, Homo sapien
tgatgtatccgatgccaggtggcac

SEQ ID NO: 814494 - DNA, 25 bp, Homo sapien
tgaacccgggaagtggaggttgcag

SEQ ID NO: 814495 - DNA, 25 bp, Homo sapien
ttaggaggcagaggcagaatagctt

SEQ ID NO: 814496 - DNA, 25 bp, Homo sapien
tatttaggaggcagaggcagaatag

SEQ ID NO: 814497 - DNA, 25 bp, Homo sapien
agctatttaggaggcagaggcagaa

SEQ ID NO: 814498 - DNA, 25 bp, Homo sapien
caggatttaccacctcagtccgcag

SEQ ID NO: 814499 - DNA, 25 bp, Homo sapien
tacagatgtggaagacgtgactcag

SEQ ID NO: 814500 - DNA, 25 bp, Homo sapien
tatagcagatctcaggaccctcagt

SEQ ID NO: 814501 - DNA, 25 bp, Homo sapien
caaacctgccactcgagagcttgga

SEQ ID NO: 814502 - DNA, 25 bp, Homo sapien
cagagtcaagtcatcataacagaga

SEQ ID NO: 814503 - DNA, 25 bp, Homo sapien
tattttccctggctacttgtgggca

SEQ ID NO: 814504 - DNA, 25 bp, Homo sapien
taaaacttgatgacccctgtgctag

SEQ ID NO: 814505 - DNA, 25 bp, Homo sapien
tgtgttctcagaagaggtaggctag

SEQ ID NO: 814506 - DNA, 25 bp, Homo sapien
gactattatagaagttcagcagcca

SEQ ID NO: 814507 - DNA, 25 bp, Homo sapien
ctggagtggtcaaggcttgctttgt

SEQ ID NO: 814508 - DNA, 25 bp, Homo sapien
agatgtagccggcaacaccactgcc

SEQ ID NO: 814509 - DNA, 25 bp, Homo sapien
aaccagatggcccttgatggatact

SEQ ID NO: 814510 - DNA, 25 bp, Homo sapien
ggagacagcgcacgcggagcgccgc

SEQ ID NO: 814511 - DNA, 25 bp, Homo sapien
ggtggctggagacagcgcacgcgga

SEQ ID NO: 814512 - DNA, 25 bp, Homo sapien
tggctggagacagcgcacgcggagc

SEQ ID NO: 814513 - DNA, 25 bp, Homo sapien
ctggagacagcgcacgcggagcgcc

SEQ ID NO: 814514 - DNA, 25 bp, Homo sapien
ggctctccgtatgcgcatgagcaga

SEQ ID NO: 814515 - DNA, 25 bp, Homo sapien
gggcttctccagttgctagctttca

SEQ ID NO: 814516 - DNA, 25 bp, Homo sapien
caaagtggctgcacgattttcccca

SEQ ID NO: 814517 - DNA, 25 bp, Homo sapien
ccgcttccgtgggagcgacaggaaa

SEQ ID NO: 814518 - DNA, 25 bp, Homo sapien
gactagacaattatctgtaaatgat

SEQ ID NO: 814519 - DNA, 25 bp, Homo sapien
tctccccagaaagcacaagaggcat

SEQ ID NO: 814520 - DNA, 25 bp, Homo sapien
taaatgatttctccccagaaagcac

SEQ ID NO: 814521 - DNA, 25 bp, Homo sapien
cgtgactagacaattatctgtaaat

SEQ ID NO: 814522 - DNA, 25 bp, Homo sapien
cattatatgatcgccactttgagcc

SEQ ID NO: 814523 - DNA, 25 bp, Homo sapien
attatatgatcgccactttgagcct

SEQ ID NO: 814524 - DNA, 25 bp, Homo sapien
cattagtctctttgcgggtacccca

SEQ ID NO: 814525 - DNA, 25 bp, Homo sapien
tctgttacagcagctgaaccagcat

SEQ ID NO: 814526 - DNA, 25 bp, Homo sapien
ccttgccaaactgctaaaattgtcc

SEQ ID NO: 814527 - DNA, 25 bp, Homo sapien
tgctaaaattgtcctctatgccctg

SEQ ID NO: 814528 - DNA, 25 bp, Homo sapien
tcccaggcatagtaggtccaccaga

SEQ ID NO: 814529 - DNA, 25 bp, Homo sapien
ccaggcatagtaggtccaccagaat

SEQ ID NO: 814530 - DNA, 25 bp, Homo sapien
aggcatagtaggtccaccagaattc

SEQ ID NO: 814531 - DNA, 25 bp, Homo sapien
cccaggcatagtaggtccaccagaa

SEQ ID NO: 814532 - DNA, 25 bp, Homo sapien
caaatgaagcaatccctggtctggg

SEQ ID NO: 814533 - DNA, 25 bp, Homo sapien
tcatcattgttgcactagcgcctag

SEQ ID NO: 814534 - DNA, 25 bp, Homo sapien
gatctggcccataaatgtgaacgga

SEQ ID NO: 814535 - DNA, 25 bp, Homo sapien
taacaactgcggtaggtggaatcca

SEQ ID NO: 814536 - DNA, 25 bp, Homo sapien
gatcttgagacattaactacagccc

SEQ ID NO: 814537 - DNA, 25 bp, Homo sapien
gaccagttatgttaaacccatggcc

SEQ ID NO: 814538 - DNA, 25 bp, Homo sapien
tgctgggtatcccaccacaagctgg

SEQ ID NO: 814539 - DNA, 25 bp, Homo sapien
gcttgaatacgtgtgacctgcctaa

SEQ ID NO: 814540 - DNA, 25 bp, Homo sapien
tgaagtgtatatgtactccactctg

SEQ ID NO: 814541 - DNA, 25 bp, Homo sapien
cactctggatcagaactctcttcaa

SEQ ID NO: 814542 - DNA, 25 bp, Homo sapien
tatgtactccactctggatcagaac

SEQ ID NO: 814543 - DNA, 25 bp, Homo sapien
gtgtatatgtactccactctggatc

SEQ ID NO: 814544 - DNA, 25 bp, Homo sapien
gacagaatgaagcacacgggcagtt

SEQ ID NO: 814545 - DNA, 25 bp, Homo sapien
gttctaaatacaggacagcatcagg

SEQ ID NO: 814546 - DNA, 25 bp, Homo sapien
tatctgggcggctgaacagaagcca

SEQ ID NO: 814547 - DNA, 25 bp, Homo sapien
tttatcagaagtatatctgggcggc

SEQ ID NO: 814548 - DNA, 25 bp, Homo sapien
caaaacaggtttgccttggcatcag

SEQ ID NO: 814549 - DNA, 25 bp, Homo sapien
gaacttttctacgtattgacagcag

SEQ ID NO: 814550 - DNA, 25 bp, Homo sapien
taatcccaggtaaagatggccctaa

SEQ ID NO: 814551 - DNA, 25 bp, Homo sapien
gcacagtaggcctagtaacctggca

SEQ ID NO: 814552 - DNA, 25 bp, Homo sapien
acatatgcccgtgacatacccatag

SEQ ID NO: 814553 - DNA, 25 bp, Homo sapien
ggttgagaacatatgcccgtgacat

SEQ ID NO: 814554 - DNA, 25 bp, Homo sapien
gaacatatgcccgtgacatacccat

SEQ ID NO: 814555 - DNA, 25 bp, Homo sapien
tgcccaggttgagaacatatgcccg

SEQ ID NO: 814556 - DNA, 25 bp, Homo sapien
aaagtacttctttcaaatgtgaccg

SEQ ID NO: 814557 - DNA, 25 bp, Homo sapien
ccttgctctcagttcaaaccaaagt

SEQ ID NO: 814558 - DNA, 25 bp, Homo sapien
tcaaatgtgaccgtttttcctgcat

SEQ ID NO: 814559 - DNA, 25 bp, Homo sapien
caaaccaaagtacttctttcaaatg

SEQ ID NO: 814560 - DNA, 25 bp, Homo sapien
ctcagctctgaacatctttcagaag

SEQ ID NO: 814561 - DNA, 25 bp, Homo sapien
tcagctctgaacatctttcagaagg

SEQ ID NO: 814562 - DNA, 25 bp, Homo sapien
actcagctctgaacatctttcagaa

SEQ ID NO: 814563 - DNA, 25 bp, Homo sapien
ggggcaaggatattccattagcctg

SEQ ID NO: 814564 - DNA, 25 bp, Homo sapien
ccatgaagtcaagggtgaggacacc

SEQ ID NO: 814565 - DNA, 25 bp, Homo sapien
cattgggatccatctgcaaggtgaa

SEQ ID NO: 814566 - DNA, 25 bp, Homo sapien
tccattagcctgtatcccaaagctc

SEQ ID NO: 814567 - DNA, 25 bp, Homo sapien
gcagccatctcatgctgatagctct

SEQ ID NO: 814568 - DNA, 25 bp, Homo sapien
cagccatctcatgctgatagctctg

SEQ ID NO: 814569 - DNA, 25 bp, Homo sapien
ctcatgctgatagctctgagttccc

SEQ ID NO: 814570 - DNA, 25 bp, Homo sapien
ggcagccatctcatgctgatagctc

SEQ ID NO: 814571 - DNA, 25 bp, Homo sapien
tgtgttcgcagccaaggctttgccc

SEQ ID NO: 814572 - DNA, 25 bp, Homo sapien
tcccagtttggttattattacatcc

SEQ ID NO: 814573 - DNA, 25 bp, Homo sapien
tgcccatcaaaacttccaactgtgt

SEQ ID NO: 814574 - DNA, 25 bp, Homo sapien
tcctgaaacactcccagtttggtta

SEQ ID NO: 814575 - DNA, 25 bp, Homo sapien
actaacagttgcggttccgtataag

SEQ ID NO: 814576 - DNA, 25 bp, Homo sapien
atgtatgtctatgcgagtgaaaatc

SEQ ID NO: 814577 - DNA, 25 bp, Homo sapien
tatgcgagtgaaaatcacttcctgg

SEQ ID NO: 814578 - DNA, 25 bp, Homo sapien
gacagacaagtaaactaacagttgc

SEQ ID NO: 814579 - DNA, 25 bp, Homo sapien
gaatagataatgatagtacataatg

SEQ ID NO: 814580 - DNA, 25 bp, Homo sapien
aagaatagataatgatagtacataa

SEQ ID NO: 814581 - DNA, 25 bp, Homo sapien
tgaaagaatagataatgatagtaca

SEQ ID NO: 814582 - DNA, 25 bp, Homo sapien
gaaagaatagataatgatagtacat

SEQ ID NO: 814583 - DNA, 25 bp, Homo sapien
gttgatgacaatcagcagattctaa

SEQ ID NO: 814584 - DNA, 25 bp, Homo sapien
ctttgaggctacagtagcgagttga

SEQ ID NO: 814585 - DNA, 25 bp, Homo sapien
ctgcagagctttgaggctacagtag

SEQ ID NO: 814586 - DNA, 25 bp, Homo sapien
ctacagtagcgagttgatgacaatc

SEQ ID NO: 814587 - DNA, 25 bp, Homo sapien
ttctgtagctcataccggtcacgcc

SEQ ID NO: 814588 - DNA, 25 bp, Homo sapien
tgtgcctcaacaggatagacatgtg

SEQ ID NO: 814589 - DNA, 25 bp, Homo sapien
catgtacaaagctgagtcgcaagtc

SEQ ID NO: 814590 - DNA, 25 bp, Homo sapien
gactggcagataacacactttggca

SEQ ID NO: 814591 - DNA, 25 bp, Homo sapien
tgtagcatggtggaaattcacattc

SEQ ID NO: 814592 - DNA, 25 bp, Homo sapien
aaagagtcgagtaggatatggtgca

SEQ ID NO: 814593 - DNA, 25 bp, Homo sapien
ctattgaaagagtcgagtaggatat

SEQ ID NO: 814594 - DNA, 25 bp, Homo sapien
tttgtttcttgtagcatggtggaaa

SEQ ID NO: 814595 - DNA, 25 bp, Homo sapien
tacaatactagtatcagcagtaagg

SEQ ID NO: 814596 - DNA, 25 bp, Homo sapien
cagtaaggtatggaaaattctttcg

SEQ ID NO: 814597 - DNA, 25 bp, Homo sapien
ctagtatcagcagtaaggtatggaa

SEQ ID NO: 814598 - DNA, 25 bp, Homo sapien
ggaaaattctttcgtagataatata

SEQ ID NO: 814599 - DNA, 25 bp, Homo sapien
gtctcctgagggtataccatccatt

SEQ ID NO: 814600 - DNA, 25 bp, Homo sapien
gagggtataccatccattagtgatt

SEQ ID NO: 814601 - DNA, 25 bp, Homo sapien
ctaccccgctgtccgccccattctt

SEQ ID NO: 814602 - DNA, 25 bp, Homo sapien
aaaagtctcctgagggtataccatc

SEQ ID NO: 814603 - DNA, 25 bp, Homo sapien
gagtagtagcccttgccgctacctt

SEQ ID NO: 814604 - DNA, 25 bp, Homo sapien
tcttccctttgagtagtagcccttg

SEQ ID NO: 814605 - DNA, 25 bp, Homo sapien
gaagatgccatggtaatccaagaac

SEQ ID NO: 814606 - DNA, 25 bp, Homo sapien
agaagatgccatggtaatccaagaa

SEQ ID NO: 814607 - DNA, 25 bp, Homo sapien
aggcacacgctgtccagtgggccat

SEQ ID NO: 814608 - DNA, 25 bp, Homo sapien
cacgctgtccagtgggccatgcccc

SEQ ID NO: 814609 - DNA, 25 bp, Homo sapien
acacgctgtccagtgggccatgccc

SEQ ID NO: 814610 - DNA, 25 bp, Homo sapien
gcacacgctgtccagtgggccatgc

SEQ ID NO: 814611 - DNA, 25 bp, Homo sapien
tgttctttatagtaatccccatcaa

SEQ ID NO: 814612 - DNA, 25 bp, Homo sapien
tagtgtcttgatttaaagataggta

SEQ ID NO: 814613 - DNA, 25 bp, Homo sapien
ggcattttcagaagtagtgtcttga

SEQ ID NO: 814614 - DNA, 25 bp, Homo sapien
catcaatggtagtgctttctactga

SEQ ID NO: 814615 - DNA, 25 bp, Homo sapien
ggtgaaggccctgttcctggtttgc

SEQ ID NO: 814616 - DNA, 25 bp, Homo sapien
caagaccaagatgtcagctggtggg

SEQ ID NO: 814617 - DNA, 25 bp, Homo sapien
gcagatggccagcttgctgtatcct

SEQ ID NO: 814618 - DNA, 25 bp, Homo sapien
ttggaaggtagggagtccaagacca

SEQ ID NO: 814619 - DNA, 25 bp, Homo sapien
tgcttaatgcccatcagaggctcct

SEQ ID NO: 814620 - DNA, 25 bp, Homo sapien
gacacccattgttctaggcctgcta

SEQ ID NO: 814621 - DNA, 25 bp, Homo sapien
cactcaggctgctgtagcaaagtgc

SEQ ID NO: 814622 - DNA, 25 bp, Homo sapien
tgtgcagcttgcagcgtatgacaaa

SEQ ID NO: 814623 - DNA, 25 bp, Homo sapien
tttggggcacaaagatgaatacaga

SEQ ID NO: 814624 - DNA, 25 bp, Homo sapien
ctgcgtatttggggcacaaagatga

SEQ ID NO: 814625 - DNA, 25 bp, Homo sapien
tgctgttctagcctcaaggagctcc

SEQ ID NO: 814626 - DNA, 25 bp, Homo sapien
gatgaatacagaatgctgttctagc

SEQ ID NO: 814627 - DNA, 25 bp, Homo sapien
aggagatacgacacatcacaaagta

SEQ ID NO: 814628 - DNA, 25 bp, Homo sapien
cccagcaaaggagatacgacacatc

SEQ ID NO: 814629 - DNA, 25 bp, Homo sapien
tgtattacgtagacatttattcatt

SEQ ID NO: 814630 - DNA, 25 bp, Homo sapien
gtagcacagttacatgtattacgta

SEQ ID NO: 814631 - DNA, 25 bp, Homo sapien
taaccaatcctactgcaagcttcgg

SEQ ID NO: 814632 - DNA, 25 bp, Homo sapien
gaaggaatagctggtgtaaaggccc

SEQ ID NO: 814633 - DNA, 25 bp, Homo sapien
tgttcccagaaggatgagtcccaag

SEQ ID NO: 814634 - DNA, 25 bp, Homo sapien
taaatgatcgctatgacctcggtgt

SEQ ID NO: 814635 - DNA, 25 bp, Homo sapien
tgctgccaactaaattatgacaagc

SEQ ID NO: 814636 - DNA, 25 bp, Homo sapien
aagatgctgccaactaaattatgac

SEQ ID NO: 814637 - DNA, 25 bp, Homo sapien
gatgctgccaactaaattatgacaa

SEQ ID NO: 814638 - DNA, 25 bp, Homo sapien
gaaagatgctgccaactaaattatg

SEQ ID NO: 814639 - DNA, 25 bp, Homo sapien
taaagcaactattctgtgctaggct

SEQ ID NO: 814640 - DNA, 25 bp, Homo sapien
tattcaaatcgtagcacccctcaat

SEQ ID NO: 814641 - DNA, 25 bp, Homo sapien
ggtcccacttgtcagcagtgttgca

SEQ ID NO: 814642 - DNA, 25 bp, Homo sapien
gggacattcccaagaattaagaatg

SEQ ID NO: 814643 - DNA, 25 bp, Homo sapien
tttggagcctaggaagtccaaggtc

SEQ ID NO: 814644 - DNA, 25 bp, Homo sapien
taaaggccttctttctgtgttatcc

SEQ ID NO: 814645 - DNA, 25 bp, Homo sapien
gggcctgcatctggtaaaggccttc

SEQ ID NO: 814646 - DNA, 25 bp, Homo sapien
tcaaggggcctgcatctggtaaagg

SEQ ID NO: 814647 - DNA, 25 bp, Homo sapien
tagtctgttctgtaagggacctcca

SEQ ID NO: 814648 - DNA, 25 bp, Homo sapien
tgctactcaggcattaaggactctg

SEQ ID NO: 814649 - DNA, 25 bp, Homo sapien
ccagggacttgccaataggatgcaa

SEQ ID NO: 814650 - DNA, 25 bp, Homo sapien
gagcaacctttccagcatccaggca

SEQ ID NO: 814651 - DNA, 25 bp, Homo sapien
cttactagtgtatgaacccaatgtt

SEQ ID NO: 814652 - DNA, 25 bp, Homo sapien
gagattataatggtcctggtctcat

SEQ ID NO: 814653 - DNA, 25 bp, Homo sapien
cacttactagtgtatgaacccaatg

SEQ ID NO: 814654 - DNA, 25 bp, Homo sapien
ttataatggtcctggtctcatgaag

SEQ ID NO: 814655 - DNA, 25 bp, Homo sapien
gtcgtactatgagcgcaccactgca

SEQ ID NO: 814656 - DNA, 25 bp, Homo sapien
gttgcaggaagccaacgtcgtacta

SEQ ID NO: 814657 - DNA, 25 bp, Homo sapien
caggtttctgcactgtaaagagact

SEQ ID NO: 814658 - DNA, 25 bp, Homo sapien
gaagtcactatgagcagttcacact

SEQ ID NO: 814659 - DNA, 25 bp, Homo sapien
cgcggatgaatgtcctgattcctag

SEQ ID NO: 814660 - DNA, 25 bp, Homo sapien
tcctagaagttgtgacagatccttg

SEQ ID NO: 814661 - DNA, 25 bp, Homo sapien
aatgtcctgattcctagaagttgtg

SEQ ID NO: 814662 - DNA, 25 bp, Homo sapien
tcctgattcctagaagttgtgacag

SEQ ID NO: 814663 - DNA, 25 bp, Homo sapien
cagatgtgaacatggtcaggaacca

SEQ ID NO: 814664 - DNA, 25 bp, Homo sapien
ggaaccaggttacctccagagagca

SEQ ID NO: 814665 - DNA, 25 bp, Homo sapien
agatgactatgggaccagatgtgaa

SEQ ID NO: 814666 - DNA, 25 bp, Homo sapien
caggaagcaggaacaacaggtgttc

SEQ ID NO: 814667 - DNA, 25 bp, Homo sapien
tcagcttcacgataacccatgaggt

SEQ ID NO: 814668 - DNA, 25 bp, Homo sapien
tgttgtttagtttcagcttcacgat

SEQ ID NO: 814669 - DNA, 25 bp, Homo sapien
acgataacccatgaggtaactaggg

SEQ ID NO: 814670 - DNA, 25 bp, Homo sapien
aaagcacttggcatgttgtttagtt

SEQ ID NO: 814671 - DNA, 25 bp, Homo sapien
aaaaatagaaaagatctaggcccat

SEQ ID NO: 814672 - DNA, 25 bp, Homo sapien
tataaaaatagaaaagatctaggcc

SEQ ID NO: 814673 - DNA, 25 bp, Homo sapien
ttataaaaatagaaaagatctaggc

SEQ ID NO: 814674 - DNA, 25 bp, Homo sapien
taaaaatagaaaagatctaggccca

SEQ ID NO: 814675 - DNA, 25 bp, Homo sapien
gcagctggcccgttctgtcatggaa

SEQ ID NO: 814676 - DNA, 25 bp, Homo sapien
cagaggaaaagggaacttcatgaca

SEQ ID NO: 814677 - DNA, 25 bp, Homo sapien
tcatgacagaaataaagccagagag

SEQ ID NO: 814678 - DNA, 25 bp, Homo sapien
cgttctgtcatggaagaatcactct

SEQ ID NO: 814679 - DNA, 25 bp, Homo sapien
gctgaaaggtcacttgtgcagagcc

SEQ ID NO: 814680 - DNA, 25 bp, Homo sapien
tattacagatttgcccacagaaggg

SEQ ID NO: 814681 - DNA, 25 bp, Homo sapien
cattgtttggtttgcagcctctgtg

SEQ ID NO: 814682 - DNA, 25 bp, Homo sapien
tatagtcttctcacaagctgaaagg

SEQ ID NO: 814683 - DNA, 25 bp, Homo sapien
actgacagctgcacatcacatcctg

SEQ ID NO: 814684 - DNA, 25 bp, Homo sapien
gccctgcactgacagctgcacatca

SEQ ID NO: 814685 - DNA, 25 bp, Homo sapien
gctgcacatcacatcctgtgatcat

SEQ ID NO: 814686 - DNA, 25 bp, Homo sapien
tgacagctgcacatcacatcctgtg

SEQ ID NO: 814687 - DNA, 25 bp, Homo sapien
cacactgactgagttaagcactttc

SEQ ID NO: 814688 - DNA, 25 bp, Homo sapien
cactttctgagattgctttctaccc

SEQ ID NO: 814689 - DNA, 25 bp, Homo sapien
gagattgctttctaccctctgaatt

SEQ ID NO: 814690 - DNA, 25 bp, Homo sapien
tgagttaagcactttctgagattgc

SEQ ID NO: 814691 - DNA, 25 bp, Homo sapien
cagcgagcgccatctgcgccgagcg

SEQ ID NO: 814692 - DNA, 25 bp, Homo sapien
ccgccctggagcatccatctcgcag

SEQ ID NO: 814693 - DNA, 25 bp, Homo sapien
cctggagcatccatctcgcagcgag

SEQ ID NO: 814694 - DNA, 25 bp, Homo sapien
ggagcatccatctcgcagcgagcgc

SEQ ID NO: 814695 - DNA, 25 bp, Homo sapien
tgttcgggcccctgcggacacgtct

SEQ ID NO: 814696 - DNA, 25 bp, Homo sapien
acacgtctgggcgtgggctttgttc

SEQ ID NO: 814697 - DNA, 25 bp, Homo sapien
gttcggaagtgcgtacacctgtgct

SEQ ID NO: 814698 - DNA, 25 bp, Homo sapien
ggcgaggccgacttcgcttctccag

SEQ ID NO: 814699 - DNA, 25 bp, Homo sapien
tcgtgggcagttgggcatggagagc

SEQ ID NO: 814700 - DNA, 25 bp, Homo sapien
gctcttgctcgtgggcagttgggca

SEQ ID NO: 814701 - DNA, 25 bp, Homo sapien
agagcctgcgggcccggcacggcgg

SEQ ID NO: 814702 - DNA, 25 bp, Homo sapien
agctgaaatccagcagcgccggcac

SEQ ID NO: 814703 - DNA, 25 bp, Homo sapien
aatatcgtctgcctcaacctggctt

SEQ ID NO: 814704 - DNA, 25 bp, Homo sapien
gaccaaatatcgtctgcctcaacct

SEQ ID NO: 814705 - DNA, 25 bp, Homo sapien
caccaggaccaaatatcgtctgcct

SEQ ID NO: 814706 - DNA, 25 bp, Homo sapien
caggaccaaatatcgtctgcctcaa

SEQ ID NO: 814707 - DNA, 25 bp, Homo sapien
ctgttgctcattccctcaggagatg

SEQ ID NO: 814708 - DNA, 25 bp, Homo sapien
gttgctcattccctcaggagatgaa

SEQ ID NO: 814709 - DNA, 25 bp, Homo sapien
tgttgctcattccctcaggagatga

SEQ ID NO: 814710 - DNA, 25 bp, Homo sapien
cctgttgctcattccctcaggagat

SEQ ID NO: 814711 - DNA, 25 bp, Homo sapien
ggaaaaaggaccagctcttggtaga

SEQ ID NO: 814712 - DNA, 25 bp, Homo sapien
tgggccagcgagaacttttccaaga

SEQ ID NO: 814713 - DNA, 25 bp, Homo sapien
gaccagctcttggtagagtacagtg

SEQ ID NO: 814714 - DNA, 25 bp, Homo sapien
tacagtgaagggtgaacccaggcct

SEQ ID NO: 814715 - DNA, 25 bp, Homo sapien
gattgcacactgaccttggctagtc

SEQ ID NO: 814716 - DNA, 25 bp, Homo sapien
catatcagcgtgtttctcagcatct

SEQ ID NO: 814717 - DNA, 25 bp, Homo sapien
gacatgaagggcacatatcagcgtg

SEQ ID NO: 814718 - DNA, 25 bp, Homo sapien
ggctagtcttaaatctatgcagcag

SEQ ID NO: 814719 - DNA, 25 bp, Homo sapien
gaagaactgtaattcacctgagata

SEQ ID NO: 814720 - DNA, 25 bp, Homo sapien
tataaaccacgtagcatggcaccta

SEQ ID NO: 814721 - DNA, 25 bp, Homo sapien
caaacccagttgtgtggtgcaccag

SEQ ID NO: 814722 - DNA, 25 bp, Homo sapien
ggccagtgcttgctttatccaaagg

SEQ ID NO: 814723 - DNA, 25 bp, Homo sapien
gaaggtctgtttagaagatcaacca

SEQ ID NO: 814724 - DNA, 25 bp, Homo sapien
tatatgtgccgaacaagaaaccgaa

SEQ ID NO: 814725 - DNA, 25 bp, Homo sapien
ttcaaccagcttgcatagcacagag

SEQ ID NO: 814726 - DNA, 25 bp, Homo sapien
tgaaaaagacggtgcttcaaccagc

SEQ ID NO: 814727 - DNA, 25 bp, Homo sapien
gccactgggccttgccttgaggttt

SEQ ID NO: 814728 - DNA, 25 bp, Homo sapien
tatagaggtgatttattctgtcagg

SEQ ID NO: 814729 - DNA, 25 bp, Homo sapien
acaggattaagaagtactatagagg

SEQ ID NO: 814730 - DNA, 25 bp, Homo sapien
tctgtcagggtcagcttaacaaaga

SEQ ID NO: 814731 - DNA, 25 bp, Homo sapien
ggagtgattccttaatggttacaga

SEQ ID NO: 814732 - DNA, 25 bp, Homo sapien
tgttcagagcttaggatacataaac

SEQ ID NO: 814733 - DNA, 25 bp, Homo sapien
aatctctccctatctgcccaagtag

SEQ ID NO: 814734 - DNA, 25 bp, Homo sapien
gcccaagtagtagcataatatgtac

SEQ ID NO: 814735 - DNA, 25 bp, Homo sapien
cactagaggttttgatgaccaattc

SEQ ID NO: 814736 - DNA, 25 bp, Homo sapien
gatgttaatccaaatgtcccagctc

SEQ ID NO: 814737 - DNA, 25 bp, Homo sapien
cattgacatctttccaatcgtgaaa

SEQ ID NO: 814738 - DNA, 25 bp, Homo sapien
gatacagcatagcaaatcttttctc

SEQ ID NO: 814739 - DNA, 25 bp, Homo sapien
gtagatttagttgttgaaccttggc

SEQ ID NO: 814740 - DNA, 25 bp, Homo sapien
tggtgaatcatagtttagtaattgt

SEQ ID NO: 814741 - DNA, 25 bp, Homo sapien
tttgtttttcgacacacgctctcac

SEQ ID NO: 814742 - DNA, 25 bp, Homo sapien
tttggtgaatcatagtttagtaatt

SEQ ID NO: 814743 - DNA, 25 bp, Homo sapien
aaaatatgagatacttgcatcctgt

SEQ ID NO: 814744 - DNA, 25 bp, Homo sapien
ttcttcttctcttctacacccacca

SEQ ID NO: 814745 - DNA, 25 bp, Homo sapien
cttcttcttctcttctacacccacc

SEQ ID NO: 814746 - DNA, 25 bp, Homo sapien
tcttcttctcttctacacccaccat

SEQ ID NO: 814747 - DNA, 25 bp, Homo sapien
ggcgcttcatcttcagctctgagaa

SEQ ID NO: 814748 - DNA, 25 bp, Homo sapien
cgcttcatcttcagctctgagaaat

SEQ ID NO: 814749 - DNA, 25 bp, Homo sapien
tcaggcgcttcatcttcagctctga

SEQ ID NO: 814750 - DNA, 25 bp, Homo sapien
ctttctcaggcgcttcatcttcagc

SEQ ID NO: 814751 - DNA, 25 bp, Homo sapien
ctttcgaagcatcttttgggcaaac

SEQ ID NO: 814752 - DNA, 25 bp, Homo sapien
ggttctgcaggtacaaagtagttgc

SEQ ID NO: 814753 - DNA, 25 bp, Homo sapien
ctgcaggtacaaagtagttgccagc

SEQ ID NO: 814754 - DNA, 25 bp, Homo sapien
cctatattccctgtgatagtgcttt

SEQ ID NO: 814755 - DNA, 25 bp, Homo sapien
tattccctgtgatagtgctttgctt

SEQ ID NO: 814756 - DNA, 25 bp, Homo sapien
tgggctcacgccactgatacctctg

SEQ ID NO: 814757 - DNA, 25 bp, Homo sapien
ctttgggctcacgccactgatacct

SEQ ID NO: 814758 - DNA, 25 bp, Homo sapien
gctcacgccactgatacctctgatt

SEQ ID NO: 814759 - DNA, 25 bp, Homo sapien
ggctcacgccactgatacctctgat

SEQ ID NO: 814760 - DNA, 25 bp, Homo sapien
ttcattccacctcgtggagaagaca

SEQ ID NO: 814761 - DNA, 25 bp, Homo sapien
aaaggttccattgtagatttgacga

SEQ ID NO: 814762 - DNA, 25 bp, Homo sapien
ttccattgtagatttgacgaaggcg

SEQ ID NO: 814763 - DNA, 25 bp, Homo sapien
ccacctcgtggagaagacaatttga

SEQ ID NO: 814764 - DNA, 25 bp, Homo sapien
aaccaaccagcttagagaaatagtc

SEQ ID NO: 814765 - DNA, 25 bp, Homo sapien
ccaaccagcttagagaaatagtcat

SEQ ID NO: 814766 - DNA, 25 bp, Homo sapien
ttaaccaaccagcttagagaaatag

SEQ ID NO: 814767 - DNA, 25 bp, Homo sapien
caaccagcttagagaaatagtcatg

SEQ ID NO: 814768 - DNA, 25 bp, Homo sapien
tctctaggtcctgcagtaaaactag

SEQ ID NO: 814769 - DNA, 25 bp, Homo sapien
tctggacaattggaataggttctca

SEQ ID NO: 814770 - DNA, 25 bp, Homo sapien
ttcaaaatacttataccagggagcc

SEQ ID NO: 814771 - DNA, 25 bp, Homo sapien
tttgtggtagaattccctgggctcc

SEQ ID NO: 814772 - DNA, 25 bp, Homo sapien
cgtcattgccgggaacgagcgagtc

SEQ ID NO: 814773 - DNA, 25 bp, Homo sapien
tggagctcattggtactcggcgccc

SEQ ID NO: 814774 - DNA, 25 bp, Homo sapien
gccccagaagcgcaaaccgtatttg

SEQ ID NO: 814775 - DNA, 25 bp, Homo sapien
gaggcttatctctgctgaaagggaa

SEQ ID NO: 814776 - DNA, 25 bp, Homo sapien
tcttggttccctatggcaacctgca

SEQ ID NO: 814777 - DNA, 25 bp, Homo sapien
tctgttccaggtctcataagggtga

SEQ ID NO: 814778 - DNA, 25 bp, Homo sapien
tcagaagtccagcaagagttgactg

SEQ ID NO: 814779 - DNA, 25 bp, Homo sapien
gagttgactggttcctctgttccag

SEQ ID NO: 814780 - DNA, 25 bp, Homo sapien
gagtacctagtaagtgaatggcaca

SEQ ID NO: 814781 - DNA, 25 bp, Homo sapien
gacagtctttgttctcgaggcatga

SEQ ID NO: 814782 - DNA, 25 bp, Homo sapien
gaaggatttctatactgctgctaac

SEQ ID NO: 814783 - DNA, 25 bp, Homo sapien
tgtgggtcctcatacagaatgggcc

SEQ ID NO: 814784 - DNA, 25 bp, Homo sapien
ttttgagcacaaacatgacacgcaa

SEQ ID NO: 814785 - DNA, 25 bp, Homo sapien
cctatgatgttgaggaagttgtatc

SEQ ID NO: 814786 - DNA, 25 bp, Homo sapien
tagaaatgtcttaggtgacgatggg

SEQ ID NO: 814787 - DNA, 25 bp, Homo sapien
gctcactagggcatttcagtcttca

SEQ ID NO: 814788 - DNA, 25 bp, Homo sapien
cctggccaagatagaacttttataa

SEQ ID NO: 814789 - DNA, 25 bp, Homo sapien
ggtaacttatatgtggctaaccatc

SEQ ID NO: 814790 - DNA, 25 bp, Homo sapien
actaaggaaccacccattagcccag

SEQ ID NO: 814791 - DNA, 25 bp, Homo sapien
ttagcccagttcttaggagaggtac

SEQ ID NO: 814792 - DNA, 25 bp, Homo sapien
ggcctggacctgtggcgcatcctca

SEQ ID NO: 814793 - DNA, 25 bp, Homo sapien
tcagtgaggagggccgccctgcatc

SEQ ID NO: 814794 - DNA, 25 bp, Homo sapien
tttcccggcagaatgctagcgcagg

SEQ ID NO: 814795 - DNA, 25 bp, Homo sapien
tgagtcgacagacgaggcggctttc

SEQ ID NO: 814796 - DNA, 25 bp, Homo sapien
ttgttgctgctagggctgtgcgcca

SEQ ID NO: 814797 - DNA, 25 bp, Homo sapien
ctgttgttgctgctagggctgtgcg

SEQ ID NO: 814798 - DNA, 25 bp, Homo sapien
tgttgttgctgctagggctgtgcgc

SEQ ID NO: 814799 - DNA, 25 bp, Homo sapien
tgttgctgctagggctgtgcgccac

SEQ ID NO: 814800 - DNA, 25 bp, Homo sapien
tctgcctccccacgtgatcccggcg

SEQ ID NO: 814801 - DNA, 25 bp, Homo sapien
cggcgccctacgcgcacgtggaaaa

SEQ ID NO: 814802 - DNA, 25 bp, Homo sapien
gatcccggcgccctacgcgcacgtg

SEQ ID NO: 814803 - DNA, 25 bp, Homo sapien
cccggcgccctacgcgcacgtggaa

SEQ ID NO: 814804 - DNA, 25 bp, Homo sapien
aggaggtagccgctggcgccaccac

SEQ ID NO: 814805 - DNA, 25 bp, Homo sapien
tggcgccaccacctcagaagaccta

SEQ ID NO: 814806 - DNA, 25 bp, Homo sapien
gtacaccgacctagcgctcctcctt

SEQ ID NO: 814807 - DNA, 25 bp, Homo sapien
ctaatctcggtcgtacaccgaccta

SEQ ID NO: 814808 - DNA, 25 bp, Homo sapien
cctgacgatcggctcgggtcggcag

SEQ ID NO: 814809 - DNA, 25 bp, Homo sapien
ctggcgaccctgacgatcggctcgg

SEQ ID NO: 814810 - DNA, 25 bp, Homo sapien
accctgacgatcggctcgggtcggc

SEQ ID NO: 814811 - DNA, 25 bp, Homo sapien
gcgaccctgacgatcggctcgggtc

SEQ ID NO: 814812 - DNA, 25 bp, Homo sapien
ctgcaccctccgactactgctgctc

SEQ ID NO: 814813 - DNA, 25 bp, Homo sapien
cctccgactactgctgctcctccac

SEQ ID NO: 814814 - DNA, 25 bp, Homo sapien
accctccgactactgctgctcctcc

SEQ ID NO: 814815 - DNA, 25 bp, Homo sapien
gcaccctccgactactgctgctcct

SEQ ID NO: 814816 - DNA, 25 bp, Homo sapien
caacccaaaacacgattctgtgatg

SEQ ID NO: 814817 - DNA, 25 bp, Homo sapien
aatccggcgcccgtgaaagccggcg

SEQ ID NO: 814818 - DNA, 25 bp, Homo sapien
attctctcggccaaaaacatgcagc

SEQ ID NO: 814819 - DNA, 25 bp, Homo sapien
gatgcggctgtctccgttcttccat

SEQ ID NO: 814820 - DNA, 25 bp, Homo sapien
ctaaaggcgactggcactttccctg

SEQ ID NO: 814821 - DNA, 25 bp, Homo sapien
ctaagatatcatagtagctttttga

SEQ ID NO: 814822 - DNA, 25 bp, Homo sapien
caaagatgaaaattgactggggagt

SEQ ID NO: 814823 - DNA, 25 bp, Homo sapien
gctttttgaggccagaattaattct

SEQ ID NO: 814824 - DNA, 25 bp, Homo sapien
tgaaaattgactggggagtagccat

SEQ ID NO: 814825 - DNA, 25 bp, Homo sapien
ggccaacttgtgaaaggccttcttg

SEQ ID NO: 814826 - DNA, 25 bp, Homo sapien
cttcttgatttggcgctctgatgcc

SEQ ID NO: 814827 - DNA, 25 bp, Homo sapien
gccaacttgtgaaaggccttcttga

SEQ ID NO: 814828 - DNA, 25 bp, Homo sapien
cttgatttggcgctctgatgccgat

SEQ ID NO: 814829 - DNA, 25 bp, Homo sapien
tatttttgtcagggtggtacttcat

SEQ ID NO: 814830 - DNA, 25 bp, Homo sapien
catcctggcgtgtctggaaatgatt

SEQ ID NO: 814831 - DNA, 25 bp, Homo sapien
taccactagtaaaagcactgtgtcc

SEQ ID NO: 814832 - DNA, 25 bp, Homo sapien
gaacagtcagtgtatgtagtaacca

SEQ ID NO: 814833 - DNA, 25 bp, Homo sapien
tcaaaacgcttcttggatccagtgt

SEQ ID NO: 814834 - DNA, 25 bp, Homo sapien
gttctactgtagaaaggcacagcgc

SEQ ID NO: 814835 - DNA, 25 bp, Homo sapien
ggtgatattagtgagcccaagggca

SEQ ID NO: 814836 - DNA, 25 bp, Homo sapien
gcctgtgatcagcatatgtcccata

SEQ ID NO: 814837 - DNA, 25 bp, Homo sapien
tttcatgtacactctgcaacgcaag

SEQ ID NO: 814838 - DNA, 25 bp, Homo sapien
tacagctttatgtaaagtttctgct

SEQ ID NO: 814839 - DNA, 25 bp, Homo sapien
tctgctttttctcaaccacgcctaa

SEQ ID NO: 814840 - DNA, 25 bp, Homo sapien
tcaaccacgcctaaagaggaaagaa

SEQ ID NO: 814841 - DNA, 25 bp, Homo sapien
aaactagtagatataacttccagga

SEQ ID NO: 814842 - DNA, 25 bp, Homo sapien
cagccgctttctacttcttgatata

SEQ ID NO: 814843 - DNA, 25 bp, Homo sapien
cccagccgctttctacttcttgata

SEQ ID NO: 814844 - DNA, 25 bp, Homo sapien
atgcccagccgctttctacttcttg

SEQ ID NO: 814845 - DNA, 25 bp, Homo sapien
tgcccagccgctttctacttcttga

SEQ ID NO: 814846 - DNA, 25 bp, Homo sapien
tcatcattatggatgcacctgccat

SEQ ID NO: 814847 - DNA, 25 bp, Homo sapien
gctgatgggatggtcaatatcatca

SEQ ID NO: 814848 - DNA, 25 bp, Homo sapien
ctgctgatgggatggtcaatatcat

SEQ ID NO: 814849 - DNA, 25 bp, Homo sapien
ggtcaatatcatcattatggatgca

SEQ ID NO: 814850 - DNA, 25 bp, Homo sapien
attggaacaatggcggcagaaccag

SEQ ID NO: 814851 - DNA, 25 bp, Homo sapien
aaccagaggtcacatgtctttgcat

SEQ ID NO: 814852 - DNA, 25 bp, Homo sapien
cattggaacaatggcggcagaacca

SEQ ID NO: 814853 - DNA, 25 bp, Homo sapien
tcagtgatccctggctgaatgcgac

SEQ ID NO: 814854 - DNA, 25 bp, Homo sapien
atgctcagtgatccctggctgaatg

SEQ ID NO: 814855 - DNA, 25 bp, Homo sapien
aatgctcagtgatccctggctgaat

SEQ ID NO: 814856 - DNA, 25 bp, Homo sapien
gctcagtgatccctggctgaatgcg

SEQ ID NO: 814857 - DNA, 25 bp, Homo sapien
ttcttactccctgttaggtgctcta

SEQ ID NO: 814858 - DNA, 25 bp, Homo sapien
tgcagatagggcaagtttttccccc

SEQ ID NO: 814859 - DNA, 25 bp, Homo sapien
ctgcagatagggcaagtttttcccc

SEQ ID NO: 814860 - DNA, 25 bp, Homo sapien
ccccgataacctgaaacaaatgaag

SEQ ID NO: 814861 - DNA, 25 bp, Homo sapien
caacgccaaggaaccaatcctgtac

SEQ ID NO: 814862 - DNA, 25 bp, Homo sapien
aacttcattctttggttcaacgcca

SEQ ID NO: 814863 - DNA, 25 bp, Homo sapien
ctggccccgataacctgaaacaaat

SEQ ID NO: 814864 - DNA, 25 bp, Homo sapien
cacagcagtgttccaggtgtgttga

SEQ ID NO: 814865 - DNA, 25 bp, Homo sapien
gaaaaagcacaggatgaataaggca

SEQ ID NO: 814866 - DNA, 25 bp, Homo sapien
ttcagaagtacacagcagtgttcca

SEQ ID NO: 814867 - DNA, 25 bp, Homo sapien
aaaagcacaggatgaataaggcatg

SEQ ID NO: 814868 - DNA, 25 bp, Homo sapien
ctcacgaggcagtgcaatgaaagca

SEQ ID NO: 814869 - DNA, 25 bp, Homo sapien
aatcctcagattgttcttgatagac

SEQ ID NO: 814870 - DNA, 25 bp, Homo sapien
aaatcaatttgtgcacaatcctcag

SEQ ID NO: 814871 - DNA, 25 bp, Homo sapien
tatgatatcttctcctacagctcct

SEQ ID NO: 814872 - DNA, 25 bp, Homo sapien
gggagagaatggagccggaacagaa

SEQ ID NO: 814873 - DNA, 25 bp, Homo sapien
gctgcagtggatggcattataatgg

SEQ ID NO: 814874 - DNA, 25 bp, Homo sapien
tgaagtcagactggaatcgaaagcc

SEQ ID NO: 814875 - DNA, 25 bp, Homo sapien
gagcaagaagctcctgtggtagtga

SEQ ID NO: 814876 - DNA, 25 bp, Homo sapien
tgcttccttctgaaggcagcaattt

SEQ ID NO: 814877 - DNA, 25 bp, Homo sapien
ttactccaggtccaggcttgacaca

SEQ ID NO: 814878 - DNA, 25 bp, Homo sapien
tttctgagctgttgtaatcccttgc

SEQ ID NO: 814879 - DNA, 25 bp, Homo sapien
tgcttttactccaggtccaggcttg

SEQ ID NO: 814880 - DNA, 25 bp, Homo sapien
gttgtaatcccttgcaactcaaatt

SEQ ID NO: 814881 - DNA, 25 bp, Homo sapien
cactggcttcaggtggaatgagatc

SEQ ID NO: 814882 - DNA, 25 bp, Homo sapien
tgctacacattacagaggcactggc

SEQ ID NO: 814883 - DNA, 25 bp, Homo sapien
ttagaagtacgtatcacaggccctc

SEQ ID NO: 814884 - DNA, 25 bp, Homo sapien
tagaccagcaacattagcatcgcct

SEQ ID NO: 814885 - DNA, 25 bp, Homo sapien
acactcagattgaagaaagctagga

SEQ ID NO: 814886 - DNA, 25 bp, Homo sapien
tcagattgaagaaagctaggacagg

SEQ ID NO: 814887 - DNA, 25 bp, Homo sapien
actcagattgaagaaagctaggaca

SEQ ID NO: 814888 - DNA, 25 bp, Homo sapien
cactcagattgaagaaagctaggac

SEQ ID NO: 814889 - DNA, 25 bp, Homo sapien
tgaagagcaatgatactgaagcagc

SEQ ID NO: 814890 - DNA, 25 bp, Homo sapien
ttgctattgtctgagattgaagagc

SEQ ID NO: 814891 - DNA, 25 bp, Homo sapien
aagatctgaagggtgtttgctattg

SEQ ID NO: 814892 - DNA, 25 bp, Homo sapien
tgagattgaagagcaatgatactga

SEQ ID NO: 814893 - DNA, 25 bp, Homo sapien
cgtcgcaagtcaaccatgataaagc

SEQ ID NO: 814894 - DNA, 25 bp, Homo sapien
tcaatgccgtcgcaagtcaaccatg

SEQ ID NO: 814895 - DNA, 25 bp, Homo sapien
caagtcaaccatgataaagcatgca

SEQ ID NO: 814896 - DNA, 25 bp, Homo sapien
ccatgataaagcatgcacagtcatt

SEQ ID NO: 814897 - DNA, 25 bp, Homo sapien
tgtggccaccgggattcaggatcag

SEQ ID NO: 814898 - DNA, 25 bp, Homo sapien
gattcaggatcagaagatccaaacc

SEQ ID NO: 814899 - DNA, 25 bp, Homo sapien
ggatcagaagatccaaaccacagag

SEQ ID NO: 814900 - DNA, 25 bp, Homo sapien
gctccatgtggccaccgggattcag

SEQ ID NO: 814901 - DNA, 25 bp, Homo sapien
tctgctaattcatgaaattgaccca

SEQ ID NO: 814902 - DNA, 25 bp, Homo sapien
tcctctgctaattcatgaaattgac

SEQ ID NO: 814903 - DNA, 25 bp, Homo sapien
cctctgctaattcatgaaattgacc

SEQ ID NO: 814904 - DNA, 25 bp, Homo sapien
cctcctctgctaattcatgaaattg

SEQ ID NO: 814905 - DNA, 25 bp, Homo sapien
gaagaaaacttaagtctctctggac

SEQ ID NO: 814906 - DNA, 25 bp, Homo sapien
ctggacttgcataactctcttgaag

SEQ ID NO: 814907 - DNA, 25 bp, Homo sapien
ttgagttacgtcctgaaatctttga

SEQ ID NO: 814908 - DNA, 25 bp, Homo sapien
gctgagttgagttacgtcctgaaat

SEQ ID NO: 814909 - DNA, 25 bp, Homo sapien
gactgtgatgctaatgagctccata

SEQ ID NO: 814910 - DNA, 25 bp, Homo sapien
taatgagctccatataacggaatgc

SEQ ID NO: 814911 - DNA, 25 bp, Homo sapien
gggctttatgatagcagctgaagac

SEQ ID NO: 814912 - DNA, 25 bp, Homo sapien
gctgtagttgggctttatgatagca

SEQ ID NO: 814913 - DNA, 25 bp, Homo sapien
caaaagagtagaccatattgttgac

SEQ ID NO: 814914 - DNA, 25 bp, Homo sapien
gtttctacaacaaaagagtagacca

SEQ ID NO: 814915 - DNA, 25 bp, Homo sapien
tacaacaaaagagtagaccatattg

SEQ ID NO: 814916 - DNA, 25 bp, Homo sapien
aaagagtagaccatattgttgacag

SEQ ID NO: 814917 - DNA, 25 bp, Homo sapien
tagtgggtactatagactagcccag

SEQ ID NO: 814918 - DNA, 25 bp, Homo sapien
tgaggcccattcacactatcaagtg

SEQ ID NO: 814919 - DNA, 25 bp, Homo sapien
tcacggcaatacctagactaatgtt

SEQ ID NO: 814920 - DNA, 25 bp, Homo sapien
taaaccattatggtaggctagcaag

SEQ ID NO: 814921 - DNA, 25 bp, Homo sapien
ttgtctttcgataacaatccttgaa

SEQ ID NO: 814922 - DNA, 25 bp, Homo sapien
aatgattgtctttcgataacaatcc

SEQ ID NO: 814923 - DNA, 25 bp, Homo sapien
aaggcaaattaatgattgtctttcg

SEQ ID NO: 814924 - DNA, 25 bp, Homo sapien
aattaatgattgtctttcgataaca

SEQ ID NO: 814925 - DNA, 25 bp, Homo sapien
gttttaatggccacacaaggagcca

SEQ ID NO: 814926 - DNA, 25 bp, Homo sapien
tctgtggtggagacatagaatttct

SEQ ID NO: 814927 - DNA, 25 bp, Homo sapien
gtggtggagacatagaatttctcct

SEQ ID NO: 814928 - DNA, 25 bp, Homo sapien
ttttaatggccacacaaggagccat

SEQ ID NO: 814929 - DNA, 25 bp, Homo sapien
agttgctgctctccctttctttcct

SEQ ID NO: 814930 - DNA, 25 bp, Homo sapien
gctgctctccctttctttcctccat

SEQ ID NO: 814931 - DNA, 25 bp, Homo sapien
ctgggagttgctgctctccctttct

SEQ ID NO: 814932 - DNA, 25 bp, Homo sapien
ttgctgctctccctttctttcctcc

SEQ ID NO: 814933 - DNA, 25 bp, Homo sapien
tctcttttaggctgttggcgattat

SEQ ID NO: 814934 - DNA, 25 bp, Homo sapien
cttttaggctgttggcgattattcg

SEQ ID NO: 814935 - DNA, 25 bp, Homo sapien
gctgttggcgattattcgtttacca

SEQ ID NO: 814936 - DNA, 25 bp, Homo sapien
ggcgattattcgtttaccatttaca

SEQ ID NO: 814937 - DNA, 25 bp, Homo sapien
taataatgaattctggtcagtcaga

SEQ ID NO: 814938 - DNA, 25 bp, Homo sapien
gaattctggtcagtcagaggcttga

SEQ ID NO: 814939 - DNA, 25 bp, Homo sapien
taatgaattctggtcagtcagaggc

SEQ ID NO: 814940 - DNA, 25 bp, Homo sapien
tgtaataatgaattctggtcagtca

SEQ ID NO: 814941 - DNA, 25 bp, Homo sapien
cacagccttgcaaatagtagtttct

SEQ ID NO: 814942 - DNA, 25 bp, Homo sapien
aataacagtccttggaattacacag

SEQ ID NO: 814943 - DNA, 25 bp, Homo sapien
acatcatagcatccaagaataacag

SEQ ID NO: 814944 - DNA, 25 bp, Homo sapien
ttactcctcttcgtctagctccata

SEQ ID NO: 814945 - DNA, 25 bp, Homo sapien
tggatgtgagaatcccaggaagttg

SEQ ID NO: 814946 - DNA, 25 bp, Homo sapien
gagaagcccacttccgcacagtaat

SEQ ID NO: 814947 - DNA, 25 bp, Homo sapien
gcccacttccgcacagtaatggatg

SEQ ID NO: 814948 - DNA, 25 bp, Homo sapien
ccaaggtggtgagaatagacttttc

SEQ ID NO: 814949 - DNA, 25 bp, Homo sapien
ggcttgaagctagcttttagtgaaa

SEQ ID NO: 814950 - DNA, 25 bp, Homo sapien
tccaaagacgccatgaaaaggatca

SEQ ID NO: 814951 - DNA, 25 bp, Homo sapien
tttagtgaaatgttctttaaagcca

SEQ ID NO: 814952 - DNA, 25 bp, Homo sapien
caaagacgccatgaaaaggatcaac

SEQ ID NO: 814953 - DNA, 25 bp, Homo sapien
aaggatggatccacccaagacaaag

SEQ ID NO: 814954 - DNA, 25 bp, Homo sapien
tatccggtcataataagagtggtcc

SEQ ID NO: 814955 - DNA, 25 bp, Homo sapien
caaagccttgattaggaaacatggc

SEQ ID NO: 814956 - DNA, 25 bp, Homo sapien
tcataaaagttgaagcttgggtggc

SEQ ID NO: 814957 - DNA, 25 bp, Homo sapien
gatatcttttctctgttggttccca

SEQ ID NO: 814958 - DNA, 25 bp, Homo sapien
tatcttttctctgttggttcccaca

SEQ ID NO: 814959 - DNA, 25 bp, Homo sapien
agatatcttttctctgttggttccc

SEQ ID NO: 814960 - DNA, 25 bp, Homo sapien
cttttctctgttggttcccacaatt

SEQ ID NO: 814961 - DNA, 25 bp, Homo sapien
acacccagctgctgcccaggccagt

SEQ ID NO: 814962 - DNA, 25 bp, Homo sapien
cccagctgctgcccaggccagtgac

SEQ ID NO: 814963 - DNA, 25 bp, Homo sapien
tcagcccacacccagctgctgccca

SEQ ID NO: 814964 - DNA, 25 bp, Homo sapien
agcccacacccagctgctgcccagg

SEQ ID NO: 814965 - DNA, 25 bp, Homo sapien
attccccaagcatcccaacaaagct

SEQ ID NO: 814966 - DNA, 25 bp, Homo sapien
ttccccaagcatcccaacaaagctc

SEQ ID NO: 814967 - DNA, 25 bp, Homo sapien
ctattccccaagcatcccaacaaag

SEQ ID NO: 814968 - DNA, 25 bp, Homo sapien
tattccccaagcatcccaacaaagc

SEQ ID NO: 814969 - DNA, 25 bp, Homo sapien
agtccaagaatcaaagcagtcccag

SEQ ID NO: 814970 - DNA, 25 bp, Homo sapien
gcctctgggatttagttccctggga

SEQ ID NO: 814971 - DNA, 25 bp, Homo sapien
ggtccaactgctggatggtatcaaa

SEQ ID NO: 814972 - DNA, 25 bp, Homo sapien
aatgaacagtgcctccctgaagcca

SEQ ID NO: 814973 - DNA, 25 bp, Homo sapien
gaggcatgaatccagatacttttca

SEQ ID NO: 814974 - DNA, 25 bp, Homo sapien
ccagagaagagagggtaacatttat

SEQ ID NO: 814975 - DNA, 25 bp, Homo sapien
tccataggcgttttatatacatcca

SEQ ID NO: 814976 - DNA, 25 bp, Homo sapien
catttattgtagactcgccacattt

SEQ ID NO: 814977 - DNA, 25 bp, Homo sapien
gaaaaagtttgagaacttccagcca

SEQ ID NO: 814978 - DNA, 25 bp, Homo sapien
aatgaaaaagtttgagaacttccag

SEQ ID NO: 814979 - DNA, 25 bp, Homo sapien
aaaaagtttgagaacttccagccat

SEQ ID NO: 814980 - DNA, 25 bp, Homo sapien
tgaaaaagtttgagaacttccagcc

SEQ ID NO: 814981 - DNA, 25 bp, Homo sapien
cagttctaatgagctcaagctgacc

SEQ ID NO: 814982 - DNA, 25 bp, Homo sapien
taatgagctcaagctgacccagcca

SEQ ID NO: 814983 - DNA, 25 bp, Homo sapien
acccagccacccgaggttgtcattt

SEQ ID NO: 814984 - DNA, 25 bp, Homo sapien
gccacccgaggttgtcatttcctca

SEQ ID NO: 814985 - DNA, 25 bp, Homo sapien
caaggtagcatctagattccagact

SEQ ID NO: 814986 - DNA, 25 bp, Homo sapien
aatttctagggtgtgatctgcatcc

SEQ ID NO: 814987 - DNA, 25 bp, Homo sapien
cagcaaaagggagtgcaccaggtat

SEQ ID NO: 814988 - DNA, 25 bp, Homo sapien
caggtatttcataaagtaggcacac

SEQ ID NO: 814989 - DNA, 25 bp, Homo sapien
gactgtccttaacatgtcttccttc

SEQ ID NO: 814990 - DNA, 25 bp, Homo sapien
tgactgtccttaacatgtcttcctt

SEQ ID NO: 814991 - DNA, 25 bp, Homo sapien
ctctctgactgtccttaacatgtct

SEQ ID NO: 814992 - DNA, 25 bp, Homo sapien
tctgactgtccttaacatgtcttcc

SEQ ID NO: 814993 - DNA, 25 bp, Homo sapien
tgtctcttgatgcttctggatataa

SEQ ID NO: 814994 - DNA, 25 bp, Homo sapien
tcattccattctgggacgaactcct

SEQ ID NO: 814995 - DNA, 25 bp, Homo sapien
tccagctgtcgttgccacaggctct

SEQ ID NO: 814996 - DNA, 25 bp, Homo sapien
caattgtcatacaccaagaaatgag

SEQ ID NO: 814997 - DNA, 25 bp, Homo sapien
atgacccggattaaatccaaatgga

SEQ ID NO: 814998 - DNA, 25 bp, Homo sapien
caaatggattgaggtcatcaacttt

SEQ ID NO: 814999 - DNA, 25 bp, Homo sapien
aaatccaaatggattgaggtcatca

SEQ ID NO: 815000 - DNA, 25 bp, Homo sapien
atccaaatggattgaggtcatcaac

SEQ ID NO: 815001 - DNA, 25 bp, Homo sapien
tgatgtactcaatctgttcaaccat

SEQ ID NO: 815002 - DNA, 25 bp, Homo sapien
tctagtagaagtcaaaatagtgatg

SEQ ID NO: 815003 - DNA, 25 bp, Homo sapien
tagaagtcaaaatagtgatgtactc

SEQ ID NO: 815004 - DNA, 25 bp, Homo sapien
caaaatagtgatgtactcaatctgt

SEQ ID NO: 815005 - DNA, 25 bp, Homo sapien
ttcaatgcattgtcacagtggttca

SEQ ID NO: 815006 - DNA, 25 bp, Homo sapien
ttttcaatgcattgtcacagtggtt

SEQ ID NO: 815007 - DNA, 25 bp, Homo sapien
tttcaatgcattgtcacagtggttc

SEQ ID NO: 815008 - DNA, 25 bp, Homo sapien
gaccttactgggcttctcagtagtt

SEQ ID NO: 815009 - DNA, 25 bp, Homo sapien
gtagtttcgagctgaagggtgattc

SEQ ID NO: 815010 - DNA, 25 bp, Homo sapien
cagggtttgactgaacactgcttca

SEQ ID NO: 815011 - DNA, 25 bp, Homo sapien
cagagctccagggtttgactgaaca

SEQ ID NO: 815012 - DNA, 25 bp, Homo sapien
gttgttgttatgtgcacttactttg

SEQ ID NO: 815013 - DNA, 25 bp, Homo sapien
tgttgttatgtgcacttactttgtt

SEQ ID NO: 815014 - DNA, 25 bp, Homo sapien
ttgttgttatgtgcacttactttgt

SEQ ID NO: 815015 - DNA, 25 bp, Homo sapien
ttcctataggtgtctctgtagaaga

SEQ ID NO: 815016 - DNA, 25 bp, Homo sapien
ttgaaggattttcctataggtgtct

SEQ ID NO: 815017 - DNA, 25 bp, Homo sapien
tggaagaaagtattagatgaattgt

SEQ ID NO: 815018 - DNA, 25 bp, Homo sapien
aagtattagatgaattgtggtcaca

SEQ ID NO: 815019 - DNA, 25 bp, Homo sapien
tgataaccatagcaggcctgggcat

SEQ ID NO: 815020 - DNA, 25 bp, Homo sapien
taccaggctgataaccatagcaggc

SEQ ID NO: 815021 - DNA, 25 bp, Homo sapien
ggctgataaccatagcaggcctggg

SEQ ID NO: 815022 - DNA, 25 bp, Homo sapien
ttctaccaggctgataaccatagca

SEQ ID NO: 815023 - DNA, 25 bp, Homo sapien
cattttcccctctctgcggtcccca

SEQ ID NO: 815024 - DNA, 25 bp, Homo sapien
cccaccattaccatatccataggta

SEQ ID NO: 815025 - DNA, 25 bp, Homo sapien
gtggctggtaatggtcattcttttc

SEQ ID NO: 815026 - DNA, 25 bp, Homo sapien
cagtcctttagagatctcttgtaag

SEQ ID NO: 815027 - DNA, 25 bp, Homo sapien
taataaattccgttagcatttgcct

SEQ ID NO: 815028 - DNA, 25 bp, Homo sapien
gcagatctagtggtaataaattccg

SEQ ID NO: 815029 - DNA, 25 bp, Homo sapien
acacccggcctcatctcagaatttt

SEQ ID NO: 815030 - DNA, 25 bp, Homo sapien
tttgatggagtttttaggttgctgt

SEQ ID NO: 815031 - DNA, 25 bp, Homo sapien
ttaggttgctgtaaatataagagca

SEQ ID NO: 815032 - DNA, 25 bp, Homo sapien
gctgtaaatataagagcatgttctc

SEQ ID NO: 815033 - DNA, 25 bp, Homo sapien
aatggccatatctatgacaaatgat

SEQ ID NO: 815034 - DNA, 25 bp, Homo sapien
gccatatctatgacaaatgattctt

SEQ ID NO: 815035 - DNA, 25 bp, Homo sapien
tcaatggccatatctatgacaaatg

SEQ ID NO: 815036 - DNA, 25 bp, Homo sapien
tggccatatctatgacaaatgattc

SEQ ID NO: 815037 - DNA, 25 bp, Homo sapien
tctcttcatcatcaccttttctgct

SEQ ID NO: 815038 - DNA, 25 bp, Homo sapien
atttctcttcatcatcaccttttct

SEQ ID NO: 815039 - DNA, 25 bp, Homo sapien
catcatcaccttttctgctgtgtgt

SEQ ID NO: 815040 - DNA, 25 bp, Homo sapien
tcatcatcaccttttctgctgtgtg

SEQ ID NO: 815041 - DNA, 25 bp, Homo sapien
gactgcctcactcccagttggaaaa

SEQ ID NO: 815042 - DNA, 25 bp, Homo sapien
caattagctcacatagatggccacc

SEQ ID NO: 815043 - DNA, 25 bp, Homo sapien
tgggagactaactctggtgactgcc

SEQ ID NO: 815044 - DNA, 25 bp, Homo sapien
tggccaccacaattaccaggttaat

SEQ ID NO: 815045 - DNA, 25 bp, Homo sapien
catgggttcaaacttcctccttaag

SEQ ID NO: 815046 - DNA, 25 bp, Homo sapien
gttcctttggaagacgagaggcgct

SEQ ID NO: 815047 - DNA, 25 bp, Homo sapien
tttggaagacgagaggcgctctgat

SEQ ID NO: 815048 - DNA, 25 bp, Homo sapien
cagggtttttaatttctttgccatg

SEQ ID NO: 815049 - DNA, 25 bp, Homo sapien
aacagcttcccatagatagctgctg

SEQ ID NO: 815050 - DNA, 25 bp, Homo sapien
ttaggaacaatgtcccaaaacagct

SEQ ID NO: 815051 - DNA, 25 bp, Homo sapien
ttgggagcataatccttttaaactg

SEQ ID NO: 815052 - DNA, 25 bp, Homo sapien
tggcatttgggagcataatcctttt

SEQ ID NO: 815053 - DNA, 25 bp, Homo sapien
ttatgtctgtagggggtaaattgtc

SEQ ID NO: 815054 - DNA, 25 bp, Homo sapien
tgtatttgtctaccactctactcat

SEQ ID NO: 815055 - DNA, 25 bp, Homo sapien
catgctctattggtgagccccacaa

SEQ ID NO: 815056 - DNA, 25 bp, Homo sapien
gctccttctgactcctgtatttgtc

SEQ ID NO: 815057 - DNA, 25 bp, Homo sapien
gccccacaaagactgctccttctga

SEQ ID NO: 815058 - DNA, 25 bp, Homo sapien
aataaggagtattctgattccctgc

SEQ ID NO: 815059 - DNA, 25 bp, Homo sapien
tgattgactgggaaaattaagaggc

SEQ ID NO: 815060 - DNA, 25 bp, Homo sapien
aagaggcacaaaattgactttatct

SEQ ID NO: 815061 - DNA, 25 bp, Homo sapien
aatccactggtagggctagtgcctg

SEQ ID NO: 815062 - DNA, 25 bp, Homo sapien
tagtttatgtgttctctggttttca

SEQ ID NO: 815063 - DNA, 25 bp, Homo sapien
tcaggtgcagtgttgcccagcttga

SEQ ID NO: 815064 - DNA, 25 bp, Homo sapien
tcttcaggtgcagtgttgcccagct

SEQ ID NO: 815065 - DNA, 25 bp, Homo sapien
tctagtttatgtgttctctggtttt

SEQ ID NO: 815066 - DNA, 25 bp, Homo sapien
ctgtcacttcattccgatgggtcat

SEQ ID NO: 815067 - DNA, 25 bp, Homo sapien
cttatttccaccaggtataatgtgg

SEQ ID NO: 815068 - DNA, 25 bp, Homo sapien
tttccaccaggtataatgtggatga

SEQ ID NO: 815069 - DNA, 25 bp, Homo sapien
tatttccaccaggtataatgtggat

SEQ ID NO: 815070 - DNA, 25 bp, Homo sapien
ttccaccaggtataatgtggatgac

SEQ ID NO: 815071 - DNA, 25 bp, Homo sapien
tcttcatccaacgtgtctgatgtga

SEQ ID NO: 815072 - DNA, 25 bp, Homo sapien
tgacacaaagggatactccaaactt

SEQ ID NO: 815073 - DNA, 25 bp, Homo sapien
catccgattgccctaaatgatctat

SEQ ID NO: 815074 - DNA, 25 bp, Homo sapien
gttggtgcaataaacacctcatcat

SEQ ID NO: 815075 - DNA, 25 bp, Homo sapien
atggctgctcttaaacttgtcttct

SEQ ID NO: 815076 - DNA, 25 bp, Homo sapien
gattgcttggtatagtctcacagga

SEQ ID NO: 815077 - DNA, 25 bp, Homo sapien
tggatttagattgcttggtatagtc

SEQ ID NO: 815078 - DNA, 25 bp, Homo sapien
tggctgctcttaaacttgtcttctt

SEQ ID NO: 815079 - DNA, 25 bp, Homo sapien
catccaagtaattgtcctgtttcat

SEQ ID NO: 815080 - DNA, 25 bp, Homo sapien
cacatccaagtaattgtcctgtttc

SEQ ID NO: 815081 - DNA, 25 bp, Homo sapien
acatccaagtaattgtcctgtttca

SEQ ID NO: 815082 - DNA, 25 bp, Homo sapien
ccacatccaagtaattgtcctgttt

SEQ ID NO: 815083 - DNA, 25 bp, Homo sapien
gctgatgaagttagaaagtaagctc

SEQ ID NO: 815084 - DNA, 25 bp, Homo sapien
agatccacagcaacttgactcctga

SEQ ID NO: 815085 - DNA, 25 bp, Homo sapien
gatcatcttcttgtcttagctgcca

SEQ ID NO: 815086 - DNA, 25 bp, Homo sapien
tagctgccagaaagagttattgttc

SEQ ID NO: 815087 - DNA, 25 bp, Homo sapien
ttctgtggtagctttgtacaagttt

SEQ ID NO: 815088 - DNA, 25 bp, Homo sapien
tctgtggtagctttgtacaagttta

SEQ ID NO: 815089 - DNA, 25 bp, Homo sapien
gttctccaagtacccttggcaatta

SEQ ID NO: 815090 - DNA, 25 bp, Homo sapien
tacccttggcaattatgcaagataa

SEQ ID NO: 815091 - DNA, 25 bp, Homo sapien
ggcacactatcagcagtagaaagct

SEQ ID NO: 815092 - DNA, 25 bp, Homo sapien
ggcaaactggaatccagttctccaa

SEQ ID NO: 815093 - DNA, 25 bp, Homo sapien
tactcttctacattggctgatggtg

SEQ ID NO: 815094 - DNA, 25 bp, Homo sapien
cattggctgatggtgaaggcatcat

SEQ ID NO: 815095 - DNA, 25 bp, Homo sapien
tatactcttctacattggctgatgg

SEQ ID NO: 815096 - DNA, 25 bp, Homo sapien
ctcttctacattggctgatggtgaa

SEQ ID NO: 815097 - DNA, 25 bp, Homo sapien
ggtccaaatgctcatacagatttcc

SEQ ID NO: 815098 - DNA, 25 bp, Homo sapien
cataaaaggtccaaatgctcataca

SEQ ID NO: 815099 - DNA, 25 bp, Homo sapien
ccaaatgctcatacagatttccagt

SEQ ID NO: 815100 - DNA, 25 bp, Homo sapien
aaaggtccaaatgctcatacagatt

SEQ ID NO: 815101 - DNA, 25 bp, Homo sapien
catattgtcataaacgttagggtcc

SEQ ID NO: 815102 - DNA, 25 bp, Homo sapien
tgtttacatacctggccattgcaag

SEQ ID NO: 815103 - DNA, 25 bp, Homo sapien
ttttggttctatggctagctaggcc

SEQ ID NO: 815104 - DNA, 25 bp, Homo sapien
ggtttcagtactaagactctcccaa

SEQ ID NO: 815105 - DNA, 25 bp, Homo sapien
cgtgtgatctgtttcaatgactgca

SEQ ID NO: 815106 - DNA, 25 bp, Homo sapien
ccttttttcatgcgtgtgatctgtt

SEQ ID NO: 815107 - DNA, 25 bp, Homo sapien
catgcgtgtgatctgtttcaatgac

SEQ ID NO: 815108 - DNA, 25 bp, Homo sapien
tctgtttcaatgactgcactccaca

SEQ ID NO: 815109 - DNA, 25 bp, Homo sapien
caaatgcagtccaccaccacgttgt

SEQ ID NO: 815110 - DNA, 25 bp, Homo sapien
cagtccaccaccacgttgtctctga

SEQ ID NO: 815111 - DNA, 25 bp, Homo sapien
aatgcagtccaccaccacgttgtct

SEQ ID NO: 815112 - DNA, 25 bp, Homo sapien
gtccaccaccacgttgtctctgatg

SEQ ID NO: 815113 - DNA, 25 bp, Homo sapien
gccctggtgcaaccagttgctttgt

SEQ ID NO: 815114 - DNA, 25 bp, Homo sapien
tctctcataagagatatctccagaa

SEQ ID NO: 815115 - DNA, 25 bp, Homo sapien
ctttcccactctctcataagagata

SEQ ID NO: 815116 - DNA, 25 bp, Homo sapien
cctggtgcaaccagttgctttgtct

SEQ ID NO: 815117 - DNA, 25 bp, Homo sapien
tcgtaaactttccaataatcacaca

SEQ ID NO: 815118 - DNA, 25 bp, Homo sapien
ttgaacatttagcttgtccatgaaa

SEQ ID NO: 815119 - DNA, 25 bp, Homo sapien
ccttgaacatttagcttgtccatga

SEQ ID NO: 815120 - DNA, 25 bp, Homo sapien
tgctctttcgtaaactttccaataa

SEQ ID NO: 815121 - DNA, 25 bp, Homo sapien
tagaaaccctgatgtctgggcaaaa

SEQ ID NO: 815122 - DNA, 25 bp, Homo sapien
gaagtaccatttagaaaccctgatg

SEQ ID NO: 815123 - DNA, 25 bp, Homo sapien
tgtattagtgatattatcaagggaa

SEQ ID NO: 815124 - DNA, 25 bp, Homo sapien
cttcacatatttcgaatacaagtga

SEQ ID NO: 815125 - DNA, 25 bp, Homo sapien
agttggctctatgttaggactttca

SEQ ID NO: 815126 - DNA, 25 bp, Homo sapien
tcaggagttggctctatgttaggac

SEQ ID NO: 815127 - DNA, 25 bp, Homo sapien
aatcaggagttggctctatgttagg

SEQ ID NO: 815128 - DNA, 25 bp, Homo sapien
ggagttggctctatgttaggacttt

SEQ ID NO: 815129 - DNA, 25 bp, Homo sapien
cagactccagtgagaattgtcacca

SEQ ID NO: 815130 - DNA, 25 bp, Homo sapien
agactccagtgagaattgtcaccat

SEQ ID NO: 815131 - DNA, 25 bp, Homo sapien
ctccagtgagaattgtcaccatttt

SEQ ID NO: 815132 - DNA, 25 bp, Homo sapien
ccagtgagaattgtcaccattttcc

SEQ ID NO: 815133 - DNA, 25 bp, Homo sapien
tattctacccaaatcttgctcctcc

SEQ ID NO: 815134 - DNA, 25 bp, Homo sapien
atattctacccaaatcttgctcctc

SEQ ID NO: 815135 - DNA, 25 bp, Homo sapien
ctatttgtcctgctgatgtgacatc

SEQ ID NO: 815136 - DNA, 25 bp, Homo sapien
gctgatgtgacatctctaaataacc

SEQ ID NO: 815137 - DNA, 25 bp, Homo sapien
tgtcctgctgatgtgacatctctaa

SEQ ID NO: 815138 - DNA, 25 bp, Homo sapien
gatgtgacatctctaaataaccaca

SEQ ID NO: 815139 - DNA, 25 bp, Homo sapien
taattatgtggcagctttccacaga

SEQ ID NO: 815140 - DNA, 25 bp, Homo sapien
tttggcacaattacacggatagaag

SEQ ID NO: 815141 - DNA, 25 bp, Homo sapien
tcccaagagtctggtcctgaagact

SEQ ID NO: 815142 - DNA, 25 bp, Homo sapien
cagagtaagaagatcatgctgatcc

SEQ ID NO: 815143 - DNA, 25 bp, Homo sapien
cctctggcagcacgagctgatagga

SEQ ID NO: 815144 - DNA, 25 bp, Homo sapien
aagggttaggtgtgtatggacccat

SEQ ID NO: 815145 - DNA, 25 bp, Homo sapien
ggagatgccatgcatgtctttatgc

SEQ ID NO: 815146 - DNA, 25 bp, Homo sapien
tggaaagcccaaacgtgccagaact

SEQ ID NO: 815147 - DNA, 25 bp, Homo sapien
tcccgtagcatcaatgactgtctcc

SEQ ID NO: 815148 - DNA, 25 bp, Homo sapien
cacctggaccaggtgcaatctttct

SEQ ID NO: 815149 - DNA, 25 bp, Homo sapien
gagaatcttcgctttgaccacctgg

SEQ ID NO: 815150 - DNA, 25 bp, Homo sapien
tctttctattacagtttcccgtagc

SEQ ID NO: 815151 - DNA, 25 bp, Homo sapien
cctagcctcaatgttctttacaatt

SEQ ID NO: 815152 - DNA, 25 bp, Homo sapien
tttcttcctagcctcaatgttcttt

SEQ ID NO: 815153 - DNA, 25 bp, Homo sapien
tcttcctagcctcaatgttctttac

SEQ ID NO: 815154 - DNA, 25 bp, Homo sapien
ttcctagcctcaatgttctttacaa

SEQ ID NO: 815155 - DNA, 25 bp, Homo sapien
cattcattatgctaatgtttttctt

SEQ ID NO: 815156 - DNA, 25 bp, Homo sapien
ctttccattcattatgctaatgttt

SEQ ID NO: 815157 - DNA, 25 bp, Homo sapien
ttctttaatatcttaaatatgtcca

SEQ ID NO: 815158 - DNA, 25 bp, Homo sapien
tctttaatatcttaaatatgtccat

SEQ ID NO: 815159 - DNA, 25 bp, Homo sapien
gaatggaccctggctacgtttggct

SEQ ID NO: 815160 - DNA, 25 bp, Homo sapien
aatggaccctggctacgtttggctg

SEQ ID NO: 815161 - DNA, 25 bp, Homo sapien
atggaccctggctacgtttggctga

SEQ ID NO: 815162 - DNA, 25 bp, Homo sapien
aggcagattcctggcatggcttgaa

SEQ ID NO: 815163 - DNA, 25 bp, Homo sapien
gagagacacactgtgtccctgaaga

SEQ ID NO: 815164 - DNA, 25 bp, Homo sapien
tatgagagggacacgaacatcaggg

SEQ ID NO: 815165 - DNA, 25 bp, Homo sapien
gtttgatttagaagcccaatcagag

SEQ ID NO: 815166 - DNA, 25 bp, Homo sapien
aacatcagggtttgatttagaagcc

SEQ ID NO: 815167 - DNA, 25 bp, Homo sapien
ctgaaggcaaattcactcaacctct

SEQ ID NO: 815168 - DNA, 25 bp, Homo sapien
cctctctagtaagggacccatgggc

SEQ ID NO: 815169 - DNA, 25 bp, Homo sapien
ctacaatgtgcagagtggaaaccct

SEQ ID NO: 815170 - DNA, 25 bp, Homo sapien
tcaacctctctagtaagggacccat

SEQ ID NO: 815171 - DNA, 25 bp, Homo sapien
cacgaagcagcatctggaccactgt

SEQ ID NO: 815172 - DNA, 25 bp, Homo sapien
tcacgaagcagcatctggaccactg

SEQ ID NO: 815173 - DNA, 25 bp, Homo sapien
ttatcacgaagcagcatctggacca

SEQ ID NO: 815174 - DNA, 25 bp, Homo sapien
cgaagcagcatctggaccactgtta

SEQ ID NO: 815175 - DNA, 25 bp, Homo sapien
tcacaatcttcacccaagagtggaa

SEQ ID NO: 815176 - DNA, 25 bp, Homo sapien
acaatcttcacccaagagtggaatt

SEQ ID NO: 815177 - DNA, 25 bp, Homo sapien
attcacaatcttcacccaagagtgg

SEQ ID NO: 815178 - DNA, 25 bp, Homo sapien
aatcttcacccaagagtggaatttt

SEQ ID NO: 815179 - DNA, 25 bp, Homo sapien
tcatgctttctcccagtgtttctcc

SEQ ID NO: 815180 - DNA, 25 bp, Homo sapien
tctcccagtgtttctccctcaggct

SEQ ID NO: 815181 - DNA, 25 bp, Homo sapien
atgctttctcccagtgtttctccct

SEQ ID NO: 815182 - DNA, 25 bp, Homo sapien
tttctcccagtgtttctccctcagg

SEQ ID NO: 815183 - DNA, 25 bp, Homo sapien
ttcttcatgactggcacactgagtg

SEQ ID NO: 815184 - DNA, 25 bp, Homo sapien
tgagtgttactgtggtagctgtacc

SEQ ID NO: 815185 - DNA, 25 bp, Homo sapien
gtaccagctttgaagagacctgaat

SEQ ID NO: 815186 - DNA, 25 bp, Homo sapien
tcatgactggcacactgagtgttac

SEQ ID NO: 815187 - DNA, 25 bp, Homo sapien
ccagttttgtagtagttccagtcat

SEQ ID NO: 815188 - DNA, 25 bp, Homo sapien
tgtctcccagctggtgtgccaggcc

SEQ ID NO: 815189 - DNA, 25 bp, Homo sapien
tccagtcatgttcgcaggcagctgt

SEQ ID NO: 815190 - DNA, 25 bp, Homo sapien
gctccttccacaaacagttctggag

SEQ ID NO: 815191 - DNA, 25 bp, Homo sapien
aagcccttttagtgtgccagtgttc

SEQ ID NO: 815192 - DNA, 25 bp, Homo sapien
cacttgcaagcccttttagtgtgcc

SEQ ID NO: 815193 - DNA, 25 bp, Homo sapien
acttgcaagcccttttagtgtgcca

SEQ ID NO: 815194 - DNA, 25 bp, Homo sapien
tgcaagcccttttagtgtgccagtg

SEQ ID NO: 815195 - DNA, 25 bp, Homo sapien
cttgtttaaatcgcccaagatattt

SEQ ID NO: 815196 - DNA, 25 bp, Homo sapien
tgtttaaatcgcccaagatatttcc

SEQ ID NO: 815197 - DNA, 25 bp, Homo sapien
ttgtttaaatcgcccaagatatttc

SEQ ID NO: 815198 - DNA, 25 bp, Homo sapien
atgatatgatctttgatcatctggc

SEQ ID NO: 815199 - DNA, 25 bp, Homo sapien
tcttgttagctctatgataatgtac

SEQ ID NO: 815200 - DNA, 25 bp, Homo sapien
tgtattgcattgtcccttttatgat

SEQ ID NO: 815201 - DNA, 25 bp, Homo sapien
ggctagtttcatctctccgctcttc

SEQ ID NO: 815202 - DNA, 25 bp, Homo sapien
agaacaagggcgctatcattttgcc

SEQ ID NO: 815203 - DNA, 25 bp, Homo sapien
tgttgtgcctgagctatgttgttca

SEQ ID NO: 815204 - DNA, 25 bp, Homo sapien
tagttgttaactgttgtgcctgagc

SEQ ID NO: 815205 - DNA, 25 bp, Homo sapien
cccaatgataggtctgtttgacttg

SEQ ID NO: 815206 - DNA, 25 bp, Homo sapien
attttgtatttcaggttcttccact

SEQ ID NO: 815207 - DNA, 25 bp, Homo sapien
cattttgtatttcaggttcttccac

SEQ ID NO: 815208 - DNA, 25 bp, Homo sapien
gtcttctagtctgtccttgacatga

SEQ ID NO: 815209 - DNA, 25 bp, Homo sapien
tttaatgtgaggtcaagttgctgct

SEQ ID NO: 815210 - DNA, 25 bp, Homo sapien
ctcagacaatagactagtggtataa

SEQ ID NO: 815211 - DNA, 25 bp, Homo sapien
ccatctgtgttcctgaatataccat

SEQ ID NO: 815212 - DNA, 25 bp, Homo sapien
aaggaatagctgctactttttaatg

SEQ ID NO: 815213 - DNA, 25 bp, Homo sapien
agaatgtggatggtggacttatgga

SEQ ID NO: 815214 - DNA, 25 bp, Homo sapien
ttctttgggagttgcaaaagctgga

SEQ ID NO: 815215 - DNA, 25 bp, Homo sapien
tggtggacttatggaggtagagagg

SEQ ID NO: 815216 - DNA, 25 bp, Homo sapien
tttctttgggagttgcaaaagctgg

SEQ ID NO: 815217 - DNA, 25 bp, Homo sapien
ttctgagctctcagagttactggtg

SEQ ID NO: 815218 - DNA, 25 bp, Homo sapien
taaagacttgctctcttatcaccac

SEQ ID NO: 815219 - DNA, 25 bp, Homo sapien
cagagttactggtggtgtttcctta

SEQ ID NO: 815220 - DNA, 25 bp, Homo sapien
tgtttccttaaagacttgctctctt

SEQ ID NO: 815221 - DNA, 25 bp, Homo sapien
gcctgagtcattaatccaagtacaa

SEQ ID NO: 815222 - DNA, 25 bp, Homo sapien
tgagttgaggataagccaagttcct

SEQ ID NO: 815223 - DNA, 25 bp, Homo sapien
tgcccaggctgtacatttgccaata

SEQ ID NO: 815224 - DNA, 25 bp, Homo sapien
ttatttgctaacacaacaggctgac

SEQ ID NO: 815225 - DNA, 25 bp, Homo sapien
tcatttagagacttgtgtattcttg

SEQ ID NO: 815226 - DNA, 25 bp, Homo sapien
gagacttgtgtattcttgaccaaga

SEQ ID NO: 815227 - DNA, 25 bp, Homo sapien
tagagacttgtgtattcttgaccaa

SEQ ID NO: 815228 - DNA, 25 bp, Homo sapien
agacttgtgtattcttgaccaagaa

SEQ ID NO: 815229 - DNA, 25 bp, Homo sapien
tccaggtttggccgtgaccacttcc

SEQ ID NO: 815230 - DNA, 25 bp, Homo sapien
ctgtttccaggtttggccgtgacca

SEQ ID NO: 815231 - DNA, 25 bp, Homo sapien
tgtttccaggtttggccgtgaccac

SEQ ID NO: 815232 - DNA, 25 bp, Homo sapien
aggtttggccgtgaccacttccaga

SEQ ID NO: 815233 - DNA, 25 bp, Homo sapien
tgatggtgcagaccaagcgtcctgc

SEQ ID NO: 815234 - DNA, 25 bp, Homo sapien
tggtgggaatcaagaagtgagtgct

SEQ ID NO: 815235 - DNA, 25 bp, Homo sapien
gtgtggtgggaatcaagaagtgagt

SEQ ID NO: 815236 - DNA, 25 bp, Homo sapien
tgggaatcaagaagtgagtgctcac

SEQ ID NO: 815237 - DNA, 25 bp, Homo sapien
taatgaaatgaacaatgactttgtc

SEQ ID NO: 815238 - DNA, 25 bp, Homo sapien
ttggccatggctaccttacgaagga

SEQ ID NO: 815239 - DNA, 25 bp, Homo sapien
ggaaatgctagagcaccaggtccct

SEQ ID NO: 815240 - DNA, 25 bp, Homo sapien
caagacccaccaaaggctgtgtaag

SEQ ID NO: 815241 - DNA, 25 bp, Homo sapien
cagaagaaggcacgccgatggagat

SEQ ID NO: 815242 - DNA, 25 bp, Homo sapien
cataagaaccggcataatctataaa

SEQ ID NO: 815243 - DNA, 25 bp, Homo sapien
ggtgtttccataagaaccggcataa

SEQ ID NO: 815244 - DNA, 25 bp, Homo sapien
aaggtgtttccataagaaccggcat

SEQ ID NO: 815245 - DNA, 25 bp, Homo sapien
tttccataagaaccggcataatcta

SEQ ID NO: 815246 - DNA, 25 bp, Homo sapien
tggaaatcgctcaaggcctccagac

SEQ ID NO: 815247 - DNA, 25 bp, Homo sapien
agttgtggagacaccgcccatggta

SEQ ID NO: 815248 - DNA, 25 bp, Homo sapien
acaccgcccatggtagttgtgggca

SEQ ID NO: 815249 - DNA, 25 bp, Homo sapien
tgtgggcattgtggctatatggaaa

SEQ ID NO: 815250 - DNA, 25 bp, Homo sapien
tcactctgatccttctaaagtcttc

SEQ ID NO: 815251 - DNA, 25 bp, Homo sapien
gggaaagactcggatgaactgtgtt

SEQ ID NO: 815252 - DNA, 25 bp, Homo sapien
agactggaaagggttcacatatccg

SEQ ID NO: 815253 - DNA, 25 bp, Homo sapien
ggaaagggttcacatatccgtacat

SEQ ID NO: 815254 - DNA, 25 bp, Homo sapien
tgtgttgtctaaaaccgtaagagaa

SEQ ID NO: 815255 - DNA, 25 bp, Homo sapien
atatgttcaatatcgttgtgccttt

SEQ ID NO: 815256 - DNA, 25 bp, Homo sapien
tatgttcaatatcgttgtgcctttc

SEQ ID NO: 815257 - DNA, 25 bp, Homo sapien
gaatgtctgcactagcagcattcat

SEQ ID NO: 815258 - DNA, 25 bp, Homo sapien
aaacagaatgtctgcactagcagca

SEQ ID NO: 815259 - DNA, 25 bp, Homo sapien
cagaatgtctgcactagcagcattc

SEQ ID NO: 815260 - DNA, 25 bp, Homo sapien
ttcaaacagaatgtctgcactagca

SEQ ID NO: 815261 - DNA, 25 bp, Homo sapien
ggccactgaagcacgagacaacttt

SEQ ID NO: 815262 - DNA, 25 bp, Homo sapien
catctttccaactggccactgaagc

SEQ ID NO: 815263 - DNA, 25 bp, Homo sapien
cacgtaaatcccgaagtctgccagc

SEQ ID NO: 815264 - DNA, 25 bp, Homo sapien
ccagcaccaacctttcgctgccttc

SEQ ID NO: 815265 - DNA, 25 bp, Homo sapien
ccttcttcagtagcacgatggggaa

SEQ ID NO: 815266 - DNA, 25 bp, Homo sapien
gccgccctttgaatctccacgtaaa

SEQ ID NO: 815267 - DNA, 25 bp, Homo sapien
gagaaaaagggcagatgtaagagcc

SEQ ID NO: 815268 - DNA, 25 bp, Homo sapien
tcttttctgtcattgggttggggtc

SEQ ID NO: 815269 - DNA, 25 bp, Homo sapien
aagggcagatgtaagagcctgccaa

SEQ ID NO: 815270 - DNA, 25 bp, Homo sapien
gggaagtattgacaccccaagtctc

SEQ ID NO: 815271 - DNA, 25 bp, Homo sapien
aagcctttttcatgcttatagacaa

SEQ ID NO: 815272 - DNA, 25 bp, Homo sapien
tattttcaaagcctttttcatgctt

SEQ ID NO: 815273 - DNA, 25 bp, Homo sapien
ctttttcatgcttatagacaaggtg

SEQ ID NO: 815274 - DNA, 25 bp, Homo sapien
tttcatgcttatagacaaggtggcg

SEQ ID NO: 815275 - DNA, 25 bp, Homo sapien
tcatagagtttctccttcccacatt

SEQ ID NO: 815276 - DNA, 25 bp, Homo sapien
ttctctgataatcattgagggctga

SEQ ID NO: 815277 - DNA, 25 bp, Homo sapien
tctctgataatcattgagggctgac

SEQ ID NO: 815278 - DNA, 25 bp, Homo sapien
catgaaaagttttatctcgattagt

SEQ ID NO: 815279 - DNA, 25 bp, Homo sapien
gaaactctttgctaaaggcattccc

SEQ ID NO: 815280 - DNA, 25 bp, Homo sapien
tatgtaaagtgacatatgtgttcac

SEQ ID NO: 815281 - DNA, 25 bp, Homo sapien
tttatctcgattagtacattcatac

SEQ ID NO: 815282 - DNA, 25 bp, Homo sapien
acatgattctcctcctctcctattg

SEQ ID NO: 815283 - DNA, 25 bp, Homo sapien
aaacatgattctcctcctctcctat

SEQ ID NO: 815284 - DNA, 25 bp, Homo sapien
tagaaacatgattctcctcctctcc

SEQ ID NO: 815285 - DNA, 25 bp, Homo sapien
gattctcctcctctcctattgccat

SEQ ID NO: 815286 - DNA, 25 bp, Homo sapien
agcactttcatgagcttgggaagca

SEQ ID NO: 815287 - DNA, 25 bp, Homo sapien
aatattgccagcagcttccatgcca

SEQ ID NO: 815288 - DNA, 25 bp, Homo sapien
cagaaatattgccagcagcttccat

SEQ ID NO: 815289 - DNA, 25 bp, Homo sapien
ttgccagcagcttccatgccaatga

SEQ ID NO: 815290 - DNA, 25 bp, Homo sapien
tgttgctccccttaatttccctctc

SEQ ID NO: 815291 - DNA, 25 bp, Homo sapien
tttagattgttgcatcactgttgat

SEQ ID NO: 815292 - DNA, 25 bp, Homo sapien
cattcttgtacttgattaggctcct

SEQ ID NO: 815293 - DNA, 25 bp, Homo sapien
tcactgttgatatatcttcatcctg

SEQ ID NO: 815294 - DNA, 25 bp, Homo sapien
ccacttaaatgtagagagataaaaa

SEQ ID NO: 815295 - DNA, 25 bp, Homo sapien
tatcatttgtcttggtggcaactag

SEQ ID NO: 815296 - DNA, 25 bp, Homo sapien
gaagtgttcccataacctataggag

SEQ ID NO: 815297 - DNA, 25 bp, Homo sapien
taaatgtagagagataaaaagcaag

SEQ ID NO: 815298 - DNA, 25 bp, Homo sapien
gaatatcctgtaattagcctccatc

SEQ ID NO: 815299 - DNA, 25 bp, Homo sapien
tggctctccattaaggacacttaga

SEQ ID NO: 815300 - DNA, 25 bp, Homo sapien
tccaccaccctagagaatgccaata

SEQ ID NO: 815301 - DNA, 25 bp, Homo sapien
gtcaacagattacccactaacccag

SEQ ID NO: 815302 - DNA, 25 bp, Homo sapien
agccagccataaacattcaatgaag

SEQ ID NO: 815303 - DNA, 25 bp, Homo sapien
ctacccaagcttggctctgaagccg

SEQ ID NO: 815304 - DNA, 25 bp, Homo sapien
aagcagctgcctctttatcaggatt

SEQ ID NO: 815305 - DNA, 25 bp, Homo sapien
tctgaagccgctttcgcacttgata

SEQ ID NO: 815306 - DNA, 25 bp, Homo sapien
atttctcttataggctgtctgactg

SEQ ID NO: 815307 - DNA, 25 bp, Homo sapien
cactatttctcttataggctgtctg

SEQ ID NO: 815308 - DNA, 25 bp, Homo sapien
cttataggctgtctgactgtatttc

SEQ ID NO: 815309 - DNA, 25 bp, Homo sapien
tctcttataggctgtctgactgtat

SEQ ID NO: 815310 - DNA, 25 bp, Homo sapien
tgtcagttttataagtcccacagga

SEQ ID NO: 815311 - DNA, 25 bp, Homo sapien
ccagatgtcagctcttcccctatca

SEQ ID NO: 815312 - DNA, 25 bp, Homo sapien
acaggatctgtgctgccagatgtca

SEQ ID NO: 815313 - DNA, 25 bp, Homo sapien
ttttataagtcccacaggatctgtg

SEQ ID NO: 815314 - DNA, 25 bp, Homo sapien
tcattgggtgtcaaatgcaaagcaa

SEQ ID NO: 815315 - DNA, 25 bp, Homo sapien
catcattgggtgtcaaatgcaaagc

SEQ ID NO: 815316 - DNA, 25 bp, Homo sapien
cataacatcattgggtgtcaaatgc

SEQ ID NO: 815317 - DNA, 25 bp, Homo sapien
actttttcataacatcattgggtgt

SEQ ID NO: 815318 - DNA, 25 bp, Homo sapien
aagaggtcacagtaagttccacaga

SEQ ID NO: 815319 - DNA, 25 bp, Homo sapien
aggtcacagtaagttccacagatgc

SEQ ID NO: 815320 - DNA, 25 bp, Homo sapien
taagaggtcacagtaagttccacag

SEQ ID NO: 815321 - DNA, 25 bp, Homo sapien
ttctaagaggtcacagtaagttcca

SEQ ID NO: 815322 - DNA, 25 bp, Homo sapien
cctcaataaactccgagagaggttt

SEQ ID NO: 815323 - DNA, 25 bp, Homo sapien
tccactgtgtagtctggtattaggg

SEQ ID NO: 815324 - DNA, 25 bp, Homo sapien
gcagtaatagagcatagtcacctca

SEQ ID NO: 815325 - DNA, 25 bp, Homo sapien
gagaggtttctgactcattggtgtc

SEQ ID NO: 815326 - DNA, 25 bp, Homo sapien
tgtgactttactagctaggttcttc

SEQ ID NO: 815327 - DNA, 25 bp, Homo sapien
catgggcagcatagctccagttgga

SEQ ID NO: 815328 - DNA, 25 bp, Homo sapien
caactgagatcggtgcatgggcagc

SEQ ID NO: 815329 - DNA, 25 bp, Homo sapien
gtgtaatgcaggctcccattgccag

SEQ ID NO: 815330 - DNA, 25 bp, Homo sapien
ggttaaactccagccatgttctggg

SEQ ID NO: 815331 - DNA, 25 bp, Homo sapien
cttccttaattatcagattacagtg

SEQ ID NO: 815332 - DNA, 25 bp, Homo sapien
tcttccttaattatcagattacagt

SEQ ID NO: 815333 - DNA, 25 bp, Homo sapien
ctcttccttaattatcagattacag

SEQ ID NO: 815334 - DNA, 25 bp, Homo sapien
tttcctttcgttgctccactgagct

SEQ ID NO: 815335 - DNA, 25 bp, Homo sapien
cttctttatcagggggatttaccat

SEQ ID NO: 815336 - DNA, 25 bp, Homo sapien
tcttctttatcagggggatttacca

SEQ ID NO: 815337 - DNA, 25 bp, Homo sapien
agatgttcacgtatttccatttgtc

SEQ ID NO: 815338 - DNA, 25 bp, Homo sapien
gatgttcacgtatttccatttgtct

SEQ ID NO: 815339 - DNA, 25 bp, Homo sapien
cagagatgttcacgtatttccattt

SEQ ID NO: 815340 - DNA, 25 bp, Homo sapien
gagatgttcacgtatttccatttgt

SEQ ID NO: 815341 - DNA, 25 bp, Homo sapien
tggcctgaaccatagttattagtca

SEQ ID NO: 815342 - DNA, 25 bp, Homo sapien
ttgaagaactggcctgaaccatagt

SEQ ID NO: 815343 - DNA, 25 bp, Homo sapien
gaactggcctgaaccatagttatta

SEQ ID NO: 815344 - DNA, 25 bp, Homo sapien
gaagaactggcctgaaccatagtta

SEQ ID NO: 815345 - DNA, 25 bp, Homo sapien
tgaagttgacagacaggtactgaag

SEQ ID NO: 815346 - DNA, 25 bp, Homo sapien
acttggtgtcacattgattgcttcc

SEQ ID NO: 815347 - DNA, 25 bp, Homo sapien
ccatttacttggtgtcacattgatt

SEQ ID NO: 815348 - DNA, 25 bp, Homo sapien
tccttcactctgaagttgacagaca

SEQ ID NO: 815349 - DNA, 25 bp, Homo sapien
ttagtgccaaaagctatgtcagtct

SEQ ID NO: 815350 - DNA, 25 bp, Homo sapien
ttctgtacccctggatccactttag

SEQ ID NO: 815351 - DNA, 25 bp, Homo sapien
aaagctatgtcagtctgggtttgtt

SEQ ID NO: 815352 - DNA, 25 bp, Homo sapien
ttaatattctgtacccctggatcca

SEQ ID NO: 815353 - DNA, 25 bp, Homo sapien
catcccagccctcgcatctctgcag

SEQ ID NO: 815354 - DNA, 25 bp, Homo sapien
tgcatcccagccctcgcatctctgc

SEQ ID NO: 815355 - DNA, 25 bp, Homo sapien
gcatcccagccctcgcatctctgca

SEQ ID NO: 815356 - DNA, 25 bp, Homo sapien
ctgcatcccagccctcgcatctctg

SEQ ID NO: 815357 - DNA, 25 bp, Homo sapien
ttcatcatctccacaagttttgttg

SEQ ID NO: 815358 - DNA, 25 bp, Homo sapien
gcttaaactatagtattttgcctgc

SEQ ID NO: 815359 - DNA, 25 bp, Homo sapien
tcatgggcttctattttgcttaaac

SEQ ID NO: 815360 - DNA, 25 bp, Homo sapien
taagactcgcaatttcatgggcttc

SEQ ID NO: 815361 - DNA, 25 bp, Homo sapien
ggaagcaggtttaagactcgcaatt

SEQ ID NO: 815362 - DNA, 25 bp, Homo sapien
tacaaaaggtgttattcataatacc

SEQ ID NO: 815363 - DNA, 25 bp, Homo sapien
gcttgctaacttgggcttcagctgt

SEQ ID NO: 815364 - DNA, 25 bp, Homo sapien
gctgtgctctttgagagtgtgatcc

SEQ ID NO: 815365 - DNA, 25 bp, Homo sapien
gatgttgtgcatgaacaaagtgctg

SEQ ID NO: 815366 - DNA, 25 bp, Homo sapien
gggttgatggcaagaacacagatct

SEQ ID NO: 815367 - DNA, 25 bp, Homo sapien
cactgggtgtgggtccaggattcgg

SEQ ID NO: 815368 - DNA, 25 bp, Homo sapien
atctagctgcagtggccgtagacac

SEQ ID NO: 815369 - DNA, 25 bp, Homo sapien
tccaggattcggtgttggtaagaac

SEQ ID NO: 815370 - DNA, 25 bp, Homo sapien
gctgtggccacaattagtcaatccc

SEQ ID NO: 815371 - DNA, 25 bp, Homo sapien
cagcatggacaactctccatgaact

SEQ ID NO: 815372 - DNA, 25 bp, Homo sapien
ccttgtttcaggttctactgaggga

SEQ ID NO: 815373 - DNA, 25 bp, Homo sapien
gctgaatccttgtctatctggaggg

SEQ ID NO: 815374 - DNA, 25 bp, Homo sapien
tcactttgtcgctttcttccaggaa

SEQ ID NO: 815375 - DNA, 25 bp, Homo sapien
cacagcactcacaattttctgtagc

SEQ ID NO: 815376 - DNA, 25 bp, Homo sapien
taagacatccggattcactttgtcg

SEQ ID NO: 815377 - DNA, 25 bp, Homo sapien
tagcaatttcactttgccaagctgt

SEQ ID NO: 815378 - DNA, 25 bp, Homo sapien
cttcctgacagactgccccagaaag

SEQ ID NO: 815379 - DNA, 25 bp, Homo sapien
tgctcctttgactctccttattcat

SEQ ID NO: 815380 - DNA, 25 bp, Homo sapien
gactgccccagaaaggtctgctcct

SEQ ID NO: 815381 - DNA, 25 bp, Homo sapien
aaaggtctgctcctttgactctcct

SEQ ID NO: 815382 - DNA, 25 bp, Homo sapien
aaaaaggtgagcaaacggctgccag

SEQ ID NO: 815383 - DNA, 25 bp, Homo sapien
gcagctgtaaccacatcagatatgg

SEQ ID NO: 815384 - DNA, 25 bp, Homo sapien
ggtaactccttaagcatcttggcag

SEQ ID NO: 815385 - DNA, 25 bp, Homo sapien
caggctcggatcaagcaaaaaggtg

SEQ ID NO: 815386 - DNA, 25 bp, Homo sapien
gttgcgaggccacatggatcttgtt

SEQ ID NO: 815387 - DNA, 25 bp, Homo sapien
tttcttcttttacagttgcgaggcc

SEQ ID NO: 815388 - DNA, 25 bp, Homo sapien
tggaggatgccttgcagctacattt

SEQ ID NO: 815389 - DNA, 25 bp, Homo sapien
tgttgtactggtagcttgtagctcc

SEQ ID NO: 815390 - DNA, 25 bp, Homo sapien
cacaatcttctccagtctaacatca

SEQ ID NO: 815391 - DNA, 25 bp, Homo sapien
cagtgtatggattaggagtcttatc

SEQ ID NO: 815392 - DNA, 25 bp, Homo sapien
cagtaatctttgttggcattaaagc

SEQ ID NO: 815393 - DNA, 25 bp, Homo sapien
cattcagtgtatggattaggagtct

SEQ ID NO: 815394 - DNA, 25 bp, Homo sapien
tggtctgttgattagaaactcctcc

SEQ ID NO: 815395 - DNA, 25 bp, Homo sapien
gtaacccaagccatagttgacggca

SEQ ID NO: 815396 - DNA, 25 bp, Homo sapien
catgtgaccataaagagacctagac

SEQ ID NO: 815397 - DNA, 25 bp, Homo sapien
ttcttcctccggctggaactaggag

SEQ ID NO: 815398 - DNA, 25 bp, Homo sapien
cctcttgctcctgctagaccctcag

SEQ ID NO: 815399 - DNA, 25 bp, Homo sapien
ttcaccctcacgtcctcttggcaca

SEQ ID NO: 815400 - DNA, 25 bp, Homo sapien
agcatcctgcgggtctgttttcttc

SEQ ID NO: 815401 - DNA, 25 bp, Homo sapien
gaccctcagcatcctgcgggtctgt

SEQ ID NO: 815402 - DNA, 25 bp, Homo sapien
ccatccccatcttgaaaggctcgaa

SEQ ID NO: 815403 - DNA, 25 bp, Homo sapien
cccatcttgaaaggctcgaacagct

SEQ ID NO: 815404 - DNA, 25 bp, Homo sapien
catccccatcttgaaaggctcgaac

SEQ ID NO: 815405 - DNA, 25 bp, Homo sapien
tccccatcttgaaaggctcgaacag

SEQ ID NO: 815406 - DNA, 25 bp, Homo sapien
gactgagcaacattcaggggctctg

SEQ ID NO: 815407 - DNA, 25 bp, Homo sapien
aacattcaggggctctgcatgcctc

SEQ ID NO: 815408 - DNA, 25 bp, Homo sapien
tagaagacaagaatgagctggatac

SEQ ID NO: 815409 - DNA, 25 bp, Homo sapien
tggatacggactgccaggagagact

SEQ ID NO: 815410 - DNA, 25 bp, Homo sapien
gctggcgtcccatgggaccagctgc

SEQ ID NO: 815411 - DNA, 25 bp, Homo sapien
cgtcccatgggaccagctgcattgg

SEQ ID NO: 815412 - DNA, 25 bp, Homo sapien
ttgatggagctatgcttggcaggaa

SEQ ID NO: 815413 - DNA, 25 bp, Homo sapien
gctcctttgatggagctatgcttgg

SEQ ID NO: 815414 - DNA, 25 bp, Homo sapien
ctttcacgtggatgatgatcattca

SEQ ID NO: 815415 - DNA, 25 bp, Homo sapien
tctttcacgtggatgatgatcattc

SEQ ID NO: 815416 - DNA, 25 bp, Homo sapien
tagttggacagcattcctgacactt

SEQ ID NO: 815417 - DNA, 25 bp, Homo sapien
tcacaagaacacttagaggtaagct

SEQ ID NO: 815418 - DNA, 25 bp, Homo sapien
tcaatgcacataggttcacaagaac

SEQ ID NO: 815419 - DNA, 25 bp, Homo sapien
ttcccagcagtcctcacaaatgtaa

SEQ ID NO: 815420 - DNA, 25 bp, Homo sapien
tcctcttccatcctcgccaatctct

SEQ ID NO: 815421 - DNA, 25 bp, Homo sapien
ctgctgatggggattctttaccatc

SEQ ID NO: 815422 - DNA, 25 bp, Homo sapien
tgctgatggggattctttaccatct

SEQ ID NO: 815423 - DNA, 25 bp, Homo sapien
tccatcctcgccaatctctgctctc

SEQ ID NO: 815424 - DNA, 25 bp, Homo sapien
cctgacatccagttccgtcttcgag

SEQ ID NO: 815425 - DNA, 25 bp, Homo sapien
ccctgacatccagttccgtcttcga

SEQ ID NO: 815426 - DNA, 25 bp, Homo sapien
tgacatccagttccgtcttcgagtc

SEQ ID NO: 815427 - DNA, 25 bp, Homo sapien
ttccctgacatccagttccgtcttc

SEQ ID NO: 815428 - DNA, 25 bp, Homo sapien
tggtgtaaattaagaacggcagtta

SEQ ID NO: 815429 - DNA, 25 bp, Homo sapien
aattaagaacggcagttatagctct

SEQ ID NO: 815430 - DNA, 25 bp, Homo sapien
cggcagttatagctctgaccactcg

SEQ ID NO: 815431 - DNA, 25 bp, Homo sapien
ttctggtgtaaattaagaacggcag

SEQ ID NO: 815432 - DNA, 25 bp, Homo sapien
ggtagggaaatggattggtgacagt

SEQ ID NO: 815433 - DNA, 25 bp, Homo sapien
gtagggaaatggattggtgacagtt

SEQ ID NO: 815434 - DNA, 25 bp, Homo sapien
tagggaaatggattggtgacagttt

SEQ ID NO: 815435 - DNA, 25 bp, Homo sapien
tggtagggaaatggattggtgacag

SEQ ID NO: 815436 - DNA, 25 bp, Homo sapien
tgttgctgcacgcatatcttgttcc

SEQ ID NO: 815437 - DNA, 25 bp, Homo sapien
tacagtaggttgagcgtggccagaa

SEQ ID NO: 815438 - DNA, 25 bp, Homo sapien
tcaaatgccaggtagcactggatac

SEQ ID NO: 815439 - DNA, 25 bp, Homo sapien
gacttcatccataggcagggcaggt

SEQ ID NO: 815440 - DNA, 25 bp, Homo sapien
tggattaatttcaagacgtttcata

SEQ ID NO: 815441 - DNA, 25 bp, Homo sapien
taatttcaagacgtttcatataatc

SEQ ID NO: 815442 - DNA, 25 bp, Homo sapien
gattaatttcaagacgtttcatata

SEQ ID NO: 815443 - DNA, 25 bp, Homo sapien
tttggattaatttcaagacgtttca

SEQ ID NO: 815444 - DNA, 25 bp, Homo sapien
cagcttgtccctggaatgggtcagt

SEQ ID NO: 815445 - DNA, 25 bp, Homo sapien
agcttgtccctggaatgggtcagtg

SEQ ID NO: 815446 - DNA, 25 bp, Homo sapien
gcttgtccctggaatgggtcagtgt

SEQ ID NO: 815447 - DNA, 25 bp, Homo sapien
catagaactgaagacaagtttgccg

SEQ ID NO: 815448 - DNA, 25 bp, Homo sapien
aagtttgccgtggttgcctgcttca

SEQ ID NO: 815449 - DNA, 25 bp, Homo sapien
tgtaaccaactccagatcctcatgg

SEQ ID NO: 815450 - DNA, 25 bp, Homo sapien
ggaagacttgatgattggtacatag

SEQ ID NO: 815451 - DNA, 25 bp, Homo sapien
atatcttaggtacaagggaatctgc

SEQ ID NO: 815452 - DNA, 25 bp, Homo sapien
tcttaggtacaagggaatctgccta

SEQ ID NO: 815453 - DNA, 25 bp, Homo sapien
ctgcaatatcttaggtacaagggaa

SEQ ID NO: 815454 - DNA, 25 bp, Homo sapien
atgtctgtgttttatgaaatgcact

SEQ ID NO: 815455 - DNA, 25 bp, Homo sapien
caaattgtcgtttctggtttcctgt

SEQ ID NO: 815456 - DNA, 25 bp, Homo sapien
catacaaattgtcgtttctggtttc

SEQ ID NO: 815457 - DNA, 25 bp, Homo sapien
tcatacaaattgtcgtttctggttt

SEQ ID NO: 815458 - DNA, 25 bp, Homo sapien
acaaattgtcgtttctggtttcctg

SEQ ID NO: 815459 - DNA, 25 bp, Homo sapien
ttctatttcccgctgaccatcaaga

SEQ ID NO: 815460 - DNA, 25 bp, Homo sapien
ttgattggctgaaagtgggcctgcc

SEQ ID NO: 815461 - DNA, 25 bp, Homo sapien
caacctcttcttttaggcaagctgt

SEQ ID NO: 815462 - DNA, 25 bp, Homo sapien
tcaagatacattgtcaacccaacct

SEQ ID NO: 815463 - DNA, 25 bp, Homo sapien
ttctctttggctgcttttcttttga

SEQ ID NO: 815464 - DNA, 25 bp, Homo sapien
gcttttcttttgaaaaatcagacat

SEQ ID NO: 815465 - DNA, 25 bp, Homo sapien
tgcttttcttttgaaaaatcagaca

SEQ ID NO: 815466 - DNA, 25 bp, Homo sapien
tctttggctgcttttcttttgaaaa

SEQ ID NO: 815467 - DNA, 25 bp, Homo sapien
cctgtggcactatgacttgaatgtt

SEQ ID NO: 815468 - DNA, 25 bp, Homo sapien
tgtggcactatgacttgaatgttga

SEQ ID NO: 815469 - DNA, 25 bp, Homo sapien
ctgtggcactatgacttgaatgttg

SEQ ID NO: 815470 - DNA, 25 bp, Homo sapien
tcctcagttccgctacaccttttaa

SEQ ID NO: 815471 - DNA, 25 bp, Homo sapien
ttatcaacccagcaaacttccgctt

SEQ ID NO: 815472 - DNA, 25 bp, Homo sapien
tatagccttacatagaacactgtaa

SEQ ID NO: 815473 - DNA, 25 bp, Homo sapien
ccttttaacaactccactatagcct

SEQ ID NO: 815474 - DNA, 25 bp, Homo sapien
caaaatcgggtaacagactgtgaaa

SEQ ID NO: 815475 - DNA, 25 bp, Homo sapien
gatctccactggtcatttctagacg

SEQ ID NO: 815476 - DNA, 25 bp, Homo sapien
ttctagacgtctctgtctataagca

SEQ ID NO: 815477 - DNA, 25 bp, Homo sapien
cagcaatgtcagagagatttggcac

SEQ ID NO: 815478 - DNA, 25 bp, Homo sapien
taatgtaatagttgcccaaataaga

SEQ ID NO: 815479 - DNA, 25 bp, Homo sapien
gacgtcccaggagcgctatatccgc

SEQ ID NO: 815480 - DNA, 25 bp, Homo sapien
cgcctaatgacccagtgccttcagg

SEQ ID NO: 815481 - DNA, 25 bp, Homo sapien
gaacacagtacagtcttcgatacct

SEQ ID NO: 815482 - DNA, 25 bp, Homo sapien
gtcatcaactgtcttacaaattctt

SEQ ID NO: 815483 - DNA, 25 bp, Homo sapien
tgatcctagtcatcaactgtcttac

SEQ ID NO: 815484 - DNA, 25 bp, Homo sapien
cctagtcatcaactgtcttacaaat

SEQ ID NO: 815485 - DNA, 25 bp, Homo sapien
tttacattccataatgatcctagtc

SEQ ID NO: 815486 - DNA, 25 bp, Homo sapien
cctggacagttgcttggatcttgtg

SEQ ID NO: 815487 - DNA, 25 bp, Homo sapien
gacagttgcttggatcttgtgccat

SEQ ID NO: 815488 - DNA, 25 bp, Homo sapien
aaagagaagccaaatgccccctgtg

SEQ ID NO: 815489 - DNA, 25 bp, Homo sapien
tggacagttgcttggatcttgtgcc

SEQ ID NO: 815490 - DNA, 25 bp, Homo sapien
ctcttagagttggcgttggtgtgct

SEQ ID NO: 815491 - DNA, 25 bp, Homo sapien
gagttggcgttggtgtgctttgtct

SEQ ID NO: 815492 - DNA, 25 bp, Homo sapien
ttagagttggcgttggtgtgctttg

SEQ ID NO: 815493 - DNA, 25 bp, Homo sapien
tcttagagttggcgttggtgtgctt

SEQ ID NO: 815494 - DNA, 25 bp, Homo sapien
tcttctgaattatactgcatttctg

SEQ ID NO: 815495 - DNA, 25 bp, Homo sapien
cccctttatcactggctccttctaa

SEQ ID NO: 815496 - DNA, 25 bp, Homo sapien
tctgaattatactgcatttctgtct

SEQ ID NO: 815497 - DNA, 25 bp, Homo sapien
tcactggctccttctaactcctgtg

SEQ ID NO: 815498 - DNA, 25 bp, Homo sapien
tagctggaactaggaactacaggca

SEQ ID NO: 815499 - DNA, 25 bp, Homo sapien
ggaacatctctcctcaattcaacat

SEQ ID NO: 815500 - DNA, 25 bp, Homo sapien
aaatggaagaaatcacctagcagag

SEQ ID NO: 815501 - DNA, 25 bp, Homo sapien
ggaagaaatcacctagcagagagag

SEQ ID NO: 815502 - DNA, 25 bp, Homo sapien
tgaaggtgatcatcatggacacagt

SEQ ID NO: 815503 - DNA, 25 bp, Homo sapien
ccccgtggtcacatctgggttgaag

SEQ ID NO: 815504 - DNA, 25 bp, Homo sapien
agtggttacactgtttatttccaga

SEQ ID NO: 815505 - DNA, 25 bp, Homo sapien
taggacacaaaaaccggtatgtcaa

SEQ ID NO: 815506 - DNA, 25 bp, Homo sapien
ttctgcatactggaagttgtagttg

SEQ ID NO: 815507 - DNA, 25 bp, Homo sapien
tgtcgtttgccactatccattccct

SEQ ID NO: 815508 - DNA, 25 bp, Homo sapien
ctgccattctgcatactggaagttg

SEQ ID NO: 815509 - DNA, 25 bp, Homo sapien
cttccacaatgtcgtttgccactat

SEQ ID NO: 815510 - DNA, 25 bp, Homo sapien
gccttcaggggatttggtttctgaa

SEQ ID NO: 815511 - DNA, 25 bp, Homo sapien
ctgccttcaggggatttggtttctg

SEQ ID NO: 815512 - DNA, 25 bp, Homo sapien
tgccttcaggggatttggtttctga

SEQ ID NO: 815513 - DNA, 25 bp, Homo sapien
gctgccttcaggggatttggtttct

SEQ ID NO: 815514 - DNA, 25 bp, Homo sapien
tcatgtctgaattacctgagagaaa

SEQ ID NO: 815515 - DNA, 25 bp, Homo sapien
gatctaggacctatccacatgacag

SEQ ID NO: 815516 - DNA, 25 bp, Homo sapien
tcaccctttgagatacagatctagg

SEQ ID NO: 815517 - DNA, 25 bp, Homo sapien
tggtcaaccagctgatctactacct

SEQ ID NO: 815518 - DNA, 25 bp, Homo sapien
tgtgtctgggagagacttattaagc

SEQ ID NO: 815519 - DNA, 25 bp, Homo sapien
acatgaagatgacggtttggcccca

SEQ ID NO: 815520 - DNA, 25 bp, Homo sapien
gacccatgcaaatttcgtccacaca

SEQ ID NO: 815521 - DNA, 25 bp, Homo sapien
tcagctgtgggaaccacatagctat

SEQ ID NO: 815522 - DNA, 25 bp, Homo sapien
ttagcctgattttccctggtccagg

SEQ ID NO: 815523 - DNA, 25 bp, Homo sapien
cttagcctgattttccctggtccag

SEQ ID NO: 815524 - DNA, 25 bp, Homo sapien
tagcctgattttccctggtccaggg

SEQ ID NO: 815525 - DNA, 25 bp, Homo sapien
taacatatattggatcttatagcaa

SEQ ID NO: 815526 - DNA, 25 bp, Homo sapien
ctgtaacatatattggatcttatag

SEQ ID NO: 815527 - DNA, 25 bp, Homo sapien
gtaacatatattggatcttatagca

SEQ ID NO: 815528 - DNA, 25 bp, Homo sapien
aacatatattggatcttatagcaac

SEQ ID NO: 815529 - DNA, 25 bp, Homo sapien
caaaataggaatataggcacaagct

SEQ ID NO: 815530 - DNA, 25 bp, Homo sapien
tgactgccttttgggtgggctcctg

SEQ ID NO: 815531 - DNA, 25 bp, Homo sapien
gaatcttaatcgaaccaccatcttg

SEQ ID NO: 815532 - DNA, 25 bp, Homo sapien
ccaacagagtgaaccactgaagtga

SEQ ID NO: 815533 - DNA, 25 bp, Homo sapien
ttgttcaccagtgttccagccgcta

SEQ ID NO: 815534 - DNA, 25 bp, Homo sapien
tgttccagccgctaattctgtttcc

SEQ ID NO: 815535 - DNA, 25 bp, Homo sapien
gttcaccagtgttccagccgctaat

SEQ ID NO: 815536 - DNA, 25 bp, Homo sapien
accagtgttccagccgctaattctg

SEQ ID NO: 815537 - DNA, 25 bp, Homo sapien
tggttctggaaaagtgggctccagt

SEQ ID NO: 815538 - DNA, 25 bp, Homo sapien
aagtgggctccagtaatatgctgcc

SEQ ID NO: 815539 - DNA, 25 bp, Homo sapien
gaaaagtgggctccagtaatatgct

SEQ ID NO: 815540 - DNA, 25 bp, Homo sapien
ttctggaaaagtgggctccagtaat

SEQ ID NO: 815541 - DNA, 25 bp, Homo sapien
tttaggagacttgtctggatctttg

SEQ ID NO: 815542 - DNA, 25 bp, Homo sapien
ttgtgagcctggcttaatgagggct

SEQ ID NO: 815543 - DNA, 25 bp, Homo sapien
tttctgctgaatgggtattttctct

SEQ ID NO: 815544 - DNA, 25 bp, Homo sapien
gctgaatgggtattttctctgacat

SEQ ID NO: 815545 - DNA, 25 bp, Homo sapien
ggccatttggtgtgccctgatgcca

SEQ ID NO: 815546 - DNA, 25 bp, Homo sapien
gatgccaagcatatgtgccagttga

SEQ ID NO: 815547 - DNA, 25 bp, Homo sapien
gactgcaaatggtttaattgggcca

SEQ ID NO: 815548 - DNA, 25 bp, Homo sapien
tgcagggatttaggtgctcagttcc

SEQ ID NO: 815549 - DNA, 25 bp, Homo sapien
tagattaatgggacgcaaacccaca

SEQ ID NO: 815550 - DNA, 25 bp, Homo sapien
gattaatgggacgcaaacccacaaa

SEQ ID NO: 815551 - DNA, 25 bp, Homo sapien
ctagattaatgggacgcaaacccac

SEQ ID NO: 815552 - DNA, 25 bp, Homo sapien
agattaatgggacgcaaacccacaa

SEQ ID NO: 815553 - DNA, 25 bp, Homo sapien
ggttagtggtgcatcgttcacccga

SEQ ID NO: 815554 - DNA, 25 bp, Homo sapien
gagccaatcgcttcagacagccaag

SEQ ID NO: 815555 - DNA, 25 bp, Homo sapien
tccagtgaagagagatcctgtgagc

SEQ ID NO: 815556 - DNA, 25 bp, Homo sapien
gacagccaagatgtagcactcgcag

SEQ ID NO: 815557 - DNA, 25 bp, Homo sapien
cacatggttgtgttcttgcccggta

SEQ ID NO: 815558 - DNA, 25 bp, Homo sapien
cagttccttggttgagataatcaca

SEQ ID NO: 815559 - DNA, 25 bp, Homo sapien
gaaaagcagtttcagtgctagccca

SEQ ID NO: 815560 - DNA, 25 bp, Homo sapien
cacctccgatgtccttgcgtgctgg

SEQ ID NO: 815561 - DNA, 25 bp, Homo sapien
cgaagccactggcatattgtcagag

SEQ ID NO: 815562 - DNA, 25 bp, Homo sapien
ttacaaaggtcactggaattaattg

SEQ ID NO: 815563 - DNA, 25 bp, Homo sapien
cactggaattaattgacttcttata

SEQ ID NO: 815564 - DNA, 25 bp, Homo sapien
atattacatgttgtaaactgactca

SEQ ID NO: 815565 - DNA, 25 bp, Homo sapien
agcaggaaccctcttcttaaacttg

SEQ ID NO: 815566 - DNA, 25 bp, Homo sapien
gagcgagcaaagctgccaatattgc

SEQ ID NO: 815567 - DNA, 25 bp, Homo sapien
tggcatttgaggcagagcgagcaaa

SEQ ID NO: 815568 - DNA, 25 bp, Homo sapien
caatattgcaagctgatgcttcagc

SEQ ID NO: 815569 - DNA, 25 bp, Homo sapien
gattcagtgggccttttttatgcaa

SEQ ID NO: 815570 - DNA, 25 bp, Homo sapien
gtgatgtttacactccttccctgaa

SEQ ID NO: 815571 - DNA, 25 bp, Homo sapien
ttccctgaatagagtagctgattat

SEQ ID NO: 815572 - DNA, 25 bp, Homo sapien
catgcaaaaagtggtgatgtttaca

SEQ ID NO: 815573 - DNA, 25 bp, Homo sapien
catgttaaataaatgttgcccaaca

SEQ ID NO: 815574 - DNA, 25 bp, Homo sapien
ccagggtccgggctgtggagcatgt

SEQ ID NO: 815575 - DNA, 25 bp, Homo sapien
taaatgttgcccaacatcttcctct

SEQ ID NO: 815576 - DNA, 25 bp, Homo sapien
ccgggctgtggagcatgttaaataa

SEQ ID NO: 815577 - DNA, 25 bp, Homo sapien
cactcattaatcatattggcggcag

SEQ ID NO: 815578 - DNA, 25 bp, Homo sapien
ttactttgaatgtcccagtcaggtc

SEQ ID NO: 815579 - DNA, 25 bp, Homo sapien
gataggaactatgtttaccacagcc

SEQ ID NO: 815580 - DNA, 25 bp, Homo sapien
ggtagatgtttctcctaaggataca

SEQ ID NO: 815581 - DNA, 25 bp, Homo sapien
tccaactctgcaaaattggctcaag

SEQ ID NO: 815582 - DNA, 25 bp, Homo sapien
tcatcatttccaactctgcaaaatt

SEQ ID NO: 815583 - DNA, 25 bp, Homo sapien
ggctcaagatgcgaatagtaaaggc

SEQ ID NO: 815584 - DNA, 25 bp, Homo sapien
gcgaatagtaaaggcaggtatgtgc

SEQ ID NO: 815585 - DNA, 25 bp, Homo sapien
cacacttttcatccctgctattaat

SEQ ID NO: 815586 - DNA, 25 bp, Homo sapien
catcgcttgtgacaagtccttcaca

SEQ ID NO: 815587 - DNA, 25 bp, Homo sapien
ttagcatttgctccccgaatcaaaa

SEQ ID NO: 815588 - DNA, 25 bp, Homo sapien
tgtgaatacattaacatctcatcgc

SEQ ID NO: 815589 - DNA, 25 bp, Homo sapien
tagggctggcgttgtaatataaggc

SEQ ID NO: 815590 - DNA, 25 bp, Homo sapien
tattcccctgtgactgatcagttga

SEQ ID NO: 815591 - DNA, 25 bp, Homo sapien
taagaggttgaaactgcccatattc

SEQ ID NO: 815592 - DNA, 25 bp, Homo sapien
cacattctagtgagagagattctaa

SEQ ID NO: 815593 - DNA, 25 bp, Homo sapien
ttgcaaggttgtacatgactagagc

SEQ ID NO: 815594 - DNA, 25 bp, Homo sapien
cagactatcagtttaggctcagaaa

SEQ ID NO: 815595 - DNA, 25 bp, Homo sapien
gcagcttcacaggttaggatttaat

SEQ ID NO: 815596 - DNA, 25 bp, Homo sapien
catgaagagcatgggcgatatgccc

SEQ ID NO: 815597 - DNA, 25 bp, Homo sapien
cactgaaataagtgccagtgccaca

SEQ ID NO: 815598 - DNA, 25 bp, Homo sapien
cagtatttgcaggaatagcagcatg

SEQ ID NO: 815599 - DNA, 25 bp, Homo sapien
gatgaatgccatagaaccacaaagt

SEQ ID NO: 815600 - DNA, 25 bp, Homo sapien
tatttaaatcccatgcttcttcagt

SEQ ID NO: 815601 - DNA, 25 bp, Homo sapien
ttcttcttcagaaatgtaatgggcc

SEQ ID NO: 815602 - DNA, 25 bp, Homo sapien
gctttcttcttcagaaatgtaatgg

SEQ ID NO: 815603 - DNA, 25 bp, Homo sapien
cttagctttcttcttcagaaatgta

SEQ ID NO: 815604 - DNA, 25 bp, Homo sapien
tagctttcttcttcagaaatgtaat

SEQ ID NO: 815605 - DNA, 25 bp, Homo sapien
catgtccctgaaatgcacttgccga

SEQ ID NO: 815606 - DNA, 25 bp, Homo sapien
cagatggtattcgagcactttgcgc

SEQ ID NO: 815607 - DNA, 25 bp, Homo sapien
taaatctggcaggttatccacagca

SEQ ID NO: 815608 - DNA, 25 bp, Homo sapien
gacttcaagtcagcgccaactaggt

SEQ ID NO: 815609 - DNA, 25 bp, Homo sapien
taaaagaggtccacatactcactgt

SEQ ID NO: 815610 - DNA, 25 bp, Homo sapien
tctggtcactgcaaaaactcgtggc

SEQ ID NO: 815611 - DNA, 25 bp, Homo sapien
tatttggttgccacagtaccccttg

SEQ ID NO: 815612 - DNA, 25 bp, Homo sapien
tacaacacaggaggaggtattgctc

SEQ ID NO: 815613 - DNA, 25 bp, Homo sapien
cttagagaaaggctagcataatcaa

SEQ ID NO: 815614 - DNA, 25 bp, Homo sapien
catgagatggaaaaatctatttact

SEQ ID NO: 815615 - DNA, 25 bp, Homo sapien
aacaaatatctcaggctaccatgag

SEQ ID NO: 815616 - DNA, 25 bp, Homo sapien
aatgtaatagggtggctgggcgcag

SEQ ID NO: 815617 - DNA, 25 bp, Homo sapien
ttcctatggaataaaagccaccagt

SEQ ID NO: 815618 - DNA, 25 bp, Homo sapien
ttttcctatggaataaaagccacca

SEQ ID NO: 815619 - DNA, 25 bp, Homo sapien
tttcctatggaataaaagccaccag

SEQ ID NO: 815620 - DNA, 25 bp, Homo sapien
ccaaggaatttgaataagtgttagg

SEQ ID NO: 815621 - DNA, 25 bp, Homo sapien
gcagtgcagtttctagtccaaggaa

SEQ ID NO: 815622 - DNA, 25 bp, Homo sapien
gactctcagcagtgcagtttctagt

SEQ ID NO: 815623 - DNA, 25 bp, Homo sapien
ttgatgaaatgtgaagactctcagc

SEQ ID NO: 815624 - DNA, 25 bp, Homo sapien
cttcgaccatttactgcacaagtat

SEQ ID NO: 815625 - DNA, 25 bp, Homo sapien
tgcatgtttttcttcgaccatttac

SEQ ID NO: 815626 - DNA, 25 bp, Homo sapien
tgccttgcatgtttttcttcgacca

SEQ ID NO: 815627 - DNA, 25 bp, Homo sapien
gaccatttactgcacaagtattgat

SEQ ID NO: 815628 - DNA, 25 bp, Homo sapien
ttctttgattaacctgccatgtgat

SEQ ID NO: 815629 - DNA, 25 bp, Homo sapien
ctcttgggcaatcatcccctttctt

SEQ ID NO: 815630 - DNA, 25 bp, Homo sapien
catgtgatgcccaaatccagagctc

SEQ ID NO: 815631 - DNA, 25 bp, Homo sapien
tgtgtactttgcactctcttgggca

SEQ ID NO: 815632 - DNA, 25 bp, Homo sapien
caaataatcactcttgggagttata

SEQ ID NO: 815633 - DNA, 25 bp, Homo sapien
catctctggatattgaggatttccc

SEQ ID NO: 815634 - DNA, 25 bp, Homo sapien
ttcccacttaaatgaagaggctctt

SEQ ID NO: 815635 - DNA, 25 bp, Homo sapien
gactatatttagcatcccttttctc

SEQ ID NO: 815636 - DNA, 25 bp, Homo sapien
tgtcgatcattagagtgcagcaacc

SEQ ID NO: 815637 - DNA, 25 bp, Homo sapien
gctggctgggttcacgagtgaaact

SEQ ID NO: 815638 - DNA, 25 bp, Homo sapien
tgaaactaactgtgaggacactcat

SEQ ID NO: 815639 - DNA, 25 bp, Homo sapien
aagtggaggcacttgaattgctggc

SEQ ID NO: 815640 - DNA, 25 bp, Homo sapien
catccccctgctgactgtgatgcca

SEQ ID NO: 815641 - DNA, 25 bp, Homo sapien
ctgtgatgccatctctttgatattt

SEQ ID NO: 815642 - DNA, 25 bp, Homo sapien
tgtgatgccatctctttgatatttc

SEQ ID NO: 815643 - DNA, 25 bp, Homo sapien
ccccctgctgactgtgatgccatct

SEQ ID NO: 815644 - DNA, 25 bp, Homo sapien
ttaaatataaatggactaaattctg

SEQ ID NO: 815645 - DNA, 25 bp, Homo sapien
taaatataaatggactaaattctgc

SEQ ID NO: 815646 - DNA, 25 bp, Homo sapien
tataaatggactaaattctgcaatt

SEQ ID NO: 815647 - DNA, 25 bp, Homo sapien
aatataaatggactaaattctgcaa

SEQ ID NO: 815648 - DNA, 25 bp, Homo sapien
ctagaccaagtttctcggaagacca

SEQ ID NO: 815649 - DNA, 25 bp, Homo sapien
agaccaagtttctcggaagaccagt

SEQ ID NO: 815650 - DNA, 25 bp, Homo sapien
ttcctagaccaagtttctcggaaga

SEQ ID NO: 815651 - DNA, 25 bp, Homo sapien
caagtttctcggaagaccagttcat

SEQ ID NO: 815652 - DNA, 25 bp, Homo sapien
ctgtctttgccacataaattcatat

SEQ ID NO: 815653 - DNA, 25 bp, Homo sapien
ctttgccacataaattcatattcat

SEQ ID NO: 815654 - DNA, 25 bp, Homo sapien
tctttgccacataaattcatattca

SEQ ID NO: 815655 - DNA, 25 bp, Homo sapien
gtctttgccacataaattcatattc

SEQ ID NO: 815656 - DNA, 25 bp, Homo sapien
cacaatgggtggctgtagtaatgta

SEQ ID NO: 815657 - DNA, 25 bp, Homo sapien
aggatgttaaggcttctttcagtga

SEQ ID NO: 815658 - DNA, 25 bp, Homo sapien
ccaaatgctggcttcgtttgtctaa

SEQ ID NO: 815659 - DNA, 25 bp, Homo sapien
aggagaagaggatgttaaggcttct

SEQ ID NO: 815660 - DNA, 25 bp, Homo sapien
tggtccttgtttatcatgatactgc

SEQ ID NO: 815661 - DNA, 25 bp, Homo sapien
ggtccttgtttatcatgatactgca

SEQ ID NO: 815662 - DNA, 25 bp, Homo sapien
gtccttgtttatcatgatactgcat

SEQ ID NO: 815663 - DNA, 25 bp, Homo sapien
actgcaatttcgtcagcaaggatgc

SEQ ID NO: 815664 - DNA, 25 bp, Homo sapien
gtagttactgcaatttcgtcagcaa

SEQ ID NO: 815665 - DNA, 25 bp, Homo sapien
tttcgtcagcaaggatgcagccctt

SEQ ID NO: 815666 - DNA, 25 bp, Homo sapien
tcagcaaggatgcagcccttgttca

SEQ ID NO: 815667 - DNA, 25 bp, Homo sapien
gacttgacactgaaagcatgatcca

SEQ ID NO: 815668 - DNA, 25 bp, Homo sapien
tttaaagcatgaaactgacatggcg

SEQ ID NO: 815669 - DNA, 25 bp, Homo sapien
cagaaatagcctacacagatgtggc

SEQ ID NO: 815670 - DNA, 25 bp, Homo sapien
tctagggctaggcaatcagttctta

SEQ ID NO: 815671 - DNA, 25 bp, Homo sapien
ttctctaaggagattaaattccctc

SEQ ID NO: 815672 - DNA, 25 bp, Homo sapien
ctctaaggagattaaattccctctt

SEQ ID NO: 815673 - DNA, 25 bp, Homo sapien
aaggagattaaattccctcttcttg

SEQ ID NO: 815674 - DNA, 25 bp, Homo sapien
ggagattaaattccctcttcttgaa

SEQ ID NO: 815675 - DNA, 25 bp, Homo sapien
gtgtctgcaatctgttactaccaga

SEQ ID NO: 815676 - DNA, 25 bp, Homo sapien
tactaccagatttcaccaccagccc

SEQ ID NO: 815677 - DNA, 25 bp, Homo sapien
accaccagcccttgaactcttgaat

SEQ ID NO: 815678 - DNA, 25 bp, Homo sapien
tgaattgtttgtgtgctcaacccct

SEQ ID NO: 815679 - DNA, 25 bp, Homo sapien
tagggagctaaattccctggaagtc

SEQ ID NO: 815680 - DNA, 25 bp, Homo sapien
ttttgcactgccaggaccaagttga

SEQ ID NO: 815681 - DNA, 25 bp, Homo sapien
gatgagaacctagagcatacctggg

SEQ ID NO: 815682 - DNA, 25 bp, Homo sapien
tgggcaatcagtgccatcaacttct

SEQ ID NO: 815683 - DNA, 25 bp, Homo sapien
ctaaggtaacagcgatctactttta

SEQ ID NO: 815684 - DNA, 25 bp, Homo sapien
taaggtaacagcgatctacttttaa

SEQ ID NO: 815685 - DNA, 25 bp, Homo sapien
tctcctccagagatttatcactgtg

SEQ ID NO: 815686 - DNA, 25 bp, Homo sapien
ttgtcgacttgttctctcttattaa

SEQ ID NO: 815687 - DNA, 25 bp, Homo sapien
ggtgcctttaggtgccacttcattt

SEQ ID NO: 815688 - DNA, 25 bp, Homo sapien
tcattttcagaactttgtcgacttg

SEQ ID NO: 815689 - DNA, 25 bp, Homo sapien
catgcggctgctgtgtgaacttccc

SEQ ID NO: 815690 - DNA, 25 bp, Homo sapien
gataccatgcggctgctgtgtgaac

SEQ ID NO: 815691 - DNA, 25 bp, Homo sapien
gcggctgctgtgtgaacttccctca

SEQ ID NO: 815692 - DNA, 25 bp, Homo sapien
tcaccgataccatgcggctgctgtg

SEQ ID NO: 815693 - DNA, 25 bp, Homo sapien
agctgagaatagagggtagtaagat

SEQ ID NO: 815694 - DNA, 25 bp, Homo sapien
tcctggttatatcctggtcattgag

SEQ ID NO: 815695 - DNA, 25 bp, Homo sapien
gaatagagggtagtaagataatgca

SEQ ID NO: 815696 - DNA, 25 bp, Homo sapien
ctggttatatcctggtcattgagga

SEQ ID NO: 815697 - DNA, 25 bp, Homo sapien
ctcatcatgtatcctttctgtagcc

SEQ ID NO: 815698 - DNA, 25 bp, Homo sapien
catcatgtatcctttctgtagcccc

SEQ ID NO: 815699 - DNA, 25 bp, Homo sapien
tcatcatgtatcctttctgtagccc

SEQ ID NO: 815700 - DNA, 25 bp, Homo sapien
tcaacttcgatttgattcaaaatag

SEQ ID NO: 815701 - DNA, 25 bp, Homo sapien
ctcaacttcgatttgattcaaaata

SEQ ID NO: 815702 - DNA, 25 bp, Homo sapien
gcatgtgagcaatttttggagacct

SEQ ID NO: 815703 - DNA, 25 bp, Homo sapien
gaagtgaccatgatgaaggcttggc

SEQ ID NO: 815704 - DNA, 25 bp, Homo sapien
ggatagttcagagcagctcccatta

SEQ ID NO: 815705 - DNA, 25 bp, Homo sapien
tgctttgtgcttggatagttcagag

SEQ ID NO: 815706 - DNA, 25 bp, Homo sapien
ttcggatcttgaaacttaagccttc

SEQ ID NO: 815707 - DNA, 25 bp, Homo sapien
ggttcctttccactatattcacttg

SEQ ID NO: 815708 - DNA, 25 bp, Homo sapien
cattgggtacgttccttgactggaa

SEQ ID NO: 815709 - DNA, 25 bp, Homo sapien
tgaggtgcagcaatctaatgtgaga

SEQ ID NO: 815710 - DNA, 25 bp, Homo sapien
caaacgatcattatctggctgaagc

SEQ ID NO: 815711 - DNA, 25 bp, Homo sapien
tctgtgtgtggaggatcacacgatt

SEQ ID NO: 815712 - DNA, 25 bp, Homo sapien
gcttgctcatattttgacaaacgat

SEQ ID NO: 815713 - DNA, 25 bp, Homo sapien
gagtgttgttatcagtctgtgtgtg

SEQ ID NO: 815714 - DNA, 25 bp, Homo sapien
tatgggccatgagtgagtgcttctt

SEQ ID NO: 815715 - DNA, 25 bp, Homo sapien
ctggcggctgtctactgactgcact

SEQ ID NO: 815716 - DNA, 25 bp, Homo sapien
tgtctactgactgcactgcccatat

SEQ ID NO: 815717 - DNA, 25 bp, Homo sapien
ctgcccatatatgggccatgagtga

SEQ ID NO: 815718 - DNA, 25 bp, Homo sapien
ggacctgatcaatggccaccatttc

SEQ ID NO: 815719 - DNA, 25 bp, Homo sapien
tcaaggacctgatcaatggccacca

SEQ ID NO: 815720 - DNA, 25 bp, Homo sapien
caatcaaggacctgatcaatggcca

SEQ ID NO: 815721 - DNA, 25 bp, Homo sapien
aaggacctgatcaatggccaccatt

SEQ ID NO: 815722 - DNA, 25 bp, Homo sapien
caaatacttcagaaagacccttgcc

SEQ ID NO: 815723 - DNA, 25 bp, Homo sapien
ttcagaaagacccttgccacttcga

SEQ ID NO: 815724 - DNA, 25 bp, Homo sapien
tacttcagaaagacccttgccactt

SEQ ID NO: 815725 - DNA, 25 bp, Homo sapien
aaagacccttgccacttcgatgaca

SEQ ID NO: 815726 - DNA, 25 bp, Homo sapien
aggatactcatcaggtggcgaacag

SEQ ID NO: 815727 - DNA, 25 bp, Homo sapien
catcaggtggcgaacagctgcacac

SEQ ID NO: 815728 - DNA, 25 bp, Homo sapien
tactcatcaggtggcgaacagctgc

SEQ ID NO: 815729 - DNA, 25 bp, Homo sapien
gatactcatcaggtggcgaacagct

SEQ ID NO: 815730 - DNA, 25 bp, Homo sapien
ttgatggtcactttcacggggaccc

SEQ ID NO: 815731 - DNA, 25 bp, Homo sapien
tgatggtcactttcacggggacccc

SEQ ID NO: 815732 - DNA, 25 bp, Homo sapien
cttgatggtcactttcacggggacc

SEQ ID NO: 815733 - DNA, 25 bp, Homo sapien
ttcccgatccatagtgaagtcctcg

SEQ ID NO: 815734 - DNA, 25 bp, Homo sapien
taaatcagcctgttgaaggatggtg

SEQ ID NO: 815735 - DNA, 25 bp, Homo sapien
gcaatggtggacagatttacactca

SEQ ID NO: 815736 - DNA, 25 bp, Homo sapien
ggtcttgtagatacctctggacttt

SEQ ID NO: 815737 - DNA, 25 bp, Homo sapien
taattcccctgcacgttgacgctca

SEQ ID NO: 815738 - DNA, 25 bp, Homo sapien
cataattcccctgcacgttgacgct

SEQ ID NO: 815739 - DNA, 25 bp, Homo sapien
ctcataattcccctgcacgttgacg

SEQ ID NO: 815740 - DNA, 25 bp, Homo sapien
tggctcataattcccctgcacgttg

SEQ ID NO: 815741 - DNA, 25 bp, Homo sapien
gcatttccctacatgcagttcccag

SEQ ID NO: 815742 - DNA, 25 bp, Homo sapien
atttccctacatgcagttcccagag

SEQ ID NO: 815743 - DNA, 25 bp, Homo sapien
gaagaagcgtgactaatcctacaca

SEQ ID NO: 815744 - DNA, 25 bp, Homo sapien
agcgtgactaatcctacacattcct

SEQ ID NO: 815745 - DNA, 25 bp, Homo sapien
gaagcgtgactaatcctacacattc

SEQ ID NO: 815746 - DNA, 25 bp, Homo sapien
gggaagaagcgtgactaatcctaca

SEQ ID NO: 815747 - DNA, 25 bp, Homo sapien
gttgatgtggtttcagtaattcagc

SEQ ID NO: 815748 - DNA, 25 bp, Homo sapien
tgtggtttcagtaattcagcaaacc

SEQ ID NO: 815749 - DNA, 25 bp, Homo sapien
gatgtggtttcagtaattcagcaaa

SEQ ID NO: 815750 - DNA, 25 bp, Homo sapien
gtttcagtaattcagcaaaccagaa

SEQ ID NO: 815751 - DNA, 25 bp, Homo sapien
aaataatgtatatcttggagactgg

SEQ ID NO: 815752 - DNA, 25 bp, Homo sapien
gtcatacaatgaaaatgcactcgaa

SEQ ID NO: 815753 - DNA, 25 bp, Homo sapien
gcaactaaaggacatggtgaacatt

SEQ ID NO: 815754 - DNA, 25 bp, Homo sapien
ggagcaggctaagtgacttgaaagc

SEQ ID NO: 815755 - DNA, 25 bp, Homo sapien
aggaatgacagtgcacacttgtaat

SEQ ID NO: 815756 - DNA, 25 bp, Homo sapien
gctttccagactttagcaatttcct

SEQ ID NO: 815757 - DNA, 25 bp, Homo sapien
tattgctccatattctttcttagga

SEQ ID NO: 815758 - DNA, 25 bp, Homo sapien
actgaagagggagttcccggtgaat

SEQ ID NO: 815759 - DNA, 25 bp, Homo sapien
ggtatccttaagacagtccttaaca

SEQ ID NO: 815760 - DNA, 25 bp, Homo sapien
tgttcatagccatacaaaaagttga

SEQ ID NO: 815761 - DNA, 25 bp, Homo sapien
atttgcagtcattactaagtatatg

SEQ ID NO: 815762 - DNA, 25 bp, Homo sapien
gttgatatccttggccgggaacagt

SEQ ID NO: 815763 - DNA, 25 bp, Homo sapien
ggcacctttcctgtcaccacagaaa

SEQ ID NO: 815764 - DNA, 25 bp, Homo sapien
gggactggctgttgccctgcgttca

SEQ ID NO: 815765 - DNA, 25 bp, Homo sapien
gcggagaggaagcttggcacctttc

SEQ ID NO: 815766 - DNA, 25 bp, Homo sapien
tcagcccctcagtgaaggcggagag

SEQ ID NO: 815767 - DNA, 25 bp, Homo sapien
tctttaacaaaaggcacgtcattac

SEQ ID NO: 815768 - DNA, 25 bp, Homo sapien
ttttcagctgcaaaaccctggatca

SEQ ID NO: 815769 - DNA, 25 bp, Homo sapien
tgtttgaggtgttcaaggataacca

SEQ ID NO: 815770 - DNA, 25 bp, Homo sapien
aaatagtgtcaagataatagcctcc

SEQ ID NO: 815771 - DNA, 25 bp, Homo sapien
tcgatgcaggtgaaaatgatataac

SEQ ID NO: 815772 - DNA, 25 bp, Homo sapien
caagagtagaaggagcatcgatgca

SEQ ID NO: 815773 - DNA, 25 bp, Homo sapien
atgatataacttcgttctttaaagc

SEQ ID NO: 815774 - DNA, 25 bp, Homo sapien
ctgtgtggcaagagtagaaggagca

SEQ ID NO: 815775 - DNA, 25 bp, Homo sapien
tacatcaaggccttttgtaaaggct

SEQ ID NO: 815776 - DNA, 25 bp, Homo sapien
aagatacatcaaggccttttgtaaa

SEQ ID NO: 815777 - DNA, 25 bp, Homo sapien
tcttgagactaatttcatagttgtt

SEQ ID NO: 815778 - DNA, 25 bp, Homo sapien
tgaaaagatacatcaaggccttttg

SEQ ID NO: 815779 - DNA, 25 bp, Homo sapien
ttttcatgtactgtttttatgtctt

SEQ ID NO: 815780 - DNA, 25 bp, Homo sapien
atgtactgtttttatgtctttgttt

SEQ ID NO: 815781 - DNA, 25 bp, Homo sapien
ttcatgtactgtttttatgtctttg

SEQ ID NO: 815782 - DNA, 25 bp, Homo sapien
tcatgtactgtttttatgtctttgt

SEQ ID NO: 815783 - DNA, 25 bp, Homo sapien
tggattcagatattttataatctga

SEQ ID NO: 815784 - DNA, 25 bp, Homo sapien
gtacatgggagcattttataaatta

SEQ ID NO: 815785 - DNA, 25 bp, Homo sapien
ctatgtacatgggagcattttataa

SEQ ID NO: 815786 - DNA, 25 bp, Homo sapien
ttataaattatttgtggattcagat

SEQ ID NO: 815787 - DNA, 25 bp, Homo sapien
gattatttactgttgagccgtttcc

SEQ ID NO: 815788 - DNA, 25 bp, Homo sapien
ggaacactaccctggaattattatc

SEQ ID NO: 815789 - DNA, 25 bp, Homo sapien
gacttaaacataagtgtagaccact

SEQ ID NO: 815790 - DNA, 25 bp, Homo sapien
taactttgaagctatcaaactggtc

SEQ ID NO: 815791 - DNA, 25 bp, Homo sapien
gaagtgtttgattttggaggtctga

SEQ ID NO: 815792 - DNA, 25 bp, Homo sapien
ctgagtcggagtggggatcttcatt

SEQ ID NO: 815793 - DNA, 25 bp, Homo sapien
tctgagtcggagtggggatcttcat

SEQ ID NO: 815794 - DNA, 25 bp, Homo sapien
tgagtcggagtggggatcttcattt

SEQ ID NO: 815795 - DNA, 25 bp, Homo sapien
agacttgctctattaagggaatcac

SEQ ID NO: 815796 - DNA, 25 bp, Homo sapien
gatggaaccacgtagaggttacaaa

SEQ ID NO: 815797 - DNA, 25 bp, Homo sapien
caatgtttgttctgcagatactttt

SEQ ID NO: 815798 - DNA, 25 bp, Homo sapien
tctgatggaaccacgtagaggttac

SEQ ID NO: 815799 - DNA, 25 bp, Homo sapien
tcattttctgatggaaccacgtaga

SEQ ID NO: 815800 - DNA, 25 bp, Homo sapien
tgttttgtgaaggtccatgcatgca

SEQ ID NO: 815801 - DNA, 25 bp, Homo sapien
gcattccgtttctgtcctgcaggta

SEQ ID NO: 815802 - DNA, 25 bp, Homo sapien
catgcagggcatgatgaacagcaaa

SEQ ID NO: 815803 - DNA, 25 bp, Homo sapien
cagaaatatagatagcctgcactgg

SEQ ID NO: 815804 - DNA, 25 bp, Homo sapien
acacttgagtctgggtaatgctgtg

SEQ ID NO: 815805 - DNA, 25 bp, Homo sapien
ctttttgtgagatggagtcttgttc

SEQ ID NO: 815806 - DNA, 25 bp, Homo sapien
cagtggcatgatctgctcactgcaa

SEQ ID NO: 815807 - DNA, 25 bp, Homo sapien
ttgttctgtcgccaaggctggagtg

SEQ ID NO: 815808 - DNA, 25 bp, Homo sapien
cctccgtctctcaggttcaagcaat

SEQ ID NO: 815809 - DNA, 25 bp, Homo sapien
agacctgattccctgtggtgatacc

SEQ ID NO: 815810 - DNA, 25 bp, Homo sapien
ggaacagccacaaaatacacacccc

SEQ ID NO: 815811 - DNA, 25 bp, Homo sapien
atattcgtggtatctgtgaacatgt

SEQ ID NO: 815812 - DNA, 25 bp, Homo sapien
atcacacacacacttgctgtcaatg

SEQ ID NO: 815813 - DNA, 25 bp, Homo sapien
cctgccttccattttgaagtgggat

SEQ ID NO: 815814 - DNA, 25 bp, Homo sapien
atcaagttccagtaacccaaatctt

SEQ ID NO: 815815 - DNA, 25 bp, Homo sapien
agccccattgggcatgataagccga

SEQ ID NO: 815816 - DNA, 25 bp, Homo sapien
ggaggcattcttcctaaaagtagac

SEQ ID NO: 815817 - DNA, 25 bp, Homo sapien
gaggaagcccacatattctattata

SEQ ID NO: 815818 - DNA, 25 bp, Homo sapien
gtccagactcaaacggaggaagccc

SEQ ID NO: 815819 - DNA, 25 bp, Homo sapien
gacttgaacgttctgaccaggtgcc

SEQ ID NO: 815820 - DNA, 25 bp, Homo sapien
ggggtgtgtattttgtggctgttcc

SEQ ID NO: 815821 - DNA, 25 bp, Homo sapien
ggcacctggtcagaacgttcaagtc

SEQ ID NO: 815822 - DNA, 25 bp, Homo sapien
ggtatcaccacagggaatcaggtct

SEQ ID NO: 815823 - DNA, 25 bp, Homo sapien
gggcttcctccgtttgagtctggac

SEQ ID NO: 815824 - DNA, 25 bp, Homo sapien
tcggcttatcatgcccaatggggct

SEQ ID NO: 815825 - DNA, 25 bp, Homo sapien
acatgttcacagataccacgaatat

SEQ ID NO: 815826 - DNA, 25 bp, Homo sapien
atcccacttcaaaatggaaggcagg

SEQ ID NO: 815827 - DNA, 25 bp, Homo sapien
gtctacttttaggaagaatgcctcc

SEQ ID NO: 815828 - DNA, 25 bp, Homo sapien
aagatttgggttactggaacttgat

SEQ ID NO: 815829 - DNA, 25 bp, Homo sapien
cattgacagcaagtgtgtgtgtgat

SEQ ID NO: 815830 - DNA, 25 bp, Homo sapien
tataatagaatatgtgggcttcctc

SEQ ID NO: 815831 - DNA, 25 bp, Homo sapien
cttgattgcaagtgtttccctgact

SEQ ID NO: 815832 - DNA, 25 bp, Homo sapien
tccctgacttccagtgaagtgccgt

SEQ ID NO: 815833 - DNA, 25 bp, Homo sapien
acagagcctggacttgattgcaagt

SEQ ID NO: 815834 - DNA, 25 bp, Homo sapien
tttggattcacttaacttgttacag

SEQ ID NO: 815835 - DNA, 25 bp, Homo sapien
tttttcccagtcaatggaatagaac

SEQ ID NO: 815836 - DNA, 25 bp, Homo sapien
gctctgttacactaagcctgagttc

SEQ ID NO: 815837 - DNA, 25 bp, Homo sapien
ttgctgctctgttacactaagcctg

SEQ ID NO: 815838 - DNA, 25 bp, Homo sapien
acactaagcctgagttctgtttgtc

SEQ ID NO: 815839 - DNA, 25 bp, Homo sapien
ccttccctgtctttggactcagtat

SEQ ID NO: 815840 - DNA, 25 bp, Homo sapien
cagtatactgatgaccattagagga

SEQ ID NO: 815841 - DNA, 25 bp, Homo sapien
catctcatttgtacctgactccttc

SEQ ID NO: 815842 - DNA, 25 bp, Homo sapien
tgatgaccattagaggataagcagg

SEQ ID NO: 815843 - DNA, 25 bp, Homo sapien
tagcagttctttgcttccttagccc

SEQ ID NO: 815844 - DNA, 25 bp, Homo sapien
ttagcagttctttgcttccttagcc

SEQ ID NO: 815845 - DNA, 25 bp, Homo sapien
gcagttctttgcttccttagcccca

SEQ ID NO: 815846 - DNA, 25 bp, Homo sapien
gttctttgcttccttagccccacta

SEQ ID NO: 815847 - DNA, 25 bp, Homo sapien
aacttcagatgaagaaggttgtatt

SEQ ID NO: 815848 - DNA, 25 bp, Homo sapien
gctggactgctggcagaactcgagc

SEQ ID NO: 815849 - DNA, 25 bp, Homo sapien
tggactgctggcagaactcgagcct

SEQ ID NO: 815850 - DNA, 25 bp, Homo sapien
ttcagatgaagaaggttgtattttg

SEQ ID NO: 815851 - DNA, 25 bp, Homo sapien
tgttatagtcattttccagtgtacg

SEQ ID NO: 815852 - DNA, 25 bp, Homo sapien
tttgtagttgttccataagaaggac

SEQ ID NO: 815853 - DNA, 25 bp, Homo sapien
tccagtgtacgagtataataattag

SEQ ID NO: 815854 - DNA, 25 bp, Homo sapien
tgtttcctataatgaataatgttat

SEQ ID NO: 815855 - DNA, 25 bp, Homo sapien
ccttctcaccgaggaagagcgggag

SEQ ID NO: 815856 - DNA, 25 bp, Homo sapien
gactttatcctgagagcgagcgaga

SEQ ID NO: 815857 - DNA, 25 bp, Homo sapien
ccaaattgggcgagggcacaaaata

SEQ ID NO: 815858 - DNA, 25 bp, Homo sapien
gctagatgtccagaactgctcgtgg

SEQ ID NO: 815859 - DNA, 25 bp, Homo sapien
tctccattagcaaatccttctcccc

SEQ ID NO: 815860 - DNA, 25 bp, Homo sapien
cagttttctgcaaaatctccattag

SEQ ID NO: 815861 - DNA, 25 bp, Homo sapien
atctccattagcaaatccttctccc

SEQ ID NO: 815862 - DNA, 25 bp, Homo sapien
gttttctgcaaaatctccattagca

SEQ ID NO: 815863 - DNA, 25 bp, Homo sapien
caagggcaatggttggaagataaag

SEQ ID NO: 815864 - DNA, 25 bp, Homo sapien
tccactcctcaaattgtgaacaagg

SEQ ID NO: 815865 - DNA, 25 bp, Homo sapien
tgttttagatgctatccgaggagga

SEQ ID NO: 815866 - DNA, 25 bp, Homo sapien
gcagtgatgcaacctactattgacg

SEQ ID NO: 815867 - DNA, 25 bp, Homo sapien
agagctgatatgtgtgcggagaacg

SEQ ID NO: 815868 - DNA, 25 bp, Homo sapien
tatgtgtgcggagaacgtctctttc

SEQ ID NO: 815869 - DNA, 25 bp, Homo sapien
tcccacataacaagaagctccagag

SEQ ID NO: 815870 - DNA, 25 bp, Homo sapien
gctgatatgtgtgcggagaacgtct

SEQ ID NO: 815871 - DNA, 25 bp, Homo sapien
cggatatttttctccaggtagccca

SEQ ID NO: 815872 - DNA, 25 bp, Homo sapien
cttagtctgcggatatttttctcca

SEQ ID NO: 815873 - DNA, 25 bp, Homo sapien
ctgcggatatttttctccaggtagc

SEQ ID NO: 815874 - DNA, 25 bp, Homo sapien
ggatatttttctccaggtagcccat

SEQ ID NO: 815875 - DNA, 25 bp, Homo sapien
tgaaccgtactaggcatttggacca

SEQ ID NO: 815876 - DNA, 25 bp, Homo sapien
aatgtgaaccgtactaggcatttgg

SEQ ID NO: 815877 - DNA, 25 bp, Homo sapien
tttcaaatgtgaaccgtactaggca

SEQ ID NO: 815878 - DNA, 25 bp, Homo sapien
gcatttggaccaatctgataaacat

SEQ ID NO: 815879 - DNA, 25 bp, Homo sapien
tcataactgtgtttgccttttctct

SEQ ID NO: 815880 - DNA, 25 bp, Homo sapien
ccttttctctgccagatgtttgtaa

SEQ ID NO: 815881 - DNA, 25 bp, Homo sapien
cataactgtgtttgccttttctctg

SEQ ID NO: 815882 - DNA, 25 bp, Homo sapien
tttctctgccagatgtttgtaagtc

SEQ ID NO: 815883 - DNA, 25 bp, Homo sapien
ctactgttgactttctacattgtga

SEQ ID NO: 815884 - DNA, 25 bp, Homo sapien
tactgttgactttctacattgtgac

SEQ ID NO: 815885 - DNA, 25 bp, Homo sapien
cccatccttttgcccgtagcccttg

SEQ ID NO: 815886 - DNA, 25 bp, Homo sapien
atccttttgcccgtagcccttggca

SEQ ID NO: 815887 - DNA, 25 bp, Homo sapien
ccttttgcccgtagcccttggcaca

SEQ ID NO: 815888 - DNA, 25 bp, Homo sapien
catccttttgcccgtagcccttggc

SEQ ID NO: 815889 - DNA, 25 bp, Homo sapien
cctgatgtgattgttagtttaccca

SEQ ID NO: 815890 - DNA, 25 bp, Homo sapien
ctgatgtgattgttagtttacccat

SEQ ID NO: 815891 - DNA, 25 bp, Homo sapien
actttgctgaccacttctatgatga

SEQ ID NO: 815892 - DNA, 25 bp, Homo sapien
gaggtcaatggatactcctacaggg

SEQ ID NO: 815893 - DNA, 25 bp, Homo sapien
tgttattgcatctcacactttgctg

SEQ ID NO: 815894 - DNA, 25 bp, Homo sapien
gcttgatgcattggccagcagtgga

SEQ ID NO: 815895 - DNA, 25 bp, Homo sapien
ttaccattcctatctttctcatgtt

SEQ ID NO: 815896 - DNA, 25 bp, Homo sapien
accattcctatctttctcatgttgt

SEQ ID NO: 815897 - DNA, 25 bp, Homo sapien
taccattcctatctttctcatgttg

SEQ ID NO: 815898 - DNA, 25 bp, Homo sapien
ccactgataactggccatgcacagc

SEQ ID NO: 815899 - DNA, 25 bp, Homo sapien
catgcacatagacctgtgaggcagc

SEQ ID NO: 815900 - DNA, 25 bp, Homo sapien
cacagcaggcatggacacttgatcc

SEQ ID NO: 815901 - DNA, 25 bp, Homo sapien
gaaatggctttaagcatgcacatag

SEQ ID NO: 815902 - DNA, 25 bp, Homo sapien
gcaatagaaaggaaccgaattttca

SEQ ID NO: 815903 - DNA, 25 bp, Homo sapien
tgcaatagaaaggaaccgaattttc

SEQ ID NO: 815904 - DNA, 25 bp, Homo sapien
ctgcaatagaaaggaaccgaatttt

SEQ ID NO: 815905 - DNA, 25 bp, Homo sapien
ccttgtttggcgtggctcaaaagct

SEQ ID NO: 815906 - DNA, 25 bp, Homo sapien
aaggcctttgtggatttcatcacag

SEQ ID NO: 815907 - DNA, 25 bp, Homo sapien
gcctttgtggatttcatcacaggac

SEQ ID NO: 815908 - DNA, 25 bp, Homo sapien
tcacaggacccttgtttggcgtggc

SEQ ID NO: 815909 - DNA, 25 bp, Homo sapien
gatttgttgactagtgcttgggcac

SEQ ID NO: 815910 - DNA, 25 bp, Homo sapien
ttaagagattctgttagcccacatg

SEQ ID NO: 815911 - DNA, 25 bp, Homo sapien
tatttctgaagcagctacatagcag

SEQ ID NO: 815912 - DNA, 25 bp, Homo sapien
cacatgttcatgttggttgctgctg

SEQ ID NO: 815913 - DNA, 25 bp, Homo sapien
gttgaggctggttatagaggttttc

SEQ ID NO: 815914 - DNA, 25 bp, Homo sapien
ctcttttgttgggaagctcatttta

SEQ ID NO: 815915 - DNA, 25 bp, Homo sapien
ttgttggtagcttacctggaaggca

SEQ ID NO: 815916 - DNA, 25 bp, Homo sapien
gaaggcagtgaccacttttttatat

SEQ ID NO: 815917 - DNA, 25 bp, Homo sapien
gaaagtcccagggtaccgcctctgc

SEQ ID NO: 815918 - DNA, 25 bp, Homo sapien
gattgtgtgatcctcccgaaagtcc

SEQ ID NO: 815919 - DNA, 25 bp, Homo sapien
gcctctgcacaacgctgatgtcttg

SEQ ID NO: 815920 - DNA, 25 bp, Homo sapien
gaagtctgtagccacatccggaagt

SEQ ID NO: 815921 - DNA, 25 bp, Homo sapien
gctgttcttccagcgacagcacctc

SEQ ID NO: 815922 - DNA, 25 bp, Homo sapien
gttcttccagcgacagcacctcgat

SEQ ID NO: 815923 - DNA, 25 bp, Homo sapien
tgttcttccagcgacagcacctcga

SEQ ID NO: 815924 - DNA, 25 bp, Homo sapien
ttcttccagcgacagcacctcgatg

SEQ ID NO: 815925 - DNA, 25 bp, Homo sapien
ctccaggccccagttgtggacagca

SEQ ID NO: 815926 - DNA, 25 bp, Homo sapien
ttgtaaaatgtgaccccagctccag

SEQ ID NO: 815927 - DNA, 25 bp, Homo sapien
cagctcccaagaaccctccggttgt

SEQ ID NO: 815928 - DNA, 25 bp, Homo sapien
ctccggttgtaaaatgtgaccccag

SEQ ID NO: 815929 - DNA, 25 bp, Homo sapien
tgggtgccactgtagaacctggtaa

SEQ ID NO: 815930 - DNA, 25 bp, Homo sapien
gggtgccactgtagaacctggtaac

SEQ ID NO: 815931 - DNA, 25 bp, Homo sapien
tgcccgatgcacagtaagtccgtgt

SEQ ID NO: 815932 - DNA, 25 bp, Homo sapien
tattagtctcactgagcagtcctgg

SEQ ID NO: 815933 - DNA, 25 bp, Homo sapien
tgtcaagtctctgcacagtgcccga

SEQ ID NO: 815934 - DNA, 25 bp, Homo sapien
ttcccagtagaaaggatggcagcgt

SEQ ID NO: 815935 - DNA, 25 bp, Homo sapien
agccagaatgggacaaggtttctca

SEQ ID NO: 815936 - DNA, 25 bp, Homo sapien
tcaggactccgagtaaaagcaaatt

SEQ ID NO: 815937 - DNA, 25 bp, Homo sapien
caacacgccttcctacttcagcacc

SEQ ID NO: 815938 - DNA, 25 bp, Homo sapien
ctttgtgtgtgttgagttctctgct

SEQ ID NO: 815939 - DNA, 25 bp, Homo sapien
gtgtgtttcattattaattaacgat

SEQ ID NO: 815940 - DNA, 25 bp, Homo sapien
gtgtttcattattaattaacgataa

SEQ ID NO: 815941 - DNA, 25 bp, Homo sapien
tgtttcattattaattaacgataaa

SEQ ID NO: 815942 - DNA, 25 bp, Homo sapien
ttgtgtgtttcattattaattaacg

SEQ ID NO: 815943 - DNA, 25 bp, Homo sapien
tccaggaactagagagaccactgcc

SEQ ID NO: 815944 - DNA, 25 bp, Homo sapien
cattctgggtacctaggaagggctg

SEQ ID NO: 815945 - DNA, 25 bp, Homo sapien
tgccaagttggagcagccagtctgc

SEQ ID NO: 815946 - DNA, 25 bp, Homo sapien
cacacaaatggatagcagtctgaga

SEQ ID NO: 815947 - DNA, 25 bp, Homo sapien
cagatggcaagctttgatggtggtg

SEQ ID NO: 815948 - DNA, 25 bp, Homo sapien
tgctcaggatgaaggttggattctc

SEQ ID NO: 815949 - DNA, 25 bp, Homo sapien
gattctctaagcatctatctgtagg

SEQ ID NO: 815950 - DNA, 25 bp, Homo sapien
tgtaggccacggtcgccctgtgttt

SEQ ID NO: 815951 - DNA, 25 bp, Homo sapien
tgccccgaggaaacttcagaacaaa

SEQ ID NO: 815952 - DNA, 25 bp, Homo sapien
catccaagtggtatggccaatagag

SEQ ID NO: 815953 - DNA, 25 bp, Homo sapien
gagagctgaaaatactgccccgagg

SEQ ID NO: 815954 - DNA, 25 bp, Homo sapien
taagcatatccagcatgatctgaga

SEQ ID NO: 815955 - DNA, 25 bp, Homo sapien
tgtctgtggagatactaatccctta

SEQ ID NO: 815956 - DNA, 25 bp, Homo sapien
caccatatgctcagttgtctgtgga

SEQ ID NO: 815957 - DNA, 25 bp, Homo sapien
cacatcgctgggcaccatatgctca

SEQ ID NO: 815958 - DNA, 25 bp, Homo sapien
cgggtcttgtggcttaacgctgccc

SEQ ID NO: 815959 - DNA, 25 bp, Homo sapien
gggactttgccagggtagtctactg

SEQ ID NO: 815960 - DNA, 25 bp, Homo sapien
cctctgggctggagagtacttgaag

SEQ ID NO: 815961 - DNA, 25 bp, Homo sapien
cttaatcagtttgtgactgcttgag

SEQ ID NO: 815962 - DNA, 25 bp, Homo sapien
tggaaactgttcaggattgaatcct

SEQ ID NO: 815963 - DNA, 25 bp, Homo sapien
gctgacagattagggcattgctaga

SEQ ID NO: 815964 - DNA, 25 bp, Homo sapien
tgtgggtccatcaacattgcaggca

SEQ ID NO: 815965 - DNA, 25 bp, Homo sapien
gctataggttagcatctacctgggt

SEQ ID NO: 815966 - DNA, 25 bp, Homo sapien
gcaggcaaactagtcctcacaagag

SEQ ID NO: 815967 - DNA, 25 bp, Homo sapien
gaatctcccactgattagatagatg

SEQ ID NO: 815968 - DNA, 25 bp, Homo sapien
taaactcccaatattctgaccacag

SEQ ID NO: 815969 - DNA, 25 bp, Homo sapien
tcttggccacttcaactctagctac

SEQ ID NO: 815970 - DNA, 25 bp, Homo sapien
ttaatccttagttctactgtgcctg

SEQ ID NO: 815971 - DNA, 25 bp, Homo sapien
ttgtttcgaagcaaagcctcactct

SEQ ID NO: 815972 - DNA, 25 bp, Homo sapien
tgatccagctctcacacagattggg

SEQ ID NO: 815973 - DNA, 25 bp, Homo sapien
tttctggtggtcttaggcaacccta

SEQ ID NO: 815974 - DNA, 25 bp, Homo sapien
gaaacccactaggacttttcatggc

SEQ ID NO: 815975 - DNA, 25 bp, Homo sapien
ctgccacatctgttcgtggaaacat

SEQ ID NO: 815976 - DNA, 25 bp, Homo sapien
tccccactgccccaagagtatagga

SEQ ID NO: 815977 - DNA, 25 bp, Homo sapien
tgccccaagagtataggagttcccc

SEQ ID NO: 815978 - DNA, 25 bp, Homo sapien
gagttcccccaacgggctgccagat

SEQ ID NO: 815979 - DNA, 25 bp, Homo sapien
taggagttcccccaacgggctgcca

SEQ ID NO: 815980 - DNA, 25 bp, Homo sapien
tagagtgtcagacttccaactgaga

SEQ ID NO: 815981 - DNA, 25 bp, Homo sapien
ttccttggttaagggtctgtcacac

SEQ ID NO: 815982 - DNA, 25 bp, Homo sapien
ttctgagtcatcatgaagtcctctg

SEQ ID NO: 815983 - DNA, 25 bp, Homo sapien
tgattgaaggcgttccacggtctgg

SEQ ID NO: 815984 - DNA, 25 bp, Homo sapien
tgtgtggctttaatgatgggcatga

SEQ ID NO: 815985 - DNA, 25 bp, Homo sapien
ctttccggtaccaccttgtaatgcg

SEQ ID NO: 815986 - DNA, 25 bp, Homo sapien
taccaccttgtaatgcgaagtctac

SEQ ID NO: 815987 - DNA, 25 bp, Homo sapien
tggaataaggctcgtttctgtccct

SEQ ID NO: 815988 - DNA, 25 bp, Homo sapien
tgacacttcactggctgattaattg

SEQ ID NO: 815989 - DNA, 25 bp, Homo sapien
tggctgattaattgtctgggatctg

SEQ ID NO: 815990 - DNA, 25 bp, Homo sapien
atgacacttcactggctgattaatt

SEQ ID NO: 815991 - DNA, 25 bp, Homo sapien
gctgattaattgtctgggatctgct

SEQ ID NO: 815992 - DNA, 25 bp, Homo sapien
tctgtttttaactcgggtatctctc

SEQ ID NO: 815993 - DNA, 25 bp, Homo sapien
ttttaactcgggtatctctcatctg

SEQ ID NO: 815994 - DNA, 25 bp, Homo sapien
taactcgggtatctctcatctgttt

SEQ ID NO: 815995 - DNA, 25 bp, Homo sapien
tcgggtatctctcatctgttttagg

SEQ ID NO: 815996 - DNA, 25 bp, Homo sapien
tttttagggcaaggtgaccttcatc

SEQ ID NO: 815997 - DNA, 25 bp, Homo sapien
caggaacgtgctccaccagactagg

SEQ ID NO: 815998 - DNA, 25 bp, Homo sapien
tttaaacctcccattttgatgtcag

SEQ ID NO: 815999 - DNA, 25 bp, Homo sapien
tctacttctggaataagtgttggcg

SEQ ID NO: 816000 - DNA, 25 bp, Homo sapien
ggtgttctcagtgcagctatgttcc

SEQ ID NO: 816001 - DNA, 25 bp, Homo sapien
tgggcttgacccagatcccagaaga

SEQ ID NO: 816002 - DNA, 25 bp, Homo sapien
gacatgagtcttcattccctcaact

SEQ ID NO: 816003 - DNA, 25 bp, Homo sapien
tcaactcccattggtgaggtagcta

SEQ ID NO: 816004 - DNA, 25 bp, Homo sapien
cttgaacctgatctgaggagtagga

SEQ ID NO: 816005 - DNA, 25 bp, Homo sapien
tctgaggagtaggatataaacagca

SEQ ID NO: 816006 - DNA, 25 bp, Homo sapien
gagtaggatataaacagcaccccaa

SEQ ID NO: 816007 - DNA, 25 bp, Homo sapien
cctgatctgaggagtaggatataaa

SEQ ID NO: 816008 - DNA, 25 bp, Homo sapien
gtgcctatcactatgcccagtgggt

SEQ ID NO: 816009 - DNA, 25 bp, Homo sapien
tgaactcgccacttgcaggtgacca

SEQ ID NO: 816010 - DNA, 25 bp, Homo sapien
tgaagtcatctttgaactcgccact

SEQ ID NO: 816011 - DNA, 25 bp, Homo sapien
tgcccagcccattgtataacagttt

SEQ ID NO: 816012 - DNA, 25 bp, Homo sapien
tgtggtaagcattgaaacgtttcct

SEQ ID NO: 816013 - DNA, 25 bp, Homo sapien
tcaaagccgtaagttctagaagagt

SEQ ID NO: 816014 - DNA, 25 bp, Homo sapien
tgccagtggcaacaaacagccaggg

SEQ ID NO: 816015 - DNA, 25 bp, Homo sapien
cacaggtactgactggaaagaagtc

SEQ ID NO: 816016 - DNA, 25 bp, Homo sapien
tccttgcctgtttgacaatttctag

SEQ ID NO: 816017 - DNA, 25 bp, Homo sapien
actcagtttgtgtactgtgtaactc

SEQ ID NO: 816018 - DNA, 25 bp, Homo sapien
gcacgtgcccttttgtttccatcct

SEQ ID NO: 816019 - DNA, 25 bp, Homo sapien
taatgttccactatgactcagtttg

SEQ ID NO: 816020 - DNA, 25 bp, Homo sapien
aacatttcttagcaccagcaaaaag

SEQ ID NO: 816021 - DNA, 25 bp, Homo sapien
tgcagaaaacatttcttagcaccag

SEQ ID NO: 816022 - DNA, 25 bp, Homo sapien
tttcttagcaccagcaaaaagtccc

SEQ ID NO: 816023 - DNA, 25 bp, Homo sapien
ttagcaccagcaaaaagtccctcct

SEQ ID NO: 816024 - DNA, 25 bp, Homo sapien
ttgcatgtgaggctcccaatagctc

SEQ ID NO: 816025 - DNA, 25 bp, Homo sapien
catgtgaggctcccaatagctctct

SEQ ID NO: 816026 - DNA, 25 bp, Homo sapien
aattgcatgtgaggctcccaatagc

SEQ ID NO: 816027 - DNA, 25 bp, Homo sapien
tgcatgtgaggctcccaatagctct

SEQ ID NO: 816028 - DNA, 25 bp, Homo sapien
tcctgtctgactgcgggttccttct

SEQ ID NO: 816029 - DNA, 25 bp, Homo sapien
cttcctgtttcgattcttttttcat

SEQ ID NO: 816030 - DNA, 25 bp, Homo sapien
tacttccttgaattgcccacaggat

SEQ ID NO: 816031 - DNA, 25 bp, Homo sapien
attgcccacaggattcgcattcctg

SEQ ID NO: 816032 - DNA, 25 bp, Homo sapien
ggccttggctcagcgtaaaactctg

SEQ ID NO: 816033 - DNA, 25 bp, Homo sapien
aacatttagtgtgcttgggcaggat

SEQ ID NO: 816034 - DNA, 25 bp, Homo sapien
taattcccctacatgtgcttcagag

SEQ ID NO: 816035 - DNA, 25 bp, Homo sapien
tcctggtgctactgactgtgtaaac

SEQ ID NO: 816036 - DNA, 25 bp, Homo sapien
tagagatgtctaaacagggctgtat

SEQ ID NO: 816037 - DNA, 25 bp, Homo sapien
gatgtctaaacagggctgtatttca

SEQ ID NO: 816038 - DNA, 25 bp, Homo sapien
ccatggatctgttagagatgtctaa

SEQ ID NO: 816039 - DNA, 25 bp, Homo sapien
ctgcatgccactccatggatctgtt

SEQ ID NO: 816040 - DNA, 25 bp, Homo sapien
ttcttttcggattgggctctgcgtc

SEQ ID NO: 816041 - DNA, 25 bp, Homo sapien
ggattgggctctgcgtccgtttctg

SEQ ID NO: 816042 - DNA, 25 bp, Homo sapien
tttcggattgggctctgcgtccgtt

SEQ ID NO: 816043 - DNA, 25 bp, Homo sapien
attgggctctgcgtccgtttctgca

SEQ ID NO: 816044 - DNA, 25 bp, Homo sapien
tcagtgggtacagccttcctctcta

SEQ ID NO: 816045 - DNA, 25 bp, Homo sapien
ttattctgtattaaggctctgcttt

SEQ ID NO: 816046 - DNA, 25 bp, Homo sapien
ttcctgtgaactgatagttggcttt

SEQ ID NO: 816047 - DNA, 25 bp, Homo sapien
attttcaagctctgctttaaggtcc

SEQ ID NO: 816048 - DNA, 25 bp, Homo sapien
gatagttggctttttgcggtaacca

SEQ ID NO: 816049 - DNA, 25 bp, Homo sapien
ctttttgcggtaaccaggtcctgtg

SEQ ID NO: 816050 - DNA, 25 bp, Homo sapien
aatttggtggcttgaggctgggtac

SEQ ID NO: 816051 - DNA, 25 bp, Homo sapien
aaaatccttaatttggtggcttgag

SEQ ID NO: 816052 - DNA, 25 bp, Homo sapien
aatccttaatttggtggcttgaggc

SEQ ID NO: 816053 - DNA, 25 bp, Homo sapien
tccttaatttggtggcttgaggctg

SEQ ID NO: 816054 - DNA, 25 bp, Homo sapien
attcatttttcagtacttccatggc

SEQ ID NO: 816055 - DNA, 25 bp, Homo sapien
cattcatttttcagtacttccatgg

SEQ ID NO: 816056 - DNA, 25 bp, Homo sapien
caatcagagagccaagtttcataag

SEQ ID NO: 816057 - DNA, 25 bp, Homo sapien
aatcagagagccaagtttcataagc

SEQ ID NO: 816058 - DNA, 25 bp, Homo sapien
tgcaatcagagagccaagtttcata

SEQ ID NO: 816059 - DNA, 25 bp, Homo sapien
atcagagagccaagtttcataagcc

SEQ ID NO: 816060 - DNA, 25 bp, Homo sapien
tgaaatgcaatcgtgtgggtatttt

SEQ ID NO: 816061 - DNA, 25 bp, Homo sapien
taagaagcaggattacaatattcac

SEQ ID NO: 816062 - DNA, 25 bp, Homo sapien
gcaattgttgggtttccattggcac

SEQ ID NO: 816063 - DNA, 25 bp, Homo sapien
caatcgtgtgggtattttgacattt

SEQ ID NO: 816064 - DNA, 25 bp, Homo sapien
catcttttgaaatggggttaggata

SEQ ID NO: 816065 - DNA, 25 bp, Homo sapien
ccatcttttgaaatggggttaggat

SEQ ID NO: 816066 - DNA, 25 bp, Homo sapien
atcttttgaaatggggttaggatag

SEQ ID NO: 816067 - DNA, 25 bp, Homo sapien
atccatcttttgaaatggggttagg

SEQ ID NO: 816068 - DNA, 25 bp, Homo sapien
ttcaaagatgattttacggccgggc

SEQ ID NO: 816069 - DNA, 25 bp, Homo sapien
ggcttctctgagagggcatccacaa

SEQ ID NO: 816070 - DNA, 25 bp, Homo sapien
gaaaggtggtttgcatgccactgca

SEQ ID NO: 816071 - DNA, 25 bp, Homo sapien
caatagtaggagacttggaagctcc

SEQ ID NO: 816072 - DNA, 25 bp, Homo sapien
gatagggttgaggaatctttaatct

SEQ ID NO: 816073 - DNA, 25 bp, Homo sapien
agggttgaggaatctttaatctgaa

SEQ ID NO: 816074 - DNA, 25 bp, Homo sapien
aaaggctacaatccagaagtcactc

SEQ ID NO: 816075 - DNA, 25 bp, Homo sapien
tctgaaaggctacaatccagaagtc

SEQ ID NO: 816076 - DNA, 25 bp, Homo sapien
tgtttctgatgtaggtcacccgcac

SEQ ID NO: 816077 - DNA, 25 bp, Homo sapien
gcttttcagaaatgatcacaccctg

SEQ ID NO: 816078 - DNA, 25 bp, Homo sapien
agtgagggtccgcacatttccgtgg

SEQ ID NO: 816079 - DNA, 25 bp, Homo sapien
ccccaagcagtggatactgtgtcta

SEQ ID NO: 816080 - DNA, 25 bp, Homo sapien
cccctcctgggtgtcatgtgatcta

SEQ ID NO: 816081 - DNA, 25 bp, Homo sapien
ggtgtcatgtgatctacttgaatgc

SEQ ID NO: 816082 - DNA, 25 bp, Homo sapien
aatgctgtcaggcactagctattga

SEQ ID NO: 816083 - DNA, 25 bp, Homo sapien
agctattgagcttgtgccaggacca

SEQ ID NO: 816084 - DNA, 25 bp, Homo sapien
tgtcagtataaactggtggttttcc

SEQ ID NO: 816085 - DNA, 25 bp, Homo sapien
taaagtgtttttctcagcttgatat

SEQ ID NO: 816086 - DNA, 25 bp, Homo sapien
tcagcttgatatggatacacctgag

SEQ ID NO: 816087 - DNA, 25 bp, Homo sapien
tcagtataaactggtggttttccac

SEQ ID NO: 816088 - DNA, 25 bp, Homo sapien
caacaatgattggaaacagcgagcc

SEQ ID NO: 816089 - DNA, 25 bp, Homo sapien
cttgtcttggagagtgagtccttct

SEQ ID NO: 816090 - DNA, 25 bp, Homo sapien
tctatgggtgtttttactgccaaca

SEQ ID NO: 816091 - DNA, 25 bp, Homo sapien
taatgacttggccattgtctatggg

SEQ ID NO: 816092 - DNA, 25 bp, Homo sapien
gggaatctaataacaggatagcatc

SEQ ID NO: 816093 - DNA, 25 bp, Homo sapien
ctttgtaagaagcactaggagcctg

SEQ ID NO: 816094 - DNA, 25 bp, Homo sapien
cctgtgctccgcagaacacataggg

SEQ ID NO: 816095 - DNA, 25 bp, Homo sapien
taaacgttttgttgatggagatgga

SEQ ID NO: 816096 - DNA, 25 bp, Homo sapien
ccatagctgaataccattttgcttt

SEQ ID NO: 816097 - DNA, 25 bp, Homo sapien
tttgcctctctcccaaattccatag

SEQ ID NO: 816098 - DNA, 25 bp, Homo sapien
cccaaattccatagctgaataccat

SEQ ID NO: 816099 - DNA, 25 bp, Homo sapien
aattccatagctgaataccattttg

SEQ ID NO: 816100 - DNA, 25 bp, Homo sapien
ttggcattctaaacgtggttggtag

SEQ ID NO: 816101 - DNA, 25 bp, Homo sapien
tttggcattctaaacgtggttggta

SEQ ID NO: 816102 - DNA, 25 bp, Homo sapien
tggcattctaaacgtggttggtagt

SEQ ID NO: 816103 - DNA, 25 bp, Homo sapien
tagagtgaagaacaaggtcctgcag

SEQ ID NO: 816104 - DNA, 25 bp, Homo sapien
tcaactgctgaagaccgaatgtatc

SEQ ID NO: 816105 - DNA, 25 bp, Homo sapien
ctctgggtgtggtctggacattgct

SEQ ID NO: 816106 - DNA, 25 bp, Homo sapien
gggctccgacatctccacgtttcag

SEQ ID NO: 816107 - DNA, 25 bp, Homo sapien
atccgaatcaaaacatctgcaagtg

SEQ ID NO: 816108 - DNA, 25 bp, Homo sapien
agtgctgtgattgagaccaaaggga

SEQ ID NO: 816109 - DNA, 25 bp, Homo sapien
gattgagaccaaagggaatgtgtaa

SEQ ID NO: 816110 - DNA, 25 bp, Homo sapien
gatgatccgaatcaaaacatctgca

SEQ ID NO: 816111 - DNA, 25 bp, Homo sapien
gatgctgtgacttggactttagagg

SEQ ID NO: 816112 - DNA, 25 bp, Homo sapien
cagaatcatccctcatgtgcatgta

SEQ ID NO: 816113 - DNA, 25 bp, Homo sapien
tattacacaagaaatggtatgtccg

SEQ ID NO: 816114 - DNA, 25 bp, Homo sapien
aatgcaaggcttactagagggaggt

SEQ ID NO: 816115 - DNA, 25 bp, Homo sapien
ttgtgatggttgtggccaggtcttc

SEQ ID NO: 816116 - DNA, 25 bp, Homo sapien
tcagataaccgccttatttttgtga

SEQ ID NO: 816117 - DNA, 25 bp, Homo sapien
caattataggaaatacctttgaggg

SEQ ID NO: 816118 - DNA, 25 bp, Homo sapien
caggtcttctgatgcaggatttcta

SEQ ID NO: 816119 - DNA, 25 bp, Homo sapien
gatgttgattcagcgacaatttact

SEQ ID NO: 816120 - DNA, 25 bp, Homo sapien
ctttccaggacaatgccgtctacac

SEQ ID NO: 816121 - DNA, 25 bp, Homo sapien
cacagacttccaatggaagatgttg

SEQ ID NO: 816122 - DNA, 25 bp, Homo sapien
tgattcagcgacaatttactagaaa

SEQ ID NO: 816123 - DNA, 25 bp, Homo sapien
ccatgataagacagtatacatttac

SEQ ID NO: 816124 - DNA, 25 bp, Homo sapien
accatgataagacagtatacattta

SEQ ID NO: 816125 - DNA, 25 bp, Homo sapien
aaccatgataagacagtatacattt

SEQ ID NO: 816126 - DNA, 25 bp, Homo sapien
atcgatggcagggacatttttactg

SEQ ID NO: 816127 - DNA, 25 bp, Homo sapien
gactttagtatgttttgaatggtgg

SEQ ID NO: 816128 - DNA, 25 bp, Homo sapien
cttaataatcaagactttaggctgg

SEQ ID NO: 816129 - DNA, 25 bp, Homo sapien
aaatagaaaccttctcagtgctgca

SEQ ID NO: 816130 - DNA, 25 bp, Homo sapien
agaagtcttgatgccatgggctgca

SEQ ID NO: 816131 - DNA, 25 bp, Homo sapien
tgggctgcatgaagtgtcttccctt

SEQ ID NO: 816132 - DNA, 25 bp, Homo sapien
agtaggagaagtcttgatgccatgg

SEQ ID NO: 816133 - DNA, 25 bp, Homo sapien
tccctttgtcaaccccacgccagtg

SEQ ID NO: 816134 - DNA, 25 bp, Homo sapien
tcctgaagaatgctccccgctattg

SEQ ID NO: 816135 - DNA, 25 bp, Homo sapien
cagcaaggtattgtgtcaggccaga

SEQ ID NO: 816136 - DNA, 25 bp, Homo sapien
agagctcctgaagaatgctccccgc

SEQ ID NO: 816137 - DNA, 25 bp, Homo sapien
tattgcatgcccgtagcctggctga

SEQ ID NO: 816138 - DNA, 25 bp, Homo sapien
tctgactcacatcttttgaactctg

SEQ ID NO: 816139 - DNA, 25 bp, Homo sapien
ctctgactcacatcttttgaactct

SEQ ID NO: 816140 - DNA, 25 bp, Homo sapien
ttgaactctggggtccacactgtcc

SEQ ID NO: 816141 - DNA, 25 bp, Homo sapien
agaaccactgacaaactcaaatact

SEQ ID NO: 816142 - DNA, 25 bp, Homo sapien
tctggagagtaagccaacagctggt

SEQ ID NO: 816143 - DNA, 25 bp, Homo sapien
caaggtgggtattggataagcactc

SEQ ID NO: 816144 - DNA, 25 bp, Homo sapien
ggaaaatgacgtctcccatggccgc

SEQ ID NO: 816145 - DNA, 25 bp, Homo sapien
cggcagtgtaccatgtccagggcag

SEQ ID NO: 816146 - DNA, 25 bp, Homo sapien
ggataagttgacgtctggctcccca

SEQ ID NO: 816147 - DNA, 25 bp, Homo sapien
taaaagttgttgtaggatatggcag

SEQ ID NO: 816148 - DNA, 25 bp, Homo sapien
cagtgttacgttgcatacagtataa

SEQ ID NO: 816149 - DNA, 25 bp, Homo sapien
cccacactcaggcagtgttacgttg

SEQ ID NO: 816150 - DNA, 25 bp, Homo sapien
gcatttccaagtttttcctcagctg

SEQ ID NO: 816151 - DNA, 25 bp, Homo sapien
catttccaagtttttcctcagctgg

SEQ ID NO: 816152 - DNA, 25 bp, Homo sapien
ctgcccttgggcatttccaagtttt

SEQ ID NO: 816153 - DNA, 25 bp, Homo sapien
ttccaagtttttcctcagctggcat

SEQ ID NO: 816154 - DNA, 25 bp, Homo sapien
cgcacaggtattctgcttgctctct

SEQ ID NO: 816155 - DNA, 25 bp, Homo sapien
tctgcttgctctcttatgtattttg

SEQ ID NO: 816156 - DNA, 25 bp, Homo sapien
agtgccttgctgttgtcaggccgca

SEQ ID NO: 816157 - DNA, 25 bp, Homo sapien
ttgtcaggccgcacaggtattctgc

SEQ ID NO: 816158 - DNA, 25 bp, Homo sapien
cacagtactttcagagcaaatgcag

SEQ ID NO: 816159 - DNA, 25 bp, Homo sapien
caggcactcaagagacagcttactg

SEQ ID NO: 816160 - DNA, 25 bp, Homo sapien
gtgcaatttcaacgcggaacacagt

SEQ ID NO: 816161 - DNA, 25 bp, Homo sapien
gttggttgaaagaaacaggcactca

SEQ ID NO: 816162 - DNA, 25 bp, Homo sapien
gaagggattctttgagcgccaggca

SEQ ID NO: 816163 - DNA, 25 bp, Homo sapien
cctttgaggtgtgtgtttcactgtg

SEQ ID NO: 816164 - DNA, 25 bp, Homo sapien
taaatcttgacagcataactaccat

SEQ ID NO: 816165 - DNA, 25 bp, Homo sapien
tatgctaaagtgatacgagccccag

SEQ ID NO: 816166 - DNA, 25 bp, Homo sapien
gccctaccatatgcttagtgaatgc

SEQ ID NO: 816167 - DNA, 25 bp, Homo sapien
ctgccctaccatatgcttagtgaat

SEQ ID NO: 816168 - DNA, 25 bp, Homo sapien
cctaccatatgcttagtgaatgcca

SEQ ID NO: 816169 - DNA, 25 bp, Homo sapien
ctaccatatgcttagtgaatgccat

SEQ ID NO: 816170 - DNA, 25 bp, Homo sapien
ggctacctccttccttgtctggttc

SEQ ID NO: 816171 - DNA, 25 bp, Homo sapien
tacctccttccttgtctggttctgc

SEQ ID NO: 816172 - DNA, 25 bp, Homo sapien
cctccttccttgtctggttctgcct

SEQ ID NO: 816173 - DNA, 25 bp, Homo sapien
gctacctccttccttgtctggttct

SEQ ID NO: 816174 - DNA, 25 bp, Homo sapien
tttttacatgtaaaggagcactgtg

SEQ ID NO: 816175 - DNA, 25 bp, Homo sapien
tctgaagtctttggtcctctgatgc

SEQ ID NO: 816176 - DNA, 25 bp, Homo sapien
aaagttgtctgcagaagtgaagagg

SEQ ID NO: 816177 - DNA, 25 bp, Homo sapien
gaattgcagcctgatctgcctggca

SEQ ID NO: 816178 - DNA, 25 bp, Homo sapien
aagccagtgcctttgagtccatgcc

SEQ ID NO: 816179 - DNA, 25 bp, Homo sapien
tgggcacccttctctgaggtgattt

SEQ ID NO: 816180 - DNA, 25 bp, Homo sapien
ctttgagtccatgcccacagattcc

SEQ ID NO: 816181 - DNA, 25 bp, Homo sapien
catttctgagtactttggctgcaga

SEQ ID NO: 816182 - DNA, 25 bp, Homo sapien
tgccatcatcgggacagtgcctcat

SEQ ID NO: 816183 - DNA, 25 bp, Homo sapien
cccctaaggtggtggagcagtgcac

SEQ ID NO: 816184 - DNA, 25 bp, Homo sapien
tatatatatctacaggcagggagct

SEQ ID NO: 816185 - DNA, 25 bp, Homo sapien
tcatgctgtcgtcatggcacggaca

SEQ ID NO: 816186 - DNA, 25 bp, Homo sapien
tagtggatcaaacgagctcctgcca

SEQ ID NO: 816187 - DNA, 25 bp, Homo sapien
ttattcttctgtgtacttattttcc

SEQ ID NO: 816188 - DNA, 25 bp, Homo sapien
cataccaagtagtggatcaaacgag

SEQ ID NO: 816189 - DNA, 25 bp, Homo sapien
cacataatttatagtccataccaag

SEQ ID NO: 816190 - DNA, 25 bp, Homo sapien
cacacacttgtatggtatgctctgc

SEQ ID NO: 816191 - DNA, 25 bp, Homo sapien
tatgctctgcatatggtggctggat

SEQ ID NO: 816192 - DNA, 25 bp, Homo sapien
tgtgacatgggctaccaggaaccct

SEQ ID NO: 816193 - DNA, 25 bp, Homo sapien
cagctgggaagaaggataccctctt

SEQ ID NO: 816194 - DNA, 25 bp, Homo sapien
gccagtaatttgttgcaggggaccc

SEQ ID NO: 816195 - DNA, 25 bp, Homo sapien
tgtgcacatactccagccttacagc

SEQ ID NO: 816196 - DNA, 25 bp, Homo sapien
agcagacctagagagggccagtaat

SEQ ID NO: 816197 - DNA, 25 bp, Homo sapien
gctgggcctgtgtgattggccctgt

SEQ ID NO: 816198 - DNA, 25 bp, Homo sapien
ccaaagttggttgaggagcttgtaa

SEQ ID NO: 816199 - DNA, 25 bp, Homo sapien
tctcctctggtagccaaagttggtt

SEQ ID NO: 816200 - DNA, 25 bp, Homo sapien
gaggagcttgtaaagctgccttgat

SEQ ID NO: 816201 - DNA, 25 bp, Homo sapien
gctcaggggttagccagggtctcaa

SEQ ID NO: 816202 - DNA, 25 bp, Homo sapien
tgtggtcttcataaggacagtgatt

SEQ ID NO: 816203 - DNA, 25 bp, Homo sapien
gaaaggggtctatagaagatgccac

SEQ ID NO: 816204 - DNA, 25 bp, Homo sapien
cattgagaagtgtactgtggtcttc

SEQ ID NO: 816205 - DNA, 25 bp, Homo sapien
gtattgcaataacaaagcttactgg

SEQ ID NO: 816206 - DNA, 25 bp, Homo sapien
gaatatatacatcagaggaacatta

SEQ ID NO: 816207 - DNA, 25 bp, Homo sapien
gctagtacgagggagattatacaaa

SEQ ID NO: 816208 - DNA, 25 bp, Homo sapien
tgtttctatcacagtgacttcatgc

SEQ ID NO: 816209 - DNA, 25 bp, Homo sapien
gacttcatgctgtgaatatatacat

SEQ ID NO: 816210 - DNA, 25 bp, Homo sapien
cctttctttacaagcggtgggcaga

SEQ ID NO: 816211 - DNA, 25 bp, Homo sapien
tgtcctgcttggagtcgatcccaga

SEQ ID NO: 816212 - DNA, 25 bp, Homo sapien
gggtgctggtatcgattagttcctc

SEQ ID NO: 816213 - DNA, 25 bp, Homo sapien
gcggtgggcagaggcttaaaaacca

SEQ ID NO: 816214 - DNA, 25 bp, Homo sapien
cactgcagcgctgctcggggactgt

SEQ ID NO: 816215 - DNA, 25 bp, Homo sapien
gggcgcggggattacaaagcctgaa

SEQ ID NO: 816216 - DNA, 25 bp, Homo sapien
tgcattgttgtgagccggagaaggg

SEQ ID NO: 816217 - DNA, 25 bp, Homo sapien
agcctccagcgcagatcctgcccag

SEQ ID NO: 816218 - DNA, 25 bp, Homo sapien
tggaggcgaactccccgtcgacgta

SEQ ID NO: 816219 - DNA, 25 bp, Homo sapien
cgtcgacgtaatgttttctccacac

SEQ ID NO: 816220 - DNA, 25 bp, Homo sapien
gggtggcaccagtagaaacgctact

SEQ ID NO: 816221 - DNA, 25 bp, Homo sapien
gaaacgctactggaggcgaactccc

SEQ ID NO: 816222 - DNA, 25 bp, Homo sapien
ccccctgggtcttggaagcagccat

SEQ ID NO: 816223 - DNA, 25 bp, Homo sapien
cagccccctgggtcttggaagcagc

SEQ ID NO: 816224 - DNA, 25 bp, Homo sapien
ggcgacagccccctgggtcttggaa

SEQ ID NO: 816225 - DNA, 25 bp, Homo sapien
tcgggcgacagccccctgggtcttg

SEQ ID NO: 816226 - DNA, 25 bp, Homo sapien
tgctgcagctcccatcacggtcttc

SEQ ID NO: 816227 - DNA, 25 bp, Homo sapien
acctacacccccgactgtgctgcag

SEQ ID NO: 816228 - DNA, 25 bp, Homo sapien
gcagctcccatcacggtcttcctgc

SEQ ID NO: 816229 - DNA, 25 bp, Homo sapien
tacacccccgactgtgctgcagctc

SEQ ID NO: 816230 - DNA, 25 bp, Homo sapien
tttctccgccatcccatggcatttt

SEQ ID NO: 816231 - DNA, 25 bp, Homo sapien
agaaaggaagacacatcagccgcgc

SEQ ID NO: 816232 - DNA, 25 bp, Homo sapien
cacacccggtcatagagaaaggaag

SEQ ID NO: 816233 - DNA, 25 bp, Homo sapien
ggtcagaccagaggtccgttgcaca

SEQ ID NO: 816234 - DNA, 25 bp, Homo sapien
ctgcctgttagtctttcctggtcct

SEQ ID NO: 816235 - DNA, 25 bp, Homo sapien
ctctcacttcttccatgagggcaac

SEQ ID NO: 816236 - DNA, 25 bp, Homo sapien
cctggtcctctggtctctctcactt

SEQ ID NO: 816237 - DNA, 25 bp, Homo sapien
tcacttcttccatgagggcaaccat

SEQ ID NO: 816238 - DNA, 25 bp, Homo sapien
ctaaatgaggtgaggtcttgtttaa

SEQ ID NO: 816239 - DNA, 25 bp, Homo sapien
atgaggtgaggtcttgtttaaaaat

SEQ ID NO: 816240 - DNA, 25 bp, Homo sapien
ctggtcacaaacacacgattttaaa

SEQ ID NO: 816241 - DNA, 25 bp, Homo sapien
cctggtcacaaacacacgattttaa

SEQ ID NO: 816242 - DNA, 25 bp, Homo sapien
gatctaggagttcccatgacagtgc

SEQ ID NO: 816243 - DNA, 25 bp, Homo sapien
gccaatattgctggtaagggagtaa

SEQ ID NO: 816244 - DNA, 25 bp, Homo sapien
tctgtgcagaaaactgttcaacaaa

SEQ ID NO: 816245 - DNA, 25 bp, Homo sapien
gaagtctcagaatattctgtgcaga

SEQ ID NO: 816246 - DNA, 25 bp, Homo sapien
tcaggcagtgggtacccttctggtc

SEQ ID NO: 816247 - DNA, 25 bp, Homo sapien
gcggtacgcgccaaaatctcagaaa

SEQ ID NO: 816248 - DNA, 25 bp, Homo sapien
catccggatgaggtcgggcacgttc

SEQ ID NO: 816249 - DNA, 25 bp, Homo sapien
ggctgagctgtatccaaattgcaaa

SEQ ID NO: 816250 - DNA, 25 bp, Homo sapien
aacttgatgtaacactggagtacag

SEQ ID NO: 816251 - DNA, 25 bp, Homo sapien
gtatccattaaccacccctttgctg

SEQ ID NO: 816252 - DNA, 25 bp, Homo sapien
taatggtgacatcagggcaaatggg

SEQ ID NO: 816253 - DNA, 25 bp, Homo sapien
ctagtcttcgtgttcataaaggtga

SEQ ID NO: 816254 - DNA, 25 bp, Homo sapien
gttttctcctgactttgttgattgt

SEQ ID NO: 816255 - DNA, 25 bp, Homo sapien
gcaaatacgttctccgatactgtgg

SEQ ID NO: 816256 - DNA, 25 bp, Homo sapien
tctccgatactgtgggttttctcct

SEQ ID NO: 816257 - DNA, 25 bp, Homo sapien
ctggtcgtaaatcccttttcagacg

SEQ ID NO: 816258 - DNA, 25 bp, Homo sapien
cactgtcttaaggtagcggtaaagg

SEQ ID NO: 816259 - DNA, 25 bp, Homo sapien
ccaaaacaatgtacgtgctgactgc

SEQ ID NO: 816260 - DNA, 25 bp, Homo sapien
tgctgtcactgtcttaaggtagcgg

SEQ ID NO: 816261 - DNA, 25 bp, Homo sapien
cagaatctatggattgatcccaaaa

SEQ ID NO: 816262 - DNA, 25 bp, Homo sapien
taccaatgtagttcctgggccatta

SEQ ID NO: 816263 - DNA, 25 bp, Homo sapien
tgagaactacctggacattctttag

SEQ ID NO: 816264 - DNA, 25 bp, Homo sapien
cttttataccaatgtagttcctggg

SEQ ID NO: 816265 - DNA, 25 bp, Homo sapien
tctttagtgacagtgtaaggggcaa

SEQ ID NO: 816266 - DNA, 25 bp, Homo sapien
ccgatatttgatgttgaatgcctag

SEQ ID NO: 816267 - DNA, 25 bp, Homo sapien
ttgatgttgaatgcctagcaataca

SEQ ID NO: 816268 - DNA, 25 bp, Homo sapien
gaatgcctagcaatacagtcttcaa

SEQ ID NO: 816269 - DNA, 25 bp, Homo sapien
tgttgaatgcctagcaatacagtct

SEQ ID NO: 816270 - DNA, 25 bp, Homo sapien
ctgatacagttccagtgtttttttc

SEQ ID NO: 816271 - DNA, 25 bp, Homo sapien
tccctgatacagttccagtgttttt

SEQ ID NO: 816272 - DNA, 25 bp, Homo sapien
ctccctgatacagttccagtgtttt

SEQ ID NO: 816273 - DNA, 25 bp, Homo sapien
ccctgatacagttccagtgtttttt

SEQ ID NO: 816274 - DNA, 25 bp, Homo sapien
gcataattgacaagaggacctcagg

SEQ ID NO: 816275 - DNA, 25 bp, Homo sapien
catttgcactgaagctaagcctccc

SEQ ID NO: 816276 - DNA, 25 bp, Homo sapien
tattattctagggaagcgcttctca

SEQ ID NO: 816277 - DNA, 25 bp, Homo sapien
tggaaacgtgccattcaaagctcct

SEQ ID NO: 816278 - DNA, 25 bp, Homo sapien
gaaagcggctccaggatacaatcct

SEQ ID NO: 816279 - DNA, 25 bp, Homo sapien
ggaaagcggctccaggatacaatcc

SEQ ID NO: 816280 - DNA, 25 bp, Homo sapien
cagggaaagcggctccaggatacaa

SEQ ID NO: 816281 - DNA, 25 bp, Homo sapien
gggaaagcggctccaggatacaatc

SEQ ID NO: 816282 - DNA, 25 bp, Homo sapien
ggaaatcagcaaccaacttgacatc

SEQ ID NO: 816283 - DNA, 25 bp, Homo sapien
tatgctcaataatcatgtgcttcag

SEQ ID NO: 816284 - DNA, 25 bp, Homo sapien
tcagctatgacaatcttatgctcaa

SEQ ID NO: 816285 - DNA, 25 bp, Homo sapien
aataatcatgtgcttcagaagtttg

SEQ ID NO: 816286 - DNA, 25 bp, Homo sapien
taaccatgagggctggtgttacccc

SEQ ID NO: 816287 - DNA, 25 bp, Homo sapien
tgaactactactggcctcgggtgat

SEQ ID NO: 816288 - DNA, 25 bp, Homo sapien
gacagaatacctcaaaatgggacct

SEQ ID NO: 816289 - DNA, 25 bp, Homo sapien
ggaattactggaaggacccactcag

SEQ ID NO: 816290 - DNA, 25 bp, Homo sapien
gtcctcttctagtggagatggttgt

SEQ ID NO: 816291 - DNA, 25 bp, Homo sapien
ggtcctcttctagtggagatggttg

SEQ ID NO: 816292 - DNA, 25 bp, Homo sapien
caaatggagcagtggaattaattct

SEQ ID NO: 816293 - DNA, 25 bp, Homo sapien
taattcttattacactacaaaaatc

SEQ ID NO: 816294 - DNA, 25 bp, Homo sapien
ggaattaattcttattacactacaa

SEQ ID NO: 816295 - DNA, 25 bp, Homo sapien
gagcagtggaattaattcttattac

SEQ ID NO: 816296 - DNA, 25 bp, Homo sapien
tctatcttctggtaaaacgtcacat

SEQ ID NO: 816297 - DNA, 25 bp, Homo sapien
taagaattctatcttctggtaaaac

SEQ ID NO: 816298 - DNA, 25 bp, Homo sapien
tcttctggtaaaacgtcacataaca

SEQ ID NO: 816299 - DNA, 25 bp, Homo sapien
gaattctatcttctggtaaaacgtc

SEQ ID NO: 816300 - DNA, 25 bp, Homo sapien
aaggctaaagatgctgaggttttca

SEQ ID NO: 816301 - DNA, 25 bp, Homo sapien
tactgaaccctagcatgtgtcaggc

SEQ ID NO: 816302 - DNA, 25 bp, Homo sapien
ccagaaaggctactatgtagattaa

SEQ ID NO: 816303 - DNA, 25 bp, Homo sapien
ccatatgcttaattcataaagggaa

SEQ ID NO: 816304 - DNA, 25 bp, Homo sapien
aatggtatcaccttcccctactgga

SEQ ID NO: 816305 - DNA, 25 bp, Homo sapien
cataagacactgctataaggagaga

SEQ ID NO: 816306 - DNA, 25 bp, Homo sapien
gatcattcttaaggccactgttagc

SEQ ID NO: 816307 - DNA, 25 bp, Homo sapien
tactgcagttgttgtacaggaaaac

SEQ ID NO: 816308 - DNA, 25 bp, Homo sapien
tgcagacacatcgtacagattctgc

SEQ ID NO: 816309 - DNA, 25 bp, Homo sapien
gagacctgagtccatctgcagacac

SEQ ID NO: 816310 - DNA, 25 bp, Homo sapien
tctgcatgctaaagaacaagaatgg

SEQ ID NO: 816311 - DNA, 25 bp, Homo sapien
gctgaagtagtagggtttgagttct

SEQ ID NO: 816312 - DNA, 25 bp, Homo sapien
gcatgtatggattgattgccttttc

SEQ ID NO: 816313 - DNA, 25 bp, Homo sapien
caacgagcatgtatggattgattgc

SEQ ID NO: 816314 - DNA, 25 bp, Homo sapien
aagcagaaattcaacgagcatgtat

SEQ ID NO: 816315 - DNA, 25 bp, Homo sapien
gtttctgtaagctggcataatgctc

SEQ ID NO: 816316 - DNA, 25 bp, Homo sapien
aatttttctatctaagccggagtag

SEQ ID NO: 816317 - DNA, 25 bp, Homo sapien
tccttctcattgttaagacacagca

SEQ ID NO: 816318 - DNA, 25 bp, Homo sapien
tctctaagtagaccgtacactcttg

SEQ ID NO: 816319 - DNA, 25 bp, Homo sapien
tcctgaatacaccttgaacatttag

SEQ ID NO: 816320 - DNA, 25 bp, Homo sapien
cacagggtgctatgaagcaagaacc

SEQ ID NO: 816321 - DNA, 25 bp, Homo sapien
caagttggtctagtctttctcaggc

SEQ ID NO: 816322 - DNA, 25 bp, Homo sapien
cattcactatgtgttcctgggcaaa

SEQ ID NO: 816323 - DNA, 25 bp, Homo sapien
caaggcatggcttatggatggtcat

SEQ ID NO: 816324 - DNA, 25 bp, Homo sapien
aaataatgactacgctggcatggca

SEQ ID NO: 816325 - DNA, 25 bp, Homo sapien
tagtagtaccagacacatgagaggc

SEQ ID NO: 816326 - DNA, 25 bp, Homo sapien
ccagtggcgggctattgtaaactgc

SEQ ID NO: 816327 - DNA, 25 bp, Homo sapien
gatcctataatcattgctaacgccc

SEQ ID NO: 816328 - DNA, 25 bp, Homo sapien
caatttagttaagttacgtcttgct

SEQ ID NO: 816329 - DNA, 25 bp, Homo sapien
tactgagaacttaacgaataccaca

SEQ ID NO: 816330 - DNA, 25 bp, Homo sapien
cttcatacagttaggcctttccttc

SEQ ID NO: 816331 - DNA, 25 bp, Homo sapien
taagttacgtcttgctactgagaac

SEQ ID NO: 816332 - DNA, 25 bp, Homo sapien
tgagttcctctatgccacatgcaca

SEQ ID NO: 816333 - DNA, 25 bp, Homo sapien
cccttactgacatatggttggcact

SEQ ID NO: 816334 - DNA, 25 bp, Homo sapien
tatacccgaggtgcaacaacataca

SEQ ID NO: 816335 - DNA, 25 bp, Homo sapien
ttgggcataccacttctctaggact

SEQ ID NO: 816336 - DNA, 25 bp, Homo sapien
acatacaaacgccatgaaaattggt

SEQ ID NO: 816337 - DNA, 25 bp, Homo sapien
tgtttccaaggaattcttcattgca

SEQ ID NO: 816338 - DNA, 25 bp, Homo sapien
tggtatcatttcgttcttgctgctg

SEQ ID NO: 816339 - DNA, 25 bp, Homo sapien
tacaaacgccatgaaaattggtatc

SEQ ID NO: 816340 - DNA, 25 bp, Homo sapien
taatcacatgcctcctcactaggtc

SEQ ID NO: 816341 - DNA, 25 bp, Homo sapien
tgtcagtagtaatgtttggtaaatt

SEQ ID NO: 816342 - DNA, 25 bp, Homo sapien
ttacctcaacataaaatcggaaata

SEQ ID NO: 816343 - DNA, 25 bp, Homo sapien
catatgccgatatgagagatctctg

SEQ ID NO: 816344 - DNA, 25 bp, Homo sapien
taacagtctgcacttggtcccatgc

SEQ ID NO: 816345 - DNA, 25 bp, Homo sapien
ccaggattccaagcctgatatccag

SEQ ID NO: 816346 - DNA, 25 bp, Homo sapien
taggagtggcctagccttagccagg

SEQ ID NO: 816347 - DNA, 25 bp, Homo sapien
ttcaggtgaggttcccctaggagtg

SEQ ID NO: 816348 - DNA, 25 bp, Homo sapien
cagatatgagtgttgggaggctacc

SEQ ID NO: 816349 - DNA, 25 bp, Homo sapien
aacaagcccatgtgtgagcctaggc

SEQ ID NO: 816350 - DNA, 25 bp, Homo sapien
gaacgagggctaacaagcagctgtc

SEQ ID NO: 816351 - DNA, 25 bp, Homo sapien
caaggacagttctaccacagtgggc

SEQ ID NO: 816352 - DNA, 25 bp, Homo sapien
caacagtaaccaagcatgtcaggtc

SEQ ID NO: 816353 - DNA, 25 bp, Homo sapien
caagccttggaatggaccaagagct

SEQ ID NO: 816354 - DNA, 25 bp, Homo sapien
ttcaggcctgacacccaagccttgg

SEQ ID NO: 816355 - DNA, 25 bp, Homo sapien
tgactccaaagtgttcccccaacag

SEQ ID NO: 816356 - DNA, 25 bp, Homo sapien
gggttccagacctgaggctcaggct

SEQ ID NO: 816357 - DNA, 25 bp, Homo sapien
gaagagttcaggtgaaagcagagct

SEQ ID NO: 816358 - DNA, 25 bp, Homo sapien
tagtatgctcatttgtctcactgcc

SEQ ID NO: 816359 - DNA, 25 bp, Homo sapien
tgataactttgactaaaactacttg

SEQ ID NO: 816360 - DNA, 25 bp, Homo sapien
gtttacaatgttgtctggcaatcca

SEQ ID NO: 816361 - DNA, 25 bp, Homo sapien
tgtacacaaaaattcattgcagttt

SEQ ID NO: 816362 - DNA, 25 bp, Homo sapien
tgtctggcaatccaatgttgaaagc

SEQ ID NO: 816363 - DNA, 25 bp, Homo sapien
cacaaaaattcattgcagtttacaa

SEQ ID NO: 816364 - DNA, 25 bp, Homo sapien
tattcatttggctttgtagagtgca

SEQ ID NO: 816365 - DNA, 25 bp, Homo sapien
gatataccatccttgtcagaatccc

SEQ ID NO: 816366 - DNA, 25 bp, Homo sapien
caagtctcttgtatagttgctgcaa

SEQ ID NO: 816367 - DNA, 25 bp, Homo sapien
tacacaaacactgataaacaagtct

SEQ ID NO: 816368 - DNA, 25 bp, Homo sapien
tcttctcacagtacaagcactgcaa

SEQ ID NO: 816369 - DNA, 25 bp, Homo sapien
cctgaaggtcttctcacagtacaag

SEQ ID NO: 816370 - DNA, 25 bp, Homo sapien
gaaggtcttctcacagtacaagcac

SEQ ID NO: 816371 - DNA, 25 bp, Homo sapien
ggtcttctcacagtacaagcactgc

SEQ ID NO: 816372 - DNA, 25 bp, Homo sapien
cctcagaaagattttgtttgcagta

SEQ ID NO: 816373 - DNA, 25 bp, Homo sapien
gtttgcagtactgcaatcaaatttt

SEQ ID NO: 816374 - DNA, 25 bp, Homo sapien
gcagtactgcaatcaaattttaagt

SEQ ID NO: 816375 - DNA, 25 bp, Homo sapien
tcctcagaaagattttgtttgcagt

SEQ ID NO: 816376 - DNA, 25 bp, Homo sapien
tgactgtgagttctagagacatgac

SEQ ID NO: 816377 - DNA, 25 bp, Homo sapien
taatcactacttgaatgtgcccctc

SEQ ID NO: 816378 - DNA, 25 bp, Homo sapien
tgtactctaaccatttcaaagctaa

SEQ ID NO: 816379 - DNA, 25 bp, Homo sapien
ggtatgtggatatccaaatgctgta

SEQ ID NO: 816380 - DNA, 25 bp, Homo sapien
caaatccgtgccctgtatgagcagc

SEQ ID NO: 816381 - DNA, 25 bp, Homo sapien
gacaaaattccaccctaaagcagag

SEQ ID NO: 816382 - DNA, 25 bp, Homo sapien
gacagctaccctacttgatgcccag

SEQ ID NO: 816383 - DNA, 25 bp, Homo sapien
caattagccttttgtgaccagtggg

SEQ ID NO: 816384 - DNA, 25 bp, Homo sapien
tgctgattaaagtcagctttacttt

SEQ ID NO: 816385 - DNA, 25 bp, Homo sapien
tgttactaagcctgatacctctggt

SEQ ID NO: 816386 - DNA, 25 bp, Homo sapien
cccatcattgttgcgctggcagagt

SEQ ID NO: 816387 - DNA, 25 bp, Homo sapien
tctgctataggagaggtcgaacgct

SEQ ID NO: 816388 - DNA, 25 bp, Homo sapien
tctagcatctggtacctggaaggca

SEQ ID NO: 816389 - DNA, 25 bp, Homo sapien
tatgtagctgaagcctcgatgttaa

SEQ ID NO: 816390 - DNA, 25 bp, Homo sapien
catgagcatcgtaggaatatgtagc

SEQ ID NO: 816391 - DNA, 25 bp, Homo sapien
aagcttacttttgttataagtggct

SEQ ID NO: 816392 - DNA, 25 bp, Homo sapien
taaacagtctgttgccctctgagga

SEQ ID NO: 816393 - DNA, 25 bp, Homo sapien
cattagagatggttaatttggactc

SEQ ID NO: 816394 - DNA, 25 bp, Homo sapien
ctaaaaacaaagaactatgagtgcc

SEQ ID NO: 816395 - DNA, 25 bp, Homo sapien
gaggttttgaagctgtcattatcag

SEQ ID NO: 816396 - DNA, 25 bp, Homo sapien
ttggactctataatgtacttcccag

SEQ ID NO: 816397 - DNA, 25 bp, Homo sapien
gaaaagttccactcttttggcgcta

SEQ ID NO: 816398 - DNA, 25 bp, Homo sapien
cacagcgttagcaaaactttatgga

SEQ ID NO: 816399 - DNA, 25 bp, Homo sapien
tctggcaagcctagtcacagcgtta

SEQ ID NO: 816400 - DNA, 25 bp, Homo sapien
tgtgccatgcaaaagcagacaatgt

SEQ ID NO: 816401 - DNA, 25 bp, Homo sapien
tggtccagcaactcccgatcatctt

SEQ ID NO: 816402 - DNA, 25 bp, Homo sapien
ctgatggtccagcaactcccgatca

SEQ ID NO: 816403 - DNA, 25 bp, Homo sapien
aactcccgatcatcttccaactgaa

SEQ ID NO: 816404 - DNA, 25 bp, Homo sapien
gatggtccagcaactcccgatcatc

SEQ ID NO: 816405 - DNA, 25 bp, Homo sapien
gtgttcttcccaatcagaccagtca

SEQ ID NO: 816406 - DNA, 25 bp, Homo sapien
gggtgttcttcccaatcagaccagt

SEQ ID NO: 816407 - DNA, 25 bp, Homo sapien
ctccatgtggacatacaacttctca

SEQ ID NO: 816408 - DNA, 25 bp, Homo sapien
agggtgttcttcccaatcagaccag

SEQ ID NO: 816409 - DNA, 25 bp, Homo sapien
ttattttgagaagatcaaattcgtg

SEQ ID NO: 816410 - DNA, 25 bp, Homo sapien
tgagaagatcaaattcgtgtgcatc

SEQ ID NO: 816411 - DNA, 25 bp, Homo sapien
tccgaataaaattgaccagtttcac

SEQ ID NO: 816412 - DNA, 25 bp, Homo sapien
ccgaataaaattgaccagtttcact

SEQ ID NO: 816413 - DNA, 25 bp, Homo sapien
ctccgaataaaattgaccagtttca

SEQ ID NO: 816414 - DNA, 25 bp, Homo sapien
cacgtctttctatcggggagcagcg

SEQ ID NO: 816415 - DNA, 25 bp, Homo sapien
ttgaacttcacatggcagccataac

SEQ ID NO: 816416 - DNA, 25 bp, Homo sapien
tcttaagtctgctttggatttgaac

SEQ ID NO: 816417 - DNA, 25 bp, Homo sapien
tggcagccataacatctgcattggt

SEQ ID NO: 816418 - DNA, 25 bp, Homo sapien
cagatagtgtacacaggagagtgtc

SEQ ID NO: 816419 - DNA, 25 bp, Homo sapien
cttcactgatgatgggaacattttc

SEQ ID NO: 816420 - DNA, 25 bp, Homo sapien
tgagctgtcaggtcactttcactgt

SEQ ID NO: 816421 - DNA, 25 bp, Homo sapien
tagatgtatcttcactgatgatggg

SEQ ID NO: 816422 - DNA, 25 bp, Homo sapien
gtagcaactggttcaaaatactgct

SEQ ID NO: 816423 - DNA, 25 bp, Homo sapien
tagcaactggttcaaaatactgctt

SEQ ID NO: 816424 - DNA, 25 bp, Homo sapien
ttatagtagcaactggttcaaaata

SEQ ID NO: 816425 - DNA, 25 bp, Homo sapien
tagtagcaactggttcaaaatactg

SEQ ID NO: 816426 - DNA, 25 bp, Homo sapien
aggaccaatcttttgttgatgttca

SEQ ID NO: 816427 - DNA, 25 bp, Homo sapien
ctttcatatctgtctcataggagaa

SEQ ID NO: 816428 - DNA, 25 bp, Homo sapien
agtttatttcaccaaggaccaatct

SEQ ID NO: 816429 - DNA, 25 bp, Homo sapien
tgttctttcatatctgtctcatagg

SEQ ID NO: 816430 - DNA, 25 bp, Homo sapien
tagtaagtgcatttttctactttat

SEQ ID NO: 816431 - DNA, 25 bp, Homo sapien
tcacacaataaaactttacagccaa

SEQ ID NO: 816432 - DNA, 25 bp, Homo sapien
atgaagtgagataatttaagatgat

SEQ ID NO: 816433 - DNA, 25 bp, Homo sapien
cacaataaaactttacagccaaaat

SEQ ID NO: 816434 - DNA, 25 bp, Homo sapien
cacacaataaaactttacagccaaa

SEQ ID NO: 816435 - DNA, 25 bp, Homo sapien
tacagctcacccaatatagtacaga

SEQ ID NO: 816436 - DNA, 25 bp, Homo sapien
ggaggagactgaaactactgattga

SEQ ID NO: 816437 - DNA, 25 bp, Homo sapien
ggaatttggccaccctaggcagaaa

SEQ ID NO: 816438 - DNA, 25 bp, Homo sapien
gacatacaaattgcagggaaaagtg

SEQ ID NO: 816439 - DNA, 25 bp, Homo sapien
tttcttcattatatccaaattatgc

SEQ ID NO: 816440 - DNA, 25 bp, Homo sapien
cttcattatatccaaattatgcatt

SEQ ID NO: 816441 - DNA, 25 bp, Homo sapien
tcttcattatatccaaattatgcat

SEQ ID NO: 816442 - DNA, 25 bp, Homo sapien
tcattatatccaaattatgcatttt

SEQ ID NO: 816443 - DNA, 25 bp, Homo sapien
actaaactaagatcatggacctccc

SEQ ID NO: 816444 - DNA, 25 bp, Homo sapien
tatagtagcagaaatggatggagac

SEQ ID NO: 816445 - DNA, 25 bp, Homo sapien
gagactgggctctcgaactggacac

SEQ ID NO: 816446 - DNA, 25 bp, Homo sapien
tagtgcatggatctcacttggaacc

SEQ ID NO: 816447 - DNA, 25 bp, Homo sapien
gacaggcaatacgactccaagatga

SEQ ID NO: 816448 - DNA, 25 bp, Homo sapien
catagagtccttcgccaatagtggc

SEQ ID NO: 816449 - DNA, 25 bp, Homo sapien
gactcttgagtctctggacaggcaa

SEQ ID NO: 816450 - DNA, 25 bp, Homo sapien
tacagttgagttaggaccgcatggt

SEQ ID NO: 816451 - DNA, 25 bp, Homo sapien
gctgagccctcagcatataaccatc

SEQ ID NO: 816452 - DNA, 25 bp, Homo sapien
tttttggcagtagtggatgtgtcct

SEQ ID NO: 816453 - DNA, 25 bp, Homo sapien
ggttccaacagtacttctgctcctt

SEQ ID NO: 816454 - DNA, 25 bp, Homo sapien
ttgctttccatctgtccaggttcca

SEQ ID NO: 816455 - DNA, 25 bp, Homo sapien
tttagacacaagtaccctgagctgc

SEQ ID NO: 816456 - DNA, 25 bp, Homo sapien
gaagctgtcatatgagacctcctgc

SEQ ID NO: 816457 - DNA, 25 bp, Homo sapien
gagtcctccaaggtgtcagggatcc

SEQ ID NO: 816458 - DNA, 25 bp, Homo sapien
gactagactagttgcactgggacct

SEQ ID NO: 816459 - DNA, 25 bp, Homo sapien
gaattgcctcggcttgtgaaggcta

SEQ ID NO: 816460 - DNA, 25 bp, Homo sapien
gaatccacagatatttctctcaggg

SEQ ID NO: 816461 - DNA, 25 bp, Homo sapien
tcattcctcgaggaagaatccacag

SEQ ID NO: 816462 - DNA, 25 bp, Homo sapien
caatgatggcaagcccagttgcgcg

SEQ ID NO: 816463 - DNA, 25 bp, Homo sapien
atctctgaacttaaacctgattggg

SEQ ID NO: 816464 - DNA, 25 bp, Homo sapien
tctctgaacttaaacctgattgggg

SEQ ID NO: 816465 - DNA, 25 bp, Homo sapien
gatctctgaacttaaacctgattgg

SEQ ID NO: 816466 - DNA, 25 bp, Homo sapien
ctctgaacttaaacctgattggggg

SEQ ID NO: 816467 - DNA, 25 bp, Homo sapien
gatggaagtaattccagggccatgc

SEQ ID NO: 816468 - DNA, 25 bp, Homo sapien
cacaatagtgtatcagaggttctgc

SEQ ID NO: 816469 - DNA, 25 bp, Homo sapien
gaatgtagctattgctctcagaagg

SEQ ID NO: 816470 - DNA, 25 bp, Homo sapien
ggccatgctgaaccccagctgaaag

SEQ ID NO: 816471 - DNA, 25 bp, Homo sapien
aaagcacagatgctagttcctgtcc

SEQ ID NO: 816472 - DNA, 25 bp, Homo sapien
cccactaagctaaggtcaaccaaga

SEQ ID NO: 816473 - DNA, 25 bp, Homo sapien
gaaaattcactccttctgtctggta

SEQ ID NO: 816474 - DNA, 25 bp, Homo sapien
tgttctctttgctcattgggcttac

SEQ ID NO: 816475 - DNA, 25 bp, Homo sapien
aactagagtttgatttcctgctcac

SEQ ID NO: 816476 - DNA, 25 bp, Homo sapien
gaatttaatgtgcttatgatgccac

SEQ ID NO: 816477 - DNA, 25 bp, Homo sapien
tctgtaaccaagtcaattgactggg

SEQ ID NO: 816478 - DNA, 25 bp, Homo sapien
caaaaagagcatagcttcacttaca

SEQ ID NO: 816479 - DNA, 25 bp, Homo sapien
acacactggagggtccagagaggaa

SEQ ID NO: 816480 - DNA, 25 bp, Homo sapien
ggaggccagttaggaaactgttata

SEQ ID NO: 816481 - DNA, 25 bp, Homo sapien
gttcagataacagaccatggtggca

SEQ ID NO: 816482 - DNA, 25 bp, Homo sapien
tagctgttacgaaggaacacactgg

SEQ ID NO: 816483 - DNA, 25 bp, Homo sapien
gggagcagtatggaggctcctcaaa

SEQ ID NO: 816484 - DNA, 25 bp, Homo sapien
ccagcaattgcacaactaagaattt

SEQ ID NO: 816485 - DNA, 25 bp, Homo sapien
tatgctcaatgggatactattcagc

SEQ ID NO: 816486 - DNA, 25 bp, Homo sapien
gcacagccactatggggagcagtat

SEQ ID NO: 816487 - DNA, 25 bp, Homo sapien
cagaagttttataatggatacaatt

SEQ ID NO: 816488 - DNA, 25 bp, Homo sapien
ttaatagaaacagtggtcacgatag

SEQ ID NO: 816489 - DNA, 25 bp, Homo sapien
cagtggtcacgatagaaaattcaca

SEQ ID NO: 816490 - DNA, 25 bp, Homo sapien
ttagacctacaaatatatgtccaga

SEQ ID NO: 816491 - DNA, 25 bp, Homo sapien
ccttgtggcagtgtgtaagtctggg

SEQ ID NO: 816492 - DNA, 25 bp, Homo sapien
ccatggatccagacactcagtgaag

SEQ ID NO: 816493 - DNA, 25 bp, Homo sapien
gagcagtcatcaactcccttgggca

SEQ ID NO: 816494 - DNA, 25 bp, Homo sapien
tagggaccacggaattgaattgcag

SEQ ID NO: 816495 - DNA, 25 bp, Homo sapien
ctggcagagaaccgtcaggctccaa

SEQ ID NO: 816496 - DNA, 25 bp, Homo sapien
ttgtatttcgtcttccacattcact

SEQ ID NO: 816497 - DNA, 25 bp, Homo sapien
tggcagagaaccgtcaggctccaag

SEQ ID NO: 816498 - DNA, 25 bp, Homo sapien
ttttgtatttcgtcttccacattca

SEQ ID NO: 816499 - DNA, 25 bp, Homo sapien
ggataaaggtctgggttacagcact

SEQ ID NO: 816500 - DNA, 25 bp, Homo sapien
taaacaggcaagtgtagcaacgctg

SEQ ID NO: 816501 - DNA, 25 bp, Homo sapien
gggtggaacccaattgtgactgtaa

SEQ ID NO: 816502 - DNA, 25 bp, Homo sapien
gaccaggtgcttaggcctcttcagg

SEQ ID NO: 816503 - DNA, 25 bp, Homo sapien
taaggaatgctagatgtggttgatt

SEQ ID NO: 816504 - DNA, 25 bp, Homo sapien
gttaaggaatgctagatgtggttga

SEQ ID NO: 816505 - DNA, 25 bp, Homo sapien
ttaaggaatgctagatgtggttgat

SEQ ID NO: 816506 - DNA, 25 bp, Homo sapien
cgtcattgaggttatggctgatgga

SEQ ID NO: 816507 - DNA, 25 bp, Homo sapien
ttgttcgtcattgaggttatggctg

SEQ ID NO: 816508 - DNA, 25 bp, Homo sapien
gtaagtgcaaggctaccaatagtaa

SEQ ID NO: 816509 - DNA, 25 bp, Homo sapien
gcaaggctaccaatagtaagggagg

SEQ ID NO: 816510 - DNA, 25 bp, Homo sapien
tatccgtagtttacctctcagctga

SEQ ID NO: 816511 - DNA, 25 bp, Homo sapien
caggtttctgggaatagtaatgacc

SEQ ID NO: 816512 - DNA, 25 bp, Homo sapien
tattagcgggtgtcttttgcgggta

SEQ ID NO: 816513 - DNA, 25 bp, Homo sapien
tgacccgtagtataacccttggcca

SEQ ID NO: 816514 - DNA, 25 bp, Homo sapien
actcctgaagggttgttagattctg

SEQ ID NO: 816515 - DNA, 25 bp, Homo sapien
agaacatctttggttgtatattgtc

SEQ ID NO: 816516 - DNA, 25 bp, Homo sapien
tctgtttcatgcaagaataaaaggt

SEQ ID NO: 816517 - DNA, 25 bp, Homo sapien
acatctttggttgtatattgtcggg

SEQ ID NO: 816518 - DNA, 25 bp, Homo sapien
gaatgagaatggaatatacgagggc

SEQ ID NO: 816519 - DNA, 25 bp, Homo sapien
tgagaatggaatatacgagggccag

SEQ ID NO: 816520 - DNA, 25 bp, Homo sapien
gaatggaatatacgagggccagtac

SEQ ID NO: 816521 - DNA, 25 bp, Homo sapien
atggaatatacgagggccagtacgc

SEQ ID NO: 816522 - DNA, 25 bp, Homo sapien
gatgctgtctgtccgatggcaatga

SEQ ID NO: 816523 - DNA, 25 bp, Homo sapien
gagtgtaagcaggtcagccactagg

SEQ ID NO: 816524 - DNA, 25 bp, Homo sapien
gaatggtagagaagtacatgataga

SEQ ID NO: 816525 - DNA, 25 bp, Homo sapien
gaaaggatatttgactggctgccct

SEQ ID NO: 816526 - DNA, 25 bp, Homo sapien
aagaaatcccgaaagcctggtgctg

SEQ ID NO: 816527 - DNA, 25 bp, Homo sapien
gcccctgtgcctggtgtaaagtaga

SEQ ID NO: 816528 - DNA, 25 bp, Homo sapien
tctgatcagcaacttgggacaagtg

SEQ ID NO: 816529 - DNA, 25 bp, Homo sapien
agtgaccaatttgacaccggcccct

SEQ ID NO: 816530 - DNA, 25 bp, Homo sapien
attactatagaatgtggcatcgttt

SEQ ID NO: 816531 - DNA, 25 bp, Homo sapien
ctaagtatgaggttgttatgtgata

SEQ ID NO: 816532 - DNA, 25 bp, Homo sapien
gttttatcatccacacaaaaatgcc

SEQ ID NO: 816533 - DNA, 25 bp, Homo sapien
cagagcatgctttttttcggtccaa

SEQ ID NO: 816534 - DNA, 25 bp, Homo sapien
aggaacctgggatgttgaggtccat

SEQ ID NO: 816535 - DNA, 25 bp, Homo sapien
ctcactttcagaggcatgtagccta

SEQ ID NO: 816536 - DNA, 25 bp, Homo sapien
tcaccacaccatatttcactccagg

SEQ ID NO: 816537 - DNA, 25 bp, Homo sapien
tcaaagccctgagaaacgagccagt

SEQ ID NO: 816538 - DNA, 25 bp, Homo sapien
ttttctgatcttttatgagataaga

SEQ ID NO: 816539 - DNA, 25 bp, Homo sapien
gaggtagctggcattctttgcacac

SEQ ID NO: 816540 - DNA, 25 bp, Homo sapien
taagaatccataggctgctaattga

SEQ ID NO: 816541 - DNA, 25 bp, Homo sapien
caccaggtttcatagatttctccag

SEQ ID NO: 816542 - DNA, 25 bp, Homo sapien
tgtagcagctggaacgcattcagct

SEQ ID NO: 816543 - DNA, 25 bp, Homo sapien
atctgtagcagctggaacgcattca

SEQ ID NO: 816544 - DNA, 25 bp, Homo sapien
tctgtagcagctggaacgcattcag

SEQ ID NO: 816545 - DNA, 25 bp, Homo sapien
gtagcagctggaacgcattcagctc

SEQ ID NO: 816546 - DNA, 25 bp, Homo sapien
gtgtctgctccctccgatgtccatc

SEQ ID NO: 816547 - DNA, 25 bp, Homo sapien
gcatgccaactattcaaataaactt

SEQ ID NO: 816548 - DNA, 25 bp, Homo sapien
cacctccattgctaaaagcatgcca

SEQ ID NO: 816549 - DNA, 25 bp, Homo sapien
aactttcaagcccacagactccaga

SEQ ID NO: 816550 - DNA, 25 bp, Homo sapien
gccaaatggacccaaaaacgagcag

SEQ ID NO: 816551 - DNA, 25 bp, Homo sapien
tatctgtgacccacggggtgtgtct

SEQ ID NO: 816552 - DNA, 25 bp, Homo sapien
caggtcatggatatcttgatgagaa

SEQ ID NO: 816553 - DNA, 25 bp, Homo sapien
aggatggaggatgtatatctgtgac

SEQ ID NO: 816554 - DNA, 25 bp, Homo sapien
catggccgagggctctttgggatcc

SEQ ID NO: 816555 - DNA, 25 bp, Homo sapien
tctttgggatccagttgatggggtt

SEQ ID NO: 816556 - DNA, 25 bp, Homo sapien
agaggtgtaggggcctagtttccat

SEQ ID NO: 816557 - DNA, 25 bp, Homo sapien
gtgtaggggcctagtttccatggcc

SEQ ID NO: 816558 - DNA, 25 bp, Homo sapien
gcctgtgaatgccacggttacagca

SEQ ID NO: 816559 - DNA, 25 bp, Homo sapien
gatgcctgtgaatgccacggttaca

SEQ ID NO: 816560 - DNA, 25 bp, Homo sapien
tgaatgccacggttacagcaggcac

SEQ ID NO: 816561 - DNA, 25 bp, Homo sapien
gggatgcctgtgaatgccacggtta

SEQ ID NO: 816562 - DNA, 25 bp, Homo sapien
gagaggagagtaaatctttggcagt

SEQ ID NO: 816563 - DNA, 25 bp, Homo sapien
tgggcaatatcgtggctgccggaga

SEQ ID NO: 816564 - DNA, 25 bp, Homo sapien
tttggaccactttcaacatagcacg

SEQ ID NO: 816565 - DNA, 25 bp, Homo sapien
tcaacatagcacgagcctgggcaat

SEQ ID NO: 816566 - DNA, 25 bp, Homo sapien
taatgttggcacctagtgatcacca

SEQ ID NO: 816567 - DNA, 25 bp, Homo sapien
tactgggaggaattacacacatccc

SEQ ID NO: 816568 - DNA, 25 bp, Homo sapien
tgggatgtccacgtaaagttcttcg

SEQ ID NO: 816569 - DNA, 25 bp, Homo sapien
tatgtagaccttgaatgaaccagga

SEQ ID NO: 816570 - DNA, 25 bp, Homo sapien
cagggacatgaccaaagaggttcct

SEQ ID NO: 816571 - DNA, 25 bp, Homo sapien
tctcagcccatttggaggtgactct

SEQ ID NO: 816572 - DNA, 25 bp, Homo sapien
taagcggtgagtccataggctccct

SEQ ID NO: 816573 - DNA, 25 bp, Homo sapien
tctctacccctaagcggtgagtcca

SEQ ID NO: 816574 - DNA, 25 bp, Homo sapien
taaagtccctagtccagcaacagaa

SEQ ID NO: 816575 - DNA, 25 bp, Homo sapien
taccaagcatgttctagagcatgag

SEQ ID NO: 816576 - DNA, 25 bp, Homo sapien
aactctgacagtgctagaactcaca

SEQ ID NO: 816577 - DNA, 25 bp, Homo sapien
gggaagctcattccaacagtggata

SEQ ID NO: 816578 - DNA, 25 bp, Homo sapien
tgacacctacctgaagaggccttcc

SEQ ID NO: 816579 - DNA, 25 bp, Homo sapien
tactggaacagtacgtggcacttag

SEQ ID NO: 816580 - DNA, 25 bp, Homo sapien
tctgcctgatatgatcaacccgagc

SEQ ID NO: 816581 - DNA, 25 bp, Homo sapien
ccaggccttacctaggtttggcaca

SEQ ID NO: 816582 - DNA, 25 bp, Homo sapien
cacatccacttagtcgttctgcggc

SEQ ID NO: 816583 - DNA, 25 bp, Homo sapien
ccctggaaacgtgtgctttgcattt

SEQ ID NO: 816584 - DNA, 25 bp, Homo sapien
cacttagtcgttctgcggcaggcct

SEQ ID NO: 816585 - DNA, 25 bp, Homo sapien
ctggaaacgtgtgctttgcatttgg

SEQ ID NO: 816586 - DNA, 25 bp, Homo sapien
tgtttctctctagcgcgggagctaa

SEQ ID NO: 816587 - DNA, 25 bp, Homo sapien
gatcgaaaacgatacatgtttctct

SEQ ID NO: 816588 - DNA, 25 bp, Homo sapien
acatgtttctctctagcgcgggagc

SEQ ID NO: 816589 - DNA, 25 bp, Homo sapien
ctgtgatcgaaaacgatacatgttt

SEQ ID NO: 816590 - DNA, 25 bp, Homo sapien
taacaacagagtcgagaagcggcgg

SEQ ID NO: 816591 - DNA, 25 bp, Homo sapien
gaggcgagtcttcggctaacaacag

SEQ ID NO: 816592 - DNA, 25 bp, Homo sapien
cagagtcggagcttagcgaggatca

SEQ ID NO: 816593 - DNA, 25 bp, Homo sapien
ttttactcgtgcgtctgtgcggcgg

SEQ ID NO: 816594 - DNA, 25 bp, Homo sapien
gccgccagcactgctaccgcggtgg

SEQ ID NO: 816595 - DNA, 25 bp, Homo sapien
gtggggagtgttccgcttcttgttc

SEQ ID NO: 816596 - DNA, 25 bp, Homo sapien
ccgccagcactgctaccgcggtggg

SEQ ID NO: 816597 - DNA, 25 bp, Homo sapien
ccgcggtggggagtgttccgcttct

SEQ ID NO: 816598 - DNA, 25 bp, Homo sapien
gcaaaactggaaggatcgctataac

SEQ ID NO: 816599 - DNA, 25 bp, Homo sapien
aaaggctgaacatttcgatgctggc

SEQ ID NO: 816600 - DNA, 25 bp, Homo sapien
cattgtttcaattgatgcatcttca

SEQ ID NO: 816601 - DNA, 25 bp, Homo sapien
taaccactgcaatggctcattgttt

SEQ ID NO: 816602 - DNA, 25 bp, Homo sapien
ctaagaaataatataaaacagccat

SEQ ID NO: 816603 - DNA, 25 bp, Homo sapien
acttgtactctaggtcttcttgagt

SEQ ID NO: 816604 - DNA, 25 bp, Homo sapien
tatccagggttaggtcaattaatcc

SEQ ID NO: 816605 - DNA, 25 bp, Homo sapien
ctaggtcttcttgagttccttcctc

SEQ ID NO: 816606 - DNA, 25 bp, Homo sapien
ctcttatccagggttaggtcaatta

SEQ ID NO: 816607 - DNA, 25 bp, Homo sapien
cttttttcaggcagcgttcaatgct

SEQ ID NO: 816608 - DNA, 25 bp, Homo sapien
ccttcaagagctgcttgccttgtct

SEQ ID NO: 816609 - DNA, 25 bp, Homo sapien
ataccttcaagagctgcttgccttg

SEQ ID NO: 816610 - DNA, 25 bp, Homo sapien
cgttcaatgctatcagttaaagtca

SEQ ID NO: 816611 - DNA, 25 bp, Homo sapien
gaactgtatacaccacaagtgtggg

SEQ ID NO: 816612 - DNA, 25 bp, Homo sapien
aacacctttaatagcgccattgtgt

SEQ ID NO: 816613 - DNA, 25 bp, Homo sapien
gatatatcagcttagacccacctca

SEQ ID NO: 816614 - DNA, 25 bp, Homo sapien
gggtctgctatcaactataccaata

SEQ ID NO: 816615 - DNA, 25 bp, Homo sapien
agggcccagctgaatacaaagaaca

SEQ ID NO: 816616 - DNA, 25 bp, Homo sapien
tttgcctagcctgcatactagctga

SEQ ID NO: 816617 - DNA, 25 bp, Homo sapien
cgctgcagctgcacgttgctcatca

SEQ ID NO: 816618 - DNA, 25 bp, Homo sapien
tagctgacccatcacaaatgatttt

SEQ ID NO: 816619 - DNA, 25 bp, Homo sapien
ttgagtagctggtacagtactatag

SEQ ID NO: 816620 - DNA, 25 bp, Homo sapien
ggcgcaccacgtctgggtgtcatga

SEQ ID NO: 816621 - DNA, 25 bp, Homo sapien
ctggtacagtactataggcgcacca

SEQ ID NO: 816622 - DNA, 25 bp, Homo sapien
tagacagatctataaatgtaaatat

SEQ ID NO: 816623 - DNA, 25 bp, Homo sapien
tccagggcaaacagctagactattc

SEQ ID NO: 816624 - DNA, 25 bp, Homo sapien
tccaaaaatctacccagcagagtgt

SEQ ID NO: 816625 - DNA, 25 bp, Homo sapien
gcctccaggtggctggtaagccaag

SEQ ID NO: 816626 - DNA, 25 bp, Homo sapien
gaattactaactactggagggcaca

SEQ ID NO: 816627 - DNA, 25 bp, Homo sapien
gccagtctgttccagtactatgagg

SEQ ID NO: 816628 - DNA, 25 bp, Homo sapien
tgaactaagatcaaaggaagtgcgt

SEQ ID NO: 816629 - DNA, 25 bp, Homo sapien
ctggattatgctgaaaagaggctgg

SEQ ID NO: 816630 - DNA, 25 bp, Homo sapien
gaagtgcgtttcagctcaagctctg

SEQ ID NO: 816631 - DNA, 25 bp, Homo sapien
acagcaaacaccaaagcaagttgca

SEQ ID NO: 816632 - DNA, 25 bp, Homo sapien
tgtcatctgtggcaataaaacagca

SEQ ID NO: 816633 - DNA, 25 bp, Homo sapien
agcaaacaccaaagcaagttgcaca

SEQ ID NO: 816634 - DNA, 25 bp, Homo sapien
aaacagcaaacaccaaagcaagttg

SEQ ID NO: 816635 - DNA, 25 bp, Homo sapien
ccatgcaagaagagagctgatatga

SEQ ID NO: 816636 - DNA, 25 bp, Homo sapien
tattaggagtgctgcaaataacagt

SEQ ID NO: 816637 - DNA, 25 bp, Homo sapien
cagcagtagtgtccatgcaagaaga

SEQ ID NO: 816638 - DNA, 25 bp, Homo sapien
cacttcattgattgggcatatggtc

SEQ ID NO: 816639 - DNA, 25 bp, Homo sapien
aaagagaagtgccaaagattcacca

SEQ ID NO: 816640 - DNA, 25 bp, Homo sapien
catgtttacatcatcacaagagagg

SEQ ID NO: 816641 - DNA, 25 bp, Homo sapien
agagaagtgccaaagattcaccagc

SEQ ID NO: 816642 - DNA, 25 bp, Homo sapien
agaagtgccaaagattcaccagcag

SEQ ID NO: 816643 - DNA, 25 bp, Homo sapien
gggttctcaagctggccatgttcca

SEQ ID NO: 816644 - DNA, 25 bp, Homo sapien
caaggtaatgatggaacaatgggcc

SEQ ID NO: 816645 - DNA, 25 bp, Homo sapien
tctccatgaggatccctaaacttca

SEQ ID NO: 816646 - DNA, 25 bp, Homo sapien
tagggaaataaatcactgggttctc

SEQ ID NO: 816647 - DNA, 25 bp, Homo sapien
aagcacatgtcccagtcttaatgag

SEQ ID NO: 816648 - DNA, 25 bp, Homo sapien
atgtcccagtcttaatgagcagtgt

SEQ ID NO: 816649 - DNA, 25 bp, Homo sapien
catctgtgagtggacaagtgaatgg

SEQ ID NO: 816650 - DNA, 25 bp, Homo sapien
aaatcccttcgagagccaagccatg

SEQ ID NO: 816651 - DNA, 25 bp, Homo sapien
aaattgggacatctggtttccatgc

SEQ ID NO: 816652 - DNA, 25 bp, Homo sapien
tctggccagtagaggaatgtaagat

SEQ ID NO: 816653 - DNA, 25 bp, Homo sapien
tccatgcgttgaggttaagaagcta

SEQ ID NO: 816654 - DNA, 25 bp, Homo sapien
tccttcaatacaggcctagaatgga

SEQ ID NO: 816655 - DNA, 25 bp, Homo sapien
aatggaatgggtgagacctggaaaa

SEQ ID NO: 816656 - DNA, 25 bp, Homo sapien
taatgtctcttatattaagttactc

SEQ ID NO: 816657 - DNA, 25 bp, Homo sapien
tactctacagttcctaaaaggccac

SEQ ID NO: 816658 - DNA, 25 bp, Homo sapien
gatcttaattctgcccaccaaataa

SEQ ID NO: 816659 - DNA, 25 bp, Homo sapien
gcgtgctgagattgaaaaacttcac

SEQ ID NO: 816660 - DNA, 25 bp, Homo sapien
taatagagctgtaccactctgggac

SEQ ID NO: 816661 - DNA, 25 bp, Homo sapien
cagtcattactacacaacagggtca

SEQ ID NO: 816662 - DNA, 25 bp, Homo sapien
gggtcaaaagtcctagatcagaatc

SEQ ID NO: 816663 - DNA, 25 bp, Homo sapien
ccagaaatgctgactacaagatgat

SEQ ID NO: 816664 - DNA, 25 bp, Homo sapien
tcttcatggtatttagggactaggc

SEQ ID NO: 816665 - DNA, 25 bp, Homo sapien
gcagattatgggcttccttgtcaca

SEQ ID NO: 816666 - DNA, 25 bp, Homo sapien
catatagagctaacaaagaacagtc

SEQ ID NO: 816667 - DNA, 25 bp, Homo sapien
catctctgaaaactgaccgctgctt

SEQ ID NO: 816668 - DNA, 25 bp, Homo sapien
ttctcttgtccactttggcccggtg

SEQ ID NO: 816669 - DNA, 25 bp, Homo sapien
ttggcccggtgtttatttccatctg

SEQ ID NO: 816670 - DNA, 25 bp, Homo sapien
catctgttgccaaggccctaagcat

SEQ ID NO: 816671 - DNA, 25 bp, Homo sapien
taagtggccttgttaaaatgctggg

SEQ ID NO: 816672 - DNA, 25 bp, Homo sapien
ttctccagtgagatatcttttgtcc

SEQ ID NO: 816673 - DNA, 25 bp, Homo sapien
tcatgaagatctctggcacggtggc

SEQ ID NO: 816674 - DNA, 25 bp, Homo sapien
tgaaacaggtttgaggattacagaa

SEQ ID NO: 816675 - DNA, 25 bp, Homo sapien
tctgtccctccacaattcaaggtta

SEQ ID NO: 816676 - DNA, 25 bp, Homo sapien
tatatagtcaatcctccatatctgg

SEQ ID NO: 816677 - DNA, 25 bp, Homo sapien
tatcctctttcctgttggtaacaga

SEQ ID NO: 816678 - DNA, 25 bp, Homo sapien
gatttaaagtatacgtgcataggtt

SEQ ID NO: 816679 - DNA, 25 bp, Homo sapien
aaggtgtaaccatgggagtgcagcc

SEQ ID NO: 816680 - DNA, 25 bp, Homo sapien
aacttgcgggcttgtgatttcatca

SEQ ID NO: 816681 - DNA, 25 bp, Homo sapien
caaccagaagggctccaagaggtct

SEQ ID NO: 816682 - DNA, 25 bp, Homo sapien
catgtgaggcaaacacagtgaccgt

SEQ ID NO: 816683 - DNA, 25 bp, Homo sapien
tccttaaaggtgtcataggtgtgtt

SEQ ID NO: 816684 - DNA, 25 bp, Homo sapien
ttttttacccagcaatcaatataca

SEQ ID NO: 816685 - DNA, 25 bp, Homo sapien
aagaacctccttaaaggtgtcatag

SEQ ID NO: 816686 - DNA, 25 bp, Homo sapien
tatacatgcgttcaggaccaaattt

SEQ ID NO: 816687 - DNA, 25 bp, Homo sapien
agactgctccctactttaaaagcaa

SEQ ID NO: 816688 - DNA, 25 bp, Homo sapien
agcactctggatacctaattaattt

SEQ ID NO: 816689 - DNA, 25 bp, Homo sapien
gagctatattcaagactgctcccta

SEQ ID NO: 816690 - DNA, 25 bp, Homo sapien
aaagccaattaagtgagctatattc

SEQ ID NO: 816691 - DNA, 25 bp, Homo sapien
ttcgaaacgagaaatcttcatcgtt

SEQ ID NO: 816692 - DNA, 25 bp, Homo sapien
agttcaaatacatttcgaaggaatt

SEQ ID NO: 816693 - DNA, 25 bp, Homo sapien
gttttaagcgttgcagcatcaagca

SEQ ID NO: 816694 - DNA, 25 bp, Homo sapien
atacatttcgaaggaattcatttga

SEQ ID NO: 816695 - DNA, 25 bp, Homo sapien
tattatctgatacaaaaggactatg

SEQ ID NO: 816696 - DNA, 25 bp, Homo sapien
tgtaaaacgagtctggtacttcact

SEQ ID NO: 816697 - DNA, 25 bp, Homo sapien
cacctaatgggcaaacaagcagcaa

SEQ ID NO: 816698 - DNA, 25 bp, Homo sapien
tgaacaccgttcctatattaagata

SEQ ID NO: 816699 - DNA, 25 bp, Homo sapien
gtatgtgaatgttcagagcaacact

SEQ ID NO: 816700 - DNA, 25 bp, Homo sapien
ggttgcatgctatataactccattt

SEQ ID NO: 816701 - DNA, 25 bp, Homo sapien
ggaactagagttgtacaacatcatg

SEQ ID NO: 816702 - DNA, 25 bp, Homo sapien
cagagacagcagattagcggttgcc

SEQ ID NO: 816703 - DNA, 25 bp, Homo sapien
ggaaaaacgtgcatcagtaagactt

SEQ ID NO: 816704 - DNA, 25 bp, Homo sapien
gcatcagtaagacttaagatattct

SEQ ID NO: 816705 - DNA, 25 bp, Homo sapien
caaagagttaacaggggccatgcaa

SEQ ID NO: 816706 - DNA, 25 bp, Homo sapien
tgaactaatttgaccctataaacat

SEQ ID NO: 816707 - DNA, 25 bp, Homo sapien
tctgctctcttatctcgacatttgc

SEQ ID NO: 816708 - DNA, 25 bp, Homo sapien
aacatctgctctcttatctcgacat

SEQ ID NO: 816709 - DNA, 25 bp, Homo sapien
tcttatctcgacatttgcttctagc

SEQ ID NO: 816710 - DNA, 25 bp, Homo sapien
tatctcgacatttgcttctagcttt

SEQ ID NO: 816711 - DNA, 25 bp, Homo sapien
ttataagcaatataaccactgctac

SEQ ID NO: 816712 - DNA, 25 bp, Homo sapien
tatttaataatcagaactcaccagt

SEQ ID NO: 816713 - DNA, 25 bp, Homo sapien
accactgctacaaaagttatctaag

SEQ ID NO: 816714 - DNA, 25 bp, Homo sapien
tccaggataaaaactgtgtctagag

SEQ ID NO: 816715 - DNA, 25 bp, Homo sapien
tcagtattcttgacaaccacagtgt

SEQ ID NO: 816716 - DNA, 25 bp, Homo sapien
ccttttgttgatgccagtgacagga

SEQ ID NO: 816717 - DNA, 25 bp, Homo sapien
tctcagatgttaaggttagcaacct

SEQ ID NO: 816718 - DNA, 25 bp, Homo sapien
taagtacagctataaggtctcatgg

SEQ ID NO: 816719 - DNA, 25 bp, Homo sapien
agtaaaatgcacaaagtctcataca

SEQ ID NO: 816720 - DNA, 25 bp, Homo sapien
aatgcacaaagtctcatacagcaga

SEQ ID NO: 816721 - DNA, 25 bp, Homo sapien
taaaatgcacaaagtctcatacagc

SEQ ID NO: 816722 - DNA, 25 bp, Homo sapien
aaatgcacaaagtctcatacagcag

SEQ ID NO: 816723 - DNA, 25 bp, Homo sapien
tgcccacctggcctagtcattttgg

SEQ ID NO: 816724 - DNA, 25 bp, Homo sapien
attttggactctgtacctcaaagcc

SEQ ID NO: 816725 - DNA, 25 bp, Homo sapien
tcagaaaccttaatcccaattatgt

SEQ ID NO: 816726 - DNA, 25 bp, Homo sapien
atgagccacactgcatgttgccaag

SEQ ID NO: 816727 - DNA, 25 bp, Homo sapien
gtgactccataagccagcaaatgat

SEQ ID NO: 816728 - DNA, 25 bp, Homo sapien
gattttcacctagagggagcaccag

SEQ ID NO: 816729 - DNA, 25 bp, Homo sapien
tcacggcgacctacagcaagagtat

SEQ ID NO: 816730 - DNA, 25 bp, Homo sapien
acaagtctacggatttgaaatggca

SEQ ID NO: 816731 - DNA, 25 bp, Homo sapien
gcattaactccaagacaaaacgttg

SEQ ID NO: 816732 - DNA, 25 bp, Homo sapien
tatgatcacagctatgcaaacaggt

SEQ ID NO: 816733 - DNA, 25 bp, Homo sapien
gaagtaccattaaactatgttcagg

SEQ ID NO: 816734 - DNA, 25 bp, Homo sapien
gcaaacaggtacatgatctaaccaa

SEQ ID NO: 816735 - DNA, 25 bp, Homo sapien
gaagcaactgttagctgacaccacc

SEQ ID NO: 816736 - DNA, 25 bp, Homo sapien
taaatatcctgtagcaggcggaagc

SEQ ID NO: 816737 - DNA, 25 bp, Homo sapien
gcactcctgccatggtatgcttcca

SEQ ID NO: 816738 - DNA, 25 bp, Homo sapien
tgttagctgacaccacctttccagc

SEQ ID NO: 816739 - DNA, 25 bp, Homo sapien
gagctttgactgctaggttaccaga

SEQ ID NO: 816740 - DNA, 25 bp, Homo sapien
gcagtgtaagattccaaatcctgac

SEQ ID NO: 816741 - DNA, 25 bp, Homo sapien
tttcttcagcatacgggtgctccta

SEQ ID NO: 816742 - DNA, 25 bp, Homo sapien
ggtgctcctatgagacccataagcc

SEQ ID NO: 816743 - DNA, 25 bp, Homo sapien
gagtagggacgaatcctattcttca

SEQ ID NO: 816744 - DNA, 25 bp, Homo sapien
cattcttctatcagaacatctgtag

SEQ ID NO: 816745 - DNA, 25 bp, Homo sapien
gactgaaaactccttagagtaggga

SEQ ID NO: 816746 - DNA, 25 bp, Homo sapien
catctttgatttcccgatagactga

SEQ ID NO: 816747 - DNA, 25 bp, Homo sapien
taagtcatttatggaatccaccaca

SEQ ID NO: 816748 - DNA, 25 bp, Homo sapien
ccggctggacagaggtttagtttgt

SEQ ID NO: 816749 - DNA, 25 bp, Homo sapien
atccaccacataaagctttccatct

SEQ ID NO: 816750 - DNA, 25 bp, Homo sapien
ggaacagatgctgcgatccggctgg

SEQ ID NO: 816751 - DNA, 25 bp, Homo sapien
aaaacagagctggttgtgggatacc

SEQ ID NO: 816752 - DNA, 25 bp, Homo sapien
gaagactcaattgaatgctctggga

SEQ ID NO: 816753 - DNA, 25 bp, Homo sapien
taaaggctaagagtgatagaagttc

SEQ ID NO: 816754 - DNA, 25 bp, Homo sapien
tgctctgggatatttccctggaaac

SEQ ID NO: 816755 - DNA, 25 bp, Homo sapien
ttcttctctattggtattcaaggaa

SEQ ID NO: 816756 - DNA, 25 bp, Homo sapien
ctattggtattcaaggaataagcag

SEQ ID NO: 816757 - DNA, 25 bp, Homo sapien
tatctccttagacctctttggaaag

SEQ ID NO: 816758 - DNA, 25 bp, Homo sapien
gaataagcagggttaagctatctcc

SEQ ID NO: 816759 - DNA, 25 bp, Homo sapien
aatatcacgaaaaaaaccagtgcca

SEQ ID NO: 816760 - DNA, 25 bp, Homo sapien
tccatttcctgagtttgtgccaagg

SEQ ID NO: 816761 - DNA, 25 bp, Homo sapien
ttagcagccccacaaaaaacagact

SEQ ID NO: 816762 - DNA, 25 bp, Homo sapien
tttgtgccaaggactgggattttgt

SEQ ID NO: 816763 - DNA, 25 bp, Homo sapien
gattctcttaagatcatctatgtct

SEQ ID NO: 816764 - DNA, 25 bp, Homo sapien
gagtcgctttacgatcatgttattg

SEQ ID NO: 816765 - DNA, 25 bp, Homo sapien
cttcagctgttagtcttcttgacac

SEQ ID NO: 816766 - DNA, 25 bp, Homo sapien
ttgagttggttgagtcgctttacga

SEQ ID NO: 816767 - DNA, 25 bp, Homo sapien
tgaaaagagtaatcacctggttccc

SEQ ID NO: 816768 - DNA, 25 bp, Homo sapien
tgggttgcctgaccagatcatctgt

SEQ ID NO: 816769 - DNA, 25 bp, Homo sapien
gctcccatcttgctgcagaaagtgg

SEQ ID NO: 816770 - DNA, 25 bp, Homo sapien
ccattaaagttgaagtgccctacca

SEQ ID NO: 816771 - DNA, 25 bp, Homo sapien
gtaaagtgaatgcttaatatcgtag

SEQ ID NO: 816772 - DNA, 25 bp, Homo sapien
gatcaatccaaaatgatagaatcat

SEQ ID NO: 816773 - DNA, 25 bp, Homo sapien
cttaatatcgtagtaaacccaaatg

SEQ ID NO: 816774 - DNA, 25 bp, Homo sapien
aatacattcttcaattgaccggtag

SEQ ID NO: 816775 - DNA, 25 bp, Homo sapien
gttggaacgagttctctttatagca

SEQ ID NO: 816776 - DNA, 25 bp, Homo sapien
tggaacgagttctctttatagcatt

SEQ ID NO: 816777 - DNA, 25 bp, Homo sapien
ccaagttggaacgagttctctttat

SEQ ID NO: 816778 - DNA, 25 bp, Homo sapien
aagttggaacgagttctctttatag

SEQ ID NO: 816779 - DNA, 25 bp, Homo sapien
gcacttatgtgggagagaaggcaaa

SEQ ID NO: 816780 - DNA, 25 bp, Homo sapien
cacttatgtgggagagaaggcaaac

SEQ ID NO: 816781 - DNA, 25 bp, Homo sapien
tattttcatcatcattcaccttaaa

SEQ ID NO: 816782 - DNA, 25 bp, Homo sapien
tttggttcacaattgaaaagatagg

SEQ ID NO: 816783 - DNA, 25 bp, Homo sapien
tggttcacaattgaaaagataggtc

SEQ ID NO: 816784 - DNA, 25 bp, Homo sapien
caagggaaactgttgcctgcacaga

SEQ ID NO: 816785 - DNA, 25 bp, Homo sapien
ctaaaccacacttcgattgtaagac

SEQ ID NO: 816786 - DNA, 25 bp, Homo sapien
taaaccacacttcgattgtaagacc

SEQ ID NO: 816787 - DNA, 25 bp, Homo sapien
aaaccacacttcgattgtaagacca

SEQ ID NO: 816788 - DNA, 25 bp, Homo sapien
tcatcatcatcacagcaggttttac

SEQ ID NO: 816789 - DNA, 25 bp, Homo sapien
tgatctgggtgttagtggttttaag

SEQ ID NO: 816790 - DNA, 25 bp, Homo sapien
gcacttttggctggtatatcttata

SEQ ID NO: 816791 - DNA, 25 bp, Homo sapien
gtgcacttttggctggtatatctta

SEQ ID NO: 816792 - DNA, 25 bp, Homo sapien
actgatgagcttagcttccacttta

SEQ ID NO: 816793 - DNA, 25 bp, Homo sapien
tctacaggactagatcctttttgtg

SEQ ID NO: 816794 - DNA, 25 bp, Homo sapien
gcttagcttccactttaggaagaga

SEQ ID NO: 816795 - DNA, 25 bp, Homo sapien
taatgttttctacaggactagatcc

SEQ ID NO: 816796 - DNA, 25 bp, Homo sapien
ataagaagccacttcttaaaagtct

SEQ ID NO: 816797 - DNA, 25 bp, Homo sapien
ttgcatgaggaataagaagccactt

SEQ ID NO: 816798 - DNA, 25 bp, Homo sapien
gaggaataagaagccacttcttaaa

SEQ ID NO: 816799 - DNA, 25 bp, Homo sapien
tctctttgcatgaggaataagaagc

SEQ ID NO: 816800 - DNA, 25 bp, Homo sapien
gtctgggttgttgttgagccacaga

SEQ ID NO: 816801 - DNA, 25 bp, Homo sapien
ttgttgagccacagataataaccat

SEQ ID NO: 816802 - DNA, 25 bp, Homo sapien
tcagtctcagtctgggttgttgttg

SEQ ID NO: 816803 - DNA, 25 bp, Homo sapien
ggttgttgttgagccacagataata

SEQ ID NO: 816804 - DNA, 25 bp, Homo sapien
gccgccctgatagcaatggccagaa

SEQ ID NO: 816805 - DNA, 25 bp, Homo sapien
cactgttcagtatgtggcccacgtc

SEQ ID NO: 816806 - DNA, 25 bp, Homo sapien
agagagaatttatcccactgttcag

SEQ ID NO: 816807 - DNA, 25 bp, Homo sapien
tacattcatatctcgagtcagccag

SEQ ID NO: 816808 - DNA, 25 bp, Homo sapien
tcaggcccaggtctcaaagaggatc

SEQ ID NO: 816809 - DNA, 25 bp, Homo sapien
aggcccaggtctcaaagaggatccc

SEQ ID NO: 816810 - DNA, 25 bp, Homo sapien
gcccaggtctcaaagaggatcccct

SEQ ID NO: 816811 - DNA, 25 bp, Homo sapien
caggtctcaaagaggatcccctggg

SEQ ID NO: 816812 - DNA, 25 bp, Homo sapien
ggattcgtagtaatattgaattagt

SEQ ID NO: 816813 - DNA, 25 bp, Homo sapien
aaatagtgagagatagggatgattc

SEQ ID NO: 816814 - DNA, 25 bp, Homo sapien
tacatgactggtaagtagaggtact

SEQ ID NO: 816815 - DNA, 25 bp, Homo sapien
tgaattagtagtaatatcgagtgga

SEQ ID NO: 816816 - DNA, 25 bp, Homo sapien
tctctcttaatctgctcaaaccggc

SEQ ID NO: 816817 - DNA, 25 bp, Homo sapien
tgctttttcgaaatagtctcaatct

SEQ ID NO: 816818 - DNA, 25 bp, Homo sapien
gctttttcgaaatagtctcaatctt

SEQ ID NO: 816819 - DNA, 25 bp, Homo sapien
ctcttaatctgctcaaaccggctac

SEQ ID NO: 816820 - DNA, 25 bp, Homo sapien
ggcaagatcacaagtcccgtatgca

SEQ ID NO: 816821 - DNA, 25 bp, Homo sapien
caagatcacaagtcccgtatgcaca

SEQ ID NO: 816822 - DNA, 25 bp, Homo sapien
cacaagtcccgtatgcacaaaaacc

SEQ ID NO: 816823 - DNA, 25 bp, Homo sapien
ccatggcaagatcacaagtcccgta

SEQ ID NO: 816824 - DNA, 25 bp, Homo sapien
cctctgagatggaccactctcacaa

SEQ ID NO: 816825 - DNA, 25 bp, Homo sapien
ccacattgttatacatctggcattg

SEQ ID NO: 816826 - DNA, 25 bp, Homo sapien
tttcaatagcagaatcccttactaa

SEQ ID NO: 816827 - DNA, 25 bp, Homo sapien
ggcttctctatcagctatacccttt

SEQ ID NO: 816828 - DNA, 25 bp, Homo sapien
gatttgtatggtcctgacaggcttc

SEQ ID NO: 816829 - DNA, 25 bp, Homo sapien
tcttttctttcagaagagatgccac

SEQ ID NO: 816830 - DNA, 25 bp, Homo sapien
cacttctgccttcaaaaaaactgtc

SEQ ID NO: 816831 - DNA, 25 bp, Homo sapien
tttctttcagaagagatgccacttc

SEQ ID NO: 816832 - DNA, 25 bp, Homo sapien
tctttcagaagagatgccacttctg

SEQ ID NO: 816833 - DNA, 25 bp, Homo sapien
gataaaccaatataaatggagatga

SEQ ID NO: 816834 - DNA, 25 bp, Homo sapien
catgggtgagcaggactttacatgt

SEQ ID NO: 816835 - DNA, 25 bp, Homo sapien
ttcatgggtgagcaggactttacat

SEQ ID NO: 816836 - DNA, 25 bp, Homo sapien
gggtgagcaggactttacatgtctt

SEQ ID NO: 816837 - DNA, 25 bp, Homo sapien
agaaaagagcaaagaaaaggtaatg

SEQ ID NO: 816838 - DNA, 25 bp, Homo sapien
aggtagacagctggccaaggaagaa

SEQ ID NO: 816839 - DNA, 25 bp, Homo sapien
ctgaggtagacagctggccaaggaa

SEQ ID NO: 816840 - DNA, 25 bp, Homo sapien
agagcaaagaaaaggtaatgaatct

SEQ ID NO: 816841 - DNA, 25 bp, Homo sapien
gctcatcctgcttgaggatattctg

SEQ ID NO: 816842 - DNA, 25 bp, Homo sapien
ctcatcctgcttgaggatattctga

SEQ ID NO: 816843 - DNA, 25 bp, Homo sapien
ctgcttgaggatattctgaactgaa

SEQ ID NO: 816844 - DNA, 25 bp, Homo sapien
cttgaggatattctgaactgaaaga

SEQ ID NO: 816845 - DNA, 25 bp, Homo sapien
cattttttccaagacgcaagacaca

SEQ ID NO: 816846 - DNA, 25 bp, Homo sapien
cccatgagagcagtgtctagttgta

SEQ ID NO: 816847 - DNA, 25 bp, Homo sapien
caaggaaattgatcatcctgtcttc

SEQ ID NO: 816848 - DNA, 25 bp, Homo sapien
gcaagacacatagttcaatctcctt

SEQ ID NO: 816849 - DNA, 25 bp, Homo sapien
gactggagtaggcggtaggagcgag

SEQ ID NO: 816850 - DNA, 25 bp, Homo sapien
aggactggagtaggcggtaggagcg

SEQ ID NO: 816851 - DNA, 25 bp, Homo sapien
ctggagtaggcggtaggagcgagtc

SEQ ID NO: 816852 - DNA, 25 bp, Homo sapien
ggagtaggcggtaggagcgagtcat

SEQ ID NO: 816853 - DNA, 25 bp, Homo sapien
ggtcccaagacgaggagcgggaagc

SEQ ID NO: 816854 - DNA, 25 bp, Homo sapien
ttaggtcccaagacgaggagcggga

SEQ ID NO: 816855 - DNA, 25 bp, Homo sapien
tcccaagacgaggagcgggaagctg

SEQ ID NO: 816856 - DNA, 25 bp, Homo sapien
ccaagacgaggagcgggaagctgcc

SEQ ID NO: 816857 - DNA, 25 bp, Homo sapien
ctggctgtgcctggaccgcttcgtc

SEQ ID NO: 816858 - DNA, 25 bp, Homo sapien
tgtgcctggaccgcttcgtccacgg

SEQ ID NO: 816859 - DNA, 25 bp, Homo sapien
ggctgtgcctggaccgcttcgtcca

SEQ ID NO: 816860 - DNA, 25 bp, Homo sapien
gcctggaccgcttcgtccacggcct

SEQ ID NO: 816861 - DNA, 25 bp, Homo sapien
gctgggtctcctccacgcgggttac

SEQ ID NO: 816862 - DNA, 25 bp, Homo sapien
ggagctgggtctcctccacgcgggt

SEQ ID NO: 816863 - DNA, 25 bp, Homo sapien
tgggagctgggtctcctccacgcgg

SEQ ID NO: 816864 - DNA, 25 bp, Homo sapien
agctgggtctcctccacgcgggtta

SEQ ID NO: 816865 - DNA, 25 bp, Homo sapien
ttgcactaccattgtagccatgatg

SEQ ID NO: 816866 - DNA, 25 bp, Homo sapien
tgatctgatggctaccactagagcc

SEQ ID NO: 816867 - DNA, 25 bp, Homo sapien
taccactagagcctttcaaagttct

SEQ ID NO: 816868 - DNA, 25 bp, Homo sapien
tgtccctggacttgcactaccattg

SEQ ID NO: 816869 - DNA, 25 bp, Homo sapien
cactggttaattgctgtgtggcttt

SEQ ID NO: 816870 - DNA, 25 bp, Homo sapien
aagcagttcttgcaacactggttaa

SEQ ID NO: 816871 - DNA, 25 bp, Homo sapien
tttggagaggtaatgctagatgaaa

SEQ ID NO: 816872 - DNA, 25 bp, Homo sapien
gctttcttgtggagattcaggtttt

SEQ ID NO: 816873 - DNA, 25 bp, Homo sapien
tgcttttcaagagggttgcatcaat

SEQ ID NO: 816874 - DNA, 25 bp, Homo sapien
gagggttgcatcaatttgtcttccc

SEQ ID NO: 816875 - DNA, 25 bp, Homo sapien
ttcatggctcttggttcatattgcc

SEQ ID NO: 816876 - DNA, 25 bp, Homo sapien
ttataatagcataagccttttcatg

SEQ ID NO: 816877 - DNA, 25 bp, Homo sapien
aatatgccattcttgaaaacattgg

SEQ ID NO: 816878 - DNA, 25 bp, Homo sapien
cattcttgaaaacattggtgtgtga

SEQ ID NO: 816879 - DNA, 25 bp, Homo sapien
atatgccattcttgaaaacattggt

SEQ ID NO: 816880 - DNA, 25 bp, Homo sapien
tgccattcttgaaaacattggtgtg

SEQ ID NO: 816881 - DNA, 25 bp, Homo sapien
tcaggcacccttcaatttccaaaca

SEQ ID NO: 816882 - DNA, 25 bp, Homo sapien
caaacacatgaagatacgctaaatt

SEQ ID NO: 816883 - DNA, 25 bp, Homo sapien
cacatgaagatacgctaaattttac

SEQ ID NO: 816884 - DNA, 25 bp, Homo sapien
ttccaaacacatgaagatacgctaa

SEQ ID NO: 816885 - DNA, 25 bp, Homo sapien
tttgttagcatcctttactgcttct

SEQ ID NO: 816886 - DNA, 25 bp, Homo sapien
caggttcagattgtccaaagaaata

SEQ ID NO: 816887 - DNA, 25 bp, Homo sapien
gctttgttagcatcctttactgctt

SEQ ID NO: 816888 - DNA, 25 bp, Homo sapien
tagctttgttagcatcctttactgc

SEQ ID NO: 816889 - DNA, 25 bp, Homo sapien
agacagtatggtgaattcttaagga

SEQ ID NO: 816890 - DNA, 25 bp, Homo sapien
tttacacagctaagatacataaaaa

SEQ ID NO: 816891 - DNA, 25 bp, Homo sapien
gaaaagaaattgtgacgaaagccaa

SEQ ID NO: 816892 - DNA, 25 bp, Homo sapien
ggaaaagaaattgtgacgaaagcca

SEQ ID NO: 816893 - DNA, 25 bp, Homo sapien
tagcagcaggcctacgaagaaggac

SEQ ID NO: 816894 - DNA, 25 bp, Homo sapien
gcagcctagatgagtgggtttcccc

SEQ ID NO: 816895 - DNA, 25 bp, Homo sapien
gatctctaataactccagccagagg

SEQ ID NO: 816896 - DNA, 25 bp, Homo sapien
cagaggctagggacagaattcaaat

SEQ ID NO: 816897 - DNA, 25 bp, Homo sapien
tgtcattgtataatggccctctttg

SEQ ID NO: 816898 - DNA, 25 bp, Homo sapien
ttctttagattaccatatgcatggg

SEQ ID NO: 816899 - DNA, 25 bp, Homo sapien
tatatcctcttgacgacatgacccc

SEQ ID NO: 816900 - DNA, 25 bp, Homo sapien
gaaagtgagtctcctatatgcagca

SEQ ID NO: 816901 - DNA, 25 bp, Homo sapien
ctgtgatgccaatgacagtgctctc

SEQ ID NO: 816902 - DNA, 25 bp, Homo sapien
tcctgtgatgccaatgacagtgctc

SEQ ID NO: 816903 - DNA, 25 bp, Homo sapien
cctgtgatgccaatgacagtgctct

SEQ ID NO: 816904 - DNA, 25 bp, Homo sapien
attcctgtgatgccaatgacagtgc

SEQ ID NO: 816905 - DNA, 25 bp, Homo sapien
tctaaagtagcctcatctataacta

SEQ ID NO: 816906 - DNA, 25 bp, Homo sapien
gacatctgtatcactgtttacaagt

SEQ ID NO: 816907 - DNA, 25 bp, Homo sapien
ttgttgttcgtgatgccacacaagt

SEQ ID NO: 816908 - DNA, 25 bp, Homo sapien
catctataactattgttgttcgtga

SEQ ID NO: 816909 - DNA, 25 bp, Homo sapien
tgtgtttgcttctatggccaggcag

SEQ ID NO: 816910 - DNA, 25 bp, Homo sapien
ttgtgtttgcttctatggccaggca

SEQ ID NO: 816911 - DNA, 25 bp, Homo sapien
tgacttagtgtctgtttagcgataa

SEQ ID NO: 816912 - DNA, 25 bp, Homo sapien
ccaattgacttagtgtctgtttagc

SEQ ID NO: 816913 - DNA, 25 bp, Homo sapien
tctgtttagcgataaggaattccta

SEQ ID NO: 816914 - DNA, 25 bp, Homo sapien
aaggaattcctatttgcttcctgtg

SEQ ID NO: 816915 - DNA, 25 bp, Homo sapien
cagtctatgcacccaggcaccagct

SEQ ID NO: 816916 - DNA, 25 bp, Homo sapien
ggcagtctatgcacccaggcaccag

SEQ ID NO: 816917 - DNA, 25 bp, Homo sapien
gcagtctatgcacccaggcaccagc

SEQ ID NO: 816918 - DNA, 25 bp, Homo sapien
aggcagtctatgcacccaggcacca

SEQ ID NO: 816919 - DNA, 25 bp, Homo sapien
tttcagcatgcaattcaagagccat

SEQ ID NO: 816920 - DNA, 25 bp, Homo sapien
tgaagttttcagcatgcaattcaag

SEQ ID NO: 816921 - DNA, 25 bp, Homo sapien
tatgaagttttcagcatgcaattca

SEQ ID NO: 816922 - DNA, 25 bp, Homo sapien
gttttcagcatgcaattcaagagcc

SEQ ID NO: 816923 - DNA, 25 bp, Homo sapien
tataggcataagcagctgtgtttat

SEQ ID NO: 816924 - DNA, 25 bp, Homo sapien
tttataggcataagcagctgtgttt

SEQ ID NO: 816925 - DNA, 25 bp, Homo sapien
ggcataagcagctgtgtttatgctt

SEQ ID NO: 816926 - DNA, 25 bp, Homo sapien
tgtgtttatgcttctgtgattttct

SEQ ID NO: 816927 - DNA, 25 bp, Homo sapien
tggcctcctgtcaaatacatatgat

SEQ ID NO: 816928 - DNA, 25 bp, Homo sapien
tgtttgcagcatacaaatacaaagt

SEQ ID NO: 816929 - DNA, 25 bp, Homo sapien
gattctactgattaggctttccctt

SEQ ID NO: 816930 - DNA, 25 bp, Homo sapien
tgtaattgactaaacactcgattct

SEQ ID NO: 816931 - DNA, 25 bp, Homo sapien
tgtgtgctacaagattccctgaatg

SEQ ID NO: 816932 - DNA, 25 bp, Homo sapien
gccagcagtgggccttctgagcttc

SEQ ID NO: 816933 - DNA, 25 bp, Homo sapien
gctgaaattccaccaatgagccagc

SEQ ID NO: 816934 - DNA, 25 bp, Homo sapien
gtgttgtggaatcccaaaggctgaa

SEQ ID NO: 816935 - DNA, 25 bp, Homo sapien
cagtcccagcacaagggtctttcct

SEQ ID NO: 816936 - DNA, 25 bp, Homo sapien
tccagtagcagaatctttgtactcc

SEQ ID NO: 816937 - DNA, 25 bp, Homo sapien
cctggttcgttttcaatttcatcac

SEQ ID NO: 816938 - DNA, 25 bp, Homo sapien
cccagcacaagggtctttcctggtt

SEQ ID NO: 816939 - DNA, 25 bp, Homo sapien
tacaccactgaaacagcgaactctg

SEQ ID NO: 816940 - DNA, 25 bp, Homo sapien
gaactctgtcccataggaccaccga

SEQ ID NO: 816941 - DNA, 25 bp, Homo sapien
tgcaatctgaaatatccccgtgagg

SEQ ID NO: 816942 - DNA, 25 bp, Homo sapien
gcatggcctctgctttagcaccagg

SEQ ID NO: 816943 - DNA, 25 bp, Homo sapien
cctgacatggtcacatgctgcttct

SEQ ID NO: 816944 - DNA, 25 bp, Homo sapien
tcctgacatggtcacatgctgcttc

SEQ ID NO: 816945 - DNA, 25 bp, Homo sapien
ctgacatggtcacatgctgcttctc

SEQ ID NO: 816946 - DNA, 25 bp, Homo sapien
tttcctgacatggtcacatgctgct

SEQ ID NO: 816947 - DNA, 25 bp, Homo sapien
ctggaccccagattgtgcgcatctt

SEQ ID NO: 816948 - DNA, 25 bp, Homo sapien
tcagagtggctgacttggatgaaca

SEQ ID NO: 816949 - DNA, 25 bp, Homo sapien
cacaaatgtggaattatgtcaaagt

SEQ ID NO: 816950 - DNA, 25 bp, Homo sapien
tgcgcatcttcgatgagctctcaga

SEQ ID NO: 816951 - DNA, 25 bp, Homo sapien
tttggatgtcctgagctcagcgctc

SEQ ID NO: 816952 - DNA, 25 bp, Homo sapien
caatgtcagggctaccacttggacc

SEQ ID NO: 816953 - DNA, 25 bp, Homo sapien
cacttggacctgtttagtgagcact

SEQ ID NO: 816954 - DNA, 25 bp, Homo sapien
tcagagttgatacccatgtggaagg

SEQ ID NO: 816955 - DNA, 25 bp, Homo sapien
gatttttagcagtgtgcaagggaca

SEQ ID NO: 816956 - DNA, 25 bp, Homo sapien
gggacaaatgagtatgacatagctt

SEQ ID NO: 816957 - DNA, 25 bp, Homo sapien
gaagttgaccagtcatcttgtatga

SEQ ID NO: 816958 - DNA, 25 bp, Homo sapien
gacatagcttcctagacaagcagtg

SEQ ID NO: 816959 - DNA, 25 bp, Homo sapien
cttatgaccagttatgctttaaaaa

SEQ ID NO: 816960 - DNA, 25 bp, Homo sapien
ttttgggctcaaacatatttactct

SEQ ID NO: 816961 - DNA, 25 bp, Homo sapien
tattcaaatttatagcttagtctct

SEQ ID NO: 816962 - DNA, 25 bp, Homo sapien
tactcttgggtactgcttttttata

SEQ ID NO: 816963 - DNA, 25 bp, Homo sapien
aataaggagccaagttctttctctc

SEQ ID NO: 816964 - DNA, 25 bp, Homo sapien
tctactaaaaagaggtaacatggag

SEQ ID NO: 816965 - DNA, 25 bp, Homo sapien
caaatagcatacacactgttgcaaa

SEQ ID NO: 816966 - DNA, 25 bp, Homo sapien
tgtgataccttgctaaaaccacaaa

SEQ ID NO: 816967 - DNA, 25 bp, Homo sapien
tcagcagtagggtagtagaaaagcc

SEQ ID NO: 816968 - DNA, 25 bp, Homo sapien
gaatgtgacttgagccaatttgtta

SEQ ID NO: 816969 - DNA, 25 bp, Homo sapien
cagctgacagtttgacagccacaaa

SEQ ID NO: 816970 - DNA, 25 bp, Homo sapien
tctcagctatttgtgagcaggttag

SEQ ID NO: 816971 - DNA, 25 bp, Homo sapien
gcaggcactgatcagggtatctcct

SEQ ID NO: 816972 - DNA, 25 bp, Homo sapien
acttgtataccactatctatgcagc

SEQ ID NO: 816973 - DNA, 25 bp, Homo sapien
taggaagaagttagagtcagggaac

SEQ ID NO: 816974 - DNA, 25 bp, Homo sapien
tattggcaattttagttaggcataa

SEQ ID NO: 816975 - DNA, 25 bp, Homo sapien
ctgcagtgtgggctagagtacaatg

SEQ ID NO: 816976 - DNA, 25 bp, Homo sapien
tgcttccttgtagtcagtccttctc

SEQ ID NO: 816977 - DNA, 25 bp, Homo sapien
gcaacctgttttccgttcctagaca

SEQ ID NO: 816978 - DNA, 25 bp, Homo sapien
taccacagtcaatttgtagagcagt

SEQ ID NO: 816979 - DNA, 25 bp, Homo sapien
ttggaattttctggatgatttgtca

SEQ ID NO: 816980 - DNA, 25 bp, Homo sapien
cttagagacactcacctctggtatt

SEQ ID NO: 816981 - DNA, 25 bp, Homo sapien
cctctggtattttgtaatacctggc

SEQ ID NO: 816982 - DNA, 25 bp, Homo sapien
tattctttccgcattcaaacttaga

SEQ ID NO: 816983 - DNA, 25 bp, Homo sapien
ttgtggtcgcgttctccgaggcaga

SEQ ID NO: 816984 - DNA, 25 bp, Homo sapien
aacagccaagctccttgtcggacct

SEQ ID NO: 816985 - DNA, 25 bp, Homo sapien
tcaactgggcgccacgttgtggtcg

SEQ ID NO: 816986 - DNA, 25 bp, Homo sapien
gagcgcctctccgtatttcgcaagg

SEQ ID NO: 816987 - DNA, 25 bp, Homo sapien
tccgagggttgggagagcgcgttgg

SEQ ID NO: 816988 - DNA, 25 bp, Homo sapien
ggcgacggccgagtcaggtagggag

SEQ ID NO: 816989 - DNA, 25 bp, Homo sapien
cgcgttggtggcgacggccgagtca

SEQ ID NO: 816990 - DNA, 25 bp, Homo sapien
gagagcgcgttggtggcgacggccg

SEQ ID NO: 816991 - DNA, 25 bp, Homo sapien
gcgcgtatggcctcgggccctcgtt

SEQ ID NO: 816992 - DNA, 25 bp, Homo sapien
cggagaaagtttacgccgacactgg

SEQ ID NO: 816993 - DNA, 25 bp, Homo sapien
tttcggcggcggaaacatggcggtc

SEQ ID NO: 816994 - DNA, 25 bp, Homo sapien
cactggcctgtattagcgcgtatgg

SEQ ID NO: 816995 - DNA, 25 bp, Homo sapien
ggaaggaggcgcgccgcgcagtttg

SEQ ID NO: 816996 - DNA, 25 bp, Homo sapien
gaaggaggcgcgccgcgcagtttga

SEQ ID NO: 816997 - DNA, 25 bp, Homo sapien
aaggaggcgcgccgcgcagtttgac

SEQ ID NO: 816998 - DNA, 25 bp, Homo sapien
gggaaggaggcgcgccgcgcagttt

SEQ ID NO: 816999 - DNA, 25 bp, Homo sapien
gcagttgacactcgcgcagcgcctt

SEQ ID NO: 817000 - DNA, 25 bp, Homo sapien
caggagtcgactttggcttgaggaa

SEQ ID NO: 817001 - DNA, 25 bp, Homo sapien
tggcctagatgcttgatgggcactg

SEQ ID NO: 817002 - DNA, 25 bp, Homo sapien
ctgtcagcctgatctttggtggtct

SEQ ID NO: 817003 - DNA, 25 bp, Homo sapien
cagcccacgcgtggcagtcctgtcc

SEQ ID NO: 817004 - DNA, 25 bp, Homo sapien
tacagcccacgcgtggcagtcctgt

SEQ ID NO: 817005 - DNA, 25 bp, Homo sapien
ttacagcccacgcgtggcagtcctg

SEQ ID NO: 817006 - DNA, 25 bp, Homo sapien
gcccacgcgtggcagtcctgtccac

SEQ ID NO: 817007 - DNA, 25 bp, Homo sapien
aatgagcagcaacgcctcccgcagt

SEQ ID NO: 817008 - DNA, 25 bp, Homo sapien
ttaatgagcagcaacgcctcccgca

SEQ ID NO: 817009 - DNA, 25 bp, Homo sapien
taatgagcagcaacgcctcccgcag

SEQ ID NO: 817010 - DNA, 25 bp, Homo sapien
tgagcagcaacgcctcccgcagtat

SEQ ID NO: 817011 - DNA, 25 bp, Homo sapien
cacagggtgtgaagagccggaacat

SEQ ID NO: 817012 - DNA, 25 bp, Homo sapien
gctatactcctacaggtgacctggg

SEQ ID NO: 817013 - DNA, 25 bp, Homo sapien
cagcggcagccattagactcttaac

SEQ ID NO: 817014 - DNA, 25 bp, Homo sapien
ttaacaggctacagaacagattggg

SEQ ID NO: 817015 - DNA, 25 bp, Homo sapien
cctgagactcaagataacctgtgat

SEQ ID NO: 817016 - DNA, 25 bp, Homo sapien
agccagtccccgatgctttggtttt

SEQ ID NO: 817017 - DNA, 25 bp, Homo sapien
gggagcacatcattatgtggtcttg

SEQ ID NO: 817018 - DNA, 25 bp, Homo sapien
catcattatgtggtcttggaaatgg

SEQ ID NO: 817019 - DNA, 25 bp, Homo sapien
tggacaaggtaagggacgatactcc

SEQ ID NO: 817020 - DNA, 25 bp, Homo sapien
gaacatggcgttctcatcaccagtg

SEQ ID NO: 817021 - DNA, 25 bp, Homo sapien
tgtccttccgatgcaagaacgtgat

SEQ ID NO: 817022 - DNA, 25 bp, Homo sapien
ttgtctgcaccctgaatgaacatgg

SEQ ID NO: 817023 - DNA, 25 bp, Homo sapien
tgtgtggcctatggtgtccccacca

SEQ ID NO: 817024 - DNA, 25 bp, Homo sapien
aagcaacaactccagcaggagacgc

SEQ ID NO: 817025 - DNA, 25 bp, Homo sapien
taccagacataaagtgtaggaatgg

SEQ ID NO: 817026 - DNA, 25 bp, Homo sapien
tatcaatagtgaccagggcttgcac

SEQ ID NO: 817027 - DNA, 25 bp, Homo sapien
tgcaaaatggacaccaggacacttt

SEQ ID NO: 817028 - DNA, 25 bp, Homo sapien
gactatatgggagttagcctgggca

SEQ ID NO: 817029 - DNA, 25 bp, Homo sapien
cagccctgccgtgagtagaggtgct

SEQ ID NO: 817030 - DNA, 25 bp, Homo sapien
tgggcaggcactataaggccagtgc

SEQ ID NO: 817031 - DNA, 25 bp, Homo sapien
tgatgcaaagacacaatatagatca

SEQ ID NO: 817032 - DNA, 25 bp, Homo sapien
gacacaatatagatcagcacagctc

SEQ ID NO: 817033 - DNA, 25 bp, Homo sapien
gcaaagacacaatatagatcagcac

SEQ ID NO: 817034 - DNA, 25 bp, Homo sapien
caatatagatcagcacagctctgaa

SEQ ID NO: 817035 - DNA, 25 bp, Homo sapien
aggcaacttgggccattgcatacag

SEQ ID NO: 817036 - DNA, 25 bp, Homo sapien
gttcagggtatgtgtgacacacatt

SEQ ID NO: 817037 - DNA, 25 bp, Homo sapien
gcaacttgggccattgcatacagtt

SEQ ID NO: 817038 - DNA, 25 bp, Homo sapien
aggttcagggtatgtgtgacacaca

SEQ ID NO: 817039 - DNA, 25 bp, Homo sapien
gatacagattaagaggatgttcttg

SEQ ID NO: 817040 - DNA, 25 bp, Homo sapien
tcttggatttaatgattaagtcatc

SEQ ID NO: 817041 - DNA, 25 bp, Homo sapien
gaaagtcagtcatcagtgggataca

SEQ ID NO: 817042 - DNA, 25 bp, Homo sapien
gaagccacagtgaacgtaacagttc

SEQ ID NO: 817043 - DNA, 25 bp, Homo sapien
tcaactgtggaactttagagaaggc

SEQ ID NO: 817044 - DNA, 25 bp, Homo sapien
ctgtggaactttagagaaggcttac

SEQ ID NO: 817045 - DNA, 25 bp, Homo sapien
actgtggaactttagagaaggctta

SEQ ID NO: 817046 - DNA, 25 bp, Homo sapien
caactgtggaactttagagaaggct

SEQ ID NO: 817047 - DNA, 25 bp, Homo sapien
gaccatgacggatcttaatataacc

SEQ ID NO: 817048 - DNA, 25 bp, Homo sapien
tcagggtcaactggggctagagtct

SEQ ID NO: 817049 - DNA, 25 bp, Homo sapien
cccagtcaggttgggataagtgatg

SEQ ID NO: 817050 - DNA, 25 bp, Homo sapien
caacactgagctagaagagaagggc

SEQ ID NO: 817051 - DNA, 25 bp, Homo sapien
tcgaacgcagttttgcctgggcttc

SEQ ID NO: 817052 - DNA, 25 bp, Homo sapien
gggaaattaaaatcatcgaacgcag

SEQ ID NO: 817053 - DNA, 25 bp, Homo sapien
tgcatgatgcgatcggtatttaccc

SEQ ID NO: 817054 - DNA, 25 bp, Homo sapien
caggtttcgtaatgttgcatgatgc

SEQ ID NO: 817055 - DNA, 25 bp, Homo sapien
acgcggctggagctcaaggaggctc

SEQ ID NO: 817056 - DNA, 25 bp, Homo sapien
gacgcggctggagctcaaggaggct

SEQ ID NO: 817057 - DNA, 25 bp, Homo sapien
ggaggacgcggctggagctcaagga

SEQ ID NO: 817058 - DNA, 25 bp, Homo sapien
aggacgcggctggagctcaaggagg

SEQ ID NO: 817059 - DNA, 25 bp, Homo sapien
acctctttcagagtatggccccggg

SEQ ID NO: 817060 - DNA, 25 bp, Homo sapien
gtgccatcttcttaactcgtttatc

SEQ ID NO: 817061 - DNA, 25 bp, Homo sapien
ctgtctctcttagaaaatttgtctg

SEQ ID NO: 817062 - DNA, 25 bp, Homo sapien
tttgtctgtcgccaagctacctctt

SEQ ID NO: 817063 - DNA, 25 bp, Homo sapien
tcagcaaaactgttttcactcttcc

SEQ ID NO: 817064 - DNA, 25 bp, Homo sapien
cttacctgtcctcagcaaaactgtt

SEQ ID NO: 817065 - DNA, 25 bp, Homo sapien
agcaaaactgttttcactcttccaa

SEQ ID NO: 817066 - DNA, 25 bp, Homo sapien
gtcctcagcaaaactgttttcactc

SEQ ID NO: 817067 - DNA, 25 bp, Homo sapien
cacccaggccctatgactttctgaa

SEQ ID NO: 817068 - DNA, 25 bp, Homo sapien
cacggcgaatggattatagaatagc

SEQ ID NO: 817069 - DNA, 25 bp, Homo sapien
atagccaatccatgattccactctg

SEQ ID NO: 817070 - DNA, 25 bp, Homo sapien
tcaccctcagtcacggcgaatggat

SEQ ID NO: 817071 - DNA, 25 bp, Homo sapien
tagtaaatgaggaagcgctacacac

SEQ ID NO: 817072 - DNA, 25 bp, Homo sapien
tgtgatccctaacctaccttgcatt

SEQ ID NO: 817073 - DNA, 25 bp, Homo sapien
aagaaagcactgtgtgatctgccca

SEQ ID NO: 817074 - DNA, 25 bp, Homo sapien
tctccagtctcatctatgtctgtga

SEQ ID NO: 817075 - DNA, 25 bp, Homo sapien
tctagagtgagctgacttggcttgc

SEQ ID NO: 817076 - DNA, 25 bp, Homo sapien
caacgtgtatttccaaaagtgccta

SEQ ID NO: 817077 - DNA, 25 bp, Homo sapien
gcccattgggtgctgatgtagaaag

SEQ ID NO: 817078 - DNA, 25 bp, Homo sapien
cagtagtcacttagtcacctccagg

SEQ ID NO: 817079 - DNA, 25 bp, Homo sapien
ttagatatcagagagtcaggcaaaa

SEQ ID NO: 817080 - DNA, 25 bp, Homo sapien
tgagtaacatcctcctgatgagaag

SEQ ID NO: 817081 - DNA, 25 bp, Homo sapien
aatgtattcagtgtatctaatactg

SEQ ID NO: 817082 - DNA, 25 bp, Homo sapien
tgttttgttgtctcccaagttaata

SEQ ID NO: 817083 - DNA, 25 bp, Homo sapien
gttgatgctcagtatgcttggagaa

SEQ ID NO: 817084 - DNA, 25 bp, Homo sapien
gctttcttataattgtaggaggtca

SEQ ID NO: 817085 - DNA, 25 bp, Homo sapien
tggagaagtggctttcttataattg

SEQ ID NO: 817086 - DNA, 25 bp, Homo sapien
gaggccaagagttgatgctcagtat

SEQ ID NO: 817087 - DNA, 25 bp, Homo sapien
gaacacggtggggatttaatgacat

SEQ ID NO: 817088 - DNA, 25 bp, Homo sapien
ttctcttcttctgaacacggtgggg

SEQ ID NO: 817089 - DNA, 25 bp, Homo sapien
atgacattctgtttagtactactcc

SEQ ID NO: 817090 - DNA, 25 bp, Homo sapien
tgtttagtactactcctcaatggtt

SEQ ID NO: 817091 - DNA, 25 bp, Homo sapien
tgaacataggaacccacaccatttt

SEQ ID NO: 817092 - DNA, 25 bp, Homo sapien
cgtttgagacagcagagaccttagt

SEQ ID NO: 817093 - DNA, 25 bp, Homo sapien
gccatttctgctcagcatcgtttga

SEQ ID NO: 817094 - DNA, 25 bp, Homo sapien
aatgtgaacataggaacccacacca

SEQ ID NO: 817095 - DNA, 25 bp, Homo sapien
tcaccctaaagaacagtctttgata

SEQ ID NO: 817096 - DNA, 25 bp, Homo sapien
caccctaaagaacagtctttgatac

SEQ ID NO: 817097 - DNA, 25 bp, Homo sapien
ccatgagacatgcaggaacttcaaa

SEQ ID NO: 817098 - DNA, 25 bp, Homo sapien
gcagtcttaaccatgagacatgcag

SEQ ID NO: 817099 - DNA, 25 bp, Homo sapien
aacacaccaaactgtgcagtcttaa

SEQ ID NO: 817100 - DNA, 25 bp, Homo sapien
tgtttgacttatgctgcatataatg

SEQ ID NO: 817101 - DNA, 25 bp, Homo sapien
gtctttcccagcagttgcctcccct

SEQ ID NO: 817102 - DNA, 25 bp, Homo sapien
cagcctcctcgccacagtgtcttag

SEQ ID NO: 817103 - DNA, 25 bp, Homo sapien
agcctcctcgccacagtgtcttagg

SEQ ID NO: 817104 - DNA, 25 bp, Homo sapien
cctcctcgccacagtgtcttaggaa

SEQ ID NO: 817105 - DNA, 25 bp, Homo sapien
gcctcctcgccacagtgtcttagga

SEQ ID NO: 817106 - DNA, 25 bp, Homo sapien
gatcattgagtatccctatctccat

SEQ ID NO: 817107 - DNA, 25 bp, Homo sapien
tctaccctttgggaaatcatcctaa

SEQ ID NO: 817108 - DNA, 25 bp, Homo sapien
tcccaagaggttgtcccatgtgtct

SEQ ID NO: 817109 - DNA, 25 bp, Homo sapien
tcatcaagctattgttggaacatct

SEQ ID NO: 817110 - DNA, 25 bp, Homo sapien
gaacaaccgcagttatcatgatgac

SEQ ID NO: 817111 - DNA, 25 bp, Homo sapien
gatgactctttggagttagctccca

SEQ ID NO: 817112 - DNA, 25 bp, Homo sapien
gaaggcgttattgccctgagacagg

SEQ ID NO: 817113 - DNA, 25 bp, Homo sapien
aagtctccagttaacccagaaggcg

SEQ ID NO: 817114 - DNA, 25 bp, Homo sapien
ctgcgccagccatttttccggtcat

SEQ ID NO: 817115 - DNA, 25 bp, Homo sapien
ggtcatctctgtgcggctgaatgga

SEQ ID NO: 817116 - DNA, 25 bp, Homo sapien
tttttccggtcatctctgtgcggct

SEQ ID NO: 817117 - DNA, 25 bp, Homo sapien
gcgccagccatttttccggtcatct

SEQ ID NO: 817118 - DNA, 25 bp, Homo sapien
actgttgtttaatctagctaattgc

SEQ ID NO: 817119 - DNA, 25 bp, Homo sapien
gagctattcttcatctaacatctgc

SEQ ID NO: 817120 - DNA, 25 bp, Homo sapien
tcctcattatctatggttactttgt

SEQ ID NO: 817121 - DNA, 25 bp, Homo sapien
tgctacgtttgtctaattatgggac

SEQ ID NO: 817122 - DNA, 25 bp, Homo sapien
gattagccagcagataagcaatgtg

SEQ ID NO: 817123 - DNA, 25 bp, Homo sapien
tactgcatccattctgattagccag

SEQ ID NO: 817124 - DNA, 25 bp, Homo sapien
tataatatatgcaaaggccattaca

SEQ ID NO: 817125 - DNA, 25 bp, Homo sapien
tggaaactgatttaaagtctctacc

SEQ ID NO: 817126 - DNA, 25 bp, Homo sapien
gcaacactctctttttggccttaaa

SEQ ID NO: 817127 - DNA, 25 bp, Homo sapien
tatcagccgcaacgcatgaaaatgt

SEQ ID NO: 817128 - DNA, 25 bp, Homo sapien
ggccttaaagcatttgtgcatcaag

SEQ ID NO: 817129 - DNA, 25 bp, Homo sapien
caaggccacagcgtaaaataaacag

SEQ ID NO: 817130 - DNA, 25 bp, Homo sapien
cagcattactggataaatctttttg

SEQ ID NO: 817131 - DNA, 25 bp, Homo sapien
atcacagcattactggataaatctt

SEQ ID NO: 817132 - DNA, 25 bp, Homo sapien
cattactggataaatctttttgttc

SEQ ID NO: 817133 - DNA, 25 bp, Homo sapien
cacatctcgtccaagatcatcaatc

SEQ ID NO: 817134 - DNA, 25 bp, Homo sapien
tttcctgtttgtcaaatgacatctg

SEQ ID NO: 817135 - DNA, 25 bp, Homo sapien
gttttttcctgtttgtcaaatgaca

SEQ ID NO: 817136 - DNA, 25 bp, Homo sapien
tttttcctgtttgtcaaatgacatc

SEQ ID NO: 817137 - DNA, 25 bp, Homo sapien
ttttcctgtttgtcaaatgacatct

SEQ ID NO: 817138 - DNA, 25 bp, Homo sapien
ttggctaggatctgttgctgtagag

SEQ ID NO: 817139 - DNA, 25 bp, Homo sapien
tgctgtagagttagtgttccccttg

SEQ ID NO: 817140 - DNA, 25 bp, Homo sapien
ccacttggtctagcctgttgttaaa

SEQ ID NO: 817141 - DNA, 25 bp, Homo sapien
ccttgggtggtgttgtaatactccg

SEQ ID NO: 817142 - DNA, 25 bp, Homo sapien
gagcagtcaactgttaatacctctg

SEQ ID NO: 817143 - DNA, 25 bp, Homo sapien
aaataaaagggtgctggtgtctagg

SEQ ID NO: 817144 - DNA, 25 bp, Homo sapien
cctttactagttcagagaatttctc

SEQ ID NO: 817145 - DNA, 25 bp, Homo sapien
tgtcaagaaacaactgtaaccattg

SEQ ID NO: 817146 - DNA, 25 bp, Homo sapien
cttgtgggatgcatgcctaatgagt

SEQ ID NO: 817147 - DNA, 25 bp, Homo sapien
tgtgggatgcatgcctaatgagtca

SEQ ID NO: 817148 - DNA, 25 bp, Homo sapien
gatgcatgcctaatgagtcatcctt

SEQ ID NO: 817149 - DNA, 25 bp, Homo sapien
tgggatgcatgcctaatgagtcatc

SEQ ID NO: 817150 - DNA, 25 bp, Homo sapien
cagcagtggaagcttgaagacaggg

SEQ ID NO: 817151 - DNA, 25 bp, Homo sapien
ccagcagtggaagcttgaagacagg

SEQ ID NO: 817152 - DNA, 25 bp, Homo sapien
gcagtggaagcttgaagacaggggc

SEQ ID NO: 817153 - DNA, 25 bp, Homo sapien
ctgcaagcatgccttaactgttcca

SEQ ID NO: 817154 - DNA, 25 bp, Homo sapien
gcaagcatgccttaactgttccaac

SEQ ID NO: 817155 - DNA, 25 bp, Homo sapien
ttccaacatctgatgcaaatggctt

SEQ ID NO: 817156 - DNA, 25 bp, Homo sapien
gccttaactgttccaacatctgatg

SEQ ID NO: 817157 - DNA, 25 bp, Homo sapien
caaaggtaccatgacttgtgcctgg

SEQ ID NO: 817158 - DNA, 25 bp, Homo sapien
tgtgcctggactccttgctctgctc

SEQ ID NO: 817159 - DNA, 25 bp, Homo sapien
gaggatcctgatgctacaaccaaag

SEQ ID NO: 817160 - DNA, 25 bp, Homo sapien
tgatgctacaaccaaaggtaccatg

SEQ ID NO: 817161 - DNA, 25 bp, Homo sapien
tcagcaaccacctgaacagggacca

SEQ ID NO: 817162 - DNA, 25 bp, Homo sapien
caaccacctgaacagggaccacttt

SEQ ID NO: 817163 - DNA, 25 bp, Homo sapien
gcaaccacctgaacagggaccactt

SEQ ID NO: 817164 - DNA, 25 bp, Homo sapien
agcaaccacctgaacagggaccact

SEQ ID NO: 817165 - DNA, 25 bp, Homo sapien
aagacttatgtcttgtagccattcc

SEQ ID NO: 817166 - DNA, 25 bp, Homo sapien
gttgcttccaagacttatgtcttgt

SEQ ID NO: 817167 - DNA, 25 bp, Homo sapien
tttgtggccgcttccagctctgaat

SEQ ID NO: 817168 - DNA, 25 bp, Homo sapien
gtggccgcttccagctctgaatttc

SEQ ID NO: 817169 - DNA, 25 bp, Homo sapien
cttctgggtagtttgtgtggatgct

SEQ ID NO: 817170 - DNA, 25 bp, Homo sapien
ttttcttctgggtagtttgtgtgga

SEQ ID NO: 817171 - DNA, 25 bp, Homo sapien
gggtagtttgtgtggatgcttccca

SEQ ID NO: 817172 - DNA, 25 bp, Homo sapien
ggtagtttgtgtggatgcttcccat

SEQ ID NO: 817173 - DNA, 25 bp, Homo sapien
tctgccacacttgtgctcctcttta

SEQ ID NO: 817174 - DNA, 25 bp, Homo sapien
acttgtgctcctctttattgacccc

SEQ ID NO: 817175 - DNA, 25 bp, Homo sapien
gctcctctttattgaccccaagcat

SEQ ID NO: 817176 - DNA, 25 bp, Homo sapien
tgtgctcctctttattgaccccaag

SEQ ID NO: 817177 - DNA, 25 bp, Homo sapien
gtcacctaatcggttgtttactgtg

SEQ ID NO: 817178 - DNA, 25 bp, Homo sapien
tgctggcagacctaagtaggtcacc

SEQ ID NO: 817179 - DNA, 25 bp, Homo sapien
agaagtctgcgaattcatgctggca

SEQ ID NO: 817180 - DNA, 25 bp, Homo sapien
taacagaagtctgcgaattcatgct

SEQ ID NO: 817181 - DNA, 25 bp, Homo sapien
tagcagaagctaagctgttgccctg

SEQ ID NO: 817182 - DNA, 25 bp, Homo sapien
taagccatctcgtaacttctgcatc

SEQ ID NO: 817183 - DNA, 25 bp, Homo sapien
gtggttagtcattttctgctggcaa

SEQ ID NO: 817184 - DNA, 25 bp, Homo sapien
tgctggcaaatcaaacacacctaag

SEQ ID NO: 817185 - DNA, 25 bp, Homo sapien
tcatgttgccagagtggaatttttt

SEQ ID NO: 817186 - DNA, 25 bp, Homo sapien
atcaatctcatgaaattgatgggtt

SEQ ID NO: 817187 - DNA, 25 bp, Homo sapien
catgaaattgatgggttgaacagca

SEQ ID NO: 817188 - DNA, 25 bp, Homo sapien
tgttgccagagtggaattttttggg

SEQ ID NO: 817189 - DNA, 25 bp, Homo sapien
tccctgtgccttgacacttgaacat

SEQ ID NO: 817190 - DNA, 25 bp, Homo sapien
tgctagacatagctgtccctgtgcc

SEQ ID NO: 817191 - DNA, 25 bp, Homo sapien
ctgagggctcataggaaattttgct

SEQ ID NO: 817192 - DNA, 25 bp, Homo sapien
ggctcataggaaattttgctagaca

SEQ ID NO: 817193 - DNA, 25 bp, Homo sapien
tgccaaacaattctagtgcctgcca

SEQ ID NO: 817194 - DNA, 25 bp, Homo sapien
ttcacatcacaatttatcattgtca

SEQ ID NO: 817195 - DNA, 25 bp, Homo sapien
tagtgactgccaaacaattctagtg

SEQ ID NO: 817196 - DNA, 25 bp, Homo sapien
aatgttagtgactgccaaacaattc

SEQ ID NO: 817197 - DNA, 25 bp, Homo sapien
tggctttaggatagacagccggaaa

SEQ ID NO: 817198 - DNA, 25 bp, Homo sapien
acatgctgtcatgttggctttagga

SEQ ID NO: 817199 - DNA, 25 bp, Homo sapien
cttttggagtacatgctgtcatgtt

SEQ ID NO: 817200 - DNA, 25 bp, Homo sapien
gatagacagccggaaaagttataaa

SEQ ID NO: 817201 - DNA, 25 bp, Homo sapien
aaatcaatgtgcaaatcaggataca

SEQ ID NO: 817202 - DNA, 25 bp, Homo sapien
atcaatgtgcaaatcaggatacaaa

SEQ ID NO: 817203 - DNA, 25 bp, Homo sapien
tttagaaaaccacgttgtctcagcc

SEQ ID NO: 817204 - DNA, 25 bp, Homo sapien
agcaacttcagcaaaatcaatgtgc

SEQ ID NO: 817205 - DNA, 25 bp, Homo sapien
cctatggatctagccagaatacatt

SEQ ID NO: 817206 - DNA, 25 bp, Homo sapien
tgtctttgctctcagcagttgggaa

SEQ ID NO: 817207 - DNA, 25 bp, Homo sapien
attctgtcctatggatctagccaga

SEQ ID NO: 817208 - DNA, 25 bp, Homo sapien
tttgtctttgctctcagcagttggg

SEQ ID NO: 817209 - DNA, 25 bp, Homo sapien
tgttggaaggggatctgtcagcatc

SEQ ID NO: 817210 - DNA, 25 bp, Homo sapien
agcatcagggattttagaagaggga

SEQ ID NO: 817211 - DNA, 25 bp, Homo sapien
gcatcagggattttagaagagggac

SEQ ID NO: 817212 - DNA, 25 bp, Homo sapien
tgatcacactgttggaaggggatct

SEQ ID NO: 817213 - DNA, 25 bp, Homo sapien
tgccccgtatatccatccattgttg

SEQ ID NO: 817214 - DNA, 25 bp, Homo sapien
aactgttactttgtagcttctgaaa

SEQ ID NO: 817215 - DNA, 25 bp, Homo sapien
tttgtgtgttttatggcaagagcag

SEQ ID NO: 817216 - DNA, 25 bp, Homo sapien
caggtatacaccaagttattggata

SEQ ID NO: 817217 - DNA, 25 bp, Homo sapien
aaagacattgtcttctacccctcca

SEQ ID NO: 817218 - DNA, 25 bp, Homo sapien
cctccactctgttcacggttgcatt

SEQ ID NO: 817219 - DNA, 25 bp, Homo sapien
ggtgtgccacttctgtactgaattg

SEQ ID NO: 817220 - DNA, 25 bp, Homo sapien
tattctgcaatgttaggtgtgccac

SEQ ID NO: 817221 - DNA, 25 bp, Homo sapien
taactccccgaataatgttgaaggc

SEQ ID NO: 817222 - DNA, 25 bp, Homo sapien
tcagataatgcaggctaactccccg

SEQ ID NO: 817223 - DNA, 25 bp, Homo sapien
taactgcgcacagctcacattgctg

SEQ ID NO: 817224 - DNA, 25 bp, Homo sapien
gaccaaacttgtaatggcagacaca

SEQ ID NO: 817225 - DNA, 25 bp, Homo sapien
ttaggacagagaaaatggaactatt

SEQ ID NO: 817226 - DNA, 25 bp, Homo sapien
aaatggaactattatagcatgggcc

SEQ ID NO: 817227 - DNA, 25 bp, Homo sapien
cagagaaaatggaactattatagca

SEQ ID NO: 817228 - DNA, 25 bp, Homo sapien
gaactattatagcatgggcctttgt

SEQ ID NO: 817229 - DNA, 25 bp, Homo sapien
gggaggattcaacttaattatcagg

SEQ ID NO: 817230 - DNA, 25 bp, Homo sapien
cttaattatcaggtccctggcccct

SEQ ID NO: 817231 - DNA, 25 bp, Homo sapien
tgtgatgtgattaattaagggagga

SEQ ID NO: 817232 - DNA, 25 bp, Homo sapien
gtgattaattaagggaggattcaac

SEQ ID NO: 817233 - DNA, 25 bp, Homo sapien
ggatgatgttgtatagtgtaaaagc

SEQ ID NO: 817234 - DNA, 25 bp, Homo sapien
tccggggatgatgttgtatagtgta

SEQ ID NO: 817235 - DNA, 25 bp, Homo sapien
gggatgatgttgtatagtgtaaaag

SEQ ID NO: 817236 - DNA, 25 bp, Homo sapien
atgtttccggggatgatgttgtata

SEQ ID NO: 817237 - DNA, 25 bp, Homo sapien
cagagaagttggaatgtgcccctgg

SEQ ID NO: 817238 - DNA, 25 bp, Homo sapien
gtgtggagagtctggctagagctac

SEQ ID NO: 817239 - DNA, 25 bp, Homo sapien
catctctctaggtaaggtgtggaga

SEQ ID NO: 817240 - DNA, 25 bp, Homo sapien
agagaagttggaatgtgcccctggt

SEQ ID NO: 817241 - DNA, 25 bp, Homo sapien
ccactgcaatgggactggaaatctg

SEQ ID NO: 817242 - DNA, 25 bp, Homo sapien
tactgccactgcaatgggactggaa

SEQ ID NO: 817243 - DNA, 25 bp, Homo sapien
tgccactgcaatgggactggaaatc

SEQ ID NO: 817244 - DNA, 25 bp, Homo sapien
actgccactgcaatgggactggaaa

SEQ ID NO: 817245 - DNA, 25 bp, Homo sapien
agttcaccaaatgcactgatctcag

SEQ ID NO: 817246 - DNA, 25 bp, Homo sapien
tcctgagacaccaatctggaacaca

SEQ ID NO: 817247 - DNA, 25 bp, Homo sapien
tctaagaatcaatcctggatattgt

SEQ ID NO: 817248 - DNA, 25 bp, Homo sapien
tggatattgttcctctcctgagaca

SEQ ID NO: 817249 - DNA, 25 bp, Homo sapien
tcctctcctgagacaccaatctgga

SEQ ID NO: 817250 - DNA, 25 bp, Homo sapien
cttttccaatttggtggacagtcac

SEQ ID NO: 817251 - DNA, 25 bp, Homo sapien
tcttttccaatttggtggacagtca

SEQ ID NO: 817252 - DNA, 25 bp, Homo sapien
cgttggtagtttgatggagatggca

SEQ ID NO: 817253 - DNA, 25 bp, Homo sapien
agaaagtcgttggtagtttgatgga

SEQ ID NO: 817254 - DNA, 25 bp, Homo sapien
gtcgttggtagtttgatggagatgg

SEQ ID NO: 817255 - DNA, 25 bp, Homo sapien
aaagtcgttggtagtttgatggaga

SEQ ID NO: 817256 - DNA, 25 bp, Homo sapien
taaacgtcaagggatatggcacccc

SEQ ID NO: 817257 - DNA, 25 bp, Homo sapien
cagtttctttgggaagatagaagcc

SEQ ID NO: 817258 - DNA, 25 bp, Homo sapien
gtggctaccttgctccaagttcaaa

SEQ ID NO: 817259 - DNA, 25 bp, Homo sapien
tctgcccttcgagatatatgtaaat

SEQ ID NO: 817260 - DNA, 25 bp, Homo sapien
ccaaatactaggtgccatctagcgg

SEQ ID NO: 817261 - DNA, 25 bp, Homo sapien
tatggttgccaaatactaggtgcca

SEQ ID NO: 817262 - DNA, 25 bp, Homo sapien
tattttaagctctggaaatacagaa

SEQ ID NO: 817263 - DNA, 25 bp, Homo sapien
gaaatacagaagtgttatggttgcc

SEQ ID NO: 817264 - DNA, 25 bp, Homo sapien
gagtctgggaaaacaagcacttggt

SEQ ID NO: 817265 - DNA, 25 bp, Homo sapien
catctgttgtggaagggagttttgt

SEQ ID NO: 817266 - DNA, 25 bp, Homo sapien
tggccacatgtccttgctgcaaggg

SEQ ID NO: 817267 - DNA, 25 bp, Homo sapien
tctcggatccctttggccacatgtc

SEQ ID NO: 817268 - DNA, 25 bp, Homo sapien
tttctgttcccattgtccatcatct

SEQ ID NO: 817269 - DNA, 25 bp, Homo sapien
ttctgttcccattgtccatcatctc

SEQ ID NO: 817270 - DNA, 25 bp, Homo sapien
actttctgttcccattgtccatcat

SEQ ID NO: 817271 - DNA, 25 bp, Homo sapien
cacactttctgttcccattgtccat

SEQ ID NO: 817272 - DNA, 25 bp, Homo sapien
tttctgcagacttcccgtaatggct

SEQ ID NO: 817273 - DNA, 25 bp, Homo sapien
caataaggctgtgtagtggacagag

SEQ ID NO: 817274 - DNA, 25 bp, Homo sapien
ctggcatgcagttaatcgtggagtc

SEQ ID NO: 817275 - DNA, 25 bp, Homo sapien
ggtccagtgttatcagcaactggca

SEQ ID NO: 817276 - DNA, 25 bp, Homo sapien
ctgagccagcaactacaggatgagt

SEQ ID NO: 817277 - DNA, 25 bp, Homo sapien
gagagttgacatgcgtaagtttcct

SEQ ID NO: 817278 - DNA, 25 bp, Homo sapien
tttcctaggattagtggaggatggt

SEQ ID NO: 817279 - DNA, 25 bp, Homo sapien
tccccagtagccttagacatcactt

SEQ ID NO: 817280 - DNA, 25 bp, Homo sapien
tatactagtacaaggccctaagcgc

SEQ ID NO: 817281 - DNA, 25 bp, Homo sapien
aagcagtatcaattaagtagcaatt

SEQ ID NO: 817282 - DNA, 25 bp, Homo sapien
tagaagcagtatcaattaagtagca

SEQ ID NO: 817283 - DNA, 25 bp, Homo sapien
gaagcagtatcaattaagtagcaat

SEQ ID NO: 817284 - DNA, 25 bp, Homo sapien
atagaagcagtatcaattaagtagc

SEQ ID NO: 817285 - DNA, 25 bp, Homo sapien
caggttctgtaagcgtgagtggtat

SEQ ID NO: 817286 - DNA, 25 bp, Homo sapien
cagaccgtgcatgctaacagcacaa

SEQ ID NO: 817287 - DNA, 25 bp, Homo sapien
cacttctgtcatagggcttcatcag

SEQ ID NO: 817288 - DNA, 25 bp, Homo sapien
ttgcatatgtcagaacagaccgtgc

SEQ ID NO: 817289 - DNA, 25 bp, Homo sapien
gctctcaccgctttgttctgatttt

SEQ ID NO: 817290 - DNA, 25 bp, Homo sapien
ctgctctcaccgctttgttctgatt

SEQ ID NO: 817291 - DNA, 25 bp, Homo sapien
caagtcttatgttctgtttgtctgc

SEQ ID NO: 817292 - DNA, 25 bp, Homo sapien
cattcttcttcacagacgtgtcaag

SEQ ID NO: 817293 - DNA, 25 bp, Homo sapien
tttttgtcaaagaagacgtagcagc

SEQ ID NO: 817294 - DNA, 25 bp, Homo sapien
actttttgtcaaagaagacgtagca

SEQ ID NO: 817295 - DNA, 25 bp, Homo sapien
ttttgtcaaagaagacgtagcagct

SEQ ID NO: 817296 - DNA, 25 bp, Homo sapien
ctttttgtcaaagaagacgtagcag

SEQ ID NO: 817297 - DNA, 25 bp, Homo sapien
ctttactgctatattcagctgtaat

SEQ ID NO: 817298 - DNA, 25 bp, Homo sapien
taaagcgagttttgtgtgcattcca

SEQ ID NO: 817299 - DNA, 25 bp, Homo sapien
gacttttatgaagcagaaccttttg

SEQ ID NO: 817300 - DNA, 25 bp, Homo sapien
ccatgtataaccaagccatttaaca

SEQ ID NO: 817301 - DNA, 25 bp, Homo sapien
gatgggctatttccacgaggatcat

SEQ ID NO: 817302 - DNA, 25 bp, Homo sapien
ccagcaggtaattacccatcaaaac

SEQ ID NO: 817303 - DNA, 25 bp, Homo sapien
gccagcaggtaattacccatcaaaa

SEQ ID NO: 817304 - DNA, 25 bp, Homo sapien
ctgccagcaggtaattacccatcaa

SEQ ID NO: 817305 - DNA, 25 bp, Homo sapien
tgccagcaggtaattacccatcaaa

SEQ ID NO: 817306 - DNA, 25 bp, Homo sapien
gcagaatcagagcatatcatgatgc

SEQ ID NO: 817307 - DNA, 25 bp, Homo sapien
gtctgcattcttcctaggcttagag

SEQ ID NO: 817308 - DNA, 25 bp, Homo sapien
gataatagaaccattgcatagtctg

SEQ ID NO: 817309 - DNA, 25 bp, Homo sapien
tttgtgctgctcttaagaggaaggc

SEQ ID NO: 817310 - DNA, 25 bp, Homo sapien
ttaggtctgctcggtccagacttga

SEQ ID NO: 817311 - DNA, 25 bp, Homo sapien
tgctcggtccagacttgagttcaag

SEQ ID NO: 817312 - DNA, 25 bp, Homo sapien
tctgctcggtccagacttgagttca

SEQ ID NO: 817313 - DNA, 25 bp, Homo sapien
ggtctgctcggtccagacttgagtt

SEQ ID NO: 817314 - DNA, 25 bp, Homo sapien
tggttccgtgtgaaatttgaagtag

SEQ ID NO: 817315 - DNA, 25 bp, Homo sapien
ttggttccgtgtgaaatttgaagta

SEQ ID NO: 817316 - DNA, 25 bp, Homo sapien
taagattgtcttggctatgcgagct

SEQ ID NO: 817317 - DNA, 25 bp, Homo sapien
gcttaagattgtcttggctatgcga

SEQ ID NO: 817318 - DNA, 25 bp, Homo sapien
tgctgccgtgccctttgaaaatggc

SEQ ID NO: 817319 - DNA, 25 bp, Homo sapien
gaaaatggctgatctttcagttttg

SEQ ID NO: 817320 - DNA, 25 bp, Homo sapien
ataaagtgtaagaaactcaatcttc

SEQ ID NO: 817321 - DNA, 25 bp, Homo sapien
cagttttgcacctgttatgcatgtc

SEQ ID NO: 817322 - DNA, 25 bp, Homo sapien
gattgactttgaatctgcaacaaga

SEQ ID NO: 817323 - DNA, 25 bp, Homo sapien
gaaataagattgactttgaatctgc

SEQ ID NO: 817324 - DNA, 25 bp, Homo sapien
gaagccaagctcttcaagcacctct

SEQ ID NO: 817325 - DNA, 25 bp, Homo sapien
ctttgaatctgcaacaagatctgaa

SEQ ID NO: 817326 - DNA, 25 bp, Homo sapien
tttctctcacaatccactctctcca

SEQ ID NO: 817327 - DNA, 25 bp, Homo sapien
ctttctctcacaatccactctctcc

SEQ ID NO: 817328 - DNA, 25 bp, Homo sapien
gctccttagcttcatggctcctttc

SEQ ID NO: 817329 - DNA, 25 bp, Homo sapien
tcctagacttgtgtgtagtcttcca

SEQ ID NO: 817330 - DNA, 25 bp, Homo sapien
tgtgtagtcttccaggctccttagc

SEQ ID NO: 817331 - DNA, 25 bp, Homo sapien
cattacatatagaaccatttgcctc

SEQ ID NO: 817332 - DNA, 25 bp, Homo sapien
ctgtttacctggaagtactccctgt

SEQ ID NO: 817333 - DNA, 25 bp, Homo sapien
cctgtttacctggaagtactccctg

SEQ ID NO: 817334 - DNA, 25 bp, Homo sapien
ctggaagtactccctgtttacctgg

SEQ ID NO: 817335 - DNA, 25 bp, Homo sapien
tggaagtactccctgtttacctgga

SEQ ID NO: 817336 - DNA, 25 bp, Homo sapien
tgtggttgacagatacaatggacat

SEQ ID NO: 817337 - DNA, 25 bp, Homo sapien
ctgtggttgacagatacaatggaca

SEQ ID NO: 817338 - DNA, 25 bp, Homo sapien
gttgacagatacaatggacattccc

SEQ ID NO: 817339 - DNA, 25 bp, Homo sapien
tggttgacagatacaatggacattc

SEQ ID NO: 817340 - DNA, 25 bp, Homo sapien
tgcaaccagaacagtagcccttgcc

SEQ ID NO: 817341 - DNA, 25 bp, Homo sapien
ctgcaaccagaacagtagcccttgc

SEQ ID NO: 817342 - DNA, 25 bp, Homo sapien
gaagaaattctcctcctactgacaa

SEQ ID NO: 817343 - DNA, 25 bp, Homo sapien
gcaaccagaacagtagcccttgccc

SEQ ID NO: 817344 - DNA, 25 bp, Homo sapien
ctttgattccattcatcaggccttt

SEQ ID NO: 817345 - DNA, 25 bp, Homo sapien
catgaggctgctcttcaggtaaaga

SEQ ID NO: 817346 - DNA, 25 bp, Homo sapien
ccatccagatacagaggaattccct

SEQ ID NO: 817347 - DNA, 25 bp, Homo sapien
cttttggttagagtacatgaggctg

SEQ ID NO: 817348 - DNA, 25 bp, Homo sapien
gaggatacatcgtttttcagtcatc

SEQ ID NO: 817349 - DNA, 25 bp, Homo sapien
tgaggatacatcgtttttcagtcat

SEQ ID NO: 817350 - DNA, 25 bp, Homo sapien
aggatacatcgtttttcagtcatcc

SEQ ID NO: 817351 - DNA, 25 bp, Homo sapien
tgaaagcagctctaagtctcgtggc

SEQ ID NO: 817352 - DNA, 25 bp, Homo sapien
ctgttgctgggaatggcttgattcc

SEQ ID NO: 817353 - DNA, 25 bp, Homo sapien
tggcttgattccacgctggtcccag

SEQ ID NO: 817354 - DNA, 25 bp, Homo sapien
agctctaagtctcgtggctgttgct

SEQ ID NO: 817355 - DNA, 25 bp, Homo sapien
gctctaagatccagtaaggccagtc

SEQ ID NO: 817356 - DNA, 25 bp, Homo sapien
ctaagatccagtaaggccagtcccc

SEQ ID NO: 817357 - DNA, 25 bp, Homo sapien
ctgctctaagatccagtaaggccag

SEQ ID NO: 817358 - DNA, 25 bp, Homo sapien
tctaagatccagtaaggccagtccc

SEQ ID NO: 817359 - DNA, 25 bp, Homo sapien
tgtcccgttttttctacaggagcta

SEQ ID NO: 817360 - DNA, 25 bp, Homo sapien
caggagctatactcctggtaaccac

SEQ ID NO: 817361 - DNA, 25 bp, Homo sapien
cagcaggtatgtttcagccttacaa

SEQ ID NO: 817362 - DNA, 25 bp, Homo sapien
caggcagtatgtgaaaccagtaata

SEQ ID NO: 817363 - DNA, 25 bp, Homo sapien
tcttttcacggtgtgcgcctctgcg

SEQ ID NO: 817364 - DNA, 25 bp, Homo sapien
gagacccgagcgtgcgttaaagcgc

SEQ ID NO: 817365 - DNA, 25 bp, Homo sapien
caaaaccgtatgctgtattggcaaa

SEQ ID NO: 817366 - DNA, 25 bp, Homo sapien
aagtacgtcctctcagcagacggag

SEQ ID NO: 817367 - DNA, 25 bp, Homo sapien
gggctagagctagggcgaagcggcg

SEQ ID NO: 817368 - DNA, 25 bp, Homo sapien
acgcggccgccgcataaataaccgg

SEQ ID NO: 817369 - DNA, 25 bp, Homo sapien
cgtgggcagcgtcccgggaggtggc

SEQ ID NO: 817370 - DNA, 25 bp, Homo sapien
cgtgtctcgcgctttctcggaggct

SEQ ID NO: 817371 - DNA, 25 bp, Homo sapien
tgaagtgcccaacttagacgcgaga

SEQ ID NO: 817372 - DNA, 25 bp, Homo sapien
tcatccctgtgcacggttatcccga

SEQ ID NO: 817373 - DNA, 25 bp, Homo sapien
ttatcccgaagcgtcagtagggccc

SEQ ID NO: 817374 - DNA, 25 bp, Homo sapien
ttctgagatgaacgctgaagtgccc

SEQ ID NO: 817375 - DNA, 25 bp, Homo sapien
acttgatttctcgactggtgccacc

SEQ ID NO: 817376 - DNA, 25 bp, Homo sapien
gatacctattaggataagacagctg

SEQ ID NO: 817377 - DNA, 25 bp, Homo sapien
gaagcgtcagggaaaagaatgccag

SEQ ID NO: 817378 - DNA, 25 bp, Homo sapien
tgagcacaggaccaacacaacattg

SEQ ID NO: 817379 - DNA, 25 bp, Homo sapien
tctcacatttttgttcggccctgaa

SEQ ID NO: 817380 - DNA, 25 bp, Homo sapien
ctcacatttttgttcggccctgaac

SEQ ID NO: 817381 - DNA, 25 bp, Homo sapien
tcacatttttgttcggccctgaact

SEQ ID NO: 817382 - DNA, 25 bp, Homo sapien
ttggccctgggaacagtcttcaaac

SEQ ID NO: 817383 - DNA, 25 bp, Homo sapien
cctctcttaaggtgagttgctccca

SEQ ID NO: 817384 - DNA, 25 bp, Homo sapien
ttctcatgacaatctttggccctgg

SEQ ID NO: 817385 - DNA, 25 bp, Homo sapien
gaagtttttcgaagcagctcaccag

SEQ ID NO: 817386 - DNA, 25 bp, Homo sapien
tgtcactctttatgaagacaaccgg

SEQ ID NO: 817387 - DNA, 25 bp, Homo sapien
tgcgcaatacactcaagactctgaa

SEQ ID NO: 817388 - DNA, 25 bp, Homo sapien
caatctctgatgaaggatcagtcaa

SEQ ID NO: 817389 - DNA, 25 bp, Homo sapien
cagtcaacatcctaaaattgcgcaa

SEQ ID NO: 817390 - DNA, 25 bp, Homo sapien
tggttcccagattccctagcccaat

SEQ ID NO: 817391 - DNA, 25 bp, Homo sapien
ccctagcccaatcctggaaggctct

SEQ ID NO: 817392 - DNA, 25 bp, Homo sapien
ctagcccaatcctggaaggctctcc

SEQ ID NO: 817393 - DNA, 25 bp, Homo sapien
ttcccagattccctagcccaatcct

SEQ ID NO: 817394 - DNA, 25 bp, Homo sapien
ggaaacatttctgcgaagttcacag

SEQ ID NO: 817395 - DNA, 25 bp, Homo sapien
aaaatacgtaaactgttgatcacct

SEQ ID NO: 817396 - DNA, 25 bp, Homo sapien
gatcacctctggttgtcttaactag

SEQ ID NO: 817397 - DNA, 25 bp, Homo sapien
aactagcatggaggttgtcatggaa

SEQ ID NO: 817398 - DNA, 25 bp, Homo sapien
catatcctaggagacaaagtacagc

SEQ ID NO: 817399 - DNA, 25 bp, Homo sapien
cttaagcctccccagaattgtgttt

SEQ ID NO: 817400 - DNA, 25 bp, Homo sapien
tatatcctcaaaagaccatagtcca

SEQ ID NO: 817401 - DNA, 25 bp, Homo sapien
cattaacctatagtagcaagaagag

SEQ ID NO: 817402 - DNA, 25 bp, Homo sapien
gcagtgacaattgactaaaggctct

SEQ ID NO: 817403 - DNA, 25 bp, Homo sapien
tgcagcagtgacaattgactaaagg

SEQ ID NO: 817404 - DNA, 25 bp, Homo sapien
cttgcagcagtgacaattgactaaa

SEQ ID NO: 817405 - DNA, 25 bp, Homo sapien
tgacaattgactaaaggctctggct

SEQ ID NO: 817406 - DNA, 25 bp, Homo sapien
aaagattactgaggcatagcagtga

SEQ ID NO: 817407 - DNA, 25 bp, Homo sapien
cctgtacctgactatgaaccatcaa

SEQ ID NO: 817408 - DNA, 25 bp, Homo sapien
agaacagaacaaaaagtccaacctg

SEQ ID NO: 817409 - DNA, 25 bp, Homo sapien
agattactgaggcatagcagtgagc

SEQ ID NO: 817410 - DNA, 25 bp, Homo sapien
gctctgtaaaggacatggaccactc

SEQ ID NO: 817411 - DNA, 25 bp, Homo sapien
tgaacatctgcggaaaactccaagg

SEQ ID NO: 817412 - DNA, 25 bp, Homo sapien
tattaattaggcaaggcgcaggaca

SEQ ID NO: 817413 - DNA, 25 bp, Homo sapien
taaatggatgggctagcctgcgacc

SEQ ID NO: 817414 - DNA, 25 bp, Homo sapien
cttgccttatcttgaagtcactcat

SEQ ID NO: 817415 - DNA, 25 bp, Homo sapien
tggatcacatccccttgccttatct

SEQ ID NO: 817416 - DNA, 25 bp, Homo sapien
cccttgccttatcttgaagtcactc

SEQ ID NO: 817417 - DNA, 25 bp, Homo sapien
gatcacatccccttgccttatcttg

SEQ ID NO: 817418 - DNA, 25 bp, Homo sapien
ggacaaagcttcaacagacttctat

SEQ ID NO: 817419 - DNA, 25 bp, Homo sapien
tttggagagttagactttaattctc

SEQ ID NO: 817420 - DNA, 25 bp, Homo sapien
tctacttccaggataggtcaggaca

SEQ ID NO: 817421 - DNA, 25 bp, Homo sapien
tcctttctccagagtattcttctac

SEQ ID NO: 817422 - DNA, 25 bp, Homo sapien
cctggcccaggtacattattaatga

SEQ ID NO: 817423 - DNA, 25 bp, Homo sapien
taaaaggttgttctatccacattga

SEQ ID NO: 817424 - DNA, 25 bp, Homo sapien
gtgaaccatgctgaaacatatgtgc

SEQ ID NO: 817425 - DNA, 25 bp, Homo sapien
taaagtcattaactgcattagcctc

SEQ ID NO: 817426 - DNA, 25 bp, Homo sapien
gctgtatctgtggaatgtgctcttt

SEQ ID NO: 817427 - DNA, 25 bp, Homo sapien
cctgcaggcaaccaacaactgctgt

SEQ ID NO: 817428 - DNA, 25 bp, Homo sapien
taccaccaccccctcaattctgatg

SEQ ID NO: 817429 - DNA, 25 bp, Homo sapien
caccccctcaattctgatgatccct

SEQ ID NO: 817430 - DNA, 25 bp, Homo sapien
tctgatctgggcgaaaactccaaag

SEQ ID NO: 817431 - DNA, 25 bp, Homo sapien
tgcttggccatttcaaaaaacagag

SEQ ID NO: 817432 - DNA, 25 bp, Homo sapien
gaggctgcatgtgatacaatcgaaa

SEQ ID NO: 817433 - DNA, 25 bp, Homo sapien
gaaatcttgcagcagtctacggcaa

SEQ ID NO: 817434 - DNA, 25 bp, Homo sapien
tgctacctccacccacctgttcaag

SEQ ID NO: 817435 - DNA, 25 bp, Homo sapien
ctttctctcccacaaacttctccat

SEQ ID NO: 817436 - DNA, 25 bp, Homo sapien
gagtaaatctgaatctgccacagga

SEQ ID NO: 817437 - DNA, 25 bp, Homo sapien
gtccagggccaattaacaatcacgt

SEQ ID NO: 817438 - DNA, 25 bp, Homo sapien
cggtagtgactaaatggagagctgt

SEQ ID NO: 817439 - DNA, 25 bp, Homo sapien
cacataacactctgattgatcggta

SEQ ID NO: 817440 - DNA, 25 bp, Homo sapien
ctaggaaaattcaatcccagcatca

SEQ ID NO: 817441 - DNA, 25 bp, Homo sapien
cacaagactttcgaattaaccttga

SEQ ID NO: 817442 - DNA, 25 bp, Homo sapien
tgaaacggagtcctaggaaaattca

SEQ ID NO: 817443 - DNA, 25 bp, Homo sapien
ttcaatcccagcatcacattagagt

SEQ ID NO: 817444 - DNA, 25 bp, Homo sapien
gtgtgaccatggctcattgtagtct

SEQ ID NO: 817445 - DNA, 25 bp, Homo sapien
tggtgtgaccatggctcattgtagt

SEQ ID NO: 817446 - DNA, 25 bp, Homo sapien
gtgaccatggctcattgtagtcttg

SEQ ID NO: 817447 - DNA, 25 bp, Homo sapien
gtggtgtgaccatggctcattgtag

SEQ ID NO: 817448 - DNA, 25 bp, Homo sapien
tagatgctcggttcctagtggcttg

SEQ ID NO: 817449 - DNA, 25 bp, Homo sapien
ttctgacaccgcagagaggcccaca

SEQ ID NO: 817450 - DNA, 25 bp, Homo sapien
ctggtactttctgacaccgcagaga

SEQ ID NO: 817451 - DNA, 25 bp, Homo sapien
agaggtcaagctagatgctcggttc

SEQ ID NO: 817452 - DNA, 25 bp, Homo sapien
tagttttagccacggagagaccgct

SEQ ID NO: 817453 - DNA, 25 bp, Homo sapien
ttagttttagccacggagagaccgc

SEQ ID NO: 817454 - DNA, 25 bp, Homo sapien
tagccacggagagaccgctttcctg

SEQ ID NO: 817455 - DNA, 25 bp, Homo sapien
ttttagccacggagagaccgctttc

SEQ ID NO: 817456 - DNA, 25 bp, Homo sapien
agttctgctcactgagagtgatgaa

SEQ ID NO: 817457 - DNA, 25 bp, Homo sapien
gttctgctcactgagagtgatgaag

SEQ ID NO: 817458 - DNA, 25 bp, Homo sapien
ttctgctcactgagagtgatgaagg

SEQ ID NO: 817459 - DNA, 25 bp, Homo sapien
tctgctcactgagagtgatgaaggc

SEQ ID NO: 817460 - DNA, 25 bp, Homo sapien
gcatttttgactctgggctcattca

SEQ ID NO: 817461 - DNA, 25 bp, Homo sapien
tttgactctgggctcattcagatct

SEQ ID NO: 817462 - DNA, 25 bp, Homo sapien
cagatctttaggcattgttcctata

SEQ ID NO: 817463 - DNA, 25 bp, Homo sapien
gcattgttcctatagcgaatctttg

SEQ ID NO: 817464 - DNA, 25 bp, Homo sapien
gctggcctgcactgggatgaaatcc

SEQ ID NO: 817465 - DNA, 25 bp, Homo sapien
atctacatagtctcacccagttctc

SEQ ID NO: 817466 - DNA, 25 bp, Homo sapien
gtcaccaactgcacacatttgccag

SEQ ID NO: 817467 - DNA, 25 bp, Homo sapien
aatttgcaccaatccatctacatag

SEQ ID NO: 817468 - DNA, 25 bp, Homo sapien
ccaaacagcaggctgttcttcaaac

SEQ ID NO: 817469 - DNA, 25 bp, Homo sapien
ccccaaacagcaggctgttcttcaa

SEQ ID NO: 817470 - DNA, 25 bp, Homo sapien
ctccccaaacagcaggctgttcttc

SEQ ID NO: 817471 - DNA, 25 bp, Homo sapien
caaacagcaggctgttcttcaaaca

SEQ ID NO: 817472 - DNA, 25 bp, Homo sapien
ttaccatttgattttgccagagacc

SEQ ID NO: 817473 - DNA, 25 bp, Homo sapien
acatgttctggtaaattggtaatgc

SEQ ID NO: 817474 - DNA, 25 bp, Homo sapien
aacacacaggaactctaagagtttc

SEQ ID NO: 817475 - DNA, 25 bp, Homo sapien
ttgagcttcctgtgttaccatttga

SEQ ID NO: 817476 - DNA, 25 bp, Homo sapien
tctacatttccagtcagttccttta

SEQ ID NO: 817477 - DNA, 25 bp, Homo sapien
cttgtcgagaacagattaaccttgt

SEQ ID NO: 817478 - DNA, 25 bp, Homo sapien
tattctatgatttcgtgccagtatg

SEQ ID NO: 817479 - DNA, 25 bp, Homo sapien
tgccagtatgattacacaaatgaac

SEQ ID NO: 817480 - DNA, 25 bp, Homo sapien
gataagtcaagatcccttcaaccaa

SEQ ID NO: 817481 - DNA, 25 bp, Homo sapien
ctatggaaactctcctgagcaaccc

SEQ ID NO: 817482 - DNA, 25 bp, Homo sapien
tcaggtgctagagggaattacaaat

SEQ ID NO: 817483 - DNA, 25 bp, Homo sapien
tatttacaggccactcactgtgcgc

SEQ ID NO: 817484 - DNA, 25 bp, Homo sapien
agttaatacattattcatggtttag

SEQ ID NO: 817485 - DNA, 25 bp, Homo sapien
tatatattctatggtccactttgaa

SEQ ID NO: 817486 - DNA, 25 bp, Homo sapien
tgcgcccggccaaacttgatatgca

SEQ ID NO: 817487 - DNA, 25 bp, Homo sapien
tacattattcatggtttagtctcat

SEQ ID NO: 817488 - DNA, 25 bp, Homo sapien
gggttccaacaacccatgccaggct

SEQ ID NO: 817489 - DNA, 25 bp, Homo sapien
ccctcttctctcaacctgggttcca

SEQ ID NO: 817490 - DNA, 25 bp, Homo sapien
ttctcttatgtggatgccctcttct

SEQ ID NO: 817491 - DNA, 25 bp, Homo sapien
tattctcttatgtggatgccctctt

SEQ ID NO: 817492 - DNA, 25 bp, Homo sapien
gcagacacaaagcggacagcctcag

SEQ ID NO: 817493 - DNA, 25 bp, Homo sapien
aaagcagacacaaagcggacagcct

SEQ ID NO: 817494 - DNA, 25 bp, Homo sapien
taaagcagacacaaagcggacagcc

SEQ ID NO: 817495 - DNA, 25 bp, Homo sapien
aagcagacacaaagcggacagcctc

SEQ ID NO: 817496 - DNA, 25 bp, Homo sapien
gatcacgtcccagactgatggcatt

SEQ ID NO: 817497 - DNA, 25 bp, Homo sapien
ggcgtccgtggacaatcgtacacaa

SEQ ID NO: 817498 - DNA, 25 bp, Homo sapien
tactgtgagtacacctctgcccgat

SEQ ID NO: 817499 - DNA, 25 bp, Homo sapien
tcagaagctagctcactgtcaaagc

SEQ ID NO: 817500 - DNA, 25 bp, Homo sapien
aaaagtgcagctatctgtgtcatcc

SEQ ID NO: 817501 - DNA, 25 bp, Homo sapien
tcatgcatacttaaatcaccttgcc

SEQ ID NO: 817502 - DNA, 25 bp, Homo sapien
tcttccctcatagcttgttcatgca

SEQ ID NO: 817503 - DNA, 25 bp, Homo sapien
gtctctcttgacaattattctatca

SEQ ID NO: 817504 - DNA, 25 bp, Homo sapien
tcatttttacagttccagtgtcagt

SEQ ID NO: 817505 - DNA, 25 bp, Homo sapien
cagttgttgcccctttgtcattaaa

SEQ ID NO: 817506 - DNA, 25 bp, Homo sapien
gatgaaagcactgatcatcaatagg

SEQ ID NO: 817507 - DNA, 25 bp, Homo sapien
aagcactgatcatcaataggaaacc

SEQ ID NO: 817508 - DNA, 25 bp, Homo sapien
cagaatcttgccgaagtaatacaga

SEQ ID NO: 817509 - DNA, 25 bp, Homo sapien
ctcgctagccacagaatcttgccga

SEQ ID NO: 817510 - DNA, 25 bp, Homo sapien
gccacagaatcttgccgaagtaata

SEQ ID NO: 817511 - DNA, 25 bp, Homo sapien
tcttgccgaagtaatacagagacat

SEQ ID NO: 817512 - DNA, 25 bp, Homo sapien
ctatggttcctaaagattcaaatgt

SEQ ID NO: 817513 - DNA, 25 bp, Homo sapien
tcatgacgtctgttctgtgagtttc

SEQ ID NO: 817514 - DNA, 25 bp, Homo sapien
tttcttctatggttcctaaagattc

SEQ ID NO: 817515 - DNA, 25 bp, Homo sapien
cttctatggttcctaaagattcaaa

SEQ ID NO: 817516 - DNA, 25 bp, Homo sapien
caccatgcatagtgcatttgagatc

SEQ ID NO: 817517 - DNA, 25 bp, Homo sapien
agtggaattaattcatcataggcac

SEQ ID NO: 817518 - DNA, 25 bp, Homo sapien
tgataactcttgtgctctagtggaa

SEQ ID NO: 817519 - DNA, 25 bp, Homo sapien
gaaactagcgtttaaataatgataa

SEQ ID NO: 817520 - DNA, 25 bp, Homo sapien
tcttgcagccataatcttgaataaa

SEQ ID NO: 817521 - DNA, 25 bp, Homo sapien
gcgtgcacaaccacttattatataa

SEQ ID NO: 817522 - DNA, 25 bp, Homo sapien
tgttatagtcacaacagtgcttttg

SEQ ID NO: 817523 - DNA, 25 bp, Homo sapien
tagtatatgactccctgttatagtc

SEQ ID NO: 817524 - DNA, 25 bp, Homo sapien
gcttatgcatgagcagcaatcaaac

SEQ ID NO: 817525 - DNA, 25 bp, Homo sapien
tgtccttcctgggaagtaattaagc

SEQ ID NO: 817526 - DNA, 25 bp, Homo sapien
cagtggaaatccttgcagtaaataa

SEQ ID NO: 817527 - DNA, 25 bp, Homo sapien
ctttcaggatagcaatgagatgtcc

SEQ ID NO: 817528 - DNA, 25 bp, Homo sapien
tctaattggctgcttagagtgctca

SEQ ID NO: 817529 - DNA, 25 bp, Homo sapien
gctgcttagagtgctcattccattt

SEQ ID NO: 817530 - DNA, 25 bp, Homo sapien
gtctctgtcgcagattcctgcatca

SEQ ID NO: 817531 - DNA, 25 bp, Homo sapien
tccattttgattcattgaactgttg

SEQ ID NO: 817532 - DNA, 25 bp, Homo sapien
tatcctgacacctgaagggtactct

SEQ ID NO: 817533 - DNA, 25 bp, Homo sapien
ctgacacctgaagggtactctggta

SEQ ID NO: 817534 - DNA, 25 bp, Homo sapien
tcctgacacctgaagggtactctgg

SEQ ID NO: 817535 - DNA, 25 bp, Homo sapien
ttaatatcctgacacctgaagggta

SEQ ID NO: 817536 - DNA, 25 bp, Homo sapien
gatcgtagtgtttacatgatttaca

SEQ ID NO: 817537 - DNA, 25 bp, Homo sapien
gaaaagcaacagatcgtagtgttta

SEQ ID NO: 817538 - DNA, 25 bp, Homo sapien
gagacacttaggagaacacaaaaag

SEQ ID NO: 817539 - DNA, 25 bp, Homo sapien
ttgcattttatgagacacttaggag

SEQ ID NO: 817540 - DNA, 25 bp, Homo sapien
cttagggaaattaggaggaatattg

SEQ ID NO: 817541 - DNA, 25 bp, Homo sapien
ggaaattaggaggaatattgtagca

SEQ ID NO: 817542 - DNA, 25 bp, Homo sapien
aatacttaggactctcacttaggga

SEQ ID NO: 817543 - DNA, 25 bp, Homo sapien
aaaaatacttaggactctcacttag

SEQ ID NO: 817544 - DNA, 25 bp, Homo sapien
gtacagtaggatcaagcttagtctc

SEQ ID NO: 817545 - DNA, 25 bp, Homo sapien
tagtgataatataacgacttcagga

SEQ ID NO: 817546 - DNA, 25 bp, Homo sapien
tagtctctgtagaatagccatggat

SEQ ID NO: 817547 - DNA, 25 bp, Homo sapien
tgatctcagaacacactccatcata

SEQ ID NO: 817548 - DNA, 25 bp, Homo sapien
ttccaggttgcagtgagttatgatt

SEQ ID NO: 817549 - DNA, 25 bp, Homo sapien
acttcagaggctgaggtcggaggac

SEQ ID NO: 817550 - DNA, 25 bp, Homo sapien
gcttgagcccaggagttccaggttg

SEQ ID NO: 817551 - DNA, 25 bp, Homo sapien
cttcagaggctgaggtcggaggact

SEQ ID NO: 817552 - DNA, 25 bp, Homo sapien
actgaaatcctggggactgaagtct

SEQ ID NO: 817553 - DNA, 25 bp, Homo sapien
gactgaaatcctggggactgaagtc

SEQ ID NO: 817554 - DNA, 25 bp, Homo sapien
tgactgaaatcctggggactgaagt

SEQ ID NO: 817555 - DNA, 25 bp, Homo sapien
ctgactgaaatcctggggactgaag

SEQ ID NO: 817556 - DNA, 25 bp, Homo sapien
gagttgaacaggagccgatcacagg

SEQ ID NO: 817557 - DNA, 25 bp, Homo sapien
aggaagagttgaacaggagccgatc

SEQ ID NO: 817558 - DNA, 25 bp, Homo sapien
ccgatcacaggccacgagagtgcca

SEQ ID NO: 817559 - DNA, 25 bp, Homo sapien
acaggccacgagagtgccaaaggga

SEQ ID NO: 817560 - DNA, 25 bp, Homo sapien
aataaggatgagctgctcagaaggt

SEQ ID NO: 817561 - DNA, 25 bp, Homo sapien
caagaataaggatgagctgctcaga

SEQ ID NO: 817562 - DNA, 25 bp, Homo sapien
cactagcaatcagctttgaggtgac

SEQ ID NO: 817563 - DNA, 25 bp, Homo sapien
aaatgtcactagcaatcagctttga

SEQ ID NO: 817564 - DNA, 25 bp, Homo sapien
tgaccactacttcgtttagtttctc

SEQ ID NO: 817565 - DNA, 25 bp, Homo sapien
ttctcctatggtcatgttcagaggg

SEQ ID NO: 817566 - DNA, 25 bp, Homo sapien
cagagggctcctatcataaaatcca

SEQ ID NO: 817567 - DNA, 25 bp, Homo sapien
tttcctggagtaattcaaaatgacc

SEQ ID NO: 817568 - DNA, 25 bp, Homo sapien
cctgggtgtaagagacaacatcctc

SEQ ID NO: 817569 - DNA, 25 bp, Homo sapien
taacaaataacctgggtgtaagaga

SEQ ID NO: 817570 - DNA, 25 bp, Homo sapien
caaataacctgggtgtaagagacaa

SEQ ID NO: 817571 - DNA, 25 bp, Homo sapien
taacctgggtgtaagagacaacatc

SEQ ID NO: 817572 - DNA, 25 bp, Homo sapien
tgagctccaaccccagggtttctga

SEQ ID NO: 817573 - DNA, 25 bp, Homo sapien
cgctcttctaggtcatcagttaagt

SEQ ID NO: 817574 - DNA, 25 bp, Homo sapien
ctcacacttttgagaatcgctcttc

SEQ ID NO: 817575 - DNA, 25 bp, Homo sapien
taggtctagggagtggcctgagaat

SEQ ID NO: 817576 - DNA, 25 bp, Homo sapien
ggatcttaggtagcaaacactggaa

SEQ ID NO: 817577 - DNA, 25 bp, Homo sapien
cataatcactctgggacaagctttt

SEQ ID NO: 817578 - DNA, 25 bp, Homo sapien
tatatatttgctagaggtgagccac

SEQ ID NO: 817579 - DNA, 25 bp, Homo sapien
gaaaagatactgaacgacatcccta

SEQ ID NO: 817580 - DNA, 25 bp, Homo sapien
tgttataggaggatgcttactgcca

SEQ ID NO: 817581 - DNA, 25 bp, Homo sapien
tcctctggcagaaactcaatttcgg

SEQ ID NO: 817582 - DNA, 25 bp, Homo sapien
cagctgggacactggtatacagaaa

SEQ ID NO: 817583 - DNA, 25 bp, Homo sapien
caatttcggagtccaatactaatgc

SEQ ID NO: 817584 - DNA, 25 bp, Homo sapien
caagaatgcacagcatagtagctgg

SEQ ID NO: 817585 - DNA, 25 bp, Homo sapien
cacacagtagctcctttacagacct

SEQ ID NO: 817586 - DNA, 25 bp, Homo sapien
gctggttccagatatctgagatgca

SEQ ID NO: 817587 - DNA, 25 bp, Homo sapien
tattgtaaactttctaagggctgga

SEQ ID NO: 817588 - DNA, 25 bp, Homo sapien
taccgcagatctacaggaaagaggc

SEQ ID NO: 817589 - DNA, 25 bp, Homo sapien
gaaagaggcttgaggcagatagcct

SEQ ID NO: 817590 - DNA, 25 bp, Homo sapien
taccaaggcaaggaaatgctaccgc

SEQ ID NO: 817591 - DNA, 25 bp, Homo sapien
gcaggtgcataaacagtgagctcag

SEQ ID NO: 817592 - DNA, 25 bp, Homo sapien
ggtctagcatagtgtaaatcctgaa

SEQ ID NO: 817593 - DNA, 25 bp, Homo sapien
gaatgtattgtgagatacaacccct

SEQ ID NO: 817594 - DNA, 25 bp, Homo sapien
tctgtccaagttagataatgtccca

SEQ ID NO: 817595 - DNA, 25 bp, Homo sapien
caatgtatagggtcacttgcacaaa

SEQ ID NO: 817596 - DNA, 25 bp, Homo sapien
gtttgctgctgtaaaagaagttgtc

SEQ ID NO: 817597 - DNA, 25 bp, Homo sapien
cagtggtctctgtttatcactgctc

SEQ ID NO: 817598 - DNA, 25 bp, Homo sapien
gatttcaatccacttgtttgctgct

SEQ ID NO: 817599 - DNA, 25 bp, Homo sapien
tgctcttaggagatttcaatccact

SEQ ID NO: 817600 - DNA, 25 bp, Homo sapien
tcacttggatacaactgcggaaggg

SEQ ID NO: 817601 - DNA, 25 bp, Homo sapien
ccaaggacaggagtgctttactaac

SEQ ID NO: 817602 - DNA, 25 bp, Homo sapien
caagtgggtctgcacatctgttatc

SEQ ID NO: 817603 - DNA, 25 bp, Homo sapien
tccagaaggccatcatgtaagactt

SEQ ID NO: 817604 - DNA, 25 bp, Homo sapien
cttaaatttacgtctctgctctgca

SEQ ID NO: 817605 - DNA, 25 bp, Homo sapien
gcacagctgttgaagaaccacaagt

SEQ ID NO: 817606 - DNA, 25 bp, Homo sapien
gctctgcacagctgttgaagaacca

SEQ ID NO: 817607 - DNA, 25 bp, Homo sapien
tctgctctgcacagctgttgaagaa

SEQ ID NO: 817608 - DNA, 25 bp, Homo sapien
taacaggagatttctagcactaaaa

SEQ ID NO: 817609 - DNA, 25 bp, Homo sapien
gccactataaatgtcataacaggag

SEQ ID NO: 817610 - DNA, 25 bp, Homo sapien
gcacaatcttagatgttcttagaag

SEQ ID NO: 817611 - DNA, 25 bp, Homo sapien
tgaaaaagcagaccaaaagattaag

SEQ ID NO: 817612 - DNA, 25 bp, Homo sapien
gcaccagtctacgaaaagccttttg

SEQ ID NO: 817613 - DNA, 25 bp, Homo sapien
tacacaatggcgtcaggaaaagctg

SEQ ID NO: 817614 - DNA, 25 bp, Homo sapien
tctaggttgagatgccccagtaagc

SEQ ID NO: 817615 - DNA, 25 bp, Homo sapien
ggcttaatggctggagtctacacaa

SEQ ID NO: 817616 - DNA, 25 bp, Homo sapien
cccaagggcgggtgatacaagttag

SEQ ID NO: 817617 - DNA, 25 bp, Homo sapien
tacatgcaaattggtgggaccggcc

SEQ ID NO: 817618 - DNA, 25 bp, Homo sapien
caaggctgcagtctagtagcaaacc

SEQ ID NO: 817619 - DNA, 25 bp, Homo sapien
cagtgacaggtatgcaagcagccta

SEQ ID NO: 817620 - DNA, 25 bp, Homo sapien
cagactccaagacctgtacaacatt

SEQ ID NO: 817621 - DNA, 25 bp, Homo sapien
tgtgacacagactccaagacctgta

SEQ ID NO: 817622 - DNA, 25 bp, Homo sapien
ttcttttgtgacacagactccaaga

SEQ ID NO: 817623 - DNA, 25 bp, Homo sapien
ccaagacctgtacaacattgagaag

SEQ ID NO: 817624 - DNA, 25 bp, Homo sapien
catcaatgttcagctagtcaagaag

SEQ ID NO: 817625 - DNA, 25 bp, Homo sapien
gacaatgtagctattgggttgtgcc

SEQ ID NO: 817626 - DNA, 25 bp, Homo sapien
gggaaacacgtgtgtagaaatcacg

SEQ ID NO: 817627 - DNA, 25 bp, Homo sapien
ttgtgccaggataacacattttagc

SEQ ID NO: 817628 - DNA, 25 bp, Homo sapien
catgatactgctgtaggaaccttac

SEQ ID NO: 817629 - DNA, 25 bp, Homo sapien
tatcttggtaggtcaaaatagggaa

SEQ ID NO: 817630 - DNA, 25 bp, Homo sapien
ttgtctcacagttaaccagtataga

SEQ ID NO: 817631 - DNA, 25 bp, Homo sapien
cttaaggcttgtgctaataacgtac

SEQ ID NO: 817632 - DNA, 25 bp, Homo sapien
agagtggccacagatacataatttt

SEQ ID NO: 817633 - DNA, 25 bp, Homo sapien
tacataattttgtttctggaagcaa

SEQ ID NO: 817634 - DNA, 25 bp, Homo sapien
atgcccatcaccagaagagtggcca

SEQ ID NO: 817635 - DNA, 25 bp, Homo sapien
tgtgaggatgcccatcaccagaaga

SEQ ID NO: 817636 - DNA, 25 bp, Homo sapien
taatctatttagtgggactgggtcc

SEQ ID NO: 817637 - DNA, 25 bp, Homo sapien
tgattatctgcaccaatggaaggga

SEQ ID NO: 817638 - DNA, 25 bp, Homo sapien
gaatttctaattgcccagtgtaact

SEQ ID NO: 817639 - DNA, 25 bp, Homo sapien
ccatggccttgtgcctagtagctga

SEQ ID NO: 817640 - DNA, 25 bp, Homo sapien
tgcaggtagaatctatgctcaatag

SEQ ID NO: 817641 - DNA, 25 bp, Homo sapien
gataactgctatgtgaattgggcca

SEQ ID NO: 817642 - DNA, 25 bp, Homo sapien
tcttgaatggagacttgaggattac

SEQ ID NO: 817643 - DNA, 25 bp, Homo sapien
accaaatattacagtccaaagtgac

SEQ ID NO: 817644 - DNA, 25 bp, Homo sapien
aataaatacatcagttcttaaggaa

SEQ ID NO: 817645 - DNA, 25 bp, Homo sapien
atgtatagagtagtaaaaagtaaat

SEQ ID NO: 817646 - DNA, 25 bp, Homo sapien
gagtctgttagcaagatagttgaca

SEQ ID NO: 817647 - DNA, 25 bp, Homo sapien
tccatacggatgttactgtagcaag

SEQ ID NO: 817648 - DNA, 25 bp, Homo sapien
cttagccaggacatgatagggactc

SEQ ID NO: 817649 - DNA, 25 bp, Homo sapien
gcagataagttcattcaaataggca

SEQ ID NO: 817650 - DNA, 25 bp, Homo sapien
ggttggcccatagaacacactttgt

SEQ ID NO: 817651 - DNA, 25 bp, Homo sapien
aatgtcaccctgatggctacgcaag

SEQ ID NO: 817652 - DNA, 25 bp, Homo sapien
cagacattgtgctagaaacacttgt

SEQ ID NO: 817653 - DNA, 25 bp, Homo sapien
tacgcaagtttggagcatgctgaca

SEQ ID NO: 817654 - DNA, 25 bp, Homo sapien
ctgagttgaaacagattgtctgatt

SEQ ID NO: 817655 - DNA, 25 bp, Homo sapien
tgagttgaaacagattgtctgattt

SEQ ID NO: 817656 - DNA, 25 bp, Homo sapien
tgaatcctcattatgtctacaagcc

SEQ ID NO: 817657 - DNA, 25 bp, Homo sapien
gaatcctcattatgtctacaagccc

SEQ ID NO: 817658 - DNA, 25 bp, Homo sapien
atcctcattatgtctacaagcccca

SEQ ID NO: 817659 - DNA, 25 bp, Homo sapien
aatcctcattatgtctacaagcccc

SEQ ID NO: 817660 - DNA, 25 bp, Homo sapien
taccagcccatatgtggttcttgaa

SEQ ID NO: 817661 - DNA, 25 bp, Homo sapien
ccaaagagtaatggctctagattta

SEQ ID NO: 817662 - DNA, 25 bp, Homo sapien
aagtcatagtgtaggtggagttacc

SEQ ID NO: 817663 - DNA, 25 bp, Homo sapien
tattaatctatatgaggcctgcaga

SEQ ID NO: 817664 - DNA, 25 bp, Homo sapien
cccttcaagagacttaattctatgt

SEQ ID NO: 817665 - DNA, 25 bp, Homo sapien
ttcttgcctctttacccagatgaac

SEQ ID NO: 817666 - DNA, 25 bp, Homo sapien
taataaattgcctcagtttatacaa

SEQ ID NO: 817667 - DNA, 25 bp, Homo sapien
tacccagatgaacttccccttcaag

SEQ ID NO: 817668 - DNA, 25 bp, Homo sapien
gtttcccactacaagaccacagata

SEQ ID NO: 817669 - DNA, 25 bp, Homo sapien
tcagatctggcagttaggatccaat

SEQ ID NO: 817670 - DNA, 25 bp, Homo sapien
gacttacggattgaaaatatgcccg

SEQ ID NO: 817671 - DNA, 25 bp, Homo sapien
tataccacaccagaggatcaaacag

SEQ ID NO: 817672 - DNA, 25 bp, Homo sapien
caggctcttcatagcatgacatgca

SEQ ID NO: 817673 - DNA, 25 bp, Homo sapien
ttaatgtagtatacccctaggtctg

SEQ ID NO: 817674 - DNA, 25 bp, Homo sapien
catcctgtctgaaaagacttctacg

SEQ ID NO: 817675 - DNA, 25 bp, Homo sapien
ccaactagtcttgctgaaaggtttc

SEQ ID NO: 817676 - DNA, 25 bp, Homo sapien
gatttgtctttctagctcaccatgg

SEQ ID NO: 817677 - DNA, 25 bp, Homo sapien
cattatgtttaggtcttgccaaggg

SEQ ID NO: 817678 - DNA, 25 bp, Homo sapien
tgctgatgagcctgtctaactgaca

SEQ ID NO: 817679 - DNA, 25 bp, Homo sapien
tcctgccgctgggtacactgatttg

SEQ ID NO: 817680 - DNA, 25 bp, Homo sapien
taattgccagaatataacacctcca

SEQ ID NO: 817681 - DNA, 25 bp, Homo sapien
gcagagaagtaattgctctcctggt

SEQ ID NO: 817682 - DNA, 25 bp, Homo sapien
tcttcgctgacaacccataaattta

SEQ ID NO: 817683 - DNA, 25 bp, Homo sapien
tgtagatacagcaactcactgattg

SEQ ID NO: 817684 - DNA, 25 bp, Homo sapien
gagaagggcttgtagctgctgagga

SEQ ID NO: 817685 - DNA, 25 bp, Homo sapien
aagggcttgtagctgctgaggagac

SEQ ID NO: 817686 - DNA, 25 bp, Homo sapien
gttggagaagggcttgtagctgctg

SEQ ID NO: 817687 - DNA, 25 bp, Homo sapien
tgctgttgttggagaagggcttgta

SEQ ID NO: 817688 - DNA, 25 bp, Homo sapien
ataggttgtcctttcaaatggagac

SEQ ID NO: 817689 - DNA, 25 bp, Homo sapien
gttacatttatgttctagcacgcta

SEQ ID NO: 817690 - DNA, 25 bp, Homo sapien
cattttcaaattacacctctctctg

SEQ ID NO: 817691 - DNA, 25 bp, Homo sapien
caacaaattgaatgtacctaagcat

SEQ ID NO: 817692 - DNA, 25 bp, Homo sapien
tttttccaaggcagctctgaaattt

SEQ ID NO: 817693 - DNA, 25 bp, Homo sapien
atttttttccaaggcagctctgaaa

SEQ ID NO: 817694 - DNA, 25 bp, Homo sapien
tctgaaattttccaatccagaatcc

SEQ ID NO: 817695 - DNA, 25 bp, Homo sapien
tttccaatccagaatccaaaaaatc

SEQ ID NO: 817696 - DNA, 25 bp, Homo sapien
ctggcatatggcagagtatccatta

SEQ ID NO: 817697 - DNA, 25 bp, Homo sapien
aactcttctagactggcatatggca

SEQ ID NO: 817698 - DNA, 25 bp, Homo sapien
gcaaaagtttcacgtattataaatc

SEQ ID NO: 817699 - DNA, 25 bp, Homo sapien
gagtatccattaagattcatcccat

SEQ ID NO: 817700 - DNA, 25 bp, Homo sapien
gcaaaagctgaagatgtaactgctc

SEQ ID NO: 817701 - DNA, 25 bp, Homo sapien
aagatgtaactgctcttgctgtttc

SEQ ID NO: 817702 - DNA, 25 bp, Homo sapien
ctctttcgcttgctttccaggatgc

SEQ ID NO: 817703 - DNA, 25 bp, Homo sapien
gctgtttcttgtaaaactcttgtag

SEQ ID NO: 817704 - DNA, 25 bp, Homo sapien
aggcagcgattggacaggaagtgct

SEQ ID NO: 817705 - DNA, 25 bp, Homo sapien
cttgaggcagcgattggacaggaag

SEQ ID NO: 817706 - DNA, 25 bp, Homo sapien
gaatggagatgagtccctgacgctg

SEQ ID NO: 817707 - DNA, 25 bp, Homo sapien
atggagatgagtccctgacgctgaa

SEQ ID NO: 817708 - DNA, 25 bp, Homo sapien
gcacttagaactgaagactgtccat

SEQ ID NO: 817709 - DNA, 25 bp, Homo sapien
aattgttagtagtgaggtctagccc

SEQ ID NO: 817710 - DNA, 25 bp, Homo sapien
cactatggaatgatgagttattggt

SEQ ID NO: 817711 - DNA, 25 bp, Homo sapien
gaactccagtcacttctttccataa

SEQ ID NO: 817712 - DNA, 25 bp, Homo sapien
caaaagaacacgacgtcagattcat

SEQ ID NO: 817713 - DNA, 25 bp, Homo sapien
tgtagcaaaagaacacgacgtcaga

SEQ ID NO: 817714 - DNA, 25 bp, Homo sapien
gcaaaagaacacgacgtcagattca

SEQ ID NO: 817715 - DNA, 25 bp, Homo sapien
tagcaaaagaacacgacgtcagatt

SEQ ID NO: 817716 - DNA, 25 bp, Homo sapien
aaactccatggccatagagagtgtg

SEQ ID NO: 817717 - DNA, 25 bp, Homo sapien
actccatggccatagagagtgtgag

SEQ ID NO: 817718 - DNA, 25 bp, Homo sapien
tccatggccatagagagtgtgagag

SEQ ID NO: 817719 - DNA, 25 bp, Homo sapien
taaaaactgtccaaaatcttcacaa

SEQ ID NO: 817720 - DNA, 25 bp, Homo sapien
cataagagtctcagcctgtgaagtt

SEQ ID NO: 817721 - DNA, 25 bp, Homo sapien
tagctgcaccatgacaacataagag

SEQ ID NO: 817722 - DNA, 25 bp, Homo sapien
tgtgatgccaagtacttgtgcctgg

SEQ ID NO: 817723 - DNA, 25 bp, Homo sapien
tgttggaacccacaaaaatcttgaa

SEQ ID NO: 817724 - DNA, 25 bp, Homo sapien
tttctcttaattagttagaaatgat

SEQ ID NO: 817725 - DNA, 25 bp, Homo sapien
ttacaaagagccatagtggtatatg

SEQ ID NO: 817726 - DNA, 25 bp, Homo sapien
aatggtctctttgcttataatcagt

SEQ ID NO: 817727 - DNA, 25 bp, Homo sapien
acaaagagccatagtggtatatgaa

SEQ ID NO: 817728 - DNA, 25 bp, Homo sapien
ggtcttagagccctattcaatttat

SEQ ID NO: 817729 - DNA, 25 bp, Homo sapien
tattagaatagagactgtagactac

SEQ ID NO: 817730 - DNA, 25 bp, Homo sapien
tggaacacaaaagaaccttgccatt

SEQ ID NO: 817731 - DNA, 25 bp, Homo sapien
tgattgaatttttcagtggaacaca

SEQ ID NO: 817732 - DNA, 25 bp, Homo sapien
tatttctaactgttgcaccacctgc

SEQ ID NO: 817733 - DNA, 25 bp, Homo sapien
catccaatgcgtgttcattgttaag

SEQ ID NO: 817734 - DNA, 25 bp, Homo sapien
gcatttgcactcgacactgagcagt

SEQ ID NO: 817735 - DNA, 25 bp, Homo sapien
actgagcagtgcttcggtcatccaa

SEQ ID NO: 817736 - DNA, 25 bp, Homo sapien
taaagtcctgtggacactgttagca

SEQ ID NO: 817737 - DNA, 25 bp, Homo sapien
gactagtgccaacagctgtgaaggg

SEQ ID NO: 817738 - DNA, 25 bp, Homo sapien
actgaggtccagttagtgccccctg

SEQ ID NO: 817739 - DNA, 25 bp, Homo sapien
gccaggattgtctacacacttcatg

SEQ ID NO: 817740 - DNA, 25 bp, Homo sapien
ttaagaaagagtgagatcagaagcg

SEQ ID NO: 817741 - DNA, 25 bp, Homo sapien
aagagtgagatcagaagcgttttag

SEQ ID NO: 817742 - DNA, 25 bp, Homo sapien
gaaagagtgagatcagaagcgtttt

SEQ ID NO: 817743 - DNA, 25 bp, Homo sapien
gagtgagatcagaagcgttttagaa

SEQ ID NO: 817744 - DNA, 25 bp, Homo sapien
tgggctctgagggtcgcatgtgcaa

SEQ ID NO: 817745 - DNA, 25 bp, Homo sapien
atggtttgggctctgagggtcgcat

SEQ ID NO: 817746 - DNA, 25 bp, Homo sapien
gagggtcgcatgtgcaagtgggtca

SEQ ID NO: 817747 - DNA, 25 bp, Homo sapien
cttgaagacgttcgcgttctttaga

SEQ ID NO: 817748 - DNA, 25 bp, Homo sapien
ttgttttctaactgtcactaaattg

SEQ ID NO: 817749 - DNA, 25 bp, Homo sapien
ttctaactgtcactaaattgttcat

SEQ ID NO: 817750 - DNA, 25 bp, Homo sapien
cattggtagagctatttactgttta

SEQ ID NO: 817751 - DNA, 25 bp, Homo sapien
tcttagtctgttacattggtagagc

SEQ ID NO: 817752 - DNA, 25 bp, Homo sapien
gagcacctctgcatagtttgagaaa

SEQ ID NO: 817753 - DNA, 25 bp, Homo sapien
ctaataataacgactggcaccctga

SEQ ID NO: 817754 - DNA, 25 bp, Homo sapien
tgagaaacgcagaaacatccatatg

SEQ ID NO: 817755 - DNA, 25 bp, Homo sapien
aagccactggtgtaagcttctctgg

SEQ ID NO: 817756 - DNA, 25 bp, Homo sapien
tgacatgggaatgttgtatttgtct

SEQ ID NO: 817757 - DNA, 25 bp, Homo sapien
gctctgtggggatgtctccaacata

SEQ ID NO: 817758 - DNA, 25 bp, Homo sapien
gaatgtcgccttcgtatggctccca

SEQ ID NO: 817759 - DNA, 25 bp, Homo sapien
ggctcccacattgggcacactggct

SEQ ID NO: 817760 - DNA, 25 bp, Homo sapien
tgagagttgcataagtaaatggagg

SEQ ID NO: 817761 - DNA, 25 bp, Homo sapien
gagagttgcataagtaaatggaggt

SEQ ID NO: 817762 - DNA, 25 bp, Homo sapien
tatgagagttgcataagtaaatgga

SEQ ID NO: 817763 - DNA, 25 bp, Homo sapien
cttatgagagttgcataagtaaatg

SEQ ID NO: 817764 - DNA, 25 bp, Homo sapien
tgtaaaccagctgtaaatttcatta

SEQ ID NO: 817765 - DNA, 25 bp, Homo sapien
tacgcctgaagtaagcaaatgtccg

SEQ ID NO: 817766 - DNA, 25 bp, Homo sapien
cattaagtgttaactgcctgtcaga

SEQ ID NO: 817767 - DNA, 25 bp, Homo sapien
tgcctgtcagatgactccatgatag

SEQ ID NO: 817768 - DNA, 25 bp, Homo sapien
tgtaattagtgtgtcaggccctcgt

SEQ ID NO: 817769 - DNA, 25 bp, Homo sapien
aagcctcagctattaattgcaccaa

SEQ ID NO: 817770 - DNA, 25 bp, Homo sapien
tctgtaaggaactgtggtaggcatc

SEQ ID NO: 817771 - DNA, 25 bp, Homo sapien
tagaaaactatatcagaggcaaaat

SEQ ID NO: 817772 - DNA, 25 bp, Homo sapien
cccgtggcagcttcagtctgtatga

SEQ ID NO: 817773 - DNA, 25 bp, Homo sapien
aaacctacagcctccatttgttgca

SEQ ID NO: 817774 - DNA, 25 bp, Homo sapien
tatgatgtgtacaaaaggcgcagac

SEQ ID NO: 817775 - DNA, 25 bp, Homo sapien
tttgttgcacaagccaaacagacat

SEQ ID NO: 817776 - DNA, 25 bp, Homo sapien
gcatttatgttctgacaggataata

SEQ ID NO: 817777 - DNA, 25 bp, Homo sapien
tatgttctgacaggataatattcac

SEQ ID NO: 817778 - DNA, 25 bp, Homo sapien
caatgaagttgtttggacagggata

SEQ ID NO: 817779 - DNA, 25 bp, Homo sapien
tagatgaacccttttgtctaagtaa

SEQ ID NO: 817780 - DNA, 25 bp, Homo sapien
caaatggcttgtggctaattgatgt

SEQ ID NO: 817781 - DNA, 25 bp, Homo sapien
tgctgagtgcccttatctttccaga

SEQ ID NO: 817782 - DNA, 25 bp, Homo sapien
tagtctgtgctgagtgcccttatct

SEQ ID NO: 817783 - DNA, 25 bp, Homo sapien
aaaacagttcacttagtctgtgctg

SEQ ID NO: 817784 - DNA, 25 bp, Homo sapien
tgcccatggctctgaatatgataat

SEQ ID NO: 817785 - DNA, 25 bp, Homo sapien
gaatgagttttgctggatccccgag

SEQ ID NO: 817786 - DNA, 25 bp, Homo sapien
ttatgcatgcgatatagttagaact

SEQ ID NO: 817787 - DNA, 25 bp, Homo sapien
attaatgagcaaatgagcagtttta

SEQ ID NO: 817788 - DNA, 25 bp, Homo sapien
ttgcacaaagctttatgcaaataag

SEQ ID NO: 817789 - DNA, 25 bp, Homo sapien
agtgacaagtgttaattttgcacaa

SEQ ID NO: 817790 - DNA, 25 bp, Homo sapien
tgcacaaagctttatgcaaataagc

SEQ ID NO: 817791 - DNA, 25 bp, Homo sapien
gacaagtgttaattttgcacaaagc

SEQ ID NO: 817792 - DNA, 25 bp, Homo sapien
caggctaagattatgacgtactgca

SEQ ID NO: 817793 - DNA, 25 bp, Homo sapien
tgaccttcgcttctggtattctact

SEQ ID NO: 817794 - DNA, 25 bp, Homo sapien
cagtccatactgctcctttaacatt

SEQ ID NO: 817795 - DNA, 25 bp, Homo sapien
tactcgaacaaaacacttgtgcagg

SEQ ID NO: 817796 - DNA, 25 bp, Homo sapien
gagctgctccatagcctaaactggt

SEQ ID NO: 817797 - DNA, 25 bp, Homo sapien
gcattaagagctgctccatagccta

SEQ ID NO: 817798 - DNA, 25 bp, Homo sapien
ctgcaaactggcattaagagctgct

SEQ ID NO: 817799 - DNA, 25 bp, Homo sapien
caaactggcattaagagctgctcca

SEQ ID NO: 817800 - DNA, 25 bp, Homo sapien
gcagtaggccactggatgcattatt

SEQ ID NO: 817801 - DNA, 25 bp, Homo sapien
gatgcattatttatcagtccaggat

SEQ ID NO: 817802 - DNA, 25 bp, Homo sapien
tcagtccaggattacttagcaaagg

SEQ ID NO: 817803 - DNA, 25 bp, Homo sapien
tagcaaaggtaaactgctctctgcc

SEQ ID NO: 817804 - DNA, 25 bp, Homo sapien
aaccattgaggtcttcgtggacggc

SEQ ID NO: 817805 - DNA, 25 bp, Homo sapien
gagcagcccggactactgtttccat

SEQ ID NO: 817806 - DNA, 25 bp, Homo sapien
cagagaaccattgaggtcttcgtgg

SEQ ID NO: 817807 - DNA, 25 bp, Homo sapien
ttccattgctgtcaatgtgatccag

SEQ ID NO: 817808 - DNA, 25 bp, Homo sapien
aaattgtgggaattcacaccacgga

SEQ ID NO: 817809 - DNA, 25 bp, Homo sapien
caccacggatgtcagatatcatctg

SEQ ID NO: 817810 - DNA, 25 bp, Homo sapien
gatatcatctgtatagttctataaa

SEQ ID NO: 817811 - DNA, 25 bp, Homo sapien
acacactttgcctaaattgtgggaa

SEQ ID NO: 817812 - DNA, 25 bp, Homo sapien
ggtcagatgacgagaaggcctttga

SEQ ID NO: 817813 - DNA, 25 bp, Homo sapien
gacatgttatgggaaccctgagagt

SEQ ID NO: 817814 - DNA, 25 bp, Homo sapien
caagtaactttaacacaaggcagaa

SEQ ID NO: 817815 - DNA, 25 bp, Homo sapien
tgatcgatgccacagtaggtaaagt

SEQ ID NO: 817816 - DNA, 25 bp, Homo sapien
ggcactgaagtaacatcaactttgg

SEQ ID NO: 817817 - DNA, 25 bp, Homo sapien
ggatttatgtctatttcggtagcag

SEQ ID NO: 817818 - DNA, 25 bp, Homo sapien
tttaacatagcttaaggcaggagtg

SEQ ID NO: 817819 - DNA, 25 bp, Homo sapien
catagaaggtcacagatagaaggga

SEQ ID NO: 817820 - DNA, 25 bp, Homo sapien
tctcttgggctacattcttcaatga

SEQ ID NO: 817821 - DNA, 25 bp, Homo sapien
tagaaagtgactgaacctgccagcc

SEQ ID NO: 817822 - DNA, 25 bp, Homo sapien
gcatcagggaatcgctgtgaaaaag

SEQ ID NO: 817823 - DNA, 25 bp, Homo sapien
tgatccaggccctactcaaggaaag

SEQ ID NO: 817824 - DNA, 25 bp, Homo sapien
aacatgtagatacaccaaaatttta

SEQ ID NO: 817825 - DNA, 25 bp, Homo sapien
aaaacatgtagatacaccaaaattt

SEQ ID NO: 817826 - DNA, 25 bp, Homo sapien
ctgaaaaacatgtagatacaccaaa

SEQ ID NO: 817827 - DNA, 25 bp, Homo sapien
gaaaaacatgtagatacaccaaaat

SEQ ID NO: 817828 - DNA, 25 bp, Homo sapien
ggacattgggcagtcttcatcctct

SEQ ID NO: 817829 - DNA, 25 bp, Homo sapien
aattctggactgtgattagctgttg

SEQ ID NO: 817830 - DNA, 25 bp, Homo sapien
ctctctgtcgtcttctaattctgga

SEQ ID NO: 817831 - DNA, 25 bp, Homo sapien
tccagatcttcagataaaggctctt

SEQ ID NO: 817832 - DNA, 25 bp, Homo sapien
tgatatgtcccttcacgctgaggtt

SEQ ID NO: 817833 - DNA, 25 bp, Homo sapien
tcatttcatgaacccttaagagcca

SEQ ID NO: 817834 - DNA, 25 bp, Homo sapien
tatttttggcagtatatgaggcgca

SEQ ID NO: 817835 - DNA, 25 bp, Homo sapien
aatttgcctgttggtactgaatccc

SEQ ID NO: 817836 - DNA, 25 bp, Homo sapien
tcagctagatacaagcagtgacact

SEQ ID NO: 817837 - DNA, 25 bp, Homo sapien
tatgtcatttacagttggtggcacc

SEQ ID NO: 817838 - DNA, 25 bp, Homo sapien
gatactactcctgtgcaaattaaaa

SEQ ID NO: 817839 - DNA, 25 bp, Homo sapien
cctaaggttttagatggttgcaaca

SEQ ID NO: 817840 - DNA, 25 bp, Homo sapien
gctgtagcctttgactgtgtttgca

SEQ ID NO: 817841 - DNA, 25 bp, Homo sapien
agtacagttgtaagatctatgcaga

SEQ ID NO: 817842 - DNA, 25 bp, Homo sapien
gcaggtagacaaagctttatcacaa

SEQ ID NO: 817843 - DNA, 25 bp, Homo sapien
ctcttggccatggttagagttggct

SEQ ID NO: 817844 - DNA, 25 bp, Homo sapien
tcctttgtactaattgaagttacag

SEQ ID NO: 817845 - DNA, 25 bp, Homo sapien
ttgcatttagatggacttttggcct

SEQ ID NO: 817846 - DNA, 25 bp, Homo sapien
gattactctgtgactgaattaacat

SEQ ID NO: 817847 - DNA, 25 bp, Homo sapien
ctaattgaagttacagaaggctgac

SEQ ID NO: 817848 - DNA, 25 bp, Homo sapien
cataatcgttttggtcagtgatcca

SEQ ID NO: 817849 - DNA, 25 bp, Homo sapien
cactgcggattttgtcctcacctct

SEQ ID NO: 817850 - DNA, 25 bp, Homo sapien
gcatatcataacttccactgcggat

SEQ ID NO: 817851 - DNA, 25 bp, Homo sapien
tgcatttgcatcaagtacataatcg

SEQ ID NO: 817852 - DNA, 25 bp, Homo sapien
tcagtgtaaaaactcagctagatca

SEQ ID NO: 817853 - DNA, 25 bp, Homo sapien
caccactgaaaataactgactgaat

SEQ ID NO: 817854 - DNA, 25 bp, Homo sapien
aataaataccatggactacaattgc

SEQ ID NO: 817855 - DNA, 25 bp, Homo sapien
taagaccatacaagacatcttctaa

SEQ ID NO: 817856 - DNA, 25 bp, Homo sapien
taatatcccgtataagcagaggcag

SEQ ID NO: 817857 - DNA, 25 bp, Homo sapien
gcttagtttgcaagaaccggttcca

SEQ ID NO: 817858 - DNA, 25 bp, Homo sapien
tccatcacatggaacgggaacgtat

SEQ ID NO: 817859 - DNA, 25 bp, Homo sapien
gaacgtatgttaagctctagcagcc

SEQ ID NO: 817860 - DNA, 25 bp, Homo sapien
gccttacaatagctacgcaaagcag

SEQ ID NO: 817861 - DNA, 25 bp, Homo sapien
ttagcattgtagtcttaggccaccc

SEQ ID NO: 817862 - DNA, 25 bp, Homo sapien
tacagaccaagcatttcaggaaact

SEQ ID NO: 817863 - DNA, 25 bp, Homo sapien
taggccacccttctgatggtacaac

SEQ ID NO: 817864 - DNA, 25 bp, Homo sapien
tttcaaatagtacaactgtgccacg

SEQ ID NO: 817865 - DNA, 25 bp, Homo sapien
aactccctggtgttagaggtagaca

SEQ ID NO: 817866 - DNA, 25 bp, Homo sapien
ggtaagccatgttcctttcaatagc

SEQ ID NO: 817867 - DNA, 25 bp, Homo sapien
gattttgcgactgaatctgcccagg

SEQ ID NO: 817868 - DNA, 25 bp, Homo sapien
gatacaacagaggttggttggtgac

SEQ ID NO: 817869 - DNA, 25 bp, Homo sapien
caacagaggttggttggtgacacat

SEQ ID NO: 817870 - DNA, 25 bp, Homo sapien
ggactgaaagcccaggatacaacag

SEQ ID NO: 817871 - DNA, 25 bp, Homo sapien
actgaaagcccaggatacaacagag

SEQ ID NO: 817872 - DNA, 25 bp, Homo sapien
ttgtcttgcacaacctggagagcat

SEQ ID NO: 817873 - DNA, 25 bp, Homo sapien
tgttgtcttgcacaacctggagagc

SEQ ID NO: 817874 - DNA, 25 bp, Homo sapien
gttgtcttgcacaacctggagagca

SEQ ID NO: 817875 - DNA, 25 bp, Homo sapien
ctttggtatgatgaaaagtaggtac

SEQ ID NO: 817876 - DNA, 25 bp, Homo sapien
aagtaggtactcttcaaaaggtctg

SEQ ID NO: 817877 - DNA, 25 bp, Homo sapien
tgaaagcaaagaggcaactcatgag

SEQ ID NO: 817878 - DNA, 25 bp, Homo sapien
aactcatgaggtatggaagcctgga

SEQ ID NO: 817879 - DNA, 25 bp, Homo sapien
gctgttgaggtctgctacgttgatt

SEQ ID NO: 817880 - DNA, 25 bp, Homo sapien
ttgaggtctgctacgttgattcccc

SEQ ID NO: 817881 - DNA, 25 bp, Homo sapien
agaatgctgttgaggtctgctacgt

SEQ ID NO: 817882 - DNA, 25 bp, Homo sapien
aatgctgttgaggtctgctacgttg

SEQ ID NO: 817883 - DNA, 25 bp, Homo sapien
ctccagctgctgtgagggcaaaccc

SEQ ID NO: 817884 - DNA, 25 bp, Homo sapien
ggaatagcatcaattcgaatcgcac

SEQ ID NO: 817885 - DNA, 25 bp, Homo sapien
aagggaagtggagttaatgctttca

SEQ ID NO: 817886 - DNA, 25 bp, Homo sapien
gtggagttaatgctttcaggacagg

SEQ ID NO: 817887 - DNA, 25 bp, Homo sapien
tcgaatcgcacatctcatacattga

SEQ ID NO: 817888 - DNA, 25 bp, Homo sapien
ctgactcatgctcttccacaaaaga

SEQ ID NO: 817889 - DNA, 25 bp, Homo sapien
tcacagggcttctgtatctgactca

SEQ ID NO: 817890 - DNA, 25 bp, Homo sapien
acagggcttctgtatctgactcatg

SEQ ID NO: 817891 - DNA, 25 bp, Homo sapien
ttccacaaaagagagaagtgactgc

SEQ ID NO: 817892 - DNA, 25 bp, Homo sapien
ggtgatggcaaaggtgccagagctc

SEQ ID NO: 817893 - DNA, 25 bp, Homo sapien
gtgatggcaaaggtgccagagctca

SEQ ID NO: 817894 - DNA, 25 bp, Homo sapien
tgatggcaaaggtgccagagctcat

SEQ ID NO: 817895 - DNA, 25 bp, Homo sapien
tcttgactggactgcctgtgcatcc

SEQ ID NO: 817896 - DNA, 25 bp, Homo sapien
cagtcttgactggactgcctgtgca

SEQ ID NO: 817897 - DNA, 25 bp, Homo sapien
gacggcattgcagtcttgactggac

SEQ ID NO: 817898 - DNA, 25 bp, Homo sapien
cattgcagtcttgactggactgcct

SEQ ID NO: 817899 - DNA, 25 bp, Homo sapien
agtctcaggtcacccaaattctcca

SEQ ID NO: 817900 - DNA, 25 bp, Homo sapien
gaagtctcaggtcacccaaattctc

SEQ ID NO: 817901 - DNA, 25 bp, Homo sapien
aagtctcaggtcacccaaattctcc

SEQ ID NO: 817902 - DNA, 25 bp, Homo sapien
gtctcaggtcacccaaattctccat

SEQ ID NO: 817903 - DNA, 25 bp, Homo sapien
tcaggccactttatcagaatagctt

SEQ ID NO: 817904 - DNA, 25 bp, Homo sapien
cagtgagctttagaagcaggtggtc

SEQ ID NO: 817905 - DNA, 25 bp, Homo sapien
acaatctatggtgactgggactgaa

SEQ ID NO: 817906 - DNA, 25 bp, Homo sapien
tcagaatagctttctgataaagaaa

SEQ ID NO: 817907 - DNA, 25 bp, Homo sapien
ggtggcacttggttattgttaccat

SEQ ID NO: 817908 - DNA, 25 bp, Homo sapien
ctggtggcacttggttattgttacc

SEQ ID NO: 817909 - DNA, 25 bp, Homo sapien
ttctggtggcacttggttattgtta

SEQ ID NO: 817910 - DNA, 25 bp, Homo sapien
tctggtggcacttggttattgttac

SEQ ID NO: 817911 - DNA, 25 bp, Homo sapien
acccatgcagcatcagtgagcgcat

SEQ ID NO: 817912 - DNA, 25 bp, Homo sapien
cttcgtatatctataggatccccat

SEQ ID NO: 817913 - DNA, 25 bp, Homo sapien
gtatatctataggatccccattgca

SEQ ID NO: 817914 - DNA, 25 bp, Homo sapien
tataggatccccattgcatacaccc

SEQ ID NO: 817915 - DNA, 25 bp, Homo sapien
tatctataggatccccattgcatac

SEQ ID NO: 817916 - DNA, 25 bp, Homo sapien
aatgcacattccttgtccaatctgg

SEQ ID NO: 817917 - DNA, 25 bp, Homo sapien
accaatgcacattccttgtccaatc

SEQ ID NO: 817918 - DNA, 25 bp, Homo sapien
ttgcaaccaatgcacattccttgtc

SEQ ID NO: 817919 - DNA, 25 bp, Homo sapien
aatataacatggtctgaataattgt

SEQ ID NO: 817920 - DNA, 25 bp, Homo sapien
acattccgaggaattgccatctgga

SEQ ID NO: 817921 - DNA, 25 bp, Homo sapien
gccatctggaatattgaaagtcgtc

SEQ ID NO: 817922 - DNA, 25 bp, Homo sapien
cccagtcggccccaccatctcttgg

SEQ ID NO: 817923 - DNA, 25 bp, Homo sapien
tcaacgactgtgacacttctcccag

SEQ ID NO: 817924 - DNA, 25 bp, Homo sapien
tttccaggttttctataatcagcat

SEQ ID NO: 817925 - DNA, 25 bp, Homo sapien
tttcattgtacttttctccattttc

SEQ ID NO: 817926 - DNA, 25 bp, Homo sapien
ctctgggaatttcattgaatttatt

SEQ ID NO: 817927 - DNA, 25 bp, Homo sapien
tccattttccaggttttctataatc

SEQ ID NO: 817928 - DNA, 25 bp, Homo sapien
tctagcaactcctgctggtgctcca

SEQ ID NO: 817929 - DNA, 25 bp, Homo sapien
tggtgctccatcatgtgagggccac

SEQ ID NO: 817930 - DNA, 25 bp, Homo sapien
ctggtgctccatcatgtgagggcca

SEQ ID NO: 817931 - DNA, 25 bp, Homo sapien
ctctagcaactcctgctggtgctcc

SEQ ID NO: 817932 - DNA, 25 bp, Homo sapien
agaaaaagattggcggctgaaagtg

SEQ ID NO: 817933 - DNA, 25 bp, Homo sapien
tagaaaaagattggcggctgaaagt

SEQ ID NO: 817934 - DNA, 25 bp, Homo sapien
ttagaaaaagattggcggctgaaag

SEQ ID NO: 817935 - DNA, 25 bp, Homo sapien
aaaaagattggcggctgaaagtgtc

SEQ ID NO: 817936 - DNA, 25 bp, Homo sapien
ccttaacttccctatttcatcacaa

SEQ ID NO: 817937 - DNA, 25 bp, Homo sapien
tatttcatcacaatgacttggtaac

SEQ ID NO: 817938 - DNA, 25 bp, Homo sapien
cacaatgacttggtaacttgtacat

SEQ ID NO: 817939 - DNA, 25 bp, Homo sapien
catcacaatgacttggtaacttgta

SEQ ID NO: 817940 - DNA, 25 bp, Homo sapien
cagaatcaaatgctgctctcttcat

SEQ ID NO: 817941 - DNA, 25 bp, Homo sapien
tgattttctccagctcttccggcat

SEQ ID NO: 817942 - DNA, 25 bp, Homo sapien
ttgattttctccagctcttccggca

SEQ ID NO: 817943 - DNA, 25 bp, Homo sapien
tttgattttctccagctcttccggc

SEQ ID NO: 817944 - DNA, 25 bp, Homo sapien
ctttgattttctccagctcttccgg

SEQ ID NO: 817945 - DNA, 25 bp, Homo sapien
cagtcttatgggcagactttctgca

SEQ ID NO: 817946 - DNA, 25 bp, Homo sapien
ccttttcatagctctgagaagaatg

SEQ ID NO: 817947 - DNA, 25 bp, Homo sapien
atttctccgcatagagggtgatcag

SEQ ID NO: 817948 - DNA, 25 bp, Homo sapien
gaagaccatcccttctgtcagttga

SEQ ID NO: 817949 - DNA, 25 bp, Homo sapien
aatgtgacctgcagctttgagatgt

SEQ ID NO: 817950 - DNA, 25 bp, Homo sapien
tctcctagaatgaataatctccagg

SEQ ID NO: 817951 - DNA, 25 bp, Homo sapien
tatttgaaggagagatactgagctc

SEQ ID NO: 817952 - DNA, 25 bp, Homo sapien
aaaccattaattgcctctgaaggga

SEQ ID NO: 817953 - DNA, 25 bp, Homo sapien
agtttgaatgatggagctcagggcc

SEQ ID NO: 817954 - DNA, 25 bp, Homo sapien
cagttttgtacaagctgattctcca

SEQ ID NO: 817955 - DNA, 25 bp, Homo sapien
tagaattcccctaaccttagagcca

SEQ ID NO: 817956 - DNA, 25 bp, Homo sapien
ccagtctagcagttttgtacaagct

SEQ ID NO: 817957 - DNA, 25 bp, Homo sapien
ctagaagaaatccgtcatttattgc

SEQ ID NO: 817958 - DNA, 25 bp, Homo sapien
gaagaaatccgtcatttattgctag

SEQ ID NO: 817959 - DNA, 25 bp, Homo sapien
agaaatccgtcatttattgctagga

SEQ ID NO: 817960 - DNA, 25 bp, Homo sapien
gaaatccgtcatttattgctaggag

SEQ ID NO: 817961 - DNA, 25 bp, Homo sapien
ttaatgatgtggttgacagtatcca

SEQ ID NO: 817962 - DNA, 25 bp, Homo sapien
gaagtccgtcaaattttgatttgca

SEQ ID NO: 817963 - DNA, 25 bp, Homo sapien
aatgatgtggttgacagtatccacc

SEQ ID NO: 817964 - DNA, 25 bp, Homo sapien
aaaaatgaagcactagtgcagaagt

SEQ ID NO: 817965 - DNA, 25 bp, Homo sapien
tatgatgttaattcaggggagtggt

SEQ ID NO: 817966 - DNA, 25 bp, Homo sapien
atgatgttaattcaggggagtggtt

SEQ ID NO: 817967 - DNA, 25 bp, Homo sapien
tgatgttaattcaggggagtggtta

SEQ ID NO: 817968 - DNA, 25 bp, Homo sapien
ctatgatgttaattcaggggagtgg

SEQ ID NO: 817969 - DNA, 25 bp, Homo sapien
atacccattaatccctgtttgcaga

SEQ ID NO: 817970 - DNA, 25 bp, Homo sapien
ataatacccattaatccctgtttgc

SEQ ID NO: 817971 - DNA, 25 bp, Homo sapien
aatacccattaatccctgtttgcag

SEQ ID NO: 817972 - DNA, 25 bp, Homo sapien
ttttatgaatactggcacattttca

SEQ ID NO: 817973 - DNA, 25 bp, Homo sapien
tggctgcccagacgttccccccacc

SEQ ID NO: 817974 - DNA, 25 bp, Homo sapien
tccctggctgcccagacgttccccc

SEQ ID NO: 817975 - DNA, 25 bp, Homo sapien
cctggctgcccagacgttcccccca

SEQ ID NO: 817976 - DNA, 25 bp, Homo sapien
ctggctgcccagacgttccccccac

SEQ ID NO: 817977 - DNA, 25 bp, Homo sapien
tcttggctagcggccccgatgctgg

SEQ ID NO: 817978 - DNA, 25 bp, Homo sapien
gctagcggccccgatgctgggagcg

SEQ ID NO: 817979 - DNA, 25 bp, Homo sapien
cggatcgggaaggcctcgaactctt

SEQ ID NO: 817980 - DNA, 25 bp, Homo sapien
ggatcgggaaggcctcgaactcttg

SEQ ID NO: 817981 - DNA, 25 bp, Homo sapien
ttccactcctacaatcctgaaacac

SEQ ID NO: 817982 - DNA, 25 bp, Homo sapien
ctgaaacacttctccctctgttgct

SEQ ID NO: 817983 - DNA, 25 bp, Homo sapien
cccctctttccagccagctcactcc

SEQ ID NO: 817984 - DNA, 25 bp, Homo sapien
cactccagccggctcccctgcgagg

SEQ ID NO: 817985 - DNA, 25 bp, Homo sapien
agacgccgcagtggcggcaactgcg

SEQ ID NO: 817986 - DNA, 25 bp, Homo sapien
gccgcagtggcggcaactgcggcag

SEQ ID NO: 817987 - DNA, 25 bp, Homo sapien
cgccccggtggcctgacgacggcgg

SEQ ID NO: 817988 - DNA, 25 bp, Homo sapien
ggcggcaactgcggcagcggtggcg

SEQ ID NO: 817989 - DNA, 25 bp, Homo sapien
tagcgagcctccggcagcggccgca

SEQ ID NO: 817990 - DNA, 25 bp, Homo sapien
ttagcgagcctccggcagcggccgc

SEQ ID NO: 817991 - DNA, 25 bp, Homo sapien
agcgagcctccggcagcggccgcat

SEQ ID NO: 817992 - DNA, 25 bp, Homo sapien
ctccgcatccccccgtagtcgctcc

SEQ ID NO: 817993 - DNA, 25 bp, Homo sapien
ccgtagtcgctccaagccccttcct

SEQ ID NO: 817994 - DNA, 25 bp, Homo sapien
cgtagtcgctccaagccccttcctc

SEQ ID NO: 817995 - DNA, 25 bp, Homo sapien
gcatccccccgtagtcgctccaagc

SEQ ID NO: 817996 - DNA, 25 bp, Homo sapien
ttttagagaagagcacaccacccct

SEQ ID NO: 817997 - DNA, 25 bp, Homo sapien
gtttttagagaagagcacaccaccc

SEQ ID NO: 817998 - DNA, 25 bp, Homo sapien
aaatgtttttagagaagagcacacc

SEQ ID NO: 817999 - DNA, 25 bp, Homo sapien
atgtttttagagaagagcacaccac

SEQ ID NO: 818000 - DNA, 25 bp, Homo sapien
gctgccgcctagctcgccgcccggc

SEQ ID NO: 818001 - DNA, 25 bp, Homo sapien
gcagggcgcacggaggaagggctgt

SEQ ID NO: 818002 - DNA, 25 bp, Homo sapien
gggcgcacggaggaagggctgtgag

SEQ ID NO: 818003 - DNA, 25 bp, Homo sapien
aggtgctgggtgcagggaactgact

SEQ ID NO: 818004 - DNA, 25 bp, Homo sapien
gagcgagggcttcgcccgcgccgga

SEQ ID NO: 818005 - DNA, 25 bp, Homo sapien
gctgcggccccacgggcccgggagc

SEQ ID NO: 818006 - DNA, 25 bp, Homo sapien
ctcggccacgcgctgcggccccacg

SEQ ID NO: 818007 - DNA, 25 bp, Homo sapien
gcccgggagcgagggcttcgcccgc

SEQ ID NO: 818008 - DNA, 25 bp, Homo sapien
gatgaaatggagtaagtgcacgctt

SEQ ID NO: 818009 - DNA, 25 bp, Homo sapien
tgcacgcttgttcagagagctgcgg

SEQ ID NO: 818010 - DNA, 25 bp, Homo sapien
ggtggtagaggagccaacaagaaac

SEQ ID NO: 818011 - DNA, 25 bp, Homo sapien
ctgaattatcaaccgggtggtagag

SEQ ID NO: 818012 - DNA, 25 bp, Homo sapien
acaagcataagccattccaaagcta

SEQ ID NO: 818013 - DNA, 25 bp, Homo sapien
aatggactggtcttgcatctctcca

SEQ ID NO: 818014 - DNA, 25 bp, Homo sapien
ctaatgagttcaccatccgaaggat

SEQ ID NO: 818015 - DNA, 25 bp, Homo sapien
ttccccaaatggactggtcttgcat

SEQ ID NO: 818016 - DNA, 25 bp, Homo sapien
tgaagtggctattggtagcttgagt

SEQ ID NO: 818017 - DNA, 25 bp, Homo sapien
tatatatgcagtaggattacacaca

SEQ ID NO: 818018 - DNA, 25 bp, Homo sapien
tactgatgaacaatatctatatatg

SEQ ID NO: 818019 - DNA, 25 bp, Homo sapien
tatctatatatgcagtaggattaca

SEQ ID NO: 818020 - DNA, 25 bp, Homo sapien
tttatactgatgaacaatatctata

SEQ ID NO: 818021 - DNA, 25 bp, Homo sapien
attcttttaccggacatttatctag

SEQ ID NO: 818022 - DNA, 25 bp, Homo sapien
atttcagcacttgaagaaaaacagg

SEQ ID NO: 818023 - DNA, 25 bp, Homo sapien
gacacagtgctaagatgagttaaat

SEQ ID NO: 818024 - DNA, 25 bp, Homo sapien
tctagaaagtaccagacacagtgct

SEQ ID NO: 818025 - DNA, 25 bp, Homo sapien
gcttcttatacttaaccctgatgat

SEQ ID NO: 818026 - DNA, 25 bp, Homo sapien
agtacatattgcttacctagaaaag

SEQ ID NO: 818027 - DNA, 25 bp, Homo sapien
catcccatgcacataattcataagg

SEQ ID NO: 818028 - DNA, 25 bp, Homo sapien
gagggcatcaaggaagaatagaaag

SEQ ID NO: 818029 - DNA, 25 bp, Homo sapien
cctgaagcaacactacatggcggtg

SEQ ID NO: 818030 - DNA, 25 bp, Homo sapien
taaatcagaagtaacaacaggctca

SEQ ID NO: 818031 - DNA, 25 bp, Homo sapien
gactaggacatcagagtgagcacaa

SEQ ID NO: 818032 - DNA, 25 bp, Homo sapien
tagaagcagcatccttttggcatac

SEQ ID NO: 818033 - DNA, 25 bp, Homo sapien
ttgcagaagtacagctagtgacagg

SEQ ID NO: 818034 - DNA, 25 bp, Homo sapien
cgaaagtggtaaagcaagggaccag

SEQ ID NO: 818035 - DNA, 25 bp, Homo sapien
gggaccagagtcaaagatcattatt

SEQ ID NO: 818036 - DNA, 25 bp, Homo sapien
aggcgatatggatagcccagagccc

SEQ ID NO: 818037 - DNA, 25 bp, Homo sapien
ttatctgcggatccgtgtttggccc

SEQ ID NO: 818038 - DNA, 25 bp, Homo sapien
tacagacaagctggactgaattttt

SEQ ID NO: 818039 - DNA, 25 bp, Homo sapien
cctgtgtggccgttctttatcttgc

SEQ ID NO: 818040 - DNA, 25 bp, Homo sapien
tgtttggccccgtggtgaattccat

SEQ ID NO: 818041 - DNA, 25 bp, Homo sapien
tgggaaagttaatctgcattttacc

SEQ ID NO: 818042 - DNA, 25 bp, Homo sapien
ctttgggaaagttaatctgcatttt

SEQ ID NO: 818043 - DNA, 25 bp, Homo sapien
gggaaagttaatctgcattttacca

SEQ ID NO: 818044 - DNA, 25 bp, Homo sapien
ttgggaaagttaatctgcattttac

SEQ ID NO: 818045 - DNA, 25 bp, Homo sapien
tagaagacgattatctaaaagcagg

SEQ ID NO: 818046 - DNA, 25 bp, Homo sapien
tcactctagaagacgattatctaaa

SEQ ID NO: 818047 - DNA, 25 bp, Homo sapien
ctctagaagacgattatctaaaagc

SEQ ID NO: 818048 - DNA, 25 bp, Homo sapien
gaagacgattatctaaaagcaggat

SEQ ID NO: 818049 - DNA, 25 bp, Homo sapien
aaaaagaagtatagcagttatattt

SEQ ID NO: 818050 - DNA, 25 bp, Homo sapien
aaagaagtatagcagttatatttaa

SEQ ID NO: 818051 - DNA, 25 bp, Homo sapien
agaagtatagcagttatatttaaag

SEQ ID NO: 818052 - DNA, 25 bp, Homo sapien
gaagtatagcagttatatttaaagt

SEQ ID NO: 818053 - DNA, 25 bp, Homo sapien
tcatgtctccaacccaatctggaac

SEQ ID NO: 818054 - DNA, 25 bp, Homo sapien
ttacacagattacaagggacttccc

SEQ ID NO: 818055 - DNA, 25 bp, Homo sapien
tatggataagactttgcaaaatgtg

SEQ ID NO: 818056 - DNA, 25 bp, Homo sapien
tccagagctctgtggtaggccataa

SEQ ID NO: 818057 - DNA, 25 bp, Homo sapien
caaggcctactgttctgacatatgg

SEQ ID NO: 818058 - DNA, 25 bp, Homo sapien
tctgttcaccacaactgtttctgcc

SEQ ID NO: 818059 - DNA, 25 bp, Homo sapien
ataaatcatgctgcctattcaaggc

SEQ ID NO: 818060 - DNA, 25 bp, Homo sapien
tagactaagacacctagccactaaa

SEQ ID NO: 818061 - DNA, 25 bp, Homo sapien
ggaaccagaatgtctgagtttgagt

SEQ ID NO: 818062 - DNA, 25 bp, Homo sapien
catagaattgcagcgttgttgggag

SEQ ID NO: 818063 - DNA, 25 bp, Homo sapien
gagtctcaattttaccatgcacctg

SEQ ID NO: 818064 - DNA, 25 bp, Homo sapien
tgtatactaagaagaagatccctgc

SEQ ID NO: 818065 - DNA, 25 bp, Homo sapien
agattcagtccagccttttcaggaa

SEQ ID NO: 818066 - DNA, 25 bp, Homo sapien
tatgttgggcaccactgtacaataa

SEQ ID NO: 818067 - DNA, 25 bp, Homo sapien
tatcacgtgttaactcatgagaaac

SEQ ID NO: 818068 - DNA, 25 bp, Homo sapien
gatttggaatagagcattgtatcac

SEQ ID NO: 818069 - DNA, 25 bp, Homo sapien
aagatagatgctcctcctactagag

SEQ ID NO: 818070 - DNA, 25 bp, Homo sapien
gataaccaaaactctggaggtggca

SEQ ID NO: 818071 - DNA, 25 bp, Homo sapien
gacagtcagacagagatatggaagg

SEQ ID NO: 818072 - DNA, 25 bp, Homo sapien
gtcacacccctcgacataagtggta

SEQ ID NO: 818073 - DNA, 25 bp, Homo sapien
taaaataactactcttctgtcattc

SEQ ID NO: 818074 - DNA, 25 bp, Homo sapien
aaaataactactcttctgtcattcc

SEQ ID NO: 818075 - DNA, 25 bp, Homo sapien
tctaaaataactactcttctgtcat

SEQ ID NO: 818076 - DNA, 25 bp, Homo sapien
ttctaaaataactactcttctgtca

SEQ ID NO: 818077 - DNA, 25 bp, Homo sapien
gaacagggaccgcacatagctatct

SEQ ID NO: 818078 - DNA, 25 bp, Homo sapien
caacaggaagagctgtatctcctcc

SEQ ID NO: 818079 - DNA, 25 bp, Homo sapien
cttcaaaccgaatgcagaaagggct

SEQ ID NO: 818080 - DNA, 25 bp, Homo sapien
aaattttggcgatgtgttagggcta

SEQ ID NO: 818081 - DNA, 25 bp, Homo sapien
tactcagtgacaagggattcaaggt

SEQ ID NO: 818082 - DNA, 25 bp, Homo sapien
aatgggcttattcaaccacccagga

SEQ ID NO: 818083 - DNA, 25 bp, Homo sapien
ctgaaactgtcatagtgaatgggct

SEQ ID NO: 818084 - DNA, 25 bp, Homo sapien
gaaactctaggaaagggagatccca

SEQ ID NO: 818085 - DNA, 25 bp, Homo sapien
cccagtggcggtataacaggactct

SEQ ID NO: 818086 - DNA, 25 bp, Homo sapien
tgctttgaggtcaaacctgactctg

SEQ ID NO: 818087 - DNA, 25 bp, Homo sapien
tttagctgctacgactatcacctgc

SEQ ID NO: 818088 - DNA, 25 bp, Homo sapien
taaagtggagtacaggaaaggacag

SEQ ID NO: 818089 - DNA, 25 bp, Homo sapien
tgtgactgatcccaggaactctgtg

SEQ ID NO: 818090 - DNA, 25 bp, Homo sapien
tgagtcctacgaaaggtcatcagtg

SEQ ID NO: 818091 - DNA, 25 bp, Homo sapien
tcatcagtgttacgcttaggcagct

SEQ ID NO: 818092 - DNA, 25 bp, Homo sapien
gaggagaactcagcacaagactggc

SEQ ID NO: 818093 - DNA, 25 bp, Homo sapien
ggcaaagagaagatcataagaatga

SEQ ID NO: 818094 - DNA, 25 bp, Homo sapien
ggcttgcagtcaggaatcatctttt

SEQ ID NO: 818095 - DNA, 25 bp, Homo sapien
gactgtgactcagggtaatgaaaag

SEQ ID NO: 818096 - DNA, 25 bp, Homo sapien
ctaccactgccaacaggaatcaaga

SEQ ID NO: 818097 - DNA, 25 bp, Homo sapien
tgggagtgacattccaaactaaacc

SEQ ID NO: 818098 - DNA, 25 bp, Homo sapien
tagtgtctgattcaaaccaaggaac

SEQ ID NO: 818099 - DNA, 25 bp, Homo sapien
aacactggatatgggattacatggc

SEQ ID NO: 818100 - DNA, 25 bp, Homo sapien
taaaccactagttgcctcccatagg

SEQ ID NO: 818101 - DNA, 25 bp, Homo sapien
gctgtgagtagcatcttcggctcaa

SEQ ID NO: 818102 - DNA, 25 bp, Homo sapien
gttgattcgtgtagctgtagttcac

SEQ ID NO: 818103 - DNA, 25 bp, Homo sapien
gatttatctatgttgattcgtgtag

SEQ ID NO: 818104 - DNA, 25 bp, Homo sapien
ggaaactatactccgcaaattgctg

SEQ ID NO: 818105 - DNA, 25 bp, Homo sapien
accagcttgttgcttggcagccatg

SEQ ID NO: 818106 - DNA, 25 bp, Homo sapien
caaacaccagggtacctacggcagt

SEQ ID NO: 818107 - DNA, 25 bp, Homo sapien
gaagattccacaacctacaatagcg

SEQ ID NO: 818108 - DNA, 25 bp, Homo sapien
taagtgccttcgatggagtgtcagc

SEQ ID NO: 818109 - DNA, 25 bp, Homo sapien
gattattactctcacaaactgtgca

SEQ ID NO: 818110 - DNA, 25 bp, Homo sapien
ttgtgtgtacgcacatgtgttcaca

SEQ ID NO: 818111 - DNA, 25 bp, Homo sapien
taacactgggctaaaacaactgcat

SEQ ID NO: 818112 - DNA, 25 bp, Homo sapien
gaaatttccttcaattgctccaccc

SEQ ID NO: 818113 - DNA, 25 bp, Homo sapien
gaccatatagtgagaaaaaggagga

SEQ ID NO: 818114 - DNA, 25 bp, Homo sapien
cacaaaatacgtgttatcaattgac

SEQ ID NO: 818115 - DNA, 25 bp, Homo sapien
gagcaaaatagttaagtaatccaca

SEQ ID NO: 818116 - DNA, 25 bp, Homo sapien
tgatgaggagaccatatagtgagaa

SEQ ID NO: 818117 - DNA, 25 bp, Homo sapien
tctgaggtgcagatgccacatgacg

SEQ ID NO: 818118 - DNA, 25 bp, Homo sapien
caaagggtcaggaattcgcagaaca

SEQ ID NO: 818119 - DNA, 25 bp, Homo sapien
cacagtccatatcacaagggcagtt

SEQ ID NO: 818120 - DNA, 25 bp, Homo sapien
tcgcagaacaagcaagccaggatac

SEQ ID NO: 818121 - DNA, 25 bp, Homo sapien
tgctcctgagaacggttaaaagaaa

SEQ ID NO: 818122 - DNA, 25 bp, Homo sapien
gagagatcaacactggttcccaact

SEQ ID NO: 818123 - DNA, 25 bp, Homo sapien
aatatcggtaaaaaggagaaggcat

SEQ ID NO: 818124 - DNA, 25 bp, Homo sapien
tgcctcgtttaaatacacactgaaa

SEQ ID NO: 818125 - DNA, 25 bp, Homo sapien
tcaaactgagtaggagagagcatgg

SEQ ID NO: 818126 - DNA, 25 bp, Homo sapien
cacacacagtttagggtgtccacct

SEQ ID NO: 818127 - DNA, 25 bp, Homo sapien
cacatttaaaaggacaccgcctgta

SEQ ID NO: 818128 - DNA, 25 bp, Homo sapien
gagtccacacagtcggcattcagag

SEQ ID NO: 818129 - DNA, 25 bp, Homo sapien
tctcgagtcttatttatgttgggca

SEQ ID NO: 818130 - DNA, 25 bp, Homo sapien
atagtaagtgtggaacaaaccctat

SEQ ID NO: 818131 - DNA, 25 bp, Homo sapien
tcctacaggcctacaaatcacaagt

SEQ ID NO: 818132 - DNA, 25 bp, Homo sapien
gattagatgcaacaatcctacaggc

SEQ ID NO: 818133 - DNA, 25 bp, Homo sapien
taaatactggcaggttcaccgttga

SEQ ID NO: 818134 - DNA, 25 bp, Homo sapien
tgacagtttttgcaacacccaccct

SEQ ID NO: 818135 - DNA, 25 bp, Homo sapien
tgggaggtgccaaacttattccctg

SEQ ID NO: 818136 - DNA, 25 bp, Homo sapien
gaggtgtctagtatcaatccaagca

SEQ ID NO: 818137 - DNA, 25 bp, Homo sapien
ggaaaagtcctactcccagtgtcat

SEQ ID NO: 818138 - DNA, 25 bp, Homo sapien
atttgcatagcgagcggaacccaca

SEQ ID NO: 818139 - DNA, 25 bp, Homo sapien
tctagcaaaaatgtgtgtaagtagg

SEQ ID NO: 818140 - DNA, 25 bp, Homo sapien
tctccgggtaatgaccccatttgca

SEQ ID NO: 818141 - DNA, 25 bp, Homo sapien
atttctgtttttcaacatatattca

SEQ ID NO: 818142 - DNA, 25 bp, Homo sapien
gcagctaaattttatggtagttaaa

SEQ ID NO: 818143 - DNA, 25 bp, Homo sapien
tttatggtagttaaactgtgaagct

SEQ ID NO: 818144 - DNA, 25 bp, Homo sapien
cttgctcacaatcttgcctatgtgg

SEQ ID NO: 818145 - DNA, 25 bp, Homo sapien
caatcttgcctatgtggatgtagcc

SEQ ID NO: 818146 - DNA, 25 bp, Homo sapien
gaaaagaaaacccattgtcatcacc

SEQ ID NO: 818147 - DNA, 25 bp, Homo sapien
tccttccctctatgcactgtcttgt

SEQ ID NO: 818148 - DNA, 25 bp, Homo sapien
cacctccttggccactaaatactta

SEQ ID NO: 818149 - DNA, 25 bp, Homo sapien
tgtgtgctgttaatcctgtaatttc

SEQ ID NO: 818150 - DNA, 25 bp, Homo sapien
gacaagaaagcatgagagcaagcca

SEQ ID NO: 818151 - DNA, 25 bp, Homo sapien
gcaagagagggtcaaactcccttta

SEQ ID NO: 818152 - DNA, 25 bp, Homo sapien
gccagcaagagagggtcaaactccc

SEQ ID NO: 818153 - DNA, 25 bp, Homo sapien
gcaagccagcaagagagggtcaaac

SEQ ID NO: 818154 - DNA, 25 bp, Homo sapien
aagtgtaagtccctgctgtcaaaga

SEQ ID NO: 818155 - DNA, 25 bp, Homo sapien
tttggggctctggttcctgtaagtg

SEQ ID NO: 818156 - DNA, 25 bp, Homo sapien
tatcctcatgtgtaagtgtaagtcc

SEQ ID NO: 818157 - DNA, 25 bp, Homo sapien
ttatgcaccagtcctttcagcaggg

SEQ ID NO: 818158 - DNA, 25 bp, Homo sapien
gccatgtaagcagagtgtttgccta

SEQ ID NO: 818159 - DNA, 25 bp, Homo sapien
gcgtcaactaccacttcacacagga

SEQ ID NO: 818160 - DNA, 25 bp, Homo sapien
taattctgcctacttgccatgtaag

SEQ ID NO: 818161 - DNA, 25 bp, Homo sapien
gtatcaacccaggacagctaaagtg

SEQ ID NO: 818162 - DNA, 25 bp, Homo sapien
tagaggagagtttggatgctatact

SEQ ID NO: 818163 - DNA, 25 bp, Homo sapien
ggtaatctgttctcctcgagttata

SEQ ID NO: 818164 - DNA, 25 bp, Homo sapien
taatactcaggaatttaatgttgta

SEQ ID NO: 818165 - DNA, 25 bp, Homo sapien
ttgcctttgttaataaatgacaact

SEQ ID NO: 818166 - DNA, 25 bp, Homo sapien
gtcaagcactgcccagtcccccagt

SEQ ID NO: 818167 - DNA, 25 bp, Homo sapien
agtcccccagtcacaaagcaccact

SEQ ID NO: 818168 - DNA, 25 bp, Homo sapien
ctctcttcatccaataagctcctat

SEQ ID NO: 818169 - DNA, 25 bp, Homo sapien
ttctctcttcatccaataagctcct

SEQ ID NO: 818170 - DNA, 25 bp, Homo sapien
ccttctgggataggacaacagtatt

SEQ ID NO: 818171 - DNA, 25 bp, Homo sapien
tgttgtccgcttgctccttctggga

SEQ ID NO: 818172 - DNA, 25 bp, Homo sapien
ctggatggttagtggtcaggatatc

SEQ ID NO: 818173 - DNA, 25 bp, Homo sapien
gacaacagtattcttcaatggctcc

SEQ ID NO: 818174 - DNA, 25 bp, Homo sapien
gataatgctcgcttgtccaccattc

SEQ ID NO: 818175 - DNA, 25 bp, Homo sapien
tgtgaagctcggttcctaagaggtc

SEQ ID NO: 818176 - DNA, 25 bp, Homo sapien
cacagatgggtattggtagacagcc

SEQ ID NO: 818177 - DNA, 25 bp, Homo sapien
ggagctgaggcgataatgctcgctt

SEQ ID NO: 818178 - DNA, 25 bp, Homo sapien
ttgtgtcccaaagtctaagataatg

SEQ ID NO: 818179 - DNA, 25 bp, Homo sapien
ccccgtaggaatcagaggaagcagc

SEQ ID NO: 818180 - DNA, 25 bp, Homo sapien
tcaaattcagcatctccccgtagga

SEQ ID NO: 818181 - DNA, 25 bp, Homo sapien
tgaggtgcccacagtctaggttatc

SEQ ID NO: 818182 - DNA, 25 bp, Homo sapien
aattagctgtcttctccatatggca

SEQ ID NO: 818183 - DNA, 25 bp, Homo sapien
ctccatatggcatttaggtttcagc

SEQ ID NO: 818184 - DNA, 25 bp, Homo sapien
catttaggtttcagccacttctttc

SEQ ID NO: 818185 - DNA, 25 bp, Homo sapien
catatggcatttaggtttcagccac

SEQ ID NO: 818186 - DNA, 25 bp, Homo sapien
catattggtgcttaatgaactctga

SEQ ID NO: 818187 - DNA, 25 bp, Homo sapien
tattggtgccacactggcatggatt

SEQ ID NO: 818188 - DNA, 25 bp, Homo sapien
tctagagagctgcattgtaacatat

SEQ ID NO: 818189 - DNA, 25 bp, Homo sapien
tttgcataatgtattgaggctctat

SEQ ID NO: 818190 - DNA, 25 bp, Homo sapien
tgtatgctgcgtaccaggaaagacc

SEQ ID NO: 818191 - DNA, 25 bp, Homo sapien
tctaggtagggcaaaaagtaggcac

SEQ ID NO: 818192 - DNA, 25 bp, Homo sapien
taaagagccgaccttcaacaatagg

SEQ ID NO: 818193 - DNA, 25 bp, Homo sapien
taatgaaggtaacttggacaaggcg

SEQ ID NO: 818194 - DNA, 25 bp, Homo sapien
tcaggatcaggctctagcacccagt

SEQ ID NO: 818195 - DNA, 25 bp, Homo sapien
ttctttcaggatcaggctctagcac

SEQ ID NO: 818196 - DNA, 25 bp, Homo sapien
aggatcaggctctagcacccagtca

SEQ ID NO: 818197 - DNA, 25 bp, Homo sapien
gatcaggctctagcacccagtcatc

SEQ ID NO: 818198 - DNA, 25 bp, Homo sapien
tagatgggcatgaattccgttggca

SEQ ID NO: 818199 - DNA, 25 bp, Homo sapien
catgaattccgttggcaagttgaag

SEQ ID NO: 818200 - DNA, 25 bp, Homo sapien
tacaacaacagggaagatggaaagc

SEQ ID NO: 818201 - DNA, 25 bp, Homo sapien
gaaggttcccacatccaatggcgaa

SEQ ID NO: 818202 - DNA, 25 bp, Homo sapien
cccattgtgtcttgcatgtgaaata

SEQ ID NO: 818203 - DNA, 25 bp, Homo sapien
tctgggtatcgttcagtaaatgaaa

SEQ ID NO: 818204 - DNA, 25 bp, Homo sapien
ttaatctgggtatcgttcagtaaat

SEQ ID NO: 818205 - DNA, 25 bp, Homo sapien
atgaaagtgtgccatctatttcaca

SEQ ID NO: 818206 - DNA, 25 bp, Homo sapien
tgaatgaggccgatttcttccagtt

SEQ ID NO: 818207 - DNA, 25 bp, Homo sapien
gccgatttcttccagtttagttgta

SEQ ID NO: 818208 - DNA, 25 bp, Homo sapien
cttccagtttagttgtacacaaagc

SEQ ID NO: 818209 - DNA, 25 bp, Homo sapien
ctgactgtgaatgaggccgatttct

SEQ ID NO: 818210 - DNA, 25 bp, Homo sapien
aatcatcatgtagccagtagtttgg

SEQ ID NO: 818211 - DNA, 25 bp, Homo sapien
catgtagccagtagtttggaaaaga

SEQ ID NO: 818212 - DNA, 25 bp, Homo sapien
actgaatcatcatgtagccagtagt

SEQ ID NO: 818213 - DNA, 25 bp, Homo sapien
ctctatcctcaaagactgaatcatc

SEQ ID NO: 818214 - DNA, 25 bp, Homo sapien
aataggaagtgaagcaaaacacact

SEQ ID NO: 818215 - DNA, 25 bp, Homo sapien
gaagtgaagcaaaacacactttgct

SEQ ID NO: 818216 - DNA, 25 bp, Homo sapien
gcaaaacacactttgctctcaactc

SEQ ID NO: 818217 - DNA, 25 bp, Homo sapien
gtgaagcaaaacacactttgctctc

SEQ ID NO: 818218 - DNA, 25 bp, Homo sapien
tactttcgctccgggtgaactgctc

SEQ ID NO: 818219 - DNA, 25 bp, Homo sapien
ccatgctgagcacttacacccaggg

SEQ ID NO: 818220 - DNA, 25 bp, Homo sapien
ggtccagggatgtaagctgcttccc

SEQ ID NO: 818221 - DNA, 25 bp, Homo sapien
gctccaatcgtactgtgctctttcc

SEQ ID NO: 818222 - DNA, 25 bp, Homo sapien
actgatatgataactaatttgtagc

SEQ ID NO: 818223 - DNA, 25 bp, Homo sapien
cctcaaaaggagtagtatttagcaa

SEQ ID NO: 818224 - DNA, 25 bp, Homo sapien
ttctgtggcttaataatacctacaa

SEQ ID NO: 818225 - DNA, 25 bp, Homo sapien
ggaattcctaacaaagcttctaata

SEQ ID NO: 818226 - DNA, 25 bp, Homo sapien
ccagaggctgatatcatgatgggaa

SEQ ID NO: 818227 - DNA, 25 bp, Homo sapien
gacaactctggacctgacctaacaa

SEQ ID NO: 818228 - DNA, 25 bp, Homo sapien
gagcttgcagaacaattccagaggc

SEQ ID NO: 818229 - DNA, 25 bp, Homo sapien
ttcatagtggaaatcaattagccca

SEQ ID NO: 818230 - DNA, 25 bp, Homo sapien
ggaggacaaacagttgttgttgaca

SEQ ID NO: 818231 - DNA, 25 bp, Homo sapien
gtgtttgatcttcataagtctgctg

SEQ ID NO: 818232 - DNA, 25 bp, Homo sapien
tatgatagccataggaggacaaaca

SEQ ID NO: 818233 - DNA, 25 bp, Homo sapien
ttaataattctatgatagccatagg

SEQ ID NO: 818234 - DNA, 25 bp, Homo sapien
tgtcagccactggatttctggatgc

SEQ ID NO: 818235 - DNA, 25 bp, Homo sapien
tgtgtcagccactggatttctggat

SEQ ID NO: 818236 - DNA, 25 bp, Homo sapien
tcagccactggatttctggatgcat

SEQ ID NO: 818237 - DNA, 25 bp, Homo sapien
atgtgtcagccactggatttctgga

SEQ ID NO: 818238 - DNA, 25 bp, Homo sapien
cctcatcccactggacccagaaact

SEQ ID NO: 818239 - DNA, 25 bp, Homo sapien
tggaatcccctactgctcctcatcc

SEQ ID NO: 818240 - DNA, 25 bp, Homo sapien
atggaatcccctactgctcctcatc

SEQ ID NO: 818241 - DNA, 25 bp, Homo sapien
gacccagaaacttctataccatcac

SEQ ID NO: 818242 - DNA, 25 bp, Homo sapien
ggccttttagcaaatatctccagta

SEQ ID NO: 818243 - DNA, 25 bp, Homo sapien
ttttagcaaatatctccagtacaca

SEQ ID NO: 818244 - DNA, 25 bp, Homo sapien
gccttttagcaaatatctccagtac

SEQ ID NO: 818245 - DNA, 25 bp, Homo sapien
ccttttagcaaatatctccagtaca

SEQ ID NO: 818246 - DNA, 25 bp, Homo sapien
gccattagccagcttacagactgtg

SEQ ID NO: 818247 - DNA, 25 bp, Homo sapien
caagcagagccattagccagcttac

SEQ ID NO: 818248 - DNA, 25 bp, Homo sapien
attgtgggagaaacaacgtcctctc

SEQ ID NO: 818249 - DNA, 25 bp, Homo sapien
ctagaggcgtttagcatgagaattc

SEQ ID NO: 818250 - DNA, 25 bp, Homo sapien
gctttggatttagttgtacattcag

SEQ ID NO: 818251 - DNA, 25 bp, Homo sapien
gaaagtcctacctgtttgctcaggc

SEQ ID NO: 818252 - DNA, 25 bp, Homo sapien
tgtacattcagggtacaagttgaaa

SEQ ID NO: 818253 - DNA, 25 bp, Homo sapien
tgaatgaacttcattagctttggat

SEQ ID NO: 818254 - DNA, 25 bp, Homo sapien
tacaaaatccaggagtgtggcaaca

SEQ ID NO: 818255 - DNA, 25 bp, Homo sapien
ctacaaaatccaggagtgtggcaac

SEQ ID NO: 818256 - DNA, 25 bp, Homo sapien
tgaaggatattctctaagtgtaggt

SEQ ID NO: 818257 - DNA, 25 bp, Homo sapien
ctaagtgtaggtaacgaagagccaa

SEQ ID NO: 818258 - DNA, 25 bp, Homo sapien
tttcatcactaatcccattgaagga

SEQ ID NO: 818259 - DNA, 25 bp, Homo sapien
tgtaggtaacgaagagccaaaacgc

SEQ ID NO: 818260 - DNA, 25 bp, Homo sapien
cagtcaagtgaacaaggagaaggga

SEQ ID NO: 818261 - DNA, 25 bp, Homo sapien
tcagtcaagtgaacaaggagaaggg

SEQ ID NO: 818262 - DNA, 25 bp, Homo sapien
gaagggacagcataacagagtccat

SEQ ID NO: 818263 - DNA, 25 bp, Homo sapien
cgtcagtcaagtgaacaaggagaag

SEQ ID NO: 818264 - DNA, 25 bp, Homo sapien
ttttactgttacatctgacaggatt

SEQ ID NO: 818265 - DNA, 25 bp, Homo sapien
cattttctgtagtccgcctttagta

SEQ ID NO: 818266 - DNA, 25 bp, Homo sapien
atttcacattttctgtagtccgcct

SEQ ID NO: 818267 - DNA, 25 bp, Homo sapien
tgtagtccgcctttagtacattgaa

SEQ ID NO: 818268 - DNA, 25 bp, Homo sapien
cagggagacgctgcaaatgtacagg

SEQ ID NO: 818269 - DNA, 25 bp, Homo sapien
aatcccgtagaagtgtaatacacac

SEQ ID NO: 818270 - DNA, 25 bp, Homo sapien
agccccgctgctcttttagtgcctg

SEQ ID NO: 818271 - DNA, 25 bp, Homo sapien
tagtgcctgtgaccttgaagccgtg

SEQ ID NO: 818272 - DNA, 25 bp, Homo sapien
acttctgcatttagaggcggctcag

SEQ ID NO: 818273 - DNA, 25 bp, Homo sapien
gaatgactaaaactggctgtctagg

SEQ ID NO: 818274 - DNA, 25 bp, Homo sapien
ttttcatgaagacctctgagggttc

SEQ ID NO: 818275 - DNA, 25 bp, Homo sapien
ggagcatcaagctacaaacactggc

SEQ ID NO: 818276 - DNA, 25 bp, Homo sapien
tcaaaacaggcttcttactattcat

SEQ ID NO: 818277 - DNA, 25 bp, Homo sapien
taattcaaaacaggcttcttactat

SEQ ID NO: 818278 - DNA, 25 bp, Homo sapien
cagtataattcaaaacaggcttctt

SEQ ID NO: 818279 - DNA, 25 bp, Homo sapien
gtataattcaaaacaggcttcttac

SEQ ID NO: 818280 - DNA, 25 bp, Homo sapien
ttactgggtgatcattttcagacag

SEQ ID NO: 818281 - DNA, 25 bp, Homo sapien
tactatgttgtcagggcatttgcca

SEQ ID NO: 818282 - DNA, 25 bp, Homo sapien
tttgccaacacaaagtgggctgtca

SEQ ID NO: 818283 - DNA, 25 bp, Homo sapien
tttcagacagagatatgatgttgag

SEQ ID NO: 818284 - DNA, 25 bp, Homo sapien
gaatcggaatgtttcctgtgagata

SEQ ID NO: 818285 - DNA, 25 bp, Homo sapien
gaatgagacaccagaatcggaatgt

SEQ ID NO: 818286 - DNA, 25 bp, Homo sapien
tcatgagaatgagacaccagaatcg

SEQ ID NO: 818287 - DNA, 25 bp, Homo sapien
gagacaccagaatcggaatgtttcc

SEQ ID NO: 818288 - DNA, 25 bp, Homo sapien
tcttctctgttaagacagcaagttt

SEQ ID NO: 818289 - DNA, 25 bp, Homo sapien
tcctgtctagccctgataatctgcc

SEQ ID NO: 818290 - DNA, 25 bp, Homo sapien
ggactggatggaaatgtccctcttt

SEQ ID NO: 818291 - DNA, 25 bp, Homo sapien
tagggctcctttactttggtcatgg

SEQ ID NO: 818292 - DNA, 25 bp, Homo sapien
aacctgcccttctgaaaaagtgtgg

SEQ ID NO: 818293 - DNA, 25 bp, Homo sapien
taaagatcaactgaagccttgagca

SEQ ID NO: 818294 - DNA, 25 bp, Homo sapien
tgcagaggaataagaaacctgccct

SEQ ID NO: 818295 - DNA, 25 bp, Homo sapien
catctatatttgaaaaggtcggagg

SEQ ID NO: 818296 - DNA, 25 bp, Homo sapien
catattgcacaagataaagttattt

SEQ ID NO: 818297 - DNA, 25 bp, Homo sapien
ctgctgcaggcaggttacttatcat

SEQ ID NO: 818298 - DNA, 25 bp, Homo sapien
gataaagttatttctgctgcaggca

SEQ ID NO: 818299 - DNA, 25 bp, Homo sapien
tatttctgctgcaggcaggttactt

SEQ ID NO: 818300 - DNA, 25 bp, Homo sapien
ctagtagtacttgtgggcctgtgtg

SEQ ID NO: 818301 - DNA, 25 bp, Homo sapien
cctgtgtgactgcaggtctatgggc

SEQ ID NO: 818302 - DNA, 25 bp, Homo sapien
agtagtacttgtgggcctgtgtgac

SEQ ID NO: 818303 - DNA, 25 bp, Homo sapien
gactgcaggtctatgggcagtcagt

SEQ ID NO: 818304 - DNA, 25 bp, Homo sapien
ggctaatttcaggtagttgtcctgg

SEQ ID NO: 818305 - DNA, 25 bp, Homo sapien
atttcaggtagttgtcctggccata

SEQ ID NO: 818306 - DNA, 25 bp, Homo sapien
gtaggctaatttcaggtagttgtcc

SEQ ID NO: 818307 - DNA, 25 bp, Homo sapien
agcagtcgacgtttttcacagtagg

SEQ ID NO: 818308 - DNA, 25 bp, Homo sapien
cactgttaaataactcagcagacag

SEQ ID NO: 818309 - DNA, 25 bp, Homo sapien
gagttttcggatcactgttaaataa

SEQ ID NO: 818310 - DNA, 25 bp, Homo sapien
tgttaaataactcagcagacagagg

SEQ ID NO: 818311 - DNA, 25 bp, Homo sapien
gcagacagagggacataatgcccat

SEQ ID NO: 818312 - DNA, 25 bp, Homo sapien
cacattatgagctgtataactttca

SEQ ID NO: 818313 - DNA, 25 bp, Homo sapien
cagaatacacattatgagctgtata

SEQ ID NO: 818314 - DNA, 25 bp, Homo sapien
gctatatgattaaattttttgccac

SEQ ID NO: 818315 - DNA, 25 bp, Homo sapien
gctatagctatatgattaaattttt

SEQ ID NO: 818316 - DNA, 25 bp, Homo sapien
tcataatgagtggtctccaccctgt

SEQ ID NO: 818317 - DNA, 25 bp, Homo sapien
cacctcatcggctaaagatgcagga

SEQ ID NO: 818318 - DNA, 25 bp, Homo sapien
tgtccacaacgttcagcaaccagct

SEQ ID NO: 818319 - DNA, 25 bp, Homo sapien
cagctgagcacttctggccacctca

SEQ ID NO: 818320 - DNA, 25 bp, Homo sapien
ccataatgccacaaagataggcata

SEQ ID NO: 818321 - DNA, 25 bp, Homo sapien
cttcccataatgccacaaagatagg

SEQ ID NO: 818322 - DNA, 25 bp, Homo sapien
ttcccataatgccacaaagataggc

SEQ ID NO: 818323 - DNA, 25 bp, Homo sapien
tcccataatgccacaaagataggca

SEQ ID NO: 818324 - DNA, 25 bp, Homo sapien
cagtttaatgtacccactgttctga

SEQ ID NO: 818325 - DNA, 25 bp, Homo sapien
ttttgtgtgcattagatgtcacctc

SEQ ID NO: 818326 - DNA, 25 bp, Homo sapien
gatgtcacctcatgcaatttatgta

SEQ ID NO: 818327 - DNA, 25 bp, Homo sapien
tattaagaatcagtttaatgtaccc

SEQ ID NO: 818328 - DNA, 25 bp, Homo sapien
cttgactgtgagggcttatgactat

SEQ ID NO: 818329 - DNA, 25 bp, Homo sapien
tgagggcttatgactattgacgttg

SEQ ID NO: 818330 - DNA, 25 bp, Homo sapien
actgtgagggcttatgactattgac

SEQ ID NO: 818331 - DNA, 25 bp, Homo sapien
ggcttatgactattgacgttgtcaa

SEQ ID NO: 818332 - DNA, 25 bp, Homo sapien
taggtgtattaattgaattccacac

SEQ ID NO: 818333 - DNA, 25 bp, Homo sapien
tttaaattatggctgccctctataa

SEQ ID NO: 818334 - DNA, 25 bp, Homo sapien
ccctctataaaggtgtctttaggtg

SEQ ID NO: 818335 - DNA, 25 bp, Homo sapien
tatggctgccctctataaaggtgtc

SEQ ID NO: 818336 - DNA, 25 bp, Homo sapien
tgtaaagggtccattaatatagatg

SEQ ID NO: 818337 - DNA, 25 bp, Homo sapien
ccattaatatagatggtaagattta

SEQ ID NO: 818338 - DNA, 25 bp, Homo sapien
gagttgtaaagggtccattaatata

SEQ ID NO: 818339 - DNA, 25 bp, Homo sapien
gggtccattaatatagatggtaaga

SEQ ID NO: 818340 - DNA, 25 bp, Homo sapien
ccgcagttccgtgcagtcagaagat

SEQ ID NO: 818341 - DNA, 25 bp, Homo sapien
tattaacgcagcgtccattgtgaga

SEQ ID NO: 818342 - DNA, 25 bp, Homo sapien
tcctgtttctagcacgagatttaag

SEQ ID NO: 818343 - DNA, 25 bp, Homo sapien
ggctccagcgcgttaattttgctcc

SEQ ID NO: 818344 - DNA, 25 bp, Homo sapien
tcagtgatgtgtgctgtttctcatt

SEQ ID NO: 818345 - DNA, 25 bp, Homo sapien
agtgatgtgtgctgtttctcattca

SEQ ID NO: 818346 - DNA, 25 bp, Homo sapien
tttcagtgatgtgtgctgtttctca

SEQ ID NO: 818347 - DNA, 25 bp, Homo sapien
ttttcagtgatgtgtgctgtttctc

SEQ ID NO: 818348 - DNA, 25 bp, Homo sapien
aactggaagtaatctggacactatc

SEQ ID NO: 818349 - DNA, 25 bp, Homo sapien
tctggacactatcagaagtctgaag

SEQ ID NO: 818350 - DNA, 25 bp, Homo sapien
gaagaatcctataatctctttcact

SEQ ID NO: 818351 - DNA, 25 bp, Homo sapien
tctttcactattcacatcaccatgt

SEQ ID NO: 818352 - DNA, 25 bp, Homo sapien
tcagagaacataagcagttaagatt

SEQ ID NO: 818353 - DNA, 25 bp, Homo sapien
cagagaacataagcagttaagattc

SEQ ID NO: 818354 - DNA, 25 bp, Homo sapien
tctccttcccaatttagagatgtcg

SEQ ID NO: 818355 - DNA, 25 bp, Homo sapien
gtctccacaaaagatgctctccttc

SEQ ID NO: 818356 - DNA, 25 bp, Homo sapien
tccttcccaatttagagatgtcgca

SEQ ID NO: 818357 - DNA, 25 bp, Homo sapien
ctccacaaaagatgctctccttccc

SEQ ID NO: 818358 - DNA, 25 bp, Homo sapien
tgtgacataggtggtaacgatggca

SEQ ID NO: 818359 - DNA, 25 bp, Homo sapien
tatagcaggtacacctgtggtgtga

SEQ ID NO: 818360 - DNA, 25 bp, Homo sapien
tacacctgtggtgtgacataggtgg

SEQ ID NO: 818361 - DNA, 25 bp, Homo sapien
ggtggtaacgatggcatgctcttga

SEQ ID NO: 818362 - DNA, 25 bp, Homo sapien
tgtcattgtcagttggcagttcggg

SEQ ID NO: 818363 - DNA, 25 bp, Homo sapien
gcagttcgggctcattcctggaagc

SEQ ID NO: 818364 - DNA, 25 bp, Homo sapien
gatgttgcccagtccgcatattgac

SEQ ID NO: 818365 - DNA, 25 bp, Homo sapien
gaagctgtgccgtacaattggatac

SEQ ID NO: 818366 - DNA, 25 bp, Homo sapien
acgttcttatccttcggatcatgag

SEQ ID NO: 818367 - DNA, 25 bp, Homo sapien
ggctctctccctgaatatctctata

SEQ ID NO: 818368 - DNA, 25 bp, Homo sapien
tatccttcggatcatgagcagtgtg

SEQ ID NO: 818369 - DNA, 25 bp, Homo sapien
tagagtgtgatctctctctgacagc

SEQ ID NO: 818370 - DNA, 25 bp, Homo sapien
tagtgtcaatggtgaaaccacataa

SEQ ID NO: 818371 - DNA, 25 bp, Homo sapien
attccattagtgtcaatggtgaaac

SEQ ID NO: 818372 - DNA, 25 bp, Homo sapien
tgaaaccacataataggctttatta

SEQ ID NO: 818373 - DNA, 25 bp, Homo sapien
cataataggctttattacaaacttc

SEQ ID NO: 818374 - DNA, 25 bp, Homo sapien
taaagcagttgcagcctattaattt

SEQ ID NO: 818375 - DNA, 25 bp, Homo sapien
gaaaataaagcagttgcagcctatt

SEQ ID NO: 818376 - DNA, 25 bp, Homo sapien
tgaaaataaagcagttgcagcctat

SEQ ID NO: 818377 - DNA, 25 bp, Homo sapien
aaataaagcagttgcagcctattaa

SEQ ID NO: 818378 - DNA, 25 bp, Homo sapien
acatgcccagaagtagcaaactttg

SEQ ID NO: 818379 - DNA, 25 bp, Homo sapien
tggattaaatccgtagagatgtcct

SEQ ID NO: 818380 - DNA, 25 bp, Homo sapien
ttagccacgagccaaataagctgct

SEQ ID NO: 818381 - DNA, 25 bp, Homo sapien
gaaacccttgtaatggatggctcat

SEQ ID NO: 818382 - DNA, 25 bp, Homo sapien
aacttcaatagttcccctgctctag

SEQ ID NO: 818383 - DNA, 25 bp, Homo sapien
actttcagacgtggtttcagtatca

SEQ ID NO: 818384 - DNA, 25 bp, Homo sapien
tgtcatgacactgaaggactaccct

SEQ ID NO: 818385 - DNA, 25 bp, Homo sapien
ttttggctccagttaagctgacacc

SEQ ID NO: 818386 - DNA, 25 bp, Homo sapien
gatgaagtgaataactctgtagcta

SEQ ID NO: 818387 - DNA, 25 bp, Homo sapien
ccggattgtgtgagcatgaggcata

SEQ ID NO: 818388 - DNA, 25 bp, Homo sapien
caaagttgaactgtcagagtaaagg

SEQ ID NO: 818389 - DNA, 25 bp, Homo sapien
gagaagtcaaatgctgggtcttaaa

SEQ ID NO: 818390 - DNA, 25 bp, Homo sapien
cgtcttctgacgatattcctacagt

SEQ ID NO: 818391 - DNA, 25 bp, Homo sapien
agacacgtcttctgacgatattcct

SEQ ID NO: 818392 - DNA, 25 bp, Homo sapien
tctgacgatattcctacagttaaac

SEQ ID NO: 818393 - DNA, 25 bp, Homo sapien
gacgatattcctacagttaaacgca

SEQ ID NO: 818394 - DNA, 25 bp, Homo sapien
atccatatagagcagtaccaggaaa

SEQ ID NO: 818395 - DNA, 25 bp, Homo sapien
caggtgagacaagtggctttttgct

SEQ ID NO: 818396 - DNA, 25 bp, Homo sapien
tgttttattgaaggcttgtactcta

SEQ ID NO: 818397 - DNA, 25 bp, Homo sapien
ttattatatattcaggtgagacaag

SEQ ID NO: 818398 - DNA, 25 bp, Homo sapien
catgagtctgtatatcctgagttcc

SEQ ID NO: 818399 - DNA, 25 bp, Homo sapien
caactgaatgggctagaaatcgcat

SEQ ID NO: 818400 - DNA, 25 bp, Homo sapien
tttagttcgaaatacaatctgggca

SEQ ID NO: 818401 - DNA, 25 bp, Homo sapien
cgcattcttctagaggttaacatga

SEQ ID NO: 818402 - DNA, 25 bp, Homo sapien
tgatttcatgcccttaacacttcct

SEQ ID NO: 818403 - DNA, 25 bp, Homo sapien
tcagttttgaccctcggtagctggt

SEQ ID NO: 818404 - DNA, 25 bp, Homo sapien
gaccctcggtagctggtgatattta

SEQ ID NO: 818405 - DNA, 25 bp, Homo sapien
tttcatgcccttaacacttccttct

SEQ ID NO: 818406 - DNA, 25 bp, Homo sapien
catagcctctgttgtagcatgctgc

SEQ ID NO: 818407 - DNA, 25 bp, Homo sapien
cagtgttcccatagcctctgttgta

SEQ ID NO: 818408 - DNA, 25 bp, Homo sapien
tgttcccatagcctctgttgtagca

SEQ ID NO: 818409 - DNA, 25 bp, Homo sapien
tcccatagcctctgttgtagcatgc

SEQ ID NO: 818410 - DNA, 25 bp, Homo sapien
cttctgaaaccagtattttgtttct

SEQ ID NO: 818411 - DNA, 25 bp, Homo sapien
ttgaaaaatctgttgtatcttggca

SEQ ID NO: 818412 - DNA, 25 bp, Homo sapien
tgaaaaatctgttgtatcttggcat

SEQ ID NO: 818413 - DNA, 25 bp, Homo sapien
tgtttctatttgctggaaaattgaa

SEQ ID NO: 818414 - DNA, 25 bp, Homo sapien
aatttgatgtggattaaaacccgat

SEQ ID NO: 818415 - DNA, 25 bp, Homo sapien
ctgacccatggtaggcacaaaatcc

SEQ ID NO: 818416 - DNA, 25 bp, Homo sapien
tctaagggtaagtctaatttcttga

SEQ ID NO: 818417 - DNA, 25 bp, Homo sapien
tccaccagggggtcatgtttctgcc

SEQ ID NO: 818418 - DNA, 25 bp, Homo sapien
agtgcccgggctaggcgccacaggc

SEQ ID NO: 818419 - DNA, 25 bp, Homo sapien
tggtggcgctcacaggccttcaaga

SEQ ID NO: 818420 - DNA, 25 bp, Homo sapien
tctgtctacctggaggattgtgaat

SEQ ID NO: 818421 - DNA, 25 bp, Homo sapien
gcttgattgcgggaggagctccaac

SEQ ID NO: 818422 - DNA, 25 bp, Homo sapien
tcctgctatatggaaactcttctct

SEQ ID NO: 818423 - DNA, 25 bp, Homo sapien
tcctgttgggtcaaataacattact

SEQ ID NO: 818424 - DNA, 25 bp, Homo sapien
tctggcaatttgtggagtatggact

SEQ ID NO: 818425 - DNA, 25 bp, Homo sapien
tgtctcattgtctgcaacaaatgtt

SEQ ID NO: 818426 - DNA, 25 bp, Homo sapien
gtgggtatggctaaatgacatctca

SEQ ID NO: 818427 - DNA, 25 bp, Homo sapien
gggtatggctaaatgacatctcacc

SEQ ID NO: 818428 - DNA, 25 bp, Homo sapien
tggctaaatgacatctcacctttct

SEQ ID NO: 818429 - DNA, 25 bp, Homo sapien
tatggctaaatgacatctcaccttt

SEQ ID NO: 818430 - DNA, 25 bp, Homo sapien
tactgtaccaggtggtatcacaggg

SEQ ID NO: 818431 - DNA, 25 bp, Homo sapien
actccaagggggctactgtaccagg

SEQ ID NO: 818432 - DNA, 25 bp, Homo sapien
ctgtaccaggtggtatcacagggca

SEQ ID NO: 818433 - DNA, 25 bp, Homo sapien
gctactgtaccaggtggtatcacag

SEQ ID NO: 818434 - DNA, 25 bp, Homo sapien
ttaagttccatagacgtggtacaca

SEQ ID NO: 818435 - DNA, 25 bp, Homo sapien
gaagtttgactttcgatgttcccac

SEQ ID NO: 818436 - DNA, 25 bp, Homo sapien
agacgtggtacacatatctggtcac

SEQ ID NO: 818437 - DNA, 25 bp, Homo sapien
tctggtcacttgacactcaaaagag

SEQ ID NO: 818438 - DNA, 25 bp, Homo sapien
tagaagctgggttaagaccatttcc

SEQ ID NO: 818439 - DNA, 25 bp, Homo sapien
gaagtatttgcccaaatagtttgtg

SEQ ID NO: 818440 - DNA, 25 bp, Homo sapien
gtgtttgcaaatttagaagctgggt

SEQ ID NO: 818441 - DNA, 25 bp, Homo sapien
accagaagtatttgcccaaatagtt

SEQ ID NO: 818442 - DNA, 25 bp, Homo sapien
tccccatagatctcttgattagtgt

SEQ ID NO: 818443 - DNA, 25 bp, Homo sapien
cctttcctacttatttgatccccat

SEQ ID NO: 818444 - DNA, 25 bp, Homo sapien
tatttgatccccatagatctcttga

SEQ ID NO: 818445 - DNA, 25 bp, Homo sapien
tagatctcttgattagtgtttggtg

SEQ ID NO: 818446 - DNA, 25 bp, Homo sapien
caattttatcaatccaccttataat

SEQ ID NO: 818447 - DNA, 25 bp, Homo sapien
tgaagcataaagagtttgcttggat

SEQ ID NO: 818448 - DNA, 25 bp, Homo sapien
taaaacttcaattgggttacatgaa

SEQ ID NO: 818449 - DNA, 25 bp, Homo sapien
cagagaacttgctcaactttcccca

SEQ ID NO: 818450 - DNA, 25 bp, Homo sapien
gaaaatgctcccatatgattgagca

SEQ ID NO: 818451 - DNA, 25 bp, Homo sapien
gcttatattccgatcctgtccacat

SEQ ID NO: 818452 - DNA, 25 bp, Homo sapien
gattgagcagttcatgaagttctgg

SEQ ID NO: 818453 - DNA, 25 bp, Homo sapien
taaaacattgccctgctcatgtcct

SEQ ID NO: 818454 - DNA, 25 bp, Homo sapien
tagtttccactcatcttgctcaaca

SEQ ID NO: 818455 - DNA, 25 bp, Homo sapien
tgtgtgctcccaccaaacagtagtt

SEQ ID NO: 818456 - DNA, 25 bp, Homo sapien
tgctgatgtgtgctcccaccaaaca

SEQ ID NO: 818457 - DNA, 25 bp, Homo sapien
aacagtagtttccactcatcttgct

SEQ ID NO: 818458 - DNA, 25 bp, Homo sapien
ctagtcagttgctgtctgggcaaag

SEQ ID NO: 818459 - DNA, 25 bp, Homo sapien
tcagaggaagtagctagtcagttgc

SEQ ID NO: 818460 - DNA, 25 bp, Homo sapien
caaagtgtaatgtaaagagagtggg

SEQ ID NO: 818461 - DNA, 25 bp, Homo sapien
gagtgggatcatccagaaccctcct

SEQ ID NO: 818462 - DNA, 25 bp, Homo sapien
gtttccaatagagcagacagatttg

SEQ ID NO: 818463 - DNA, 25 bp, Homo sapien
gacagatttgtttcaagttgagatg

SEQ ID NO: 818464 - DNA, 25 bp, Homo sapien
tattatatgtttccaatagagcaga

SEQ ID NO: 818465 - DNA, 25 bp, Homo sapien
gatttgtttcaagttgagatgagac

SEQ ID NO: 818466 - DNA, 25 bp, Homo sapien
tctgacttgtgctgaaacttttcct

SEQ ID NO: 818467 - DNA, 25 bp, Homo sapien
tagtaggcttcaatatgatattcac

SEQ ID NO: 818468 - DNA, 25 bp, Homo sapien
cctattcagatgagttatgttggag

SEQ ID NO: 818469 - DNA, 25 bp, Homo sapien
taaatggaaataagtcaaggtcatg

SEQ ID NO: 818470 - DNA, 25 bp, Homo sapien
aagaagtgaaatagggaagtacagc

SEQ ID NO: 818471 - DNA, 25 bp, Homo sapien
aaagggttgtccaactttcacagag

SEQ ID NO: 818472 - DNA, 25 bp, Homo sapien
tgagcgagttcttctgtgatagacg

SEQ ID NO: 818473 - DNA, 25 bp, Homo sapien
ggcatagtagcttcaattgctgttg

SEQ ID NO: 818474 - DNA, 25 bp, Homo sapien
gaacatcagtgaaggcaaatatttt

SEQ ID NO: 818475 - DNA, 25 bp, Homo sapien
cgatgtcagattataatgagttcac

SEQ ID NO: 818476 - DNA, 25 bp, Homo sapien
tgttggaataagaaaacgatgtcag

SEQ ID NO: 818477 - DNA, 25 bp, Homo sapien
aaaagctaatatacccagctctgta

SEQ ID NO: 818478 - DNA, 25 bp, Homo sapien
tttttccactagaggtctctctcgt

SEQ ID NO: 818479 - DNA, 25 bp, Homo sapien
tccactagaggtctctctcgtaaca

SEQ ID NO: 818480 - DNA, 25 bp, Homo sapien
tagaggtctctctcgtaacagcttt

SEQ ID NO: 818481 - DNA, 25 bp, Homo sapien
ggtctctctcgtaacagctttcctt

SEQ ID NO: 818482 - DNA, 25 bp, Homo sapien
caacttggtggtgtactactggaac

SEQ ID NO: 818483 - DNA, 25 bp, Homo sapien
ggagtccaaatccacttaaattctg

SEQ ID NO: 818484 - DNA, 25 bp, Homo sapien
ttcttctttgactacggagtccaaa

SEQ ID NO: 818485 - DNA, 25 bp, Homo sapien
gttttcctgaaaagaggtacagcat

SEQ ID NO: 818486 - DNA, 25 bp, Homo sapien
ccttcgcaacacttgtaagttggat

SEQ ID NO: 818487 - DNA, 25 bp, Homo sapien
gaggtccttcgcaacacttgtaagt

SEQ ID NO: 818488 - DNA, 25 bp, Homo sapien
ttgaagaggtccttcgcaacacttg

SEQ ID NO: 818489 - DNA, 25 bp, Homo sapien
gaagaggtccttcgcaacacttgta

SEQ ID NO: 818490 - DNA, 25 bp, Homo sapien
gatgagtctgctgttggctgcataa

SEQ ID NO: 818491 - DNA, 25 bp, Homo sapien
atacatccattaaccctggagccat

SEQ ID NO: 818492 - DNA, 25 bp, Homo sapien
catccattaaccctggagccatctg

SEQ ID NO: 818493 - DNA, 25 bp, Homo sapien
ccattaaccctggagccatctgtaa

SEQ ID NO: 818494 - DNA, 25 bp, Homo sapien
aaccctggagccatctgtaataact

SEQ ID NO: 818495 - DNA, 25 bp, Homo sapien
tctgcccagtgacatgactgatgac

SEQ ID NO: 818496 - DNA, 25 bp, Homo sapien
cagtggatgaatctgcccagtgaca

SEQ ID NO: 818497 - DNA, 25 bp, Homo sapien
ataagccagtggatgaatctgccca

SEQ ID NO: 818498 - DNA, 25 bp, Homo sapien
gtaggaataagccagtggatgaatc

SEQ ID NO: 818499 - DNA, 25 bp, Homo sapien
tgttaaagatttttctgtagacata

SEQ ID NO: 818500 - DNA, 25 bp, Homo sapien
aagatttttctgtagacatattcaa

SEQ ID NO: 818501 - DNA, 25 bp, Homo sapien
atttttctgtagacatattcaacct

SEQ ID NO: 818502 - DNA, 25 bp, Homo sapien
taaagatttttctgtagacatattc

SEQ ID NO: 818503 - DNA, 25 bp, Homo sapien
gatctgctcttttcatcagaattgc

SEQ ID NO: 818504 - DNA, 25 bp, Homo sapien
gatggatgatctgctcttttcatca

SEQ ID NO: 818505 - DNA, 25 bp, Homo sapien
tatgtgatggatgatctgctctttt

SEQ ID NO: 818506 - DNA, 25 bp, Homo sapien
gctcttttcatcagaattgcaccta

SEQ ID NO: 818507 - DNA, 25 bp, Homo sapien
tacagacaggaggtcacgtatgatc

SEQ ID NO: 818508 - DNA, 25 bp, Homo sapien
ggaaagtacagacaggaggtcacgt

SEQ ID NO: 818509 - DNA, 25 bp, Homo sapien
gaggtcacgtatgatctggactttg

SEQ ID NO: 818510 - DNA, 25 bp, Homo sapien
cacaagagcccttaattctgtatct

SEQ ID NO: 818511 - DNA, 25 bp, Homo sapien
catttccaaaagtgcgttagctgcc

SEQ ID NO: 818512 - DNA, 25 bp, Homo sapien
gtccatttccaaaagtgcgttagct

SEQ ID NO: 818513 - DNA, 25 bp, Homo sapien
ccatttccaaaagtgcgttagctgc

SEQ ID NO: 818514 - DNA, 25 bp, Homo sapien
tgagtccatttccaaaagtgcgtta

SEQ ID NO: 818515 - DNA, 25 bp, Homo sapien
ggtttcaggacaccattaacatttc

SEQ ID NO: 818516 - DNA, 25 bp, Homo sapien
aagtatatcctgtcttacttgagga

SEQ ID NO: 818517 - DNA, 25 bp, Homo sapien
ttgtccaggtcacatctagattttt

SEQ ID NO: 818518 - DNA, 25 bp, Homo sapien
taatggagcaatcactgaccaaaag

SEQ ID NO: 818519 - DNA, 25 bp, Homo sapien
gaaggtgaacaattgtaggtttgca

SEQ ID NO: 818520 - DNA, 25 bp, Homo sapien
tgggaactggctgatcatgcagctc

SEQ ID NO: 818521 - DNA, 25 bp, Homo sapien
gcatattgtgtgagagatgcatctc

SEQ ID NO: 818522 - DNA, 25 bp, Homo sapien
cgtgtgggtatgtgctgtctttgtt

SEQ ID NO: 818523 - DNA, 25 bp, Homo sapien
cctttgcttgtctcacttctggcct

SEQ ID NO: 818524 - DNA, 25 bp, Homo sapien
tcctttgcttgtctcacttctggcc

SEQ ID NO: 818525 - DNA, 25 bp, Homo sapien
ttcctttgcttgtctcacttctggc

SEQ ID NO: 818526 - DNA, 25 bp, Homo sapien
tcttggttggctctgagtgatcaca

SEQ ID NO: 818527 - DNA, 25 bp, Homo sapien
tggtgtcttggttggctctgagtga

SEQ ID NO: 818528 - DNA, 25 bp, Homo sapien
tgtcttggttggctctgagtgatca

SEQ ID NO: 818529 - DNA, 25 bp, Homo sapien
ttggttggctctgagtgatcacagc

SEQ ID NO: 818530 - DNA, 25 bp, Homo sapien
gtaaatgtaaagactgttgtccatt

SEQ ID NO: 818531 - DNA, 25 bp, Homo sapien
ttataactagtagcgacctctttaa

SEQ ID NO: 818532 - DNA, 25 bp, Homo sapien
gtttattataactagtagcgacctc

SEQ ID NO: 818533 - DNA, 25 bp, Homo sapien
ggagtttattataactagtagcgac

SEQ ID NO: 818534 - DNA, 25 bp, Homo sapien
ttttctctggggccataggactgga

SEQ ID NO: 818535 - DNA, 25 bp, Homo sapien
tcctttttccagcattggcattcat

SEQ ID NO: 818536 - DNA, 25 bp, Homo sapien
tccagcattggcattcatccttcct

SEQ ID NO: 818537 - DNA, 25 bp, Homo sapien
tttctctggggccataggactggag

SEQ ID NO: 818538 - DNA, 25 bp, Homo sapien
agagcccaggctagactattttggt

SEQ ID NO: 818539 - DNA, 25 bp, Homo sapien
cactaaggtgcttctcctgtgtatg

SEQ ID NO: 818540 - DNA, 25 bp, Homo sapien
tatttaggtcaacactaaggtgctt

SEQ ID NO: 818541 - DNA, 25 bp, Homo sapien
tattttggttgctgcccctcatcca

SEQ ID NO: 818542 - DNA, 25 bp, Homo sapien
tggtgactttaaggttaaatctgtc

SEQ ID NO: 818543 - DNA, 25 bp, Homo sapien
gatgtgaggcaaagctttcatgtgc

SEQ ID NO: 818544 - DNA, 25 bp, Homo sapien
ctggatggctacctccgagatgctt

SEQ ID NO: 818545 - DNA, 25 bp, Homo sapien
catgtgcttatgtcctctgacctgg

SEQ ID NO: 818546 - DNA, 25 bp, Homo sapien
ttagaagtcaggtgttcgctttgat

SEQ ID NO: 818547 - DNA, 25 bp, Homo sapien
agaagtcaggtgttcgctttgatgg

SEQ ID NO: 818548 - DNA, 25 bp, Homo sapien
tagaagtcaggtgttcgctttgatg

SEQ ID NO: 818549 - DNA, 25 bp, Homo sapien
cacctttgaggtttgttcatgtcca

SEQ ID NO: 818550 - DNA, 25 bp, Homo sapien
acacaattgttagctgaatgccaac

SEQ ID NO: 818551 - DNA, 25 bp, Homo sapien
agactggtacctggctttgctcaga

SEQ ID NO: 818552 - DNA, 25 bp, Homo sapien
ttgcacactgagagcaagagtgggt

SEQ ID NO: 818553 - DNA, 25 bp, Homo sapien
agtctgccatagctcaagccagaaa

SEQ ID NO: 818554 - DNA, 25 bp, Homo sapien
tttctcatttaatgaggatacaact

SEQ ID NO: 818555 - DNA, 25 bp, Homo sapien
tgagtgtgggaaatgcagtatccat

SEQ ID NO: 818556 - DNA, 25 bp, Homo sapien
caagccagaaattgagtgtgggaaa

SEQ ID NO: 818557 - DNA, 25 bp, Homo sapien
gctgcttttgtgaagcgtcagttgt

SEQ ID NO: 818558 - DNA, 25 bp, Homo sapien
tcaaccgagggagcctctgataatt

SEQ ID NO: 818559 - DNA, 25 bp, Homo sapien
ttttaccgctcttgcatttctcgga

SEQ ID NO: 818560 - DNA, 25 bp, Homo sapien
gcatgcttcagtctcaaccgaggga

SEQ ID NO: 818561 - DNA, 25 bp, Homo sapien
gaaaccctggactgatgtttgtccc

SEQ ID NO: 818562 - DNA, 25 bp, Homo sapien
caatttcagttcactaaatatgttt

SEQ ID NO: 818563 - DNA, 25 bp, Homo sapien
gttttctctgtctacttccagctgg

SEQ ID NO: 818564 - DNA, 25 bp, Homo sapien
tttgtccctttcatgttgcacttca

SEQ ID NO: 818565 - DNA, 25 bp, Homo sapien
gtctttgtagatctgcagttgctca

SEQ ID NO: 818566 - DNA, 25 bp, Homo sapien
ttgtctttgtagatctgcagttgct

SEQ ID NO: 818567 - DNA, 25 bp, Homo sapien
tgtctttgtagatctgcagttgctc

SEQ ID NO: 818568 - DNA, 25 bp, Homo sapien
tctttgtagatctgcagttgctcat

SEQ ID NO: 818569 - DNA, 25 bp, Homo sapien
ggagctcagtgatataccaggagat

SEQ ID NO: 818570 - DNA, 25 bp, Homo sapien
aataggagctcagtgatataccagg

SEQ ID NO: 818571 - DNA, 25 bp, Homo sapien
tcagtgatataccaggagatagtaa

SEQ ID NO: 818572 - DNA, 25 bp, Homo sapien
tagttacgtactccttcaaaagtga

SEQ ID NO: 818573 - DNA, 25 bp, Homo sapien
gcagagtttcctagacgtctatccg

SEQ ID NO: 818574 - DNA, 25 bp, Homo sapien
tttgtcaagttacccatggcagagt

SEQ ID NO: 818575 - DNA, 25 bp, Homo sapien
ttcctagacgtctatccggattcat

SEQ ID NO: 818576 - DNA, 25 bp, Homo sapien
gatgatttgtcaagttacccatggc

SEQ ID NO: 818577 - DNA, 25 bp, Homo sapien
cctggacttgtcttatctgaacttc

SEQ ID NO: 818578 - DNA, 25 bp, Homo sapien
ctggacttgtcttatctgaacttct

SEQ ID NO: 818579 - DNA, 25 bp, Homo sapien
tgcttttcacaggaaggatcatcac

SEQ ID NO: 818580 - DNA, 25 bp, Homo sapien
aactggtggacgttgatgctcttct

SEQ ID NO: 818581 - DNA, 25 bp, Homo sapien
ctccttggatccacctgagtctgag

SEQ ID NO: 818582 - DNA, 25 bp, Homo sapien
tatcttcccttgcaaaacctctact

SEQ ID NO: 818583 - DNA, 25 bp, Homo sapien
ctcttgacactcaactgttaattct

SEQ ID NO: 818584 - DNA, 25 bp, Homo sapien
ttctgttcatttcagtcagcatctc

SEQ ID NO: 818585 - DNA, 25 bp, Homo sapien
agcatctcttgacactcaactgtta

SEQ ID NO: 818586 - DNA, 25 bp, Homo sapien
tctgttcatttcagtcagcatctct

SEQ ID NO: 818587 - DNA, 25 bp, Homo sapien
tcatgccaagcaactgaagctgctg

SEQ ID NO: 818588 - DNA, 25 bp, Homo sapien
caagcaactgaagctgctgaagtta

SEQ ID NO: 818589 - DNA, 25 bp, Homo sapien
catgccaagcaactgaagctgctga

SEQ ID NO: 818590 - DNA, 25 bp, Homo sapien
aactgaagctgctgaagttagtttg

SEQ ID NO: 818591 - DNA, 25 bp, Homo sapien
gattcctgtgatggaccttgggcac

SEQ ID NO: 818592 - DNA, 25 bp, Homo sapien
caatattgcgttgtggagatgccct

SEQ ID NO: 818593 - DNA, 25 bp, Homo sapien
tgagatggtgctaggcctatcgcgt

SEQ ID NO: 818594 - DNA, 25 bp, Homo sapien
taccatcagattggtcggtctggaa

SEQ ID NO: 818595 - DNA, 25 bp, Homo sapien
ctcctcctcctatccgggatcccac

SEQ ID NO: 818596 - DNA, 25 bp, Homo sapien
tcgcccggcgccgtcgaacttccgc

SEQ ID NO: 818597 - DNA, 25 bp, Homo sapien
cgggatcccacggccgggttcagct

SEQ ID NO: 818598 - DNA, 25 bp, Homo sapien
tgcgaacacgggaaacctgcggaac

SEQ ID NO: 818599 - DNA, 25 bp, Homo sapien
tcttcactttgttttccaggtccat

SEQ ID NO: 818600 - DNA, 25 bp, Homo sapien
ttcttcactttgttttccaggtcca

SEQ ID NO: 818601 - DNA, 25 bp, Homo sapien
aagacactgtaatggaatgcgctca

SEQ ID NO: 818602 - DNA, 25 bp, Homo sapien
tccaaaacgcatctgtaggagttcc

SEQ ID NO: 818603 - DNA, 25 bp, Homo sapien
gctctggctccgctgaaagacactg

SEQ ID NO: 818604 - DNA, 25 bp, Homo sapien
tcctgaatccgttactttgagaaag

SEQ ID NO: 818605 - DNA, 25 bp, Homo sapien
gacatcaggagccaaaattacttga

SEQ ID NO: 818606 - DNA, 25 bp, Homo sapien
catctgatcagtttaagctggttcc

SEQ ID NO: 818607 - DNA, 25 bp, Homo sapien
ttcagtacctccatgtgacatcagg

SEQ ID NO: 818608 - DNA, 25 bp, Homo sapien
tatttacagttagcagttccttccc

SEQ ID NO: 818609 - DNA, 25 bp, Homo sapien
ttacactgccatgcagggttctaag

SEQ ID NO: 818610 - DNA, 25 bp, Homo sapien
ccatgcagggttctaagtattttac

SEQ ID NO: 818611 - DNA, 25 bp, Homo sapien
cactgccatgcagggttctaagtat

SEQ ID NO: 818612 - DNA, 25 bp, Homo sapien
ctgccatgcagggttctaagtattt

SEQ ID NO: 818613 - DNA, 25 bp, Homo sapien
tggtcacccaacctggggcccagag

SEQ ID NO: 818614 - DNA, 25 bp, Homo sapien
ttggtcacccaacctggggcccaga

SEQ ID NO: 818615 - DNA, 25 bp, Homo sapien
caggtgacccttctgacccagaaaa

SEQ ID NO: 818616 - DNA, 25 bp, Homo sapien
aaatgggaatggaatcaatgtatcc

SEQ ID NO: 818617 - DNA, 25 bp, Homo sapien
tggcaacatttcaggtgacccttct

SEQ ID NO: 818618 - DNA, 25 bp, Homo sapien
tcagcagtcgaataggttggcaaca

SEQ ID NO: 818619 - DNA, 25 bp, Homo sapien
gaagtgcagttcgaatccttcacat

SEQ ID NO: 818620 - DNA, 25 bp, Homo sapien
ctccagaagtgcagttcgaatcctt

SEQ ID NO: 818621 - DNA, 25 bp, Homo sapien
gggctccaaatccttgctcgtgacc

SEQ ID NO: 818622 - DNA, 25 bp, Homo sapien
aatccttgctcgtgacctaagccca

SEQ ID NO: 818623 - DNA, 25 bp, Homo sapien
tgtctgaggaagtattgcaaaaagt

SEQ ID NO: 818624 - DNA, 25 bp, Homo sapien
gaggaagtattgcaaaaagtataaa

SEQ ID NO: 818625 - DNA, 25 bp, Homo sapien
ataaattactaatgtggttgcagtt

SEQ ID NO: 818626 - DNA, 25 bp, Homo sapien
tctgaggaagtattgcaaaaagtat

SEQ ID NO: 818627 - DNA, 25 bp, Homo sapien
tagttcaaggacaatgttctcttct

SEQ ID NO: 818628 - DNA, 25 bp, Homo sapien
ttatagttcaaggacaatgttctct

SEQ ID NO: 818629 - DNA, 25 bp, Homo sapien
tcttatagttcaaggacaatgttct

SEQ ID NO: 818630 - DNA, 25 bp, Homo sapien
tttcttatagttcaaggacaatgtt

SEQ ID NO: 818631 - DNA, 25 bp, Homo sapien
tgagtgtaaccccatctgatattcc

SEQ ID NO: 818632 - DNA, 25 bp, Homo sapien
gatattccttatgctgtcacccaat

SEQ ID NO: 818633 - DNA, 25 bp, Homo sapien
tggtgatggccccaataatagacat

SEQ ID NO: 818634 - DNA, 25 bp, Homo sapien
caagaggctttgtactttattgcat

SEQ ID NO: 818635 - DNA, 25 bp, Homo sapien
ggcagcaactggattcgtcaatatc

SEQ ID NO: 818636 - DNA, 25 bp, Homo sapien
caatcagagtggtatacttggtgtc

SEQ ID NO: 818637 - DNA, 25 bp, Homo sapien
ggagcccactcataggtaactgtat

SEQ ID NO: 818638 - DNA, 25 bp, Homo sapien
tgattctggacaggaggagcccact

SEQ ID NO: 818639 - DNA, 25 bp, Homo sapien
aagaaactctctgttccatatcatt

SEQ ID NO: 818640 - DNA, 25 bp, Homo sapien
aaactctctgttccatatcatttac

SEQ ID NO: 818641 - DNA, 25 bp, Homo sapien
taaagaaactctctgttccatatca

SEQ ID NO: 818642 - DNA, 25 bp, Homo sapien
caataaagaaactctctgttccata

SEQ ID NO: 818643 - DNA, 25 bp, Homo sapien
catgtttggaatggtctgtaggacc

SEQ ID NO: 818644 - DNA, 25 bp, Homo sapien
cagtttgtaagatctgagttactac

SEQ ID NO: 818645 - DNA, 25 bp, Homo sapien
gaagtgggttctatccaatagcagc

SEQ ID NO: 818646 - DNA, 25 bp, Homo sapien
aaacttttaggcagacatgtttgga

SEQ ID NO: 818647 - DNA, 25 bp, Homo sapien
gcatccatctcacagggaagtttga

SEQ ID NO: 818648 - DNA, 25 bp, Homo sapien
gggtgcttctatcccctccaggaat

SEQ ID NO: 818649 - DNA, 25 bp, Homo sapien
gctcagcagatttgtcctccatggc

SEQ ID NO: 818650 - DNA, 25 bp, Homo sapien
tgggagacaactcatggcactttga

SEQ ID NO: 818651 - DNA, 25 bp, Homo sapien
caaatttgtcgatgtagataataac

SEQ ID NO: 818652 - DNA, 25 bp, Homo sapien
ggaagccatccagaacaacctagtc

SEQ ID NO: 818653 - DNA, 25 bp, Homo sapien
caactttgaagagacataatttcta

SEQ ID NO: 818654 - DNA, 25 bp, Homo sapien
tgtgcccagctaagactgccatttc

SEQ ID NO: 818655 - DNA, 25 bp, Homo sapien
tctttcatactcagtttgcagcaat

SEQ ID NO: 818656 - DNA, 25 bp, Homo sapien
cttctttcatactcagtttgcagca

SEQ ID NO: 818657 - DNA, 25 bp, Homo sapien
ttcatactcagtttgcagcaatagc

SEQ ID NO: 818658 - DNA, 25 bp, Homo sapien
tttcatactcagtttgcagcaatag

SEQ ID NO: 818659 - DNA, 25 bp, Homo sapien
cagtttatcatagccagccctttcg

SEQ ID NO: 818660 - DNA, 25 bp, Homo sapien
gggtttctcgctgtcacagtaatgt

SEQ ID NO: 818661 - DNA, 25 bp, Homo sapien
taatgtctgccacagtatagcttct

SEQ ID NO: 818662 - DNA, 25 bp, Homo sapien
aaatcatgtcaaccaggagttcatg

SEQ ID NO: 818663 - DNA, 25 bp, Homo sapien
tatctccccagctagaatgctatca

SEQ ID NO: 818664 - DNA, 25 bp, Homo sapien
caggtgccaattctggttttctgcc

SEQ ID NO: 818665 - DNA, 25 bp, Homo sapien
ctgcctgggtatactcattgctgaa

SEQ ID NO: 818666 - DNA, 25 bp, Homo sapien
cgggcttgtcattgaccatcacgta

SEQ ID NO: 818667 - DNA, 25 bp, Homo sapien
taaactcaagtcctaaagcaggctg

SEQ ID NO: 818668 - DNA, 25 bp, Homo sapien
caccctgtggtaggaataatttgct

SEQ ID NO: 818669 - DNA, 25 bp, Homo sapien
tgaggtggctcatagtcaatgcatg

SEQ ID NO: 818670 - DNA, 25 bp, Homo sapien
gaattgccttgattttaacaccctg

SEQ ID NO: 818671 - DNA, 25 bp, Homo sapien
tcttcacagtaccacactcttataa

SEQ ID NO: 818672 - DNA, 25 bp, Homo sapien
taatttcattccttagccaggagtc

SEQ ID NO: 818673 - DNA, 25 bp, Homo sapien
aaaacttgttaccttatcttcacag

SEQ ID NO: 818674 - DNA, 25 bp, Homo sapien
ggagtcccttttacttgatagctca

SEQ ID NO: 818675 - DNA, 25 bp, Homo sapien
gaacgctgaaaattggcattgacat

SEQ ID NO: 818676 - DNA, 25 bp, Homo sapien
agtagaatggttgtaattataagaa

SEQ ID NO: 818677 - DNA, 25 bp, Homo sapien
gaaatatattggtgaggcacagttg

SEQ ID NO: 818678 - DNA, 25 bp, Homo sapien
gcacagttgatagagaatgaataac

SEQ ID NO: 818679 - DNA, 25 bp, Homo sapien
gatttgacgtcttgttccctaggta

SEQ ID NO: 818680 - DNA, 25 bp, Homo sapien
tgaccatggtaaccccaaagcgaga

SEQ ID NO: 818681 - DNA, 25 bp, Homo sapien
gatataaggcaagctctaccctcca

SEQ ID NO: 818682 - DNA, 25 bp, Homo sapien
gaggaacgaaatttgaggccactgc

SEQ ID NO: 818683 - DNA, 25 bp, Homo sapien
gtgaggcctggttatatatgtccat

SEQ ID NO: 818684 - DNA, 25 bp, Homo sapien
tctataagttaggtcaacccagtct

SEQ ID NO: 818685 - DNA, 25 bp, Homo sapien
gctgcaccatgcaagcaactgcttt

SEQ ID NO: 818686 - DNA, 25 bp, Homo sapien
gacatgtaatcacaggtcgaatcta

SEQ ID NO: 818687 - DNA, 25 bp, Homo sapien
gaaaaccatcccttctactggcatg

SEQ ID NO: 818688 - DNA, 25 bp, Homo sapien
ccgctgcacttctgggtcgatggca

SEQ ID NO: 818689 - DNA, 25 bp, Homo sapien
agctgaaattgttataggtcacccg

SEQ ID NO: 818690 - DNA, 25 bp, Homo sapien
aagcactctgtggatgcatgccagc

SEQ ID NO: 818691 - DNA, 25 bp, Homo sapien
cactttggatagctatggctcgata

SEQ ID NO: 818692 - DNA, 25 bp, Homo sapien
tatggctcgatacttctgggtgccc

SEQ ID NO: 818693 - DNA, 25 bp, Homo sapien
gcagaccactttggatagctatggc

SEQ ID NO: 818694 - DNA, 25 bp, Homo sapien
ggatagctatggctcgatacttctg

SEQ ID NO: 818695 - DNA, 25 bp, Homo sapien
gcctaaatcaggaaagagtaaatgc

SEQ ID NO: 818696 - DNA, 25 bp, Homo sapien
aacgtagcgccttggtattagggca

SEQ ID NO: 818697 - DNA, 25 bp, Homo sapien
taagacgaggcaataaacgtagcgc

SEQ ID NO: 818698 - DNA, 25 bp, Homo sapien
taaaaagtgtggatactgttatgcc

SEQ ID NO: 818699 - DNA, 25 bp, Homo sapien
aatgggtggcttggcttttatgtcc

SEQ ID NO: 818700 - DNA, 25 bp, Homo sapien
tagtctctgggtacaaaaactatac

SEQ ID NO: 818701 - DNA, 25 bp, Homo sapien
tatctaaatcatggcaggcaagtgc

SEQ ID NO: 818702 - DNA, 25 bp, Homo sapien
ttgatatatccatggacaggcttgg

SEQ ID NO: 818703 - DNA, 25 bp, Homo sapien
tcgccccctgctgtaacacatgctt

SEQ ID NO: 818704 - DNA, 25 bp, Homo sapien
tcactcaaaaaaggatatgaataaa

SEQ ID NO: 818705 - DNA, 25 bp, Homo sapien
ttttcactcaaaaaaggatatgaat

SEQ ID NO: 818706 - DNA, 25 bp, Homo sapien
taacacatgcttagttgcagaagca

SEQ ID NO: 818707 - DNA, 25 bp, Homo sapien
cctggctgtacccttataatgatca

SEQ ID NO: 818708 - DNA, 25 bp, Homo sapien
tgtaggctacttcctatactcctgg

SEQ ID NO: 818709 - DNA, 25 bp, Homo sapien
caagagttagcccatcagtctctca

SEQ ID NO: 818710 - DNA, 25 bp, Homo sapien
catctttactaactgatcatgcaga

SEQ ID NO: 818711 - DNA, 25 bp, Homo sapien
gtctcctgtcagtgacaggtcttca

SEQ ID NO: 818712 - DNA, 25 bp, Homo sapien
tgtctcctgtcagtgacaggtcttc

SEQ ID NO: 818713 - DNA, 25 bp, Homo sapien
cgttgtctcctgtcagtgacaggtc

SEQ ID NO: 818714 - DNA, 25 bp, Homo sapien
ttccgttgtctcctgtcagtgacag

SEQ ID NO: 818715 - DNA, 25 bp, Homo sapien
atggcccagaatcaatccgatgtgg

SEQ ID NO: 818716 - DNA, 25 bp, Homo sapien
gctgacatgatgcatggcccagaat

SEQ ID NO: 818717 - DNA, 25 bp, Homo sapien
gaatcaatccgatgtggagcaactc

SEQ ID NO: 818718 - DNA, 25 bp, Homo sapien
ttgcaagctgacatgatgcatggcc

SEQ ID NO: 818719 - DNA, 25 bp, Homo sapien
taagctctgagtgttgactattgaa

SEQ ID NO: 818720 - DNA, 25 bp, Homo sapien
aaacacagacttgacattttctaca

SEQ ID NO: 818721 - DNA, 25 bp, Homo sapien
tatatgccttgtaaatatcacggta

SEQ ID NO: 818722 - DNA, 25 bp, Homo sapien
tatcacggtatttggtaagctctga

SEQ ID NO: 818723 - DNA, 25 bp, Homo sapien
ctgcttcttccttccctgtccccat

SEQ ID NO: 818724 - DNA, 25 bp, Homo sapien
tgagctttctgcttcttccttccct

SEQ ID NO: 818725 - DNA, 25 bp, Homo sapien
ctgagctttctgcttcttccttccc

SEQ ID NO: 818726 - DNA, 25 bp, Homo sapien
tttctgcttcttccttccctgtccc

SEQ ID NO: 818727 - DNA, 25 bp, Homo sapien
agagttgggcaaagttagagccaaa

SEQ ID NO: 818728 - DNA, 25 bp, Homo sapien
gttgggcaaagttagagccaaatcc

SEQ ID NO: 818729 - DNA, 25 bp, Homo sapien
gagagttgggcaaagttagagccaa

SEQ ID NO: 818730 - DNA, 25 bp, Homo sapien
ctgagagttgggcaaagttagagcc

SEQ ID NO: 818731 - DNA, 25 bp, Homo sapien
ggtcaccatattaacactgagatca

SEQ ID NO: 818732 - DNA, 25 bp, Homo sapien
tatggtcaccatattaacactgaga

SEQ ID NO: 818733 - DNA, 25 bp, Homo sapien
ctttactatggtcaccatattaaca

SEQ ID NO: 818734 - DNA, 25 bp, Homo sapien
tactatggtcaccatattaacactg

SEQ ID NO: 818735 - DNA, 25 bp, Homo sapien
taatctgagtgggcaccatctaatc

SEQ ID NO: 818736 - DNA, 25 bp, Homo sapien
ctttaatctgagtgggcaccatcta

SEQ ID NO: 818737 - DNA, 25 bp, Homo sapien
aatctgagtgggcaccatctaatca

SEQ ID NO: 818738 - DNA, 25 bp, Homo sapien
tttaatctgagtgggcaccatctaa

SEQ ID NO: 818739 - DNA, 25 bp, Homo sapien
gcatagtggcatgggttgacagcct

SEQ ID NO: 818740 - DNA, 25 bp, Homo sapien
agatagcatagtggcatgggttgac

SEQ ID NO: 818741 - DNA, 25 bp, Homo sapien
cagaattagagatagcatagtggca

SEQ ID NO: 818742 - DNA, 25 bp, Homo sapien
cggtctggatggcagaattagagat

SEQ ID NO: 818743 - DNA, 25 bp, Homo sapien
tttgttttgatagttgttcaattcc

SEQ ID NO: 818744 - DNA, 25 bp, Homo sapien
tccatctcctcctgtatagtacttt

SEQ ID NO: 818745 - DNA, 25 bp, Homo sapien
tcctttcggggagatgattgctgga

SEQ ID NO: 818746 - DNA, 25 bp, Homo sapien
tgatagttgttcaattcctttcggg

SEQ ID NO: 818747 - DNA, 25 bp, Homo sapien
gtgatagttgcattagagccaagcc

SEQ ID NO: 818748 - DNA, 25 bp, Homo sapien
gcaggtcctggtccacctgtgatag

SEQ ID NO: 818749 - DNA, 25 bp, Homo sapien
cctggtccacctgtgatagttgcat

SEQ ID NO: 818750 - DNA, 25 bp, Homo sapien
cacctgtgatagttgcattagagcc

SEQ ID NO: 818751 - DNA, 25 bp, Homo sapien
ttacgtgttggaggccagtgacgac

SEQ ID NO: 818752 - DNA, 25 bp, Homo sapien
acagtctctttcaggagttacgtgt

SEQ ID NO: 818753 - DNA, 25 bp, Homo sapien
ttggaggccagtgacgactgcagat

SEQ ID NO: 818754 - DNA, 25 bp, Homo sapien
ttcaggagttacgtgttggaggcca

SEQ ID NO: 818755 - DNA, 25 bp, Homo sapien
ctgtcattccccgggtctgcgttgg

SEQ ID NO: 818756 - DNA, 25 bp, Homo sapien
gaagtcctgtcattccccgggtctg

SEQ ID NO: 818757 - DNA, 25 bp, Homo sapien
tcattccccgggtctgcgttggcat

SEQ ID NO: 818758 - DNA, 25 bp, Homo sapien
agactctgcccggtggggactgtct

SEQ ID NO: 818759 - DNA, 25 bp, Homo sapien
tccaaatatgacttggggacacttg

SEQ ID NO: 818760 - DNA, 25 bp, Homo sapien
tgttcccaagtgatcttattccaaa

SEQ ID NO: 818761 - DNA, 25 bp, Homo sapien
gacttggggacacttgtatgtgccg

SEQ ID NO: 818762 - DNA, 25 bp, Homo sapien
cttctttgacttgtgttcccaagtg

SEQ ID NO: 818763 - DNA, 25 bp, Homo sapien
atctgtagatcagagagcacgctgc

SEQ ID NO: 818764 - DNA, 25 bp, Homo sapien
tgattgccggcagggtttttcaccc

SEQ ID NO: 818765 - DNA, 25 bp, Homo sapien
gacttgaatgtcacagaatgctctg

SEQ ID NO: 818766 - DNA, 25 bp, Homo sapien
tgaacaatgcaaatctgtagatcag

SEQ ID NO: 818767 - DNA, 25 bp, Homo sapien
tgttgctgcttactcaggagaggca

SEQ ID NO: 818768 - DNA, 25 bp, Homo sapien
ggtgagggccgtcccctgattccaa

SEQ ID NO: 818769 - DNA, 25 bp, Homo sapien
tgggaagtccaaggtgtctgcagat

SEQ ID NO: 818770 - DNA, 25 bp, Homo sapien
agatggtgcgttgttgctgcttact

SEQ ID NO: 818771 - DNA, 25 bp, Homo sapien
tctggtttatgtttagacagttgcc

SEQ ID NO: 818772 - DNA, 25 bp, Homo sapien
tctctggtttatgtttagacagttg

SEQ ID NO: 818773 - DNA, 25 bp, Homo sapien
ggtttatgtttagacagttgccaga

SEQ ID NO: 818774 - DNA, 25 bp, Homo sapien
tatgtttagacagttgccagaaaga

SEQ ID NO: 818775 - DNA, 25 bp, Homo sapien
tgtgcttcccaaaacaccttctgta

SEQ ID NO: 818776 - DNA, 25 bp, Homo sapien
gcaatgttggcaaattactctctcc

SEQ ID NO: 818777 - DNA, 25 bp, Homo sapien
ggcagctgttttgtccaccattgta

SEQ ID NO: 818778 - DNA, 25 bp, Homo sapien
gatactagtcccatgaaatattcac

SEQ ID NO: 818779 - DNA, 25 bp, Homo sapien
atcttttccttccttgggccctcat

SEQ ID NO: 818780 - DNA, 25 bp, Homo sapien
caagacagctgcaaatcttttcctt

SEQ ID NO: 818781 - DNA, 25 bp, Homo sapien
agacagctgcaaatcttttccttcc

SEQ ID NO: 818782 - DNA, 25 bp, Homo sapien
gacagctgcaaatcttttccttcct

SEQ ID NO: 818783 - DNA, 25 bp, Homo sapien
cccatcaccaacacaaaaattggtg

SEQ ID NO: 818784 - DNA, 25 bp, Homo sapien
cataatgactggaggcatctggatt

SEQ ID NO: 818785 - DNA, 25 bp, Homo sapien
atgactggaggcatctggattcccc

SEQ ID NO: 818786 - DNA, 25 bp, Homo sapien
cttccataatgactggaggcatctg

SEQ ID NO: 818787 - DNA, 25 bp, Homo sapien
gagtaaagtccctaggctgtgtagc

SEQ ID NO: 818788 - DNA, 25 bp, Homo sapien
gcaccctcttgggtacatcatcaaa

SEQ ID NO: 818789 - DNA, 25 bp, Homo sapien
tatgccttgcatcgtctatgggagg

SEQ ID NO: 818790 - DNA, 25 bp, Homo sapien
cagagtcccctctaggtttttgtgg

SEQ ID NO: 818791 - DNA, 25 bp, Homo sapien
catcatcatgtaaatcctagggagc

SEQ ID NO: 818792 - DNA, 25 bp, Homo sapien
cctagggagcaaattttctggcaga

SEQ ID NO: 818793 - DNA, 25 bp, Homo sapien
gattttgttgccacaaggcagcatg

SEQ ID NO: 818794 - DNA, 25 bp, Homo sapien
ggtgtgctcatgaagcagcaacaaa

SEQ ID NO: 818795 - DNA, 25 bp, Homo sapien
gggtgctctggagtatgcaatcctg

SEQ ID NO: 818796 - DNA, 25 bp, Homo sapien
gctgaacaccttctgatttggaaca

SEQ ID NO: 818797 - DNA, 25 bp, Homo sapien
agtatgaagtggctgaacaccttct

SEQ ID NO: 818798 - DNA, 25 bp, Homo sapien
tccattctgatccaaatagctgcag

SEQ ID NO: 818799 - DNA, 25 bp, Homo sapien
tcaaagagttccattctgatccaaa

SEQ ID NO: 818800 - DNA, 25 bp, Homo sapien
caggccatagttaaacttagatata

SEQ ID NO: 818801 - DNA, 25 bp, Homo sapien
tggacccaggccatagttaaactta

SEQ ID NO: 818802 - DNA, 25 bp, Homo sapien
cccaggccatagttaaacttagata

SEQ ID NO: 818803 - DNA, 25 bp, Homo sapien
gacccaggccatagttaaacttaga

SEQ ID NO: 818804 - DNA, 25 bp, Homo sapien
tatctctagataaaagtgtacaggg

SEQ ID NO: 818805 - DNA, 25 bp, Homo sapien
gatgtgctggctattgggcctacag

SEQ ID NO: 818806 - DNA, 25 bp, Homo sapien
tgtacaggggaagttgccaaaatta

SEQ ID NO: 818807 - DNA, 25 bp, Homo sapien
gggcctacagaaatgcaccttctgt

SEQ ID NO: 818808 - DNA, 25 bp, Homo sapien
cgtccacctgatactctattgcaca

SEQ ID NO: 818809 - DNA, 25 bp, Homo sapien
gcacaaacaccaggattagaaattg

SEQ ID NO: 818810 - DNA, 25 bp, Homo sapien
tgcagcttgtcacaggcagagtttc

SEQ ID NO: 818811 - DNA, 25 bp, Homo sapien
tgtttttcctcccacgtctccagct

SEQ ID NO: 818812 - DNA, 25 bp, Homo sapien
gaaacagagttaggggtgtgacaca

SEQ ID NO: 818813 - DNA, 25 bp, Homo sapien
cactaataagagtatgatgacagca

SEQ ID NO: 818814 - DNA, 25 bp, Homo sapien
ctttgtggggtaataggagccagaa

SEQ ID NO: 818815 - DNA, 25 bp, Homo sapien
ttcctgttgcgggaatttgctcttc

SEQ ID NO: 818816 - DNA, 25 bp, Homo sapien
aaatcatgaaatttgtgacagagac

SEQ ID NO: 818817 - DNA, 25 bp, Homo sapien
atcatgaaatttgtgacagagacca

SEQ ID NO: 818818 - DNA, 25 bp, Homo sapien
aatcatgaaatttgtgacagagacc

SEQ ID NO: 818819 - DNA, 25 bp, Homo sapien
aagcaaatctttgccacagcctttt

SEQ ID NO: 818820 - DNA, 25 bp, Homo sapien
cattttcagtgtagtgccccatctg

SEQ ID NO: 818821 - DNA, 25 bp, Homo sapien
taatagagtgttggcaatctcctgg

SEQ ID NO: 818822 - DNA, 25 bp, Homo sapien
aatgttgacctctgccgtggatggc

SEQ ID NO: 818823 - DNA, 25 bp, Homo sapien
tgacttggcttcatttatcaggtcc

SEQ ID NO: 818824 - DNA, 25 bp, Homo sapien
gacatcttggtacgagaccataacg

SEQ ID NO: 818825 - DNA, 25 bp, Homo sapien
taacgatttgatgtaggcccactgc

SEQ ID NO: 818826 - DNA, 25 bp, Homo sapien
ttagcttcctcagtcaaaagacatc

SEQ ID NO: 818827 - DNA, 25 bp, Homo sapien
gaacaaggagccgtattcttagctt

SEQ ID NO: 818828 - DNA, 25 bp, Homo sapien
agggactggatctgctgtcccgaca

SEQ ID NO: 818829 - DNA, 25 bp, Homo sapien
tggatctgctgtcccgacatgatgg

SEQ ID NO: 818830 - DNA, 25 bp, Homo sapien
gactggatctgctgtcccgacatga

SEQ ID NO: 818831 - DNA, 25 bp, Homo sapien
tctgctgtcccgacatgatggcaag

SEQ ID NO: 818832 - DNA, 25 bp, Homo sapien
cattccaggcattgtctgatgccag

SEQ ID NO: 818833 - DNA, 25 bp, Homo sapien
ctacgatggtacaatgccatcagcc

SEQ ID NO: 818834 - DNA, 25 bp, Homo sapien
gccatcagcccttccacttttagga

SEQ ID NO: 818835 - DNA, 25 bp, Homo sapien
ttttaggaatagttccattccaggc

SEQ ID NO: 818836 - DNA, 25 bp, Homo sapien
catctgggcatatacgtgcaagtca

SEQ ID NO: 818837 - DNA, 25 bp, Homo sapien
gccatctgggcatatacgtgcaagt

SEQ ID NO: 818838 - DNA, 25 bp, Homo sapien
aggccatctgggcatatacgtgcaa

SEQ ID NO: 818839 - DNA, 25 bp, Homo sapien
cttcaggccatctgggcatatacgt

SEQ ID NO: 818840 - DNA, 25 bp, Homo sapien
ttgggaaggcaatagaaaattacag

SEQ ID NO: 818841 - DNA, 25 bp, Homo sapien
ttcttttcttttttgtgagcaacat

SEQ ID NO: 818842 - DNA, 25 bp, Homo sapien
ggaaggcaatagaaaattacagtca

SEQ ID NO: 818843 - DNA, 25 bp, Homo sapien
cttttcttttttgtgagcaacatgg

SEQ ID NO: 818844 - DNA, 25 bp, Homo sapien
gttggtgtcaccgtcagtggagcag

SEQ ID NO: 818845 - DNA, 25 bp, Homo sapien
caggcgttaggttcttcagtaaggt

SEQ ID NO: 818846 - DNA, 25 bp, Homo sapien
tcttcaggattcagcatgcatggca

SEQ ID NO: 818847 - DNA, 25 bp, Homo sapien
cccaaagtgtaatggttttgagatc

SEQ ID NO: 818848 - DNA, 25 bp, Homo sapien
cagaatggattctttcccctatcta

SEQ ID NO: 818849 - DNA, 25 bp, Homo sapien
tgggaattgataaacgacttgatag

SEQ ID NO: 818850 - DNA, 25 bp, Homo sapien
cactttgaagacagatatagtggga

SEQ ID NO: 818851 - DNA, 25 bp, Homo sapien
gactctgctcatcacccaatagtac

SEQ ID NO: 818852 - DNA, 25 bp, Homo sapien
tgctggtattgagcctctgggaacc

SEQ ID NO: 818853 - DNA, 25 bp, Homo sapien
gtgctggtattgagcctctgggaac

SEQ ID NO: 818854 - DNA, 25 bp, Homo sapien
ctccggctgtgtttgccttgcgtgc

SEQ ID NO: 818855 - DNA, 25 bp, Homo sapien
tgccttgcgtgctgcggctcatggt

SEQ ID NO: 818856 - DNA, 25 bp, Homo sapien
agagctggcaagtcgtcccagggaa

SEQ ID NO: 818857 - DNA, 25 bp, Homo sapien
gaagacaacggccttcctggaggga

SEQ ID NO: 818858 - DNA, 25 bp, Homo sapien
agggaaccgtccccacgagtcacag

SEQ ID NO: 818859 - DNA, 25 bp, Homo sapien
gggcccgtactgtcatgcctcagag

SEQ ID NO: 818860 - DNA, 25 bp, Homo sapien
tcgtccatgaagagctgtacgtccg

SEQ ID NO: 818861 - DNA, 25 bp, Homo sapien
agagctgtacgtccgccttctccgt

SEQ ID NO: 818862 - DNA, 25 bp, Homo sapien
gagtcgtcgtccatgaagagctgta

SEQ ID NO: 818863 - DNA, 25 bp, Homo sapien
ctgtaggagtcgtcgtccatgaaga

SEQ ID NO: 818864 - DNA, 25 bp, Homo sapien
tcctggtccgagtccgcgaacttct

SEQ ID NO: 818865 - DNA, 25 bp, Homo sapien
tcggcgtactcgaggccgctgtggt

SEQ ID NO: 818866 - DNA, 25 bp, Homo sapien
cttgagatgcgagttgagccggtgg

SEQ ID NO: 818867 - DNA, 25 bp, Homo sapien
ctcggggtcggcgtactcgaggccg

SEQ ID NO: 818868 - DNA, 25 bp, Homo sapien
gaccccgaactgtcagccaacctga

SEQ ID NO: 818869 - DNA, 25 bp, Homo sapien
cgaactgtcagccaacctgacgccc

SEQ ID NO: 818870 - DNA, 25 bp, Homo sapien
ctgaggagacaggacgcagggaccc

SEQ ID NO: 818871 - DNA, 25 bp, Homo sapien
acaggacgcagggaccccgaactgt

SEQ ID NO: 818872 - DNA, 25 bp, Homo sapien
tttgtcaaaggagtgcgtagtcacc

SEQ ID NO: 818873 - DNA, 25 bp, Homo sapien
ccgtcaggaacttgtacattacgta

SEQ ID NO: 818874 - DNA, 25 bp, Homo sapien
gagaattcccgcaatgaaggccagg

SEQ ID NO: 818875 - DNA, 25 bp, Homo sapien
ctgatttcaaagagggcatggctgc

SEQ ID NO: 818876 - DNA, 25 bp, Homo sapien
tactgcttgggaactgatgcgcgtt

SEQ ID NO: 818877 - DNA, 25 bp, Homo sapien
aatatgcccatgtttcagaaagccg

SEQ ID NO: 818878 - DNA, 25 bp, Homo sapien
tcatccaattctactgtcagcggca

SEQ ID NO: 818879 - DNA, 25 bp, Homo sapien
ttgttttaccccaagcacaggcagt

SEQ ID NO: 818880 - DNA, 25 bp, Homo sapien
ttcctctgggtcccatccttgccat

SEQ ID NO: 818881 - DNA, 25 bp, Homo sapien
tttcctctgggtcccatccttgcca

SEQ ID NO: 818882 - DNA, 25 bp, Homo sapien
cctttcctctgggtcccatccttgc

SEQ ID NO: 818883 - DNA, 25 bp, Homo sapien
ctccctttcctctgggtcccatcct

SEQ ID NO: 818884 - DNA, 25 bp, Homo sapien
cattatcccgcagctggagttttca

SEQ ID NO: 818885 - DNA, 25 bp, Homo sapien
tcctatcaatatacagtgggcttcc

SEQ ID NO: 818886 - DNA, 25 bp, Homo sapien
gaaagttctctacagtttaggacac

SEQ ID NO: 818887 - DNA, 25 bp, Homo sapien
taattatatgccacttccatttgtg

SEQ ID NO: 818888 - DNA, 25 bp, Homo sapien
cacaatatgctatgcggtcactcag

SEQ ID NO: 818889 - DNA, 25 bp, Homo sapien
tggcaatcttggcaccttcaacata

SEQ ID NO: 818890 - DNA, 25 bp, Homo sapien
caaatcttatgtgccaactcaggga

SEQ ID NO: 818891 - DNA, 25 bp, Homo sapien
ggaagcctagctttgttgactataa

SEQ ID NO: 818892 - DNA, 25 bp, Homo sapien
tgggttctcaacatcacaaatagtt

SEQ ID NO: 818893 - DNA, 25 bp, Homo sapien
gagcagagaatctaatgatcctccg

SEQ ID NO: 818894 - DNA, 25 bp, Homo sapien
tgatcctccgacatcaaacttaagt

SEQ ID NO: 818895 - DNA, 25 bp, Homo sapien
tgtgttccctcattttggagcagag

SEQ ID NO: 818896 - DNA, 25 bp, Homo sapien
aatagacctattttgaaggcagaat

SEQ ID NO: 818897 - DNA, 25 bp, Homo sapien
tataacaagatgacctcaaattggc

SEQ ID NO: 818898 - DNA, 25 bp, Homo sapien
taaccaaatccacttcacttagaat

SEQ ID NO: 818899 - DNA, 25 bp, Homo sapien
ctcaaattggcctattaaaaggctg

SEQ ID NO: 818900 - DNA, 25 bp, Homo sapien
caaaaggtattataaatagatgctg

SEQ ID NO: 818901 - DNA, 25 bp, Homo sapien
ctggaccaggctagatcggatattc

SEQ ID NO: 818902 - DNA, 25 bp, Homo sapien
aacagtgaggacatccttgaccctt

SEQ ID NO: 818903 - DNA, 25 bp, Homo sapien
ggatattccctcattgtatttctaa

SEQ ID NO: 818904 - DNA, 25 bp, Homo sapien
cctgagggtttacttcctgatagcc

SEQ ID NO: 818905 - DNA, 25 bp, Homo sapien
tgcttaagtcttcacacttccctga

SEQ ID NO: 818906 - DNA, 25 bp, Homo sapien
ctgcttaagtcttcacacttccctg

SEQ ID NO: 818907 - DNA, 25 bp, Homo sapien
tttacttcctgatagcctttcctgc

SEQ ID NO: 818908 - DNA, 25 bp, Homo sapien
gccaccctcttggtaacgtgagttc

SEQ ID NO: 818909 - DNA, 25 bp, Homo sapien
ggtccttgcctaaagtagatgctgg

SEQ ID NO: 818910 - DNA, 25 bp, Homo sapien
catgaatgtcttagtgcctgccacc

SEQ ID NO: 818911 - DNA, 25 bp, Homo sapien
ggataattggatcacagcgggtaga

SEQ ID NO: 818912 - DNA, 25 bp, Homo sapien
ggcagaaccattaggcaggtcttta

SEQ ID NO: 818913 - DNA, 25 bp, Homo sapien
cattaggcaggtctttacaaaaggc

SEQ ID NO: 818914 - DNA, 25 bp, Homo sapien
acacaatggagcaatgataacatct

SEQ ID NO: 818915 - DNA, 25 bp, Homo sapien
ctcttccatattgtctgcactgaag

SEQ ID NO: 818916 - DNA, 25 bp, Homo sapien
ctggctcagttgcaggctgacagaa

SEQ ID NO: 818917 - DNA, 25 bp, Homo sapien
aatcctggctcagttgcaggctgac

SEQ ID NO: 818918 - DNA, 25 bp, Homo sapien
tgacagaagagaagcatcgtcctac

SEQ ID NO: 818919 - DNA, 25 bp, Homo sapien
tcaatcctggctcagttgcaggctg

SEQ ID NO: 818920 - DNA, 25 bp, Homo sapien
ttacagtatcccaatctccagacct

SEQ ID NO: 818921 - DNA, 25 bp, Homo sapien
atctccagacctggggtccaagtat

SEQ ID NO: 818922 - DNA, 25 bp, Homo sapien
aatctccagacctggggtccaagta

SEQ ID NO: 818923 - DNA, 25 bp, Homo sapien
cagtatcccaatctccagacctggg

SEQ ID NO: 818924 - DNA, 25 bp, Homo sapien
tctgcctttaaatctaagtggtgtc

SEQ ID NO: 818925 - DNA, 25 bp, Homo sapien
acatttctaaatgtggttgctcatc

SEQ ID NO: 818926 - DNA, 25 bp, Homo sapien
tgtactaaagcaaaactgtctgcct

SEQ ID NO: 818927 - DNA, 25 bp, Homo sapien
taggaaatgaacagaacagtggtgc

SEQ ID NO: 818928 - DNA, 25 bp, Homo sapien
taatcagaacagtgcaatcttacca

SEQ ID NO: 818929 - DNA, 25 bp, Homo sapien
taagcaatctgattagagcaacatt

SEQ ID NO: 818930 - DNA, 25 bp, Homo sapien
catcttgttaaataggcctgtagga

SEQ ID NO: 818931 - DNA, 25 bp, Homo sapien
tatagttactataatcgttgtgtgc

SEQ ID NO: 818932 - DNA, 25 bp, Homo sapien
tatgcatgtagttcagtagcccaag

SEQ ID NO: 818933 - DNA, 25 bp, Homo sapien
gattatgcgtcccatctaaggatgc

SEQ ID NO: 818934 - DNA, 25 bp, Homo sapien
atgcccggcccagaaataatgagat

SEQ ID NO: 818935 - DNA, 25 bp, Homo sapien
catcacactgaaataggactctaca

SEQ ID NO: 818936 - DNA, 25 bp, Homo sapien
tctttagggcacatggttccagcag

SEQ ID NO: 818937 - DNA, 25 bp, Homo sapien
cacgcttcggcattgtctttagggc

SEQ ID NO: 818938 - DNA, 25 bp, Homo sapien
tctgatttctctgactgcagcatgg

SEQ ID NO: 818939 - DNA, 25 bp, Homo sapien
tgccgcaacagtcaacagcacagag

SEQ ID NO: 818940 - DNA, 25 bp, Homo sapien
tgaagcccaggtgctagcttgggac

SEQ ID NO: 818941 - DNA, 25 bp, Homo sapien
gcttgggacagctcttacaactgag

SEQ ID NO: 818942 - DNA, 25 bp, Homo sapien
cgagtgaggaggttacatgaagccc

SEQ ID NO: 818943 - DNA, 25 bp, Homo sapien
tacaactgaggacatgaaactgcct

SEQ ID NO: 818944 - DNA, 25 bp, Homo sapien
gctcattgaatgtgcctctttgggc

SEQ ID NO: 818945 - DNA, 25 bp, Homo sapien
tctgatacagcatagtggaacctcc

SEQ ID NO: 818946 - DNA, 25 bp, Homo sapien
cactctgtccgtccttggttattga

SEQ ID NO: 818947 - DNA, 25 bp, Homo sapien
cctcctatgttgagtgcgatgtaga

SEQ ID NO: 818948 - DNA, 25 bp, Homo sapien
aagccccattccttcaggtggcaga

SEQ ID NO: 818949 - DNA, 25 bp, Homo sapien
ccacccagcttgattaagtatcatt

SEQ ID NO: 818950 - DNA, 25 bp, Homo sapien
aactgtcaaagtcccatgtgaattg

SEQ ID NO: 818951 - DNA, 25 bp, Homo sapien
aggtggcagaaacttaatttcagtc

SEQ ID NO: 818952 - DNA, 25 bp, Homo sapien
taggcacatccccaaggttctggca

SEQ ID NO: 818953 - DNA, 25 bp, Homo sapien
agagagcgagtgagaacgtttctcc

SEQ ID NO: 818954 - DNA, 25 bp, Homo sapien
aggtttgttctgctcgcggttggcc

SEQ ID NO: 818955 - DNA, 25 bp, Homo sapien
gtgctgcgccgggtctaggcacatc

SEQ ID NO: 818956 - DNA, 25 bp, Homo sapien
ctccgagtctacgtatttgccccca

SEQ ID NO: 818957 - DNA, 25 bp, Homo sapien
cgagtctacgtatttgcccccagac

SEQ ID NO: 818958 - DNA, 25 bp, Homo sapien
ccgagtctacgtatttgcccccaga

SEQ ID NO: 818959 - DNA, 25 bp, Homo sapien
tccgagtctacgtatttgcccccag

SEQ ID NO: 818960 - DNA, 25 bp, Homo sapien
cagcagtcgggatatttggagaggc

SEQ ID NO: 818961 - DNA, 25 bp, Homo sapien
tagacccatccagaaaacgcgtcct

SEQ ID NO: 818962 - DNA, 25 bp, Homo sapien
tgggcccaacagacccaatctcagg

SEQ ID NO: 818963 - DNA, 25 bp, Homo sapien
aggcagatagcagaagcggacactc

SEQ ID NO: 818964 - DNA, 25 bp, Homo sapien
gggggtcccgcgacaagggagcatc

SEQ ID NO: 818965 - DNA, 25 bp, Homo sapien
gtctgggcgcctggcggagagtccc

SEQ ID NO: 818966 - DNA, 25 bp, Homo sapien
cacctcttcgaacccccagcaggca

SEQ ID NO: 818967 - DNA, 25 bp, Homo sapien
cgccgcctgcgggacctgccggtct

SEQ ID NO: 818968 - DNA, 25 bp, Homo sapien
caagaactttggaaagtgcaaacac

SEQ ID NO: 818969 - DNA, 25 bp, Homo sapien
ggaggtctacctctctcggaacacc

SEQ ID NO: 818970 - DNA, 25 bp, Homo sapien
tacgtgttggaagacgaggtttcca

SEQ ID NO: 818971 - DNA, 25 bp, Homo sapien
gacgccaagatgcagaaggagttct

SEQ ID NO: 818972 - DNA, 25 bp, Homo sapien
cgtgcacagaaaccgcctgcgcgta

SEQ ID NO: 818973 - DNA, 25 bp, Homo sapien
cgacagctacggctccgtgcacaga

SEQ ID NO: 818974 - DNA, 25 bp, Homo sapien
tttttaagaggatctcgcagaggac

SEQ ID NO: 818975 - DNA, 25 bp, Homo sapien
ccgcctgcgcgtagccagcttttta

SEQ ID NO: 818976 - DNA, 25 bp, Homo sapien
gggaaacctcgagctcgaaatcgaa

SEQ ID NO: 818977 - DNA, 25 bp, Homo sapien
gaaaaacaagcgatgagaagtcagc

SEQ ID NO: 818978 - DNA, 25 bp, Homo sapien
aacaagcgatgagaagtcagcctgg

SEQ ID NO: 818979 - DNA, 25 bp, Homo sapien
acctcgagctcgaaatcgaactaac

SEQ ID NO: 818980 - DNA, 25 bp, Homo sapien
tcgcggttgaccaggtcgatctcct

SEQ ID NO: 818981 - DNA, 25 bp, Homo sapien
cagctcgtctgccatggccttgttg

SEQ ID NO: 818982 - DNA, 25 bp, Homo sapien
gtacacttgcttctcgctcagctcg

SEQ ID NO: 818983 - DNA, 25 bp, Homo sapien
tcgatctccttggtgtgcgcgtcgt

SEQ ID NO: 818984 - DNA, 25 bp, Homo sapien
cttgaccacgtcatcgttgaggtgt

SEQ ID NO: 818985 - DNA, 25 bp, Homo sapien
cctctctgactcatcccgggagatt

SEQ ID NO: 818986 - DNA, 25 bp, Homo sapien
ttttccatctgtgttgaagtctctt

SEQ ID NO: 818987 - DNA, 25 bp, Homo sapien
ccatctgtgttgaagtctcttttcc

SEQ ID NO: 818988 - DNA, 25 bp, Homo sapien
ctcatcccgggagattcgcttgctc

SEQ ID NO: 818989 - DNA, 25 bp, Homo sapien
tcatcggccaggcactctttgggca

SEQ ID NO: 818990 - DNA, 25 bp, Homo sapien
gccaggcatctgagtgagactgcca

SEQ ID NO: 818991 - DNA, 25 bp, Homo sapien
tctctgtagggcattctctgaagtc

SEQ ID NO: 818992 - DNA, 25 bp, Homo sapien
aagtcccctctaggccaggcatctg

SEQ ID NO: 818993 - DNA, 25 bp, Homo sapien
caatggtttatgtgcaagcatgcca

SEQ ID NO: 818994 - DNA, 25 bp, Homo sapien
caacatagttcccatgaaaggcagg

SEQ ID NO: 818995 - DNA, 25 bp, Homo sapien
tcccttggtagttgcatagcctgtg

SEQ ID NO: 818996 - DNA, 25 bp, Homo sapien
tagcctgtggatcatgcagatttcc

SEQ ID NO: 818997 - DNA, 25 bp, Homo sapien
aggacactgtcatctctttccatat

SEQ ID NO: 818998 - DNA, 25 bp, Homo sapien
ggacactgtcatctctttccatatt

SEQ ID NO: 818999 - DNA, 25 bp, Homo sapien
ttacaatgtactggtgtggtcccac

SEQ ID NO: 819000 - DNA, 25 bp, Homo sapien
ctgcttttacaatgtactggtgtgg

SEQ ID NO: 819001 - DNA, 25 bp, Homo sapien
cttttacaatgtactggtgtggtcc

SEQ ID NO: 819002 - DNA, 25 bp, Homo sapien
caatgtactggtgtggtcccacaaa

SEQ ID NO: 819003 - DNA, 25 bp, Homo sapien
cactctggacttaagggcaatgcca

SEQ ID NO: 819004 - DNA, 25 bp, Homo sapien
gacacctaggagattagccttatcc

SEQ ID NO: 819005 - DNA, 25 bp, Homo sapien
cagcagcagatggtatattttggca

SEQ ID NO: 819006 - DNA, 25 bp, Homo sapien
gtctgccagacacctaggagattag

SEQ ID NO: 819007 - DNA, 25 bp, Homo sapien
ctaggaggggaagagttgtgaacat

SEQ ID NO: 819008 - DNA, 25 bp, Homo sapien
cagagcagacccgaagcaggtctgc

SEQ ID NO: 819009 - DNA, 25 bp, Homo sapien
agacccgaagcaggtctgccttgag

SEQ ID NO: 819010 - DNA, 25 bp, Homo sapien
gagcagacccgaagcaggtctgcct

SEQ ID NO: 819011 - DNA, 25 bp, Homo sapien
gcagacccgaagcaggtctgccttg

SEQ ID NO: 819012 - DNA, 25 bp, Homo sapien
cagatgagtgccatcgggatgccaa

SEQ ID NO: 819013 - DNA, 25 bp, Homo sapien
tagatggaatagacacggctgatgc

SEQ ID NO: 819014 - DNA, 25 bp, Homo sapien
tcttaatgcatggtacaactgccca

SEQ ID NO: 819015 - DNA, 25 bp, Homo sapien
caaatgccgtcaaaactgtgtgtcc

SEQ ID NO: 819016 - DNA, 25 bp, Homo sapien
tcaaccaagataattcaattcataa

SEQ ID NO: 819017 - DNA, 25 bp, Homo sapien
attgttgctgtattagcaacttgga

SEQ ID NO: 819018 - DNA, 25 bp, Homo sapien
attcaattcataaattgttgctgta

SEQ ID NO: 819019 - DNA, 25 bp, Homo sapien
ttgctgtattagcaacttggaactt

SEQ ID NO: 819020 - DNA, 25 bp, Homo sapien
gagagctcagccctattggtccact

SEQ ID NO: 819021 - DNA, 25 bp, Homo sapien
catgtgtcacagcataacagacggt

SEQ ID NO: 819022 - DNA, 25 bp, Homo sapien
tcagaaacacgcatggaaaactagg

SEQ ID NO: 819023 - DNA, 25 bp, Homo sapien
cccactacggataaagatgttgcca

SEQ ID NO: 819024 - DNA, 25 bp, Homo sapien
tgtaacctttacaggacatgcatga

SEQ ID NO: 819025 - DNA, 25 bp, Homo sapien
cacactatgcacatgctcattacat

SEQ ID NO: 819026 - DNA, 25 bp, Homo sapien
cacacactatgcacatgctcattac

SEQ ID NO: 819027 - DNA, 25 bp, Homo sapien
acactatgcacatgctcattacata

SEQ ID NO: 819028 - DNA, 25 bp, Homo sapien
gagaccattaccccccacaaacaca

SEQ ID NO: 819029 - DNA, 25 bp, Homo sapien
ccgcacaggatgtgaagatgcatta

SEQ ID NO: 819030 - DNA, 25 bp, Homo sapien
cacaggatgtgaagatgcattagat

SEQ ID NO: 819031 - DNA, 25 bp, Homo sapien
gtgaagatgcattagatttgaccat

SEQ ID NO: 819032 - DNA, 25 bp, Homo sapien
gatgtgaagatgcattagatttgac

SEQ ID NO: 819033 - DNA, 25 bp, Homo sapien
cagtcttctgggcattacttggaag

SEQ ID NO: 819034 - DNA, 25 bp, Homo sapien
ttgcaggataggaaggtcacagcca

SEQ ID NO: 819035 - DNA, 25 bp, Homo sapien
gtcacagccaaatgatctgggccca

SEQ ID NO: 819036 - DNA, 25 bp, Homo sapien
gtggcagagacattgagaatagggt

SEQ ID NO: 819037 - DNA, 25 bp, Homo sapien
cgtatctcaaactgtctccttgggc

SEQ ID NO: 819038 - DNA, 25 bp, Homo sapien
caaactgtctccttgggcagtatgg

SEQ ID NO: 819039 - DNA, 25 bp, Homo sapien
tctcaaactgtctccttgggcagta

SEQ ID NO: 819040 - DNA, 25 bp, Homo sapien
ccacgtatctcaaactgtctccttg

SEQ ID NO: 819041 - DNA, 25 bp, Homo sapien
gactcactgtgcgaccatggaaaat

SEQ ID NO: 819042 - DNA, 25 bp, Homo sapien
tctgactcactgtgcgaccatggaa

SEQ ID NO: 819043 - DNA, 25 bp, Homo sapien
ctgactcactgtgcgaccatggaaa

SEQ ID NO: 819044 - DNA, 25 bp, Homo sapien
ctcactgtgcgaccatggaaaattc

SEQ ID NO: 819045 - DNA, 25 bp, Homo sapien
aaaagaggcaggaactactgccacg

SEQ ID NO: 819046 - DNA, 25 bp, Homo sapien
gcaggaactactgccacgataatgg

SEQ ID NO: 819047 - DNA, 25 bp, Homo sapien
gaactactgccacgataatggtagc

SEQ ID NO: 819048 - DNA, 25 bp, Homo sapien
tgccacgataatggtagcaggagga

SEQ ID NO: 819049 - DNA, 25 bp, Homo sapien
aatcttcttgactgaacacccaaga

SEQ ID NO: 819050 - DNA, 25 bp, Homo sapien
cttgactgaacacccaagaggccat

SEQ ID NO: 819051 - DNA, 25 bp, Homo sapien
gcacttctttgggacgcctatgttt

SEQ ID NO: 819052 - DNA, 25 bp, Homo sapien
tcctagactgaattcccccaaatct

SEQ ID NO: 819053 - DNA, 25 bp, Homo sapien
tgggtggcatgaggaaccataaaca

SEQ ID NO: 819054 - DNA, 25 bp, Homo sapien
ctgtgggtggcatgaggaaccataa

SEQ ID NO: 819055 - DNA, 25 bp, Homo sapien
ggcatgaggaaccataaacataatc

SEQ ID NO: 819056 - DNA, 25 bp, Homo sapien
ctggaagtgtcactgtgggtggcat

SEQ ID NO: 819057 - DNA, 25 bp, Homo sapien
ctttgtttctgcattcctcacatct

SEQ ID NO: 819058 - DNA, 25 bp, Homo sapien
ttctcttctttgtttctgcattcct

SEQ ID NO: 819059 - DNA, 25 bp, Homo sapien
ctcttctttgtttctgcattcctca

SEQ ID NO: 819060 - DNA, 25 bp, Homo sapien
cttctttgtttctgcattcctcaca

SEQ ID NO: 819061 - DNA, 25 bp, Homo sapien
gagaagttttctcgccctggctgcg

SEQ ID NO: 819062 - DNA, 25 bp, Homo sapien
gagataagcgggaccgagtctcccc

SEQ ID NO: 819063 - DNA, 25 bp, Homo sapien
ctaggtggagaagttttctcgccct

SEQ ID NO: 819064 - DNA, 25 bp, Homo sapien
ctgaagttagcacagccggagataa

SEQ ID NO: 819065 - DNA, 25 bp, Homo sapien
gtcagcggcgcaaggaccacacgcg

SEQ ID NO: 819066 - DNA, 25 bp, Homo sapien
ctggctcgcgccctccactcggctc

SEQ ID NO: 819067 - DNA, 25 bp, Homo sapien
cctcctctcagcaagtcagctgtcg

SEQ ID NO: 819068 - DNA, 25 bp, Homo sapien
gctgtcgccccgcatctggctcgcg

SEQ ID NO: 819069 - DNA, 25 bp, Homo sapien
tcggagtaaattctgcattgacaat

SEQ ID NO: 819070 - DNA, 25 bp, Homo sapien
ttaattatcgggtcagcactacgac

SEQ ID NO: 819071 - DNA, 25 bp, Homo sapien
cattgacaatagtcagggaaagtac

SEQ ID NO: 819072 - DNA, 25 bp, Homo sapien
tatgaatgggaaaccgtacttcgga

SEQ ID NO: 819073 - DNA, 25 bp, Homo sapien
gtaacagcctcccatactagagaag

SEQ ID NO: 819074 - DNA, 25 bp, Homo sapien
tgtgggctttagtgtcagacagact

SEQ ID NO: 819075 - DNA, 25 bp, Homo sapien
gggtgagaccactccaaatacctgg

SEQ ID NO: 819076 - DNA, 25 bp, Homo sapien
gaagttggcacagtcccttgggtga

SEQ ID NO: 819077 - DNA, 25 bp, Homo sapien
gaattactaggctaaatttagcttc

SEQ ID NO: 819078 - DNA, 25 bp, Homo sapien
taatgactaggttgatatttaaact

SEQ ID NO: 819079 - DNA, 25 bp, Homo sapien
tcaagtaaaggaactgtggttcaca

SEQ ID NO: 819080 - DNA, 25 bp, Homo sapien
cattgttttcttgagcgcatgtaga

SEQ ID NO: 819081 - DNA, 25 bp, Homo sapien
aggtccctctgttgacgctgccaca

SEQ ID NO: 819082 - DNA, 25 bp, Homo sapien
aaagacatgtcgctggcaggtccct

SEQ ID NO: 819083 - DNA, 25 bp, Homo sapien
gacattctggatgggtgtttccgcg

SEQ ID NO: 819084 - DNA, 25 bp, Homo sapien
taggtgtcgacaactagagccatgt

SEQ ID NO: 819085 - DNA, 25 bp, Homo sapien
tctgtggggagaatatgcagtgaac

SEQ ID NO: 819086 - DNA, 25 bp, Homo sapien
ctgggctcttctatctgtggggaga

SEQ ID NO: 819087 - DNA, 25 bp, Homo sapien
tggctgggctcttctatctgtgggg

SEQ ID NO: 819088 - DNA, 25 bp, Homo sapien
tcttctatctgtggggagaatatgc

SEQ ID NO: 819089 - DNA, 25 bp, Homo sapien
taaagcagtgctcatgattgggtcc

SEQ ID NO: 819090 - DNA, 25 bp, Homo sapien
tgaaaggactttggctcccagggcg

SEQ ID NO: 819091 - DNA, 25 bp, Homo sapien
gaatctggcttgctttgtgcgaaca

SEQ ID NO: 819092 - DNA, 25 bp, Homo sapien
ctatttgtctagcaagctgggcccc

SEQ ID NO: 819093 - DNA, 25 bp, Homo sapien
tttctaatttatacctcacagttta

SEQ ID NO: 819094 - DNA, 25 bp, Homo sapien
taatttatacctcacagtttataag

SEQ ID NO: 819095 - DNA, 25 bp, Homo sapien
cagtttataagtggggaactgatgt

SEQ ID NO: 819096 - DNA, 25 bp, Homo sapien
tttatacctcacagtttataagtgg

SEQ ID NO: 819097 - DNA, 25 bp, Homo sapien
gaatttcattggctaatcctgtctg

SEQ ID NO: 819098 - DNA, 25 bp, Homo sapien
atttcattggctaatcctgtctgtt

SEQ ID NO: 819099 - DNA, 25 bp, Homo sapien
tgaatttcattggctaatcctgtct

SEQ ID NO: 819100 - DNA, 25 bp, Homo sapien
aatttcattggctaatcctgtctgt

SEQ ID NO: 819101 - DNA, 25 bp, Homo sapien
tcaggtgtggctagtgcattttggg

SEQ ID NO: 819102 - DNA, 25 bp, Homo sapien
caggtgtggctagtgcattttggga

SEQ ID NO: 819103 - DNA, 25 bp, Homo sapien
gcagtgactccctgagcctatgaga

SEQ ID NO: 819104 - DNA, 25 bp, Homo sapien
tgcatgcggcatagttaacgcttca

SEQ ID NO: 819105 - DNA, 25 bp, Homo sapien
catgttttctaacaccccaagggtg

SEQ ID NO: 819106 - DNA, 25 bp, Homo sapien
tcatgaattaatataacccacgggt

SEQ ID NO: 819107 - DNA, 25 bp, Homo sapien
gggcacatatctgggctctgaatca

SEQ ID NO: 819108 - DNA, 25 bp, Homo sapien
tggccactgataaggcagaagtctg

SEQ ID NO: 819109 - DNA, 25 bp, Homo sapien
caggatcctagattcggttaccaca

SEQ ID NO: 819110 - DNA, 25 bp, Homo sapien
gaataggaagtcaacatggctcagc

SEQ ID NO: 819111 - DNA, 25 bp, Homo sapien
ttttatctagggcacgatttgaagt

SEQ ID NO: 819112 - DNA, 25 bp, Homo sapien
ctagggcacgatttgaagtatcatc

SEQ ID NO: 819113 - DNA, 25 bp, Homo sapien
tctccttttatctagggcacgattt

SEQ ID NO: 819114 - DNA, 25 bp, Homo sapien
aagtatcatctaccattttaatgtc

SEQ ID NO: 819115 - DNA, 25 bp, Homo sapien
ggtctagttttatcttattggcatc

SEQ ID NO: 819116 - DNA, 25 bp, Homo sapien
tagttttatcttattggcatcaatg

SEQ ID NO: 819117 - DNA, 25 bp, Homo sapien
aaatagattgggtggagttgaggag

SEQ ID NO: 819118 - DNA, 25 bp, Homo sapien
agcactttggagacaaatagattgg

SEQ ID NO: 819119 - DNA, 25 bp, Homo sapien
taccaagcacgtacttggtgccttt

SEQ ID NO: 819120 - DNA, 25 bp, Homo sapien
cttggtgcctttgaatgttgccact

SEQ ID NO: 819121 - DNA, 25 bp, Homo sapien
ctctgtaccaagcacgtacttggtg

SEQ ID NO: 819122 - DNA, 25 bp, Homo sapien
ggtgcctttgaatgttgccactggg

SEQ ID NO: 819123 - DNA, 25 bp, Homo sapien
ttgggtctagcctctacatagggag

SEQ ID NO: 819124 - DNA, 25 bp, Homo sapien
gggagacaaaagattgacacgtaca

SEQ ID NO: 819125 - DNA, 25 bp, Homo sapien
gttgatagttacattctgaaaacac

SEQ ID NO: 819126 - DNA, 25 bp, Homo sapien
tagctaactgatgcaaagtataaga

SEQ ID NO: 819127 - DNA, 25 bp, Homo sapien
ctatcgtttgtcaatcctggcaaat

SEQ ID NO: 819128 - DNA, 25 bp, Homo sapien
tcgtttgtcaatcctggcaaatgct

SEQ ID NO: 819129 - DNA, 25 bp, Homo sapien
tgtcaatcctggcaaatgcttctac

SEQ ID NO: 819130 - DNA, 25 bp, Homo sapien
tatcgtttgtcaatcctggcaaatg

SEQ ID NO: 819131 - DNA, 25 bp, Homo sapien
ctcaggagccgatgcgatcaactgg

SEQ ID NO: 819132 - DNA, 25 bp, Homo sapien
gcaaggcaggccaacgttcagattc

SEQ ID NO: 819133 - DNA, 25 bp, Homo sapien
gggtatcagcaatggaagatgaaat

SEQ ID NO: 819134 - DNA, 25 bp, Homo sapien
aaggcaggccaacgttcagattcag

SEQ ID NO: 819135 - DNA, 25 bp, Homo sapien
cgaatattgcgcttttcggaccggc

SEQ ID NO: 819136 - DNA, 25 bp, Homo sapien
aatattgcgcttttcggaccggctt

SEQ ID NO: 819137 - DNA, 25 bp, Homo sapien
tattgcgcttttcggaccggcttaa

SEQ ID NO: 819138 - DNA, 25 bp, Homo sapien
cccgaatattgcgcttttcggaccg

SEQ ID NO: 819139 - DNA, 25 bp, Homo sapien
cttcagtgcagggctaggactaagc

SEQ ID NO: 819140 - DNA, 25 bp, Homo sapien
taagtcaacgcgctgcaaagctgtg

SEQ ID NO: 819141 - DNA, 25 bp, Homo sapien
tgttcgatattcatcacggcgcgct

SEQ ID NO: 819142 - DNA, 25 bp, Homo sapien
caagattagctatggtgaggtctcc

SEQ ID NO: 819143 - DNA, 25 bp, Homo sapien
ggacttcgctgaattgacccatgaa

SEQ ID NO: 819144 - DNA, 25 bp, Homo sapien
gctggggctgtagcttgtgttccca

SEQ ID NO: 819145 - DNA, 25 bp, Homo sapien
gattcactttgcacccaacagctgg

SEQ ID NO: 819146 - DNA, 25 bp, Homo sapien
attcactttgcacccaacagctggg

SEQ ID NO: 819147 - DNA, 25 bp, Homo sapien
ctgtagcttgtgttcccagccagag

SEQ ID NO: 819148 - DNA, 25 bp, Homo sapien
ggagaaaattcacatgaggggttga

SEQ ID NO: 819149 - DNA, 25 bp, Homo sapien
acatgaggggttgatggtcctgatc

SEQ ID NO: 819150 - DNA, 25 bp, Homo sapien
gggttgatggtcctgatcgagaaac

SEQ ID NO: 819151 - DNA, 25 bp, Homo sapien
gatggtcctgatcgagaaaccacaa

SEQ ID NO: 819152 - DNA, 25 bp, Homo sapien
agcccaagccattcaatgggatctt

SEQ ID NO: 819153 - DNA, 25 bp, Homo sapien
cccaagccattcaatgggatcttcg

SEQ ID NO: 819154 - DNA, 25 bp, Homo sapien
aagccattcaatgggatcttcgtga

SEQ ID NO: 819155 - DNA, 25 bp, Homo sapien
gcagcccaagccattcaatgggatc

SEQ ID NO: 819156 - DNA, 25 bp, Homo sapien
cacacatttgtcgtggcaccagcca

SEQ ID NO: 819157 - DNA, 25 bp, Homo sapien
gttgagtccatgtcccgctcaggca

SEQ ID NO: 819158 - DNA, 25 bp, Homo sapien
agacagatctgttgagtccatgtcc

SEQ ID NO: 819159 - DNA, 25 bp, Homo sapien
ggcattcctccgatcgcacacattt

SEQ ID NO: 819160 - DNA, 25 bp, Homo sapien
catgggtgttgaccctccacttgcc

SEQ ID NO: 819161 - DNA, 25 bp, Homo sapien
acccatgggtgttgaccctccactt

SEQ ID NO: 819162 - DNA, 25 bp, Homo sapien
gccacccatgggtgttgaccctcca

SEQ ID NO: 819163 - DNA, 25 bp, Homo sapien
agccacccatgggtgttgaccctcc

SEQ ID NO: 819164 - DNA, 25 bp, Homo sapien
agaagtatagatgttagtatagtca

SEQ ID NO: 819165 - DNA, 25 bp, Homo sapien
gtatagatgttagtatagtcatccg

SEQ ID NO: 819166 - DNA, 25 bp, Homo sapien
gatgttagtatagtcatccgttgag

SEQ ID NO: 819167 - DNA, 25 bp, Homo sapien
tatagtcatccgttgagcctttgct

SEQ ID NO: 819168 - DNA, 25 bp, Homo sapien
gacccaacaatggctggcaaactct

SEQ ID NO: 819169 - DNA, 25 bp, Homo sapien
ccttggatagacccaacaatggctg

SEQ ID NO: 819170 - DNA, 25 bp, Homo sapien
ctggcaaactctgagttatcctgaa

SEQ ID NO: 819171 - DNA, 25 bp, Homo sapien
ttggatagacccaacaatggctggc

SEQ ID NO: 819172 - DNA, 25 bp, Homo sapien
tatacgccttgctctgtgcactggc

SEQ ID NO: 819173 - DNA, 25 bp, Homo sapien
tgtttgcccagttgcattcagcagc

SEQ ID NO: 819174 - DNA, 25 bp, Homo sapien
cactggctgcgtgcactacattctg

SEQ ID NO: 819175 - DNA, 25 bp, Homo sapien
ggttgctatggtattccccacccag

SEQ ID NO: 819176 - DNA, 25 bp, Homo sapien
tcttcatcagccttcggactgagct

SEQ ID NO: 819177 - DNA, 25 bp, Homo sapien
tcataactctgattgtaactcttca

SEQ ID NO: 819178 - DNA, 25 bp, Homo sapien
gccttcggactgagctcttatcaaa

SEQ ID NO: 819179 - DNA, 25 bp, Homo sapien
tccttcatgtgctctataagccaag

SEQ ID NO: 819180 - DNA, 25 bp, Homo sapien
agtagaaacacgttgggcccagact

SEQ ID NO: 819181 - DNA, 25 bp, Homo sapien
tgggccattctgaagtgaattcatc

SEQ ID NO: 819182 - DNA, 25 bp, Homo sapien
gggccattctgaagtgaattcatct

SEQ ID NO: 819183 - DNA, 25 bp, Homo sapien
taggagtagaaacacgttgggccca

SEQ ID NO: 819184 - DNA, 25 bp, Homo sapien
catcgtgctctcacttaaagtcaag

SEQ ID NO: 819185 - DNA, 25 bp, Homo sapien
taaagtcaaggtgcagctctcattt

SEQ ID NO: 819186 - DNA, 25 bp, Homo sapien
gaaatccaaagtcccagccacatat

SEQ ID NO: 819187 - DNA, 25 bp, Homo sapien
catttccaaggagaactctagtttt

SEQ ID NO: 819188 - DNA, 25 bp, Homo sapien
tcagtaaaatggatagattcggacc

SEQ ID NO: 819189 - DNA, 25 bp, Homo sapien
gaactagcacgggtcttggatcaga

SEQ ID NO: 819190 - DNA, 25 bp, Homo sapien
taaaataaccacctgatagaatggg

SEQ ID NO: 819191 - DNA, 25 bp, Homo sapien
gattcggacctttgtgtaaccctga

SEQ ID NO: 819192 - DNA, 25 bp, Homo sapien
tcattaaagtatgtcaacaggtaca

SEQ ID NO: 819193 - DNA, 25 bp, Homo sapien
catatgaaacaatgggctaactaca

SEQ ID NO: 819194 - DNA, 25 bp, Homo sapien
tatagcacttatacagacaaacagg

SEQ ID NO: 819195 - DNA, 25 bp, Homo sapien
taaagacctcaccagttgaatagtg

SEQ ID NO: 819196 - DNA, 25 bp, Homo sapien
ggcaggaccaactgtgcatttcaat

SEQ ID NO: 819197 - DNA, 25 bp, Homo sapien
tgtgttgtcccgtggccatttgaaa

SEQ ID NO: 819198 - DNA, 25 bp, Homo sapien
tactgtattgtgttgtcccgtggcc

SEQ ID NO: 819199 - DNA, 25 bp, Homo sapien
tgtcccgtggccatttgaaataatt

SEQ ID NO: 819200 - DNA, 25 bp, Homo sapien
cataggagaatgtactgtattgtgt

SEQ ID NO: 819201 - DNA, 25 bp, Homo sapien
tatttcggcgaaatacttgttatta

SEQ ID NO: 819202 - DNA, 25 bp, Homo sapien
agtgccaccagccataggaccgtat

SEQ ID NO: 819203 - DNA, 25 bp, Homo sapien
taaagtaagtaaagtgccaccagcc

SEQ ID NO: 819204 - DNA, 25 bp, Homo sapien
tgaaatgtgtctagaattcccactg

SEQ ID NO: 819205 - DNA, 25 bp, Homo sapien
gggtataacattcaagaatactgtt

SEQ ID NO: 819206 - DNA, 25 bp, Homo sapien
gacaatgggatcttcacggtaactg

SEQ ID NO: 819207 - DNA, 25 bp, Homo sapien
gcttgtctctcggttggctaagtca

SEQ ID NO: 819208 - DNA, 25 bp, Homo sapien
aactcagttgaaatggtttgggctg

SEQ ID NO: 819209 - DNA, 25 bp, Homo sapien
gttgagaggttctttccaccaagta

SEQ ID NO: 819210 - DNA, 25 bp, Homo sapien
gacaatgttgagaggttctttccac

SEQ ID NO: 819211 - DNA, 25 bp, Homo sapien
aaaactgacaatgttgagaggttct

SEQ ID NO: 819212 - DNA, 25 bp, Homo sapien
gaaaactgacaatgttgagaggttc

SEQ ID NO: 819213 - DNA, 25 bp, Homo sapien
catgcacatttatgaccattctcgg

SEQ ID NO: 819214 - DNA, 25 bp, Homo sapien
gaccattctcgggacactaactgaa

SEQ ID NO: 819215 - DNA, 25 bp, Homo sapien
aacacctgttattgtgctcccacca

SEQ ID NO: 819216 - DNA, 25 bp, Homo sapien
tctcgggacactaactgaattcagg

SEQ ID NO: 819217 - DNA, 25 bp, Homo sapien
atacagcttggcaacatccatagca

SEQ ID NO: 819218 - DNA, 25 bp, Homo sapien
gcttggcaacatccatagcaacttt

SEQ ID NO: 819219 - DNA, 25 bp, Homo sapien
acaattatccactgtaaacagaata

SEQ ID NO: 819220 - DNA, 25 bp, Homo sapien
taccaccccaatcaattgaaaatat

SEQ ID NO: 819221 - DNA, 25 bp, Homo sapien
gagtggtacaacagattatctctga

SEQ ID NO: 819222 - DNA, 25 bp, Homo sapien
ctgttgcagggaaggagtggtacaa

SEQ ID NO: 819223 - DNA, 25 bp, Homo sapien
ctgaattagagcgatgttgacatgc

SEQ ID NO: 819224 - DNA, 25 bp, Homo sapien
ttatctctgaattagagcgatgttg

SEQ ID NO: 819225 - DNA, 25 bp, Homo sapien
atttggaaaggatcccatctaacat

SEQ ID NO: 819226 - DNA, 25 bp, Homo sapien
tttggaaaggatcccatctaacatg

SEQ ID NO: 819227 - DNA, 25 bp, Homo sapien
cattgcccattgagatcatcactgg

SEQ ID NO: 819228 - DNA, 25 bp, Homo sapien
tcactggcttttcaaaaggcttaaa

SEQ ID NO: 819229 - DNA, 25 bp, Homo sapien
gctttcctctcatacataagaaaaa

SEQ ID NO: 819230 - DNA, 25 bp, Homo sapien
cctggctgagaggtagaagttttaa

SEQ ID NO: 819231 - DNA, 25 bp, Homo sapien
tcaacttaacgtattgataaagagt

SEQ ID NO: 819232 - DNA, 25 bp, Homo sapien
aagagttagattgctgacacaacaa

SEQ ID NO: 819233 - DNA, 25 bp, Homo sapien
caatttcagcaggtcattggggacc

SEQ ID NO: 819234 - DNA, 25 bp, Homo sapien
taacacttcacctttaactgcttca

SEQ ID NO: 819235 - DNA, 25 bp, Homo sapien
tatttagctcgctgttcaatttcag

SEQ ID NO: 819236 - DNA, 25 bp, Homo sapien
gggaccgtgcataaaacggcttcag

SEQ ID NO: 819237 - DNA, 25 bp, Homo sapien
tggcttccttatttacatcatgaga

SEQ ID NO: 819238 - DNA, 25 bp, Homo sapien
ggcttccttatttacatcatgagag

SEQ ID NO: 819239 - DNA, 25 bp, Homo sapien
cttccttatttacatcatgagagga

SEQ ID NO: 819240 - DNA, 25 bp, Homo sapien
tccttatttacatcatgagaggaat

SEQ ID NO: 819241 - DNA, 25 bp, Homo sapien
acacataaatgagctttaatgattt

SEQ ID NO: 819242 - DNA, 25 bp, Homo sapien
cacataaatgagctttaatgattta

SEQ ID NO: 819243 - DNA, 25 bp, Homo sapien
ttaagcctgagaataacataattac

SEQ ID NO: 819244 - DNA, 25 bp, Homo sapien
gatttattttaagcctgagaataac

SEQ ID NO: 819245 - DNA, 25 bp, Homo sapien
ccaaggacggttgaagaaattgctt

SEQ ID NO: 819246 - DNA, 25 bp, Homo sapien
caacaccagcaatcaatcctgtgaa

SEQ ID NO: 819247 - DNA, 25 bp, Homo sapien
gtgctgttgatattgagacaacacc

SEQ ID NO: 819248 - DNA, 25 bp, Homo sapien
gaaattctgatctggttgaactatt

SEQ ID NO: 819249 - DNA, 25 bp, Homo sapien
tcgtagcgaactaattcactgccca

SEQ ID NO: 819250 - DNA, 25 bp, Homo sapien
ttctggaaaagtagctcggtagtct

SEQ ID NO: 819251 - DNA, 25 bp, Homo sapien
gagtgtgtactcttgcatcgtagcg

SEQ ID NO: 819252 - DNA, 25 bp, Homo sapien
gggcttacacttcgggcacttacaa

SEQ ID NO: 819253 - DNA, 25 bp, Homo sapien
tctggatttagagcactgaggtcaa

SEQ ID NO: 819254 - DNA, 25 bp, Homo sapien
cacaatcaggctactgggcccaatc

SEQ ID NO: 819255 - DNA, 25 bp, Homo sapien
cacttgtcggcatgaaccgttctga

SEQ ID NO: 819256 - DNA, 25 bp, Homo sapien
catgtctgtcagaggatactgcact

SEQ ID NO: 819257 - DNA, 25 bp, Homo sapien
ctcttcctatgacttcattgaaatg

SEQ ID NO: 819258 - DNA, 25 bp, Homo sapien
catgaataagttgtagatgatatga

SEQ ID NO: 819259 - DNA, 25 bp, Homo sapien
taacaataccactataggtacgtag

SEQ ID NO: 819260 - DNA, 25 bp, Homo sapien
cactataggtacgtaggtgtgtttg

SEQ ID NO: 819261 - DNA, 25 bp, Homo sapien
tgactcatattaaagcctaacctaa

SEQ ID NO: 819262 - DNA, 25 bp, Homo sapien
gtcccatgatatacacaaccaaaat

SEQ ID NO: 819263 - DNA, 25 bp, Homo sapien
ccatgatatacacaaccaaaatgcc

SEQ ID NO: 819264 - DNA, 25 bp, Homo sapien
aagtcccatgatatacacaaccaaa

SEQ ID NO: 819265 - DNA, 25 bp, Homo sapien
aaagtcccatgatatacacaaccaa

SEQ ID NO: 819266 - DNA, 25 bp, Homo sapien
catgatgattccctcggtcagaaat

SEQ ID NO: 819267 - DNA, 25 bp, Homo sapien
gagacccttcacttcgcaggcagat

SEQ ID NO: 819268 - DNA, 25 bp, Homo sapien
catgtatggtaggaccaccagcgga

SEQ ID NO: 819269 - DNA, 25 bp, Homo sapien
gcagattcccaggagcgagaggaca

SEQ ID NO: 819270 - DNA, 25 bp, Homo sapien
ctttggctacttgaagaccaaagcc

SEQ ID NO: 819271 - DNA, 25 bp, Homo sapien
tcatgcctttggctacttgaagacc

SEQ ID NO: 819272 - DNA, 25 bp, Homo sapien
gaccaaagccaataagatcttttac

SEQ ID NO: 819273 - DNA, 25 bp, Homo sapien
tctgtggacaaactttttgcttgca

SEQ ID NO: 819274 - DNA, 25 bp, Homo sapien
tgaaatccataacttctgaaggaag

SEQ ID NO: 819275 - DNA, 25 bp, Homo sapien
tacaatgatgctgaatatctacaga

SEQ ID NO: 819276 - DNA, 25 bp, Homo sapien
cagattaaacaagtggcttcagtat

SEQ ID NO: 819277 - DNA, 25 bp, Homo sapien
aaattattacccgtggctgaaatag

SEQ ID NO: 819278 - DNA, 25 bp, Homo sapien
tggtaaacttttgagtttgcagact

SEQ ID NO: 819279 - DNA, 25 bp, Homo sapien
ctttgcacctgttttgttgtgtaca

SEQ ID NO: 819280 - DNA, 25 bp, Homo sapien
gaccaaaatcagcaaccttgactgt

SEQ ID NO: 819281 - DNA, 25 bp, Homo sapien
tatcatacatgtctctggcaagacc

SEQ ID NO: 819282 - DNA, 25 bp, Homo sapien
aactcagagataaccaatacattac

SEQ ID NO: 819283 - DNA, 25 bp, Homo sapien
ggagaaactcagagataaccaatac

SEQ ID NO: 819284 - DNA, 25 bp, Homo sapien
gaaactcagagataaccaatacatt

SEQ ID NO: 819285 - DNA, 25 bp, Homo sapien
gagaaactcagagataaccaataca

SEQ ID NO: 819286 - DNA, 25 bp, Homo sapien
tgatgaatggtttagtccattgtat

SEQ ID NO: 819287 - DNA, 25 bp, Homo sapien
gatgaatggtttagtccattgtatg

SEQ ID NO: 819288 - DNA, 25 bp, Homo sapien
tgtttctgaggtttatcatgctgta

SEQ ID NO: 819289 - DNA, 25 bp, Homo sapien
atgaatggtttagtccattgtatgg

SEQ ID NO: 819290 - DNA, 25 bp, Homo sapien
ggctctcaaatgtaatatgcgaagt

SEQ ID NO: 819291 - DNA, 25 bp, Homo sapien
tactactactgatacgacaacatgg

SEQ ID NO: 819292 - DNA, 25 bp, Homo sapien
tgaattactgatacgttactactac

SEQ ID NO: 819293 - DNA, 25 bp, Homo sapien
ggagacagactcataagactactga

SEQ ID NO: 819294 - DNA, 25 bp, Homo sapien
caagtaaacagttatatcaaaggtg

SEQ ID NO: 819295 - DNA, 25 bp, Homo sapien
ggagtcttctcccttgcaacaagta

SEQ ID NO: 819296 - DNA, 25 bp, Homo sapien
gggtctgggcagtattcgggttgta

SEQ ID NO: 819297 - DNA, 25 bp, Homo sapien
caaaggtgtttacgtcaggataagg

SEQ ID NO: 819298 - DNA, 25 bp, Homo sapien
gcatttcggctttagggtgccagca

SEQ ID NO: 819299 - DNA, 25 bp, Homo sapien
cccaatgaaagtagagaagatcgct

SEQ ID NO: 819300 - DNA, 25 bp, Homo sapien
gttcacatggacatagtgctcccca

SEQ ID NO: 819301 - DNA, 25 bp, Homo sapien
gaagatcgctgatatccgggacacc

SEQ ID NO: 819302 - DNA, 25 bp, Homo sapien
atgacaacagagaaggatacggagc

SEQ ID NO: 819303 - DNA, 25 bp, Homo sapien
acaacagagaaggatacggagcgac

SEQ ID NO: 819304 - DNA, 25 bp, Homo sapien
tcatcatcagcgttatcttctgatg

SEQ ID NO: 819305 - DNA, 25 bp, Homo sapien
aacagagaaggatacggagcgacac

SEQ ID NO: 819306 - DNA, 25 bp, Homo sapien
cagaaggaggctggtcgtgtgtcca

SEQ ID NO: 819307 - DNA, 25 bp, Homo sapien
cccagaaggaggctggtcgtgtgtc

SEQ ID NO: 819308 - DNA, 25 bp, Homo sapien
agaaggaggctggtcgtgtgtccac

SEQ ID NO: 819309 - DNA, 25 bp, Homo sapien
ccagaaggaggctggtcgtgtgtcc

SEQ ID NO: 819310 - DNA, 25 bp, Homo sapien
tcagataagaaattccttagaatcc

SEQ ID NO: 819311 - DNA, 25 bp, Homo sapien
gtcctataatagtgcaattttggca

SEQ ID NO: 819312 - DNA, 25 bp, Homo sapien
cattggacaaagtgtggactgttgc

SEQ ID NO: 819313 - DNA, 25 bp, Homo sapien
gcaagagcaaagaatatcgatggcc

SEQ ID NO: 819314 - DNA, 25 bp, Homo sapien
tgcaggccattggtccgtggcctgt

SEQ ID NO: 819315 - DNA, 25 bp, Homo sapien
tatgacaggagtgttgtcacggctg

SEQ ID NO: 819316 - DNA, 25 bp, Homo sapien
tggcctgtgggaccaagcctctggt

SEQ ID NO: 819317 - DNA, 25 bp, Homo sapien
gtgttgtcacggctgcaggccattg

SEQ ID NO: 819318 - DNA, 25 bp, Homo sapien
attcaacccagaattcaagttttgg

SEQ ID NO: 819319 - DNA, 25 bp, Homo sapien
aattcaacccagaattcaagttttg

SEQ ID NO: 819320 - DNA, 25 bp, Homo sapien
tcaagaagccctcaatatttcctgc

SEQ ID NO: 819321 - DNA, 25 bp, Homo sapien
tttcccatatgaaatcaagtggtac

SEQ ID NO: 819322 - DNA, 25 bp, Homo sapien
gtgatcaagaagccctcaatatttc

SEQ ID NO: 819323 - DNA, 25 bp, Homo sapien
tcaatttcccatatgaaatcaagtg

SEQ ID NO: 819324 - DNA, 25 bp, Homo sapien
ttgaccatacaacacacaaaagtgt

SEQ ID NO: 819325 - DNA, 25 bp, Homo sapien
tgaaactttgactgtattgcctata

SEQ ID NO: 819326 - DNA, 25 bp, Homo sapien
ccaaccaaaggaatgtctatacaaa

SEQ ID NO: 819327 - DNA, 25 bp, Homo sapien
tacctaatgggtgaatgacaccatc

SEQ ID NO: 819328 - DNA, 25 bp, Homo sapien
agcatcattctcaaacagtgggttt

SEQ ID NO: 819329 - DNA, 25 bp, Homo sapien
catcattctcaaacagtgggttttt

SEQ ID NO: 819330 - DNA, 25 bp, Homo sapien
aacagtgggtttttatatgacaact

SEQ ID NO: 819331 - DNA, 25 bp, Homo sapien
gtagcatcattctcaaacagtgggt

SEQ ID NO: 819332 - DNA, 25 bp, Homo sapien
tcttgaccctggtagagacagttct

SEQ ID NO: 819333 - DNA, 25 bp, Homo sapien
tgccaccgagacagaggctaatctt

SEQ ID NO: 819334 - DNA, 25 bp, Homo sapien
tattgagtttcagtgtgacacaccc

SEQ ID NO: 819335 - DNA, 25 bp, Homo sapien
ccaattgcttgcgaggtgggaacct

SEQ ID NO: 819336 - DNA, 25 bp, Homo sapien
gcatcactttactttaattgcatga

SEQ ID NO: 819337 - DNA, 25 bp, Homo sapien
gacagtttgggcaagcatccatttt

SEQ ID NO: 819338 - DNA, 25 bp, Homo sapien
caatatctttggctgacgtaatcta

SEQ ID NO: 819339 - DNA, 25 bp, Homo sapien
gccttgaagccaacatagtactagt

SEQ ID NO: 819340 - DNA, 25 bp, Homo sapien
gaatagctcgggaacatcaatggaa

SEQ ID NO: 819341 - DNA, 25 bp, Homo sapien
tcttgtttacaagaattgttgccac

SEQ ID NO: 819342 - DNA, 25 bp, Homo sapien
gaaagagcagatgtcacaggaacaa

SEQ ID NO: 819343 - DNA, 25 bp, Homo sapien
cacagttctgcagaaggaaagcccc

SEQ ID NO: 819344 - DNA, 25 bp, Homo sapien
caaagtggccaacgtcaaagtaagg

SEQ ID NO: 819345 - DNA, 25 bp, Homo sapien
tctgggtggactcactcccggaaag

SEQ ID NO: 819346 - DNA, 25 bp, Homo sapien
gagataacccagtgcacagcattga

SEQ ID NO: 819347 - DNA, 25 bp, Homo sapien
tgtgttcttccaagagagataaccc

SEQ ID NO: 819348 - DNA, 25 bp, Homo sapien
tgtgtgtttgtgttcttccaagaga

SEQ ID NO: 819349 - DNA, 25 bp, Homo sapien
cagagactgcttgcaaattatgcaa

SEQ ID NO: 819350 - DNA, 25 bp, Homo sapien
tcagagactgcttgcaaattatgca

SEQ ID NO: 819351 - DNA, 25 bp, Homo sapien
agagactgcttgcaaattatgcaaa

SEQ ID NO: 819352 - DNA, 25 bp, Homo sapien
aacctttgactttagtctccacagc

SEQ ID NO: 819353 - DNA, 25 bp, Homo sapien
gttcactgtcctgaagcccctcgat

SEQ ID NO: 819354 - DNA, 25 bp, Homo sapien
cctgattagggatcaaacctttgac

SEQ ID NO: 819355 - DNA, 25 bp, Homo sapien
agtgaagctgtctgccctgattagg

SEQ ID NO: 819356 - DNA, 25 bp, Homo sapien
aaaggaactgctttgattgccactc

SEQ ID NO: 819357 - DNA, 25 bp, Homo sapien
gaggctctcctatgggagcacgaag

SEQ ID NO: 819358 - DNA, 25 bp, Homo sapien
gctttgattgccactctattctctt

SEQ ID NO: 819359 - DNA, 25 bp, Homo sapien
ctttgccatgggttttcagtttctc

SEQ ID NO: 819360 - DNA, 25 bp, Homo sapien
cattacttagggccttctgaagcat

SEQ ID NO: 819361 - DNA, 25 bp, Homo sapien
ctctgaatgattttgatccccgaac

SEQ ID NO: 819362 - DNA, 25 bp, Homo sapien
tctgaatgattttgatccccgaacc

SEQ ID NO: 819363 - DNA, 25 bp, Homo sapien
aatgattttgatccccgaaccacac

SEQ ID NO: 819364 - DNA, 25 bp, Homo sapien
tgaatgattttgatccccgaaccac

SEQ ID NO: 819365 - DNA, 25 bp, Homo sapien
gccctggttgggatgtgatctcctc

SEQ ID NO: 819366 - DNA, 25 bp, Homo sapien
tgggatgtgatctcctcaatctggg

SEQ ID NO: 819367 - DNA, 25 bp, Homo sapien
gccctgtgcgcaggccctggttggg

SEQ ID NO: 819368 - DNA, 25 bp, Homo sapien
ttccttgaagccctgtgcgcaggcc

SEQ ID NO: 819369 - DNA, 25 bp, Homo sapien
tcttctgcattgattctggcttcgc

SEQ ID NO: 819370 - DNA, 25 bp, Homo sapien
tggaagctgaaagtagatgtctccc

SEQ ID NO: 819371 - DNA, 25 bp, Homo sapien
ggcttcgctgtgcacctcggtcact

SEQ ID NO: 819372 - DNA, 25 bp, Homo sapien
gatgtctcccaatcttctgcattga

SEQ ID NO: 819373 - DNA, 25 bp, Homo sapien
tttatctaggacatagggagaaagc

SEQ ID NO: 819374 - DNA, 25 bp, Homo sapien
ccctttatctaggacatagggagaa

SEQ ID NO: 819375 - DNA, 25 bp, Homo sapien
ccgtctcccctttatctaggacata

SEQ ID NO: 819376 - DNA, 25 bp, Homo sapien
tatctaggacatagggagaaagcag

SEQ ID NO: 819377 - DNA, 25 bp, Homo sapien
gattggtgctgctaaacttcccaag

SEQ ID NO: 819378 - DNA, 25 bp, Homo sapien
ttggtgctgctaaacttcccaaggc

SEQ ID NO: 819379 - DNA, 25 bp, Homo sapien
aagtgattggtgctgctaaacttcc

SEQ ID NO: 819380 - DNA, 25 bp, Homo sapien
gaagaagtgattggtgctgctaaac

SEQ ID NO: 819381 - DNA, 25 bp, Homo sapien
tgcacgtttctccaaccggttagaa

SEQ ID NO: 819382 - DNA, 25 bp, Homo sapien
ctggcactgtccttttatcatcttc

SEQ ID NO: 819383 - DNA, 25 bp, Homo sapien
catcttcaggctccttgtgcacgtt

SEQ ID NO: 819384 - DNA, 25 bp, Homo sapien
cagctttactggtagtaaagctggc

SEQ ID NO: 819385 - DNA, 25 bp, Homo sapien
agagcttcaacatcatccgcagagg

SEQ ID NO: 819386 - DNA, 25 bp, Homo sapien
gactggcgaagttgcagaggcttaa

SEQ ID NO: 819387 - DNA, 25 bp, Homo sapien
tccgcagaggtgtgggtacacagat

SEQ ID NO: 819388 - DNA, 25 bp, Homo sapien
tctcttggagcagaccgctaattta

SEQ ID NO: 819389 - DNA, 25 bp, Homo sapien
gcaatacatgccttacatggcacag

SEQ ID NO: 819390 - DNA, 25 bp, Homo sapien
cctgtttctatgaggagatttggct

SEQ ID NO: 819391 - DNA, 25 bp, Homo sapien
actcatgagccatcactagggcgat

SEQ ID NO: 819392 - DNA, 25 bp, Homo sapien
atcaattgctttaagtatttacacc

SEQ ID NO: 819393 - DNA, 25 bp, Homo sapien
ggacaccgtggtgcttcataatcac

SEQ ID NO: 819394 - DNA, 25 bp, Homo sapien
tgagaaccagaagactcagactgtg

SEQ ID NO: 819395 - DNA, 25 bp, Homo sapien
tcaggactcaatgctggacaccgtg

SEQ ID NO: 819396 - DNA, 25 bp, Homo sapien
gatactgatggccaggactcactca

SEQ ID NO: 819397 - DNA, 25 bp, Homo sapien
aggtaagtaccactcaactggtctc

SEQ ID NO: 819398 - DNA, 25 bp, Homo sapien
gaatctgattggtagagttagtacc

SEQ ID NO: 819399 - DNA, 25 bp, Homo sapien
actggtctcctgttcattcgagagg

SEQ ID NO: 819400 - DNA, 25 bp, Homo sapien
gattggtagagttagtacctgtcat

SEQ ID NO: 819401 - DNA, 25 bp, Homo sapien
agcgccgcgcgcccccgctaaggga

SEQ ID NO: 819402 - DNA, 25 bp, Homo sapien
cagcgccgcgcgcccccgctaaggg

SEQ ID NO: 819403 - DNA, 25 bp, Homo sapien
tcagcgccgcgcgcccccgctaagg

SEQ ID NO: 819404 - DNA, 25 bp, Homo sapien
cgccgcgcgcccccgctaagggagg

SEQ ID NO: 819405 - DNA, 25 bp, Homo sapien
cacctgacttccccgtttccgtgcg

SEQ ID NO: 819406 - DNA, 25 bp, Homo sapien
gcggcagcggccacctgacttcccc

SEQ ID NO: 819407 - DNA, 25 bp, Homo sapien
cttccttctggcgacaaaccgcggc

SEQ ID NO: 819408 - DNA, 25 bp, Homo sapien
tccttctggcgacaaaccgcggcgg

SEQ ID NO: 819409 - DNA, 25 bp, Homo sapien
cttcatcagacaactgctcctccag

SEQ ID NO: 819410 - DNA, 25 bp, Homo sapien
tcatcagacaactgctcctccagat

SEQ ID NO: 819411 - DNA, 25 bp, Homo sapien
cttctcttcatcagacaactgctcc

SEQ ID NO: 819412 - DNA, 25 bp, Homo sapien
tctcttcatcagacaactgctcctc

SEQ ID NO: 819413 - DNA, 25 bp, Homo sapien
cagtaaaaggagttgcacattttcc

SEQ ID NO: 819414 - DNA, 25 bp, Homo sapien
tcttcggaagaagtcctagcaggaa

SEQ ID NO: 819415 - DNA, 25 bp, Homo sapien
gcaggaaagtgaggtgccaccaaat

SEQ ID NO: 819416 - DNA, 25 bp, Homo sapien
taagtcgttcatctggttccattgc

SEQ ID NO: 819417 - DNA, 25 bp, Homo sapien
gaatgcaaaaactatacttaatcct

SEQ ID NO: 819418 - DNA, 25 bp, Homo sapien
ttccagtagaaacactgcgaattag

SEQ ID NO: 819419 - DNA, 25 bp, Homo sapien
ggtattttcatggaacctgtcagag

SEQ ID NO: 819420 - DNA, 25 bp, Homo sapien
cagccatgggtattttcatggaacc

SEQ ID NO: 819421 - DNA, 25 bp, Homo sapien
tagtggcatatcatgtgggctaagg

SEQ ID NO: 819422 - DNA, 25 bp, Homo sapien
tgttaaacagcacaattcacctttg

SEQ ID NO: 819423 - DNA, 25 bp, Homo sapien
gacattctggattggtaagcctggg

SEQ ID NO: 819424 - DNA, 25 bp, Homo sapien
taagcctgggttatggtagtggcat

SEQ ID NO: 819425 - DNA, 25 bp, Homo sapien
ggaattacagacactccaggcctca

SEQ ID NO: 819426 - DNA, 25 bp, Homo sapien
gagcccctaatacagtgatacagtg

SEQ ID NO: 819427 - DNA, 25 bp, Homo sapien
ggctaggcgctctactggaattaca

SEQ ID NO: 819428 - DNA, 25 bp, Homo sapien
cactgatttaatacaggctaggcgc

SEQ ID NO: 819429 - DNA, 25 bp, Homo sapien
aattctccagattgttctagtgcct

SEQ ID NO: 819430 - DNA, 25 bp, Homo sapien
tgaattctccagattgttctagtgc

SEQ ID NO: 819431 - DNA, 25 bp, Homo sapien
catgaattctccagattgttctagt

SEQ ID NO: 819432 - DNA, 25 bp, Homo sapien
gaattctccagattgttctagtgcc

SEQ ID NO: 819433 - DNA, 25 bp, Homo sapien
gaagtgactgggttccctcagccta

SEQ ID NO: 819434 - DNA, 25 bp, Homo sapien
gagaagctgtgatcaaaagccttgg

SEQ ID NO: 819435 - DNA, 25 bp, Homo sapien
gctccatggtgaagtaccacaggtg

SEQ ID NO: 819436 - DNA, 25 bp, Homo sapien
tatgggataccctgatgaaccaggc

SEQ ID NO: 819437 - DNA, 25 bp, Homo sapien
tcaagaagttcctaactccctggtc

SEQ ID NO: 819438 - DNA, 25 bp, Homo sapien
aacttctatgtaactgaatttttat

SEQ ID NO: 819439 - DNA, 25 bp, Homo sapien
cgcccggcctctaaacttctatgta

SEQ ID NO: 819440 - DNA, 25 bp, Homo sapien
gcccggcctctaaacttctatgtaa

SEQ ID NO: 819441 - DNA, 25 bp, Homo sapien
cttaccggtgaagcctgaatttaag

SEQ ID NO: 819442 - DNA, 25 bp, Homo sapien
taccggtgaagcctgaatttaagat

SEQ ID NO: 819443 - DNA, 25 bp, Homo sapien
tgaagcctgaatttaagatatgtaa

SEQ ID NO: 819444 - DNA, 25 bp, Homo sapien
ccggtgaagcctgaatttaagatat

SEQ ID NO: 819445 - DNA, 25 bp, Homo sapien
tactcccatatctgagtgcttagaa

SEQ ID NO: 819446 - DNA, 25 bp, Homo sapien
aaaatcaatcagagcgggagaaact

SEQ ID NO: 819447 - DNA, 25 bp, Homo sapien
ctcccttcaaggcagaatctgtttc

SEQ ID NO: 819448 - DNA, 25 bp, Homo sapien
tggcaaatagcagaccctcaaatat

SEQ ID NO: 819449 - DNA, 25 bp, Homo sapien
cctcaaagtgtagcactgacttagt

SEQ ID NO: 819450 - DNA, 25 bp, Homo sapien
ttaaataattctggattaaatagag

SEQ ID NO: 819451 - DNA, 25 bp, Homo sapien
gatatggcatctatggttaaatata

SEQ ID NO: 819452 - DNA, 25 bp, Homo sapien
acttgagttctgattaattaaaatg

SEQ ID NO: 819453 - DNA, 25 bp, Homo sapien
tagaggattctaattacttgagttc

SEQ ID NO: 819454 - DNA, 25 bp, Homo sapien
ttgaatagacacttcgccgccaaag

SEQ ID NO: 819455 - DNA, 25 bp, Homo sapien
gtccgctgtagaactgattgcttga

SEQ ID NO: 819456 - DNA, 25 bp, Homo sapien
aaggacataacacccagtgctggtg

SEQ ID NO: 819457 - DNA, 25 bp, Homo sapien
tcaaaatgtaaaacctgctctgtgg

SEQ ID NO: 819458 - DNA, 25 bp, Homo sapien
tgttatctatctggtatctgacatc

SEQ ID NO: 819459 - DNA, 25 bp, Homo sapien
gttatctatctggtatctgacatca

SEQ ID NO: 819460 - DNA, 25 bp, Homo sapien
tatctatctggtatctgacatcaat

SEQ ID NO: 819461 - DNA, 25 bp, Homo sapien
atctatctggtatctgacatcaatc

SEQ ID NO: 819462 - DNA, 25 bp, Homo sapien
tcagactgacagttacctaatctcc

SEQ ID NO: 819463 - DNA, 25 bp, Homo sapien
tagctatctcacctaaaaagtgcat

SEQ ID NO: 819464 - DNA, 25 bp, Homo sapien
tagttttgaacttgagaagcagcat

SEQ ID NO: 819465 - DNA, 25 bp, Homo sapien
tagaactttaggttctggaatcaga

SEQ ID NO: 819466 - DNA, 25 bp, Homo sapien
tatcacaggcttctgctaaaataag

SEQ ID NO: 819467 - DNA, 25 bp, Homo sapien
gatactttttcactcaatcacctta

SEQ ID NO: 819468 - DNA, 25 bp, Homo sapien
gatataaatgttccatatcacaggc

SEQ ID NO: 819469 - DNA, 25 bp, Homo sapien
tatttcaaagctctactgaaaatgg

SEQ ID NO: 819470 - DNA, 25 bp, Homo sapien
aattctccaggaggggcatgaatga

SEQ ID NO: 819471 - DNA, 25 bp, Homo sapien
gaatgatgaattttgctgctatacg

SEQ ID NO: 819472 - DNA, 25 bp, Homo sapien
tgatgaattttgctgctatacgcac

SEQ ID NO: 819473 - DNA, 25 bp, Homo sapien
gggcatgaatgatgaattttgctgc

SEQ ID NO: 819474 - DNA, 25 bp, Homo sapien
tattctagccattacaaaatccaga

SEQ ID NO: 819475 - DNA, 25 bp, Homo sapien
aatccagactaacatattgtcattg

SEQ ID NO: 819476 - DNA, 25 bp, Homo sapien
ttttctgcatactgtccttagctta

SEQ ID NO: 819477 - DNA, 25 bp, Homo sapien
ggatatattctagtcagtgatatga

SEQ ID NO: 819478 - DNA, 25 bp, Homo sapien
cacttttaagacacggtgaagttca

SEQ ID NO: 819479 - DNA, 25 bp, Homo sapien
ttttataaagagatcactacaggcc

SEQ ID NO: 819480 - DNA, 25 bp, Homo sapien
gcccagtcctatatcttatactaag

SEQ ID NO: 819481 - DNA, 25 bp, Homo sapien
aaaaaacggaaactgaagagctctg

SEQ ID NO: 819482 - DNA, 25 bp, Homo sapien
aattgtaattgggaagctactgact

SEQ ID NO: 819483 - DNA, 25 bp, Homo sapien
tatgcagggcatttaactcaaggta

SEQ ID NO: 819484 - DNA, 25 bp, Homo sapien
aggactttcctgattaaatatgcag

SEQ ID NO: 819485 - DNA, 25 bp, Homo sapien
gaccctaaggaggaagagactatct

SEQ ID NO: 819486 - DNA, 25 bp, Homo sapien
tcattattaagcagtaaccgaacat

SEQ ID NO: 819487 - DNA, 25 bp, Homo sapien
ccctgagaagattgtcattattaag

SEQ ID NO: 819488 - DNA, 25 bp, Homo sapien
gagaagattgtcattattaagcagt

SEQ ID NO: 819489 - DNA, 25 bp, Homo sapien
gtcattattaagcagtaaccgaaca

SEQ ID NO: 819490 - DNA, 25 bp, Homo sapien
tgggtattatactaggatgaaaagt

SEQ ID NO: 819491 - DNA, 25 bp, Homo sapien
gactggatggatactaaactttctt

SEQ ID NO: 819492 - DNA, 25 bp, Homo sapien
actgactggatggatactaaacttt

SEQ ID NO: 819493 - DNA, 25 bp, Homo sapien
tcagtcaggattttacatattgggt

SEQ ID NO: 819494 - DNA, 25 bp, Homo sapien
taaaagtcccatactttcacgtatc

SEQ ID NO: 819495 - DNA, 25 bp, Homo sapien
aatctaacaatcattaacagatcaa

SEQ ID NO: 819496 - DNA, 25 bp, Homo sapien
cacgtatcttgagtcaaatgtataa

SEQ ID NO: 819497 - DNA, 25 bp, Homo sapien
gatcaataattctttggacaaataa

SEQ ID NO: 819498 - DNA, 25 bp, Homo sapien
tcataaccttcaatttttactggag

SEQ ID NO: 819499 - DNA, 25 bp, Homo sapien
taaactggtccaagttatactgtgc

SEQ ID NO: 819500 - DNA, 25 bp, Homo sapien
tggtccaagttatactgtgcaaatg

SEQ ID NO: 819501 - DNA, 25 bp, Homo sapien
tactggagtaaactggtccaagtta

SEQ ID NO: 819502 - DNA, 25 bp, Homo sapien
ttgatgatggaatgaatttagaaaa

SEQ ID NO: 819503 - DNA, 25 bp, Homo sapien
atgatggaatgaatttagaaaaaaa

SEQ ID NO: 819504 - DNA, 25 bp, Homo sapien
ctttgatgatggaatgaatttagaa

SEQ ID NO: 819505 - DNA, 25 bp, Homo sapien
gatgatggaatgaatttagaaaaaa

SEQ ID NO: 819506 - DNA, 25 bp, Homo sapien
tctcagagcagtttctactgaagtt

SEQ ID NO: 819507 - DNA, 25 bp, Homo sapien
taagctctcagagcagtttctactg

SEQ ID NO: 819508 - DNA, 25 bp, Homo sapien
gctctcagagcagtttctactgaag

SEQ ID NO: 819509 - DNA, 25 bp, Homo sapien
tcagagcagtttctactgaagttct

SEQ ID NO: 819510 - DNA, 25 bp, Homo sapien
ttttaagagacgctaaagactcaca

SEQ ID NO: 819511 - DNA, 25 bp, Homo sapien
gttgaacctacgaaagaaccacaca

SEQ ID NO: 819512 - DNA, 25 bp, Homo sapien
taactttgatctaaactgagacgag

SEQ ID NO: 819513 - DNA, 25 bp, Homo sapien
ctgagacgagtcatgaacataagat

SEQ ID NO: 819514 - DNA, 25 bp, Homo sapien
catgcaataatggtttgctgtccat

SEQ ID NO: 819515 - DNA, 25 bp, Homo sapien
tttctatgcatgcaataatggtttg

SEQ ID NO: 819516 - DNA, 25 bp, Homo sapien
gaactgatggctttctatgcatgca

SEQ ID NO: 819517 - DNA, 25 bp, Homo sapien
aaattttttgcttggaactgatggc

SEQ ID NO: 819518 - DNA, 25 bp, Homo sapien
aagcagtggagcaaccttgggccat

SEQ ID NO: 819519 - DNA, 25 bp, Homo sapien
ttaatagcaccaccaaccaacttgg

SEQ ID NO: 819520 - DNA, 25 bp, Homo sapien
gaccagtatggtaaatcagtgctcc

SEQ ID NO: 819521 - DNA, 25 bp, Homo sapien
gattgccaactggtgttctcgcagg

SEQ ID NO: 819522 - DNA, 25 bp, Homo sapien
gatggcttatgaaaaattacccttg

SEQ ID NO: 819523 - DNA, 25 bp, Homo sapien
tactgagactattgtgccatgatat

SEQ ID NO: 819524 - DNA, 25 bp, Homo sapien
gatacaatgctcatagtgatggctt

SEQ ID NO: 819525 - DNA, 25 bp, Homo sapien
gatgcctggcttgaagtatagttct

SEQ ID NO: 819526 - DNA, 25 bp, Homo sapien
catctaagactagttgcttctgatt

SEQ ID NO: 819527 - DNA, 25 bp, Homo sapien
gaaggtctctactgaaatctaagaa

SEQ ID NO: 819528 - DNA, 25 bp, Homo sapien
tctctactgaaatctaagaaacatc

SEQ ID NO: 819529 - DNA, 25 bp, Homo sapien
aaacatctaagactagttgcttctg

SEQ ID NO: 819530 - DNA, 25 bp, Homo sapien
tctgggttcaatactcatgtagtct

SEQ ID NO: 819531 - DNA, 25 bp, Homo sapien
tctctgcacgctaaggacattctaa

SEQ ID NO: 819532 - DNA, 25 bp, Homo sapien
gatagtacaagttgagtcttcctaa

SEQ ID NO: 819533 - DNA, 25 bp, Homo sapien
aattctggatgagtagtttagcgtc

SEQ ID NO: 819534 - DNA, 25 bp, Homo sapien
cacttgagtggttgaaggagtgatt

SEQ ID NO: 819535 - DNA, 25 bp, Homo sapien
aaccacttgagtggttgaaggagtg

SEQ ID NO: 819536 - DNA, 25 bp, Homo sapien
tgaattttcaagatgccaaccactt

SEQ ID NO: 819537 - DNA, 25 bp, Homo sapien
ctgaattttcaagatgccaaccact

SEQ ID NO: 819538 - DNA, 25 bp, Homo sapien
ttatgactcactagctgaacattac

SEQ ID NO: 819539 - DNA, 25 bp, Homo sapien
atatctttatgactcactagctgaa

SEQ ID NO: 819540 - DNA, 25 bp, Homo sapien
tatctttatgactcactagctgaac

SEQ ID NO: 819541 - DNA, 25 bp, Homo sapien
tctttatgactcactagctgaacat

SEQ ID NO: 819542 - DNA, 25 bp, Homo sapien
ggcaccatacccttgttatgtcaat

SEQ ID NO: 819543 - DNA, 25 bp, Homo sapien
caaggagagtaccaattaggtcaaa

SEQ ID NO: 819544 - DNA, 25 bp, Homo sapien
tgtcaaactccccaaacaagacggc

SEQ ID NO: 819545 - DNA, 25 bp, Homo sapien
tcactggcaaattttgcaaggagag

SEQ ID NO: 819546 - DNA, 25 bp, Homo sapien
aattttaaacactggacatgcattc

SEQ ID NO: 819547 - DNA, 25 bp, Homo sapien
tgaaatctcaatgatacacacatgg

SEQ ID NO: 819548 - DNA, 25 bp, Homo sapien
cagaataagctggtctcaatgttca

SEQ ID NO: 819549 - DNA, 25 bp, Homo sapien
caatagacaacctttatgggtaaga

SEQ ID NO: 819550 - DNA, 25 bp, Homo sapien
ttttctgcagcttctacaatcttta

SEQ ID NO: 819551 - DNA, 25 bp, Homo sapien
ttctgcagcttctacaatctttata

SEQ ID NO: 819552 - DNA, 25 bp, Homo sapien
aaattcttttgctgtttgcacttca

SEQ ID NO: 819553 - DNA, 25 bp, Homo sapien
ctgcagcttctacaatctttataaa

SEQ ID NO: 819554 - DNA, 25 bp, Homo sapien
tctgcactcagaaattatgttggcc

SEQ ID NO: 819555 - DNA, 25 bp, Homo sapien
cagattatggaagcttgactggtaa

SEQ ID NO: 819556 - DNA, 25 bp, Homo sapien
caagcaactcagatcagagatactc

SEQ ID NO: 819557 - DNA, 25 bp, Homo sapien
taaggagtagaaacttgtccaattc

SEQ ID NO: 819558 - DNA, 25 bp, Homo sapien
cttagtgcgtgtaactggcaactgt

SEQ ID NO: 819559 - DNA, 25 bp, Homo sapien
gcgtgtaactggcaactgtcgacgt

SEQ ID NO: 819560 - DNA, 25 bp, Homo sapien
ggcaactgtcgacgtaaggctttga

SEQ ID NO: 819561 - DNA, 25 bp, Homo sapien
taactggcaactgtcgacgtaaggc

SEQ ID NO: 819562 - DNA, 25 bp, Homo sapien
tttacataaatggaacaggtgagga

SEQ ID NO: 819563 - DNA, 25 bp, Homo sapien
taaaccgagacatggtcatgagttc

SEQ ID NO: 819564 - DNA, 25 bp, Homo sapien
gcccatctgactgggcagcttgaca

SEQ ID NO: 819565 - DNA, 25 bp, Homo sapien
gacactaaaatgatccggtcatgca

SEQ ID NO: 819566 - DNA, 25 bp, Homo sapien
aatttccaggcccagacgtctgtgg

SEQ ID NO: 819567 - DNA, 25 bp, Homo sapien
gcaatactctattgaatgaaaccat

SEQ ID NO: 819568 - DNA, 25 bp, Homo sapien
tcactccctatggtaaatactaaca

SEQ ID NO: 819569 - DNA, 25 bp, Homo sapien
ggagtacgtgaggaaaggattccac

SEQ ID NO: 819570 - DNA, 25 bp, Homo sapien
ttttctttaggaatcccaatgtgcc

SEQ ID NO: 819571 - DNA, 25 bp, Homo sapien
caatgctttcaaagcccaacagtga

SEQ ID NO: 819572 - DNA, 25 bp, Homo sapien
tctcaatgctttcaaagcccaacag

SEQ ID NO: 819573 - DNA, 25 bp, Homo sapien
gaatcccaatgtgccaaaacttgta

SEQ ID NO: 819574 - DNA, 25 bp, Homo sapien
tcccaaatgaggaaaagccgcatga

SEQ ID NO: 819575 - DNA, 25 bp, Homo sapien
ccaagtgtactctggaaaagcacca

SEQ ID NO: 819576 - DNA, 25 bp, Homo sapien
gaggtgacctttccaatgctgagtg

SEQ ID NO: 819577 - DNA, 25 bp, Homo sapien
cccatagatggcaaaggcgcaaact

SEQ ID NO: 819578 - DNA, 25 bp, Homo sapien
gagatgctccaagggatgggacaca

SEQ ID NO: 819579 - DNA, 25 bp, Homo sapien
tggcgcctcttggaaactgcagtct

SEQ ID NO: 819580 - DNA, 25 bp, Homo sapien
gagtaatagccgaaccttgagcagc

SEQ ID NO: 819581 - DNA, 25 bp, Homo sapien
gatgtcctggactcgtttctccgcg

SEQ ID NO: 819582 - DNA, 25 bp, Homo sapien
caattctctgggataattttgactg

SEQ ID NO: 819583 - DNA, 25 bp, Homo sapien
aagcagcgcagggattttccagaga

SEQ ID NO: 819584 - DNA, 25 bp, Homo sapien
gggtggcagatgctatttacctttg

SEQ ID NO: 819585 - DNA, 25 bp, Homo sapien
ttttgactgtgaaacggccacctct

SEQ ID NO: 819586 - DNA, 25 bp, Homo sapien
ctttcgtggagcgatcacgtggccc

SEQ ID NO: 819587 - DNA, 25 bp, Homo sapien
ttcgtggagcgatcacgtggcccct

SEQ ID NO: 819588 - DNA, 25 bp, Homo sapien
aggtccctacaagtggctttcgtgg

SEQ ID NO: 819589 - DNA, 25 bp, Homo sapien
caagtggctttcgtggagcgatcac

SEQ ID NO: 819590 - DNA, 25 bp, Homo sapien
gtgtctgccgggatgattcaccggc

SEQ ID NO: 819591 - DNA, 25 bp, Homo sapien
ctgctgccgcggctcttggtgtctg

SEQ ID NO: 819592 - DNA, 25 bp, Homo sapien
gctcggcgggaaatcgcgcgggccg

SEQ ID NO: 819593 - DNA, 25 bp, Homo sapien
tgccgggatgattcaccggcccgga

SEQ ID NO: 819594 - DNA, 25 bp, Homo sapien
tacgtccaagaccaaactatgcagg

SEQ ID NO: 819595 - DNA, 25 bp, Homo sapien
gaatagcacgatgaagaaccacacg

SEQ ID NO: 819596 - DNA, 25 bp, Homo sapien
gttgattttcaaaggcacccgcagg

SEQ ID NO: 819597 - DNA, 25 bp, Homo sapien
cacccgcaggatgtagaccaggaat

SEQ ID NO: 819598 - DNA, 25 bp, Homo sapien
accagcgacgcagcagggcggctgc

SEQ ID NO: 819599 - DNA, 25 bp, Homo sapien
gtgtcctgggaactccttcgcccgc

SEQ ID NO: 819600 - DNA, 25 bp, Homo sapien
ccgggagggcgtgaggaaggactcg

SEQ ID NO: 819601 - DNA, 25 bp, Homo sapien
ggaaccctcggagttccggcgcaga

SEQ ID NO: 819602 - DNA, 25 bp, Homo sapien
ggtcccttcgacaatccatttggtg

SEQ ID NO: 819603 - DNA, 25 bp, Homo sapien
gaagggagacgagcaaagatcactg

SEQ ID NO: 819604 - DNA, 25 bp, Homo sapien
catttggtgacctgacacgtcatcc

SEQ ID NO: 819605 - DNA, 25 bp, Homo sapien
tgaaaactgcaaccgaaaccctcag

SEQ ID NO: 819606 - DNA, 25 bp, Homo sapien
tactttgtgtttcggaactctctgg

SEQ ID NO: 819607 - DNA, 25 bp, Homo sapien
catttaccaccgaccaaggatggga

SEQ ID NO: 819608 - DNA, 25 bp, Homo sapien
taaaggactgtaacccttagctcga

SEQ ID NO: 819609 - DNA, 25 bp, Homo sapien
ggcacgcggcacttgctgagcatat

SEQ ID NO: 819610 - DNA, 25 bp, Homo sapien
gagcagcacctattcaaatggtgag

SEQ ID NO: 819611 - DNA, 25 bp, Homo sapien
gacaagcagccatccaaaaagatga

SEQ ID NO: 819612 - DNA, 25 bp, Homo sapien
tctaaagcgaagaagacaatattgc

SEQ ID NO: 819613 - DNA, 25 bp, Homo sapien
aagccatggtctttccgatgacaga

SEQ ID NO: 819614 - DNA, 25 bp, Homo sapien
agaacagcaaagttagtcccgttag

SEQ ID NO: 819615 - DNA, 25 bp, Homo sapien
gaacagcaaagttagtcccgttaga

SEQ ID NO: 819616 - DNA, 25 bp, Homo sapien
cagcaaagttagtcccgttagaact

SEQ ID NO: 819617 - DNA, 25 bp, Homo sapien
tcaagatattgagaagataccaagc

SEQ ID NO: 819618 - DNA, 25 bp, Homo sapien
tgcgccatctgcaactccctaaaag

SEQ ID NO: 819619 - DNA, 25 bp, Homo sapien
caggtacagagctgggcctatggaa

SEQ ID NO: 819620 - DNA, 25 bp, Homo sapien
tctccaggaacacacttgccttcat

SEQ ID NO: 819621 - DNA, 25 bp, Homo sapien
tggaaaactacacgatgtaagagct

SEQ ID NO: 819622 - DNA, 25 bp, Homo sapien
cctttgtttgggaggtccacctctg

SEQ ID NO: 819623 - DNA, 25 bp, Homo sapien
taggctcaattcaagagaagctctc

SEQ ID NO: 819624 - DNA, 25 bp, Homo sapien
tgttatagtacattaggaggcatct

SEQ ID NO: 819625 - DNA, 25 bp, Homo sapien
caaggtaagcctgtcttttctgcag

SEQ ID NO: 819626 - DNA, 25 bp, Homo sapien
tataagataaagtaactgcaggcat

SEQ ID NO: 819627 - DNA, 25 bp, Homo sapien
aacttgaacggataaagagctgttt

SEQ ID NO: 819628 - DNA, 25 bp, Homo sapien
tgttgtaattccttgtaaaacttga

SEQ ID NO: 819629 - DNA, 25 bp, Homo sapien
agataaagtaactgcaggcatgcca

SEQ ID NO: 819630 - DNA, 25 bp, Homo sapien
gataaggacctactttgtacaagga

SEQ ID NO: 819631 - DNA, 25 bp, Homo sapien
ccatgctttagatgcatatggccca

SEQ ID NO: 819632 - DNA, 25 bp, Homo sapien
tataagatcttgtaacagcctctga

SEQ ID NO: 819633 - DNA, 25 bp, Homo sapien
gggcaactaagatgtctgggataca

SEQ ID NO: 819634 - DNA, 25 bp, Homo sapien
tcactccttaatgtccacaatagga

SEQ ID NO: 819635 - DNA, 25 bp, Homo sapien
cactccttaatgtccacaataggaa

SEQ ID NO: 819636 - DNA, 25 bp, Homo sapien
cgtagtcgaaataatcagaaggttg

SEQ ID NO: 819637 - DNA, 25 bp, Homo sapien
gaattcgagtccagcacggtcaaca

SEQ ID NO: 819638 - DNA, 25 bp, Homo sapien
tggcgcacacccgtagtcgaaataa

SEQ ID NO: 819639 - DNA, 25 bp, Homo sapien
cccaggaattcgagtccagcacggt

SEQ ID NO: 819640 - DNA, 25 bp, Homo sapien
ggcagtatatagcacaagcatgtct

SEQ ID NO: 819641 - DNA, 25 bp, Homo sapien
ccttaggctggttgcatggtaagcc

SEQ ID NO: 819642 - DNA, 25 bp, Homo sapien
tataccagagttctccaatttcgtg

SEQ ID NO: 819643 - DNA, 25 bp, Homo sapien
cacaagttgacatgctctaggacct

SEQ ID NO: 819644 - DNA, 25 bp, Homo sapien
gtacaactctatcagccagaaaatg

SEQ ID NO: 819645 - DNA, 25 bp, Homo sapien
agccagaaaatgaaacggctccctg

SEQ ID NO: 819646 - DNA, 25 bp, Homo sapien
tttccaagtacaactctatcagcca

SEQ ID NO: 819647 - DNA, 25 bp, Homo sapien
cagccagaaaatgaaacggctccct

SEQ ID NO: 819648 - DNA, 25 bp, Homo sapien
cgtgccttacatgaatttctgtcat

SEQ ID NO: 819649 - DNA, 25 bp, Homo sapien
tttctcctatttcttcatcgtgcct

SEQ ID NO: 819650 - DNA, 25 bp, Homo sapien
tcctatttcttcatcgtgccttaca

SEQ ID NO: 819651 - DNA, 25 bp, Homo sapien
tatttcttcatcgtgccttacatga

SEQ ID NO: 819652 - DNA, 25 bp, Homo sapien
cagccctgctgtagcagtaagacaa

SEQ ID NO: 819653 - DNA, 25 bp, Homo sapien
caatagcagggcttatgcatacgct

SEQ ID NO: 819654 - DNA, 25 bp, Homo sapien
aacagcggatactgcaatccccagc

SEQ ID NO: 819655 - DNA, 25 bp, Homo sapien
gcagcaacagcggatactgcaatcc

SEQ ID NO: 819656 - DNA, 25 bp, Homo sapien
ttaacagcaccaaaaaccgaagagc

SEQ ID NO: 819657 - DNA, 25 bp, Homo sapien
tctcccggtgtgattgaaatgcaag

SEQ ID NO: 819658 - DNA, 25 bp, Homo sapien
tccactaggcaaatgaaggccgacg

SEQ ID NO: 819659 - DNA, 25 bp, Homo sapien
tcatgaagccagacaatgcagtcca

SEQ ID NO: 819660 - DNA, 25 bp, Homo sapien
agcgaggagagtgtacatgtgagag

SEQ ID NO: 819661 - DNA, 25 bp, Homo sapien
aaagcgaggagagtgtacatgtgag

SEQ ID NO: 819662 - DNA, 25 bp, Homo sapien
gaaaagcgaggagagtgtacatgtg

SEQ ID NO: 819663 - DNA, 25 bp, Homo sapien
aaaagcgaggagagtgtacatgtga

SEQ ID NO: 819664 - DNA, 25 bp, Homo sapien
cacggtagagccatgatatgaatcc

SEQ ID NO: 819665 - DNA, 25 bp, Homo sapien
cattggataagtcacactgtaagct

SEQ ID NO: 819666 - DNA, 25 bp, Homo sapien
gcttagatggtagatggttaaaccc

SEQ ID NO: 819667 - DNA, 25 bp, Homo sapien
ggttgctgccatttctaaacatgca

SEQ ID NO: 819668 - DNA, 25 bp, Homo sapien
tctctcttcagccagtattttccac

SEQ ID NO: 819669 - DNA, 25 bp, Homo sapien
tcttcagccagtattttccactgct

SEQ ID NO: 819670 - DNA, 25 bp, Homo sapien
cacaaacaccccttgataagcccta

SEQ ID NO: 819671 - DNA, 25 bp, Homo sapien
tgacatctctcttcagccagtattt

SEQ ID NO: 819672 - DNA, 25 bp, Homo sapien
tggcctaaggataaatatacagatc

SEQ ID NO: 819673 - DNA, 25 bp, Homo sapien
tctgataaagttgccaattccatgg

SEQ ID NO: 819674 - DNA, 25 bp, Homo sapien
caagaaatggtgctagaagaagtga

SEQ ID NO: 819675 - DNA, 25 bp, Homo sapien
gaaatatagggtgaactgacttctg

SEQ ID NO: 819676 - DNA, 25 bp, Homo sapien
tttacttgtgttagagaaggaggaa

SEQ ID NO: 819677 - DNA, 25 bp, Homo sapien
ggaggaagcttattaggaagcacac

SEQ ID NO: 819678 - DNA, 25 bp, Homo sapien
tgctgaattctgtaagcggccttta

SEQ ID NO: 819679 - DNA, 25 bp, Homo sapien
tgtaagcggcctttaggctgaagcg

SEQ ID NO: 819680 - DNA, 25 bp, Homo sapien
cttacaggttgggaagcgatgagct

SEQ ID NO: 819681 - DNA, 25 bp, Homo sapien
cattcagaagcataggctagcagta

SEQ ID NO: 819682 - DNA, 25 bp, Homo sapien
caaggtgatgttagatgccatggcc

SEQ ID NO: 819683 - DNA, 25 bp, Homo sapien
ggatcagtcttttgccattagctca

SEQ ID NO: 819684 - DNA, 25 bp, Homo sapien
tgtaaatcccctaatacactgcctt

SEQ ID NO: 819685 - DNA, 25 bp, Homo sapien
tctgcctatagtgtaaatcccctaa

SEQ ID NO: 819686 - DNA, 25 bp, Homo sapien
tgccttccaagtgctcgatacatgt

SEQ ID NO: 819687 - DNA, 25 bp, Homo sapien
tcaacacttactatatgtggagcac

SEQ ID NO: 819688 - DNA, 25 bp, Homo sapien
tggcctccaattctagttccaggaa

SEQ ID NO: 819689 - DNA, 25 bp, Homo sapien
gaaaaaagcatggttacgtgcaaag

SEQ ID NO: 819690 - DNA, 25 bp, Homo sapien
caggtatcttaaagtttggcaagcc

SEQ ID NO: 819691 - DNA, 25 bp, Homo sapien
cacaggtacatgagaccatgctcag

SEQ ID NO: 819692 - DNA, 25 bp, Homo sapien
ggccctcacaccacaagacagatac

SEQ ID NO: 819693 - DNA, 25 bp, Homo sapien
tgatatccttgcacaaacatcactc

SEQ ID NO: 819694 - DNA, 25 bp, Homo sapien
tgttccccagagaaatccttaaaca

SEQ ID NO: 819695 - DNA, 25 bp, Homo sapien
atcagctgatatccttgcacaaaca

SEQ ID NO: 819696 - DNA, 25 bp, Homo sapien
atgtaaatcaaaactgccaatgatc

SEQ ID NO: 819697 - DNA, 25 bp, Homo sapien
taaatcaaaactgccaatgatcccc

SEQ ID NO: 819698 - DNA, 25 bp, Homo sapien
tttatgaagccaaagaaaaaagaca

SEQ ID NO: 819699 - DNA, 25 bp, Homo sapien
tcagatatgtaaatcaaaactgcca

SEQ ID NO: 819700 - DNA, 25 bp, Homo sapien
gataggcgacttctactgttcagtg

SEQ ID NO: 819701 - DNA, 25 bp, Homo sapien
gaatttacgacagagcctatcaagg

SEQ ID NO: 819702 - DNA, 25 bp, Homo sapien
ggtttatgacctagactgcccttac

SEQ ID NO: 819703 - DNA, 25 bp, Homo sapien
tcggcctctagatcatggaatcata

SEQ ID NO: 819704 - DNA, 25 bp, Homo sapien
gcttgatatgtgactgaggtctcca

SEQ ID NO: 819705 - DNA, 25 bp, Homo sapien
gccaggtctggcatatttttcatca

SEQ ID NO: 819706 - DNA, 25 bp, Homo sapien
tttcatcacgtttagtacaatactg

SEQ ID NO: 819707 - DNA, 25 bp, Homo sapien
ggttgcccaccacttcgagatacat

SEQ ID NO: 819708 - DNA, 25 bp, Homo sapien
cctccgggatgcatgtgcgacgcat

SEQ ID NO: 819709 - DNA, 25 bp, Homo sapien
ctccacctccgggatgcatgtgcga

SEQ ID NO: 819710 - DNA, 25 bp, Homo sapien
acctccgggatgcatgtgcgacgca

SEQ ID NO: 819711 - DNA, 25 bp, Homo sapien
ccacctccgggatgcatgtgcgacg

SEQ ID NO: 819712 - DNA, 25 bp, Homo sapien
cattatcctaagtcagaggagtgga

SEQ ID NO: 819713 - DNA, 25 bp, Homo sapien
tagcatatctaaatcctggcatctg

SEQ ID NO: 819714 - DNA, 25 bp, Homo sapien
tactacatagtcaaggaactcaggt

SEQ ID NO: 819715 - DNA, 25 bp, Homo sapien
tgcaaaacatcccactcaggtagga

SEQ ID NO: 819716 - DNA, 25 bp, Homo sapien
cagaacaagtttagatctatacctc

SEQ ID NO: 819717 - DNA, 25 bp, Homo sapien
tctgagggatgacataattctcaac

SEQ ID NO: 819718 - DNA, 25 bp, Homo sapien
gatccacagtacttctgaccagaag

SEQ ID NO: 819719 - DNA, 25 bp, Homo sapien
cattctagcatatcaaataggcaaa

SEQ ID NO: 819720 - DNA, 25 bp, Homo sapien
ctgattctgcaactgattctgtagc

SEQ ID NO: 819721 - DNA, 25 bp, Homo sapien
gctctcaggcctattttgatctcca

SEQ ID NO: 819722 - DNA, 25 bp, Homo sapien
ctgtagctctcaggcctattttgat

SEQ ID NO: 819723 - DNA, 25 bp, Homo sapien
acatttcctttacaactgattctgc

SEQ ID NO: 819724 - DNA, 25 bp, Homo sapien
tgtcagtgtccctctctattaccct

SEQ ID NO: 819725 - DNA, 25 bp, Homo sapien
tatgtctgtggattcagaccttcct

SEQ ID NO: 819726 - DNA, 25 bp, Homo sapien
aagggtgagccaatggacttgaatc

SEQ ID NO: 819727 - DNA, 25 bp, Homo sapien
ctcaattttgtggttaagactgcag

SEQ ID NO: 819728 - DNA, 25 bp, Homo sapien
ttcatctacgcctgaagctggacaa

SEQ ID NO: 819729 - DNA, 25 bp, Homo sapien
gcacagcttgcctggacttctgaaa

SEQ ID NO: 819730 - DNA, 25 bp, Homo sapien
tcttgctgtggtttaccaggtgccc

SEQ ID NO: 819731 - DNA, 25 bp, Homo sapien
gaagcgcagccgcaatgtttcctgt

SEQ ID NO: 819732 - DNA, 25 bp, Homo sapien
gacagtaatagcctgccactatctt

SEQ ID NO: 819733 - DNA, 25 bp, Homo sapien
cgttctggctctcatgacagtaata

SEQ ID NO: 819734 - DNA, 25 bp, Homo sapien
ccccgtattacactcctggaagagg

SEQ ID NO: 819735 - DNA, 25 bp, Homo sapien
tatgaagccatgtctgtaagaagcc

SEQ ID NO: 819736 - DNA, 25 bp, Homo sapien
ccatacttgttagggctaggcaaaa

SEQ ID NO: 819737 - DNA, 25 bp, Homo sapien
caaggtcacctccatacttgttagg

SEQ ID NO: 819738 - DNA, 25 bp, Homo sapien
ccaacatgtaacaactaatctagct

SEQ ID NO: 819739 - DNA, 25 bp, Homo sapien
gccagatattcctgatattctatag

SEQ ID NO: 819740 - DNA, 25 bp, Homo sapien
ttctgcaaacaaactgaacaccatt

SEQ ID NO: 819741 - DNA, 25 bp, Homo sapien
tctgcaaacaaactgaacaccattg

SEQ ID NO: 819742 - DNA, 25 bp, Homo sapien
ccaaaatgaacagagatcccacgtt

SEQ ID NO: 819743 - DNA, 25 bp, Homo sapien
gaagggaatcacatccagtctggtt

SEQ ID NO: 819744 - DNA, 25 bp, Homo sapien
gggctttgatgtcattagagggaaa

SEQ ID NO: 819745 - DNA, 25 bp, Homo sapien
gaatctgtttgtagaagggaatcac

SEQ ID NO: 819746 - DNA, 25 bp, Homo sapien
gttatttatatctagatactacaca

SEQ ID NO: 819747 - DNA, 25 bp, Homo sapien
tattatcaaaaccaccacatactta

SEQ ID NO: 819748 - DNA, 25 bp, Homo sapien
catacccactattcagttaaccttg

SEQ ID NO: 819749 - DNA, 25 bp, Homo sapien
tcactgattagggttcacttacaag

SEQ ID NO: 819750 - DNA, 25 bp, Homo sapien
gaacttcggtgttaatgtgttcaaa

SEQ ID NO: 819751 - DNA, 25 bp, Homo sapien
taagccctgatattagtgaggaagt

SEQ ID NO: 819752 - DNA, 25 bp, Homo sapien
gaagtgcctgttagggccacgtaga

SEQ ID NO: 819753 - DNA, 25 bp, Homo sapien
aaaataagccctgatattagtgagg

SEQ ID NO: 819754 - DNA, 25 bp, Homo sapien
gaaacctttggattgagagattcat

SEQ ID NO: 819755 - DNA, 25 bp, Homo sapien
cgttgttcctcaacaggttaagtag

SEQ ID NO: 819756 - DNA, 25 bp, Homo sapien
gccccgacaaatgtgaagaccaatg

SEQ ID NO: 819757 - DNA, 25 bp, Homo sapien
tgctctaggtcagactcaaatattt

SEQ ID NO: 819758 - DNA, 25 bp, Homo sapien
ccaggcaaaccttatgagaggcaga

SEQ ID NO: 819759 - DNA, 25 bp, Homo sapien
tagcaaagtttcgtaggtaagtcac

SEQ ID NO: 819760 - DNA, 25 bp, Homo sapien
tgaaaatatcaaccgctacaccctg

SEQ ID NO: 819761 - DNA, 25 bp, Homo sapien
gaaatccacaatcagtccacgagag

SEQ ID NO: 819762 - DNA, 25 bp, Homo sapien
ttgaattcttttccctggtgcatac

SEQ ID NO: 819763 - DNA, 25 bp, Homo sapien
caatgaatgaagttccgtatttgcg

SEQ ID NO: 819764 - DNA, 25 bp, Homo sapien
gagttgttgtcaacccctcccagaa

SEQ ID NO: 819765 - DNA, 25 bp, Homo sapien
ccgtatttgcgaaaataccaccatt

SEQ ID NO: 819766 - DNA, 25 bp, Homo sapien
gggcgcaagtggcttactgagactt

SEQ ID NO: 819767 - DNA, 25 bp, Homo sapien
ctgagacactttgcctattggaatc

SEQ ID NO: 819768 - DNA, 25 bp, Homo sapien
ataaatttagtggatttcgccatac

SEQ ID NO: 819769 - DNA, 25 bp, Homo sapien
agtggatttcgccatactttgcatt

SEQ ID NO: 819770 - DNA, 25 bp, Homo sapien
attcagcacccctaaataaatttag

SEQ ID NO: 819771 - DNA, 25 bp, Homo sapien
tttagtggatttcgccatactttgc

SEQ ID NO: 819772 - DNA, 25 bp, Homo sapien
cgagtcacaagtaaagaatgtctgg

SEQ ID NO: 819773 - DNA, 25 bp, Homo sapien
tggtcttgggcagagagattcatgt

SEQ ID NO: 819774 - DNA, 25 bp, Homo sapien
tgcatctgcgggacgcagatggtcc

SEQ ID NO: 819775 - DNA, 25 bp, Homo sapien
agattcatgtcatagtaagtaagag

SEQ ID NO: 819776 - DNA, 25 bp, Homo sapien
ttaagccaaaaagccctcccattca

SEQ ID NO: 819777 - DNA, 25 bp, Homo sapien
tcccattcagaaggatgtatggatt

SEQ ID NO: 819778 - DNA, 25 bp, Homo sapien
cagaaatcttgacacttaagccaaa

SEQ ID NO: 819779 - DNA, 25 bp, Homo sapien
taaaagcagaaatcttgacacttaa

SEQ ID NO: 819780 - DNA, 25 bp, Homo sapien
tccaaggcttcatgagctgcagaaa

SEQ ID NO: 819781 - DNA, 25 bp, Homo sapien
tgcagaaatcctagcttgggggttt

SEQ ID NO: 819782 - DNA, 25 bp, Homo sapien
tatctccaaggcttcatgagctgca

SEQ ID NO: 819783 - DNA, 25 bp, Homo sapien
aaggcttcatgagctgcagaaatcc

SEQ ID NO: 819784 - DNA, 25 bp, Homo sapien
tatctcccagatggtagaggaagca

SEQ ID NO: 819785 - DNA, 25 bp, Homo sapien
gaggaagcaattaggggaacttcaa

SEQ ID NO: 819786 - DNA, 25 bp, Homo sapien
ttttatctcccagatggtagaggaa

SEQ ID NO: 819787 - DNA, 25 bp, Homo sapien
taggggaacttcaactctggaccta

SEQ ID NO: 819788 - DNA, 25 bp, Homo sapien
catttggttagaagtagggcaccca

SEQ ID NO: 819789 - DNA, 25 bp, Homo sapien
gctgtaacagaccacgcaggtcctg

SEQ ID NO: 819790 - DNA, 25 bp, Homo sapien
gactgctcagctcgatggaagatat

SEQ ID NO: 819791 - DNA, 25 bp, Homo sapien
gagtagcactactggccaagaaaca

SEQ ID NO: 819792 - DNA, 25 bp, Homo sapien
tggccaactggttcatgcactcctg

SEQ ID NO: 819793 - DNA, 25 bp, Homo sapien
tcaacaaccctcttaggtgggaagc

SEQ ID NO: 819794 - DNA, 25 bp, Homo sapien
taaagtgctcagtacagtagccagc

SEQ ID NO: 819795 - DNA, 25 bp, Homo sapien
gagttacgccaaaacatgcagagtg

SEQ ID NO: 819796 - DNA, 25 bp, Homo sapien
caagagaatataagcagttgcacac

SEQ ID NO: 819797 - DNA, 25 bp, Homo sapien
tagctgctgagagcgtcggtaacag

SEQ ID NO: 819798 - DNA, 25 bp, Homo sapien
tccatgatgttgtagctgctgagag

SEQ ID NO: 819799 - DNA, 25 bp, Homo sapien
tactgggatccatgatgttgtagct

SEQ ID NO: 819800 - DNA, 25 bp, Homo sapien
gagcgtcggtaacagccatctccag

SEQ ID NO: 819801 - DNA, 25 bp, Homo sapien
gtgtatacggtttacaagcaggaat

SEQ ID NO: 819802 - DNA, 25 bp, Homo sapien
ccacagtgtatacggtttacaagca

SEQ ID NO: 819803 - DNA, 25 bp, Homo sapien
cagtgtatacggtttacaagcagga

SEQ ID NO: 819804 - DNA, 25 bp, Homo sapien
tatacggtttacaagcaggaattcc

SEQ ID NO: 819805 - DNA, 25 bp, Homo sapien
tacaccaagacattggtgtctcgtc

SEQ ID NO: 819806 - DNA, 25 bp, Homo sapien
tggtcctcccgagtcttctggcaca

SEQ ID NO: 819807 - DNA, 25 bp, Homo sapien
gccttcttttgatgtacaccaagac

SEQ ID NO: 819808 - DNA, 25 bp, Homo sapien
gcacacattgctagccttcttttga

SEQ ID NO: 819809 - DNA, 25 bp, Homo sapien
tgagcgttgagtgttggtgctccct

SEQ ID NO: 819810 - DNA, 25 bp, Homo sapien
caaagagtaaccgggaattcacaag

SEQ ID NO: 819811 - DNA, 25 bp, Homo sapien
accgggaattcacaagaataactgt

SEQ ID NO: 819812 - DNA, 25 bp, Homo sapien
gcgttgagtgttggtgctccctcct

SEQ ID NO: 819813 - DNA, 25 bp, Homo sapien
tcctgctctagaccgaatgactgaa

SEQ ID NO: 819814 - DNA, 25 bp, Homo sapien
tctgacccaagatgtcaacagtgct

SEQ ID NO: 819815 - DNA, 25 bp, Homo sapien
tctactcaaatagggccagggaaag

SEQ ID NO: 819816 - DNA, 25 bp, Homo sapien
tggattactggagaccacgaggtca

SEQ ID NO: 819817 - DNA, 25 bp, Homo sapien
gagattgaatgtagccacccaggac

SEQ ID NO: 819818 - DNA, 25 bp, Homo sapien
caatgatctcgaagcatgcatgagg

SEQ ID NO: 819819 - DNA, 25 bp, Homo sapien
aatggctcagaggtcaacaggaaac

SEQ ID NO: 819820 - DNA, 25 bp, Homo sapien
gaaaggtgataacgccagagtctac

SEQ ID NO: 819821 - DNA, 25 bp, Homo sapien
taatcctgacatctaccctgtgagg

SEQ ID NO: 819822 - DNA, 25 bp, Homo sapien
ttaaaggtgttctgagaccaagaag

SEQ ID NO: 819823 - DNA, 25 bp, Homo sapien
tcaacaggtaaacgcacacgaaggt

SEQ ID NO: 819824 - DNA, 25 bp, Homo sapien
gaacagcaacaatgagtcgttatta

SEQ ID NO: 819825 - DNA, 25 bp, Homo sapien
tgactgaaattgctcccgtggacac

SEQ ID NO: 819826 - DNA, 25 bp, Homo sapien
taaaactcagtgagaccgcatacgc

SEQ ID NO: 819827 - DNA, 25 bp, Homo sapien
ccgcatacgcaaacatgaggtctca

SEQ ID NO: 819828 - DNA, 25 bp, Homo sapien
cactgcttcgctacaacctggcttg

SEQ ID NO: 819829 - DNA, 25 bp, Homo sapien
tcagaagggggaactccttcattaa

SEQ ID NO: 819830 - DNA, 25 bp, Homo sapien
ctcagaagggggaactccttcatta

SEQ ID NO: 819831 - DNA, 25 bp, Homo sapien
taaaaggttttcatggatattgaac

SEQ ID NO: 819832 - DNA, 25 bp, Homo sapien
ctaaaaggttttcatggatattgaa

SEQ ID NO: 819833 - DNA, 25 bp, Homo sapien
aaaggttttcatggatattgaacat

SEQ ID NO: 819834 - DNA, 25 bp, Homo sapien
aaaaggttttcatggatattgaaca

SEQ ID NO: 819835 - DNA, 25 bp, Homo sapien
aacatcagcatatgcttgtagttcc

SEQ ID NO: 819836 - DNA, 25 bp, Homo sapien
tgctaagactgcctgaacatcagca

SEQ ID NO: 819837 - DNA, 25 bp, Homo sapien
ctttgctaagactgcctgaacatca

SEQ ID NO: 819838 - DNA, 25 bp, Homo sapien
taagactgcctgaacatcagcatat

SEQ ID NO: 819839 - DNA, 25 bp, Homo sapien
ccagggtgaagatcagaatgcccta

SEQ ID NO: 819840 - DNA, 25 bp, Homo sapien
tctaagacctctaaagcacccactt

SEQ ID NO: 819841 - DNA, 25 bp, Homo sapien
taaaagctgtctgtactctaagacc

SEQ ID NO: 819842 - DNA, 25 bp, Homo sapien
gcaactcagtagacgtctccaggaa

SEQ ID NO: 819843 - DNA, 25 bp, Homo sapien
tagagcatccagtgcaaagctatgc

SEQ ID NO: 819844 - DNA, 25 bp, Homo sapien
gtgcaaagctatgcaggaccaccat

SEQ ID NO: 819845 - DNA, 25 bp, Homo sapien
ccaaatctgtagagcatccagtgca

SEQ ID NO: 819846 - DNA, 25 bp, Homo sapien
tcttggtgtccaaatctgtagagca

SEQ ID NO: 819847 - DNA, 25 bp, Homo sapien
agccaaacaaagcagtttccctgat

SEQ ID NO: 819848 - DNA, 25 bp, Homo sapien
aagcagtttccctgatggtaatggc

SEQ ID NO: 819849 - DNA, 25 bp, Homo sapien
gtctgtgtcagagggcccttccgtg

SEQ ID NO: 819850 - DNA, 25 bp, Homo sapien
tggctggtgccctgaagccaaacaa

SEQ ID NO: 819851 - DNA, 25 bp, Homo sapien
catcttagggagaatgactcttgaa

SEQ ID NO: 819852 - DNA, 25 bp, Homo sapien
aagtcataagtggttcataatagcc

SEQ ID NO: 819853 - DNA, 25 bp, Homo sapien
ctttaattcaataatcttggaagaa

SEQ ID NO: 819854 - DNA, 25 bp, Homo sapien
ttttcaaaagtcataagtggttcat

SEQ ID NO: 819855 - DNA, 25 bp, Homo sapien
ctgaggagctgtgccactctacgtc

SEQ ID NO: 819856 - DNA, 25 bp, Homo sapien
acctctttgccatcttatgttttat

SEQ ID NO: 819857 - DNA, 25 bp, Homo sapien
ctctttgccatcttatgttttatag

SEQ ID NO: 819858 - DNA, 25 bp, Homo sapien
ctttgccatcttatgttttatagaa

SEQ ID NO: 819859 - DNA, 25 bp, Homo sapien
cctctttgccatcttatgttttata

SEQ ID NO: 819860 - DNA, 25 bp, Homo sapien
aagaaagtaggaacacataagtttg

SEQ ID NO: 819861 - DNA, 25 bp, Homo sapien
gaaagtaggaacacataagtttgca

SEQ ID NO: 819862 - DNA, 25 bp, Homo sapien
agaaagtaggaacacataagtttgc

SEQ ID NO: 819863 - DNA, 25 bp, Homo sapien
agcagctgtgtagcatattgttgct

SEQ ID NO: 819864 - DNA, 25 bp, Homo sapien
agagacagctcttgctttgagcaaa

SEQ ID NO: 819865 - DNA, 25 bp, Homo sapien
caaagcagctgtgtagcatattgtt

SEQ ID NO: 819866 - DNA, 25 bp, Homo sapien
gacagctcttgctttgagcaaagca

SEQ ID NO: 819867 - DNA, 25 bp, Homo sapien
tcccaagctggagtcgctgtgtagg

SEQ ID NO: 819868 - DNA, 25 bp, Homo sapien
aagatgttgcagtaggtactggcga

SEQ ID NO: 819869 - DNA, 25 bp, Homo sapien
tcgctgtgtagggagaaaagatgtt

SEQ ID NO: 819870 - DNA, 25 bp, Homo sapien
gggaagctgtgacaaccctggccct

SEQ ID NO: 819871 - DNA, 25 bp, Homo sapien
gaggttaaatcgttgcagcttcagc

SEQ ID NO: 819872 - DNA, 25 bp, Homo sapien
ccaatgtcagtgctgcgatggaggt

SEQ ID NO: 819873 - DNA, 25 bp, Homo sapien
cctgcttggggccattccggcagag

SEQ ID NO: 819874 - DNA, 25 bp, Homo sapien
ggccattccggcagagggtgtgtgc

SEQ ID NO: 819875 - DNA, 25 bp, Homo sapien
cacagctctatgaatggcctctact

SEQ ID NO: 819876 - DNA, 25 bp, Homo sapien
tgctgtgctcagcccccgccgagat

SEQ ID NO: 819877 - DNA, 25 bp, Homo sapien
tcagcccccgccgagatgcagcctc

SEQ ID NO: 819878 - DNA, 25 bp, Homo sapien
agctctatgaatggcctctactgca

SEQ ID NO: 819879 - DNA, 25 bp, Homo sapien
tacttgagatacaacactgtggtca

SEQ ID NO: 819880 - DNA, 25 bp, Homo sapien
acactgtggtcaatgaatgctttct

SEQ ID NO: 819881 - DNA, 25 bp, Homo sapien
gcggtgtacttgagatacaacactg

SEQ ID NO: 819882 - DNA, 25 bp, Homo sapien
ttataagcggtgtacttgagataca

SEQ ID NO: 819883 - DNA, 25 bp, Homo sapien
ctgaggtgaaccacacgaagtttct

SEQ ID NO: 819884 - DNA, 25 bp, Homo sapien
ccaaaatgtacttaatagcgggact

SEQ ID NO: 819885 - DNA, 25 bp, Homo sapien
gataattacgtaatacagcatgtag

SEQ ID NO: 819886 - DNA, 25 bp, Homo sapien
atagcgggactgaaagtggctctca

SEQ ID NO: 819887 - DNA, 25 bp, Homo sapien
taatgcatgtttctaggcagcctct

SEQ ID NO: 819888 - DNA, 25 bp, Homo sapien
ccaagaagcacctgttaatgcatgt

SEQ ID NO: 819889 - DNA, 25 bp, Homo sapien
cacctgttaatgcatgtttctaggc

SEQ ID NO: 819890 - DNA, 25 bp, Homo sapien
catgtttctaggcagcctctatttc

SEQ ID NO: 819891 - DNA, 25 bp, Homo sapien
aatccctgaagacaatagctgcagc

SEQ ID NO: 819892 - DNA, 25 bp, Homo sapien
ccaaggcattgaggtgccactgtta

SEQ ID NO: 819893 - DNA, 25 bp, Homo sapien
tagagcctcccctcaaatctggagg

SEQ ID NO: 819894 - DNA, 25 bp, Homo sapien
tgcagccagaacatgctagagcctc

SEQ ID NO: 819895 - DNA, 25 bp, Homo sapien
aggacaggctttcaggcctgttcca

SEQ ID NO: 819896 - DNA, 25 bp, Homo sapien
ctaggacaggctttcaggcctgttc

SEQ ID NO: 819897 - DNA, 25 bp, Homo sapien
ggacaggctttcaggcctgttccac

SEQ ID NO: 819898 - DNA, 25 bp, Homo sapien
taggacaggctttcaggcctgttcc

SEQ ID NO: 819899 - DNA, 25 bp, Homo sapien
cctggtggtaggcagtggagatgac

SEQ ID NO: 819900 - DNA, 25 bp, Homo sapien
acagcccagctccaattggtagaag

SEQ ID NO: 819901 - DNA, 25 bp, Homo sapien
tgcttgtcctggtggtaggcagtgg

SEQ ID NO: 819902 - DNA, 25 bp, Homo sapien
ccagctccaattggtagaagtaccc

SEQ ID NO: 819903 - DNA, 25 bp, Homo sapien
ggcctcctcctctatgggtgggacc

SEQ ID NO: 819904 - DNA, 25 bp, Homo sapien
gagcaggcctacatctactttaagg

SEQ ID NO: 819905 - DNA, 25 bp, Homo sapien
gacatgctaaggaacgggtactggc

SEQ ID NO: 819906 - DNA, 25 bp, Homo sapien
ctatgggtgggacctcaaaaacttg

SEQ ID NO: 819907 - DNA, 25 bp, Homo sapien
aagcaggacacacttgtgttaatac

SEQ ID NO: 819908 - DNA, 25 bp, Homo sapien
aaaaagcaggacacacttgtgttaa

SEQ ID NO: 819909 - DNA, 25 bp, Homo sapien
aaagcaggacacacttgtgttaata

SEQ ID NO: 819910 - DNA, 25 bp, Homo sapien
aaaagcaggacacacttgtgttaat

SEQ ID NO: 819911 - DNA, 25 bp, Homo sapien
tgaaagaatgcatatgctattgctt

SEQ ID NO: 819912 - DNA, 25 bp, Homo sapien
ctcttccagtgtgcaagatgaaaga

SEQ ID NO: 819913 - DNA, 25 bp, Homo sapien
tgcaaaagattcaaagccccttcca

SEQ ID NO: 819914 - DNA, 25 bp, Homo sapien
tcctctcttcaggatatgttctggg

SEQ ID NO: 819915 - DNA, 25 bp, Homo sapien
tggggctgtccaagtttccaaacag

SEQ ID NO: 819916 - DNA, 25 bp, Homo sapien
gatgctgtggggctgtccaagtttc

SEQ ID NO: 819917 - DNA, 25 bp, Homo sapien
tccaaacagggttttcagggtgaca

SEQ ID NO: 819918 - DNA, 25 bp, Homo sapien
caaacagggttttcagggtgacaag

SEQ ID NO: 819919 - DNA, 25 bp, Homo sapien
taactgtggctcttagccaaccctc

SEQ ID NO: 819920 - DNA, 25 bp, Homo sapien
gccatcaagaagtggtcatcagtgt

SEQ ID NO: 819921 - DNA, 25 bp, Homo sapien
gcacgaagcctaacccaatgccaaa

SEQ ID NO: 819922 - DNA, 25 bp, Homo sapien
tggaggataactgtggctcttagcc

SEQ ID NO: 819923 - DNA, 25 bp, Homo sapien
tacatgaatgctacacctcctagca

SEQ ID NO: 819924 - DNA, 25 bp, Homo sapien
cactgtccttggtttgaagcataac

SEQ ID NO: 819925 - DNA, 25 bp, Homo sapien
acctcctagcaaacaccagggttca

SEQ ID NO: 819926 - DNA, 25 bp, Homo sapien
ccagggttcaatggccactgtcctt

SEQ ID NO: 819927 - DNA, 25 bp, Homo sapien
accattacagcctattctccttaca

SEQ ID NO: 819928 - DNA, 25 bp, Homo sapien
tacagcctattctccttacatggaa

SEQ ID NO: 819929 - DNA, 25 bp, Homo sapien
tagacgacatgcagggagcatgtct

SEQ ID NO: 819930 - DNA, 25 bp, Homo sapien
tcctcttcccaattagacgacatgc

SEQ ID NO: 819931 - DNA, 25 bp, Homo sapien
tatgcatggccagcggacctgagag

SEQ ID NO: 819932 - DNA, 25 bp, Homo sapien
tcaaaaggcaccaccaagtggtaca

SEQ ID NO: 819933 - DNA, 25 bp, Homo sapien
gggagctgcggcaactttcctgaag

SEQ ID NO: 819934 - DNA, 25 bp, Homo sapien
caagtggtacaatggtggaagtgca

SEQ ID NO: 819935 - DNA, 25 bp, Homo sapien
agagcaaaggttcccacggtgatga

SEQ ID NO: 819936 - DNA, 25 bp, Homo sapien
aagcaggatccaatcatgaaagtaa

SEQ ID NO: 819937 - DNA, 25 bp, Homo sapien
ttcccacggtgatgaatacctccaa

SEQ ID NO: 819938 - DNA, 25 bp, Homo sapien
gcaggatccaatcatgaaagtaaga

SEQ ID NO: 819939 - DNA, 25 bp, Homo sapien
tgtccagaaattttgcgaatctaag

SEQ ID NO: 819940 - DNA, 25 bp, Homo sapien
actgctaagacatgcaactgctcca

SEQ ID NO: 819941 - DNA, 25 bp, Homo sapien
tgctccatgacagccttgtgccttt

SEQ ID NO: 819942 - DNA, 25 bp, Homo sapien
ctcctggtccctttcactgctaaga

SEQ ID NO: 819943 - DNA, 25 bp, Homo sapien
gattgggtaaggataaaataggtgc

SEQ ID NO: 819944 - DNA, 25 bp, Homo sapien
cagattgggtaaggataaaataggt

SEQ ID NO: 819945 - DNA, 25 bp, Homo sapien
aagggataagggatcatccgaaaag

SEQ ID NO: 819946 - DNA, 25 bp, Homo sapien
tgtacagattgggtaaggataaaat

SEQ ID NO: 819947 - DNA, 25 bp, Homo sapien
gaaggaacataatccagcagtaaag

SEQ ID NO: 819948 - DNA, 25 bp, Homo sapien
ctgtgaaggaacataatccagcagt

SEQ ID NO: 819949 - DNA, 25 bp, Homo sapien
gaacataatccagcagtaaagagaa

SEQ ID NO: 819950 - DNA, 25 bp, Homo sapien
cataatccagcagtaaagagaataa

SEQ ID NO: 819951 - DNA, 25 bp, Homo sapien
agcttttgcgaagacccccataagt

SEQ ID NO: 819952 - DNA, 25 bp, Homo sapien
agttccgggaactgatgtgtcagga

SEQ ID NO: 819953 - DNA, 25 bp, Homo sapien
cccccataagttccgggaactgatg

SEQ ID NO: 819954 - DNA, 25 bp, Homo sapien
cataagttccgggaactgatgtgtc

SEQ ID NO: 819955 - DNA, 25 bp, Homo sapien
ccaaggcctccctctaggcaaacac

SEQ ID NO: 819956 - DNA, 25 bp, Homo sapien
aggtgccggagggatttccagttca

SEQ ID NO: 819957 - DNA, 25 bp, Homo sapien
cagttcatcttcaacacgcatgaaa

SEQ ID NO: 819958 - DNA, 25 bp, Homo sapien
aaatactcttgcaattccagtccct

SEQ ID NO: 819959 - DNA, 25 bp, Homo sapien
tccctgaactctgccgagcagaaaa

SEQ ID NO: 819960 - DNA, 25 bp, Homo sapien
ctgacagattgtgaaggccgagacg

SEQ ID NO: 819961 - DNA, 25 bp, Homo sapien
tggatgccatgctgaacaactagga

SEQ ID NO: 819962 - DNA, 25 bp, Homo sapien
tgcgggatcataaaggacagacacc

SEQ ID NO: 819963 - DNA, 25 bp, Homo sapien
taagactatggcaggagttcaggca

SEQ ID NO: 819964 - DNA, 25 bp, Homo sapien
gggtgtggcgtgggagcttcgggag

SEQ ID NO: 819965 - DNA, 25 bp, Homo sapien
gaggggcctgatgaagtgaccaggg

SEQ ID NO: 819966 - DNA, 25 bp, Homo sapien
gtggggtgtggcgtgggagcttcgg

SEQ ID NO: 819967 - DNA, 25 bp, Homo sapien
cgggaggggcctgatgaagtgacca

SEQ ID NO: 819968 - DNA, 25 bp, Homo sapien
tttcacaagctgcaaatggtcgcag

SEQ ID NO: 819969 - DNA, 25 bp, Homo sapien
tgcaaatggtcgcaggcagcctcta

SEQ ID NO: 819970 - DNA, 25 bp, Homo sapien
cagcctctagggcagttgcgataac

SEQ ID NO: 819971 - DNA, 25 bp, Homo sapien
caagctgcaaatggtcgcaggcagc

SEQ ID NO: 819972 - DNA, 25 bp, Homo sapien
atcacttagaaggtcacggctccca

SEQ ID NO: 819973 - DNA, 25 bp, Homo sapien
caagaggctcagtctcggagaagga

SEQ ID NO: 819974 - DNA, 25 bp, Homo sapien
cgatgtctaaaactgtccagagggc

SEQ ID NO: 819975 - DNA, 25 bp, Homo sapien
gaatgagcaacaccaagaaaacctg

SEQ ID NO: 819976 - DNA, 25 bp, Homo sapien
caggcaatgtagtgaggtgtctgaa

SEQ ID NO: 819977 - DNA, 25 bp, Homo sapien
gagcaggcaatgtagtgaggtgtct

SEQ ID NO: 819978 - DNA, 25 bp, Homo sapien
aaggagcaggcaatgtagtgaggtg

SEQ ID NO: 819979 - DNA, 25 bp, Homo sapien
ggaaggagcaggcaatgtagtgagg

SEQ ID NO: 819980 - DNA, 25 bp, Homo sapien
cccacagcaagccttccatcccata

SEQ ID NO: 819981 - DNA, 25 bp, Homo sapien
cttcccccacagcaagccttccatc

SEQ ID NO: 819982 - DNA, 25 bp, Homo sapien
ccacagcaagccttccatcccatac

SEQ ID NO: 819983 - DNA, 25 bp, Homo sapien
cccccacagcaagccttccatccca

SEQ ID NO: 819984 - DNA, 25 bp, Homo sapien
tccttgggagaattcacaaagactc

SEQ ID NO: 819985 - DNA, 25 bp, Homo sapien
tcaacaaggttccacaagaatacga

SEQ ID NO: 819986 - DNA, 25 bp, Homo sapien
gccccaatgcttccaacgtatagaa

SEQ ID NO: 819987 - DNA, 25 bp, Homo sapien
tcccacgagccccagttgagatggg

SEQ ID NO: 819988 - DNA, 25 bp, Homo sapien
gcaaagtactgtggtcccttctttc

SEQ ID NO: 819989 - DNA, 25 bp, Homo sapien
ctggttgatgtccataaatgctccc

SEQ ID NO: 819990 - DNA, 25 bp, Homo sapien
ttttccccatgctgcacagcaaagt

SEQ ID NO: 819991 - DNA, 25 bp, Homo sapien
tggttgatgtccataaatgctccct

SEQ ID NO: 819992 - DNA, 25 bp, Homo sapien
tgtttgctttgttttgggcactaac

SEQ ID NO: 819993 - DNA, 25 bp, Homo sapien
ttgtttgctttgttttgggcactaa

SEQ ID NO: 819994 - DNA, 25 bp, Homo sapien
tttgtttgctttgttttgggcacta

SEQ ID NO: 819995 - DNA, 25 bp, Homo sapien
ctgcattacgaaagtctcaaaaggc

SEQ ID NO: 819996 - DNA, 25 bp, Homo sapien
gcagaaaccttgttcaagactataa

SEQ ID NO: 819997 - DNA, 25 bp, Homo sapien
cccacgcttgcagcttaagtctctg

SEQ ID NO: 819998 - DNA, 25 bp, Homo sapien
cagcagaaaccttgttcaagactat

SEQ ID NO: 819999 - DNA, 25 bp, Homo sapien
tttaagggggcaaacaaagtgctga

SEQ ID NO: 820000 - DNA, 25 bp, Homo sapien
gttagctggtgccacagactggatg

SEQ ID NO: 820001 - DNA, 25 bp, Homo sapien
tcagatccgtgttagctggtgccac

SEQ ID NO: 820002 - DNA, 25 bp, Homo sapien
tggatgggaggatgctctccacttt

SEQ ID NO: 820003 - DNA, 25 bp, Homo sapien
gcagcggcgggtgaggtgagtggag

SEQ ID NO: 820004 - DNA, 25 bp, Homo sapien
agtcatgctttcttgcggtccacaa

SEQ ID NO: 820005 - DNA, 25 bp, Homo sapien
tcttgcggtccacaaggagttggca

SEQ ID NO: 820006 - DNA, 25 bp, Homo sapien
taatatggaatagtccatgaacatt

SEQ ID NO: 820007 - DNA, 25 bp, Homo sapien
cttttctgaaggcaaaataaaatag

SEQ ID NO: 820008 - DNA, 25 bp, Homo sapien
ttctgaaggcaaaataaaatagaac

SEQ ID NO: 820009 - DNA, 25 bp, Homo sapien
ggcaaaataaaatagaactgaacat

SEQ ID NO: 820010 - DNA, 25 bp, Homo sapien
aataaaatagaactgaacatcagtg

SEQ ID NO: 820011 - DNA, 25 bp, Homo sapien
tcttctgcgtaggtgtccatgggcg

SEQ ID NO: 820012 - DNA, 25 bp, Homo sapien
tggtgagagggttcctgaaaagccc

SEQ ID NO: 820013 - DNA, 25 bp, Homo sapien
cacgcttcgctgttggatgcagcca

SEQ ID NO: 820014 - DNA, 25 bp, Homo sapien
cggaattctgtctggcaggtcccca

SEQ ID NO: 820015 - DNA, 25 bp, Homo sapien
tgttggatcaggagactagtagttc

SEQ ID NO: 820016 - DNA, 25 bp, Homo sapien
gggagagaccctactagtgtataaa

SEQ ID NO: 820017 - DNA, 25 bp, Homo sapien
tacataagcctcagggagtcatagg

SEQ ID NO: 820018 - DNA, 25 bp, Homo sapien
tagttcctgggtactgaatgtcatt

SEQ ID NO: 820019 - DNA, 25 bp, Homo sapien
ccatataatctttggcatctgcccc

SEQ ID NO: 820020 - DNA, 25 bp, Homo sapien
ttcatgaaaggcctcgaaccctgaa

SEQ ID NO: 820021 - DNA, 25 bp, Homo sapien
aaaggcctcgaaccctgaattgtca

SEQ ID NO: 820022 - DNA, 25 bp, Homo sapien
ctccaatagtaatgaaggcttcatg

SEQ ID NO: 820023 - DNA, 25 bp, Homo sapien
ggtagtgactgaccccgtgaaagcc

SEQ ID NO: 820024 - DNA, 25 bp, Homo sapien
taacatgtaggctatttttggaccc

SEQ ID NO: 820025 - DNA, 25 bp, Homo sapien
gaaagcccctgtaattgaatcatag

SEQ ID NO: 820026 - DNA, 25 bp, Homo sapien
gaatcataggccctggatttcccca

SEQ ID NO: 820027 - DNA, 25 bp, Homo sapien
gatggtgttgaggtcactacactga

SEQ ID NO: 820028 - DNA, 25 bp, Homo sapien
gttctgatggtgttgaggtcactac

SEQ ID NO: 820029 - DNA, 25 bp, Homo sapien
gtgttgaggtcactacactgagcaa

SEQ ID NO: 820030 - DNA, 25 bp, Homo sapien
tctgatggtgttgaggtcactacac

SEQ ID NO: 820031 - DNA, 25 bp, Homo sapien
tgggctcatcgagcagctcaacagc

SEQ ID NO: 820032 - DNA, 25 bp, Homo sapien
gtcggcattgctgccctcaggttgc

SEQ ID NO: 820033 - DNA, 25 bp, Homo sapien
caggtccaaagtgggctcatcgagc

SEQ ID NO: 820034 - DNA, 25 bp, Homo sapien
tcacaaaaagtctggcggtagggca

SEQ ID NO: 820035 - DNA, 25 bp, Homo sapien
aaggcagattccctccccatctaga

SEQ ID NO: 820036 - DNA, 25 bp, Homo sapien
gaaagagatagagttgatagccctg

SEQ ID NO: 820037 - DNA, 25 bp, Homo sapien
gaatgttgaaccataccaggtcgct

SEQ ID NO: 820038 - DNA, 25 bp, Homo sapien
tccatctgccgactttctggtcttg

SEQ ID NO: 820039 - DNA, 25 bp, Homo sapien
ttctgctctgggcacgcatggcgcc

SEQ ID NO: 820040 - DNA, 25 bp, Homo sapien
gcatggcgcccgcacacggagtctg

SEQ ID NO: 820041 - DNA, 25 bp, Homo sapien
atggcgcccgcacacggagtctgac

SEQ ID NO: 820042 - DNA, 25 bp, Homo sapien
acgcatggcgcccgcacacggagtc

SEQ ID NO: 820043 - DNA, 25 bp, Homo sapien
cagcgatacggagcggccctggcga

SEQ ID NO: 820044 - DNA, 25 bp, Homo sapien
acggggatgtatctgggtcagcctg

SEQ ID NO: 820045 - DNA, 25 bp, Homo sapien
ccgagtcgtgggtggcgcggtgctt

SEQ ID NO: 820046 - DNA, 25 bp, Homo sapien
tgctcttcccgagtcgtgggtggcg

SEQ ID NO: 820047 - DNA, 25 bp, Homo sapien
tacagacaaggagggagtaaaggcc

SEQ ID NO: 820048 - DNA, 25 bp, Homo sapien
cagacggcctctagacaggtcagga

SEQ ID NO: 820049 - DNA, 25 bp, Homo sapien
tccatcgagagaataggtacagaca

SEQ ID NO: 820050 - DNA, 25 bp, Homo sapien
gacaagtcattgagtccagacggcc

SEQ ID NO: 820051 - DNA, 25 bp, Homo sapien
catagacacgtgagcaatgccatca

SEQ ID NO: 820052 - DNA, 25 bp, Homo sapien
ccttgaaatgagatagcaggtccat

SEQ ID NO: 820053 - DNA, 25 bp, Homo sapien
tatgggccagatatctatcactccg

SEQ ID NO: 820054 - DNA, 25 bp, Homo sapien
tcagccagtgggacattagcaaatg

SEQ ID NO: 820055 - DNA, 25 bp, Homo sapien
ttgttcttgtcttaccagctttgac

SEQ ID NO: 820056 - DNA, 25 bp, Homo sapien
cttgttcttgtcttaccagctttga

SEQ ID NO: 820057 - DNA, 25 bp, Homo sapien
ttaagaatttgctttgttctctgac

SEQ ID NO: 820058 - DNA, 25 bp, Homo sapien
ccagccattggctgtgattgcactg

SEQ ID NO: 820059 - DNA, 25 bp, Homo sapien
gctatgttttcaagacccagtatgg

SEQ ID NO: 820060 - DNA, 25 bp, Homo sapien
caagccgtggtggaacacccagtcc

SEQ ID NO: 820061 - DNA, 25 bp, Homo sapien
actgaaagctccctggacaacagcc

SEQ ID NO: 820062 - DNA, 25 bp, Homo sapien
taagagcaggttcttaagcccctgt

SEQ ID NO: 820063 - DNA, 25 bp, Homo sapien
agcccctgtcaatgcagattcctta

SEQ ID NO: 820064 - DNA, 25 bp, Homo sapien
ggccaggctaagacatgtgaggtat

SEQ ID NO: 820065 - DNA, 25 bp, Homo sapien
tcaaactccctactcatctcaaagg

SEQ ID NO: 820066 - DNA, 25 bp, Homo sapien
ggatctgttccaacagggtgataat

SEQ ID NO: 820067 - DNA, 25 bp, Homo sapien
gcaatagactgggatgcatctgact

SEQ ID NO: 820068 - DNA, 25 bp, Homo sapien
gatctgttccaacagggtgataata

SEQ ID NO: 820069 - DNA, 25 bp, Homo sapien
aatagtagcaatagactgggatgca

SEQ ID NO: 820070 - DNA, 25 bp, Homo sapien
tagcccagtgcgcatttttaaggaa

SEQ ID NO: 820071 - DNA, 25 bp, Homo sapien
taattaccggcccaggatgtgttcc

SEQ ID NO: 820072 - DNA, 25 bp, Homo sapien
gaagccaagcagtctttgaagcgaa

SEQ ID NO: 820073 - DNA, 25 bp, Homo sapien
caagggtggcacagaaatcttagga

SEQ ID NO: 820074 - DNA, 25 bp, Homo sapien
gctcctaatgccaaagacctactac

SEQ ID NO: 820075 - DNA, 25 bp, Homo sapien
gacctactactctgggtgcctgccg

SEQ ID NO: 820076 - DNA, 25 bp, Homo sapien
tctctcgggcgctggggtccctgct

SEQ ID NO: 820077 - DNA, 25 bp, Homo sapien
tgctagggccgtctgggctcaagct

SEQ ID NO: 820078 - DNA, 25 bp, Homo sapien
aagtttggagacaacgctggccttt

SEQ ID NO: 820079 - DNA, 25 bp, Homo sapien
gtttggagacaacgctggccttttc

SEQ ID NO: 820080 - DNA, 25 bp, Homo sapien
aaaagtttggagacaacgctggcct

SEQ ID NO: 820081 - DNA, 25 bp, Homo sapien
ggagacaacgctggccttttccaga

SEQ ID NO: 820082 - DNA, 25 bp, Homo sapien
gccgattttataggtggagtaacaa

SEQ ID NO: 820083 - DNA, 25 bp, Homo sapien
gcatttttagactggttggcattta

SEQ ID NO: 820084 - DNA, 25 bp, Homo sapien
ttctttgcaaaccagcctgatagca

SEQ ID NO: 820085 - DNA, 25 bp, Homo sapien
ggtgattgtcagttcctataaatag

SEQ ID NO: 820086 - DNA, 25 bp, Homo sapien
caggaggttcagacatcagttagca

SEQ ID NO: 820087 - DNA, 25 bp, Homo sapien
gatctctcatatgttgtgtcccgtg

SEQ ID NO: 820088 - DNA, 25 bp, Homo sapien
tgtcccgtgatgtgaaaagcactgc

SEQ ID NO: 820089 - DNA, 25 bp, Homo sapien
caggtcacactatgccacaataagg

SEQ ID NO: 820090 - DNA, 25 bp, Homo sapien
gagtcaaccttgtgggatgcaacca

SEQ ID NO: 820091 - DNA, 25 bp, Homo sapien
agtgctgagcttaggcgacttctac

SEQ ID NO: 820092 - DNA, 25 bp, Homo sapien
ctgaggtcacaggagtatatatacc

SEQ ID NO: 820093 - DNA, 25 bp, Homo sapien
gaatagagttacagtgacaaactgc

SEQ ID NO: 820094 - DNA, 25 bp, Homo sapien
tccaatttttcagatagattgtcag

SEQ ID NO: 820095 - DNA, 25 bp, Homo sapien
tctgacaattccaggcgctgtctgt

SEQ ID NO: 820096 - DNA, 25 bp, Homo sapien
tttcagatagattgtcagcagaatc

SEQ ID NO: 820097 - DNA, 25 bp, Homo sapien
tatgtctgacaattccaggcgctgt

SEQ ID NO: 820098 - DNA, 25 bp, Homo sapien
ttctagactatgagtggcccaaggg

SEQ ID NO: 820099 - DNA, 25 bp, Homo sapien
tgttggcacgagactcagcctagtt

SEQ ID NO: 820100 - DNA, 25 bp, Homo sapien
ggtcccattgagttcctaaggccag

SEQ ID NO: 820101 - DNA, 25 bp, Homo sapien
gcaaagagttctaaccagggaccca

SEQ ID NO: 820102 - DNA, 25 bp, Homo sapien
tttctttgaagccagctctctatcc

SEQ ID NO: 820103 - DNA, 25 bp, Homo sapien
ccgaagggcattaatgagtttagga

SEQ ID NO: 820104 - DNA, 25 bp, Homo sapien
ccagaaaaaacatcgccgaagggca

SEQ ID NO: 820105 - DNA, 25 bp, Homo sapien
gattccatagaacataaatctccag

SEQ ID NO: 820106 - DNA, 25 bp, Homo sapien
aaaggcaggggttgcaatcctagtc

SEQ ID NO: 820107 - DNA, 25 bp, Homo sapien
caaagatcaaaagagacaaagaagg

SEQ ID NO: 820108 - DNA, 25 bp, Homo sapien
tctaccaagccaatggaaaacaaaa

SEQ ID NO: 820109 - DNA, 25 bp, Homo sapien
tctgataaaacagactttaaaccaa

SEQ ID NO: 820110 - DNA, 25 bp, Homo sapien
ccctgagaggaaatgatgctatgat

SEQ ID NO: 820111 - DNA, 25 bp, Homo sapien
gctatgataattggttccatttaaa

SEQ ID NO: 820112 - DNA, 25 bp, Homo sapien
attggcttcaaaagggaaggacaca

SEQ ID NO: 820113 - DNA, 25 bp, Homo sapien
tagtaaaatagggatcagagggtaa

SEQ ID NO: 820114 - DNA, 25 bp, Homo sapien
gaatgaacttagcttctcaaggcaa

SEQ ID NO: 820115 - DNA, 25 bp, Homo sapien
tcaaggcaactacacaaagcagagc

SEQ ID NO: 820116 - DNA, 25 bp, Homo sapien
tacaggaatagatctgaatccaggg

SEQ ID NO: 820117 - DNA, 25 bp, Homo sapien
aggagcacaccagcactagcggtat

SEQ ID NO: 820118 - DNA, 25 bp, Homo sapien
aagagaaggcataagcctatgccta

SEQ ID NO: 820119 - DNA, 25 bp, Homo sapien
agcctatgcctagataaatcgcgat

SEQ ID NO: 820120 - DNA, 25 bp, Homo sapien
gttatccgggtcataggaagctatg

SEQ ID NO: 820121 - DNA, 25 bp, Homo sapien
cgcgatagagcgttcctccttgtta

SEQ ID NO: 820122 - DNA, 25 bp, Homo sapien
tataaatcaaactaaacatagctat

SEQ ID NO: 820123 - DNA, 25 bp, Homo sapien
ggctgggtgtaggagcagtgtcctc

SEQ ID NO: 820124 - DNA, 25 bp, Homo sapien
ctcatctgcattccaatgtgatgaa

SEQ ID NO: 820125 - DNA, 25 bp, Homo sapien
taaacatagctattctcatctgcat

SEQ ID NO: 820126 - DNA, 25 bp, Homo sapien
aagccacacggagatgggattgcct

SEQ ID NO: 820127 - DNA, 25 bp, Homo sapien
cggagatgggattgccttctttggt

SEQ ID NO: 820128 - DNA, 25 bp, Homo sapien
cacggagatgggattgccttctttg

SEQ ID NO: 820129 - DNA, 25 bp, Homo sapien
ccacacggagatgggattgccttct

SEQ ID NO: 820130 - DNA, 25 bp, Homo sapien
aaggagactaacaagttgtccaata

SEQ ID NO: 820131 - DNA, 25 bp, Homo sapien
gactaacaagttgtccaatacttat

SEQ ID NO: 820132 - DNA, 25 bp, Homo sapien
ctagaacacggcttgacagctttaa

SEQ ID NO: 820133 - DNA, 25 bp, Homo sapien
gaacacggcttgacagctttaaagt

SEQ ID NO: 820134 - DNA, 25 bp, Homo sapien
gaaaaagggcaaggactatcaggaa

SEQ ID NO: 820135 - DNA, 25 bp, Homo sapien
cacacgaaatgtgccaatgcaagtc

SEQ ID NO: 820136 - DNA, 25 bp, Homo sapien
ttagccccatgaggagtgccacttg

SEQ ID NO: 820137 - DNA, 25 bp, Homo sapien
cacttgcaaaggagcgatccacacg

SEQ ID NO: 820138 - DNA, 25 bp, Homo sapien
aatcacaagtctttcactgatcttc

SEQ ID NO: 820139 - DNA, 25 bp, Homo sapien
ttctgaggtaatcacaagtctttca

SEQ ID NO: 820140 - DNA, 25 bp, Homo sapien
tctgaggtaatcacaagtctttcac

SEQ ID NO: 820141 - DNA, 25 bp, Homo sapien
acaagtctttcactgatcttcccag

SEQ ID NO: 820142 - DNA, 25 bp, Homo sapien
cttcccagcagtatgccttaacaga

SEQ ID NO: 820143 - DNA, 25 bp, Homo sapien
tatgccttaacagattggatatttt

SEQ ID NO: 820144 - DNA, 25 bp, Homo sapien
gccttaacagattggatattttcaa

SEQ ID NO: 820145 - DNA, 25 bp, Homo sapien
taacagattggatattttcaatcat

SEQ ID NO: 820146 - DNA, 25 bp, Homo sapien
aaacaacatctaccaattgaacaat

SEQ ID NO: 820147 - DNA, 25 bp, Homo sapien
caacatctaccaattgaacaattcc

SEQ ID NO: 820148 - DNA, 25 bp, Homo sapien
aaaaacaacatctaccaattgaaca

SEQ ID NO: 820149 - DNA, 25 bp, Homo sapien
acatctaccaattgaacaattcccc

SEQ ID NO: 820150 - DNA, 25 bp, Homo sapien
gccttccgagtcagtttcagttctg

SEQ ID NO: 820151 - DNA, 25 bp, Homo sapien
aagaaggctgagctattgaagtatc

SEQ ID NO: 820152 - DNA, 25 bp, Homo sapien
tattgaagtatctcacataggctgc

SEQ ID NO: 820153 - DNA, 25 bp, Homo sapien
ctcacataggctgccttccgagtca

SEQ ID NO: 820154 - DNA, 25 bp, Homo sapien
cctttgattagtgcatagggaagca

SEQ ID NO: 820155 - DNA, 25 bp, Homo sapien
tacagcccagggaaattgccgagtg

SEQ ID NO: 820156 - DNA, 25 bp, Homo sapien
cgagtgaccgccatgcgcagaacaa

SEQ ID NO: 820157 - DNA, 25 bp, Homo sapien
gaatattttccggaggatgattcct

SEQ ID NO: 820158 - DNA, 25 bp, Homo sapien
ttttgtttattgctccaagagagtc

SEQ ID NO: 820159 - DNA, 25 bp, Homo sapien
gctagctacatcagtattattggga

SEQ ID NO: 820160 - DNA, 25 bp, Homo sapien
gtgaacattcctagtattagctggc

SEQ ID NO: 820161 - DNA, 25 bp, Homo sapien
ttagctggcaacttttataacttcc

SEQ ID NO: 820162 - DNA, 25 bp, Homo sapien
tccatcatactgtccagagaaatgc

SEQ ID NO: 820163 - DNA, 25 bp, Homo sapien
attccaatgtcttatattcttgctt

SEQ ID NO: 820164 - DNA, 25 bp, Homo sapien
ttacattctccatcactacttctgt

SEQ ID NO: 820165 - DNA, 25 bp, Homo sapien
tccatcactacttctgtagtcgtta

SEQ ID NO: 820166 - DNA, 25 bp, Homo sapien
tctgtagtcgttaagttatattcca

SEQ ID NO: 820167 - DNA, 25 bp, Homo sapien
gatagcactactgttacccagatag

SEQ ID NO: 820168 - DNA, 25 bp, Homo sapien
tagagtcaacagatagcactactgt

SEQ ID NO: 820169 - DNA, 25 bp, Homo sapien
tactgttacccagatagcacttcct

SEQ ID NO: 820170 - DNA, 25 bp, Homo sapien
agttgactagagtcaacagatagca

SEQ ID NO: 820171 - DNA, 25 bp, Homo sapien
ctgtcatcaccattagaagtttttc

SEQ ID NO: 820172 - DNA, 25 bp, Homo sapien
gaggctgtcatcaccattagaagtt

SEQ ID NO: 820173 - DNA, 25 bp, Homo sapien
ggctgtcatcaccattagaagtttt

SEQ ID NO: 820174 - DNA, 25 bp, Homo sapien
aagaggctgtcatcaccattagaag

SEQ ID NO: 820175 - DNA, 25 bp, Homo sapien
acaggagtaccaagaagtgagaaat

SEQ ID NO: 820176 - DNA, 25 bp, Homo sapien
aatatctttcaggacaggagtacca

SEQ ID NO: 820177 - DNA, 25 bp, Homo sapien
atatctttcaggacaggagtaccaa

SEQ ID NO: 820178 - DNA, 25 bp, Homo sapien
caggagtaccaagaagtgagaaatt

SEQ ID NO: 820179 - DNA, 25 bp, Homo sapien
tcttctagttggcatgctttgatga

SEQ ID NO: 820180 - DNA, 25 bp, Homo sapien
catgctttgatgacgcttctgtatc

SEQ ID NO: 820181 - DNA, 25 bp, Homo sapien
cagttctcccataatcaccattaga

SEQ ID NO: 820182 - DNA, 25 bp, Homo sapien
tggtgccaggcataatccaggaaaa

SEQ ID NO: 820183 - DNA, 25 bp, Homo sapien
tcttgtcacccttagaattgcatgg

SEQ ID NO: 820184 - DNA, 25 bp, Homo sapien
ttcagacccagatagagtccatgct

SEQ ID NO: 820185 - DNA, 25 bp, Homo sapien
attccatcagaggacattagccttg

SEQ ID NO: 820186 - DNA, 25 bp, Homo sapien
cactagtccacaaattcccgaagta

SEQ ID NO: 820187 - DNA, 25 bp, Homo sapien
ccagtttctcttatgcatggagtcc

SEQ ID NO: 820188 - DNA, 25 bp, Homo sapien
tatttattaaacctcacctagtggc

SEQ ID NO: 820189 - DNA, 25 bp, Homo sapien
tgttagcaaaagctgtgatccctct

SEQ ID NO: 820190 - DNA, 25 bp, Homo sapien
tgatgccttgtctgatggatgcaaa

SEQ ID NO: 820191 - DNA, 25 bp, Homo sapien
tcctacagtggtggattgaccattc

SEQ ID NO: 820192 - DNA, 25 bp, Homo sapien
tgaccattcaaaggctaagtttcaa

SEQ ID NO: 820193 - DNA, 25 bp, Homo sapien
tagtttttaccagacctggaaagca

SEQ ID NO: 820194 - DNA, 25 bp, Homo sapien
ctggaaagcaggaggtcaaattcaa

SEQ ID NO: 820195 - DNA, 25 bp, Homo sapien
tggcatcaggcctcgtacattttgt

SEQ ID NO: 820196 - DNA, 25 bp, Homo sapien
tgtaatacctacagcttccccaaag

SEQ ID NO: 820197 - DNA, 25 bp, Homo sapien
gaagtgactatagttccccaatgca

SEQ ID NO: 820198 - DNA, 25 bp, Homo sapien
cttactggagcatataaaggtctgg

SEQ ID NO: 820199 - DNA, 25 bp, Homo sapien
aggtcggtgtgaaagcccctgggtc

SEQ ID NO: 820200 - DNA, 25 bp, Homo sapien
gacccaggggctttcacaccgacct

SEQ ID NO: 820201 - DNA, 25 bp, Homo sapien
tcttgctcgttgacctccactcagt

SEQ ID NO: 820202 - DNA, 25 bp, Homo sapien
aattcttgctcgttgacctccactc

SEQ ID NO: 820203 - DNA, 25 bp, Homo sapien
agaaattcttgctcgttgacctcca

SEQ ID NO: 820204 - DNA, 25 bp, Homo sapien
gctcgttgacctccactcagtgtga

SEQ ID NO: 820205 - DNA, 25 bp, Homo sapien
ttttctgttaaaacatctaggtatc

SEQ ID NO: 820206 - DNA, 25 bp, Homo sapien
tctgttaaaacatctaggtatccaa

SEQ ID NO: 820207 - DNA, 25 bp, Homo sapien
tgaaatcaagccatataactgactg

SEQ ID NO: 820208 - DNA, 25 bp, Homo sapien
catgtacattggaccctaacaggag

SEQ ID NO: 820209 - DNA, 25 bp, Homo sapien
tacttctaggaataacccagccatt

SEQ ID NO: 820210 - DNA, 25 bp, Homo sapien
gaaatataagtcctgagctctgtgt

SEQ ID NO: 820211 - DNA, 25 bp, Homo sapien
ccaaaatcctagttttgttagccat

SEQ ID NO: 820212 - DNA, 25 bp, Homo sapien
agaagtgaccaaaatcctagttttg

SEQ ID NO: 820213 - DNA, 25 bp, Homo sapien
tgaccaaaatcctagttttgttagc

SEQ ID NO: 820214 - DNA, 25 bp, Homo sapien
ttctaatgagaaacggtgtaaggtc

SEQ ID NO: 820215 - DNA, 25 bp, Homo sapien
tcttctttctgcactaaattggtcg

SEQ ID NO: 820216 - DNA, 25 bp, Homo sapien
taaaggctcatcagaatcctcttcg

SEQ ID NO: 820217 - DNA, 25 bp, Homo sapien
gtaagggagtcttttgcacaatgga

SEQ ID NO: 820218 - DNA, 25 bp, Homo sapien
gtcatcaggttcaggacagactgcc

SEQ ID NO: 820219 - DNA, 25 bp, Homo sapien
cagactgcctccttcgtgcctgaag

SEQ ID NO: 820220 - DNA, 25 bp, Homo sapien
tgctgatcacgctgatgcgaggcag

SEQ ID NO: 820221 - DNA, 25 bp, Homo sapien
ccttggttaactgagtgtgtcatca

SEQ ID NO: 820222 - DNA, 25 bp, Homo sapien
cttgaatatatatccagttcagtca

SEQ ID NO: 820223 - DNA, 25 bp, Homo sapien
ttgaatatatatccagttcagtcaa

SEQ ID NO: 820224 - DNA, 25 bp, Homo sapien
tgaatatatatccagttcagtcaag

SEQ ID NO: 820225 - DNA, 25 bp, Homo sapien
ttcttcacttatttccaagccagtt

SEQ ID NO: 820226 - DNA, 25 bp, Homo sapien
gaaatacccccaagcgatgtatacc

SEQ ID NO: 820227 - DNA, 25 bp, Homo sapien
tctgtggggtgaaatacccccaagc

SEQ ID NO: 820228 - DNA, 25 bp, Homo sapien
atacccccaagcgatgtatacctac

SEQ ID NO: 820229 - DNA, 25 bp, Homo sapien
gggtgaaatacccccaagcgatgta

SEQ ID NO: 820230 - DNA, 25 bp, Homo sapien
tatgctctccatatcatcaaaaaag

SEQ ID NO: 820231 - DNA, 25 bp, Homo sapien
tgtgttccatgtagtcactgctggt

SEQ ID NO: 820232 - DNA, 25 bp, Homo sapien
gtatgtgttccatgtagtcactgct

SEQ ID NO: 820233 - DNA, 25 bp, Homo sapien
tagtcactgctggtatgctctccat

SEQ ID NO: 820234 - DNA, 25 bp, Homo sapien
ctcttgtggacagtaatatatcgaa

SEQ ID NO: 820235 - DNA, 25 bp, Homo sapien
tactaagcaccaaattagcacaaaa

SEQ ID NO: 820236 - DNA, 25 bp, Homo sapien
tagcacaaaaattaagctcttgtgg

SEQ ID NO: 820237 - DNA, 25 bp, Homo sapien
aaattactaagcaccaaattagcac

SEQ ID NO: 820238 - DNA, 25 bp, Homo sapien
aaacgcaatgcggacccaaaaagtg

SEQ ID NO: 820239 - DNA, 25 bp, Homo sapien
gtcacagctcataaacgcaatgcgg

SEQ ID NO: 820240 - DNA, 25 bp, Homo sapien
aacgcaatgcggacccaaaaagtga

SEQ ID NO: 820241 - DNA, 25 bp, Homo sapien
cacagctcataaacgcaatgcggac

SEQ ID NO: 820242 - DNA, 25 bp, Homo sapien
tctgcagtaatcattcacaagctga

SEQ ID NO: 820243 - DNA, 25 bp, Homo sapien
cctgttacataaaaagatctgggaa

SEQ ID NO: 820244 - DNA, 25 bp, Homo sapien
tgatccccagttccctcatgggaag

SEQ ID NO: 820245 - DNA, 25 bp, Homo sapien
caagctgaatccaagccacagatgt

SEQ ID NO: 820246 - DNA, 25 bp, Homo sapien
atacttccttaggagaggtggttct

SEQ ID NO: 820247 - DNA, 25 bp, Homo sapien
ttgaggttagcaacagcccaacaat

SEQ ID NO: 820248 - DNA, 25 bp, Homo sapien
tggaccatggtggagtgatgacact

SEQ ID NO: 820249 - DNA, 25 bp, Homo sapien
ttactggaccatggtggagtgatca

SEQ ID NO: 820250 - DNA, 25 bp, Homo sapien
tatcatcaagccttcttaattgagg

SEQ ID NO: 820251 - DNA, 25 bp, Homo sapien
agccacagcacaaccaaagaagcag

SEQ ID NO: 820252 - DNA, 25 bp, Homo sapien
ttccaaggagccacagcacaaccaa

SEQ ID NO: 820253 - DNA, 25 bp, Homo sapien
aggagccacagcacaaccaaagaag

SEQ ID NO: 820254 - DNA, 25 bp, Homo sapien
caaggagccacagcacaaccaaaga

SEQ ID NO: 820255 - DNA, 25 bp, Homo sapien
actatgagtactattccctttgtct

SEQ ID NO: 820256 - DNA, 25 bp, Homo sapien
ctggtgataatcactgcatagctgt

SEQ ID NO: 820257 - DNA, 25 bp, Homo sapien
tatttctactatgagtactattccc

SEQ ID NO: 820258 - DNA, 25 bp, Homo sapien
tggtgataatcactgcatagctgtt

SEQ ID NO: 820259 - DNA, 25 bp, Homo sapien
gctactcccacgtaaatgtaaaaca

SEQ ID NO: 820260 - DNA, 25 bp, Homo sapien
gtatgcaccagtggtagacctctga

SEQ ID NO: 820261 - DNA, 25 bp, Homo sapien
tgaagaatcccatagcaagcaaagt

SEQ ID NO: 820262 - DNA, 25 bp, Homo sapien
gacactgtgattagagtatgcacca

SEQ ID NO: 820263 - DNA, 25 bp, Homo sapien
tctataacataggggtctccttctc

SEQ ID NO: 820264 - DNA, 25 bp, Homo sapien
ataacataggggtctccttctcctc

SEQ ID NO: 820265 - DNA, 25 bp, Homo sapien
tataacataggggtctccttctcct

SEQ ID NO: 820266 - DNA, 25 bp, Homo sapien
gaagtcaaatatggtaagaggcaga

SEQ ID NO: 820267 - DNA, 25 bp, Homo sapien
ttggagaatctattaagaatcccac

SEQ ID NO: 820268 - DNA, 25 bp, Homo sapien
gaggcagaaggtcatccaaaattgc

SEQ ID NO: 820269 - DNA, 25 bp, Homo sapien
gaaggtcatccaaaattgctatatc

SEQ ID NO: 820270 - DNA, 25 bp, Homo sapien
tgctatagctccaatcacaattaat

SEQ ID NO: 820271 - DNA, 25 bp, Homo sapien
cactgttgcaacaaagatgtagggt

SEQ ID NO: 820272 - DNA, 25 bp, Homo sapien
taaaagccactatcactggcactgt

SEQ ID NO: 820273 - DNA, 25 bp, Homo sapien
taaaactgcgacaactgctatagct

SEQ ID NO: 820274 - DNA, 25 bp, Homo sapien
tgagtatcgcacattcactgtcata

SEQ ID NO: 820275 - DNA, 25 bp, Homo sapien
tacaagatgagtatcgcacattcac

SEQ ID NO: 820276 - DNA, 25 bp, Homo sapien
caaatagctcttatagcttttttac

SEQ ID NO: 820277 - DNA, 25 bp, Homo sapien
tagctcttatagcttttttacaaga

SEQ ID NO: 820278 - DNA, 25 bp, Homo sapien
catttggaaccagcgcagtgttgac

SEQ ID NO: 820279 - DNA, 25 bp, Homo sapien
tgttgacaggtacaagaaccagttg

SEQ ID NO: 820280 - DNA, 25 bp, Homo sapien
gaaggcacgaagtgtccatagtcct

SEQ ID NO: 820281 - DNA, 25 bp, Homo sapien
accagttggcagtatgtaaattcag

SEQ ID NO: 820282 - DNA, 25 bp, Homo sapien
caagctatccacatctatgctggag

SEQ ID NO: 820283 - DNA, 25 bp, Homo sapien
aagctatccacatctatgctggagt

SEQ ID NO: 820284 - DNA, 25 bp, Homo sapien
gctatccacatctatgctggagttt

SEQ ID NO: 820285 - DNA, 25 bp, Homo sapien
ctggagtttacagcccactgcaatg

SEQ ID NO: 820286 - DNA, 25 bp, Homo sapien
catgggtgacagcactatgatggga

SEQ ID NO: 820287 - DNA, 25 bp, Homo sapien
gaattattggagcacctgagaaggg

SEQ ID NO: 820288 - DNA, 25 bp, Homo sapien
taggcacttgggcataagcaccagg

SEQ ID NO: 820289 - DNA, 25 bp, Homo sapien
ttgtctaaactaggccagatgggta

SEQ ID NO: 820290 - DNA, 25 bp, Homo sapien
aagtctcatgatagccaacacccac

SEQ ID NO: 820291 - DNA, 25 bp, Homo sapien
tgtccaaggaggatcgagggatatc

SEQ ID NO: 820292 - DNA, 25 bp, Homo sapien
ccacttccgtaggagcacttttctt

SEQ ID NO: 820293 - DNA, 25 bp, Homo sapien
tgtctagagcagcaagctggcctgc

SEQ ID NO: 820294 - DNA, 25 bp, Homo sapien
taaagactcggctcacagatcgcat

SEQ ID NO: 820295 - DNA, 25 bp, Homo sapien
cttaaagactcggctcacagatcgc

SEQ ID NO: 820296 - DNA, 25 bp, Homo sapien
tgaacttaaagactcggctcacaga

SEQ ID NO: 820297 - DNA, 25 bp, Homo sapien
aacttaaagactcggctcacagatc

SEQ ID NO: 820298 - DNA, 25 bp, Homo sapien
cgagagttggccattcttgtatggt

SEQ ID NO: 820299 - DNA, 25 bp, Homo sapien
ctcaataatcataactttcgagagt

SEQ ID NO: 820300 - DNA, 25 bp, Homo sapien
ttggtaggtttaccttctgttggca

SEQ ID NO: 820301 - DNA, 25 bp, Homo sapien
cataactttcgagagttggccattc

SEQ ID NO: 820302 - DNA, 25 bp, Homo sapien
ctttgacagtcatttggccccctga

SEQ ID NO: 820303 - DNA, 25 bp, Homo sapien
tggccaggacttattgagaaggaaa

SEQ ID NO: 820304 - DNA, 25 bp, Homo sapien
atctttgacagtcatttggccccct

SEQ ID NO: 820305 - DNA, 25 bp, Homo sapien
ctctggccaggacttattgagaagg

SEQ ID NO: 820306 - DNA, 25 bp, Homo sapien
ggctactgggattcacttactgaac

SEQ ID NO: 820307 - DNA, 25 bp, Homo sapien
cacattgcttcaggctactgggatt

SEQ ID NO: 820308 - DNA, 25 bp, Homo sapien
cagtctaacaaagcaagcagtgttc

SEQ ID NO: 820309 - DNA, 25 bp, Homo sapien
gattcacttactgaacacagtctaa

SEQ ID NO: 820310 - DNA, 25 bp, Homo sapien
ggcttctttagttattaacctagca

SEQ ID NO: 820311 - DNA, 25 bp, Homo sapien
ttaattagatattctgcaagtacaa

SEQ ID NO: 820312 - DNA, 25 bp, Homo sapien
tatataggttcaggactctgcaaat

SEQ ID NO: 820313 - DNA, 25 bp, Homo sapien
cctagcaattaattagatattctgc

SEQ ID NO: 820314 - DNA, 25 bp, Homo sapien
tcaatgtcttcaccagcctggaggc

SEQ ID NO: 820315 - DNA, 25 bp, Homo sapien
tacttctgacaccaacaatgtgggt

SEQ ID NO: 820316 - DNA, 25 bp, Homo sapien
caatgtgggttttcgacaccaagca

SEQ ID NO: 820317 - DNA, 25 bp, Homo sapien
tacaggtgatgctggttcaaggacc

SEQ ID NO: 820318 - DNA, 25 bp, Homo sapien
tatacctaatggcgttctttttcat

SEQ ID NO: 820319 - DNA, 25 bp, Homo sapien
caaagtactcttccctgatccagtt

SEQ ID NO: 820320 - DNA, 25 bp, Homo sapien
tgtggtatcactccaaaggctttcc

SEQ ID NO: 820321 - DNA, 25 bp, Homo sapien
ccaagacacaccatcgatctggatt

SEQ ID NO: 820322 - DNA, 25 bp, Homo sapien
tctccttcagtgttcagtagtctca

SEQ ID NO: 820323 - DNA, 25 bp, Homo sapien
tcaaaactccaaccaggataaagct

SEQ ID NO: 820324 - DNA, 25 bp, Homo sapien
atcatctgacaatcccttttttctt

SEQ ID NO: 820325 - DNA, 25 bp, Homo sapien
catctgacaatcccttttttctttc

SEQ ID NO: 820326 - DNA, 25 bp, Homo sapien
caaaactccaaccaggataaagctt

SEQ ID NO: 820327 - DNA, 25 bp, Homo sapien
ttccaagctggcagattctccaaga

SEQ ID NO: 820328 - DNA, 25 bp, Homo sapien
cagattctccaagattgctgtctag

SEQ ID NO: 820329 - DNA, 25 bp, Homo sapien
gctggcagattctccaagattgctg

SEQ ID NO: 820330 - DNA, 25 bp, Homo sapien
aagctggcagattctccaagattgc

SEQ ID NO: 820331 - DNA, 25 bp, Homo sapien
gctttcttaactaggatacctgcaa

SEQ ID NO: 820332 - DNA, 25 bp, Homo sapien
tactgatggaaccacaatctcttgt

SEQ ID NO: 820333 - DNA, 25 bp, Homo sapien
tgttatgcactctataagggacaga

SEQ ID NO: 820334 - DNA, 25 bp, Homo sapien
gccaggtttataaacaaggctccaa

SEQ ID NO: 820335 - DNA, 25 bp, Homo sapien
tgattcgtcgtgtaacatgcctgct

SEQ ID NO: 820336 - DNA, 25 bp, Homo sapien
gcctgaagaaccgtgagccagttac

SEQ ID NO: 820337 - DNA, 25 bp, Homo sapien
tcctcttggcgctgttctcatgaga

SEQ ID NO: 820338 - DNA, 25 bp, Homo sapien
tgtaatccacctacccaagagactg

SEQ ID NO: 820339 - DNA, 25 bp, Homo sapien
gctcaggaaagattaaaggttgggc

SEQ ID NO: 820340 - DNA, 25 bp, Homo sapien
cacttagctaggagatagtaggagc

SEQ ID NO: 820341 - DNA, 25 bp, Homo sapien
tatctcctccaaaagggtgggacac

SEQ ID NO: 820342 - DNA, 25 bp, Homo sapien
ggagtgtttgtctctaaacccgtgc

SEQ ID NO: 820343 - DNA, 25 bp, Homo sapien
gcaaggcagccaagtttactgagga

SEQ ID NO: 820344 - DNA, 25 bp, Homo sapien
tgatcagacaggcacaagagagagc

SEQ ID NO: 820345 - DNA, 25 bp, Homo sapien
caggcagatggagagtatcctcagc

SEQ ID NO: 820346 - DNA, 25 bp, Homo sapien
catggagcattgcacagctgttacc

SEQ ID NO: 820347 - DNA, 25 bp, Homo sapien
tatttcttgatcactccactgttca

SEQ ID NO: 820348 - DNA, 25 bp, Homo sapien
tttccatatttcttgatcactccac

SEQ ID NO: 820349 - DNA, 25 bp, Homo sapien
tccatatttcttgatcactccactg

SEQ ID NO: 820350 - DNA, 25 bp, Homo sapien
tcttgatcactccactgttcatagg

SEQ ID NO: 820351 - DNA, 25 bp, Homo sapien
cagggagttagaggacctgtgtctt

SEQ ID NO: 820352 - DNA, 25 bp, Homo sapien
aatgtgtatctgtcatctctactgc

SEQ ID NO: 820353 - DNA, 25 bp, Homo sapien
ttccttggcttgagagaaaccacac

SEQ ID NO: 820354 - DNA, 25 bp, Homo sapien
gactactctgatgtatccccgaaga

SEQ ID NO: 820355 - DNA, 25 bp, Homo sapien
caaatgagcactgggttcatcaagc

SEQ ID NO: 820356 - DNA, 25 bp, Homo sapien
agatcttcgccttactgagaacaga

SEQ ID NO: 820357 - DNA, 25 bp, Homo sapien
gatctagccaagcacatcaactgct

SEQ ID NO: 820358 - DNA, 25 bp, Homo sapien
ccaggaaactgttctatcacagatc

SEQ ID NO: 820359 - DNA, 25 bp, Homo sapien
ttgttggcattccagcattgcttct

SEQ ID NO: 820360 - DNA, 25 bp, Homo sapien
ttactgtgcaatcagcaaatgcttg

SEQ ID NO: 820361 - DNA, 25 bp, Homo sapien
cattgcttctatcctgtgttcacag

SEQ ID NO: 820362 - DNA, 25 bp, Homo sapien
gtgttcacagagaattactgtgcaa

SEQ ID NO: 820363 - DNA, 25 bp, Homo sapien
gtactgccgcactttgttctcttct

SEQ ID NO: 820364 - DNA, 25 bp, Homo sapien
tctggggcttagacttgcacttgct

SEQ ID NO: 820365 - DNA, 25 bp, Homo sapien
agcagtttctggatggaatcgtact

SEQ ID NO: 820366 - DNA, 25 bp, Homo sapien
aagaggctcctctcgttcagcagtt

SEQ ID NO: 820367 - DNA, 25 bp, Homo sapien
gtgtgtctacccacagtgcccatgg

SEQ ID NO: 820368 - DNA, 25 bp, Homo sapien
ccaggaagccatttatcaagaccca

SEQ ID NO: 820369 - DNA, 25 bp, Homo sapien
tccaattccatgaggtgactgtccc

SEQ ID NO: 820370 - DNA, 25 bp, Homo sapien
caaaaggtgattcatggcccctggt

SEQ ID NO: 820371 - DNA, 25 bp, Homo sapien
gagaaggcagtgtacccttgatgga

SEQ ID NO: 820372 - DNA, 25 bp, Homo sapien
tggaaacagtcagactggtggtacc

SEQ ID NO: 820373 - DNA, 25 bp, Homo sapien
cagaactgcatctaagaggctgtgc

SEQ ID NO: 820374 - DNA, 25 bp, Homo sapien
tttggagttgagaaggcagtgtacc

SEQ ID NO: 820375 - DNA, 25 bp, Homo sapien
tttattgacaagtgatattttctta

SEQ ID NO: 820376 - DNA, 25 bp, Homo sapien
tgtatggattttattgacaagtgat

SEQ ID NO: 820377 - DNA, 25 bp, Homo sapien
atggattttattgacaagtgatatt

SEQ ID NO: 820378 - DNA, 25 bp, Homo sapien
ttattgacaagtgatattttcttac

SEQ ID NO: 820379 - DNA, 25 bp, Homo sapien
gagtgagagactgatgaaacatgac

SEQ ID NO: 820380 - DNA, 25 bp, Homo sapien
gacagattcgtgtttcatgttccat

SEQ ID NO: 820381 - DNA, 25 bp, Homo sapien
gaaacatgacaagtgaacgcatctg

SEQ ID NO: 820382 - DNA, 25 bp, Homo sapien
catgaagcttagaaattggagtgag

SEQ ID NO: 820383 - DNA, 25 bp, Homo sapien
taggtaacaatttcccaaccatgga

SEQ ID NO: 820384 - DNA, 25 bp, Homo sapien
ggttactggaaggaagcatattcat

SEQ ID NO: 820385 - DNA, 25 bp, Homo sapien
ttagcctttcactcgaataggtaac

SEQ ID NO: 820386 - DNA, 25 bp, Homo sapien
tccctggttactggaaggaagcata

SEQ ID NO: 820387 - DNA, 25 bp, Homo sapien
tcccacgggaaagtacagcagggct

SEQ ID NO: 820388 - DNA, 25 bp, Homo sapien
tgcagtttcagatcccacgggaaag

SEQ ID NO: 820389 - DNA, 25 bp, Homo sapien
tttcagatcccacgggaaagtacag

SEQ ID NO: 820390 - DNA, 25 bp, Homo sapien
cagatcccacgggaaagtacagcag

SEQ ID NO: 820391 - DNA, 25 bp, Homo sapien
taaatctcttagtggttacattgcc

SEQ ID NO: 820392 - DNA, 25 bp, Homo sapien
aagttggcttagataacttgtaccg

SEQ ID NO: 820393 - DNA, 25 bp, Homo sapien
ccatttggtagcatcatgtatatat

SEQ ID NO: 820394 - DNA, 25 bp, Homo sapien
cctaagtggatatagataactgcat

SEQ ID NO: 820395 - DNA, 25 bp, Homo sapien
tccctggtgattcttacatgcatcc

SEQ ID NO: 820396 - DNA, 25 bp, Homo sapien
catagaaccttctctcgtcacagtc

SEQ ID NO: 820397 - DNA, 25 bp, Homo sapien
catccagggttgagacccactgttc

SEQ ID NO: 820398 - DNA, 25 bp, Homo sapien
agggattgagatgccttcatgtagc

SEQ ID NO: 820399 - DNA, 25 bp, Homo sapien
cagaacagagtaggatggtgcaaga

SEQ ID NO: 820400 - DNA, 25 bp, Homo sapien
ccaaaattttgggtgtctgttgaga

SEQ ID NO: 820401 - DNA, 25 bp, Homo sapien
gtagttctgccttatcctcaggtga

SEQ ID NO: 820402 - DNA, 25 bp, Homo sapien
tccgataacctagagggctactaag

SEQ ID NO: 820403 - DNA, 25 bp, Homo sapien
ctccttccttagtgcgtgttaggct

SEQ ID NO: 820404 - DNA, 25 bp, Homo sapien
tctgctcccctaggcacacttctgt

SEQ ID NO: 820405 - DNA, 25 bp, Homo sapien
taggctttgaccacgtgtgaccggc

SEQ ID NO: 820406 - DNA, 25 bp, Homo sapien
gggatgcctatcatgacggtcaagt

SEQ ID NO: 820407 - DNA, 25 bp, Homo sapien
cctaagggagccctcatcatctgct

SEQ ID NO: 820408 - DNA, 25 bp, Homo sapien
ctggtcacattcacagtactgctgt

SEQ ID NO: 820409 - DNA, 25 bp, Homo sapien
cattcacagtactgctgtggtctca

SEQ ID NO: 820410 - DNA, 25 bp, Homo sapien
tcctccatagtcttgtcagtgctgt

SEQ ID NO: 820411 - DNA, 25 bp, Homo sapien
caccttggtcctccaggaggtatcc

SEQ ID NO: 820412 - DNA, 25 bp, Homo sapien
gtcctccaggaggtatccatgaggt

SEQ ID NO: 820413 - DNA, 25 bp, Homo sapien
tggtcctccaggaggtatccatgag

SEQ ID NO: 820414 - DNA, 25 bp, Homo sapien
tgcaaaggtccacatgacgccccaa

SEQ ID NO: 820415 - DNA, 25 bp, Homo sapien
tgacactgcaaaactgattgacctt

SEQ ID NO: 820416 - DNA, 25 bp, Homo sapien
tagagtagctgtatgaataccggtc

SEQ ID NO: 820417 - DNA, 25 bp, Homo sapien
actaatgtttgcgtatgacactgca

SEQ ID NO: 820418 - DNA, 25 bp, Homo sapien
gaacagtatagtctcatgatgaagt

SEQ ID NO: 820419 - DNA, 25 bp, Homo sapien
tatcagattgagcagatgggttgga

SEQ ID NO: 820420 - DNA, 25 bp, Homo sapien
agatgggttggagtgcccagggaga

SEQ ID NO: 820421 - DNA, 25 bp, Homo sapien
tatgtatttgtttatcagattgagc

SEQ ID NO: 820422 - DNA, 25 bp, Homo sapien
gatctcttaatatatcttgttgtta

SEQ ID NO: 820423 - DNA, 25 bp, Homo sapien
aatcatctggagaaatgttaagagc

SEQ ID NO: 820424 - DNA, 25 bp, Homo sapien
tttcctctggagcaaaagatgattc

SEQ ID NO: 820425 - DNA, 25 bp, Homo sapien
tcttgctttcctctggagcaaaaga

SEQ ID NO: 820426 - DNA, 25 bp, Homo sapien
taaacttcactacactccttatcct

SEQ ID NO: 820427 - DNA, 25 bp, Homo sapien
gaaatcttacttgagtcccagtaca

SEQ ID NO: 820428 - DNA, 25 bp, Homo sapien
ggagcagcttgagttacacatgatg

SEQ ID NO: 820429 - DNA, 25 bp, Homo sapien
aagctgagctcttgggttggagcaa

SEQ ID NO: 820430 - DNA, 25 bp, Homo sapien
tagagtcctaagtttcctgaatcaa

SEQ ID NO: 820431 - DNA, 25 bp, Homo sapien
cctggcacaggtctggttttacttt

SEQ ID NO: 820432 - DNA, 25 bp, Homo sapien
ctttagtctgcgaacatgtctgctg

SEQ ID NO: 820433 - DNA, 25 bp, Homo sapien
tctgcgaacatgtctgctgtgattt

SEQ ID NO: 820434 - DNA, 25 bp, Homo sapien
caatagtaaactttagtctgcgaac

SEQ ID NO: 820435 - DNA, 25 bp, Homo sapien
tgtgtttggtcaccaacatatcccc

SEQ ID NO: 820436 - DNA, 25 bp, Homo sapien
gccctgataggacggatgtgtttga

SEQ ID NO: 820437 - DNA, 25 bp, Homo sapien
tgatggaaaataggcacaacctgct

SEQ ID NO: 820438 - DNA, 25 bp, Homo sapien
aagatctgaggggtgtctctgccat

SEQ ID NO: 820439 - DNA, 25 bp, Homo sapien
ctgcctgctttctcctgtgtaaagc

SEQ ID NO: 820440 - DNA, 25 bp, Homo sapien
ctgctttctcctgtgtaaagcttac

SEQ ID NO: 820441 - DNA, 25 bp, Homo sapien
cttccagtctgcctgctttctcctg

SEQ ID NO: 820442 - DNA, 25 bp, Homo sapien
gcctgctttctcctgtgtaaagctt

SEQ ID NO: 820443 - DNA, 25 bp, Homo sapien
gaggaaatagagactgcggggagat

SEQ ID NO: 820444 - DNA, 25 bp, Homo sapien
ggaggaaatagagactgcggggaga

SEQ ID NO: 820445 - DNA, 25 bp, Homo sapien
gcttgcctgtggagctgatccatgt

SEQ ID NO: 820446 - DNA, 25 bp, Homo sapien
tctgcttgcctgtggagctgatcca

SEQ ID NO: 820447 - DNA, 25 bp, Homo sapien
tgatccatgtcccatgtcgggctga

SEQ ID NO: 820448 - DNA, 25 bp, Homo sapien
gtcacatcgaaaaactgagttaggg

SEQ ID NO: 820449 - DNA, 25 bp, Homo sapien
atgcattgtaagcttcttaaaggat

SEQ ID NO: 820450 - DNA, 25 bp, Homo sapien
ttgtaagcttcttaaaggatggtta

SEQ ID NO: 820451 - DNA, 25 bp, Homo sapien
ttctttaatgcattgtaagcttctt

SEQ ID NO: 820452 - DNA, 25 bp, Homo sapien
ctattctttaatgcattgtaagctt

SEQ ID NO: 820453 - DNA, 25 bp, Homo sapien
gggctctccaaattcaagaaaagca

SEQ ID NO: 820454 - DNA, 25 bp, Homo sapien
cacagagtgttcttccattgagctg

SEQ ID NO: 820455 - DNA, 25 bp, Homo sapien
cagttcccctccgacatggtagtca

SEQ ID NO: 820456 - DNA, 25 bp, Homo sapien
tgtagtagcctaaagcctgttccaa

SEQ ID NO: 820457 - DNA, 25 bp, Homo sapien
agggaggtgggccacgatttctact

SEQ ID NO: 820458 - DNA, 25 bp, Homo sapien
ggtgggccacgatttctacttctta

SEQ ID NO: 820459 - DNA, 25 bp, Homo sapien
ctcgagggtgaggaccccaagaggg

SEQ ID NO: 820460 - DNA, 25 bp, Homo sapien
tgaggaccccaagagggaggtgggc

SEQ ID NO: 820461 - DNA, 25 bp, Homo sapien
tcttgcaaactggtcttgtatttcc

SEQ ID NO: 820462 - DNA, 25 bp, Homo sapien
gatctgtggtgaggtggccaactcc

SEQ ID NO: 820463 - DNA, 25 bp, Homo sapien
gtagatctgctatgagacctagaga

SEQ ID NO: 820464 - DNA, 25 bp, Homo sapien
ctttcatttgacgtagatctgctat

SEQ ID NO: 820465 - DNA, 25 bp, Homo sapien
tgaaacaagtttaagaagtctcaaa

SEQ ID NO: 820466 - DNA, 25 bp, Homo sapien
tatactcctgtcaaatgaagtagtt

SEQ ID NO: 820467 - DNA, 25 bp, Homo sapien
attttctgtatatactcctgtcaaa

SEQ ID NO: 820468 - DNA, 25 bp, Homo sapien
aatgaaacaagtttaagaagtctca

SEQ ID NO: 820469 - DNA, 25 bp, Homo sapien
cctgcttgtgcaacttagctgcata

SEQ ID NO: 820470 - DNA, 25 bp, Homo sapien
ttaaagcctgcttgtgcaacttagc

SEQ ID NO: 820471 - DNA, 25 bp, Homo sapien
caacttagctgcatactgtattcta

SEQ ID NO: 820472 - DNA, 25 bp, Homo sapien
tgtgcaacttagctgcatactgtat

SEQ ID NO: 820473 - DNA, 25 bp, Homo sapien
agtggcatgactcagtcctgcatcc

SEQ ID NO: 820474 - DNA, 25 bp, Homo sapien
ccagtggcatgactcggtcccgcat

SEQ ID NO: 820475 - DNA, 25 bp, Homo sapien
caatgtgagtcttgctaacggtgat

SEQ ID NO: 820476 - DNA, 25 bp, Homo sapien
tcagtcaatgtgagtcttgctaacg

SEQ ID NO: 820477 - DNA, 25 bp, Homo sapien
gctaacggtgattctcagggagaga

SEQ ID NO: 820478 - DNA, 25 bp, Homo sapien
gagtcttgctaacggtgattctcag

SEQ ID NO: 820479 - DNA, 25 bp, Homo sapien
caaactgcctatgcaatgccagcag

SEQ ID NO: 820480 - DNA, 25 bp, Homo sapien
aatgccagcagaagacgtagcaatc

SEQ ID NO: 820481 - DNA, 25 bp, Homo sapien
gcagaacttggggagttagccttct

SEQ ID NO: 820482 - DNA, 25 bp, Homo sapien
ttcttaacaaactgcctatgcaatg

SEQ ID NO: 820483 - DNA, 25 bp, Homo sapien
ctgtgtgcattggtagagtcagcat

SEQ ID NO: 820484 - DNA, 25 bp, Homo sapien
gttttagaggactgtggagcttgct

SEQ ID NO: 820485 - DNA, 25 bp, Homo sapien
ggtgctgcttatagaggcccagctg

SEQ ID NO: 820486 - DNA, 25 bp, Homo sapien
gcttgcataaattcgcctgctggga

SEQ ID NO: 820487 - DNA, 25 bp, Homo sapien
ttaggttcatgattgattctctgtt

SEQ ID NO: 820488 - DNA, 25 bp, Homo sapien
gattaggttcatgattgattctctg

SEQ ID NO: 820489 - DNA, 25 bp, Homo sapien
cagattaggttcatgattgattctc

SEQ ID NO: 820490 - DNA, 25 bp, Homo sapien
taggttcatgattgattctctgttc

SEQ ID NO: 820491 - DNA, 25 bp, Homo sapien
gctcatgcgtggctgattgaagcct

SEQ ID NO: 820492 - DNA, 25 bp, Homo sapien
acatgagctcatgcgtggctgattg

SEQ ID NO: 820493 - DNA, 25 bp, Homo sapien
tgattgaagcctggtttggctgggc

SEQ ID NO: 820494 - DNA, 25 bp, Homo sapien
gagctcatgcgtggctgattgaagc

SEQ ID NO: 820495 - DNA, 25 bp, Homo sapien
aattccaggtttgacatatcacatt

SEQ ID NO: 820496 - DNA, 25 bp, Homo sapien
attccaggtttgacatatcacattt

SEQ ID NO: 820497 - DNA, 25 bp, Homo sapien
gaaagtggctcctgcattggtcacc

SEQ ID NO: 820498 - DNA, 25 bp, Homo sapien
catgaaagtggctcctgcattggtc

SEQ ID NO: 820499 - DNA, 25 bp, Homo sapien
tgaaagtggctcctgcattggtcac

SEQ ID NO: 820500 - DNA, 25 bp, Homo sapien
gaccatgaaagtggctcctgcattg

SEQ ID NO: 820501 - DNA, 25 bp, Homo sapien
ttgtgatagcccaccaccatcattg

SEQ ID NO: 820502 - DNA, 25 bp, Homo sapien
ctccttcatctttatagctgcagaa

SEQ ID NO: 820503 - DNA, 25 bp, Homo sapien
ggttgtagcagttgtgatagcccac

SEQ ID NO: 820504 - DNA, 25 bp, Homo sapien
cttcatctttatagctgcagaaatg

SEQ ID NO: 820505 - DNA, 25 bp, Homo sapien
agtaactggaggctaaaactctgcc

SEQ ID NO: 820506 - DNA, 25 bp, Homo sapien
cagtatccactaagcaccatgtgca

SEQ ID NO: 820507 - DNA, 25 bp, Homo sapien
tggctaaccctgaaatacctagatg

SEQ ID NO: 820508 - DNA, 25 bp, Homo sapien
tgcagttacccaaagtgtaccagcc

SEQ ID NO: 820509 - DNA, 25 bp, Homo sapien
caggtgtcctgaaccattgctaaga

SEQ ID NO: 820510 - DNA, 25 bp, Homo sapien
ggtgtcctgaaccattgctaagaca

SEQ ID NO: 820511 - DNA, 25 bp, Homo sapien
gcaggtgtcctgaaccattgctaag

SEQ ID NO: 820512 - DNA, 25 bp, Homo sapien
tgcaggtgtcctgaaccattgctaa

SEQ ID NO: 820513 - DNA, 25 bp, Homo sapien
ctgctggagagtaccatagtttctc

SEQ ID NO: 820514 - DNA, 25 bp, Homo sapien
ttctgctggagagtaccatagtttc

SEQ ID NO: 820515 - DNA, 25 bp, Homo sapien
tctgctggagagtaccatagtttct

SEQ ID NO: 820516 - DNA, 25 bp, Homo sapien
cgaccataatgacagcggctgcagc

SEQ ID NO: 820517 - DNA, 25 bp, Homo sapien
ttagtttttcgaaggccattgccga

SEQ ID NO: 820518 - DNA, 25 bp, Homo sapien
gatgagtgttggtttagtttttcga

SEQ ID NO: 820519 - DNA, 25 bp, Homo sapien
tcgaaggccattgccgaccataatg

SEQ ID NO: 820520 - DNA, 25 bp, Homo sapien
tggtcccacatgcagcatatctaac

SEQ ID NO: 820521 - DNA, 25 bp, Homo sapien
ggtcccacatgcagcatatctaaca

SEQ ID NO: 820522 - DNA, 25 bp, Homo sapien
gtcccacatgcagcatatctaacag

SEQ ID NO: 820523 - DNA, 25 bp, Homo sapien
ctggtcccacatgcagcatatctaa

SEQ ID NO: 820524 - DNA, 25 bp, Homo sapien
ccgttgcagcattcctcatgcgggc

SEQ ID NO: 820525 - DNA, 25 bp, Homo sapien
gttttcaagggttctgtcatgaacc

SEQ ID NO: 820526 - DNA, 25 bp, Homo sapien
cgttgcagcattcctcatgcgggcc

SEQ ID NO: 820527 - DNA, 25 bp, Homo sapien
tctgtcatgaaccgttgcagcattc

SEQ ID NO: 820528 - DNA, 25 bp, Homo sapien
tggggcattccgtctgcacataacc

SEQ ID NO: 820529 - DNA, 25 bp, Homo sapien
gcttgttggcaattgacattagcat

SEQ ID NO: 820530 - DNA, 25 bp, Homo sapien
tggtctttattattggggcattccg

SEQ ID NO: 820531 - DNA, 25 bp, Homo sapien
acataacctggctctccgcatagaa

SEQ ID NO: 820532 - DNA, 25 bp, Homo sapien
agtcctggatgtctttattaacctt

SEQ ID NO: 820533 - DNA, 25 bp, Homo sapien
tggatgtctttattaaccttctgtc

SEQ ID NO: 820534 - DNA, 25 bp, Homo sapien
gtcctggatgtctttattaaccttc

SEQ ID NO: 820535 - DNA, 25 bp, Homo sapien
cctggatgtctttattaaccttctg

SEQ ID NO: 820536 - DNA, 25 bp, Homo sapien
tacagagtatctctggtgagagaga

SEQ ID NO: 820537 - DNA, 25 bp, Homo sapien
tttgcaggtagatcccgaattctca

SEQ ID NO: 820538 - DNA, 25 bp, Homo sapien
tacacatcattcttaatcttgtaga

SEQ ID NO: 820539 - DNA, 25 bp, Homo sapien
tatcccaatgatccagggagtgatg

SEQ ID NO: 820540 - DNA, 25 bp, Homo sapien
gtctctgggtctgccttcaaggtgg

SEQ ID NO: 820541 - DNA, 25 bp, Homo sapien
tctcctttttgcaccaattgagaat

SEQ ID NO: 820542 - DNA, 25 bp, Homo sapien
gggtagaattggagctcaaagtctc

SEQ ID NO: 820543 - DNA, 25 bp, Homo sapien
ggagcagtgctgtatgacgctaaga

SEQ ID NO: 820544 - DNA, 25 bp, Homo sapien
tgttgaatggtttagattcttcagg

SEQ ID NO: 820545 - DNA, 25 bp, Homo sapien
ttgaatggtttagattcttcaggga

SEQ ID NO: 820546 - DNA, 25 bp, Homo sapien
caggtgttttgttgaatggtttaga

SEQ ID NO: 820547 - DNA, 25 bp, Homo sapien
tgtgtcttggcaggtgttttgttga

SEQ ID NO: 820548 - DNA, 25 bp, Homo sapien
tccaataagtaactccttatcctgc

SEQ ID NO: 820549 - DNA, 25 bp, Homo sapien
tacacattccaataagtaactcctt

SEQ ID NO: 820550 - DNA, 25 bp, Homo sapien
cattccaataagtaactccttatcc

SEQ ID NO: 820551 - DNA, 25 bp, Homo sapien
taagtaactccttatcctgcttcct

SEQ ID NO: 820552 - DNA, 25 bp, Homo sapien
tctgttaggccgattcaagaatcca

SEQ ID NO: 820553 - DNA, 25 bp, Homo sapien
tgaagagagaatgctctgttaggcc

SEQ ID NO: 820554 - DNA, 25 bp, Homo sapien
taactatttcaaagactgtcacatc

SEQ ID NO: 820555 - DNA, 25 bp, Homo sapien
ccactcgacaggaatataactattt

SEQ ID NO: 820556 - DNA, 25 bp, Homo sapien
ttctgattcttgtagctctgtcttc

SEQ ID NO: 820557 - DNA, 25 bp, Homo sapien
cctgcagatgctggactagttttca

SEQ ID NO: 820558 - DNA, 25 bp, Homo sapien
gacactgagtccattctgattcttg

SEQ ID NO: 820559 - DNA, 25 bp, Homo sapien
tcctgcagatgctggactagttttc

SEQ ID NO: 820560 - DNA, 25 bp, Homo sapien
gggagacttaattcatcagtttgtg

SEQ ID NO: 820561 - DNA, 25 bp, Homo sapien
tataaaagggagacttaattcatca

SEQ ID NO: 820562 - DNA, 25 bp, Homo sapien
acttaattcatcagtttgtgttgcc

SEQ ID NO: 820563 - DNA, 25 bp, Homo sapien
taaaagggagacttaattcatcagt

SEQ ID NO: 820564 - DNA, 25 bp, Homo sapien
tgtcctccagcaataacaacctctc

SEQ ID NO: 820565 - DNA, 25 bp, Homo sapien
gcataggtggtcaccaccaaataaa

SEQ ID NO: 820566 - DNA, 25 bp, Homo sapien
tctctctgtggactggcataggtgg

SEQ ID NO: 820567 - DNA, 25 bp, Homo sapien
cagcaataacaacctctctctgtgg

SEQ ID NO: 820568 - DNA, 25 bp, Homo sapien
taattctgggccgtgttccggaagc

SEQ ID NO: 820569 - DNA, 25 bp, Homo sapien
tatcgtgagagttgctgctccgcag

SEQ ID NO: 820570 - DNA, 25 bp, Homo sapien
tccggaagcctcgtaagacaaaagc

SEQ ID NO: 820571 - DNA, 25 bp, Homo sapien
gaactggccaaccaaacagaagccg

SEQ ID NO: 820572 - DNA, 25 bp, Homo sapien
gccagaacccggcagcggatagcgc

SEQ ID NO: 820573 - DNA, 25 bp, Homo sapien
tccgggtaacgcagcggtgccgaca

SEQ ID NO: 820574 - DNA, 25 bp, Homo sapien
agcggtgccgacagcaagcagaact

SEQ ID NO: 820575 - DNA, 25 bp, Homo sapien
cagaactgaaagggcgcgccagaac

SEQ ID NO: 820576 - DNA, 25 bp, Homo sapien
gatgtagttctccaaagcggacgtc

SEQ ID NO: 820577 - DNA, 25 bp, Homo sapien
atgtagttctccaaagcggacgtca

SEQ ID NO: 820578 - DNA, 25 bp, Homo sapien
tgtagttctccaaagcggacgtcat

SEQ ID NO: 820579 - DNA, 25 bp, Homo sapien
cccgcggcggccagcttgaggatac

SEQ ID NO: 820580 - DNA, 25 bp, Homo sapien
ccgatccccgaccgcggcctctccg

SEQ ID NO: 820581 - DNA, 25 bp, Homo sapien
caccgatccccgaccgcggcctctc

SEQ ID NO: 820582 - DNA, 25 bp, Homo sapien
atccccgaccgcggcctctccgcga

SEQ ID NO: 820583 - DNA, 25 bp, Homo sapien
ccaccgatccccgaccgcggcctct

SEQ ID NO: 820584 - DNA, 25 bp, Homo sapien
aaaagtttcttagacgccaaggcag

SEQ ID NO: 820585 - DNA, 25 bp, Homo sapien
gccgccaggacgactgttcatctta

SEQ ID NO: 820586 - DNA, 25 bp, Homo sapien
tgcaaaactgttgtcgccgccagga

SEQ ID NO: 820587 - DNA, 25 bp, Homo sapien
tgtcacagggtaccaataacgcatc

SEQ ID NO: 820588 - DNA, 25 bp, Homo sapien
cccatctgatgtaataacggcaaca

SEQ ID NO: 820589 - DNA, 25 bp, Homo sapien
tctgatgtaataacggcaacagttc

SEQ ID NO: 820590 - DNA, 25 bp, Homo sapien
attctcccatctgatgtaataacgg

SEQ ID NO: 820591 - DNA, 25 bp, Homo sapien
tctcccatctgatgtaataacggca

SEQ ID NO: 820592 - DNA, 25 bp, Homo sapien
tctagctccgagaaaccttgtaggt

SEQ ID NO: 820593 - DNA, 25 bp, Homo sapien
catgggtctagcataacagagtaac

SEQ ID NO: 820594 - DNA, 25 bp, Homo sapien
ttgacagcagttgcaaaggacacct

SEQ ID NO: 820595 - DNA, 25 bp, Homo sapien
tgaaccacaaaaggctagctcctga

SEQ ID NO: 820596 - DNA, 25 bp, Homo sapien
tagttgccaggtattccaatacaag

SEQ ID NO: 820597 - DNA, 25 bp, Homo sapien
tcacagtcattttagttgccaggta

SEQ ID NO: 820598 - DNA, 25 bp, Homo sapien
aacctcacagtcattttagttgcca

SEQ ID NO: 820599 - DNA, 25 bp, Homo sapien
gtcattttagttgccaggtattcca

SEQ ID NO: 820600 - DNA, 25 bp, Homo sapien
tgtaaagaaaatattcaggagaaaa

SEQ ID NO: 820601 - DNA, 25 bp, Homo sapien
aagaaaatattcaggagaaaaagag

SEQ ID NO: 820602 - DNA, 25 bp, Homo sapien
ctgtaaagaaaatattcaggagaaa

SEQ ID NO: 820603 - DNA, 25 bp, Homo sapien
aaatattcaggagaaaaagagaaat

SEQ ID NO: 820604 - DNA, 25 bp, Homo sapien
taccacttgttctaccccctgtgaa

SEQ ID NO: 820605 - DNA, 25 bp, Homo sapien
ccctgtgaagagctgaatactcgtt

SEQ ID NO: 820606 - DNA, 25 bp, Homo sapien
caatgtataatcctagtaccacttg

SEQ ID NO: 820607 - DNA, 25 bp, Homo sapien
caaattaatggtctggtcaaaacct

SEQ ID NO: 820608 - DNA, 25 bp, Homo sapien
cattggcgtgagtcagtgaactgca

SEQ ID NO: 820609 - DNA, 25 bp, Homo sapien
ggttgaaacctaaagaagtgctgac

SEQ ID NO: 820610 - DNA, 25 bp, Homo sapien
gaaggcacattattacaggaaccaa

SEQ ID NO: 820611 - DNA, 25 bp, Homo sapien
cctatggtaagcagggaaatgctga

SEQ ID NO: 820612 - DNA, 25 bp, Homo sapien
gaatattccccaaatcaagcgcaga

SEQ ID NO: 820613 - DNA, 25 bp, Homo sapien
tcaagcgcagaatctgtttcttcat

SEQ ID NO: 820614 - DNA, 25 bp, Homo sapien
taaaggttctgctcgaatattcccc

SEQ ID NO: 820615 - DNA, 25 bp, Homo sapien
tcagtgtgctacagaatttaaaggt

SEQ ID NO: 820616 - DNA, 25 bp, Homo sapien
catattacaatgaatcaataaggag

SEQ ID NO: 820617 - DNA, 25 bp, Homo sapien
gaatcaataaggagtcaaaatccag

SEQ ID NO: 820618 - DNA, 25 bp, Homo sapien
gatttacagatgtccaagtatgtag

SEQ ID NO: 820619 - DNA, 25 bp, Homo sapien
aaactccatatatcatcctcagaat

SEQ ID NO: 820620 - DNA, 25 bp, Homo sapien
cacacctctcagtgctagggagcaa

SEQ ID NO: 820621 - DNA, 25 bp, Homo sapien
actttcatacctaaccaattgggca

SEQ ID NO: 820622 - DNA, 25 bp, Homo sapien
gccaatgattcagataactccagca

SEQ ID NO: 820623 - DNA, 25 bp, Homo sapien
ccaccagtggaatcggataaatgcc

SEQ ID NO: 820624 - DNA, 25 bp, Homo sapien
tgagaaaacagtccaccatgtgctt

SEQ ID NO: 820625 - DNA, 25 bp, Homo sapien
ttatcatgagggacaggactggttt

SEQ ID NO: 820626 - DNA, 25 bp, Homo sapien
gaagttttactggaagacagccact

SEQ ID NO: 820627 - DNA, 25 bp, Homo sapien
tgcctgagtcacaaagcacagaggt

SEQ ID NO: 820628 - DNA, 25 bp, Homo sapien
gaggccaagttaccaaagtgctttg

SEQ ID NO: 820629 - DNA, 25 bp, Homo sapien
cttttgcagttaattgccctttcca

SEQ ID NO: 820630 - DNA, 25 bp, Homo sapien
catctctttgattcattaagctggg

SEQ ID NO: 820631 - DNA, 25 bp, Homo sapien
taatatttagccaaaactgtcagca

SEQ ID NO: 820632 - DNA, 25 bp, Homo sapien
gaaaacggcccacaatgcaggtttg

SEQ ID NO: 820633 - DNA, 25 bp, Homo sapien
ggttagagactcatcccagcaggta

SEQ ID NO: 820634 - DNA, 25 bp, Homo sapien
gctgctgaaccacaacgagtagggc

SEQ ID NO: 820635 - DNA, 25 bp, Homo sapien
tatggtagtcagtgggacagacgct

SEQ ID NO: 820636 - DNA, 25 bp, Homo sapien
tatacaagtacagaatggagaggtt

SEQ ID NO: 820637 - DNA, 25 bp, Homo sapien
aggttcctctttacatgtgaaagac

SEQ ID NO: 820638 - DNA, 25 bp, Homo sapien
gaggtaatgactatacaagtacaga

SEQ ID NO: 820639 - DNA, 25 bp, Homo sapien
tatatgaggtaatgactatacaagt

SEQ ID NO: 820640 - DNA, 25 bp, Homo sapien
catcgatttatgaagactaagcacg

SEQ ID NO: 820641 - DNA, 25 bp, Homo sapien
tggcctatccacagctttgagcata

SEQ ID NO: 820642 - DNA, 25 bp, Homo sapien
aaagaaagcaatggccactaggagg

SEQ ID NO: 820643 - DNA, 25 bp, Homo sapien
gatgaaataacacgaccttcgacag

SEQ ID NO: 820644 - DNA, 25 bp, Homo sapien
ccaagaagaggtcggaaaggtatct

SEQ ID NO: 820645 - DNA, 25 bp, Homo sapien
aaggtatctggaagaacaattctca

SEQ ID NO: 820646 - DNA, 25 bp, Homo sapien
gaaagaaattctcctggtgaagtcc

SEQ ID NO: 820647 - DNA, 25 bp, Homo sapien
gaattatgcaacctacagacttagc

SEQ ID NO: 820648 - DNA, 25 bp, Homo sapien
tgagatgaaacatgatagcttgtgc

SEQ ID NO: 820649 - DNA, 25 bp, Homo sapien
catttgtaaagccagtatatgtgga

SEQ ID NO: 820650 - DNA, 25 bp, Homo sapien
gtaataacaatttggtaccatacta

SEQ ID NO: 820651 - DNA, 25 bp, Homo sapien
aattgaacattaccctaaagagaag

SEQ ID NO: 820652 - DNA, 25 bp, Homo sapien
ttggagtccatcattcaatatcagg

SEQ ID NO: 820653 - DNA, 25 bp, Homo sapien
caaattagtatgttctagggagtgc

SEQ ID NO: 820654 - DNA, 25 bp, Homo sapien
caatatcaggataattgttagctat

SEQ ID NO: 820655 - DNA, 25 bp, Homo sapien
gctatcattaatattgacaaattag

SEQ ID NO: 820656 - DNA, 25 bp, Homo sapien
tatggtctcaggcatacaaaagcac

SEQ ID NO: 820657 - DNA, 25 bp, Homo sapien
tccaggaactggtgaaggacaggtc

SEQ ID NO: 820658 - DNA, 25 bp, Homo sapien
taacaggtaagacatcccaaggact

SEQ ID NO: 820659 - DNA, 25 bp, Homo sapien
taaactgtaacagcaaggcctatgg

SEQ ID NO: 820660 - DNA, 25 bp, Homo sapien
tcagcaagttctgcctctagagagc

SEQ ID NO: 820661 - DNA, 25 bp, Homo sapien
tctagagagcaccagagcagctact

SEQ ID NO: 820662 - DNA, 25 bp, Homo sapien
taaatgtcttcggtatggctagtca

SEQ ID NO: 820663 - DNA, 25 bp, Homo sapien
taatgtgcacttggatacctagtcc

SEQ ID NO: 820664 - DNA, 25 bp, Homo sapien
ttggtatcaactaggagactctctc

SEQ ID NO: 820665 - DNA, 25 bp, Homo sapien
cacagagcgatttattgatgcaaag

SEQ ID NO: 820666 - DNA, 25 bp, Homo sapien
gctccaggctcacacatacttagta

SEQ ID NO: 820667 - DNA, 25 bp, Homo sapien
catctttaggcatcgctggatccag

SEQ ID NO: 820668 - DNA, 25 bp, Homo sapien
gatgtcttgggatagaacgttctat

SEQ ID NO: 820669 - DNA, 25 bp, Homo sapien
tagaaagacagtatagatcagtgct

SEQ ID NO: 820670 - DNA, 25 bp, Homo sapien
tataaatggcagttaggtcaagatg

SEQ ID NO: 820671 - DNA, 25 bp, Homo sapien
gacttgacgccagaatcctgaagga

SEQ ID NO: 820672 - DNA, 25 bp, Homo sapien
tgttagaactgagcaattcataggt

SEQ ID NO: 820673 - DNA, 25 bp, Homo sapien
gaaaaacagctgtaagaatatggag

SEQ ID NO: 820674 - DNA, 25 bp, Homo sapien
tcataggtaaccaataagggaggaa

SEQ ID NO: 820675 - DNA, 25 bp, Homo sapien
gatttttccattagagtataccatg

SEQ ID NO: 820676 - DNA, 25 bp, Homo sapien
gccacggcgagacctgcttctttga

SEQ ID NO: 820677 - DNA, 25 bp, Homo sapien
gcaaacctgccatttacggagttgg

SEQ ID NO: 820678 - DNA, 25 bp, Homo sapien
tgggtctgcgcccaccaaaaggacg

SEQ ID NO: 820679 - DNA, 25 bp, Homo sapien
tgcccgcctcagaagtcatgatttg

SEQ ID NO: 820680 - DNA, 25 bp, Homo sapien
tcctttgaacgcctcagcatctgct

SEQ ID NO: 820681 - DNA, 25 bp, Homo sapien
gctctacctccagacctagcaaaga

SEQ ID NO: 820682 - DNA, 25 bp, Homo sapien
tcctgtgcaagcctgcttgtccaca

SEQ ID NO: 820683 - DNA, 25 bp, Homo sapien
ctagcaaagaccaccaccgctagag

SEQ ID NO: 820684 - DNA, 25 bp, Homo sapien
ctagactgcgtacttttcttctttc

SEQ ID NO: 820685 - DNA, 25 bp, Homo sapien
tcccttggagatgtgctgccacact

SEQ ID NO: 820686 - DNA, 25 bp, Homo sapien
tagactgcgtacttttcttctttct

SEQ ID NO: 820687 - DNA, 25 bp, Homo sapien
ttcttataagtttcccttggagatg

SEQ ID NO: 820688 - DNA, 25 bp, Homo sapien
tccttcaaaagcagatctaagggct

SEQ ID NO: 820689 - DNA, 25 bp, Homo sapien
aaactaatgcctaccttccttgtga

SEQ ID NO: 820690 - DNA, 25 bp, Homo sapien
ggccacacctgcagtcttcctatta

SEQ ID NO: 820691 - DNA, 25 bp, Homo sapien
gggcttgaactcttgcaaactaatg

SEQ ID NO: 820692 - DNA, 25 bp, Homo sapien
tacctgacgaaagtggaaatgctgg

SEQ ID NO: 820693 - DNA, 25 bp, Homo sapien
aaagcttattcatggcggtgcaggc

SEQ ID NO: 820694 - DNA, 25 bp, Homo sapien
gcgcagccggccgttatggcagtta

SEQ ID NO: 820695 - DNA, 25 bp, Homo sapien
tacggccgttatggctgttaaggtc

SEQ ID NO: 820696 - DNA, 25 bp, Homo sapien
ttcttgatctgaaggtattccttca

SEQ ID NO: 820697 - DNA, 25 bp, Homo sapien
agcttcttcaaatccccgactgaag

SEQ ID NO: 820698 - DNA, 25 bp, Homo sapien
tctgaaggtattccttcagcttctt

SEQ ID NO: 820699 - DNA, 25 bp, Homo sapien
aaatccccgactgaagcagctctgt

SEQ ID NO: 820700 - DNA, 25 bp, Homo sapien
ataaagtcattcagcggagtggtgt

SEQ ID NO: 820701 - DNA, 25 bp, Homo sapien
tataaagtcattcagcggagtggtg

SEQ ID NO: 820702 - DNA, 25 bp, Homo sapien
agcggagtggtgtaggataaaagcc

SEQ ID NO: 820703 - DNA, 25 bp, Homo sapien
tgttttcactatcccggacatttat

SEQ ID NO: 820704 - DNA, 25 bp, Homo sapien
tagcacaggctaggtgcaaaggtgt

SEQ ID NO: 820705 - DNA, 25 bp, Homo sapien
cactatcccggacatttattttgca

SEQ ID NO: 820706 - DNA, 25 bp, Homo sapien
aaagtacaacatctgtatgtccatt

SEQ ID NO: 820707 - DNA, 25 bp, Homo sapien
cagcttcgtattcaagcagtttttc

SEQ ID NO: 820708 - DNA, 25 bp, Homo sapien
ttttcgcttcaagatcagcttcgta

SEQ ID NO: 820709 - DNA, 25 bp, Homo sapien
tcagatctgggtctgcaccaaagtt

SEQ ID NO: 820710 - DNA, 25 bp, Homo sapien
cagtattataacgaatatccctcag

SEQ ID NO: 820711 - DNA, 25 bp, Homo sapien
tgttaataacggcaactaatagtgg

SEQ ID NO: 820712 - DNA, 25 bp, Homo sapien
tggattattgttaataacggcaact

SEQ ID NO: 820713 - DNA, 25 bp, Homo sapien
caactaatagtggagtatacccatc

SEQ ID NO: 820714 - DNA, 25 bp, Homo sapien
taccatttttggattattgttaata

SEQ ID NO: 820715 - DNA, 25 bp, Homo sapien
aattccacaccttgctgaagaagaa

SEQ ID NO: 820716 - DNA, 25 bp, Homo sapien
cttcgtaacataattccacaccttg

SEQ ID NO: 820717 - DNA, 25 bp, Homo sapien
ttactaaacatggtggttcaccact

SEQ ID NO: 820718 - DNA, 25 bp, Homo sapien
taaacatggtggttcaccactgaca

SEQ ID NO: 820719 - DNA, 25 bp, Homo sapien
ccatggaaataaacatattcctcag

SEQ ID NO: 820720 - DNA, 25 bp, Homo sapien
gcagtaaaaccatggaaataaacat

SEQ ID NO: 820721 - DNA, 25 bp, Homo sapien
tggaaataaacatattcctcagctg

SEQ ID NO: 820722 - DNA, 25 bp, Homo sapien
ggaaataaacatattcctcagctgt

SEQ ID NO: 820723 - DNA, 25 bp, Homo sapien
gcatatggtctgcttaaaccaaagt

SEQ ID NO: 820724 - DNA, 25 bp, Homo sapien
tggatattcaccaataatttacatg

SEQ ID NO: 820725 - DNA, 25 bp, Homo sapien
cacgttctgtattacgaagatgaaa

SEQ ID NO: 820726 - DNA, 25 bp, Homo sapien
tactcaattatggttcatgcattta

SEQ ID NO: 820727 - DNA, 25 bp, Homo sapien
tgcttccactttactaagccataga

SEQ ID NO: 820728 - DNA, 25 bp, Homo sapien
cttccactttactaagccatagaat

SEQ ID NO: 820729 - DNA, 25 bp, Homo sapien
atgcttccactttactaagccatag

SEQ ID NO: 820730 - DNA, 25 bp, Homo sapien
ctatgcttccactttactaagccat

SEQ ID NO: 820731 - DNA, 25 bp, Homo sapien
aggaaattacgtgtgaatgccagca

SEQ ID NO: 820732 - DNA, 25 bp, Homo sapien
gaatgtaacacacttgaggacaagc

SEQ ID NO: 820733 - DNA, 25 bp, Homo sapien
tcatggttctgtcggctgcacattt

SEQ ID NO: 820734 - DNA, 25 bp, Homo sapien
tctctgaggtccttaagggaaaatc

SEQ ID NO: 820735 - DNA, 25 bp, Homo sapien
tctttccatggctcgcagtgaattg

SEQ ID NO: 820736 - DNA, 25 bp, Homo sapien
ttctttccatggctcgcagtgaatt

SEQ ID NO: 820737 - DNA, 25 bp, Homo sapien
catggctcgcagtgaattgtgggta

SEQ ID NO: 820738 - DNA, 25 bp, Homo sapien
ttccatggctcgcagtgaattgtgg

SEQ ID NO: 820739 - DNA, 25 bp, Homo sapien
cacatgtagtgccaagaataaggtg

SEQ ID NO: 820740 - DNA, 25 bp, Homo sapien
acatgtagtgccaagaataaggtgt

SEQ ID NO: 820741 - DNA, 25 bp, Homo sapien
ttagtcacatgtagtgccaagaata

SEQ ID NO: 820742 - DNA, 25 bp, Homo sapien
gtcacatgtagtgccaagaataagg

SEQ ID NO: 820743 - DNA, 25 bp, Homo sapien
caacaagaaaaaaacactaatccag

SEQ ID NO: 820744 - DNA, 25 bp, Homo sapien
gcaacaagaaaaaaacactaatcca

SEQ ID NO: 820745 - DNA, 25 bp, Homo sapien
gaatagttcttaaaaatatttgaca

SEQ ID NO: 820746 - DNA, 25 bp, Homo sapien
tgacatttcaaaataatacaaaatt

SEQ ID NO: 820747 - DNA, 25 bp, Homo sapien
ccaacacagtgtcagaatattttaa

SEQ ID NO: 820748 - DNA, 25 bp, Homo sapien
cattttcagccaacacagtgtcaga

SEQ ID NO: 820749 - DNA, 25 bp, Homo sapien
tcagccaacacagtgtcagaatatt

SEQ ID NO: 820750 - DNA, 25 bp, Homo sapien
tctttacattttcagccaacacagt

SEQ ID NO: 820751 - DNA, 25 bp, Homo sapien
atattataatagttcacttaacggt

SEQ ID NO: 820752 - DNA, 25 bp, Homo sapien
taatacatgcctaacacagtttcct

SEQ ID NO: 820753 - DNA, 25 bp, Homo sapien
cagctgatggttcacaatatagatg

SEQ ID NO: 820754 - DNA, 25 bp, Homo sapien
tattccattcaacattttgacacaa

SEQ ID NO: 820755 - DNA, 25 bp, Homo sapien
gcatgggactggctaggttcaaatc

SEQ ID NO: 820756 - DNA, 25 bp, Homo sapien
tatggtacaaattctggcatgggac

SEQ ID NO: 820757 - DNA, 25 bp, Homo sapien
gaacagggcctgacaagtatcactt

SEQ ID NO: 820758 - DNA, 25 bp, Homo sapien
caagtcattgaaccatgttgcacct

SEQ ID NO: 820759 - DNA, 25 bp, Homo sapien
ggcttagaatagtccccaagaataa

SEQ ID NO: 820760 - DNA, 25 bp, Homo sapien
caggcttagaatagtccccaagaat

SEQ ID NO: 820761 - DNA, 25 bp, Homo sapien
atagtccccaagaataagctccaaa

SEQ ID NO: 820762 - DNA, 25 bp, Homo sapien
tagaatagtccccaagaataagctc

SEQ ID NO: 820763 - DNA, 25 bp, Homo sapien
gtttcagcacagaacacaaaggcca

SEQ ID NO: 820764 - DNA, 25 bp, Homo sapien
atgttattgccctcctctttgagtc

SEQ ID NO: 820765 - DNA, 25 bp, Homo sapien
tctgcttcacactggacaatggaac

SEQ ID NO: 820766 - DNA, 25 bp, Homo sapien
tctacccatgagtgtatgtgcagtg

SEQ ID NO: 820767 - DNA, 25 bp, Homo sapien
tacaagtaaggctcgaactggtgcc

SEQ ID NO: 820768 - DNA, 25 bp, Homo sapien
tagtagaaataaccatcacacaggc

SEQ ID NO: 820769 - DNA, 25 bp, Homo sapien
gatatttgagtttgaggcaccaccc

SEQ ID NO: 820770 - DNA, 25 bp, Homo sapien
cgagccacatcacggtaagttctga

SEQ ID NO: 820771 - DNA, 25 bp, Homo sapien
gaatatcggagtaaaaagtgcaggg

SEQ ID NO: 820772 - DNA, 25 bp, Homo sapien
gataattgtttccttcgagccctag

SEQ ID NO: 820773 - DNA, 25 bp, Homo sapien
cgagccctagcatataggacatatt

SEQ ID NO: 820774 - DNA, 25 bp, Homo sapien
gatctctggagtttacaaagcacta

SEQ ID NO: 820775 - DNA, 25 bp, Homo sapien
ttcttgccaagttgtagcatatctc

SEQ ID NO: 820776 - DNA, 25 bp, Homo sapien
cttcttgccaagttgtagcatatct

SEQ ID NO: 820777 - DNA, 25 bp, Homo sapien
tcttgccaagttgtagcatatctca

SEQ ID NO: 820778 - DNA, 25 bp, Homo sapien
tgctgcttccgtggataatcactgg

SEQ ID NO: 820779 - DNA, 25 bp, Homo sapien
cttggctgctaagcctgcggagagc

SEQ ID NO: 820780 - DNA, 25 bp, Homo sapien
tggctgctaagcctgcggagagcca

SEQ ID NO: 820781 - DNA, 25 bp, Homo sapien
tgcttccgtggataatcactggcat

SEQ ID NO: 820782 - DNA, 25 bp, Homo sapien
ctcaggagcctcatttggccctatt

SEQ ID NO: 820783 - DNA, 25 bp, Homo sapien
ttggccttgattcacagtgcacaac

SEQ ID NO: 820784 - DNA, 25 bp, Homo sapien
ttggccctatttggccttgattcac

SEQ ID NO: 820785 - DNA, 25 bp, Homo sapien
aggagcctcatttggccctatttgg

SEQ ID NO: 820786 - DNA, 25 bp, Homo sapien
tgatgacacaatccatggtcatctg

SEQ ID NO: 820787 - DNA, 25 bp, Homo sapien
gattatgtcacaaagttcacttgat

SEQ ID NO: 820788 - DNA, 25 bp, Homo sapien
catattccctcgaattcactgagat

SEQ ID NO: 820789 - DNA, 25 bp, Homo sapien
gagacttgtaggtgcatctgcaatg

SEQ ID NO: 820790 - DNA, 25 bp, Homo sapien
tcacttgatagaaaaccatattccc

SEQ ID NO: 820791 - DNA, 25 bp, Homo sapien
gttcagctctaaagacaagaaacaa

SEQ ID NO: 820792 - DNA, 25 bp, Homo sapien
tgttcagctctaaagacaagaaaca

SEQ ID NO: 820793 - DNA, 25 bp, Homo sapien
gatacatggatgagagtcatttcac

SEQ ID NO: 820794 - DNA, 25 bp, Homo sapien
tcataagatacatggatgagagtca

SEQ ID NO: 820795 - DNA, 25 bp, Homo sapien
tgagagtcatttcactacttagcat

SEQ ID NO: 820796 - DNA, 25 bp, Homo sapien
tttttcaactcataagatacatgga

SEQ ID NO: 820797 - DNA, 25 bp, Homo sapien
gaggcagaacattcagagagcttgg

SEQ ID NO: 820798 - DNA, 25 bp, Homo sapien
gagcttggcctttcgatttcctgcc

SEQ ID NO: 820799 - DNA, 25 bp, Homo sapien
agagagcttggcctttcgatttcct

SEQ ID NO: 820800 - DNA, 25 bp, Homo sapien
ctgaggcagaacattcagagagctt

SEQ ID NO: 820801 - DNA, 25 bp, Homo sapien
gctggcaatctcgtaagcatgtaac

SEQ ID NO: 820802 - DNA, 25 bp, Homo sapien
gaggctcaatgcatagctctgagga

SEQ ID NO: 820803 - DNA, 25 bp, Homo sapien
ctgaggattcagacgtaagtatgga

SEQ ID NO: 820804 - DNA, 25 bp, Homo sapien
ggaatgaatactgccttataggagg

SEQ ID NO: 820805 - DNA, 25 bp, Homo sapien
tctcctttgctggtaatgcctccta

SEQ ID NO: 820806 - DNA, 25 bp, Homo sapien
tcctttgctggtaatgcctcctatc

SEQ ID NO: 820807 - DNA, 25 bp, Homo sapien
ctttgctggtaatgcctcctatcat

SEQ ID NO: 820808 - DNA, 25 bp, Homo sapien
ctttgatataattgtctcctttgct

SEQ ID NO: 820809 - DNA, 25 bp, Homo sapien
atctcataaatagcaggctccatac

SEQ ID NO: 820810 - DNA, 25 bp, Homo sapien
aatatctcataaatagcaggctcca

SEQ ID NO: 820811 - DNA, 25 bp, Homo sapien
ccagtaaatatctcataaatagcag

SEQ ID NO: 820812 - DNA, 25 bp, Homo sapien
aaatatctcataaatagcaggctcc

SEQ ID NO: 820813 - DNA, 25 bp, Homo sapien
atcctttttttatctgtcccacttg

SEQ ID NO: 820814 - DNA, 25 bp, Homo sapien
cattgccaggtaactgccatatgtg

SEQ ID NO: 820815 - DNA, 25 bp, Homo sapien
ttgcagtgtagcattgccaggtaac

SEQ ID NO: 820816 - DNA, 25 bp, Homo sapien
caggtaactgccatatgtgtctatt

SEQ ID NO: 820817 - DNA, 25 bp, Homo sapien
tgtagcattgccaggtaactgccat

SEQ ID NO: 820818 - DNA, 25 bp, Homo sapien
aattcagctcgaagcccagatttgc

SEQ ID NO: 820819 - DNA, 25 bp, Homo sapien
tttgaaattcagctcgaagcccaga

SEQ ID NO: 820820 - DNA, 25 bp, Homo sapien
aaattcagctcgaagcccagatttg

SEQ ID NO: 820821 - DNA, 25 bp, Homo sapien
tgaaattcagctcgaagcccagatt

SEQ ID NO: 820822 - DNA, 25 bp, Homo sapien
ttttatgaacaacatttacaataca

SEQ ID NO: 820823 - DNA, 25 bp, Homo sapien
gaaacagcctgatagctgtatgttt

SEQ ID NO: 820824 - DNA, 25 bp, Homo sapien
cctgatagctgtatgttttatgaac

SEQ ID NO: 820825 - DNA, 25 bp, Homo sapien
tttggaaacagcctgatagctgtat

SEQ ID NO: 820826 - DNA, 25 bp, Homo sapien
gagtaatgagactggttcaagacca

SEQ ID NO: 820827 - DNA, 25 bp, Homo sapien
ccataagggttctggcctcatagat

SEQ ID NO: 820828 - DNA, 25 bp, Homo sapien
gctcattaattggaacagatactgc

SEQ ID NO: 820829 - DNA, 25 bp, Homo sapien
caagggctgagggaactaactggct

SEQ ID NO: 820830 - DNA, 25 bp, Homo sapien
tctttaagaatggttcaaacttctg

SEQ ID NO: 820831 - DNA, 25 bp, Homo sapien
gaatggttcaaacttctgtttatgt

SEQ ID NO: 820832 - DNA, 25 bp, Homo sapien
tcttctgagcacttgtctgatggaa

SEQ ID NO: 820833 - DNA, 25 bp, Homo sapien
tgagcacttgtctgatggaaagatg

SEQ ID NO: 820834 - DNA, 25 bp, Homo sapien
ttcagtccggatcatttggctgttt

SEQ ID NO: 820835 - DNA, 25 bp, Homo sapien
accttcagtccggatcatttggctg

SEQ ID NO: 820836 - DNA, 25 bp, Homo sapien
cctgaccttcagtccggatcatttg

SEQ ID NO: 820837 - DNA, 25 bp, Homo sapien
caaaccccagttgtgaaagaagcac

SEQ ID NO: 820838 - DNA, 25 bp, Homo sapien
ttctaaaggcttacctgcctttctc

SEQ ID NO: 820839 - DNA, 25 bp, Homo sapien
taggcacacctgcatttaaccctga

SEQ ID NO: 820840 - DNA, 25 bp, Homo sapien
gacatccaggctatctgtcactgct

SEQ ID NO: 820841 - DNA, 25 bp, Homo sapien
taccattatggtttatgataactgc

SEQ ID NO: 820842 - DNA, 25 bp, Homo sapien
gacacagagttcatctcgtttgccc

SEQ ID NO: 820843 - DNA, 25 bp, Homo sapien
tctcctgccatatgaagacacagag

SEQ ID NO: 820844 - DNA, 25 bp, Homo sapien
catgtgaggatgcaacaagaagggc

SEQ ID NO: 820845 - DNA, 25 bp, Homo sapien
gagttcatctcgtttgcccttcttt

SEQ ID NO: 820846 - DNA, 25 bp, Homo sapien
ctggaaagagaaagagcaaagagga

SEQ ID NO: 820847 - DNA, 25 bp, Homo sapien
gaaagagaaagagcaaagaggaaaa

SEQ ID NO: 820848 - DNA, 25 bp, Homo sapien
aagagaaagagcaaagaggaaaatt

SEQ ID NO: 820849 - DNA, 25 bp, Homo sapien
ggaaagagaaagagcaaagaggaaa

SEQ ID NO: 820850 - DNA, 25 bp, Homo sapien
tcttggtcgtttgaaagaagaggaa

SEQ ID NO: 820851 - DNA, 25 bp, Homo sapien
tcactgttcaatgcatccacaccaa

SEQ ID NO: 820852 - DNA, 25 bp, Homo sapien
tggtctttcttggtcgtttgaaaga

SEQ ID NO: 820853 - DNA, 25 bp, Homo sapien
agtgttcactgttcaatgcatccac

SEQ ID NO: 820854 - DNA, 25 bp, Homo sapien
ctaagtgaagccctagccttggact

SEQ ID NO: 820855 - DNA, 25 bp, Homo sapien
catgggatgataccacaagaagacc

SEQ ID NO: 820856 - DNA, 25 bp, Homo sapien
caaggatctgaatgtcccactgcat

SEQ ID NO: 820857 - DNA, 25 bp, Homo sapien
tatggcttgaataggtctcccaaag

SEQ ID NO: 820858 - DNA, 25 bp, Homo sapien
ggcagcaatattagtggctcttttt

SEQ ID NO: 820859 - DNA, 25 bp, Homo sapien
gctcccatgaagtgctttggcagca

SEQ ID NO: 820860 - DNA, 25 bp, Homo sapien
gctttggcagcaatattagtggctc

SEQ ID NO: 820861 - DNA, 25 bp, Homo sapien
tccatcaacagtggctcccatgaag

SEQ ID NO: 820862 - DNA, 25 bp, Homo sapien
tcaagcatttagacatgacgtattc

SEQ ID NO: 820863 - DNA, 25 bp, Homo sapien
ctcatggtgactggccctggataga

SEQ ID NO: 820864 - DNA, 25 bp, Homo sapien
gacatgacgtattctccctcatggt

SEQ ID NO: 820865 - DNA, 25 bp, Homo sapien
gtgactggccctggatagactaagg

SEQ ID NO: 820866 - DNA, 25 bp, Homo sapien
actgattgtcagtgcatgagctctg

SEQ ID NO: 820867 - DNA, 25 bp, Homo sapien
ctgaaactgattgtcagtgcatgag

SEQ ID NO: 820868 - DNA, 25 bp, Homo sapien
tgattgtcagtgcatgagctctggg

SEQ ID NO: 820869 - DNA, 25 bp, Homo sapien
aaactgattgtcagtgcatgagctc

SEQ ID NO: 820870 - DNA, 25 bp, Homo sapien
tggcttagaacatttactgccgcag

SEQ ID NO: 820871 - DNA, 25 bp, Homo sapien
agaacatttactgccgcaggcacca

SEQ ID NO: 820872 - DNA, 25 bp, Homo sapien
catttactgccgcaggcaccatgag

SEQ ID NO: 820873 - DNA, 25 bp, Homo sapien
tactgccgcaggcaccatgagcttt

SEQ ID NO: 820874 - DNA, 25 bp, Homo sapien
tgaggcatccatttgtcagcattgc

SEQ ID NO: 820875 - DNA, 25 bp, Homo sapien
tcccttttagcaatggaaccctggc

SEQ ID NO: 820876 - DNA, 25 bp, Homo sapien
cattgctttggattcctgtgagtcc

SEQ ID NO: 820877 - DNA, 25 bp, Homo sapien
ctgttacagttaatgcaggttcatg

SEQ ID NO: 820878 - DNA, 25 bp, Homo sapien
gtatccacaattacatgcacggtct

SEQ ID NO: 820879 - DNA, 25 bp, Homo sapien
actctctgggctctatctgttcatc

SEQ ID NO: 820880 - DNA, 25 bp, Homo sapien
tataggttttcacaataatgtcatg

SEQ ID NO: 820881 - DNA, 25 bp, Homo sapien
ggtctactcagtatcctacagcata

SEQ ID NO: 820882 - DNA, 25 bp, Homo sapien
ttctgaaatgggtgacagaaagttt

SEQ ID NO: 820883 - DNA, 25 bp, Homo sapien
aatgggtgacagaaagtttctgagc

SEQ ID NO: 820884 - DNA, 25 bp, Homo sapien
tgaaatgggtgacagaaagtttctg

SEQ ID NO: 820885 - DNA, 25 bp, Homo sapien
ggtgacagaaagtttctgagctcat

SEQ ID NO: 820886 - DNA, 25 bp, Homo sapien
tctgcagaaagtgtgaccaaatatc

SEQ ID NO: 820887 - DNA, 25 bp, Homo sapien
tccacttatggtaaagtcacccatt

SEQ ID NO: 820888 - DNA, 25 bp, Homo sapien
caatattgttgtaggctttgaacct

SEQ ID NO: 820889 - DNA, 25 bp, Homo sapien
taaagtgctgccatggtactacacc

SEQ ID NO: 820890 - DNA, 25 bp, Homo sapien
gctctctgctctagtgattggactt

SEQ ID NO: 820891 - DNA, 25 bp, Homo sapien
tcctgtcagtggaggctttgtagaa

SEQ ID NO: 820892 - DNA, 25 bp, Homo sapien
tcccggctttgagccagcactgtgt

SEQ ID NO: 820893 - DNA, 25 bp, Homo sapien
aataaaggcgctccaaattgcttag

SEQ ID NO: 820894 - DNA, 25 bp, Homo sapien
ttgattccaatagcctcagaaagcc

SEQ ID NO: 820895 - DNA, 25 bp, Homo sapien
aatattagtgttgattccaatagcc

SEQ ID NO: 820896 - DNA, 25 bp, Homo sapien
cctggaagacggttgattagagttg

SEQ ID NO: 820897 - DNA, 25 bp, Homo sapien
gatcttgaacaatggatacgatttc

SEQ ID NO: 820898 - DNA, 25 bp, Homo sapien
caagtaggacatttcttctgtttac

SEQ ID NO: 820899 - DNA, 25 bp, Homo sapien
ttaaacctctatgcccttgagggat

SEQ ID NO: 820900 - DNA, 25 bp, Homo sapien
ccagcgcagggtgctttctgagtaa

SEQ ID NO: 820901 - DNA, 25 bp, Homo sapien
tgtttacttatgaaatgccagcgca

SEQ ID NO: 820902 - DNA, 25 bp, Homo sapien
gcttttcactgttgcatagcctaca

SEQ ID NO: 820903 - DNA, 25 bp, Homo sapien
gttgcatagcctacaaacatcccaa

SEQ ID NO: 820904 - DNA, 25 bp, Homo sapien
cctgcttgcttttcactgttgcata

SEQ ID NO: 820905 - DNA, 25 bp, Homo sapien
gcctacaaacatcccaatcttttga

SEQ ID NO: 820906 - DNA, 25 bp, Homo sapien
catgccgatttatggcaacttccac

SEQ ID NO: 820907 - DNA, 25 bp, Homo sapien
gcagcatcagaaacatgccgattta

SEQ ID NO: 820908 - DNA, 25 bp, Homo sapien
gatttatggcaacttccacaaagat

SEQ ID NO: 820909 - DNA, 25 bp, Homo sapien
cagaaacatgccgatttatggcaac

SEQ ID NO: 820910 - DNA, 25 bp, Homo sapien
tttccattgttcataaagtggatgg

SEQ ID NO: 820911 - DNA, 25 bp, Homo sapien
gttcataaagtggatggcatagtca

SEQ ID NO: 820912 - DNA, 25 bp, Homo sapien
tgttcataaagtggatggcatagtc

SEQ ID NO: 820913 - DNA, 25 bp, Homo sapien
ccattgttcataaagtggatggcat

SEQ ID NO: 820914 - DNA, 25 bp, Homo sapien
ggataccaaaaggattcctcacgta

SEQ ID NO: 820915 - DNA, 25 bp, Homo sapien
ggattcctcacgtaagtgttgtgga

SEQ ID NO: 820916 - DNA, 25 bp, Homo sapien
tggatgtggatatattctatttgga

SEQ ID NO: 820917 - DNA, 25 bp, Homo sapien
gccaaagatattaaggaggatacca

SEQ ID NO: 820918 - DNA, 25 bp, Homo sapien
cattccctttactcagtagaatttc

SEQ ID NO: 820919 - DNA, 25 bp, Homo sapien
actttgactgccaagacttgaaatt

SEQ ID NO: 820920 - DNA, 25 bp, Homo sapien
tcattccctttactcagtagaattt

SEQ ID NO: 820921 - DNA, 25 bp, Homo sapien
tttgactgccaagacttgaaattca

SEQ ID NO: 820922 - DNA, 25 bp, Homo sapien
tcttcacatatacgtactcttattc

SEQ ID NO: 820923 - DNA, 25 bp, Homo sapien
gctcgttctgatcttcacagtccag

SEQ ID NO: 820924 - DNA, 25 bp, Homo sapien
cacagtccaggtatactgaatttct

SEQ ID NO: 820925 - DNA, 25 bp, Homo sapien
ctacttcaaggtctgtgcagctcct

SEQ ID NO: 820926 - DNA, 25 bp, Homo sapien
taacagcatgattgaaaaagagtga

SEQ ID NO: 820927 - DNA, 25 bp, Homo sapien
agtgaactggcccattaaatttgtt

SEQ ID NO: 820928 - DNA, 25 bp, Homo sapien
aataaactgaagtgatggtaattcc

SEQ ID NO: 820929 - DNA, 25 bp, Homo sapien
tttaacagcatgattgaaaaagagt

SEQ ID NO: 820930 - DNA, 25 bp, Homo sapien
tacatttaggatcccttatggtgga

SEQ ID NO: 820931 - DNA, 25 bp, Homo sapien
gaacataaaggaaagaatccctctg

SEQ ID NO: 820932 - DNA, 25 bp, Homo sapien
gatgtcagtaacagctagtgactct

SEQ ID NO: 820933 - DNA, 25 bp, Homo sapien
aaagttagtcacgtcttaaatctgc

SEQ ID NO: 820934 - DNA, 25 bp, Homo sapien
gtagaagcaattgcatctatcagca

SEQ ID NO: 820935 - DNA, 25 bp, Homo sapien
tagaagcaattgcatctatcagcat

SEQ ID NO: 820936 - DNA, 25 bp, Homo sapien
agctttaaccaaatcaaggatccca

SEQ ID NO: 820937 - DNA, 25 bp, Homo sapien
caaggatcccaagtagtttgctaaa

SEQ ID NO: 820938 - DNA, 25 bp, Homo sapien
cccaagtagtttgctaaagatttct

SEQ ID NO: 820939 - DNA, 25 bp, Homo sapien
ccaaatcaaggatcccaagtagttt

SEQ ID NO: 820940 - DNA, 25 bp, Homo sapien
tcttgctcttcttcaactcacttct

SEQ ID NO: 820941 - DNA, 25 bp, Homo sapien
ttactcccatgtttctctgaacatt

SEQ ID NO: 820942 - DNA, 25 bp, Homo sapien
tgtttctctgaacattctcttgctc

SEQ ID NO: 820943 - DNA, 25 bp, Homo sapien
tgctcttcttcaactcacttctaac

SEQ ID NO: 820944 - DNA, 25 bp, Homo sapien
gatataaaatggaaagttcatgtta

SEQ ID NO: 820945 - DNA, 25 bp, Homo sapien
gaagatataaaatggaaagttcatg

SEQ ID NO: 820946 - DNA, 25 bp, Homo sapien
ataaaatggaaagttcatgttaact

SEQ ID NO: 820947 - DNA, 25 bp, Homo sapien
agttcatgttaacttccaaatccat

SEQ ID NO: 820948 - DNA, 25 bp, Homo sapien
tggggccttctcttgtgtctgctgt

SEQ ID NO: 820949 - DNA, 25 bp, Homo sapien
ggccttctcttgtgtctgctgttat

SEQ ID NO: 820950 - DNA, 25 bp, Homo sapien
tatatggggccttctcttgtgtctg

SEQ ID NO: 820951 - DNA, 25 bp, Homo sapien
tatggggccttctcttgtgtctgct

SEQ ID NO: 820952 - DNA, 25 bp, Homo sapien
ctctggtttggcccagtacgtccat

SEQ ID NO: 820953 - DNA, 25 bp, Homo sapien
tctctggtttggcccagtacgtcca

SEQ ID NO: 820954 - DNA, 25 bp, Homo sapien
tctccttttgcactctctggtttgg

SEQ ID NO: 820955 - DNA, 25 bp, Homo sapien
gagcagtcctggcacagttgtttgg

SEQ ID NO: 820956 - DNA, 25 bp, Homo sapien
tctgctacagcagacgggctctgcc

SEQ ID NO: 820957 - DNA, 25 bp, Homo sapien
tcacacacgtttgttgtccaatcaa

SEQ ID NO: 820958 - DNA, 25 bp, Homo sapien
tgttgatggaggttaagagcagtcc

SEQ ID NO: 820959 - DNA, 25 bp, Homo sapien
cccagggtacagtttggtggacatg

SEQ ID NO: 820960 - DNA, 25 bp, Homo sapien
taaatttgacattgttagcatctgg

SEQ ID NO: 820961 - DNA, 25 bp, Homo sapien
tcacagtttcatggggattacatgc

SEQ ID NO: 820962 - DNA, 25 bp, Homo sapien
gtggacatggccctcatacagtgac

SEQ ID NO: 820963 - DNA, 25 bp, Homo sapien
catcagggatgtatccaaggatctt

SEQ ID NO: 820964 - DNA, 25 bp, Homo sapien
ggcatcagggatgtatccaaggatc

SEQ ID NO: 820965 - DNA, 25 bp, Homo sapien
ccaggcatcagggatgtatccaagg

SEQ ID NO: 820966 - DNA, 25 bp, Homo sapien
cagggatgtatccaaggatcttcat

SEQ ID NO: 820967 - DNA, 25 bp, Homo sapien
cattctcatttgctggatccatttg

SEQ ID NO: 820968 - DNA, 25 bp, Homo sapien
tgctgcccttttcttaagtcaaact

SEQ ID NO: 820969 - DNA, 25 bp, Homo sapien
ggcttcactggagttattgcattga

SEQ ID NO: 820970 - DNA, 25 bp, Homo sapien
tctaaactttttccctgtgtgctcc

SEQ ID NO: 820971 - DNA, 25 bp, Homo sapien
tgtgctcccaaacactgggagttct

SEQ ID NO: 820972 - DNA, 25 bp, Homo sapien
tttttccctgtgtgctcccaaacac

SEQ ID NO: 820973 - DNA, 25 bp, Homo sapien
cttctctaaactttttccctgtgtg

SEQ ID NO: 820974 - DNA, 25 bp, Homo sapien
tatttattttctgtcattgcttcat

SEQ ID NO: 820975 - DNA, 25 bp, Homo sapien
tttctgtcattgcttcatctaccac

SEQ ID NO: 820976 - DNA, 25 bp, Homo sapien
atatttattttctgtcattgcttca

SEQ ID NO: 820977 - DNA, 25 bp, Homo sapien
gtcattgcttcatctaccactccgt

SEQ ID NO: 820978 - DNA, 25 bp, Homo sapien
agacaagtgcgaacaagagaacggg

SEQ ID NO: 820979 - DNA, 25 bp, Homo sapien
ttacagagagaatcgaaggaagact

SEQ ID NO: 820980 - DNA, 25 bp, Homo sapien
ggagttttaacaaaccacatgctgg

SEQ ID NO: 820981 - DNA, 25 bp, Homo sapien
gaataggttcataggcatttcactc

SEQ ID NO: 820982 - DNA, 25 bp, Homo sapien
ccatgacacctagcctactgggcat

SEQ ID NO: 820983 - DNA, 25 bp, Homo sapien
gattacagccatgttgcaaatcaac

SEQ ID NO: 820984 - DNA, 25 bp, Homo sapien
ccgtgtgccagattacagccatgtt

SEQ ID NO: 820985 - DNA, 25 bp, Homo sapien
acctcagctcctcgagttgttggga

SEQ ID NO: 820986 - DNA, 25 bp, Homo sapien
atattgagcttctgggatgtcaaca

SEQ ID NO: 820987 - DNA, 25 bp, Homo sapien
cagcatattgagcttctgggatgtc

SEQ ID NO: 820988 - DNA, 25 bp, Homo sapien
tgagcttctgggatgtcaacaacca

SEQ ID NO: 820989 - DNA, 25 bp, Homo sapien
gagcttctgggatgtcaacaaccat

SEQ ID NO: 820990 - DNA, 25 bp, Homo sapien
tcttgcatccagtaggtgacccaag

SEQ ID NO: 820991 - DNA, 25 bp, Homo sapien
tgccttaggtcctgtaggaaaatag

SEQ ID NO: 820992 - DNA, 25 bp, Homo sapien
actacagctagtgaataagttaggg

SEQ ID NO: 820993 - DNA, 25 bp, Homo sapien
taagttagggttgtgccataagaga

SEQ ID NO: 820994 - DNA, 25 bp, Homo sapien
aatcatttaagtatgctcctagtgg

SEQ ID NO: 820995 - DNA, 25 bp, Homo sapien
atcatttaagtatgctcctagtgga

SEQ ID NO: 820996 - DNA, 25 bp, Homo sapien
gaatcatttaagtatgctcctagtg

SEQ ID NO: 820997 - DNA, 25 bp, Homo sapien
ctgcatatggtcagagcttggatta

SEQ ID NO: 820998 - DNA, 25 bp, Homo sapien
tacttctctgcatatggtcagagct

SEQ ID NO: 820999 - DNA, 25 bp, Homo sapien
gccagaatggatgcaccatgaaaga

SEQ ID NO: 821000 - DNA, 25 bp, Homo sapien
accatgaaagagaatggtacttctc

SEQ ID NO: 821001 - DNA, 25 bp, Homo sapien
tcaccacagcctctcggatacattg

SEQ ID NO: 821002 - DNA, 25 bp, Homo sapien
atgtcaccacagcctctcggataca

SEQ ID NO: 821003 - DNA, 25 bp, Homo sapien
tgtcaccacagcctctcggatacat

SEQ ID NO: 821004 - DNA, 25 bp, Homo sapien
caccacagcctctcggatacattgt

SEQ ID NO: 821005 - DNA, 25 bp, Homo sapien
taatcacagcggtttgaaaggccaa

SEQ ID NO: 821006 - DNA, 25 bp, Homo sapien
ggcgatccaagaacaactatcatgg

SEQ ID NO: 821007 - DNA, 25 bp, Homo sapien
catagtgagcctggtgacaagtgcc

SEQ ID NO: 821008 - DNA, 25 bp, Homo sapien
gatgctggagtctcaattagccaca

SEQ ID NO: 821009 - DNA, 25 bp, Homo sapien
gttgaatctataaagcttatagtag

SEQ ID NO: 821010 - DNA, 25 bp, Homo sapien
ttctgatttgtactgtacaagatca

SEQ ID NO: 821011 - DNA, 25 bp, Homo sapien
atttgtactgtacaagatcatcctg

SEQ ID NO: 821012 - DNA, 25 bp, Homo sapien
tgtactgtacaagatcatcctgggt

SEQ ID NO: 821013 - DNA, 25 bp, Homo sapien
ctgtacaagatcatcctgggtgatg

SEQ ID NO: 821014 - DNA, 25 bp, Homo sapien
gctgtccacatcctaaagagttgtg

SEQ ID NO: 821015 - DNA, 25 bp, Homo sapien
aagagttgtgaccactcatcatggg

SEQ ID NO: 821016 - DNA, 25 bp, Homo sapien
ctgcattggtttaagagctgtccac

SEQ ID NO: 821017 - DNA, 25 bp, Homo sapien
catcatggggtatcactgagctgct

SEQ ID NO: 821018 - DNA, 25 bp, Homo sapien
aatgactggagcacctgtggccaca

SEQ ID NO: 821019 - DNA, 25 bp, Homo sapien
tgtggccacacagtctgatggcatc

SEQ ID NO: 821020 - DNA, 25 bp, Homo sapien
gctctgatgttttcctgtccgtccc

SEQ ID NO: 821021 - DNA, 25 bp, Homo sapien
aaagattttagatagtgctctgatg

SEQ ID NO: 821022 - DNA, 25 bp, Homo sapien
tgttcctaggccttgtttcattttg

SEQ ID NO: 821023 - DNA, 25 bp, Homo sapien
tatagacacaggcttaccatgattt

SEQ ID NO: 821024 - DNA, 25 bp, Homo sapien
cttagatggtatataaggcaccacc

SEQ ID NO: 821025 - DNA, 25 bp, Homo sapien
tcgaaggttttatcataaggtctta

SEQ ID NO: 821026 - DNA, 25 bp, Homo sapien
gaaaataggccgcaggcctgatttg

SEQ ID NO: 821027 - DNA, 25 bp, Homo sapien
cttggaggtcatactgaaaataggc

SEQ ID NO: 821028 - DNA, 25 bp, Homo sapien
tctctccttagcttggaggtcatac

SEQ ID NO: 821029 - DNA, 25 bp, Homo sapien
gtcctacgagctgccggtccttaag

SEQ ID NO: 821030 - DNA, 25 bp, Homo sapien
caggcttcagagtcccctatagaaa

SEQ ID NO: 821031 - DNA, 25 bp, Homo sapien
aggcttcagagtcccctatagaaac

SEQ ID NO: 821032 - DNA, 25 bp, Homo sapien
tcaggcttcagagtcccctatagaa

SEQ ID NO: 821033 - DNA, 25 bp, Homo sapien
aactcccgatggtcaaagataaaga

SEQ ID NO: 821034 - DNA, 25 bp, Homo sapien
ccatttccttgggaagctccctgaa

SEQ ID NO: 821035 - DNA, 25 bp, Homo sapien
gtgtgacagaaaccatttccttggg

SEQ ID NO: 821036 - DNA, 25 bp, Homo sapien
tgggaagctccctgaaaagcaacat

SEQ ID NO: 821037 - DNA, 25 bp, Homo sapien
tccttgggaagctccctgaaaagca

SEQ ID NO: 821038 - DNA, 25 bp, Homo sapien
ctgtagctggagcagattggatgta

SEQ ID NO: 821039 - DNA, 25 bp, Homo sapien
tgtagctggagcagattggatgtag

SEQ ID NO: 821040 - DNA, 25 bp, Homo sapien
accttttactgagccacaagttatt

SEQ ID NO: 821041 - DNA, 25 bp, Homo sapien
gttattctcagtgtaatcacgctat

SEQ ID NO: 821042 - DNA, 25 bp, Homo sapien
tctcagtgtaatcacgctatttaat

SEQ ID NO: 821043 - DNA, 25 bp, Homo sapien
gccacaagttattctcagtgtaatc

SEQ ID NO: 821044 - DNA, 25 bp, Homo sapien
ttgtggaagatcgaatttaattctg

SEQ ID NO: 821045 - DNA, 25 bp, Homo sapien
ctgttgtggatcagtgacttggaaa

SEQ ID NO: 821046 - DNA, 25 bp, Homo sapien
ttaacatttgtggaagatcgaattt

SEQ ID NO: 821047 - DNA, 25 bp, Homo sapien
ttaattctgttgtggatcagtgact

SEQ ID NO: 821048 - DNA, 25 bp, Homo sapien
agtgccataaatttccccctacacg

SEQ ID NO: 821049 - DNA, 25 bp, Homo sapien
cataaatttccccctacacgctgct

SEQ ID NO: 821050 - DNA, 25 bp, Homo sapien
tgccataaatttccccctacacgct

SEQ ID NO: 821051 - DNA, 25 bp, Homo sapien
gccataaatttccccctacacgctg

SEQ ID NO: 821052 - DNA, 25 bp, Homo sapien
ttccatatctgtattgaccaagacc

SEQ ID NO: 821053 - DNA, 25 bp, Homo sapien
tatctgtattgaccaagaccttcat

SEQ ID NO: 821054 - DNA, 25 bp, Homo sapien
ccatctcatactctcttagcgtttg

SEQ ID NO: 821055 - DNA, 25 bp, Homo sapien
tctcttagcgtttgtctggcatttc

SEQ ID NO: 821056 - DNA, 25 bp, Homo sapien
caagtgtagtttggccaatgtttcc

SEQ ID NO: 821057 - DNA, 25 bp, Homo sapien
cagaaccatagagcaatttgtctag

SEQ ID NO: 821058 - DNA, 25 bp, Homo sapien
tgtctagaagcccaaaccatttcag

SEQ ID NO: 821059 - DNA, 25 bp, Homo sapien
cagattctgtatctgatgatgccag

SEQ ID NO: 821060 - DNA, 25 bp, Homo sapien
catcatctactgtgtctttgtctat

SEQ ID NO: 821061 - DNA, 25 bp, Homo sapien
tgaacaccagaaataataatgttgg

SEQ ID NO: 821062 - DNA, 25 bp, Homo sapien
ataatgttggtgagtgtttgaattt

SEQ ID NO: 821063 - DNA, 25 bp, Homo sapien
tcaagtgacatcatctactgtgtct

SEQ ID NO: 821064 - DNA, 25 bp, Homo sapien
ttctggcctggtcataaatatcccc

SEQ ID NO: 821065 - DNA, 25 bp, Homo sapien
ccccacaataatccatgatctttat

SEQ ID NO: 821066 - DNA, 25 bp, Homo sapien
tctgttctggcctggtcataaatat

SEQ ID NO: 821067 - DNA, 25 bp, Homo sapien
tgttctggcctggtcataaatatcc

SEQ ID NO: 821068 - DNA, 25 bp, Homo sapien
cagatctatgtaattgttagcagaa

SEQ ID NO: 821069 - DNA, 25 bp, Homo sapien
gcagatctatgtaattgttagcaga

SEQ ID NO: 821070 - DNA, 25 bp, Homo sapien
atctatgtaattgttagcagaattt

SEQ ID NO: 821071 - DNA, 25 bp, Homo sapien
agatctatgtaattgttagcagaat

SEQ ID NO: 821072 - DNA, 25 bp, Homo sapien
tggcctatcatttgtggaggaagga

SEQ ID NO: 821073 - DNA, 25 bp, Homo sapien
attcttctgtgtctgttcacatagt

SEQ ID NO: 821074 - DNA, 25 bp, Homo sapien
tactaatggttatacttggcctatc

SEQ ID NO: 821075 - DNA, 25 bp, Homo sapien
ttcacatagtttgtttagaaggtgc

SEQ ID NO: 821076 - DNA, 25 bp, Homo sapien
ctacttatctgtatccctgcaagga

SEQ ID NO: 821077 - DNA, 25 bp, Homo sapien
gcctttgcgtgtattcatcagttga

SEQ ID NO: 821078 - DNA, 25 bp, Homo sapien
tgaattaggactgtgttgctctgta

SEQ ID NO: 821079 - DNA, 25 bp, Homo sapien
cctgcaaggataggttttatgctga

SEQ ID NO: 821080 - DNA, 25 bp, Homo sapien
aatggaaaacagaaaaaggcagaag

SEQ ID NO: 821081 - DNA, 25 bp, Homo sapien
gaaaacagaaaaaggcagaagttgc

SEQ ID NO: 821082 - DNA, 25 bp, Homo sapien
atggaaaacagaaaaaggcagaagt

SEQ ID NO: 821083 - DNA, 25 bp, Homo sapien
actaatagctgatctctcagcagaa

SEQ ID NO: 821084 - DNA, 25 bp, Homo sapien
agactaatagctgatctctcagcag

SEQ ID NO: 821085 - DNA, 25 bp, Homo sapien
tcagactaatagctgatctctcagc

SEQ ID NO: 821086 - DNA, 25 bp, Homo sapien
catcagactaatagctgatctctca

SEQ ID NO: 821087 - DNA, 25 bp, Homo sapien
tcttgcatatggtactaacaatggc

SEQ ID NO: 821088 - DNA, 25 bp, Homo sapien
tgttatgctctagcaagccactttg

SEQ ID NO: 821089 - DNA, 25 bp, Homo sapien
cattctgcgagaaaactggcgatta

SEQ ID NO: 821090 - DNA, 25 bp, Homo sapien
tatgtggtcggctttaataaatcac

SEQ ID NO: 821091 - DNA, 25 bp, Homo sapien
ccaaccccggcgcaaaatgtcaccg

SEQ ID NO: 821092 - DNA, 25 bp, Homo sapien
ccggcgcaaaatgtcaccgagggag

SEQ ID NO: 821093 - DNA, 25 bp, Homo sapien
aaccccggcgcaaaatgtcaccgag

SEQ ID NO: 821094 - DNA, 25 bp, Homo sapien
cccggcgcaaaatgtcaccgaggga

SEQ ID NO: 821095 - DNA, 25 bp, Homo sapien
ctccccgcgctgctctgctagtgcg

SEQ ID NO: 821096 - DNA, 25 bp, Homo sapien
ccccgcgctgctctgctagtgcgat

SEQ ID NO: 821097 - DNA, 25 bp, Homo sapien
tccccgcgctgctctgctagtgcga

SEQ ID NO: 821098 - DNA, 25 bp, Homo sapien
ctgctagctgcttccccgccagtgg

SEQ ID NO: 821099 - DNA, 25 bp, Homo sapien
gtccgagcgcggaggcagaaggcgc

SEQ ID NO: 821100 - DNA, 25 bp, Homo sapien
ccggcacgggctctcgtccgagcgc

SEQ ID NO: 821101 - DNA, 25 bp, Homo sapien
tgcggggccactgtcgcgggagcct

SEQ ID NO: 821102 - DNA, 25 bp, Homo sapien
cagcaacaagttcaaaaggtgcggg

SEQ ID NO: 821103 - DNA, 25 bp, Homo sapien
ttccaaaagccaggcgcaggcgagc

SEQ ID NO: 821104 - DNA, 25 bp, Homo sapien
agcagcaacaagttcaaaaggtgcg

SEQ ID NO: 821105 - DNA, 25 bp, Homo sapien
ccttccaaaagccaggcgcaggcga

SEQ ID NO: 821106 - DNA, 25 bp, Homo sapien
tccgatgcgccgagagagcataaat

SEQ ID NO: 821107 - DNA, 25 bp, Homo sapien
tgcagtgtgacagttacagagctca

SEQ ID NO: 821108 - DNA, 25 bp, Homo sapien
atagagactttctcctcgccgtgca

SEQ ID NO: 821109 - DNA, 25 bp, Homo sapien
gcggtacatacctggccaagtgcgc

SEQ ID NO: 821110 - DNA, 25 bp, Homo sapien
taacgaggcgtctacaatgggtcac

SEQ ID NO: 821111 - DNA, 25 bp, Homo sapien
tactagtgagaaacgtggtccagag

SEQ ID NO: 821112 - DNA, 25 bp, Homo sapien
tctgtgtctgccaaaagcgttcgcc

SEQ ID NO: 821113 - DNA, 25 bp, Homo sapien
tcttattccaagatagggctcctgg

SEQ ID NO: 821114 - DNA, 25 bp, Homo sapien
cacattcgcgatgacagagacggca

SEQ ID NO: 821115 - DNA, 25 bp, Homo sapien
tgacatagtagaacaccagggccat

SEQ ID NO: 821116 - DNA, 25 bp, Homo sapien
aaaacggtaacgactaggcgctgca

SEQ ID NO: 821117 - DNA, 25 bp, Homo sapien
tttccgggatgaggccaaagaaggc

SEQ ID NO: 821118 - DNA, 25 bp, Homo sapien
aaatgcattgaaccactttatagac

SEQ ID NO: 821119 - DNA, 25 bp, Homo sapien
gagttgatcagtttcagctctgata

SEQ ID NO: 821120 - DNA, 25 bp, Homo sapien
ccactgcatattgtagagttgatca

SEQ ID NO: 821121 - DNA, 25 bp, Homo sapien
tcaaccataattaaagtgcatacat

SEQ ID NO: 821122 - DNA, 25 bp, Homo sapien
tctaataaggcagttaatggcagta

SEQ ID NO: 821123 - DNA, 25 bp, Homo sapien
taaactgaagcttgacactgtctag

SEQ ID NO: 821124 - DNA, 25 bp, Homo sapien
tggataaaagggtgattcagggacc

SEQ ID NO: 821125 - DNA, 25 bp, Homo sapien
gcagcaaagatgtaacgccaccgta

SEQ ID NO: 821126 - DNA, 25 bp, Homo sapien
caggacagtaggaggacatgtttat

SEQ ID NO: 821127 - DNA, 25 bp, Homo sapien
ttttgtggctcaagactcgaatctt

SEQ ID NO: 821128 - DNA, 25 bp, Homo sapien
ttggcaagcccaccgatcatttctg

SEQ ID NO: 821129 - DNA, 25 bp, Homo sapien
ctttggtagaagtgtaaggtagctc

SEQ ID NO: 821130 - DNA, 25 bp, Homo sapien
gatattttaccacatgacccatacg

SEQ ID NO: 821131 - DNA, 25 bp, Homo sapien
gacccatacgagtcaatgcacttag

SEQ ID NO: 821132 - DNA, 25 bp, Homo sapien
cagatcagcttcagaggacttgaaa

SEQ ID NO: 821133 - DNA, 25 bp, Homo sapien
gaatgacttagggaagataacccca

SEQ ID NO: 821134 - DNA, 25 bp, Homo sapien
gctgtagagcttgataggtgctcat

SEQ ID NO: 821135 - DNA, 25 bp, Homo sapien
gaaatacaagggctgtagcaggcag

SEQ ID NO: 821136 - DNA, 25 bp, Homo sapien
cataggtgattatgtgctgtagagc

SEQ ID NO: 821137 - DNA, 25 bp, Homo sapien
caccaggtccagttgggaatgccat

SEQ ID NO: 821138 - DNA, 25 bp, Homo sapien
ctatcaataaagactgagctattga

SEQ ID NO: 821139 - DNA, 25 bp, Homo sapien
atcaataaagactgagctattgaac

SEQ ID NO: 821140 - DNA, 25 bp, Homo sapien
tatcaataaagactgagctattgaa

SEQ ID NO: 821141 - DNA, 25 bp, Homo sapien
tatgcatgcaatagcggcaaaccta

SEQ ID NO: 821142 - DNA, 25 bp, Homo sapien
ttagatactgtaactacgcctgtgg

SEQ ID NO: 821143 - DNA, 25 bp, Homo sapien
tctgtagcaggtgtatgacaaccac

SEQ ID NO: 821144 - DNA, 25 bp, Homo sapien
agttggtattacacccaaggtcaca

SEQ ID NO: 821145 - DNA, 25 bp, Homo sapien
cagactgcatagcctactgaattag

SEQ ID NO: 821146 - DNA, 25 bp, Homo sapien
agtttgaggattgttggtaaacaca

SEQ ID NO: 821147 - DNA, 25 bp, Homo sapien
tctatgtgtgcaggagttagatatc

SEQ ID NO: 821148 - DNA, 25 bp, Homo sapien
tttaaaatgaagttctgcacataac

SEQ ID NO: 821149 - DNA, 25 bp, Homo sapien
ggactaaaacagtgccatacatgct

SEQ ID NO: 821150 - DNA, 25 bp, Homo sapien
taggaagtgtctactaacaagcagt

SEQ ID NO: 821151 - DNA, 25 bp, Homo sapien
cctagtaagccaatgttaatcagcc

SEQ ID NO: 821152 - DNA, 25 bp, Homo sapien
tgctaatgccataaaagcatctcgg

SEQ ID NO: 821153 - DNA, 25 bp, Homo sapien
tcaattgcaggagactaatcttatc

SEQ ID NO: 821154 - DNA, 25 bp, Homo sapien
taatcttatctggaatgtcaaggga

SEQ ID NO: 821155 - DNA, 25 bp, Homo sapien
tactgaattgaactgattgtttgcc

SEQ ID NO: 821156 - DNA, 25 bp, Homo sapien
gttgtgagagcaatacactgggtca

SEQ ID NO: 821157 - DNA, 25 bp, Homo sapien
tgaggcctatttgagagcccagtgt

SEQ ID NO: 821158 - DNA, 25 bp, Homo sapien
taacatgcccaatgacagttgaggt

SEQ ID NO: 821159 - DNA, 25 bp, Homo sapien
gaggtcgtgcttccactgaggtaag

SEQ ID NO: 821160 - DNA, 25 bp, Homo sapien
tactgtaagtaccatgtgtgaagaa

SEQ ID NO: 821161 - DNA, 25 bp, Homo sapien
gaaaagctgtcttgggttaagagag

SEQ ID NO: 821162 - DNA, 25 bp, Homo sapien
taataaatggtcctcaagcagcttg

SEQ ID NO: 821163 - DNA, 25 bp, Homo sapien
gcatagcagtgaaactagtgtgata

SEQ ID NO: 821164 - DNA, 25 bp, Homo sapien
agtgcctactagtgccaagccagta

SEQ ID NO: 821165 - DNA, 25 bp, Homo sapien
aacttcctaagtttgagtactggct

SEQ ID NO: 821166 - DNA, 25 bp, Homo sapien
ccattcttgcctttagagagactaa

SEQ ID NO: 821167 - DNA, 25 bp, Homo sapien
ccagggtacaaaatgaaagacctag

SEQ ID NO: 821168 - DNA, 25 bp, Homo sapien
gagactaagaacgtgaatgtcacac

SEQ ID NO: 821169 - DNA, 25 bp, Homo sapien
gatgtcataggtagtcaggcactgt

SEQ ID NO: 821170 - DNA, 25 bp, Homo sapien
taaattatagagtgagtggcaggct

SEQ ID NO: 821171 - DNA, 25 bp, Homo sapien
gtggcaggcttaactaaggactttc

SEQ ID NO: 821172 - DNA, 25 bp, Homo sapien
tcccaaatgggatcttcactagagt

SEQ ID NO: 821173 - DNA, 25 bp, Homo sapien
caaccattgctgagggctgaatcag

SEQ ID NO: 821174 - DNA, 25 bp, Homo sapien
tctatgatcctatagcagcctttgg

SEQ ID NO: 821175 - DNA, 25 bp, Homo sapien
gagacaagcgcagtggactttccca

SEQ ID NO: 821176 - DNA, 25 bp, Homo sapien
cagcctttggtacaccgattacaca

SEQ ID NO: 821177 - DNA, 25 bp, Homo sapien
tatgcaaatctccacctgttagagg

SEQ ID NO: 821178 - DNA, 25 bp, Homo sapien
taaaggaattgctatagagtcaggc

SEQ ID NO: 821179 - DNA, 25 bp, Homo sapien
cactctttctatgggcctttggaat

SEQ ID NO: 821180 - DNA, 25 bp, Homo sapien
aagaaaagatgatactagcagtgct

SEQ ID NO: 821181 - DNA, 25 bp, Homo sapien
ccagcaagacagttttcttgctcct

SEQ ID NO: 821182 - DNA, 25 bp, Homo sapien
agcaagacagttttcttgctcctca

SEQ ID NO: 821183 - DNA, 25 bp, Homo sapien
gcaagacagttttcttgctcctcat

SEQ ID NO: 821184 - DNA, 25 bp, Homo sapien
cagcaagacagttttcttgctcctc

SEQ ID NO: 821185 - DNA, 25 bp, Homo sapien
tattctaatatctctctgggtttag

SEQ ID NO: 821186 - DNA, 25 bp, Homo sapien
cccatagagtaaccatcaaagctgg

SEQ ID NO: 821187 - DNA, 25 bp, Homo sapien
catagagtaaccatcaaagctggag

SEQ ID NO: 821188 - DNA, 25 bp, Homo sapien
ggcccatagagtaaccatcaaagct

SEQ ID NO: 821189 - DNA, 25 bp, Homo sapien
gggccatgaggatcgcaaagaacac

SEQ ID NO: 821190 - DNA, 25 bp, Homo sapien
taattccccagacccgatgttcact

SEQ ID NO: 821191 - DNA, 25 bp, Homo sapien
caaatatctgaaagtactgtggccc

SEQ ID NO: 821192 - DNA, 25 bp, Homo sapien
taactgtataatcttgggccatgag

SEQ ID NO: 821193 - DNA, 25 bp, Homo sapien
tttgtgcagaagtcaatgaatatcg

SEQ ID NO: 821194 - DNA, 25 bp, Homo sapien
aatgaagacttctattctcatacat

SEQ ID NO: 821195 - DNA, 25 bp, Homo sapien
ttctttaaataccttatccactgct

SEQ ID NO: 821196 - DNA, 25 bp, Homo sapien
tacatatagatacagtgagatagtt

SEQ ID NO: 821197 - DNA, 25 bp, Homo sapien
ccttcatcagagttactggttgtag

SEQ ID NO: 821198 - DNA, 25 bp, Homo sapien
tttccaaataggacaagatgctccc

SEQ ID NO: 821199 - DNA, 25 bp, Homo sapien
agagaaacattcactcttccatttg

SEQ ID NO: 821200 - DNA, 25 bp, Homo sapien
gatgctcccagagaaacattcactc

SEQ ID NO: 821201 - DNA, 25 bp, Homo sapien
ggaagaaacgcagctggaatgctgc

SEQ ID NO: 821202 - DNA, 25 bp, Homo sapien
gctggaatgctgccatgaaaacttt

SEQ ID NO: 821203 - DNA, 25 bp, Homo sapien
actggaagaaacgcagctggaatgc

SEQ ID NO: 821204 - DNA, 25 bp, Homo sapien
caactggaagaaacgcagctggaat

SEQ ID NO: 821205 - DNA, 25 bp, Homo sapien
tggtggccccaagagctcaaaacag

SEQ ID NO: 821206 - DNA, 25 bp, Homo sapien
ccaccatgaccatgcagcttttggt

SEQ ID NO: 821207 - DNA, 25 bp, Homo sapien
gtggcaatcatagttgtcccagtgg

SEQ ID NO: 821208 - DNA, 25 bp, Homo sapien
ggcctgtggtataggtgcaggtagc

SEQ ID NO: 821209 - DNA, 25 bp, Homo sapien
tgccttattactgatgggttctagc

SEQ ID NO: 821210 - DNA, 25 bp, Homo sapien
tatatgtaaagaggcaatttcagca

SEQ ID NO: 821211 - DNA, 25 bp, Homo sapien
tctgcacaagaagaatatcacgttg

SEQ ID NO: 821212 - DNA, 25 bp, Homo sapien
tgtggataggaaagctcaaatctgg

SEQ ID NO: 821213 - DNA, 25 bp, Homo sapien
aatagagatctgcagctcaagtttc

SEQ ID NO: 821214 - DNA, 25 bp, Homo sapien
ctttaccacattgccctttgaaata

SEQ ID NO: 821215 - DNA, 25 bp, Homo sapien
gtactttaccacattgccctttgaa

SEQ ID NO: 821216 - DNA, 25 bp, Homo sapien
ttgaaatagagatctgcagctcaag

SEQ ID NO: 821217 - DNA, 25 bp, Homo sapien
caaatatccctagggctcaactgtc

SEQ ID NO: 821218 - DNA, 25 bp, Homo sapien
aaaagggacacggacacttctctga

SEQ ID NO: 821219 - DNA, 25 bp, Homo sapien
taatgcgctacctaacactgcttgg

SEQ ID NO: 821220 - DNA, 25 bp, Homo sapien
ggttgtagctttcccagtcgcctga

SEQ ID NO: 821221 - DNA, 25 bp, Homo sapien
acgatctgtttcagtgaagctcgta

SEQ ID NO: 821222 - DNA, 25 bp, Homo sapien
gatctgtttcagtgaagctcgtagg

SEQ ID NO: 821223 - DNA, 25 bp, Homo sapien
gctcgtaggggtgtagttgtgggaa

SEQ ID NO: 821224 - DNA, 25 bp, Homo sapien
ggaagctgagggctaccaggagcca

SEQ ID NO: 821225 - DNA, 25 bp, Homo sapien
tgctacgcacatgaaagcaaatcag

SEQ ID NO: 821226 - DNA, 25 bp, Homo sapien
atgaaagcaaatcagatacacaatg

SEQ ID NO: 821227 - DNA, 25 bp, Homo sapien
cacatgaaagcaaatcagatacaca

SEQ ID NO: 821228 - DNA, 25 bp, Homo sapien
ctgctacgcacatgaaagcaaatca

SEQ ID NO: 821229 - DNA, 25 bp, Homo sapien
caaggatcaaggcaatcgttctttt

SEQ ID NO: 821230 - DNA, 25 bp, Homo sapien
ggatcaaggcaatcgttcttttcat

SEQ ID NO: 821231 - DNA, 25 bp, Homo sapien
caaggcaatcgttcttttcatttaa

SEQ ID NO: 821232 - DNA, 25 bp, Homo sapien
tggcaaggatcaaggcaatcgttct

SEQ ID NO: 821233 - DNA, 25 bp, Homo sapien
aatggataaagagctacgctgtatt

SEQ ID NO: 821234 - DNA, 25 bp, Homo sapien
gagctacgctgtattccttatccat

SEQ ID NO: 821235 - DNA, 25 bp, Homo sapien
gataaagagctacgctgtattcctt

SEQ ID NO: 821236 - DNA, 25 bp, Homo sapien
aagagctacgctgtattccttatcc

SEQ ID NO: 821237 - DNA, 25 bp, Homo sapien
gaattagcaaaactggcgatgaatg

SEQ ID NO: 821238 - DNA, 25 bp, Homo sapien
tgaatgtgtcggtgggtcctgctct

SEQ ID NO: 821239 - DNA, 25 bp, Homo sapien
tcaagaagaattagcaaaactggcg

SEQ ID NO: 821240 - DNA, 25 bp, Homo sapien
taggatgtgttggtctgagtggaga

SEQ ID NO: 821241 - DNA, 25 bp, Homo sapien
tactatgtccaagcaccatatgttt

SEQ ID NO: 821242 - DNA, 25 bp, Homo sapien
actatgtccaagcaccatatgtttc

SEQ ID NO: 821243 - DNA, 25 bp, Homo sapien
ctatgtccaagcaccatatgtttct

SEQ ID NO: 821244 - DNA, 25 bp, Homo sapien
ccaagcctctggcagtttggcagag

SEQ ID NO: 821245 - DNA, 25 bp, Homo sapien
ctggttatgagaggcataagtccct

SEQ ID NO: 821246 - DNA, 25 bp, Homo sapien
gagttacagagatgagcgccaagcc

SEQ ID NO: 821247 - DNA, 25 bp, Homo sapien
cataagtccctggtgagttacagag

SEQ ID NO: 821248 - DNA, 25 bp, Homo sapien
ccacagaggcttgggatggaagcaa

SEQ ID NO: 821249 - DNA, 25 bp, Homo sapien
gctgctgcagatcctacattatatg

SEQ ID NO: 821250 - DNA, 25 bp, Homo sapien
tcagttcgtagggaagagcaatagc

SEQ ID NO: 821251 - DNA, 25 bp, Homo sapien
gaatttcgccacactctgatgatca

SEQ ID NO: 821252 - DNA, 25 bp, Homo sapien
tctgctcagcatcgccataactggt

SEQ ID NO: 821253 - DNA, 25 bp, Homo sapien
cctctgtccaggcatattgaataga

SEQ ID NO: 821254 - DNA, 25 bp, Homo sapien
gaaaactggacatcatatacctctg

SEQ ID NO: 821255 - DNA, 25 bp, Homo sapien
ccaatgctgacgttgggtcatagaa

SEQ ID NO: 821256 - DNA, 25 bp, Homo sapien
taaatgatcctactagctatggctc

SEQ ID NO: 821257 - DNA, 25 bp, Homo sapien
tgtgtcaaaaccctctattaaatgt

SEQ ID NO: 821258 - DNA, 25 bp, Homo sapien
gctatggctcaaggagtcattccca

SEQ ID NO: 821259 - DNA, 25 bp, Homo sapien
tacatagtagcagcaatggctaaca

SEQ ID NO: 821260 - DNA, 25 bp, Homo sapien
taggactagtgctttcttaatgtcc

SEQ ID NO: 821261 - DNA, 25 bp, Homo sapien
gtgctttcttaatgtccatgttgtt

SEQ ID NO: 821262 - DNA, 25 bp, Homo sapien
ctcacttttcctggttaggactagt

SEQ ID NO: 821263 - DNA, 25 bp, Homo sapien
cctggttaggactagtgctttctta

SEQ ID NO: 821264 - DNA, 25 bp, Homo sapien
acctgccaactttgcttaaacagaa

SEQ ID NO: 821265 - DNA, 25 bp, Homo sapien
ctctccattggtaaagagcttctca

SEQ ID NO: 821266 - DNA, 25 bp, Homo sapien
tcaaaatgaactaatctctttgggc

SEQ ID NO: 821267 - DNA, 25 bp, Homo sapien
gaactaatctctttgggcctacctg

SEQ ID NO: 821268 - DNA, 25 bp, Homo sapien
tacaaatacattggattcaggttgt

SEQ ID NO: 821269 - DNA, 25 bp, Homo sapien
aggttgtgtctcagtattgcagtcc

SEQ ID NO: 821270 - DNA, 25 bp, Homo sapien
gttgtgtctcagtattgcagtccat

SEQ ID NO: 821271 - DNA, 25 bp, Homo sapien
tatttacaaatacattggattcagg

SEQ ID NO: 821272 - DNA, 25 bp, Homo sapien
catatccgaaaaatggatccgaaag

SEQ ID NO: 821273 - DNA, 25 bp, Homo sapien
ttgagttgtctttccataagttcaa

SEQ ID NO: 821274 - DNA, 25 bp, Homo sapien
tactctgcatatccgaaaaatggat

SEQ ID NO: 821275 - DNA, 25 bp, Homo sapien
ctttgagttgtctttccataagttc

SEQ ID NO: 821276 - DNA, 25 bp, Homo sapien
tcgatcaatgaagagagtactatgc

SEQ ID NO: 821277 - DNA, 25 bp, Homo sapien
aaatacattcgatcaatgaagagag

SEQ ID NO: 821278 - DNA, 25 bp, Homo sapien
tcaatgaagagagtactatgcacaa

SEQ ID NO: 821279 - DNA, 25 bp, Homo sapien
gagagtactatgcacaaagattagg

SEQ ID NO: 821280 - DNA, 25 bp, Homo sapien
tccatccttataactccagccagcc

SEQ ID NO: 821281 - DNA, 25 bp, Homo sapien
gctagtgcaccaaaagcaaactcta

SEQ ID NO: 821282 - DNA, 25 bp, Homo sapien
tcagcagctgtggtgtaggtgtttg

SEQ ID NO: 821283 - DNA, 25 bp, Homo sapien
tgtaggtgtttgaaagttccatcct

SEQ ID NO: 821284 - DNA, 25 bp, Homo sapien
ttttgcctcatctactcctttcagg

SEQ ID NO: 821285 - DNA, 25 bp, Homo sapien
tgttttgcctcatctactcctttca

SEQ ID NO: 821286 - DNA, 25 bp, Homo sapien
gcctcatctactcctttcagggtcc

SEQ ID NO: 821287 - DNA, 25 bp, Homo sapien
ttgcctcatctactcctttcagggt

SEQ ID NO: 821288 - DNA, 25 bp, Homo sapien
ttcctatattattagtacacgtgct

SEQ ID NO: 821289 - DNA, 25 bp, Homo sapien
cttcctatattattagtacacgtgc

SEQ ID NO: 821290 - DNA, 25 bp, Homo sapien
ccttcctatattattagtacacgtg

SEQ ID NO: 821291 - DNA, 25 bp, Homo sapien
tcctatattattagtacacgtgctg

SEQ ID NO: 821292 - DNA, 25 bp, Homo sapien
taaattgcctgaaggatgcagctgt

SEQ ID NO: 821293 - DNA, 25 bp, Homo sapien
ctgcagaactaactagacatgccaa

SEQ ID NO: 821294 - DNA, 25 bp, Homo sapien
ccttatgggcacatgtgtttgacca

SEQ ID NO: 821295 - DNA, 25 bp, Homo sapien
taaagtgatgcacgcttagggccta

SEQ ID NO: 821296 - DNA, 25 bp, Homo sapien
catttttgcattttatatcctttca

SEQ ID NO: 821297 - DNA, 25 bp, Homo sapien
tgcttccctacatttttgcatttta

SEQ ID NO: 821298 - DNA, 25 bp, Homo sapien
acatttttgcattttatatcctttc

SEQ ID NO: 821299 - DNA, 25 bp, Homo sapien
cctacatttttgcattttatatcct

SEQ ID NO: 821300 - DNA, 25 bp, Homo sapien
tctctgtatatttgggtcctaccac

SEQ ID NO: 821301 - DNA, 25 bp, Homo sapien
caatctaagactgaacttacccaag

SEQ ID NO: 821302 - DNA, 25 bp, Homo sapien
tatatcaagggttcacataacatgt

SEQ ID NO: 821303 - DNA, 25 bp, Homo sapien
tccactgttagtcactgttgagcaa

SEQ ID NO: 821304 - DNA, 25 bp, Homo sapien
taactacttgtatcttttcttcctc

SEQ ID NO: 821305 - DNA, 25 bp, Homo sapien
actacttgtatcttttcttcctcca

SEQ ID NO: 821306 - DNA, 25 bp, Homo sapien
ctacttgtatcttttcttcctccat

SEQ ID NO: 821307 - DNA, 25 bp, Homo sapien
aacccttcaagcacgggaccactga

SEQ ID NO: 821308 - DNA, 25 bp, Homo sapien
cacgggaccactgaggacatcaaga

SEQ ID NO: 821309 - DNA, 25 bp, Homo sapien
cactgaggacatcaagattacacct

SEQ ID NO: 821310 - DNA, 25 bp, Homo sapien
cttccacatttaaggctattttcta

SEQ ID NO: 821311 - DNA, 25 bp, Homo sapien
ctttgaaaggtaactctgttggatg

SEQ ID NO: 821312 - DNA, 25 bp, Homo sapien
tagggtctgagtatctatgttattc

SEQ ID NO: 821313 - DNA, 25 bp, Homo sapien
gagtatctatgttattcatggattt

SEQ ID NO: 821314 - DNA, 25 bp, Homo sapien
attctaccccttagggtctgagtat

SEQ ID NO: 821315 - DNA, 25 bp, Homo sapien
tctgagtatctatgttattcatgga

SEQ ID NO: 821316 - DNA, 25 bp, Homo sapien
tccatctctgaaagtatgtcccaca

SEQ ID NO: 821317 - DNA, 25 bp, Homo sapien
ctagctaatgcgtgactttccatct

SEQ ID NO: 821318 - DNA, 25 bp, Homo sapien
tttccatctctgaaagtatgtccca

SEQ ID NO: 821319 - DNA, 25 bp, Homo sapien
tctctgaaagtatgtcccacacaca

SEQ ID NO: 821320 - DNA, 25 bp, Homo sapien
gagagctcaatgctcagagagtgta

SEQ ID NO: 821321 - DNA, 25 bp, Homo sapien
agctcaatgctcagagagtgtagtc

SEQ ID NO: 821322 - DNA, 25 bp, Homo sapien
ttggagagctcaatgctcagagagt

SEQ ID NO: 821323 - DNA, 25 bp, Homo sapien
gggctttggagagctcaatgctcag

SEQ ID NO: 821324 - DNA, 25 bp, Homo sapien
gactgaagttggatacaatcaccgg

SEQ ID NO: 821325 - DNA, 25 bp, Homo sapien
ggtagagcaatgaccaagaccccac

SEQ ID NO: 821326 - DNA, 25 bp, Homo sapien
tgcccttcgtttgtctgctcgttga

SEQ ID NO: 821327 - DNA, 25 bp, Homo sapien
agaccccactcagcgaacagataga

SEQ ID NO: 821328 - DNA, 25 bp, Homo sapien
tgcccggatcctggccagtctagct

SEQ ID NO: 821329 - DNA, 25 bp, Homo sapien
ttgcgcttccgcttttggctgcccg

SEQ ID NO: 821330 - DNA, 25 bp, Homo sapien
gcagctgattactgagtaaaccatt

SEQ ID NO: 821331 - DNA, 25 bp, Homo sapien
tgctctgcatgtaagcatttgcgct

SEQ ID NO: 821332 - DNA, 25 bp, Homo sapien
gctaacaaaagcctgctcatcctct

SEQ ID NO: 821333 - DNA, 25 bp, Homo sapien
gatttgctaacaaaagcctgctcat

SEQ ID NO: 821334 - DNA, 25 bp, Homo sapien
gagccggatttgctaacaaaagcct

SEQ ID NO: 821335 - DNA, 25 bp, Homo sapien
ctggagccggatttgctaacaaaag

SEQ ID NO: 821336 - DNA, 25 bp, Homo sapien
tgtgtcgtcgtgaacagcaggtgct

SEQ ID NO: 821337 - DNA, 25 bp, Homo sapien
gacttgaaggacgattaacagttgc

SEQ ID NO: 821338 - DNA, 25 bp, Homo sapien
taacagttgcaacttccatgcagct

SEQ ID NO: 821339 - DNA, 25 bp, Homo sapien
cacatctgatctgaatcgtgctgag

SEQ ID NO: 821340 - DNA, 25 bp, Homo sapien
ggtgttgggatgcttattattgctg

SEQ ID NO: 821341 - DNA, 25 bp, Homo sapien
gattctggcctatcgtctccttctg

SEQ ID NO: 821342 - DNA, 25 bp, Homo sapien
gctgtagtcacataaggttgttcac

SEQ ID NO: 821343 - DNA, 25 bp, Homo sapien
gtttaacacactcttccattttggc

SEQ ID NO: 821344 - DNA, 25 bp, Homo sapien
atcataagaagcatcagtaggcggc

SEQ ID NO: 821345 - DNA, 25 bp, Homo sapien
gagtttatttgcacagcccaccatg

SEQ ID NO: 821346 - DNA, 25 bp, Homo sapien
tcctgaatggcgtagaaagcatgct

SEQ ID NO: 821347 - DNA, 25 bp, Homo sapien
cattcacaaagtcaaagggccacag

SEQ ID NO: 821348 - DNA, 25 bp, Homo sapien
ccttttcagttctcacatcttttcc

SEQ ID NO: 821349 - DNA, 25 bp, Homo sapien
ttttcagttctcacatcttttccta

SEQ ID NO: 821350 - DNA, 25 bp, Homo sapien
tttcagttctcacatcttttcctag

SEQ ID NO: 821351 - DNA, 25 bp, Homo sapien
tcagttctcacatcttttcctagag

SEQ ID NO: 821352 - DNA, 25 bp, Homo sapien
tggcaagctccacctagttataagg

SEQ ID NO: 821353 - DNA, 25 bp, Homo sapien
taagtagctgtaagccacgtgcaga

SEQ ID NO: 821354 - DNA, 25 bp, Homo sapien
gcacagggtcgaaaaagggcattcc

SEQ ID NO: 821355 - DNA, 25 bp, Homo sapien
aaaaggaggttgatacagagcaggc

SEQ ID NO: 821356 - DNA, 25 bp, Homo sapien
tatgtctttaattccacaggctgct

SEQ ID NO: 821357 - DNA, 25 bp, Homo sapien
gaatgtttatgctacatgataacag

SEQ ID NO: 821358 - DNA, 25 bp, Homo sapien
acaggctgcttaaacatgggtatca

SEQ ID NO: 821359 - DNA, 25 bp, Homo sapien
tgtgtctaaagcacatttccaaacc

SEQ ID NO: 821360 - DNA, 25 bp, Homo sapien
ctgttccccgattctttgcttgact

SEQ ID NO: 821361 - DNA, 25 bp, Homo sapien
tgttccccgattctttgcttgactt

SEQ ID NO: 821362 - DNA, 25 bp, Homo sapien
gagctttcatgcagaaagcacgttt

SEQ ID NO: 821363 - DNA, 25 bp, Homo sapien
cttggagctttcatgcagaaagcac

SEQ ID NO: 821364 - DNA, 25 bp, Homo sapien
ctttcatgcagaaagcacgtttcat

SEQ ID NO: 821365 - DNA, 25 bp, Homo sapien
ttggagctttcatgcagaaagcacg

SEQ ID NO: 821366 - DNA, 25 bp, Homo sapien
tcggcacaaaagtattgggccttct

SEQ ID NO: 821367 - DNA, 25 bp, Homo sapien
tgggccttctaggtttgtcatgagt

SEQ ID NO: 821368 - DNA, 25 bp, Homo sapien
gccatctgtagagtgtcttttccac

SEQ ID NO: 821369 - DNA, 25 bp, Homo sapien
cagattctagtactattgtactggg

SEQ ID NO: 821370 - DNA, 25 bp, Homo sapien
ttttctgcagccaccggataatgcg

SEQ ID NO: 821371 - DNA, 25 bp, Homo sapien
gacatactacttagggaactgcttg

SEQ ID NO: 821372 - DNA, 25 bp, Homo sapien
gaaatccacccctggatactactgg

SEQ ID NO: 821373 - DNA, 25 bp, Homo sapien
ggataatgcgccaaagggcatggct

SEQ ID NO: 821374 - DNA, 25 bp, Homo sapien
ctccgcgggcggctttgagcgaggg

SEQ ID NO: 821375 - DNA, 25 bp, Homo sapien
gtttgaatgactaacccggcgtctg

SEQ ID NO: 821376 - DNA, 25 bp, Homo sapien
acggtaagtggccacgcgtctgtcg

SEQ ID NO: 821377 - DNA, 25 bp, Homo sapien
tgtgtgctaaactacttaagggctg

SEQ ID NO: 821378 - DNA, 25 bp, Homo sapien
ctatccccaggcgggcgtggggcac

SEQ ID NO: 821379 - DNA, 25 bp, Homo sapien
aagctgcttcattatcagagttgga

SEQ ID NO: 821380 - DNA, 25 bp, Homo sapien
aactggcagaggataaaagtgggtt

SEQ ID NO: 821381 - DNA, 25 bp, Homo sapien
tcttccccagtattctagaagctgc

SEQ ID NO: 821382 - DNA, 25 bp, Homo sapien
tgctcttccccagtattctagaagc

SEQ ID NO: 821383 - DNA, 25 bp, Homo sapien
atggctggttgtttcagcagtcctt

SEQ ID NO: 821384 - DNA, 25 bp, Homo sapien
ctctccggggaatgtatggcaccaa

SEQ ID NO: 821385 - DNA, 25 bp, Homo sapien
tggactcctttcaatgcggggatgt

SEQ ID NO: 821386 - DNA, 25 bp, Homo sapien
catggactcctttcaatgcggggat

SEQ ID NO: 821387 - DNA, 25 bp, Homo sapien
ggactcctttcaatgcggggatgtt

SEQ ID NO: 821388 - DNA, 25 bp, Homo sapien
actcctttcaatgcggggatgttta

SEQ ID NO: 821389 - DNA, 25 bp, Homo sapien
gtgactaggacccagtattcaccct

SEQ ID NO: 821390 - DNA, 25 bp, Homo sapien
cagtattcaccctgtaccacactca

SEQ ID NO: 821391 - DNA, 25 bp, Homo sapien
actgggcaagggtgactaggaccca

SEQ ID NO: 821392 - DNA, 25 bp, Homo sapien
aaggtgactgggcaagggtgactag

SEQ ID NO: 821393 - DNA, 25 bp, Homo sapien
ttgggatgaggctctagagcagtgt

SEQ ID NO: 821394 - DNA, 25 bp, Homo sapien
tgtatgatgtctgagcacattaaac

SEQ ID NO: 821395 - DNA, 25 bp, Homo sapien
gggagagtaaagctattcaatgtta

SEQ ID NO: 821396 - DNA, 25 bp, Homo sapien
ctcctagaagatgtatgatgtctga

SEQ ID NO: 821397 - DNA, 25 bp, Homo sapien
tcagcttgagatctcctatagttgg

SEQ ID NO: 821398 - DNA, 25 bp, Homo sapien
gaattttccattagcgtgaacacag

SEQ ID NO: 821399 - DNA, 25 bp, Homo sapien
tgtgtgatattctagccaggaaagc

SEQ ID NO: 821400 - DNA, 25 bp, Homo sapien
aagcttcatcttgtgcacattcagc

SEQ ID NO: 821401 - DNA, 25 bp, Homo sapien
tgtcctccacccagtttgggcttcc

SEQ ID NO: 821402 - DNA, 25 bp, Homo sapien
cctgccctcagaggtggaatcaaca

SEQ ID NO: 821403 - DNA, 25 bp, Homo sapien
caacagaggtagcaggccttgctga

SEQ ID NO: 821404 - DNA, 25 bp, Homo sapien
gaatcaacagaggtagcaggccttg

SEQ ID NO: 821405 - DNA, 25 bp, Homo sapien
ttcttccgcttgaacgaatcggctg

SEQ ID NO: 821406 - DNA, 25 bp, Homo sapien
gcttgaacgaatcggctgctgaagt

SEQ ID NO: 821407 - DNA, 25 bp, Homo sapien
tgcatgcgtcacgtatttcccatgc

SEQ ID NO: 821408 - DNA, 25 bp, Homo sapien
catgcgtcacgtatttcccatgcca

SEQ ID NO: 821409 - DNA, 25 bp, Homo sapien
ttgttatttttatgtcttccttcca

SEQ ID NO: 821410 - DNA, 25 bp, Homo sapien
tgttatttttatgtcttccttccat

SEQ ID NO: 821411 - DNA, 25 bp, Homo sapien
caaaaactttgttggttacattgat

SEQ ID NO: 821412 - DNA, 25 bp, Homo sapien
aatgtatggattaatgctgtaaatt

SEQ ID NO: 821413 - DNA, 25 bp, Homo sapien
gatcctaaatttgcgacttttcttc

SEQ ID NO: 821414 - DNA, 25 bp, Homo sapien
ttctgaggtttttgcttagatccta

SEQ ID NO: 821415 - DNA, 25 bp, Homo sapien
ccagtgagagtgtgtctgaatggct

SEQ ID NO: 821416 - DNA, 25 bp, Homo sapien
tcattcttcggtcactcctccagtg

SEQ ID NO: 821417 - DNA, 25 bp, Homo sapien
cacctctgcgtcacccttcccattt

SEQ ID NO: 821418 - DNA, 25 bp, Homo sapien
gcttcccaaggcacctccacctctg

SEQ ID NO: 821419 - DNA, 25 bp, Homo sapien
ttagaagttgttgggccaggtcttc

SEQ ID NO: 821420 - DNA, 25 bp, Homo sapien
tagaagttgttgggccaggtcttct

SEQ ID NO: 821421 - DNA, 25 bp, Homo sapien
tgatctttacatgccccaatgtggt

SEQ ID NO: 821422 - DNA, 25 bp, Homo sapien
attgatctttacatgccccaatgtg

SEQ ID NO: 821423 - DNA, 25 bp, Homo sapien
taaggtgtagtgaggagtcacattg

SEQ ID NO: 821424 - DNA, 25 bp, Homo sapien
tcacaaaatccagctgtaaaatgtg

SEQ ID NO: 821425 - DNA, 25 bp, Homo sapien
taagaaactaaggtgtagtgaggag

SEQ ID NO: 821426 - DNA, 25 bp, Homo sapien
caagttcgactaagaaactaaggtg

SEQ ID NO: 821427 - DNA, 25 bp, Homo sapien
ttcaaataagccataggctccgtca

SEQ ID NO: 821428 - DNA, 25 bp, Homo sapien
gtactctcttggattttattgccga

SEQ ID NO: 821429 - DNA, 25 bp, Homo sapien
tccgtcatggactactccatcatga

SEQ ID NO: 821430 - DNA, 25 bp, Homo sapien
cagtaaagtcagataaaaggtgcat

SEQ ID NO: 821431 - DNA, 25 bp, Homo sapien
caccctgggatgattgtgtgatgat

SEQ ID NO: 821432 - DNA, 25 bp, Homo sapien
gacaggagtctgttttggatgccag

SEQ ID NO: 821433 - DNA, 25 bp, Homo sapien
tttgttgcacataatcaccctggga

SEQ ID NO: 821434 - DNA, 25 bp, Homo sapien
ctgaggtagcagaaatagcgtaatt

SEQ ID NO: 821435 - DNA, 25 bp, Homo sapien
gcacccgctcgactccggcaaaaaa

SEQ ID NO: 821436 - DNA, 25 bp, Homo sapien
gcagcacccgctcgactccggcaaa

SEQ ID NO: 821437 - DNA, 25 bp, Homo sapien
tagcagcacccgctcgactccggca

SEQ ID NO: 821438 - DNA, 25 bp, Homo sapien
agcacccgctcgactccggcaaaaa

SEQ ID NO: 821439 - DNA, 25 bp, Homo sapien
tgtcactcgctgtcgccggagtttt

SEQ ID NO: 821440 - DNA, 25 bp, Homo sapien
tgtcgccggagttttgtcccctcca

SEQ ID NO: 821441 - DNA, 25 bp, Homo sapien
tcgctgtcgccggagttttgtcccc

SEQ ID NO: 821442 - DNA, 25 bp, Homo sapien
ttatttgtgtcactcgctgtcgccg

SEQ ID NO: 821443 - DNA, 25 bp, Homo sapien
ttccagatagtcttctaggtacaac

SEQ ID NO: 821444 - DNA, 25 bp, Homo sapien
tccagatagtcttctaggtacaaca

SEQ ID NO: 821445 - DNA, 25 bp, Homo sapien
ccagatagtcttctaggtacaacat

SEQ ID NO: 821446 - DNA, 25 bp, Homo sapien
tttccagatagtcttctaggtacaa

SEQ ID NO: 821447 - DNA, 25 bp, Homo sapien
gcggccgccgccagcgccgcgcact

SEQ ID NO: 821448 - DNA, 25 bp, Homo sapien
tggcggccgccgccagcgccgcgca

SEQ ID NO: 821449 - DNA, 25 bp, Homo sapien
gccgccgccagcgccgcgcactcac

SEQ ID NO: 821450 - DNA, 25 bp, Homo sapien
cggccgccgccagcgccgcgcactc

SEQ ID NO: 821451 - DNA, 25 bp, Homo sapien
cttacgtcactgcgcgcgtgcgtca

SEQ ID NO: 821452 - DNA, 25 bp, Homo sapien
gaggctgccagttaccgtgagaaag

SEQ ID NO: 821453 - DNA, 25 bp, Homo sapien
gggccaacggcgaaatacgcgctta

SEQ ID NO: 821454 - DNA, 25 bp, Homo sapien
ctgtcaaagggagagtccgtcagag

SEQ ID NO: 821455 - DNA, 25 bp, Homo sapien
catctcgcgcatttccgtgaagcgg

SEQ ID NO: 821456 - DNA, 25 bp, Homo sapien
acctgcaggtccatctcgcgcattt

SEQ ID NO: 821457 - DNA, 25 bp, Homo sapien
gcatttccgtgaagcggtcccgcag

SEQ ID NO: 821458 - DNA, 25 bp, Homo sapien
gcggtcccgcagatccataggaagc

SEQ ID NO: 821459 - DNA, 25 bp, Homo sapien
cagtgatgacaagcaagtctggcac

SEQ ID NO: 821460 - DNA, 25 bp, Homo sapien
gaaagagcactaggcgctagcagtg

SEQ ID NO: 821461 - DNA, 25 bp, Homo sapien
cgcgcagcgaacaggagtagtagac

SEQ ID NO: 821462 - DNA, 25 bp, Homo sapien
ttgacaactccttatgcactagcgg

SEQ ID NO: 821463 - DNA, 25 bp, Homo sapien
ctctttgttctagttgatccattgc

SEQ ID NO: 821464 - DNA, 25 bp, Homo sapien
ctttgttctagttgatccattgcat

SEQ ID NO: 821465 - DNA, 25 bp, Homo sapien
tgactctttgttctagttgatccat

SEQ ID NO: 821466 - DNA, 25 bp, Homo sapien
gactctttgttctagttgatccatt

SEQ ID NO: 821467 - DNA, 25 bp, Homo sapien
aatccctatctgaagctctaaacca

SEQ ID NO: 821468 - DNA, 25 bp, Homo sapien
gaatacagtactctatctcaactag

SEQ ID NO: 821469 - DNA, 25 bp, Homo sapien
ggtccactaatttaagtacctagca

SEQ ID NO: 821470 - DNA, 25 bp, Homo sapien
cagagggtcccaatatttcttgata

SEQ ID NO: 821471 - DNA, 25 bp, Homo sapien
ggtttgccaactgaaccttctcatc

SEQ ID NO: 821472 - DNA, 25 bp, Homo sapien
catatatctggtttgccaactgaac

SEQ ID NO: 821473 - DNA, 25 bp, Homo sapien
tatctggtttgccaactgaaccttc

SEQ ID NO: 821474 - DNA, 25 bp, Homo sapien
agtcatatatctggtttgccaactg

SEQ ID NO: 821475 - DNA, 25 bp, Homo sapien
cagaaaccaccttaccgccgtatag

SEQ ID NO: 821476 - DNA, 25 bp, Homo sapien
caaattagatgtgatcaagagagca

SEQ ID NO: 821477 - DNA, 25 bp, Homo sapien
cgccgtatagacttgctaaaatgta

SEQ ID NO: 821478 - DNA, 25 bp, Homo sapien
ttaatcagactaccaagaactcttg

SEQ ID NO: 821479 - DNA, 25 bp, Homo sapien
tctatacactgaagttagccaaaag

SEQ ID NO: 821480 - DNA, 25 bp, Homo sapien
tctatgaacaaaagagcccaggttg

SEQ ID NO: 821481 - DNA, 25 bp, Homo sapien
gaaaaagagcaccacaattgcatca

SEQ ID NO: 821482 - DNA, 25 bp, Homo sapien
tattccacagtaaatcaagctacag

SEQ ID NO: 821483 - DNA, 25 bp, Homo sapien
tatgagtatcatgcttctagaacaa

SEQ ID NO: 821484 - DNA, 25 bp, Homo sapien
tacatccttatgacagtgacatctg

SEQ ID NO: 821485 - DNA, 25 bp, Homo sapien
gataatatgtagtttggtttattcc

SEQ ID NO: 821486 - DNA, 25 bp, Homo sapien
tgtgtgtgttagtcaaatttcacta

SEQ ID NO: 821487 - DNA, 25 bp, Homo sapien
aacaaatacttgagaggccttagca

SEQ ID NO: 821488 - DNA, 25 bp, Homo sapien
taaaacagggctaaccacagagtct

SEQ ID NO: 821489 - DNA, 25 bp, Homo sapien
cacaggcatcaagcaaagcaaggat

SEQ ID NO: 821490 - DNA, 25 bp, Homo sapien
tctagcttgccctatcggaagaggc

SEQ ID NO: 821491 - DNA, 25 bp, Homo sapien
taacactggtagacacgaaggaggt

SEQ ID NO: 821492 - DNA, 25 bp, Homo sapien
gagctattacgtgcttggtgctgga

SEQ ID NO: 821493 - DNA, 25 bp, Homo sapien
gaatctgcaggtaattgagcatcct

SEQ ID NO: 821494 - DNA, 25 bp, Homo sapien
cacagacgtctgttatttgagcata

SEQ ID NO: 821495 - DNA, 25 bp, Homo sapien
ccagctttctcaagtgtcgatctac

SEQ ID NO: 821496 - DNA, 25 bp, Homo sapien
aattccagcattatcagcttccagc

SEQ ID NO: 821497 - DNA, 25 bp, Homo sapien
tttaaacttagccagttcctgatcc

SEQ ID NO: 821498 - DNA, 25 bp, Homo sapien
tccagctccattttaaacttagcca

SEQ ID NO: 821499 - DNA, 25 bp, Homo sapien
atggtgattgttcactggctgtgaa

SEQ ID NO: 821500 - DNA, 25 bp, Homo sapien
tggtgattgttcactggctgtgaag

SEQ ID NO: 821501 - DNA, 25 bp, Homo sapien
ggtgattgttcactggctgtgaagg

SEQ ID NO: 821502 - DNA, 25 bp, Homo sapien
cttagaggcatctgacgtaagggtg

SEQ ID NO: 821503 - DNA, 25 bp, Homo sapien
tttcaggaatatgatctgttgtcgt

SEQ ID NO: 821504 - DNA, 25 bp, Homo sapien
tctgttgtcgtatggtgagaagttg

SEQ ID NO: 821505 - DNA, 25 bp, Homo sapien
taagggtggatagaagagcttcaga

SEQ ID NO: 821506 - DNA, 25 bp, Homo sapien
cagttcctgaagataacgagccaat

SEQ ID NO: 821507 - DNA, 25 bp, Homo sapien
cattgtaggcattgttagaagaggc

SEQ ID NO: 821508 - DNA, 25 bp, Homo sapien
gcagctgccatggtaattgcccctg

SEQ ID NO: 821509 - DNA, 25 bp, Homo sapien
gaagaggctgtggaattattatttc

SEQ ID NO: 821510 - DNA, 25 bp, Homo sapien
gaatataaactatgggatgggcagc

SEQ ID NO: 821511 - DNA, 25 bp, Homo sapien
tgagaagggtctgcatgtaatccgc

SEQ ID NO: 821512 - DNA, 25 bp, Homo sapien
gatgacctaagtccaaggctacagg

SEQ ID NO: 821513 - DNA, 25 bp, Homo sapien
gtttcaatctgtcgcttgggctgga

SEQ ID NO: 821514 - DNA, 25 bp, Homo sapien
taaatagacattcattgatagcatc

SEQ ID NO: 821515 - DNA, 25 bp, Homo sapien
ttcattgatagcatcaatatatgta

SEQ ID NO: 821516 - DNA, 25 bp, Homo sapien
aatagacattcattgatagcatcaa

SEQ ID NO: 821517 - DNA, 25 bp, Homo sapien
ttgatagcatcaatatatgtaaata

SEQ ID NO: 821518 - DNA, 25 bp, Homo sapien
ttgctctttcgaccactccgtgagt

SEQ ID NO: 821519 - DNA, 25 bp, Homo sapien
taatgttgtcataagtgccgaagat

SEQ ID NO: 821520 - DNA, 25 bp, Homo sapien
ctgatgaactggcattctgtgttaa

SEQ ID NO: 821521 - DNA, 25 bp, Homo sapien
gatgaatagccaactgtttccctgg

SEQ ID NO: 821522 - DNA, 25 bp, Homo sapien
acaccatcagtttttgggacccaag

SEQ ID NO: 821523 - DNA, 25 bp, Homo sapien
gaagacgccttgcttgctgttaatc

SEQ ID NO: 821524 - DNA, 25 bp, Homo sapien
cctgggatagacagtgataaatgct

SEQ ID NO: 821525 - DNA, 25 bp, Homo sapien
cccaagactaagaatgaagacgcct

SEQ ID NO: 821526 - DNA, 25 bp, Homo sapien
tgcagtatcgaggttcatttgggtc

SEQ ID NO: 821527 - DNA, 25 bp, Homo sapien
tgggtcgtaagtccaatcaacctga

SEQ ID NO: 821528 - DNA, 25 bp, Homo sapien
tgatgaagaacacgatgataaggaa

SEQ ID NO: 821529 - DNA, 25 bp, Homo sapien
ggcactacagttgtttgttgagaga

SEQ ID NO: 821530 - DNA, 25 bp, Homo sapien
gaaaaatcagccgacaccattagga

SEQ ID NO: 821531 - DNA, 25 bp, Homo sapien
ggttaagaaaactacactggatggc

SEQ ID NO: 821532 - DNA, 25 bp, Homo sapien
cgtgactataattggaaacagggcc

SEQ ID NO: 821533 - DNA, 25 bp, Homo sapien
taaatcacccggatgaaggagtcat

SEQ ID NO: 821534 - DNA, 25 bp, Homo sapien
atcccaccatctcaccataagatac

SEQ ID NO: 821535 - DNA, 25 bp, Homo sapien
atcttggttatcacatcccaccatc

SEQ ID NO: 821536 - DNA, 25 bp, Homo sapien
cacatcccaccatctcaccataaga

SEQ ID NO: 821537 - DNA, 25 bp, Homo sapien
tcacatcccaccatctcaccataag

SEQ ID NO: 821538 - DNA, 25 bp, Homo sapien
tagcacggtgcagcctgaaagaatg

SEQ ID NO: 821539 - DNA, 25 bp, Homo sapien
agggacactaccctattttgaagag

SEQ ID NO: 821540 - DNA, 25 bp, Homo sapien
tactcatgagaggaagataatctca

SEQ ID NO: 821541 - DNA, 25 bp, Homo sapien
tataactaatatacctgcaaacctg

SEQ ID NO: 821542 - DNA, 25 bp, Homo sapien
tcaggggtggctcttatcagctgac

SEQ ID NO: 821543 - DNA, 25 bp, Homo sapien
aggggtggctcttatcagctgacac

SEQ ID NO: 821544 - DNA, 25 bp, Homo sapien
caggggtggctcttatcagctgaca

SEQ ID NO: 821545 - DNA, 25 bp, Homo sapien
tacaagggattctagacagggaaac

SEQ ID NO: 821546 - DNA, 25 bp, Homo sapien
gaggctctgtcccaatctacgtgag

SEQ ID NO: 821547 - DNA, 25 bp, Homo sapien
tcctgaggtccatgtaatctagtcc

SEQ ID NO: 821548 - DNA, 25 bp, Homo sapien
cactcagaagagcacaactgggaat

SEQ ID NO: 821549 - DNA, 25 bp, Homo sapien
cataatggaaccattctatagggca

SEQ ID NO: 821550 - DNA, 25 bp, Homo sapien
tctgtcaatccaacgcagccataat

SEQ ID NO: 821551 - DNA, 25 bp, Homo sapien
cagcagtgcactgtggacagtacca

SEQ ID NO: 821552 - DNA, 25 bp, Homo sapien
catttgccttttggtgcctctgtca

SEQ ID NO: 821553 - DNA, 25 bp, Homo sapien
gtactctagaggataccagcccaca

SEQ ID NO: 821554 - DNA, 25 bp, Homo sapien
catcaccctggtgtagtaaggccca

SEQ ID NO: 821555 - DNA, 25 bp, Homo sapien
caccctttgggtagcactgcataga

SEQ ID NO: 821556 - DNA, 25 bp, Homo sapien
ctcaatttggagctcccgaccaggg

SEQ ID NO: 821557 - DNA, 25 bp, Homo sapien
gctggataacaggatgttcctgact

SEQ ID NO: 821558 - DNA, 25 bp, Homo sapien
tggataacaggatgttcctgactca

SEQ ID NO: 821559 - DNA, 25 bp, Homo sapien
taacaggatgttcctgactcagaca

SEQ ID NO: 821560 - DNA, 25 bp, Homo sapien
gataacaggatgttcctgactcaga

SEQ ID NO: 821561 - DNA, 25 bp, Homo sapien
gatatacactccatagcagtaaggc

SEQ ID NO: 821562 - DNA, 25 bp, Homo sapien
gactcagatattaacaggttctacc

SEQ ID NO: 821563 - DNA, 25 bp, Homo sapien
gatgaggtagttccatgtttggccc

SEQ ID NO: 821564 - DNA, 25 bp, Homo sapien
aaatacttactatgccccttggtgt

SEQ ID NO: 821565 - DNA, 25 bp, Homo sapien
gcatttaattaagccatttattgct

SEQ ID NO: 821566 - DNA, 25 bp, Homo sapien
gccatttattgcttcaaatgtgtca

SEQ ID NO: 821567 - DNA, 25 bp, Homo sapien
ggcatttaattaagccatttattgc

SEQ ID NO: 821568 - DNA, 25 bp, Homo sapien
atttattgcttcaaatgtgtcacca

SEQ ID NO: 821569 - DNA, 25 bp, Homo sapien
cactcggaaggaaacacccagtcgt

SEQ ID NO: 821570 - DNA, 25 bp, Homo sapien
ccatgatttcctaatggattgctga

SEQ ID NO: 821571 - DNA, 25 bp, Homo sapien
tcgtatgactccaattcatctcaca

SEQ ID NO: 821572 - DNA, 25 bp, Homo sapien
ggattgctgatgaaaaccactcgga

SEQ ID NO: 821573 - DNA, 25 bp, Homo sapien
ccaggttgccttagcagttcctcaa

SEQ ID NO: 821574 - DNA, 25 bp, Homo sapien
tcacagtaaaggagtccgactctgc

SEQ ID NO: 821575 - DNA, 25 bp, Homo sapien
taaaacccaaagtgcctgttgcaca

SEQ ID NO: 821576 - DNA, 25 bp, Homo sapien
tgtaccccaggctgccaaactgttg

SEQ ID NO: 821577 - DNA, 25 bp, Homo sapien
tcataggtcccgaaagtctgaggct

SEQ ID NO: 821578 - DNA, 25 bp, Homo sapien
taagagctcttccatggatgacagt

SEQ ID NO: 821579 - DNA, 25 bp, Homo sapien
caagtttgcttcatccctgcttaag

SEQ ID NO: 821580 - DNA, 25 bp, Homo sapien
ggttgtgccaaagaatcataggtcc

SEQ ID NO: 821581 - DNA, 25 bp, Homo sapien
tggtttcctgggcattaccagagag

SEQ ID NO: 821582 - DNA, 25 bp, Homo sapien
ggcaaaatcgccgacgacaagggaa

SEQ ID NO: 821583 - DNA, 25 bp, Homo sapien
tgagcttcctcgaccctcggagggt

SEQ ID NO: 821584 - DNA, 25 bp, Homo sapien
gaagagacagattgccaccactaag

SEQ ID NO: 821585 - DNA, 25 bp, Homo sapien
taacgtgtttcccagtcatcaggtc

SEQ ID NO: 821586 - DNA, 25 bp, Homo sapien
ggatccctttcagacctcatggaag

SEQ ID NO: 821587 - DNA, 25 bp, Homo sapien
gcagaaactgtctccgttaagctta

SEQ ID NO: 821588 - DNA, 25 bp, Homo sapien
actctctaggctgtttacactctgg

SEQ ID NO: 821589 - DNA, 25 bp, Homo sapien
tgtaaatcctcagatctcttagaat

SEQ ID NO: 821590 - DNA, 25 bp, Homo sapien
aatcctcagatctcttagaatactg

SEQ ID NO: 821591 - DNA, 25 bp, Homo sapien
gaattgtaaatcctcagatctctta

SEQ ID NO: 821592 - DNA, 25 bp, Homo sapien
ttttgaattgtaaatcctcagatct

SEQ ID NO: 821593 - DNA, 25 bp, Homo sapien
gaggcacatacctggcaaacccaga

SEQ ID NO: 821594 - DNA, 25 bp, Homo sapien
ggatagaggcacatacctggcaaac

SEQ ID NO: 821595 - DNA, 25 bp, Homo sapien
ctgcaggatagaggcacatacctgg

SEQ ID NO: 821596 - DNA, 25 bp, Homo sapien
caaacccagagaaacgttgccttat

SEQ ID NO: 821597 - DNA, 25 bp, Homo sapien
tagccaacatccttcatgcaggtgg

SEQ ID NO: 821598 - DNA, 25 bp, Homo sapien
tctccagggcagtaaagatcggctc

SEQ ID NO: 821599 - DNA, 25 bp, Homo sapien
atgtagcaaccagttcatctggatt

SEQ ID NO: 821600 - DNA, 25 bp, Homo sapien
gggctcccttgagctgaacagatgg

SEQ ID NO: 821601 - DNA, 25 bp, Homo sapien
tttaacattgtcaatcccatgcata

SEQ ID NO: 821602 - DNA, 25 bp, Homo sapien
ccatttcaactgtttaacattgtca

SEQ ID NO: 821603 - DNA, 25 bp, Homo sapien
aatcccatgcatagcatctctggct

SEQ ID NO: 821604 - DNA, 25 bp, Homo sapien
cattgtcaatcccatgcatagcatc

SEQ ID NO: 821605 - DNA, 25 bp, Homo sapien
gcctcctcttcaaggctcctttgag

SEQ ID NO: 821606 - DNA, 25 bp, Homo sapien
gtaacctcacagacataacacagat

SEQ ID NO: 821607 - DNA, 25 bp, Homo sapien
tttgagatgccacccacgttgcaca

SEQ ID NO: 821608 - DNA, 25 bp, Homo sapien
cctcacagacataacacagatccaa

SEQ ID NO: 821609 - DNA, 25 bp, Homo sapien
tgagcctttcttcagcgatgacaac

SEQ ID NO: 821610 - DNA, 25 bp, Homo sapien
tggtgtagctgaagctctgttttgc

SEQ ID NO: 821611 - DNA, 25 bp, Homo sapien
cttgttctagtagccccggccctag

SEQ ID NO: 821612 - DNA, 25 bp, Homo sapien
ccgtatagccatgttgagtcagaat

SEQ ID NO: 821613 - DNA, 25 bp, Homo sapien
tagagccaacaccagtgaaaatata

SEQ ID NO: 821614 - DNA, 25 bp, Homo sapien
tcagatctccataatactccagagc

SEQ ID NO: 821615 - DNA, 25 bp, Homo sapien
acaccagtgaaaatataaggtttgc

SEQ ID NO: 821616 - DNA, 25 bp, Homo sapien
gctcagtgctttagatttccacact

SEQ ID NO: 821617 - DNA, 25 bp, Homo sapien
gataggacctaagtgatatgacgcg

SEQ ID NO: 821618 - DNA, 25 bp, Homo sapien
tatgtttgcgagtagcaaaagctgt

SEQ ID NO: 821619 - DNA, 25 bp, Homo sapien
ccttcttgctttgtatgtttgcgag

SEQ ID NO: 821620 - DNA, 25 bp, Homo sapien
tgacgcggtttttgactgtcctcct

SEQ ID NO: 821621 - DNA, 25 bp, Homo sapien
gcccgtgcaacaccagacaaagcaa

SEQ ID NO: 821622 - DNA, 25 bp, Homo sapien
tctcttctgcccgtgcaacaccaga

SEQ ID NO: 821623 - DNA, 25 bp, Homo sapien
ttctgcccgtgcaacaccagacaaa

SEQ ID NO: 821624 - DNA, 25 bp, Homo sapien
cgtgcaacaccagacaaagcaaaga

SEQ ID NO: 821625 - DNA, 25 bp, Homo sapien
tctggagtgtcacctgggcattggc

SEQ ID NO: 821626 - DNA, 25 bp, Homo sapien
taattggaatgtgcggacaggcctg

SEQ ID NO: 821627 - DNA, 25 bp, Homo sapien
gatgtggaagtgtctgaccccatgg

SEQ ID NO: 821628 - DNA, 25 bp, Homo sapien
cactatgatagcacaaggatgaggc

SEQ ID NO: 821629 - DNA, 25 bp, Homo sapien
agtatgacacaaatcataccctagg

SEQ ID NO: 821630 - DNA, 25 bp, Homo sapien
tctactaggtatatgcacgacattg

SEQ ID NO: 821631 - DNA, 25 bp, Homo sapien
cgacattgttttatgcagaatacca

SEQ ID NO: 821632 - DNA, 25 bp, Homo sapien
taccctaggcatcagagatatatga

SEQ ID NO: 821633 - DNA, 25 bp, Homo sapien
taaacaggaagactatgcatcaagg

SEQ ID NO: 821634 - DNA, 25 bp, Homo sapien
gtagaaatttcaggtaccacacaaa

SEQ ID NO: 821635 - DNA, 25 bp, Homo sapien
gattgactattccaccataaacatg

SEQ ID NO: 821636 - DNA, 25 bp, Homo sapien
gcatcaaggtaaggaacatcattct

SEQ ID NO: 821637 - DNA, 25 bp, Homo sapien
gagaaatctgagatagcatcgttca

SEQ ID NO: 821638 - DNA, 25 bp, Homo sapien
gatccgtaatttaatccagagaaca

SEQ ID NO: 821639 - DNA, 25 bp, Homo sapien
aaatgacctccttcgctgataacat

SEQ ID NO: 821640 - DNA, 25 bp, Homo sapien
gctgataacatctgcaagatccgta

SEQ ID NO: 821641 - DNA, 25 bp, Homo sapien
ggatttcaaatcatgacctgcagtg

SEQ ID NO: 821642 - DNA, 25 bp, Homo sapien
gaatccaggcaattgaactcaagct

SEQ ID NO: 821643 - DNA, 25 bp, Homo sapien
tcgtgcagcaaccatcaggccttag

SEQ ID NO: 821644 - DNA, 25 bp, Homo sapien
ggcttgtaagatctaccctgctcca

SEQ ID NO: 821645 - DNA, 25 bp, Homo sapien
cttttgatgtaaacctaactggcac

SEQ ID NO: 821646 - DNA, 25 bp, Homo sapien
gatatacagggtgttccttctgctt

SEQ ID NO: 821647 - DNA, 25 bp, Homo sapien
catgacttccttggatatacagggt

SEQ ID NO: 821648 - DNA, 25 bp, Homo sapien
taactggcacatgacttccttggat

SEQ ID NO: 821649 - DNA, 25 bp, Homo sapien
tgggctgcctggccgctgccgctcc

SEQ ID NO: 821650 - DNA, 25 bp, Homo sapien
ccttcgcgaagctgggctgcctggc

SEQ ID NO: 821651 - DNA, 25 bp, Homo sapien
tcatcgtaccgagagccttcgcgaa

SEQ ID NO: 821652 - DNA, 25 bp, Homo sapien
tgcctggccgctgccgctcctcccg

SEQ ID NO: 821653 - DNA, 25 bp, Homo sapien
gtgacgaggagggtgcgtgccaggt

SEQ ID NO: 821654 - DNA, 25 bp, Homo sapien
ctggtgacgaggagggtgcgtgcca

SEQ ID NO: 821655 - DNA, 25 bp, Homo sapien
gacgaggagggtgcgtgccaggtgc

SEQ ID NO: 821656 - DNA, 25 bp, Homo sapien
tggtgacgaggagggtgcgtgccag

SEQ ID NO: 821657 - DNA, 25 bp, Homo sapien
tcccttcatgaccttcttcttgggc

SEQ ID NO: 821658 - DNA, 25 bp, Homo sapien
ccttgatggtcccttcatgaccttc

SEQ ID NO: 821659 - DNA, 25 bp, Homo sapien
ggctcttccttgatggtcccttcat

SEQ ID NO: 821660 - DNA, 25 bp, Homo sapien
ccttcatgaccttcttcttgggcat

SEQ ID NO: 821661 - DNA, 25 bp, Homo sapien
ttaatctttcacagcataacaacgt

SEQ ID NO: 821662 - DNA, 25 bp, Homo sapien
ggatcagtacagacacttaaacttg

SEQ ID NO: 821663 - DNA, 25 bp, Homo sapien
actgctggtaagacatggtatactg

SEQ ID NO: 821664 - DNA, 25 bp, Homo sapien
attggatgtggatcagtacagacac

SEQ ID NO: 821665 - DNA, 25 bp, Homo sapien
tggcaggcaggagcgaatgagggcc

SEQ ID NO: 821666 - DNA, 25 bp, Homo sapien
ataggatgggggaaaccgcacccat

SEQ ID NO: 821667 - DNA, 25 bp, Homo sapien
gtggcaggcaggagcgaatgagggc

SEQ ID NO: 821668 - DNA, 25 bp, Homo sapien
taggatgggggaaaccgcacccatg

SEQ ID NO: 821669 - DNA, 25 bp, Homo sapien
tgtgcattgatgaaatcttccccaa

SEQ ID NO: 821670 - DNA, 25 bp, Homo sapien
ttccccaatccttgctactttatta

SEQ ID NO: 821671 - DNA, 25 bp, Homo sapien
tattaaccctgttcatgtgttcagc

SEQ ID NO: 821672 - DNA, 25 bp, Homo sapien
tgttcagcaaactctcttttccccg

SEQ ID NO: 821673 - DNA, 25 bp, Homo sapien
aatccttcctttctgcaaagtggct

SEQ ID NO: 821674 - DNA, 25 bp, Homo sapien
cattgtcttcctattccatcctctg

SEQ ID NO: 821675 - DNA, 25 bp, Homo sapien
attgtcttcctattccatcctctgg

SEQ ID NO: 821676 - DNA, 25 bp, Homo sapien
tttaataaagacataataaaagcaa

SEQ ID NO: 821677 - DNA, 25 bp, Homo sapien
aataaagacataataaaagcaaaag

SEQ ID NO: 821678 - DNA, 25 bp, Homo sapien
taataaagacataataaaagcaaaa

SEQ ID NO: 821679 - DNA, 25 bp, Homo sapien
tgtttaataaagacataataaaagc

SEQ ID NO: 821680 - DNA, 25 bp, Homo sapien
gcagtgactgccactatcttggaga

SEQ ID NO: 821681 - DNA, 25 bp, Homo sapien
ttgcagtgactgccactatcttgga

SEQ ID NO: 821682 - DNA, 25 bp, Homo sapien
cagtgactgccactatcttggagaa

SEQ ID NO: 821683 - DNA, 25 bp, Homo sapien
agtgactgccactatcttggagaat

SEQ ID NO: 821684 - DNA, 25 bp, Homo sapien
actggcaaagattagatgccaaatt

SEQ ID NO: 821685 - DNA, 25 bp, Homo sapien
ggcaaagattagatgccaaattcat

SEQ ID NO: 821686 - DNA, 25 bp, Homo sapien
ctggcaaagattagatgccaaattc

SEQ ID NO: 821687 - DNA, 25 bp, Homo sapien
tggcaaagattagatgccaaattca

SEQ ID NO: 821688 - DNA, 25 bp, Homo sapien
tgctttgaaaatagagtatgctgta

SEQ ID NO: 821689 - DNA, 25 bp, Homo sapien
gaaaatagagtatgctgtattaaac

SEQ ID NO: 821690 - DNA, 25 bp, Homo sapien
gaaaagattcaagagagcagaagac

SEQ ID NO: 821691 - DNA, 25 bp, Homo sapien
taaactgcagggtacatgagaaata

SEQ ID NO: 821692 - DNA, 25 bp, Homo sapien
gatccagacacacagagggactcac

SEQ ID NO: 821693 - DNA, 25 bp, Homo sapien
tgatccagacacacagagggactca

SEQ ID NO: 821694 - DNA, 25 bp, Homo sapien
cctgatccagacacacagagggact

SEQ ID NO: 821695 - DNA, 25 bp, Homo sapien
tccctgatccagacacacagaggga

SEQ ID NO: 821696 - DNA, 25 bp, Homo sapien
ggtgactcgaagtactcggctttaa

SEQ ID NO: 821697 - DNA, 25 bp, Homo sapien
taaaaggtgactcgaagtactcggc

SEQ ID NO: 821698 - DNA, 25 bp, Homo sapien
aaaggtgactcgaagtactcggctt

SEQ ID NO: 821699 - DNA, 25 bp, Homo sapien
actcgaagtactcggctttaattgc

SEQ ID NO: 821700 - DNA, 25 bp, Homo sapien
agctgttcacgactccagtcccctg

SEQ ID NO: 821701 - DNA, 25 bp, Homo sapien
gtggagcaaggactgtcgtttcatt

SEQ ID NO: 821702 - DNA, 25 bp, Homo sapien
gattgtttcatgtggagcaaggact

SEQ ID NO: 821703 - DNA, 25 bp, Homo sapien
tggagcaaggactgtcgtttcattc

SEQ ID NO: 821704 - DNA, 25 bp, Homo sapien
ctcgaaagattgtttcatgtggagc

SEQ ID NO: 821705 - DNA, 25 bp, Homo sapien
taaggacgtcaccaacacatacgct

SEQ ID NO: 821706 - DNA, 25 bp, Homo sapien
cacatacgctttaagaatcacagat

SEQ ID NO: 821707 - DNA, 25 bp, Homo sapien
tgacagtgaagcgttttttctttgg

SEQ ID NO: 821708 - DNA, 25 bp, Homo sapien
tctttggtggattccaaactgtgcc

SEQ ID NO: 821709 - DNA, 25 bp, Homo sapien
ttctgtgaagttcacgggcaataca

SEQ ID NO: 821710 - DNA, 25 bp, Homo sapien
tcatcccagcatataccttcccttg

SEQ ID NO: 821711 - DNA, 25 bp, Homo sapien
acgggcaatacacttccaggatcca

SEQ ID NO: 821712 - DNA, 25 bp, Homo sapien
gaagttcacgggcaatacacttcca

SEQ ID NO: 821713 - DNA, 25 bp, Homo sapien
ttgaggtgaactggctctcaggaat

SEQ ID NO: 821714 - DNA, 25 bp, Homo sapien
gcctgttgaggtgaactggctctca

SEQ ID NO: 821715 - DNA, 25 bp, Homo sapien
ttcataatgtcaaaagcctgttgag

SEQ ID NO: 821716 - DNA, 25 bp, Homo sapien
tcagccgctagcagtagtttgccaa

SEQ ID NO: 821717 - DNA, 25 bp, Homo sapien
ggtctttggtcccagagtagatgtt

SEQ ID NO: 821718 - DNA, 25 bp, Homo sapien
ggaaggtctttggtcccagagtaga

SEQ ID NO: 821719 - DNA, 25 bp, Homo sapien
aaggtctttggtcccagagtagatg

SEQ ID NO: 821720 - DNA, 25 bp, Homo sapien
atggaaggtctttggtcccagagta

SEQ ID NO: 821721 - DNA, 25 bp, Homo sapien
tagaagttgaaagcagaatctgcat

SEQ ID NO: 821722 - DNA, 25 bp, Homo sapien
aactgccataaccaatatcaaaagt

SEQ ID NO: 821723 - DNA, 25 bp, Homo sapien
tggagcactacagggtacatgaaac

SEQ ID NO: 821724 - DNA, 25 bp, Homo sapien
tatcaaaagttagaagttgaaagca

SEQ ID NO: 821725 - DNA, 25 bp, Homo sapien
taatcttgaaaatttaaatgctcgt

SEQ ID NO: 821726 - DNA, 25 bp, Homo sapien
tcttgaaaatttaaatgctcgtgta

SEQ ID NO: 821727 - DNA, 25 bp, Homo sapien
cttgaaaatttaaatgctcgtgtac

SEQ ID NO: 821728 - DNA, 25 bp, Homo sapien
tatcataatcttgaaaatttaaatg

SEQ ID NO: 821729 - DNA, 25 bp, Homo sapien
catctgatctataaagtctctgaaa

SEQ ID NO: 821730 - DNA, 25 bp, Homo sapien
attagggaagagaaaattgaaagtg

SEQ ID NO: 821731 - DNA, 25 bp, Homo sapien
atctgatctataaagtctctgaaat

SEQ ID NO: 821732 - DNA, 25 bp, Homo sapien
ccaagttcctttatgaaagtcataa

SEQ ID NO: 821733 - DNA, 25 bp, Homo sapien
ttcctttatgaaagtcataattgag

SEQ ID NO: 821734 - DNA, 25 bp, Homo sapien
tatgaaagtcataattgagttaatt

SEQ ID NO: 821735 - DNA, 25 bp, Homo sapien
gaaagtcataattgagttaatttct

SEQ ID NO: 821736 - DNA, 25 bp, Homo sapien
tgtcaaaatcaggtagcttacagtg

SEQ ID NO: 821737 - DNA, 25 bp, Homo sapien
gaaatacttaatctagtttgatgtc

SEQ ID NO: 821738 - DNA, 25 bp, Homo sapien
tagcttacagtgatctactctaatc

SEQ ID NO: 821739 - DNA, 25 bp, Homo sapien
gagcaaagtagcttataaagatttc

SEQ ID NO: 821740 - DNA, 25 bp, Homo sapien
tacttgagtgaaacatcagggtaat

SEQ ID NO: 821741 - DNA, 25 bp, Homo sapien
aattctggcagctatgctaatccca

SEQ ID NO: 821742 - DNA, 25 bp, Homo sapien
catatgaacaaatcttaggtggaaa

SEQ ID NO: 821743 - DNA, 25 bp, Homo sapien
gtctatataagtatcagaactggaa

SEQ ID NO: 821744 - DNA, 25 bp, Homo sapien
tctcctttctactgtgagaaccagg

SEQ ID NO: 821745 - DNA, 25 bp, Homo sapien
catgaataacagagttaggcagcag

SEQ ID NO: 821746 - DNA, 25 bp, Homo sapien
ggaaattagcttactctgaatcctc

SEQ ID NO: 821747 - DNA, 25 bp, Homo sapien
tgttacagataccagaagacacatg

SEQ ID NO: 821748 - DNA, 25 bp, Homo sapien
gaccagtattgggtcaggactgagc

SEQ ID NO: 821749 - DNA, 25 bp, Homo sapien
ctgaatcccaggagtagtagatggg

SEQ ID NO: 821750 - DNA, 25 bp, Homo sapien
cccacaggatttgccacatcataaa

SEQ ID NO: 821751 - DNA, 25 bp, Homo sapien
actgagccaggatttcccacaggat

SEQ ID NO: 821752 - DNA, 25 bp, Homo sapien
tttctattgcatcaaatggcacttg

SEQ ID NO: 821753 - DNA, 25 bp, Homo sapien
tattttctattgcatcaaatggcac

SEQ ID NO: 821754 - DNA, 25 bp, Homo sapien
tctattgcatcaaatggcacttgtg

SEQ ID NO: 821755 - DNA, 25 bp, Homo sapien
tattgcatcaaatggcacttgtggt

SEQ ID NO: 821756 - DNA, 25 bp, Homo sapien
tcatttttaatttgtggaactgcag

SEQ ID NO: 821757 - DNA, 25 bp, Homo sapien
tttcatttttaatttgtggaactgc

SEQ ID NO: 821758 - DNA, 25 bp, Homo sapien
catcactgcaatgtatttctttatt

SEQ ID NO: 821759 - DNA, 25 bp, Homo sapien
ctgcaatgtatttctttattttcat

SEQ ID NO: 821760 - DNA, 25 bp, Homo sapien
cttgatatgacatggtgtgttttca

SEQ ID NO: 821761 - DNA, 25 bp, Homo sapien
ttgatatgacatggtgtgttttcat

SEQ ID NO: 821762 - DNA, 25 bp, Homo sapien
ggagtttccactccaattgtcactg

SEQ ID NO: 821763 - DNA, 25 bp, Homo sapien
ctgcctgctcgtacaggtgcacctt

SEQ ID NO: 821764 - DNA, 25 bp, Homo sapien
ggatgaaagtcaggatttagttcca

SEQ ID NO: 821765 - DNA, 25 bp, Homo sapien
tttgatctttggatgaaagtcagga

SEQ ID NO: 821766 - DNA, 25 bp, Homo sapien
tcctaagcccagagggtagctggca

SEQ ID NO: 821767 - DNA, 25 bp, Homo sapien
ctaagcccagagggtagctggcaaa

SEQ ID NO: 821768 - DNA, 25 bp, Homo sapien
taagcccagagggtagctggcaaag

SEQ ID NO: 821769 - DNA, 25 bp, Homo sapien
cctaagcccagagggtagctggcaa

SEQ ID NO: 821770 - DNA, 25 bp, Homo sapien
ctatagatggtgagtttgtacgtga

SEQ ID NO: 821771 - DNA, 25 bp, Homo sapien
acttgggcggtcttctctatagatg

SEQ ID NO: 821772 - DNA, 25 bp, Homo sapien
tgtacgtgatcagagtctcaccgtg

SEQ ID NO: 821773 - DNA, 25 bp, Homo sapien
tgctgtgaaggcctcaaacaagggc

SEQ ID NO: 821774 - DNA, 25 bp, Homo sapien
tctttgagaataacatatttgtctt

SEQ ID NO: 821775 - DNA, 25 bp, Homo sapien
ttattaatatctttgagaataacat

SEQ ID NO: 821776 - DNA, 25 bp, Homo sapien
tattaatatctttgagaataacata

SEQ ID NO: 821777 - DNA, 25 bp, Homo sapien
aatatctttgagaataacatatttg

SEQ ID NO: 821778 - DNA, 25 bp, Homo sapien
ctaggaagacccaattctcctgcac

SEQ ID NO: 821779 - DNA, 25 bp, Homo sapien
gctaggaagacccaattctcctgca

SEQ ID NO: 821780 - DNA, 25 bp, Homo sapien
aagctaggaagacccaattctcctg

SEQ ID NO: 821781 - DNA, 25 bp, Homo sapien
ctcctgcacattgtgttggctctgc

SEQ ID NO: 821782 - DNA, 25 bp, Homo sapien
tatatgaacgtgaacatgcaacatt

SEQ ID NO: 821783 - DNA, 25 bp, Homo sapien
agtggtaataagtatagctatattc

SEQ ID NO: 821784 - DNA, 25 bp, Homo sapien
taaccatcactctattctcaatctt

SEQ ID NO: 821785 - DNA, 25 bp, Homo sapien
ttttagctcacatatatgaacgtga

SEQ ID NO: 821786 - DNA, 25 bp, Homo sapien
ctaactggatgccccactgtaagat

SEQ ID NO: 821787 - DNA, 25 bp, Homo sapien
taactggatgccccactgtaagatt

SEQ ID NO: 821788 - DNA, 25 bp, Homo sapien
agataggacagtttagaaattgttc

SEQ ID NO: 821789 - DNA, 25 bp, Homo sapien
gacacaagtaagataggacagttta

SEQ ID NO: 821790 - DNA, 25 bp, Homo sapien
agtgaccacaagctgtttgaccttc

SEQ ID NO: 821791 - DNA, 25 bp, Homo sapien
gtgaccacaagctgtttgaccttca

SEQ ID NO: 821792 - DNA, 25 bp, Homo sapien
tatttaaccctatccctatggccag

SEQ ID NO: 821793 - DNA, 25 bp, Homo sapien
tgtcatactaaatcaccaagcggta

SEQ ID NO: 821794 - DNA, 25 bp, Homo sapien
tagactgtccgttataggagggcac

SEQ ID NO: 821795 - DNA, 25 bp, Homo sapien
tgttatagaaaactgctgcggagct

SEQ ID NO: 821796 - DNA, 25 bp, Homo sapien
ggagtacttctagtcactattatca

SEQ ID NO: 821797 - DNA, 25 bp, Homo sapien
gtcactattatcacagatgcttcct

SEQ ID NO: 821798 - DNA, 25 bp, Homo sapien
ctatactttggagtacttctagtca

SEQ ID NO: 821799 - DNA, 25 bp, Homo sapien
ttaaagctatcaacaattctatact

SEQ ID NO: 821800 - DNA, 25 bp, Homo sapien
cccctggtcataagaatagaacaca

SEQ ID NO: 821801 - DNA, 25 bp, Homo sapien
tcattcagtggtgttgtctctgatg

SEQ ID NO: 821802 - DNA, 25 bp, Homo sapien
tttcattcagtggtgttgtctctga

SEQ ID NO: 821803 - DNA, 25 bp, Homo sapien
cattcagtggtgttgtctctgatgc

SEQ ID NO: 821804 - DNA, 25 bp, Homo sapien
tttttcattcagtggtgttgtctct

SEQ ID NO: 821805 - DNA, 25 bp, Homo sapien
gcacgggctgacatattctaatgtt

SEQ ID NO: 821806 - DNA, 25 bp, Homo sapien
tagcacgggctgacatattctaatg

SEQ ID NO: 821807 - DNA, 25 bp, Homo sapien
ttagcacgggctgacatattctaat

SEQ ID NO: 821808 - DNA, 25 bp, Homo sapien
atttagcacgggctgacatattcta

SEQ ID NO: 821809 - DNA, 25 bp, Homo sapien
ctttttgtttgctgcctagttcttg

SEQ ID NO: 821810 - DNA, 25 bp, Homo sapien
ttcagagcacttatcattatgtggc

SEQ ID NO: 821811 - DNA, 25 bp, Homo sapien
tagtacctgatgctcagtaggcact

SEQ ID NO: 821812 - DNA, 25 bp, Homo sapien
ttcactgttgttgcctggtgtctat

SEQ ID NO: 821813 - DNA, 25 bp, Homo sapien
ttcgaagagtttggattgcggttta

SEQ ID NO: 821814 - DNA, 25 bp, Homo sapien
ctatgctcggtgtttttcgaagagt

SEQ ID NO: 821815 - DNA, 25 bp, Homo sapien
cgaagagtttggattgcggtttata

SEQ ID NO: 821816 - DNA, 25 bp, Homo sapien
aaaacgttgcccttttctatgctcg

SEQ ID NO: 821817 - DNA, 25 bp, Homo sapien
caatttggacagcttgctttgctac

SEQ ID NO: 821818 - DNA, 25 bp, Homo sapien
caactttgtatactccacagatgag

SEQ ID NO: 821819 - DNA, 25 bp, Homo sapien
tccataatcaactttgtatactcca

SEQ ID NO: 821820 - DNA, 25 bp, Homo sapien
gctttgctactcttgtgctgccagg

SEQ ID NO: 821821 - DNA, 25 bp, Homo sapien
gaatttcagagagtagtaagaagac

SEQ ID NO: 821822 - DNA, 25 bp, Homo sapien
cagctacatgaacggctttgagttg

SEQ ID NO: 821823 - DNA, 25 bp, Homo sapien
aaggctctggcgtagtgaatttcag

SEQ ID NO: 821824 - DNA, 25 bp, Homo sapien
ctgaatctacagctacatgaacggc

SEQ ID NO: 821825 - DNA, 25 bp, Homo sapien
ggtagaggtatgagctaactgctcc

SEQ ID NO: 821826 - DNA, 25 bp, Homo sapien
caggtagaggtatgagctaactgct

SEQ ID NO: 821827 - DNA, 25 bp, Homo sapien
gaggtatgagctaactgctccctac

SEQ ID NO: 821828 - DNA, 25 bp, Homo sapien
tagaggtatgagctaactgctccct

SEQ ID NO: 821829 - DNA, 25 bp, Homo sapien
aagccaggtcagaggtaatgttctg

SEQ ID NO: 821830 - DNA, 25 bp, Homo sapien
caggtcagaggtaatgttctggaga

SEQ ID NO: 821831 - DNA, 25 bp, Homo sapien
tctggagatgcttactgagagtaga

SEQ ID NO: 821832 - DNA, 25 bp, Homo sapien
aatgttctggagatgcttactgaga

SEQ ID NO: 821833 - DNA, 25 bp, Homo sapien
tggaaggacaagctgaaagagtatg

SEQ ID NO: 821834 - DNA, 25 bp, Homo sapien
ccaaaactttggaaggacaagctga

SEQ ID NO: 821835 - DNA, 25 bp, Homo sapien
tggccaaaactttggaaggacaagc

SEQ ID NO: 821836 - DNA, 25 bp, Homo sapien
ctttggaaggacaagctgaaagagt

SEQ ID NO: 821837 - DNA, 25 bp, Homo sapien
tacactgcactgaagatatcctctc

SEQ ID NO: 821838 - DNA, 25 bp, Homo sapien
caacacagagctgtcccagtagcca

SEQ ID NO: 821839 - DNA, 25 bp, Homo sapien
aagacagcgctaattccagcagagg

SEQ ID NO: 821840 - DNA, 25 bp, Homo sapien
ccagcagagttctttgatcttcagc

SEQ ID NO: 821841 - DNA, 25 bp, Homo sapien
tggtggtgagacaggtgtgtcatat

SEQ ID NO: 821842 - DNA, 25 bp, Homo sapien
tttggaaaggatgtatcatgtcctc

SEQ ID NO: 821843 - DNA, 25 bp, Homo sapien
tgatcttcttaacaatctgttgaga

SEQ ID NO: 821844 - DNA, 25 bp, Homo sapien
tctgttgagacttagggcataggga

SEQ ID NO: 821845 - DNA, 25 bp, Homo sapien
ctagtatagatttgtcaagctcctc

SEQ ID NO: 821846 - DNA, 25 bp, Homo sapien
tagtatagatttgtcaagctcctca

SEQ ID NO: 821847 - DNA, 25 bp, Homo sapien
cacaactagtatagatttgtcaagc

SEQ ID NO: 821848 - DNA, 25 bp, Homo sapien
aactagtatagatttgtcaagctcc

SEQ ID NO: 821849 - DNA, 25 bp, Homo sapien
ctcttctgcagtcatgcagaacttc

SEQ ID NO: 821850 - DNA, 25 bp, Homo sapien
tcttctgcagtcatgcagaacttcc

SEQ ID NO: 821851 - DNA, 25 bp, Homo sapien
tctctcatagctaaaaggagtcagg

SEQ ID NO: 821852 - DNA, 25 bp, Homo sapien
taaacttgggtacttcagactgaga

SEQ ID NO: 821853 - DNA, 25 bp, Homo sapien
gagctgactgccttaggtacctacg

SEQ ID NO: 821854 - DNA, 25 bp, Homo sapien
tcaacattcatgaaccggctgtgtg

SEQ ID NO: 821855 - DNA, 25 bp, Homo sapien
tgtcctaacctcagattcccagatc

SEQ ID NO: 821856 - DNA, 25 bp, Homo sapien
ggtccaggatattaaggaacaagag

SEQ ID NO: 821857 - DNA, 25 bp, Homo sapien
gtctgggtcttttctactatactga

SEQ ID NO: 821858 - DNA, 25 bp, Homo sapien
ctatactgaatgtgtcatgggaaca

SEQ ID NO: 821859 - DNA, 25 bp, Homo sapien
cctctggatgaatcagcaaaccaca

SEQ ID NO: 821860 - DNA, 25 bp, Homo sapien
ttcctctggatgaatcagcaaacca

SEQ ID NO: 821861 - DNA, 25 bp, Homo sapien
ctttttagttcagactgtaaaatgg

SEQ ID NO: 821862 - DNA, 25 bp, Homo sapien
ctggatgaatcagcaaaccacaatc

SEQ ID NO: 821863 - DNA, 25 bp, Homo sapien
gagaagatgctctctgttcctctaa

SEQ ID NO: 821864 - DNA, 25 bp, Homo sapien
tagtcccaactttggcttgacccca

SEQ ID NO: 821865 - DNA, 25 bp, Homo sapien
tcctctaacggctttgaaggcattt

SEQ ID NO: 821866 - DNA, 25 bp, Homo sapien
caggaaacttggagaagatgctctc

SEQ ID NO: 821867 - DNA, 25 bp, Homo sapien
gtccagtaggaggaatacaactgtt

SEQ ID NO: 821868 - DNA, 25 bp, Homo sapien
tgtctttgtccagtaggaggaatac

SEQ ID NO: 821869 - DNA, 25 bp, Homo sapien
tttaatgatttctcgtaaattgtca

SEQ ID NO: 821870 - DNA, 25 bp, Homo sapien
caactgtttaatgatttctcgtaaa

SEQ ID NO: 821871 - DNA, 25 bp, Homo sapien
agtgaacagaacaagctgccacttc

SEQ ID NO: 821872 - DNA, 25 bp, Homo sapien
acttcttgaagaatcccagtaatgt

SEQ ID NO: 821873 - DNA, 25 bp, Homo sapien
tttagtgaacagaacaagctgccac

SEQ ID NO: 821874 - DNA, 25 bp, Homo sapien
ccacttcttgaagaatcccagtaat

SEQ ID NO: 821875 - DNA, 25 bp, Homo sapien
ctttgggccttttggagcttgagga

SEQ ID NO: 821876 - DNA, 25 bp, Homo sapien
gcttgaggatggagcagttggttgt

SEQ ID NO: 821877 - DNA, 25 bp, Homo sapien
agcagttggttgtcgtgattgtgcc

SEQ ID NO: 821878 - DNA, 25 bp, Homo sapien
tgtcgtgattgtgccctggctgctc

SEQ ID NO: 821879 - DNA, 25 bp, Homo sapien
tagatctattccctgctctcaaggg

SEQ ID NO: 821880 - DNA, 25 bp, Homo sapien
actgggagccccacaaattggcagt

SEQ ID NO: 821881 - DNA, 25 bp, Homo sapien
gaccaaagcattaatagactgggag

SEQ ID NO: 821882 - DNA, 25 bp, Homo sapien
gagttcaggtagaaagtaggtccca

SEQ ID NO: 821883 - DNA, 25 bp, Homo sapien
ctaaggcaaggcacaatccactggc

SEQ ID NO: 821884 - DNA, 25 bp, Homo sapien
ggttatttctctccagtcacacgtc

SEQ ID NO: 821885 - DNA, 25 bp, Homo sapien
gtcacacgtcctgttgtccgaacaa

SEQ ID NO: 821886 - DNA, 25 bp, Homo sapien
gagttgaggcttagttaggacacca

SEQ ID NO: 821887 - DNA, 25 bp, Homo sapien
ggcttagttaggacaccatattggc

SEQ ID NO: 821888 - DNA, 25 bp, Homo sapien
tgtaccttgggtagaattttgctgt

SEQ ID NO: 821889 - DNA, 25 bp, Homo sapien
gtaccttgggtagaattttgctgtg

SEQ ID NO: 821890 - DNA, 25 bp, Homo sapien
agagatctttcaccaccttgcttat

SEQ ID NO: 821891 - DNA, 25 bp, Homo sapien
attgctttaactattagggctcttt

SEQ ID NO: 821892 - DNA, 25 bp, Homo sapien
aagttgggtagttatgtctttggca

SEQ ID NO: 821893 - DNA, 25 bp, Homo sapien
gcttaggattgctttaactattagg

SEQ ID NO: 821894 - DNA, 25 bp, Homo sapien
cggcttctaggaactctctggacat

SEQ ID NO: 821895 - DNA, 25 bp, Homo sapien
gaactctctggacatcgacacccaa

SEQ ID NO: 821896 - DNA, 25 bp, Homo sapien
tctaggaactctctggacatcgaca

SEQ ID NO: 821897 - DNA, 25 bp, Homo sapien
taggaactctctggacatcgacacc

SEQ ID NO: 821898 - DNA, 25 bp, Homo sapien
ccaattaaagtttattactctctca

SEQ ID NO: 821899 - DNA, 25 bp, Homo sapien
actctctcagaaaaatagtccaggt

SEQ ID NO: 821900 - DNA, 25 bp, Homo sapien
ggcagggaggtcatttagggtccca

SEQ ID NO: 821901 - DNA, 25 bp, Homo sapien
tactctctcagaaaaatagtccagg

SEQ ID NO: 821902 - DNA, 25 bp, Homo sapien
taacagatagcccaaaaaacttgga

SEQ ID NO: 821903 - DNA, 25 bp, Homo sapien
ccctgtattaggtgagataagctaa

SEQ ID NO: 821904 - DNA, 25 bp, Homo sapien
tccagtttcttggttgcatagtccc

SEQ ID NO: 821905 - DNA, 25 bp, Homo sapien
gctaagcactgtaacagatagccca

SEQ ID NO: 821906 - DNA, 25 bp, Homo sapien
ttaatcagctcttcaaaggccctat

SEQ ID NO: 821907 - DNA, 25 bp, Homo sapien
cttaatcagctcttcaaaggcccta

SEQ ID NO: 821908 - DNA, 25 bp, Homo sapien
taatcagctcttcaaaggccctatt

SEQ ID NO: 821909 - DNA, 25 bp, Homo sapien
gttggttgaatctccaatgaacaga

SEQ ID NO: 821910 - DNA, 25 bp, Homo sapien
ttggttgaatctccaatgaacagaa

SEQ ID NO: 821911 - DNA, 25 bp, Homo sapien
tggttgaatctccaatgaacagaat

SEQ ID NO: 821912 - DNA, 25 bp, Homo sapien
tgttggttgaatctccaatgaacag

SEQ ID NO: 821913 - DNA, 25 bp, Homo sapien
aagtcttcccaccattgacgttgtg

SEQ ID NO: 821914 - DNA, 25 bp, Homo sapien
aatgaagggcttatccagaactggg

SEQ ID NO: 821915 - DNA, 25 bp, Homo sapien
gacgttgtgatagaatttagtgcca

SEQ ID NO: 821916 - DNA, 25 bp, Homo sapien
gccattcctgcaacgtttcattcag

SEQ ID NO: 821917 - DNA, 25 bp, Homo sapien
gtctttcattatagtttcattgtac

SEQ ID NO: 821918 - DNA, 25 bp, Homo sapien
tgtctttcattatagtttcattgta

SEQ ID NO: 821919 - DNA, 25 bp, Homo sapien
gtgggttttgtgtctttcattatag

SEQ ID NO: 821920 - DNA, 25 bp, Homo sapien
tttgtgggttttgtgtctttcatta

SEQ ID NO: 821921 - DNA, 25 bp, Homo sapien
acagtctggccagtattctctaggg

SEQ ID NO: 821922 - DNA, 25 bp, Homo sapien
gaattaagccactgaacaccaccaa

SEQ ID NO: 821923 - DNA, 25 bp, Homo sapien
accaacaaccaatacagtctggcca

SEQ ID NO: 821924 - DNA, 25 bp, Homo sapien
tgtgaataatttgcaggtgattgga

SEQ ID NO: 821925 - DNA, 25 bp, Homo sapien
gttttgatgatcactaggatattga

SEQ ID NO: 821926 - DNA, 25 bp, Homo sapien
tttgatgatcactaggatattgagt

SEQ ID NO: 821927 - DNA, 25 bp, Homo sapien
tcactaggatattgagtaaattttc

SEQ ID NO: 821928 - DNA, 25 bp, Homo sapien
gatgatcactaggatattgagtaaa

SEQ ID NO: 821929 - DNA, 25 bp, Homo sapien
tggaagacattatcaaaggtcccct

SEQ ID NO: 821930 - DNA, 25 bp, Homo sapien
tagaggatgtaacttggccacttcc

SEQ ID NO: 821931 - DNA, 25 bp, Homo sapien
catcacagaagatctgctgtccagg

SEQ ID NO: 821932 - DNA, 25 bp, Homo sapien
taacccctgctaactccaagatgct

SEQ ID NO: 821933 - DNA, 25 bp, Homo sapien
ttctttccataagttctgtacttca

SEQ ID NO: 821934 - DNA, 25 bp, Homo sapien
cacacttcccctgtagaaactcttt

SEQ ID NO: 821935 - DNA, 25 bp, Homo sapien
tgtgtcaactacttcatagccatgt

SEQ ID NO: 821936 - DNA, 25 bp, Homo sapien
taacgccccattgttatagtgaatg

SEQ ID NO: 821937 - DNA, 25 bp, Homo sapien
taactggctggttaagggtcgtgaa

SEQ ID NO: 821938 - DNA, 25 bp, Homo sapien
taaacaaggtcaaggcagttggaat

SEQ ID NO: 821939 - DNA, 25 bp, Homo sapien
gagaaagacgtggaaaatatatagc

SEQ ID NO: 821940 - DNA, 25 bp, Homo sapien
tatatagcttgtaaacaggatttgg

SEQ ID NO: 821941 - DNA, 25 bp, Homo sapien
gttacagtgccttgttgtagtttgc

SEQ ID NO: 821942 - DNA, 25 bp, Homo sapien
ggcgatcgaaaatttgttacagtgc

SEQ ID NO: 821943 - DNA, 25 bp, Homo sapien
cctctgacatgatatggcgatcgaa

SEQ ID NO: 821944 - DNA, 25 bp, Homo sapien
gaacaaacctgatttattggacctc

SEQ ID NO: 821945 - DNA, 25 bp, Homo sapien
ggacaacttctacttgccagtggaa

SEQ ID NO: 821946 - DNA, 25 bp, Homo sapien
tgtggtcgatcccaaatgtgtgcga

SEQ ID NO: 821947 - DNA, 25 bp, Homo sapien
cattgtccgggtgactagctcgtct

SEQ ID NO: 821948 - DNA, 25 bp, Homo sapien
tcagcagcgaagagataaataccag

SEQ ID NO: 821949 - DNA, 25 bp, Homo sapien
tatagttaatcgtgtttaaccatgc

SEQ ID NO: 821950 - DNA, 25 bp, Homo sapien
catacattttggtcattgcacagtg

SEQ ID NO: 821951 - DNA, 25 bp, Homo sapien
gaatccacatgataatatccctgcc

SEQ ID NO: 821952 - DNA, 25 bp, Homo sapien
tagatgtacatcttcagtaaaaaag

SEQ ID NO: 821953 - DNA, 25 bp, Homo sapien
tgcatttcaccagccaaccataaaa

SEQ ID NO: 821954 - DNA, 25 bp, Homo sapien
tactcataacctaatctacaatgga

SEQ ID NO: 821955 - DNA, 25 bp, Homo sapien
taaatcaccttaagaagacatcttg

SEQ ID NO: 821956 - DNA, 25 bp, Homo sapien
cattaaactgtgtagcgtagcccca

SEQ ID NO: 821957 - DNA, 25 bp, Homo sapien
tgagtgtgctatgttatcttatcat

SEQ ID NO: 821958 - DNA, 25 bp, Homo sapien
agtgtgctatgttatcttatcattt

SEQ ID NO: 821959 - DNA, 25 bp, Homo sapien
gtgtatgtgtggacctgtatatatg

SEQ ID NO: 821960 - DNA, 25 bp, Homo sapien
tgtatgtgtggacctgtatatatgt

SEQ ID NO: 821961 - DNA, 25 bp, Homo sapien
cacatggcttagtgaagcagcttcc

SEQ ID NO: 821962 - DNA, 25 bp, Homo sapien
caaaaacagccgacttgagggctct

SEQ ID NO: 821963 - DNA, 25 bp, Homo sapien
tagatgccagaacggagtcggagtc

SEQ ID NO: 821964 - DNA, 25 bp, Homo sapien
gagggctctcaagtttgcaatctga

SEQ ID NO: 821965 - DNA, 25 bp, Homo sapien
tacaagtgtggaacagagcacaggc

SEQ ID NO: 821966 - DNA, 25 bp, Homo sapien
aggcttgtgaccactggctcttagg

SEQ ID NO: 821967 - DNA, 25 bp, Homo sapien
ggtcttaactcccatgatagaacag

SEQ ID NO: 821968 - DNA, 25 bp, Homo sapien
gatagaacagaagaccagaggtgac

SEQ ID NO: 821969 - DNA, 25 bp, Homo sapien
tctggctttgccctctgtggttttt

SEQ ID NO: 821970 - DNA, 25 bp, Homo sapien
tggctttgccctctgtggtttttgc

SEQ ID NO: 821971 - DNA, 25 bp, Homo sapien
ttctggctttgccctctgtggtttt

SEQ ID NO: 821972 - DNA, 25 bp, Homo sapien
ctggctttgccctctgtggtttttg

SEQ ID NO: 821973 - DNA, 25 bp, Homo sapien
catagggaggtcttttgagaagccc

SEQ ID NO: 821974 - DNA, 25 bp, Homo sapien
tatttcctgcagtccctgagaacgc

SEQ ID NO: 821975 - DNA, 25 bp, Homo sapien
tcaatcgtgctctgtgatttccttt

SEQ ID NO: 821976 - DNA, 25 bp, Homo sapien
agtccctgagaacgctgtaagtccc

SEQ ID NO: 821977 - DNA, 25 bp, Homo sapien
tccctatttgtcttatttcctgcag

SEQ ID NO: 821978 - DNA, 25 bp, Homo sapien
ttctgttgatgtatccgcgtctcca

SEQ ID NO: 821979 - DNA, 25 bp, Homo sapien
ccagcagtgatagggactctcagca

SEQ ID NO: 821980 - DNA, 25 bp, Homo sapien
ttgtccagcaccaagttatccctcg

SEQ ID NO: 821981 - DNA, 25 bp, Homo sapien
tcttcctccttgcatacaacattaa

SEQ ID NO: 821982 - DNA, 25 bp, Homo sapien
ttcgggccgcaggtcagttgtccag

SEQ ID NO: 821983 - DNA, 25 bp, Homo sapien
ggctccgtaggggaacagcacgagc

SEQ ID NO: 821984 - DNA, 25 bp, Homo sapien
gctccgtaggggaacagcacgagca

SEQ ID NO: 821985 - DNA, 25 bp, Homo sapien
agggctgcccacagcgcgcacaagc

SEQ ID NO: 821986 - DNA, 25 bp, Homo sapien
ctgcccacagcgcgcacaagcgggc

SEQ ID NO: 821987 - DNA, 25 bp, Homo sapien
tgctcggcagcaggtacggtttcct

SEQ ID NO: 821988 - DNA, 25 bp, Homo sapien
ttcagcggcaaattggcgcagccca

SEQ ID NO: 821989 - DNA, 25 bp, Homo sapien
ggcggcggtgatcatgcagttccat

SEQ ID NO: 821990 - DNA, 25 bp, Homo sapien
gcttctctggaaccccgaaggaggc

SEQ ID NO: 821991 - DNA, 25 bp, Homo sapien
cgctgccgacatcatgtttctccag

SEQ ID NO: 821992 - DNA, 25 bp, Homo sapien
gcgcagcggagttggttaaatcaaa

SEQ ID NO: 821993 - DNA, 25 bp, Homo sapien
gctcctaggagccaataaaggtggg

SEQ ID NO: 821994 - DNA, 25 bp, Homo sapien
tcgctgcaattagccacttgtccgg

SEQ ID NO: 821995 - DNA, 25 bp, Homo sapien
gaagcgcacaagtggtcctgctcag

SEQ ID NO: 821996 - DNA, 25 bp, Homo sapien
taccaagtcactacgcacgtggaag

SEQ ID NO: 821997 - DNA, 25 bp, Homo sapien
cctgctcaggttagccgcacgttgg

SEQ ID NO: 821998 - DNA, 25 bp, Homo sapien
tgaacatgaaaaacgacagcgcatc

SEQ ID NO: 821999 - DNA, 25 bp, Homo sapien
cataaataaatgctgtctctttggt

SEQ ID NO: 822000 - DNA, 25 bp, Homo sapien
cagcataaataaatgctgtctcttt

SEQ ID NO: 822001 - DNA, 25 bp, Homo sapien
cacagcataaataaatgctgtctct

SEQ ID NO: 822002 - DNA, 25 bp, Homo sapien
gcataaataaatgctgtctctttgg

SEQ ID NO: 822003 - DNA, 25 bp, Homo sapien
tgcctgcactgcatgacctggtcac

SEQ ID NO: 822004 - DNA, 25 bp, Homo sapien
ttgcctgcactgcatgacctggtca

SEQ ID NO: 822005 - DNA, 25 bp, Homo sapien
gttgcctgcactgcatgacctggtc

SEQ ID NO: 822006 - DNA, 25 bp, Homo sapien
ccatactggacatcatcggagcagc

SEQ ID NO: 822007 - DNA, 25 bp, Homo sapien
tctttgcccgtggtgtttccgatgg

SEQ ID NO: 822008 - DNA, 25 bp, Homo sapien
aaatctaggaactttctgctgaacc

SEQ ID NO: 822009 - DNA, 25 bp, Homo sapien
tgctgagccgccgttctgcaaggtg

SEQ ID NO: 822010 - DNA, 25 bp, Homo sapien
ggacagtttcatgcagatgtgtaat

SEQ ID NO: 822011 - DNA, 25 bp, Homo sapien
agttatttacctaacagcactgggt

SEQ ID NO: 822012 - DNA, 25 bp, Homo sapien
taatcctagttatttacctaacagc

SEQ ID NO: 822013 - DNA, 25 bp, Homo sapien
tttggacagtttcatgcagatgtgt

SEQ ID NO: 822014 - DNA, 25 bp, Homo sapien
atatatgtgcaaatgtgtatacaca

SEQ ID NO: 822015 - DNA, 25 bp, Homo sapien
tatatgtgcaaatgtgtatacacac

SEQ ID NO: 822016 - DNA, 25 bp, Homo sapien
gtaatatatgtgcaaatgtgtatac

SEQ ID NO: 822017 - DNA, 25 bp, Homo sapien
atgtgcaaatgtgtatacacacaca

SEQ ID NO: 822018 - DNA, 25 bp, Homo sapien
aaactgacaacatgtttaggagcca

SEQ ID NO: 822019 - DNA, 25 bp, Homo sapien
tattctgactccacgactaagcggg

SEQ ID NO: 822020 - DNA, 25 bp, Homo sapien
ggagccattgcccactaaaaagtcg

SEQ ID NO: 822021 - DNA, 25 bp, Homo sapien
taagggcacatattaccaaagaagg

SEQ ID NO: 822022 - DNA, 25 bp, Homo sapien
tatctttaagatactgatattttaa

SEQ ID NO: 822023 - DNA, 25 bp, Homo sapien
taagatactgatattttaaaatatc

SEQ ID NO: 822024 - DNA, 25 bp, Homo sapien
tgtatctttaagatactgatatttt

SEQ ID NO: 822025 - DNA, 25 bp, Homo sapien
gtatctttaagatactgatatttta

SEQ ID NO: 822026 - DNA, 25 bp, Homo sapien
gaaaagtcactatgaattgccaact

SEQ ID NO: 822027 - DNA, 25 bp, Homo sapien
tgttgtagaattcaaactttgttgt

SEQ ID NO: 822028 - DNA, 25 bp, Homo sapien
ctatgaattgccaactaagtcaact

SEQ ID NO: 822029 - DNA, 25 bp, Homo sapien
caactaagtcaactatgttgtagaa

SEQ ID NO: 822030 - DNA, 25 bp, Homo sapien
catgtgcatgactatggtgttgggc

SEQ ID NO: 822031 - DNA, 25 bp, Homo sapien
taaatgtaaaaccttaagaggcatg

SEQ ID NO: 822032 - DNA, 25 bp, Homo sapien
gtgttacagtgatatatttaccgac

SEQ ID NO: 822033 - DNA, 25 bp, Homo sapien
tgttgggcaagagttattctagtga

SEQ ID NO: 822034 - DNA, 25 bp, Homo sapien
tagaataatagcaagaacctaggta

SEQ ID NO: 822035 - DNA, 25 bp, Homo sapien
ttagcattaacagttacagagagga

SEQ ID NO: 822036 - DNA, 25 bp, Homo sapien
aataaaaccaaatagctgccgaatg

SEQ ID NO: 822037 - DNA, 25 bp, Homo sapien
taagagaatcaatcataacgtgagt

SEQ ID NO: 822038 - DNA, 25 bp, Homo sapien
gacatcacatcattccgttagccaa

SEQ ID NO: 822039 - DNA, 25 bp, Homo sapien
taaggttagcggttagaaaatcatc

SEQ ID NO: 822040 - DNA, 25 bp, Homo sapien
tgctcacagtactactaagcgccag

SEQ ID NO: 822041 - DNA, 25 bp, Homo sapien
gcatagtacctaccaaataaccagg

SEQ ID NO: 822042 - DNA, 25 bp, Homo sapien
tttgttgcacataatagctagttaa

SEQ ID NO: 822043 - DNA, 25 bp, Homo sapien
tatcttacataaggaaagctggtga

SEQ ID NO: 822044 - DNA, 25 bp, Homo sapien
taaggtatttatatgcagcaggata

SEQ ID NO: 822045 - DNA, 25 bp, Homo sapien
taaatagccattgtgaattacagca

SEQ ID NO: 822046 - DNA, 25 bp, Homo sapien
tagccagcatagcttccttcaatcc

SEQ ID NO: 822047 - DNA, 25 bp, Homo sapien
aaatcgtcagggctagctgtggagt

SEQ ID NO: 822048 - DNA, 25 bp, Homo sapien
aatccccagacgatggcagaacaga

SEQ ID NO: 822049 - DNA, 25 bp, Homo sapien
gattaataaatcgtcagggctagct

SEQ ID NO: 822050 - DNA, 25 bp, Homo sapien
ctgaaaccaacagtaattgtgttca

SEQ ID NO: 822051 - DNA, 25 bp, Homo sapien
cacatgggtgttgtaacctcggcca

SEQ ID NO: 822052 - DNA, 25 bp, Homo sapien
tgatgtacggttgcattctctgcct

SEQ ID NO: 822053 - DNA, 25 bp, Homo sapien
acaggagccggaaactccgtggcag

SEQ ID NO: 822054 - DNA, 25 bp, Homo sapien
tctactgacatcaacttggcgacag

SEQ ID NO: 822055 - DNA, 25 bp, Homo sapien
tcctgcaacggacatagcagcacca

SEQ ID NO: 822056 - DNA, 25 bp, Homo sapien
tacatgaaagggtaagtcagcaccc

SEQ ID NO: 822057 - DNA, 25 bp, Homo sapien
tcaactttactagcgctgcacaggg

SEQ ID NO: 822058 - DNA, 25 bp, Homo sapien
tcgatcaggtaagggaaactctcag

SEQ ID NO: 822059 - DNA, 25 bp, Homo sapien
tagggattccactgcaagagtcaac

SEQ ID NO: 822060 - DNA, 25 bp, Homo sapien
caaaccatgaagaacatcctgtaac

SEQ ID NO: 822061 - DNA, 25 bp, Homo sapien
ctaaattctttaaatggcatatgtt

SEQ ID NO: 822062 - DNA, 25 bp, Homo sapien
gaacatcctgtaactttcattacat

SEQ ID NO: 822063 - DNA, 25 bp, Homo sapien
ttcattacattcacaaatcccctaa

SEQ ID NO: 822064 - DNA, 25 bp, Homo sapien
tagccaaagagaaaagggtctgaaa

SEQ ID NO: 822065 - DNA, 25 bp, Homo sapien
taacctgcaagctcgtaatgttccg

SEQ ID NO: 822066 - DNA, 25 bp, Homo sapien
tccgtatagtcagcccatatttcct

SEQ ID NO: 822067 - DNA, 25 bp, Homo sapien
gataaaagatactccctttggtcag

SEQ ID NO: 822068 - DNA, 25 bp, Homo sapien
ggtcattcaggacagctaagtcagt

SEQ ID NO: 822069 - DNA, 25 bp, Homo sapien
tactgggcggactgataacatttaa

SEQ ID NO: 822070 - DNA, 25 bp, Homo sapien
aattattgcccgaagctatagtggc

SEQ ID NO: 822071 - DNA, 25 bp, Homo sapien
catacatcggatatgtgaaaagcac

SEQ ID NO: 822072 - DNA, 25 bp, Homo sapien
gaaaggctaaatgctccacaggcta

SEQ ID NO: 822073 - DNA, 25 bp, Homo sapien
tataggaggcgaatctgaaaggcta

SEQ ID NO: 822074 - DNA, 25 bp, Homo sapien
tgagattggttcttctgcacagtca

SEQ ID NO: 822075 - DNA, 25 bp, Homo sapien
tgtggtgggcatcaatcatgaaagt

SEQ ID NO: 822076 - DNA, 25 bp, Homo sapien
aattggacatttagtcagtatcaca

SEQ ID NO: 822077 - DNA, 25 bp, Homo sapien
tctaaaactttatgagcagcaacac

SEQ ID NO: 822078 - DNA, 25 bp, Homo sapien
ttgggaagttcagctggtaagtatg

SEQ ID NO: 822079 - DNA, 25 bp, Homo sapien
tagttggcaaatcacaaattggaca

SEQ ID NO: 822080 - DNA, 25 bp, Homo sapien
accaaatctgtgtcagtgtaaacct

SEQ ID NO: 822081 - DNA, 25 bp, Homo sapien
catcttgtactgagtagtggtagga

SEQ ID NO: 822082 - DNA, 25 bp, Homo sapien
gtaggatgtaatggcaatatttggg

SEQ ID NO: 822083 - DNA, 25 bp, Homo sapien
tctgtgtcagtgtaaacctgaactc

SEQ ID NO: 822084 - DNA, 25 bp, Homo sapien
tctgttgcccaccaaaactgaagac

SEQ ID NO: 822085 - DNA, 25 bp, Homo sapien
ttatctgttgcccaccaaaactgaa

SEQ ID NO: 822086 - DNA, 25 bp, Homo sapien
ttgcccaccaaaactgaagacccat

SEQ ID NO: 822087 - DNA, 25 bp, Homo sapien
tgttgcccaccaaaactgaagaccc

SEQ ID NO: 822088 - DNA, 25 bp, Homo sapien
atttaatcctctcttttgttgcttg

SEQ ID NO: 822089 - DNA, 25 bp, Homo sapien
ttaatcctctcttttgttgcttgtg

SEQ ID NO: 822090 - DNA, 25 bp, Homo sapien
tttaatcctctcttttgttgcttgt

SEQ ID NO: 822091 - DNA, 25 bp, Homo sapien
aaaataatccaacggcttgacctgt

SEQ ID NO: 822092 - DNA, 25 bp, Homo sapien
caacggcttgacctgtcttccatcc

SEQ ID NO: 822093 - DNA, 25 bp, Homo sapien
cggcttgacctgtcttccatccgaa

SEQ ID NO: 822094 - DNA, 25 bp, Homo sapien
taaaataatccaacggcttgacctg

SEQ ID NO: 822095 - DNA, 25 bp, Homo sapien
cagagatgtgcttcttgggattctc

SEQ ID NO: 822096 - DNA, 25 bp, Homo sapien
ccagagatgtgcttcttgggattct

SEQ ID NO: 822097 - DNA, 25 bp, Homo sapien
gttccagagatgtgcttcttgggat

SEQ ID NO: 822098 - DNA, 25 bp, Homo sapien
tttgttccagagatgtgcttcttgg

SEQ ID NO: 822099 - DNA, 25 bp, Homo sapien
tctttctgccttcttcttaatgctg

SEQ ID NO: 822100 - DNA, 25 bp, Homo sapien
taagctatcaagtctgctctttctg

SEQ ID NO: 822101 - DNA, 25 bp, Homo sapien
tgccttcttcttaatgctggcaaag

SEQ ID NO: 822102 - DNA, 25 bp, Homo sapien
ttctgccttcttcttaatgctggca

SEQ ID NO: 822103 - DNA, 25 bp, Homo sapien
gaaaaaatggtgaggatcattatca

SEQ ID NO: 822104 - DNA, 25 bp, Homo sapien
tgcagaagttctgacaagggccaac

SEQ ID NO: 822105 - DNA, 25 bp, Homo sapien
gccaacagatacaggtgagcaggca

SEQ ID NO: 822106 - DNA, 25 bp, Homo sapien
taagtgctgtagtcagtctacagag

SEQ ID NO: 822107 - DNA, 25 bp, Homo sapien
ggccaaaggcctatcacttgggcaa

SEQ ID NO: 822108 - DNA, 25 bp, Homo sapien
tatgcttgtcatgcaggaaaggtgg

SEQ ID NO: 822109 - DNA, 25 bp, Homo sapien
ctacatctgtggcttgggttacacg

SEQ ID NO: 822110 - DNA, 25 bp, Homo sapien
cacgtgagatcttgtaggacagcca

SEQ ID NO: 822111 - DNA, 25 bp, Homo sapien
gttgaaatacttatgctccagggaa

SEQ ID NO: 822112 - DNA, 25 bp, Homo sapien
tgaaatacttatgctccagggaaga

SEQ ID NO: 822113 - DNA, 25 bp, Homo sapien
ctttgttgaaatacttatgctccag

SEQ ID NO: 822114 - DNA, 25 bp, Homo sapien
aaatacttatgctccagggaagagg

SEQ ID NO: 822115 - DNA, 25 bp, Homo sapien
tgcccacctgtctaaactaccacct

SEQ ID NO: 822116 - DNA, 25 bp, Homo sapien
gaatgacagatcttatggaccacaa

SEQ ID NO: 822117 - DNA, 25 bp, Homo sapien
gaccctgaatgacagatcttatgga

SEQ ID NO: 822118 - DNA, 25 bp, Homo sapien
ttatggaccacaactgcccacctgt

SEQ ID NO: 822119 - DNA, 25 bp, Homo sapien
tgctgcttcctggccactgaggatt

SEQ ID NO: 822120 - DNA, 25 bp, Homo sapien
ggctttctccactgctgcttcctgg

SEQ ID NO: 822121 - DNA, 25 bp, Homo sapien
tggctttctccactgctgcttcctg

SEQ ID NO: 822122 - DNA, 25 bp, Homo sapien
ggctggctttctccactgctgcttc

SEQ ID NO: 822123 - DNA, 25 bp, Homo sapien
gacattctgcagaactggacaccat

SEQ ID NO: 822124 - DNA, 25 bp, Homo sapien
gggcagcatggtctacaatacttcc

SEQ ID NO: 822125 - DNA, 25 bp, Homo sapien
cattgtcttctataaagggctgcta

SEQ ID NO: 822126 - DNA, 25 bp, Homo sapien
gagtttgtcctcagactgggcagca

SEQ ID NO: 822127 - DNA, 25 bp, Homo sapien
ctgcaggcctagatgatttgtgacc

SEQ ID NO: 822128 - DNA, 25 bp, Homo sapien
gcaggcctagatgatttgtgacctc

SEQ ID NO: 822129 - DNA, 25 bp, Homo sapien
caggcctagatgatttgtgacctca

SEQ ID NO: 822130 - DNA, 25 bp, Homo sapien
tgcaggcctagatgatttgtgacct

SEQ ID NO: 822131 - DNA, 25 bp, Homo sapien
ctgtattccgaatatagaattgcgt

SEQ ID NO: 822132 - DNA, 25 bp, Homo sapien
gtattccgaatatagaattgcgttc

SEQ ID NO: 822133 - DNA, 25 bp, Homo sapien
tctgtattccgaatatagaattgcg

SEQ ID NO: 822134 - DNA, 25 bp, Homo sapien
tattccgaatatagaattgcgttct

SEQ ID NO: 822135 - DNA, 25 bp, Homo sapien
tgtattcggaatacagaatatagga

SEQ ID NO: 822136 - DNA, 25 bp, Homo sapien
taattctgtattcggaatacagact

SEQ ID NO: 822137 - DNA, 25 bp, Homo sapien
gtattcggaatacagaatataggaa

SEQ ID NO: 822138 - DNA, 25 bp, Homo sapien
gtattcggaatacagactataggaa

SEQ ID NO: 822139 - DNA, 25 bp, Homo sapien
ttctagcagctctttctaacttcat

SEQ ID NO: 822140 - DNA, 25 bp, Homo sapien
tcaacccctggagtgatgcttattg

SEQ ID NO: 822141 - DNA, 25 bp, Homo sapien
gcttattggccaaaatagcctatcc

SEQ ID NO: 822142 - DNA, 25 bp, Homo sapien
ggccaaaatagcctatccaagcttt

SEQ ID NO: 822143 - DNA, 25 bp, Homo sapien
cctggagtgatgcttattggccaaa

SEQ ID NO: 822144 - DNA, 25 bp, Homo sapien
tcctttcagcactcagttttgtatc

SEQ ID NO: 822145 - DNA, 25 bp, Homo sapien
tcttctcccggaatttcagcttctg

SEQ ID NO: 822146 - DNA, 25 bp, Homo sapien
gcttctgtaaccctagatgaaatcc

SEQ ID NO: 822147 - DNA, 25 bp, Homo sapien
tttgtatcttctcccggaatttcag

SEQ ID NO: 822148 - DNA, 25 bp, Homo sapien
ggcagcctccgccaaaatggaagtt

SEQ ID NO: 822149 - DNA, 25 bp, Homo sapien
gtagcctaggcccagcgtctgcatt

SEQ ID NO: 822150 - DNA, 25 bp, Homo sapien
caatcccctctcgttgcttctgata

SEQ ID NO: 822151 - DNA, 25 bp, Homo sapien
gaatacatctgctgtggcagcctcc

SEQ ID NO: 822152 - DNA, 25 bp, Homo sapien
tctgtgccaggaactctgcctcgaa

SEQ ID NO: 822153 - DNA, 25 bp, Homo sapien
ttctgtgccaggaactctgcctcga

SEQ ID NO: 822154 - DNA, 25 bp, Homo sapien
ctgtgccaggaactctgcctcgaac

SEQ ID NO: 822155 - DNA, 25 bp, Homo sapien
cagaagggatgttggtacttagatt

SEQ ID NO: 822156 - DNA, 25 bp, Homo sapien
tctgggctctgatgatgtcctcgaa

SEQ ID NO: 822157 - DNA, 25 bp, Homo sapien
tcttcaaggagattgcacctgtctt

SEQ ID NO: 822158 - DNA, 25 bp, Homo sapien
catttgtctcgaagtgttcatgatc

SEQ ID NO: 822159 - DNA, 25 bp, Homo sapien
tctcaggagttactgcagttgtgtc

SEQ ID NO: 822160 - DNA, 25 bp, Homo sapien
tatacagagggtggagtgatcagca

SEQ ID NO: 822161 - DNA, 25 bp, Homo sapien
cctagaaactggaaagtgtgacaca

SEQ ID NO: 822162 - DNA, 25 bp, Homo sapien
tgtcctgaatgctcagcaaagcaac

SEQ ID NO: 822163 - DNA, 25 bp, Homo sapien
aaggttctgctagatttccatttaa

SEQ ID NO: 822164 - DNA, 25 bp, Homo sapien
ttgaagccaggtggaactacaaccc

SEQ ID NO: 822165 - DNA, 25 bp, Homo sapien
tagataaacatccagcggacctggg

SEQ ID NO: 822166 - DNA, 25 bp, Homo sapien
cttgtttgtaaggaccgcatttaga

SEQ ID NO: 822167 - DNA, 25 bp, Homo sapien
cctctcttagtaaagagcacatgaa

SEQ ID NO: 822168 - DNA, 25 bp, Homo sapien
ggaggtatgggcaccttctttctcc

SEQ ID NO: 822169 - DNA, 25 bp, Homo sapien
taggtataggcttcaaataggaggt

SEQ ID NO: 822170 - DNA, 25 bp, Homo sapien
tcttcactgagagtggagtcatgtg

SEQ ID NO: 822171 - DNA, 25 bp, Homo sapien
gggaggaccgagtcttgagtaccat

SEQ ID NO: 822172 - DNA, 25 bp, Homo sapien
gatacagacagggagtagaggaggg

SEQ ID NO: 822173 - DNA, 25 bp, Homo sapien
ggagggaggaccgagtcttgagtac

SEQ ID NO: 822174 - DNA, 25 bp, Homo sapien
gtagaggagggaggaccgagtcttg

SEQ ID NO: 822175 - DNA, 25 bp, Homo sapien
gcagggcaagtaactgagatacagc

SEQ ID NO: 822176 - DNA, 25 bp, Homo sapien
catggagatttctctcgctaaagtg

SEQ ID NO: 822177 - DNA, 25 bp, Homo sapien
cagttgttggaatttcagggcaaga

SEQ ID NO: 822178 - DNA, 25 bp, Homo sapien
aaagagcaacaaagaaaacggcagg

SEQ ID NO: 822179 - DNA, 25 bp, Homo sapien
ccttggagtatggtcagcttctctc

SEQ ID NO: 822180 - DNA, 25 bp, Homo sapien
attttctgacacttccaggcaagag

SEQ ID NO: 822181 - DNA, 25 bp, Homo sapien
tcttttctccaagccttcatccatt

SEQ ID NO: 822182 - DNA, 25 bp, Homo sapien
tgatccaatgctttttgtcctcctc

SEQ ID NO: 822183 - DNA, 25 bp, Homo sapien
tgttccttcacagacacggtatgac

SEQ ID NO: 822184 - DNA, 25 bp, Homo sapien
tccatgtttgtcgatttaaaaagcc

SEQ ID NO: 822185 - DNA, 25 bp, Homo sapien
gacagtaaaagatgggttgttgcct

SEQ ID NO: 822186 - DNA, 25 bp, Homo sapien
gacacggtatgacattgtagaattc

SEQ ID NO: 822187 - DNA, 25 bp, Homo sapien
ctgcaagcacgaaagtagaaccgaa

SEQ ID NO: 822188 - DNA, 25 bp, Homo sapien
agtagaaccgaacattacacaacat

SEQ ID NO: 822189 - DNA, 25 bp, Homo sapien
gcacgaaagtagaaccgaacattac

SEQ ID NO: 822190 - DNA, 25 bp, Homo sapien
gaaagtagaaccgaacattacacaa

SEQ ID NO: 822191 - DNA, 25 bp, Homo sapien
aaagcagtgagcgaggcatctgcct

SEQ ID NO: 822192 - DNA, 25 bp, Homo sapien
taaaggaagcttggcctgaacattc

SEQ ID NO: 822193 - DNA, 25 bp, Homo sapien
tcataattccgataaaggaagcttg

SEQ ID NO: 822194 - DNA, 25 bp, Homo sapien
tggcaaagcagtgagcgaggcatct

SEQ ID NO: 822195 - DNA, 25 bp, Homo sapien
aatggctccggctcccaatgttgca

SEQ ID NO: 822196 - DNA, 25 bp, Homo sapien
gagaagactgtagatttgcactcag

SEQ ID NO: 822197 - DNA, 25 bp, Homo sapien
taggcatctggtcttatagtgacag

SEQ ID NO: 822198 - DNA, 25 bp, Homo sapien
tagtgctcgtcatctctcagaaatg

SEQ ID NO: 822199 - DNA, 25 bp, Homo sapien
tctgcagtgatagtgcccaagaaaa

SEQ ID NO: 822200 - DNA, 25 bp, Homo sapien
ctggtgattgagttccctgtttcca

SEQ ID NO: 822201 - DNA, 25 bp, Homo sapien
cactatatggtttggtgcccaggga

SEQ ID NO: 822202 - DNA, 25 bp, Homo sapien
gcttctgcagtgatagtgcccaaga

SEQ ID NO: 822203 - DNA, 25 bp, Homo sapien
accgcgctttctagattccaggcca

SEQ ID NO: 822204 - DNA, 25 bp, Homo sapien
ctccattgcaggtaggcaccgcgct

SEQ ID NO: 822205 - DNA, 25 bp, Homo sapien
gcacagatggtttaagggtgcagct

SEQ ID NO: 822206 - DNA, 25 bp, Homo sapien
aggccaccaagcacagatggtttaa

SEQ ID NO: 822207 - DNA, 25 bp, Homo sapien
catataaatctcgtccttaacacca

SEQ ID NO: 822208 - DNA, 25 bp, Homo sapien
tataaatctcgtccttaacaccaaa

SEQ ID NO: 822209 - DNA, 25 bp, Homo sapien
atataaatctcgtccttaacaccaa

SEQ ID NO: 822210 - DNA, 25 bp, Homo sapien
tcttgttcacgaatcactcccactc

SEQ ID NO: 822211 - DNA, 25 bp, Homo sapien
ttgttcacgaatcactcccactccc

SEQ ID NO: 822212 - DNA, 25 bp, Homo sapien
cttgttcacgaatcactcccactcc

SEQ ID NO: 822213 - DNA, 25 bp, Homo sapien
cctcttgttcacgaatcactcccac

SEQ ID NO: 822214 - DNA, 25 bp, Homo sapien
tgtaacagacacgaacaagggaacc

SEQ ID NO: 822215 - DNA, 25 bp, Homo sapien
ctgtaacagacacgaacaagggaac

SEQ ID NO: 822216 - DNA, 25 bp, Homo sapien
cagacacgaacaagggaacccccat

SEQ ID NO: 822217 - DNA, 25 bp, Homo sapien
actgtaacagacacgaacaagggaa

SEQ ID NO: 822218 - DNA, 25 bp, Homo sapien
agagaaagttatcttcactcttaga

SEQ ID NO: 822219 - DNA, 25 bp, Homo sapien
gagaaagttatcttcactcttagaa

SEQ ID NO: 822220 - DNA, 25 bp, Homo sapien
aagttatcttcactcttagaatttt

SEQ ID NO: 822221 - DNA, 25 bp, Homo sapien
gaaagttatcttcactcttagaatt

SEQ ID NO: 822222 - DNA, 25 bp, Homo sapien
aacacatcctctactatggatctac

SEQ ID NO: 822223 - DNA, 25 bp, Homo sapien
aaacacatcctctactatggatcta

SEQ ID NO: 822224 - DNA, 25 bp, Homo sapien
aaaacacatcctctactatggatct

SEQ ID NO: 822225 - DNA, 25 bp, Homo sapien
taccaggcagaatgtaaatgaagga

SEQ ID NO: 822226 - DNA, 25 bp, Homo sapien
ccagaggtaggcgatggtgtaaaac

SEQ ID NO: 822227 - DNA, 25 bp, Homo sapien
tatttacagggtaggcaataccagg

SEQ ID NO: 822228 - DNA, 25 bp, Homo sapien
catgtcaggagccttatttacaggg

SEQ ID NO: 822229 - DNA, 25 bp, Homo sapien
agagaggatattctttattagaata

SEQ ID NO: 822230 - DNA, 25 bp, Homo sapien
agctagggtctgacacgagattcca

SEQ ID NO: 822231 - DNA, 25 bp, Homo sapien
tagggtctgacacgagattccacat

SEQ ID NO: 822232 - DNA, 25 bp, Homo sapien
ggagctagggtctgacacgagattc

SEQ ID NO: 822233 - DNA, 25 bp, Homo sapien
tttttcttggcagttcataaataat

SEQ ID NO: 822234 - DNA, 25 bp, Homo sapien
ctggaagatctgttcctcttcttat

SEQ ID NO: 822235 - DNA, 25 bp, Homo sapien
ttggcagttcataaataatctgcat

SEQ ID NO: 822236 - DNA, 25 bp, Homo sapien
ttcttggcagttcataaataatctg

SEQ ID NO: 822237 - DNA, 25 bp, Homo sapien
attagtcttagatttccttaccagg

SEQ ID NO: 822238 - DNA, 25 bp, Homo sapien
ttattagtcttagatttccttacca

SEQ ID NO: 822239 - DNA, 25 bp, Homo sapien
tattattagtcttagatttccttac

SEQ ID NO: 822240 - DNA, 25 bp, Homo sapien
gctattattagtcttagatttcctt

SEQ ID NO: 822241 - DNA, 25 bp, Homo sapien
tgtggcttggactgcattgtggtcc

SEQ ID NO: 822242 - DNA, 25 bp, Homo sapien
caaatctggcataaatggagtgaca

SEQ ID NO: 822243 - DNA, 25 bp, Homo sapien
ccctctttgacttggttgacatcct

SEQ ID NO: 822244 - DNA, 25 bp, Homo sapien
tgtagccaatccttatggcaggatg

SEQ ID NO: 822245 - DNA, 25 bp, Homo sapien
cctgctgatagtttcagtcaatgcc

SEQ ID NO: 822246 - DNA, 25 bp, Homo sapien
gtttcagtcaatgccacccacatct

SEQ ID NO: 822247 - DNA, 25 bp, Homo sapien
gtctgatttcacatgttctccacca

SEQ ID NO: 822248 - DNA, 25 bp, Homo sapien
gctgcccctgattctctctttaaag

SEQ ID NO: 822249 - DNA, 25 bp, Homo sapien
ttgtttggccatctctgttgcctca

SEQ ID NO: 822250 - DNA, 25 bp, Homo sapien
tgcctcagcccaaccttgcctctaa

SEQ ID NO: 822251 - DNA, 25 bp, Homo sapien
catctctgttgcctcagcccaacct

SEQ ID NO: 822252 - DNA, 25 bp, Homo sapien
gttgtttggccatctctgttgcctc

SEQ ID NO: 822253 - DNA, 25 bp, Homo sapien
gctgtgaaatattggtgaagctccc

SEQ ID NO: 822254 - DNA, 25 bp, Homo sapien
gctcttatgttgaagtccacagctg

SEQ ID NO: 822255 - DNA, 25 bp, Homo sapien
tgtgaaatattggtgaagctcccat

SEQ ID NO: 822256 - DNA, 25 bp, Homo sapien
tgtgctttaaggtaacgcaggctct

SEQ ID NO: 822257 - DNA, 25 bp, Homo sapien
cttaggacctgggtgagaagggcat

SEQ ID NO: 822258 - DNA, 25 bp, Homo sapien
agggcatcttgtgtctctgaagaca

SEQ ID NO: 822259 - DNA, 25 bp, Homo sapien
ggtgagaagggcatcttgtgtctct

SEQ ID NO: 822260 - DNA, 25 bp, Homo sapien
tttcagctgcttggtaccgaggtgg

SEQ ID NO: 822261 - DNA, 25 bp, Homo sapien
cgtctctgatttcccaaacctaacg

SEQ ID NO: 822262 - DNA, 25 bp, Homo sapien
gatacatagttccaccgtctctgat

SEQ ID NO: 822263 - DNA, 25 bp, Homo sapien
ctaacggttgtgaatggccaattgg

SEQ ID NO: 822264 - DNA, 25 bp, Homo sapien
tccacgtcttgccagaaatatcttt

SEQ ID NO: 822265 - DNA, 25 bp, Homo sapien
ccacgtcttgccagaaatatctttg

SEQ ID NO: 822266 - DNA, 25 bp, Homo sapien
tgcattttttcattgaagggactct

SEQ ID NO: 822267 - DNA, 25 bp, Homo sapien
tcttgcattttttcattgaagggac

SEQ ID NO: 822268 - DNA, 25 bp, Homo sapien
aagccaactaggtccaacaggaagt

SEQ ID NO: 822269 - DNA, 25 bp, Homo sapien
aacaagccaactaggtccaacagga

SEQ ID NO: 822270 - DNA, 25 bp, Homo sapien
caagccaactaggtccaacaggaag

SEQ ID NO: 822271 - DNA, 25 bp, Homo sapien
ttaacaagccaactaggtccaacag

SEQ ID NO: 822272 - DNA, 25 bp, Homo sapien
tccatagtgttgatcgccagggcac

SEQ ID NO: 822273 - DNA, 25 bp, Homo sapien
tctagttgcctggagtgataacctg

SEQ ID NO: 822274 - DNA, 25 bp, Homo sapien
gtgaactcccaactaacgagaatgg

SEQ ID NO: 822275 - DNA, 25 bp, Homo sapien
tgctctctagttgcagaagcctgct

SEQ ID NO: 822276 - DNA, 25 bp, Homo sapien
gctcagtatctccagaaacaatgtt

SEQ ID NO: 822277 - DNA, 25 bp, Homo sapien
tgctcagtatctccagaaacaatgt

SEQ ID NO: 822278 - DNA, 25 bp, Homo sapien
atgctgttaatcagtctttttccaa

SEQ ID NO: 822279 - DNA, 25 bp, Homo sapien
caaatgctgttaatcagtctttttc

SEQ ID NO: 822280 - DNA, 25 bp, Homo sapien
gctgttaatcagtctttttccaata

SEQ ID NO: 822281 - DNA, 25 bp, Homo sapien
tgcacaaatgctgttaatcagtctt

SEQ ID NO: 822282 - DNA, 25 bp, Homo sapien
tgtccaacatgagaccaccttttaa

SEQ ID NO: 822283 - DNA, 25 bp, Homo sapien
caacatgagaccaccttttaatagt

SEQ ID NO: 822284 - DNA, 25 bp, Homo sapien
gagactgtccaacatgagaccacct

SEQ ID NO: 822285 - DNA, 25 bp, Homo sapien
gagacaaggtcattaatcagaagag

SEQ ID NO: 822286 - DNA, 25 bp, Homo sapien
tggggatgtagccctgaatatgatg

SEQ ID NO: 822287 - DNA, 25 bp, Homo sapien
tgtggggatgtagccctgaatatga

SEQ ID NO: 822288 - DNA, 25 bp, Homo sapien
gtggggatgtagccctgaatatgat

SEQ ID NO: 822289 - DNA, 25 bp, Homo sapien
ctagacggaagacataagggatttt

SEQ ID NO: 822290 - DNA, 25 bp, Homo sapien
tctttttggcttcgacagatgtcca

SEQ ID NO: 822291 - DNA, 25 bp, Homo sapien
gcaggaggacctttccaagaactta

SEQ ID NO: 822292 - DNA, 25 bp, Homo sapien
ccagctggtcatgactggctccaca

SEQ ID NO: 822293 - DNA, 25 bp, Homo sapien
ggaaagaaggccaattttatgcagg

SEQ ID NO: 822294 - DNA, 25 bp, Homo sapien
ctggcaggaacaggcgactctgaga

SEQ ID NO: 822295 - DNA, 25 bp, Homo sapien
gaaggccaattttatgcaggtttct

SEQ ID NO: 822296 - DNA, 25 bp, Homo sapien
ggcgactctgagatcatcattttca

SEQ ID NO: 822297 - DNA, 25 bp, Homo sapien
ttcagctctgagtcagcaacaaact

SEQ ID NO: 822298 - DNA, 25 bp, Homo sapien
tcagctctgagtcagcaacaaactc

SEQ ID NO: 822299 - DNA, 25 bp, Homo sapien
tttcagctctgagtcagcaacaaac

SEQ ID NO: 822300 - DNA, 25 bp, Homo sapien
ctttcagctctgagtcagcaacaaa

SEQ ID NO: 822301 - DNA, 25 bp, Homo sapien
tgtgcttaagcacaacagtttcttt

SEQ ID NO: 822302 - DNA, 25 bp, Homo sapien
tgcagtgctgaatcttagacactga

SEQ ID NO: 822303 - DNA, 25 bp, Homo sapien
tggccttgtgagagcggcccattgt

SEQ ID NO: 822304 - DNA, 25 bp, Homo sapien
ttagacactgaagacagcctctctt

SEQ ID NO: 822305 - DNA, 25 bp, Homo sapien
cataaacgtaagcttccaccagtca

SEQ ID NO: 822306 - DNA, 25 bp, Homo sapien
accactagtggactgagaaaatgca

SEQ ID NO: 822307 - DNA, 25 bp, Homo sapien
tagtggactgagaaaatgcaaggcc

SEQ ID NO: 822308 - DNA, 25 bp, Homo sapien
aaggcaagcataaacgtaagcttcc

SEQ ID NO: 822309 - DNA, 25 bp, Homo sapien
attttcagttgtacccataagggag

SEQ ID NO: 822310 - DNA, 25 bp, Homo sapien
gaactaatttgcaaagacacttata

SEQ ID NO: 822311 - DNA, 25 bp, Homo sapien
gaatgagagcttaaaagaaccgtgg

SEQ ID NO: 822312 - DNA, 25 bp, Homo sapien
catgcttcccaataaggacggtatt

SEQ ID NO: 822313 - DNA, 25 bp, Homo sapien
atcacattgtatcttttacccaaca

SEQ ID NO: 822314 - DNA, 25 bp, Homo sapien
ccaagttctgtatcacattgtatct

SEQ ID NO: 822315 - DNA, 25 bp, Homo sapien
tgtatcacattgtatcttttaccca

SEQ ID NO: 822316 - DNA, 25 bp, Homo sapien
tgttaccaagttctgtatcacattg

SEQ ID NO: 822317 - DNA, 25 bp, Homo sapien
cttctctcagacgtaggctgctgcc

SEQ ID NO: 822318 - DNA, 25 bp, Homo sapien
ctctcgtcgtttccctgaaataggg

SEQ ID NO: 822319 - DNA, 25 bp, Homo sapien
tcatcagggttgactccactgccac

SEQ ID NO: 822320 - DNA, 25 bp, Homo sapien
aaatagggaaactgcctgcaaccct

SEQ ID NO: 822321 - DNA, 25 bp, Homo sapien
gcaggtctagtggattggacgcaga

SEQ ID NO: 822322 - DNA, 25 bp, Homo sapien
aggcaggtctagtggattggacgca

SEQ ID NO: 822323 - DNA, 25 bp, Homo sapien
aggtctagtggattggacgcagatg

SEQ ID NO: 822324 - DNA, 25 bp, Homo sapien
caggtctagtggattggacgcagat

SEQ ID NO: 822325 - DNA, 25 bp, Homo sapien
tccggcgtgcgggactttgcctctt

SEQ ID NO: 822326 - DNA, 25 bp, Homo sapien
gaggaataatctggagaaagccgca

SEQ ID NO: 822327 - DNA, 25 bp, Homo sapien
ggccgctagccgaggcgcatgtcct

SEQ ID NO: 822328 - DNA, 25 bp, Homo sapien
aatctggagaaagccgcacggtggt

SEQ ID NO: 822329 - DNA, 25 bp, Homo sapien
ctctgcttctcagagtggagaggga

SEQ ID NO: 822330 - DNA, 25 bp, Homo sapien
tcctccagtgtatagatcgaagtga

SEQ ID NO: 822331 - DNA, 25 bp, Homo sapien
tcgaagtgagatcgtgcgtgcgtat

SEQ ID NO: 822332 - DNA, 25 bp, Homo sapien
ttccagacggtctgcggcccctcgc

SEQ ID NO: 822333 - DNA, 25 bp, Homo sapien
cgaggaaacgctttaggattcgcat

SEQ ID NO: 822334 - DNA, 25 bp, Homo sapien
agcgaggaaacgctttaggattcgc

SEQ ID NO: 822335 - DNA, 25 bp, Homo sapien
aggagctgaatgcaagcgaggaaac

SEQ ID NO: 822336 - DNA, 25 bp, Homo sapien
gcaagcgaggaaacgctttaggatt

SEQ ID NO: 822337 - DNA, 25 bp, Homo sapien
cttccctccaagttatcaacttctg

SEQ ID NO: 822338 - DNA, 25 bp, Homo sapien
tccctgtgttccatgctacatcttc

SEQ ID NO: 822339 - DNA, 25 bp, Homo sapien
ggatatttctctgattccctgtgtt

SEQ ID NO: 822340 - DNA, 25 bp, Homo sapien
tcaagcgatcatcctctgtttctct

SEQ ID NO: 822341 - DNA, 25 bp, Homo sapien
cagacacgcaatgtgagtgctgtgc

SEQ ID NO: 822342 - DNA, 25 bp, Homo sapien
gacacgcaatgtgagtgctgtgcca

SEQ ID NO: 822343 - DNA, 25 bp, Homo sapien
catgaggagaccagactccttgaag

SEQ ID NO: 822344 - DNA, 25 bp, Homo sapien
ttagagcccagtggctatatcccat

SEQ ID NO: 822345 - DNA, 25 bp, Homo sapien
tcaaaatctatatagactcttggac

SEQ ID NO: 822346 - DNA, 25 bp, Homo sapien
tccatgattgtgtgccaattcagtt

SEQ ID NO: 822347 - DNA, 25 bp, Homo sapien
atgagtaaaagcccttaggaagttg

SEQ ID NO: 822348 - DNA, 25 bp, Homo sapien
ttgtgtgccaattcagttcaaaatc

SEQ ID NO: 822349 - DNA, 25 bp, Homo sapien
cttctttgtggacttgcggctaagt

SEQ ID NO: 822350 - DNA, 25 bp, Homo sapien
caaactgaagagtgcaatttctgca

SEQ ID NO: 822351 - DNA, 25 bp, Homo sapien
aatttctgcattgtatctgtaaagg

SEQ ID NO: 822352 - DNA, 25 bp, Homo sapien
gcggctaagttctggcaaactgaag

SEQ ID NO: 822353 - DNA, 25 bp, Homo sapien
tagcttatgagatcaattctaccca

SEQ ID NO: 822354 - DNA, 25 bp, Homo sapien
gagtcgtcttgaagactctcatatg

SEQ ID NO: 822355 - DNA, 25 bp, Homo sapien
caaatgggctgcaaaaattctaatt

SEQ ID NO: 822356 - DNA, 25 bp, Homo sapien
tcataaggccaatctgagtcgtctt

SEQ ID NO: 822357 - DNA, 25 bp, Homo sapien
tccaagtgcaacgaaataatatgta

SEQ ID NO: 822358 - DNA, 25 bp, Homo sapien
ccaagtgcaacgaaataatatgtat

SEQ ID NO: 822359 - DNA, 25 bp, Homo sapien
ttttgtttttgcaccgagaggactg

SEQ ID NO: 822360 - DNA, 25 bp, Homo sapien
tttgtttttgcaccgagaggactga

SEQ ID NO: 822361 - DNA, 25 bp, Homo sapien
gagaggactgatagctctctatata

SEQ ID NO: 822362 - DNA, 25 bp, Homo sapien
ccgagaggactgatagctctctata

SEQ ID NO: 822363 - DNA, 25 bp, Homo sapien
cagcatctagtttcagttcacccct

SEQ ID NO: 822364 - DNA, 25 bp, Homo sapien
gtcttcagcatctagtttcagttca

SEQ ID NO: 822365 - DNA, 25 bp, Homo sapien
ttcagcatctagtttcagttcaccc

SEQ ID NO: 822366 - DNA, 25 bp, Homo sapien
tcttcagcatctagtttcagttcac

SEQ ID NO: 822367 - DNA, 25 bp, Homo sapien
gaggtgcatgcactcttgctaagca

SEQ ID NO: 822368 - DNA, 25 bp, Homo sapien
ccttctggggtgtccttgattggca

SEQ ID NO: 822369 - DNA, 25 bp, Homo sapien
gtgagatacttgaaaaacggctcaa

SEQ ID NO: 822370 - DNA, 25 bp, Homo sapien
tgaaaaacggctcaatctcccttgt

SEQ ID NO: 822371 - DNA, 25 bp, Homo sapien
tcctttgtccacgactcttctcata

SEQ ID NO: 822372 - DNA, 25 bp, Homo sapien
ttgtccacgactcttctcataaggc

SEQ ID NO: 822373 - DNA, 25 bp, Homo sapien
tctcctcgtctcctttgtccacgac

SEQ ID NO: 822374 - DNA, 25 bp, Homo sapien
tcgtctcctttgtccacgactcttc

SEQ ID NO: 822375 - DNA, 25 bp, Homo sapien
tgattctcatgctcatgctccaatt

SEQ ID NO: 822376 - DNA, 25 bp, Homo sapien
gctccaatttcatatctgcatggcc

SEQ ID NO: 822377 - DNA, 25 bp, Homo sapien
tctgcatggccttgttgaagctgaa

SEQ ID NO: 822378 - DNA, 25 bp, Homo sapien
tcaatttccacttgttgcagatatt

SEQ ID NO: 822379 - DNA, 25 bp, Homo sapien
tgtgtgctcaggtcattttgattgc

SEQ ID NO: 822380 - DNA, 25 bp, Homo sapien
ttctcaggaccaattgctaattttc

SEQ ID NO: 822381 - DNA, 25 bp, Homo sapien
tattcatgactgttgagcaaagtag

SEQ ID NO: 822382 - DNA, 25 bp, Homo sapien
agttctattctctccaaacctagag

SEQ ID NO: 822383 - DNA, 25 bp, Homo sapien
cataataaatgacttaatcatgcag

SEQ ID NO: 822384 - DNA, 25 bp, Homo sapien
taataaatgacttaatcatgcagta

SEQ ID NO: 822385 - DNA, 25 bp, Homo sapien
acttgagatgcactggtggaccccc

SEQ ID NO: 822386 - DNA, 25 bp, Homo sapien
tgagatgcactggtggaccccccag

SEQ ID NO: 822387 - DNA, 25 bp, Homo sapien
tagcagtaattgtagacgtaacaag

SEQ ID NO: 822388 - DNA, 25 bp, Homo sapien
acttagcagtaattgtagacgtaac

SEQ ID NO: 822389 - DNA, 25 bp, Homo sapien
gggaaacttagcagtaattgtagac

SEQ ID NO: 822390 - DNA, 25 bp, Homo sapien
cagtaattgtagacgtaacaagaaa

SEQ ID NO: 822391 - DNA, 25 bp, Homo sapien
tcacaacatgcttatcttcaagtct

SEQ ID NO: 822392 - DNA, 25 bp, Homo sapien
cttcaagtcttgtaattggtgacct

SEQ ID NO: 822393 - DNA, 25 bp, Homo sapien
cactgggtcttactgggccactgct

SEQ ID NO: 822394 - DNA, 25 bp, Homo sapien
cctatcttgaccaatgacagcactg

SEQ ID NO: 822395 - DNA, 25 bp, Homo sapien
gtataggaccagccaatctcttcaa

SEQ ID NO: 822396 - DNA, 25 bp, Homo sapien
ataggaccagccaatctcttcaaca

SEQ ID NO: 822397 - DNA, 25 bp, Homo sapien
tataggaccagccaatctcttcaac

SEQ ID NO: 822398 - DNA, 25 bp, Homo sapien
tgtataggaccagccaatctcttca

SEQ ID NO: 822399 - DNA, 25 bp, Homo sapien
tttaagtggctattcctgagggaaa

SEQ ID NO: 822400 - DNA, 25 bp, Homo sapien
ggactatagcagttttttaagtggc

SEQ ID NO: 822401 - DNA, 25 bp, Homo sapien
caatggattagtaagcagattaact

SEQ ID NO: 822402 - DNA, 25 bp, Homo sapien
gattaactatcatgatcagcaggaa

SEQ ID NO: 822403 - DNA, 25 bp, Homo sapien
gggattagaagcatgcgccaacatg

SEQ ID NO: 822404 - DNA, 25 bp, Homo sapien
caacatgcctggctaatttttttgt

SEQ ID NO: 822405 - DNA, 25 bp, Homo sapien
attagaagcatgcgccaacatgcct

SEQ ID NO: 822406 - DNA, 25 bp, Homo sapien
ctgaccttgtgatctacccacctca

SEQ ID NO: 822407 - DNA, 25 bp, Homo sapien
ggtctacctcatacccatctgcaga

SEQ ID NO: 822408 - DNA, 25 bp, Homo sapien
gtacaatattacagaggtctacctc

SEQ ID NO: 822409 - DNA, 25 bp, Homo sapien
catctgcagagtactccacagtcga

SEQ ID NO: 822410 - DNA, 25 bp, Homo sapien
ctgaagaggtatagtgcaaatggct

SEQ ID NO: 822411 - DNA, 25 bp, Homo sapien
taacagtctataacagtttggatgc

SEQ ID NO: 822412 - DNA, 25 bp, Homo sapien
cagaatattctgtggtagttagaag

SEQ ID NO: 822413 - DNA, 25 bp, Homo sapien
tgctggtgtagtaagggccacagac

SEQ ID NO: 822414 - DNA, 25 bp, Homo sapien
ggtagttagaagctctataacagtc

SEQ ID NO: 822415 - DNA, 25 bp, Homo sapien
tgtaatcattgcagcacctgctgag

SEQ ID NO: 822416 - DNA, 25 bp, Homo sapien
gacataaacctgtcagaagtcctga

SEQ ID NO: 822417 - DNA, 25 bp, Homo sapien
cctgctgagcttggtactaacatta

SEQ ID NO: 822418 - DNA, 25 bp, Homo sapien
tatgaactccccagaactatgtgtg

SEQ ID NO: 822419 - DNA, 25 bp, Homo sapien
tgaaaaggctggtatagcagcaggc

SEQ ID NO: 822420 - DNA, 25 bp, Homo sapien
aagggatgtgctctggcctgcagaa

SEQ ID NO: 822421 - DNA, 25 bp, Homo sapien
taggtgggccagctcattaaagcca

SEQ ID NO: 822422 - DNA, 25 bp, Homo sapien
cacttgaagaaggtgcatagtctgc

SEQ ID NO: 822423 - DNA, 25 bp, Homo sapien
gagtgagacatgcaacctgttatgc

SEQ ID NO: 822424 - DNA, 25 bp, Homo sapien
tgaggtactacattctgaacaaggg

SEQ ID NO: 822425 - DNA, 25 bp, Homo sapien
gactctaggcaaatgactacgtctc

SEQ ID NO: 822426 - DNA, 25 bp, Homo sapien
cacttcctgagcacacatgaggtac

SEQ ID NO: 822427 - DNA, 25 bp, Homo sapien
aataaagggcacttgcaattccact

SEQ ID NO: 822428 - DNA, 25 bp, Homo sapien
tggccagggccctaggagtcaaaac

SEQ ID NO: 822429 - DNA, 25 bp, Homo sapien
gaagaccatacacaaggctttggaa

SEQ ID NO: 822430 - DNA, 25 bp, Homo sapien
cacaagaactcaaagcctaacagct

SEQ ID NO: 822431 - DNA, 25 bp, Homo sapien
gatgtataaaaagctagagaaccgg

SEQ ID NO: 822432 - DNA, 25 bp, Homo sapien
agtggaaatcagtaggacgagtgtg

SEQ ID NO: 822433 - DNA, 25 bp, Homo sapien
gacgagtgtgagtaggatgtataaa

SEQ ID NO: 822434 - DNA, 25 bp, Homo sapien
gttctggcgagaggatgctgaagct

SEQ ID NO: 822435 - DNA, 25 bp, Homo sapien
gatggcgtgcctcaaaagagcagtg

SEQ ID NO: 822436 - DNA, 25 bp, Homo sapien
cggaatcccattaattggtcaccaa

SEQ ID NO: 822437 - DNA, 25 bp, Homo sapien
tggtcaccaatgcatcaggcaatct

SEQ ID NO: 822438 - DNA, 25 bp, Homo sapien
caatattcctgatggacaagcagag

SEQ ID NO: 822439 - DNA, 25 bp, Homo sapien
tgcgaaaggagatacagccaaagtg

SEQ ID NO: 822440 - DNA, 25 bp, Homo sapien
gatgcgaaaggagatacagccaaag

SEQ ID NO: 822441 - DNA, 25 bp, Homo sapien
gaaaggagatacagccaaagtgaag

SEQ ID NO: 822442 - DNA, 25 bp, Homo sapien
ggatgcgaaaggagatacagccaaa

SEQ ID NO: 822443 - DNA, 25 bp, Homo sapien
ttcatcaatattgataggagattgt

SEQ ID NO: 822444 - DNA, 25 bp, Homo sapien
catcaatattgataggagattgttt

SEQ ID NO: 822445 - DNA, 25 bp, Homo sapien
gattgttttgggctattacatgttg

SEQ ID NO: 822446 - DNA, 25 bp, Homo sapien
tgggctattacatgttggatatttc

SEQ ID NO: 822447 - DNA, 25 bp, Homo sapien
tctgaaactcctccgctgacacggt

SEQ ID NO: 822448 - DNA, 25 bp, Homo sapien
cccagtgaaaagttatcttgcttgc

SEQ ID NO: 822449 - DNA, 25 bp, Homo sapien
agatgacatattgcattttccccag

SEQ ID NO: 822450 - DNA, 25 bp, Homo sapien
tctaaactatgctctgatccatcag

SEQ ID NO: 822451 - DNA, 25 bp, Homo sapien
aaatcggtccgcatcaaagcagtag

SEQ ID NO: 822452 - DNA, 25 bp, Homo sapien
tcaaaacttgaaaatcggtccgcat

SEQ ID NO: 822453 - DNA, 25 bp, Homo sapien
ttgaaaatcggtccgcatcaaagca

SEQ ID NO: 822454 - DNA, 25 bp, Homo sapien
tccgcatcaaagcagtagatttgca

SEQ ID NO: 822455 - DNA, 25 bp, Homo sapien
aacgactaacactttcgactccatc

SEQ ID NO: 822456 - DNA, 25 bp, Homo sapien
tcaataatcgctttgaaatccaaat

SEQ ID NO: 822457 - DNA, 25 bp, Homo sapien
aaacgactaacactttcgactccat

SEQ ID NO: 822458 - DNA, 25 bp, Homo sapien
ctccatcaataatcgctttgaaatc

SEQ ID NO: 822459 - DNA, 25 bp, Homo sapien
gaatccgtcctcagctaatccaaga

SEQ ID NO: 822460 - DNA, 25 bp, Homo sapien
ctaatacaagtgaggtagagagaca

SEQ ID NO: 822461 - DNA, 25 bp, Homo sapien
tctcatgctgccatgtaatacatgc

SEQ ID NO: 822462 - DNA, 25 bp, Homo sapien
taagtgttccgcagtttctcctttg

SEQ ID NO: 822463 - DNA, 25 bp, Homo sapien
cctttgatcctcaaggttgccagca

SEQ ID NO: 822464 - DNA, 25 bp, Homo sapien
tgcctaaagacaagtcccacctttg

SEQ ID NO: 822465 - DNA, 25 bp, Homo sapien
tatggtgaatacagagccaaatttg

SEQ ID NO: 822466 - DNA, 25 bp, Homo sapien
agcaatgtctgattgccaatatggg

SEQ ID NO: 822467 - DNA, 25 bp, Homo sapien
aactcgaaagattgcaactaacgtc

SEQ ID NO: 822468 - DNA, 25 bp, Homo sapien
tccctgcaactcgaaagattgcaac

SEQ ID NO: 822469 - DNA, 25 bp, Homo sapien
gaaagattgcaactaacgtcttttg

SEQ ID NO: 822470 - DNA, 25 bp, Homo sapien
ttgcaactaacgtcttttgtgggct

SEQ ID NO: 822471 - DNA, 25 bp, Homo sapien
gcagtcacctggtctctcttacgga

SEQ ID NO: 822472 - DNA, 25 bp, Homo sapien
gaaatgaattgaccccaggagagcc

SEQ ID NO: 822473 - DNA, 25 bp, Homo sapien
aattacctccttaactgacaagtgg

SEQ ID NO: 822474 - DNA, 25 bp, Homo sapien
gccagaaattgactcgctgctaagt

SEQ ID NO: 822475 - DNA, 25 bp, Homo sapien
tgagtttggcagaaggttcaacagt

SEQ ID NO: 822476 - DNA, 25 bp, Homo sapien
tatgaatggatctaaagcagcctgc

SEQ ID NO: 822477 - DNA, 25 bp, Homo sapien
agggaggagatgtcaatgagccatt

SEQ ID NO: 822478 - DNA, 25 bp, Homo sapien
ccagtcaactgtgtctgtgcaggga

SEQ ID NO: 822479 - DNA, 25 bp, Homo sapien
gagaacttgtactgttgctctcgaa

SEQ ID NO: 822480 - DNA, 25 bp, Homo sapien
tgtaagtagtccatcagcatgacat

SEQ ID NO: 822481 - DNA, 25 bp, Homo sapien
tcagcatgacataaccagattgttg

SEQ ID NO: 822482 - DNA, 25 bp, Homo sapien
ggaaaacacctgtctagagaacttg

SEQ ID NO: 822483 - DNA, 25 bp, Homo sapien
aaagccaacaaacattgcatctagt

SEQ ID NO: 822484 - DNA, 25 bp, Homo sapien
aaaagccaacaaacattgcatctag

SEQ ID NO: 822485 - DNA, 25 bp, Homo sapien
aagccaacaaacattgcatctagtg

SEQ ID NO: 822486 - DNA, 25 bp, Homo sapien
agccaacaaacattgcatctagtga

SEQ ID NO: 822487 - DNA, 25 bp, Homo sapien
aaggctggtataattctctgggtca

SEQ ID NO: 822488 - DNA, 25 bp, Homo sapien
gactcgaggtctttcccatgtaaca

SEQ ID NO: 822489 - DNA, 25 bp, Homo sapien
catggtatcataaacgactcgaggt

SEQ ID NO: 822490 - DNA, 25 bp, Homo sapien
catccaactgctggtacaaaactgc

SEQ ID NO: 822491 - DNA, 25 bp, Homo sapien
catcaaattcataaattagtactac

SEQ ID NO: 822492 - DNA, 25 bp, Homo sapien
gcatttgcaaacaaggagcaatgtg

SEQ ID NO: 822493 - DNA, 25 bp, Homo sapien
ttgacaatatatatgcaagaacagt

SEQ ID NO: 822494 - DNA, 25 bp, Homo sapien
tgaaaaagtgaacaactaagttatc

SEQ ID NO: 822495 - DNA, 25 bp, Homo sapien
gaacataactcatattgggtagcaa

SEQ ID NO: 822496 - DNA, 25 bp, Homo sapien
catattgggtagcaaattattgaga

SEQ ID NO: 822497 - DNA, 25 bp, Homo sapien
ggtagcaaattattgagaatagcac

SEQ ID NO: 822498 - DNA, 25 bp, Homo sapien
cataactcatattgggtagcaaatt

SEQ ID NO: 822499 - DNA, 25 bp, Homo sapien
taggcatgtcgacaatcagttggtc

SEQ ID NO: 822500 - DNA, 25 bp, Homo sapien
catataagccattagtgcatatggc

SEQ ID NO: 822501 - DNA, 25 bp, Homo sapien
aggattatcagtaggcatgtcgaca

SEQ ID NO: 822502 - DNA, 25 bp, Homo sapien
tcagttggtcgctgtattttccata

SEQ ID NO: 822503 - DNA, 25 bp, Homo sapien
caactatttcggcctttgtggattt

SEQ ID NO: 822504 - DNA, 25 bp, Homo sapien
ttattcaactatttcggcctttgtg

SEQ ID NO: 822505 - DNA, 25 bp, Homo sapien
tcaactatttcggcctttgtggatt

SEQ ID NO: 822506 - DNA, 25 bp, Homo sapien
attcaactatttcggcctttgtgga

SEQ ID NO: 822507 - DNA, 25 bp, Homo sapien
cttcagttccaattaattcagggaa

SEQ ID NO: 822508 - DNA, 25 bp, Homo sapien
tcttcagttccaattaattcaggga

SEQ ID NO: 822509 - DNA, 25 bp, Homo sapien
tcttcatatcttacactgccaatca

SEQ ID NO: 822510 - DNA, 25 bp, Homo sapien
atcttcatatcttacactgccaatc

SEQ ID NO: 822511 - DNA, 25 bp, Homo sapien
aatcttcatatcttacactgccaat

SEQ ID NO: 822512 - DNA, 25 bp, Homo sapien
cttcatatcttacactgccaatcat

SEQ ID NO: 822513 - DNA, 25 bp, Homo sapien
ggtttgtagcactgtctctaccagg

SEQ ID NO: 822514 - DNA, 25 bp, Homo sapien
ggatcggttagtcttggcttcattg

SEQ ID NO: 822515 - DNA, 25 bp, Homo sapien
cgattgtagtgtgttgtggtagaaa

SEQ ID NO: 822516 - DNA, 25 bp, Homo sapien
ggcttcattgtatttcgtccctatg

SEQ ID NO: 822517 - DNA, 25 bp, Homo sapien
tatttaaggattctgcagtccccga

SEQ ID NO: 822518 - DNA, 25 bp, Homo sapien
cagtccccgacaagttcatatgtgg

SEQ ID NO: 822519 - DNA, 25 bp, Homo sapien
tcagtcacagtctgagaagtcaagg

SEQ ID NO: 822520 - DNA, 25 bp, Homo sapien
tcatatgtggagatctaagaacagt

SEQ ID NO: 822521 - DNA, 25 bp, Homo sapien
tgtctgtagagctaggaaaccacac

SEQ ID NO: 822522 - DNA, 25 bp, Homo sapien
cctgatccaacatcgggctgtgctg

SEQ ID NO: 822523 - DNA, 25 bp, Homo sapien
tgaccgtggagaccaaatcctgttg

SEQ ID NO: 822524 - DNA, 25 bp, Homo sapien
tctgcgagtataccacgttgaccgt

SEQ ID NO: 822525 - DNA, 25 bp, Homo sapien
tgaagcagcatgagtagtggacagc

SEQ ID NO: 822526 - DNA, 25 bp, Homo sapien
gaaatacaggcgtagcatgcaaggc

SEQ ID NO: 822527 - DNA, 25 bp, Homo sapien
caaggctgggctctaatagcaaatc

SEQ ID NO: 822528 - DNA, 25 bp, Homo sapien
caaatgacacatcgacactgggaaa

SEQ ID NO: 822529 - DNA, 25 bp, Homo sapien
tggctagggccgctaaataaggaac

SEQ ID NO: 822530 - DNA, 25 bp, Homo sapien
tcaggccctgaagaacgtgcatgca

SEQ ID NO: 822531 - DNA, 25 bp, Homo sapien
ggaaacatgcccttggtgctagaaa

SEQ ID NO: 822532 - DNA, 25 bp, Homo sapien
tgggagccctcattatcagacaagg

SEQ ID NO: 822533 - DNA, 25 bp, Homo sapien
aagcaactgttggaataccagcaaa

SEQ ID NO: 822534 - DNA, 25 bp, Homo sapien
atacaaatgtatcagaagcaactgt

SEQ ID NO: 822535 - DNA, 25 bp, Homo sapien
ctgtggggagaaacagctgtaatgg

SEQ ID NO: 822536 - DNA, 25 bp, Homo sapien
cagatttggcactatgactcagctc

SEQ ID NO: 822537 - DNA, 25 bp, Homo sapien
cggcatcagatttggcactatgact

SEQ ID NO: 822538 - DNA, 25 bp, Homo sapien
tttggcactatgactcagctcagaa

SEQ ID NO: 822539 - DNA, 25 bp, Homo sapien
aactttgttgaggttacagaaccat

SEQ ID NO: 822540 - DNA, 25 bp, Homo sapien
tcaccatcatcatcagtgtcaccat

SEQ ID NO: 822541 - DNA, 25 bp, Homo sapien
tcatcaccatcatcatcagtgtcac

SEQ ID NO: 822542 - DNA, 25 bp, Homo sapien
ccatcatcatcagtgtcaccatctt

SEQ ID NO: 822543 - DNA, 25 bp, Homo sapien
accatcatcatcagtgtcaccatct

SEQ ID NO: 822544 - DNA, 25 bp, Homo sapien
ttatgaatggataagccatcactac

SEQ ID NO: 822545 - DNA, 25 bp, Homo sapien
cttatgaatggataagccatcacta

SEQ ID NO: 822546 - DNA, 25 bp, Homo sapien
ctctataggatgagcatgacataca

SEQ ID NO: 822547 - DNA, 25 bp, Homo sapien
tgggatagcccatttgctgatggtg

SEQ ID NO: 822548 - DNA, 25 bp, Homo sapien
tgactgtctgaggatacacttgtga

SEQ ID NO: 822549 - DNA, 25 bp, Homo sapien
gctgatggtgatttaccaggacttc

SEQ ID NO: 822550 - DNA, 25 bp, Homo sapien
ggaagcagagcactaccagtctgaa

SEQ ID NO: 822551 - DNA, 25 bp, Homo sapien
ctgaggtaccttgccctgatccact

SEQ ID NO: 822552 - DNA, 25 bp, Homo sapien
gagttctcgctagtaacagatgatg

SEQ ID NO: 822553 - DNA, 25 bp, Homo sapien
tgcctctgaaacgtggaacacttct

SEQ ID NO: 822554 - DNA, 25 bp, Homo sapien
aaaactgaaatctgtggaagtctca

SEQ ID NO: 822555 - DNA, 25 bp, Homo sapien
taaaagacatcctgtagagtatgaa

SEQ ID NO: 822556 - DNA, 25 bp, Homo sapien
tcagagagaagtgcttatgtcacat

SEQ ID NO: 822557 - DNA, 25 bp, Homo sapien
gctccccaagctgatatgaatgtgg

SEQ ID NO: 822558 - DNA, 25 bp, Homo sapien
tgtattatgcaaacagaattgcccc

SEQ ID NO: 822559 - DNA, 25 bp, Homo sapien
tatcaatgtcactacctggtaagac

SEQ ID NO: 822560 - DNA, 25 bp, Homo sapien
catctggtcagtaagctaatttgca

SEQ ID NO: 822561 - DNA, 25 bp, Homo sapien
gatggtttacactgccctctttagg

SEQ ID NO: 822562 - DNA, 25 bp, Homo sapien
tatcctaattagtgggagaacacac

SEQ ID NO: 822563 - DNA, 25 bp, Homo sapien
aataatctagtatctttgggtgtca

SEQ ID NO: 822564 - DNA, 25 bp, Homo sapien
tttaagagatagacatttccaggct

SEQ ID NO: 822565 - DNA, 25 bp, Homo sapien
taattggcccctaacatgaaagcat

SEQ ID NO: 822566 - DNA, 25 bp, Homo sapien
aacacatcctgtaaattgttctgca

SEQ ID NO: 822567 - DNA, 25 bp, Homo sapien
gctgacagtgctacaaaaagccctt

SEQ ID NO: 822568 - DNA, 25 bp, Homo sapien
gatgactgagcatgagaacggtttc

SEQ ID NO: 822569 - DNA, 25 bp, Homo sapien
gaacggtttctaacattacagcatg

SEQ ID NO: 822570 - DNA, 25 bp, Homo sapien
tgtgttcagtgggaaaccaagatga

SEQ ID NO: 822571 - DNA, 25 bp, Homo sapien
gtcagggctgacacgatcacaaggg

SEQ ID NO: 822572 - DNA, 25 bp, Homo sapien
gagactcatggctactattactggc

SEQ ID NO: 822573 - DNA, 25 bp, Homo sapien
cccacaagaaccactagacagataa

SEQ ID NO: 822574 - DNA, 25 bp, Homo sapien
aacccctcagctagaccaatacgag

SEQ ID NO: 822575 - DNA, 25 bp, Homo sapien
gaatttgaagttgtagctgggttca

SEQ ID NO: 822576 - DNA, 25 bp, Homo sapien
gttaatataggaaacctcaatgccc

SEQ ID NO: 822577 - DNA, 25 bp, Homo sapien
gatatcaggcatgctaaaagcacag

SEQ ID NO: 822578 - DNA, 25 bp, Homo sapien
gcagaagagcaagtagatatcaggc

SEQ ID NO: 822579 - DNA, 25 bp, Homo sapien
taactctaggggatgtactgtcctc

SEQ ID NO: 822580 - DNA, 25 bp, Homo sapien
cctctaagtaaaagtgtgcagtctg

SEQ ID NO: 822581 - DNA, 25 bp, Homo sapien
aggtgtggatataactctaggggat

SEQ ID NO: 822582 - DNA, 25 bp, Homo sapien
ggggatgtactgtcctctaagtaaa

SEQ ID NO: 822583 - DNA, 25 bp, Homo sapien
taaggagatgcccttgaatcaccac

SEQ ID NO: 822584 - DNA, 25 bp, Homo sapien
gagtttggatctcctggactaggtc

SEQ ID NO: 822585 - DNA, 25 bp, Homo sapien
gcatattcaggtgatcaagagggaa

SEQ ID NO: 822586 - DNA, 25 bp, Homo sapien
caacagatgttcagcatttaggcca

SEQ ID NO: 822587 - DNA, 25 bp, Homo sapien
cttcagtaaacccactacttgcatg

SEQ ID NO: 822588 - DNA, 25 bp, Homo sapien
tcagtaaacccactacttgcatgta

SEQ ID NO: 822589 - DNA, 25 bp, Homo sapien
ttcagtaaacccactacttgcatgt

SEQ ID NO: 822590 - DNA, 25 bp, Homo sapien
tcttcagtaaacccactacttgcat

SEQ ID NO: 822591 - DNA, 25 bp, Homo sapien
tgtttccaccagtacaacttggctt

SEQ ID NO: 822592 - DNA, 25 bp, Homo sapien
tgcttttgcattaacactggtgtac

SEQ ID NO: 822593 - DNA, 25 bp, Homo sapien
tactagaagtgcaaatggttgcact

SEQ ID NO: 822594 - DNA, 25 bp, Homo sapien
tgtaatttggctggaaatcatgaaa

SEQ ID NO: 822595 - DNA, 25 bp, Homo sapien
tacttagctgatagttcagtgggcc

SEQ ID NO: 822596 - DNA, 25 bp, Homo sapien
aatctacttagctgatagttcagtg

SEQ ID NO: 822597 - DNA, 25 bp, Homo sapien
tctacttagctgatagttcagtggg

SEQ ID NO: 822598 - DNA, 25 bp, Homo sapien
aaaatctacttagctgatagttcag

SEQ ID NO: 822599 - DNA, 25 bp, Homo sapien
tattattccaccctacttagtactg

SEQ ID NO: 822600 - DNA, 25 bp, Homo sapien
tatagcatgcgtaacctctagcctg

SEQ ID NO: 822601 - DNA, 25 bp, Homo sapien
agtacttcaaagagggaggtccgca

SEQ ID NO: 822602 - DNA, 25 bp, Homo sapien
gattaggcttacagctcaaagtact

SEQ ID NO: 822603 - DNA, 25 bp, Homo sapien
tcaaacaacgtgccttaaaatataa

SEQ ID NO: 822604 - DNA, 25 bp, Homo sapien
ttcaaacaacgtgccttaaaatata

SEQ ID NO: 822605 - DNA, 25 bp, Homo sapien
cctaagtcaacagtacagctctgca

SEQ ID NO: 822606 - DNA, 25 bp, Homo sapien
tacctaagtcaacagtacagctctg

SEQ ID NO: 822607 - DNA, 25 bp, Homo sapien
ggcaacgatatttatgtatcgattc

SEQ ID NO: 822608 - DNA, 25 bp, Homo sapien
gattcttgtgcttgttgtctgggtg

SEQ ID NO: 822609 - DNA, 25 bp, Homo sapien
cttttcagcaagctgtgctagctta

SEQ ID NO: 822610 - DNA, 25 bp, Homo sapien
cagtcagtttgccatccttttcagc

SEQ ID NO: 822611 - DNA, 25 bp, Homo sapien
caacataattggcattgatataatc

SEQ ID NO: 822612 - DNA, 25 bp, Homo sapien
tgtgctagcttaaccctgctatgat

SEQ ID NO: 822613 - DNA, 25 bp, Homo sapien
tataagcttttggtctgttgtagcc

SEQ ID NO: 822614 - DNA, 25 bp, Homo sapien
ggccttgggcagcaatataagcttt

SEQ ID NO: 822615 - DNA, 25 bp, Homo sapien
ccacgaggtttgttatcatgacaat

SEQ ID NO: 822616 - DNA, 25 bp, Homo sapien
cctttctccacgaggtttgttatca

SEQ ID NO: 822617 - DNA, 25 bp, Homo sapien
gagtaaaattcctcacagtataata

SEQ ID NO: 822618 - DNA, 25 bp, Homo sapien
cagaaagttcccgtactcctcactc

SEQ ID NO: 822619 - DNA, 25 bp, Homo sapien
aggcaagcacttgcacactcttctg

SEQ ID NO: 822620 - DNA, 25 bp, Homo sapien
actcccatcggcaggccagtactga

SEQ ID NO: 822621 - DNA, 25 bp, Homo sapien
tgattatgcccatcattttgttgac

SEQ ID NO: 822622 - DNA, 25 bp, Homo sapien
ttgattatgcccatcattttgttga

SEQ ID NO: 822623 - DNA, 25 bp, Homo sapien
aggccactgcgtgtagtgatactgt

SEQ ID NO: 822624 - DNA, 25 bp, Homo sapien
cactggcagggagtactctggtact

SEQ ID NO: 822625 - DNA, 25 bp, Homo sapien
cactgcatggcgcttggcataggct

SEQ ID NO: 822626 - DNA, 25 bp, Homo sapien
gcagtggacgacaacaggccccact

SEQ ID NO: 822627 - DNA, 25 bp, Homo sapien
catactgtctagcacaatatatgtg

SEQ ID NO: 822628 - DNA, 25 bp, Homo sapien
ttgtgaacggatgtgttttaagaag

SEQ ID NO: 822629 - DNA, 25 bp, Homo sapien
gaatctgctgcaacatactgtctag

SEQ ID NO: 822630 - DNA, 25 bp, Homo sapien
gttgacagttccttcgtgttgaatc

SEQ ID NO: 822631 - DNA, 25 bp, Homo sapien
taagtatggcctcaaccagtgtatc

SEQ ID NO: 822632 - DNA, 25 bp, Homo sapien
ccagtgtatcatgaatgaagacata

SEQ ID NO: 822633 - DNA, 25 bp, Homo sapien
tgaatatgactgtccagcacctcag

SEQ ID NO: 822634 - DNA, 25 bp, Homo sapien
tgaggagtgcattaacataggcatg

SEQ ID NO: 822635 - DNA, 25 bp, Homo sapien
taggaggatcagttaagccagggag

SEQ ID NO: 822636 - DNA, 25 bp, Homo sapien
ggaggatcagttaagccagggagag

SEQ ID NO: 822637 - DNA, 25 bp, Homo sapien
aggatcagttaagccagggagagga

SEQ ID NO: 822638 - DNA, 25 bp, Homo sapien
gaggtaggaggatcagttaagccag

SEQ ID NO: 822639 - DNA, 25 bp, Homo sapien
agggatgatagaagaagttcgattc

SEQ ID NO: 822640 - DNA, 25 bp, Homo sapien
agaagaagttcgattcttttccctg

SEQ ID NO: 822641 - DNA, 25 bp, Homo sapien
tagggctgcagaatagtcactctgc

SEQ ID NO: 822642 - DNA, 25 bp, Homo sapien
gctgtatatttgactggctcaggag

SEQ ID NO: 822643 - DNA, 25 bp, Homo sapien
tcagggatgaaatgccaacccttga

SEQ ID NO: 822644 - DNA, 25 bp, Homo sapien
cagggatgaaatgccaacccttgat

SEQ ID NO: 822645 - DNA, 25 bp, Homo sapien
agggatgaaatgccaacccttgatc

SEQ ID NO: 822646 - DNA, 25 bp, Homo sapien
tcaggaatcataaccaccagttggg

SEQ ID NO: 822647 - DNA, 25 bp, Homo sapien
tgggcattatggtcccatatcatcc

SEQ ID NO: 822648 - DNA, 25 bp, Homo sapien
gatgaattcattgctctggtaatag

SEQ ID NO: 822649 - DNA, 25 bp, Homo sapien
cctccagaaatccttgatggtatga

SEQ ID NO: 822650 - DNA, 25 bp, Homo sapien
ctgcagaattgcaaatgaaagaaga

SEQ ID NO: 822651 - DNA, 25 bp, Homo sapien
gcagaattgcaaatgaaagaagagt

SEQ ID NO: 822652 - DNA, 25 bp, Homo sapien
tgcagaattgcaaatgaaagaagag

SEQ ID NO: 822653 - DNA, 25 bp, Homo sapien
gagtgaccttaaagctctcacaatt

SEQ ID NO: 822654 - DNA, 25 bp, Homo sapien
tttttcctcattagatagacatttg

SEQ ID NO: 822655 - DNA, 25 bp, Homo sapien
catctttatttggccagtaaacaaa

SEQ ID NO: 822656 - DNA, 25 bp, Homo sapien
gtgttcttcagccataagagtgacc

SEQ ID NO: 822657 - DNA, 25 bp, Homo sapien
gctcagtagcatagaccttcacttg

SEQ ID NO: 822658 - DNA, 25 bp, Homo sapien
tgaattaggatcaatcaggaacctg

SEQ ID NO: 822659 - DNA, 25 bp, Homo sapien
aaaggcccctagcttttgagctcag

SEQ ID NO: 822660 - DNA, 25 bp, Homo sapien
cactaattcaggaagaggctacttc

SEQ ID NO: 822661 - DNA, 25 bp, Homo sapien
taatggggctatctggatttggcca

SEQ ID NO: 822662 - DNA, 25 bp, Homo sapien
taggcccatccctattggcagcttc

SEQ ID NO: 822663 - DNA, 25 bp, Homo sapien
gacactgaaagtgcctcacttcaag

SEQ ID NO: 822664 - DNA, 25 bp, Homo sapien
atcatgaacaatcataggcccatcc

SEQ ID NO: 822665 - DNA, 25 bp, Homo sapien
aattgtctctcttcgctttttgcac

SEQ ID NO: 822666 - DNA, 25 bp, Homo sapien
tgccaagtgttcatgatatcaatag

SEQ ID NO: 822667 - DNA, 25 bp, Homo sapien
aagactccattgagatgcaccactc

SEQ ID NO: 822668 - DNA, 25 bp, Homo sapien
tatagccttgacaactttgcagtga

SEQ ID NO: 822669 - DNA, 25 bp, Homo sapien
catcagattgatcatcttggctacc

SEQ ID NO: 822670 - DNA, 25 bp, Homo sapien
ggtgcataagggttgtcagagcaca

SEQ ID NO: 822671 - DNA, 25 bp, Homo sapien
tggctacctggtaaacatccacgga

SEQ ID NO: 822672 - DNA, 25 bp, Homo sapien
tcagagcacagaaagttcctgccgt

SEQ ID NO: 822673 - DNA, 25 bp, Homo sapien
atggattgtggacttgtaattcagc

SEQ ID NO: 822674 - DNA, 25 bp, Homo sapien
aaatttcgttcactgccttgttact

SEQ ID NO: 822675 - DNA, 25 bp, Homo sapien
gcctctaggaagttagttgtactct

SEQ ID NO: 822676 - DNA, 25 bp, Homo sapien
tgatacataagatttcagcagcctc

SEQ ID NO: 822677 - DNA, 25 bp, Homo sapien
caatgctgcaccattactgtccaga

SEQ ID NO: 822678 - DNA, 25 bp, Homo sapien
taaactaaagactctaagctctcag

SEQ ID NO: 822679 - DNA, 25 bp, Homo sapien
ctatatttccatcaggcaatgctgc

SEQ ID NO: 822680 - DNA, 25 bp, Homo sapien
atgctgcaccattactgtccagaga

SEQ ID NO: 822681 - DNA, 25 bp, Homo sapien
gtaagaccagctaatgaactacgtc

SEQ ID NO: 822682 - DNA, 25 bp, Homo sapien
aatttggtccatggagacactaggg

SEQ ID NO: 822683 - DNA, 25 bp, Homo sapien
gtcagaaaactggtagagtaagacc

SEQ ID NO: 822684 - DNA, 25 bp, Homo sapien
ggcggcagaatcctatgtcatgaaa

SEQ ID NO: 822685 - DNA, 25 bp, Homo sapien
catgcactgttggtggatacccacg

SEQ ID NO: 822686 - DNA, 25 bp, Homo sapien
acatatcaagtgaagaatgccagac

SEQ ID NO: 822687 - DNA, 25 bp, Homo sapien
cttcaaagaaaacatggcgtaaatc

SEQ ID NO: 822688 - DNA, 25 bp, Homo sapien
ccagaacaggcgaatatatatagag

SEQ ID NO: 822689 - DNA, 25 bp, Homo sapien
tttacaagatcacttcattaggcac

SEQ ID NO: 822690 - DNA, 25 bp, Homo sapien
ggcatctatgaagaacccatggtta

SEQ ID NO: 822691 - DNA, 25 bp, Homo sapien
tactggacagtcaagaaagggcaat

SEQ ID NO: 822692 - DNA, 25 bp, Homo sapien
tggtgaaggactggattatttcccc

SEQ ID NO: 822693 - DNA, 25 bp, Homo sapien
cggagatgggtggaagttgggcgcc

SEQ ID NO: 822694 - DNA, 25 bp, Homo sapien
ttgggcgccttgcaagtctgggttt

SEQ ID NO: 822695 - DNA, 25 bp, Homo sapien
actcttcagcccctgcgggactatg

SEQ ID NO: 822696 - DNA, 25 bp, Homo sapien
tccgagacacagacccattctccag

SEQ ID NO: 822697 - DNA, 25 bp, Homo sapien
gagaaggcggcgagcattcgggcct

SEQ ID NO: 822698 - DNA, 25 bp, Homo sapien
cagcctgtgagatgcggtggagata

SEQ ID NO: 822699 - DNA, 25 bp, Homo sapien
tcttctaggaattcggagcctcccc

SEQ ID NO: 822700 - DNA, 25 bp, Homo sapien
tgcagcgactcggaagattcgaggc

SEQ ID NO: 822701 - DNA, 25 bp, Homo sapien
tccattatgtcagtgagatatatcc

SEQ ID NO: 822702 - DNA, 25 bp, Homo sapien
gggcaagttgaatatatgctctctg

SEQ ID NO: 822703 - DNA, 25 bp, Homo sapien
cctaaacctggtctgttagctctct

SEQ ID NO: 822704 - DNA, 25 bp, Homo sapien
ttacagcaggtacactgctaatggg

SEQ ID NO: 822705 - DNA, 25 bp, Homo sapien
ttggacctcagacttctgtcctggc

SEQ ID NO: 822706 - DNA, 25 bp, Homo sapien
ggacctcagacttctgtcctggcat

SEQ ID NO: 822707 - DNA, 25 bp, Homo sapien
tggacctcagacttctgtcctggca

SEQ ID NO: 822708 - DNA, 25 bp, Homo sapien
attggacctcagacttctgtcctgg

SEQ ID NO: 822709 - DNA, 25 bp, Homo sapien
tacaggcataagccaccgagctttg

SEQ ID NO: 822710 - DNA, 25 bp, Homo sapien
caggcataagccaccgagctttgtc

SEQ ID NO: 822711 - DNA, 25 bp, Homo sapien
gcagtagtgcaatttcagctcacta

SEQ ID NO: 822712 - DNA, 25 bp, Homo sapien
agtagtgcaatttcagctcactaca

SEQ ID NO: 822713 - DNA, 25 bp, Homo sapien
tcaaatctacaatcataaattctta

SEQ ID NO: 822714 - DNA, 25 bp, Homo sapien
ctgctttgctactacttgtctcggt

SEQ ID NO: 822715 - DNA, 25 bp, Homo sapien
gctactacttgtctcggttttatca

SEQ ID NO: 822716 - DNA, 25 bp, Homo sapien
cttgtctcggttttatcagtattac

SEQ ID NO: 822717 - DNA, 25 bp, Homo sapien
cttttcttccctcctacgaccacat

SEQ ID NO: 822718 - DNA, 25 bp, Homo sapien
ctacgaccacatctcctacaaccat

SEQ ID NO: 822719 - DNA, 25 bp, Homo sapien
cctacgaccacatctcctacaacca

SEQ ID NO: 822720 - DNA, 25 bp, Homo sapien
gaaatacctcatagaacctggcttt

SEQ ID NO: 822721 - DNA, 25 bp, Homo sapien
aggagtggtctcagcttgctggtga

SEQ ID NO: 822722 - DNA, 25 bp, Homo sapien
tcaactgacttccaggagtggtctc

SEQ ID NO: 822723 - DNA, 25 bp, Homo sapien
tggtgaagtgaaatacctcatagaa

SEQ ID NO: 822724 - DNA, 25 bp, Homo sapien
agtccccagtcttctttccaatcat

SEQ ID NO: 822725 - DNA, 25 bp, Homo sapien
caatcattccacctctccataaatt

SEQ ID NO: 822726 - DNA, 25 bp, Homo sapien
tccacctctccataaatttcatatt

SEQ ID NO: 822727 - DNA, 25 bp, Homo sapien
tcctccaactgctttgccagtcccc

SEQ ID NO: 822728 - DNA, 25 bp, Homo sapien
caaattcacttcagagaggtgtgta

SEQ ID NO: 822729 - DNA, 25 bp, Homo sapien
gcttattggattagttacactcact

SEQ ID NO: 822730 - DNA, 25 bp, Homo sapien
caggctggtggattctagtagtcct

SEQ ID NO: 822731 - DNA, 25 bp, Homo sapien
gtgtcctctgtggtcctaatgttta

SEQ ID NO: 822732 - DNA, 25 bp, Homo sapien
gaaatacggtaaagccactctgaaa

SEQ ID NO: 822733 - DNA, 25 bp, Homo sapien
gacctgggttttttggcctcgcaga

SEQ ID NO: 822734 - DNA, 25 bp, Homo sapien
tgcacataaagtttacaggagctct

SEQ ID NO: 822735 - DNA, 25 bp, Homo sapien
cactcctaggtagaaaaatgcaaca

SEQ ID NO: 822736 - DNA, 25 bp, Homo sapien
tccttgggttggttagctgctgtgg

SEQ ID NO: 822737 - DNA, 25 bp, Homo sapien
ttgaagtccttgggttggttagctg

SEQ ID NO: 822738 - DNA, 25 bp, Homo sapien
tttgcaattccagccctggaagttt

SEQ ID NO: 822739 - DNA, 25 bp, Homo sapien
tctttgcaattccagccctggaagt

SEQ ID NO: 822740 - DNA, 25 bp, Homo sapien
tggcatgaatagtggctactccttc

SEQ ID NO: 822741 - DNA, 25 bp, Homo sapien
catctttgcaattccagccctggaa

SEQ ID NO: 822742 - DNA, 25 bp, Homo sapien
cactacaatgctgggtttactttcc

SEQ ID NO: 822743 - DNA, 25 bp, Homo sapien
cacacaaagtagcatactcagatcc

SEQ ID NO: 822744 - DNA, 25 bp, Homo sapien
gagcttcattccaaagactatcact

SEQ ID NO: 822745 - DNA, 25 bp, Homo sapien
atggcacacaaagtagcatactcag

SEQ ID NO: 822746 - DNA, 25 bp, Homo sapien
tcctactggagttgctcttggttct

SEQ ID NO: 822747 - DNA, 25 bp, Homo sapien
ttcctactggagttgctcttggttc

SEQ ID NO: 822748 - DNA, 25 bp, Homo sapien
gttctattccacaagttgatgtcat

SEQ ID NO: 822749 - DNA, 25 bp, Homo sapien
ggcattgttctattccacaagttga

SEQ ID NO: 822750 - DNA, 25 bp, Homo sapien
gaagtgaaacgactgcatcagttct

SEQ ID NO: 822751 - DNA, 25 bp, Homo sapien
ttcagacaggcccttatcttgcaga

SEQ ID NO: 822752 - DNA, 25 bp, Homo sapien
tgggaaaagcataggagtggtaaga

SEQ ID NO: 822753 - DNA, 25 bp, Homo sapien
cagtacgaatgttaggtttcacctc

SEQ ID NO: 822754 - DNA, 25 bp, Homo sapien
tcacctcctgattctgaggaaccat

SEQ ID NO: 822755 - DNA, 25 bp, Homo sapien
tggaacttgacttttagcttcagaa

SEQ ID NO: 822756 - DNA, 25 bp, Homo sapien
tctggtcatgcttttggttctctct

SEQ ID NO: 822757 - DNA, 25 bp, Homo sapien
atcaaggtaaccgtttattgtcaga

SEQ ID NO: 822758 - DNA, 25 bp, Homo sapien
acttttgttgctatggaagtattca

SEQ ID NO: 822759 - DNA, 25 bp, Homo sapien
ccgtttattgtcagacttttgttgc

SEQ ID NO: 822760 - DNA, 25 bp, Homo sapien
tgtcagacttttgttgctatggaag

SEQ ID NO: 822761 - DNA, 25 bp, Homo sapien
ttttttctagtccatccacactcct

SEQ ID NO: 822762 - DNA, 25 bp, Homo sapien
ccacactcctactctcctagatgag

SEQ ID NO: 822763 - DNA, 25 bp, Homo sapien
cctactctcctagatgagtatttct

SEQ ID NO: 822764 - DNA, 25 bp, Homo sapien
ttcccaaaccacgttattagctgaa

SEQ ID NO: 822765 - DNA, 25 bp, Homo sapien
cagagcctatgatttccttgcatct

SEQ ID NO: 822766 - DNA, 25 bp, Homo sapien
gcctatgatttccttgcatcttgga

SEQ ID NO: 822767 - DNA, 25 bp, Homo sapien
atgatttccttgcatcttggatttc

SEQ ID NO: 822768 - DNA, 25 bp, Homo sapien
tggatttccatgttggggaccaaga

SEQ ID NO: 822769 - DNA, 25 bp, Homo sapien
tgcagcggtttcttccccaggtgat

SEQ ID NO: 822770 - DNA, 25 bp, Homo sapien
ggatctaagatgcaatttggtctgc

SEQ ID NO: 822771 - DNA, 25 bp, Homo sapien
tagttatacatagtaatattaaggg

SEQ ID NO: 822772 - DNA, 25 bp, Homo sapien
cagtggctccaaagcagtagttctc

SEQ ID NO: 822773 - DNA, 25 bp, Homo sapien
ggcagaatggccctttttcttctca

SEQ ID NO: 822774 - DNA, 25 bp, Homo sapien
tccatggatgcacttgtgaatattg

SEQ ID NO: 822775 - DNA, 25 bp, Homo sapien
cttctcatcacccttctttgcagga

SEQ ID NO: 822776 - DNA, 25 bp, Homo sapien
gatgcacttgtgaatattgatggtg

SEQ ID NO: 822777 - DNA, 25 bp, Homo sapien
ttgcagaatctctttgagttcccga

SEQ ID NO: 822778 - DNA, 25 bp, Homo sapien
gcagaatctctttgagttcccgagg

SEQ ID NO: 822779 - DNA, 25 bp, Homo sapien
gcaaattgcagaatctctttgagtt

SEQ ID NO: 822780 - DNA, 25 bp, Homo sapien
aattgcagaatctctttgagttccc

SEQ ID NO: 822781 - DNA, 25 bp, Homo sapien
cccagacctctttgttgcacctggt

SEQ ID NO: 822782 - DNA, 25 bp, Homo sapien
tggacaaccgcacacagataccgtg

SEQ ID NO: 822783 - DNA, 25 bp, Homo sapien
caaccgcacacagataccgtgtggg

SEQ ID NO: 822784 - DNA, 25 bp, Homo sapien
ccgcacacagataccgtgtgggtca

SEQ ID NO: 822785 - DNA, 25 bp, Homo sapien
cacacagataccgtgtgggtcatac

SEQ ID NO: 822786 - DNA, 25 bp, Homo sapien
acaggtatgtaggtaaccaaaatat

SEQ ID NO: 822787 - DNA, 25 bp, Homo sapien
tcatccacatcgactgtctttagat

SEQ ID NO: 822788 - DNA, 25 bp, Homo sapien
ggtatgtaggtaaccaaaatataga

SEQ ID NO: 822789 - DNA, 25 bp, Homo sapien
gtatgtaggtaaccaaaatatagag

SEQ ID NO: 822790 - DNA, 25 bp, Homo sapien
ctctccctttaatggtgattgtcca

SEQ ID NO: 822791 - DNA, 25 bp, Homo sapien
cctttaatggtgattgtccatttcc

SEQ ID NO: 822792 - DNA, 25 bp, Homo sapien
tctctccctttaatggtgattgtcc

SEQ ID NO: 822793 - DNA, 25 bp, Homo sapien
gacatctctccctttaatggtgatt

SEQ ID NO: 822794 - DNA, 25 bp, Homo sapien
gcttctgtcggaaaaaatcgcgttc

SEQ ID NO: 822795 - DNA, 25 bp, Homo sapien
tagctttcaaagacctgtcccaggc

SEQ ID NO: 822796 - DNA, 25 bp, Homo sapien
gtaaggccgcgtgtggtcaaccact

SEQ ID NO: 822797 - DNA, 25 bp, Homo sapien
cattacatgaaagaaagcgcccagc

SEQ ID NO: 822798 - DNA, 25 bp, Homo sapien
gtgatggtgcccgtccccctctccg

SEQ ID NO: 822799 - DNA, 25 bp, Homo sapien
actggtggtgatggtgcccgtcccc

SEQ ID NO: 822800 - DNA, 25 bp, Homo sapien
ggaggctactggtggtgatggtgcc

SEQ ID NO: 822801 - DNA, 25 bp, Homo sapien
ggctactggtggtgatggtgcccgt

SEQ ID NO: 822802 - DNA, 25 bp, Homo sapien
tgggcaggcaggttcggctggtgat

SEQ ID NO: 822803 - DNA, 25 bp, Homo sapien
tcattggtgcgccaagaactctgcg

SEQ ID NO: 822804 - DNA, 25 bp, Homo sapien
gggcaggcaggttcggctggtgatg

SEQ ID NO: 822805 - DNA, 25 bp, Homo sapien
ttctcctcttggaagttaacgattg

SEQ ID NO: 822806 - DNA, 25 bp, Homo sapien
gatcttggctgcgttattgacacaa

SEQ ID NO: 822807 - DNA, 25 bp, Homo sapien
aagttaacgattggcgagatcttgg

SEQ ID NO: 822808 - DNA, 25 bp, Homo sapien
ttctattgatagaaataagtagtga

SEQ ID NO: 822809 - DNA, 25 bp, Homo sapien
taaatggtccagactcggttcgggc

SEQ ID NO: 822810 - DNA, 25 bp, Homo sapien
ttacctgccggcgtcttctaaatgg

SEQ ID NO: 822811 - DNA, 25 bp, Homo sapien
gaaatggtctctacgcgcgctcttt

SEQ ID NO: 822812 - DNA, 25 bp, Homo sapien
tctcaatggaaactcggaagcgtgc

SEQ ID NO: 822813 - DNA, 25 bp, Homo sapien
gaggagggaatactttgacgtcaat

SEQ ID NO: 822814 - DNA, 25 bp, Homo sapien
tgaagcccgtcgtattcagccagac

SEQ ID NO: 822815 - DNA, 25 bp, Homo sapien
tgcagtctgggcgaatccaaagtag

SEQ ID NO: 822816 - DNA, 25 bp, Homo sapien
cagaggcggaactgattttcgcgga

SEQ ID NO: 822817 - DNA, 25 bp, Homo sapien
ctgttagacatcaggcgcgttccca

SEQ ID NO: 822818 - DNA, 25 bp, Homo sapien
ctttcaacctagcccggtggcggag

SEQ ID NO: 822819 - DNA, 25 bp, Homo sapien
cgtaaaacgaactggtggcattcag

SEQ ID NO: 822820 - DNA, 25 bp, Homo sapien
tccagaggccgcgaattgtgtacaa

SEQ ID NO: 822821 - DNA, 25 bp, Homo sapien
cgggctgcttcgcgcttcttggctt

SEQ ID NO: 822822 - DNA, 25 bp, Homo sapien
cttttatttcgaattgcagtaacca

SEQ ID NO: 822823 - DNA, 25 bp, Homo sapien
tatgatagggacttcaacaaaaagc

SEQ ID NO: 822824 - DNA, 25 bp, Homo sapien
tgcatttgcttatgatagggacttc

SEQ ID NO: 822825 - DNA, 25 bp, Homo sapien
tttcgaattgcagtaaccatagcca

SEQ ID NO: 822826 - DNA, 25 bp, Homo sapien
gagtcatagcctctcagtctggagg

SEQ ID NO: 822827 - DNA, 25 bp, Homo sapien
tgtcaaggaaacagtcgaaccgtgt

SEQ ID NO: 822828 - DNA, 25 bp, Homo sapien
taaacttcgtgggtagtgtcaagga

SEQ ID NO: 822829 - DNA, 25 bp, Homo sapien
gctgttgctccacagtaaaggttgg

SEQ ID NO: 822830 - DNA, 25 bp, Homo sapien
tacaccctgagtcgtcaaagcaagt

SEQ ID NO: 822831 - DNA, 25 bp, Homo sapien
taactgtttggaactcgtgagcaag

SEQ ID NO: 822832 - DNA, 25 bp, Homo sapien
gcaagaaccgagaagtggagagccc

SEQ ID NO: 822833 - DNA, 25 bp, Homo sapien
gctggccaccgaatcctgaatgagg

SEQ ID NO: 822834 - DNA, 25 bp, Homo sapien
caggcccatggtgcgaaaatgaaat

SEQ ID NO: 822835 - DNA, 25 bp, Homo sapien
gaaatcagctattgtgccaacaccg

SEQ ID NO: 822836 - DNA, 25 bp, Homo sapien
gaaggaccccaattattactatgcc

SEQ ID NO: 822837 - DNA, 25 bp, Homo sapien
tctctgccgtgagtaaaaagctctg

SEQ ID NO: 822838 - DNA, 25 bp, Homo sapien
ggaacacttgagcaacgcggcggca

SEQ ID NO: 822839 - DNA, 25 bp, Homo sapien
gcaccgactcctgcccggagttgct

SEQ ID NO: 822840 - DNA, 25 bp, Homo sapien
gactgcagtacttctaggctcccag

SEQ ID NO: 822841 - DNA, 25 bp, Homo sapien
cttagggcgactgccagcaccgact

SEQ ID NO: 822842 - DNA, 25 bp, Homo sapien
agcctagcccctggcgtgtctgtga

SEQ ID NO: 822843 - DNA, 25 bp, Homo sapien
ccttttggatcacacgcagctctga

SEQ ID NO: 822844 - DNA, 25 bp, Homo sapien
tatatatggccagcccgatgggagg

SEQ ID NO: 822845 - DNA, 25 bp, Homo sapien
gaactctggtctcagaaagggccag

SEQ ID NO: 822846 - DNA, 25 bp, Homo sapien
ggcggccgggcagtagcggagaggg

SEQ ID NO: 822847 - DNA, 25 bp, Homo sapien
tgggcggccgggcagtagcggagag

SEQ ID NO: 822848 - DNA, 25 bp, Homo sapien
gggcggccgggcagtagcggagagg

SEQ ID NO: 822849 - DNA, 25 bp, Homo sapien
tacagatggagtcgcgtccacaggc

SEQ ID NO: 822850 - DNA, 25 bp, Homo sapien
ctacagatggagtcgcgtccacagg

SEQ ID NO: 822851 - DNA, 25 bp, Homo sapien
tactatgcaagaaaacgaagtcgct

SEQ ID NO: 822852 - DNA, 25 bp, Homo sapien
cagtaaccttcgaggaagagccgcg

SEQ ID NO: 822853 - DNA, 25 bp, Homo sapien
ttcaagtcccgctcgcagtaacctt

SEQ ID NO: 822854 - DNA, 25 bp, Homo sapien
gaagtcgctaatgcgcctccttttc

SEQ ID NO: 822855 - DNA, 25 bp, Homo sapien
gttgctcagagatcctcgaagcccc

SEQ ID NO: 822856 - DNA, 25 bp, Homo sapien
cgaagcccctttgcgctgccgcggt

SEQ ID NO: 822857 - DNA, 25 bp, Homo sapien
cgtcgttgctcagagatcctcgaag

SEQ ID NO: 822858 - DNA, 25 bp, Homo sapien
tcagccgtcgttgctcagagatcct

SEQ ID NO: 822859 - DNA, 25 bp, Homo sapien
cggcggtgagagggtccaccggctc

SEQ ID NO: 822860 - DNA, 25 bp, Homo sapien
ggcggtgagagggtccaccggctcc

SEQ ID NO: 822861 - DNA, 25 bp, Homo sapien
caatagcagtcaggcaggtagtgga

SEQ ID NO: 822862 - DNA, 25 bp, Homo sapien
ggagctacttgcatccttatgagaa

SEQ ID NO: 822863 - DNA, 25 bp, Homo sapien
cttatgagaaaatcggagaccaacc

SEQ ID NO: 822864 - DNA, 25 bp, Homo sapien
ttccaaagcaaaggcaatagcagtc

SEQ ID NO: 822865 - DNA, 25 bp, Homo sapien
ggtagcaagtgtgcttccgtcaaga

SEQ ID NO: 822866 - DNA, 25 bp, Homo sapien
ttcaactataagtaatccccaggtg

SEQ ID NO: 822867 - DNA, 25 bp, Homo sapien
tgagaagtcagttcggaccactgca

SEQ ID NO: 822868 - DNA, 25 bp, Homo sapien
tgctccagtataacagcttgcaggc

SEQ ID NO: 822869 - DNA, 25 bp, Homo sapien
cataccttctgtgcaagctgcggca

SEQ ID NO: 822870 - DNA, 25 bp, Homo sapien
ttcctgtgtagaccaaggcaaagaa

SEQ ID NO: 822871 - DNA, 25 bp, Homo sapien
agcagtaatgccattcccatacctt

SEQ ID NO: 822872 - DNA, 25 bp, Homo sapien
attcctgtgtagaccaaggcaaaga

SEQ ID NO: 822873 - DNA, 25 bp, Homo sapien
catagagaaggtgcgtaacagactc

SEQ ID NO: 822874 - DNA, 25 bp, Homo sapien
gatagattcatataatctaccccac

SEQ ID NO: 822875 - DNA, 25 bp, Homo sapien
aacagaatgacaactgggtttttct

SEQ ID NO: 822876 - DNA, 25 bp, Homo sapien
gaataaagctgtattgaagcaacat

SEQ ID NO: 822877 - DNA, 25 bp, Homo sapien
gaagccaacaagtgtagaacgcacc

SEQ ID NO: 822878 - DNA, 25 bp, Homo sapien
tcaacgaagccaacaagtgtagaac

SEQ ID NO: 822879 - DNA, 25 bp, Homo sapien
aacaagtgtagaacgcacccaggac

SEQ ID NO: 822880 - DNA, 25 bp, Homo sapien
gtgtagaacgcacccaggacatgtc

SEQ ID NO: 822881 - DNA, 25 bp, Homo sapien
ggccttttgtactccccctctgtga

SEQ ID NO: 822882 - DNA, 25 bp, Homo sapien
cctctgtgaatcacgccttctgcaa

SEQ ID NO: 822883 - DNA, 25 bp, Homo sapien
caccagtgttggctaaatccaagaa

SEQ ID NO: 822884 - DNA, 25 bp, Homo sapien
tctgcaaggtcagaccattcacaag

SEQ ID NO: 822885 - DNA, 25 bp, Homo sapien
gcacagacttgatatggggtcgagg

SEQ ID NO: 822886 - DNA, 25 bp, Homo sapien
tatggggtcgaggatctccgttcat

SEQ ID NO: 822887 - DNA, 25 bp, Homo sapien
cacagacttgatatggggtcgagga

SEQ ID NO: 822888 - DNA, 25 bp, Homo sapien
tgcacagacttgatatggggtcgag

SEQ ID NO: 822889 - DNA, 25 bp, Homo sapien
ctgaggaaccgaactgctggcggtt

SEQ ID NO: 822890 - DNA, 25 bp, Homo sapien
tgaccttaggcaccagtttcttctt

SEQ ID NO: 822891 - DNA, 25 bp, Homo sapien
gaactgctggcggttgaatccttgc

SEQ ID NO: 822892 - DNA, 25 bp, Homo sapien
catctattatcagtgtgaccttagg

SEQ ID NO: 822893 - DNA, 25 bp, Homo sapien
taaccatagcaattgccgctgtcct

SEQ ID NO: 822894 - DNA, 25 bp, Homo sapien
ccgctgtcctcgtggcaaatgagat

SEQ ID NO: 822895 - DNA, 25 bp, Homo sapien
cattttccacagagggccattaagt

SEQ ID NO: 822896 - DNA, 25 bp, Homo sapien
ttctgggtccttgcaaactacatca

SEQ ID NO: 822897 - DNA, 25 bp, Homo sapien
tctggtaaggccttttaggagtcag

SEQ ID NO: 822898 - DNA, 25 bp, Homo sapien
cgtgcaggatctggtaaggcctttt

SEQ ID NO: 822899 - DNA, 25 bp, Homo sapien
tccctccttcctataacgtgcagga

SEQ ID NO: 822900 - DNA, 25 bp, Homo sapien
ccttcctataacgtgcaggatctgg

SEQ ID NO: 822901 - DNA, 25 bp, Homo sapien
ccctctaaggtgtaacagatggtca

SEQ ID NO: 822902 - DNA, 25 bp, Homo sapien
gccttgagtagtcatcagtccttga

SEQ ID NO: 822903 - DNA, 25 bp, Homo sapien
tattttaactccatagcagccttga

SEQ ID NO: 822904 - DNA, 25 bp, Homo sapien
agggtgacatctgaggtcctccacg

SEQ ID NO: 822905 - DNA, 25 bp, Homo sapien
tctcctgaacgtcaggactttttca

SEQ ID NO: 822906 - DNA, 25 bp, Homo sapien
gccatctcctgaacgtcaggacttt

SEQ ID NO: 822907 - DNA, 25 bp, Homo sapien
tcagccatctcctgaacgtcaggac

SEQ ID NO: 822908 - DNA, 25 bp, Homo sapien
tgaacgtcaggactttttcattatc

SEQ ID NO: 822909 - DNA, 25 bp, Homo sapien
taacaggtgccaacaggtacaccaa

SEQ ID NO: 822910 - DNA, 25 bp, Homo sapien
ggtacaccaagagacatagcagcat

SEQ ID NO: 822911 - DNA, 25 bp, Homo sapien
caggtgccaacaggtacaccaagag

SEQ ID NO: 822912 - DNA, 25 bp, Homo sapien
aggtacaccaagagacatagcagca

SEQ ID NO: 822913 - DNA, 25 bp, Homo sapien
taaaacacttagataacagttcaga

SEQ ID NO: 822914 - DNA, 25 bp, Homo sapien
gttaattaaatatatcccagattcc

SEQ ID NO: 822915 - DNA, 25 bp, Homo sapien
ccaagtttgtctagtatctgagtta

SEQ ID NO: 822916 - DNA, 25 bp, Homo sapien
tttcttataaaacatagcgtgcccc

SEQ ID NO: 822917 - DNA, 25 bp, Homo sapien
tttagagccttcttctcgtcaatag

SEQ ID NO: 822918 - DNA, 25 bp, Homo sapien
gagccttcttctcgtcaatagttag

SEQ ID NO: 822919 - DNA, 25 bp, Homo sapien
tcgtcaatagttaggtataggacaa

SEQ ID NO: 822920 - DNA, 25 bp, Homo sapien
tcttctcgtcaatagttaggtatag

SEQ ID NO: 822921 - DNA, 25 bp, Homo sapien
acattcaggtatctctggtagtctt

SEQ ID NO: 822922 - DNA, 25 bp, Homo sapien
tctctggtagtcttttagaatcgaa

SEQ ID NO: 822923 - DNA, 25 bp, Homo sapien
gattcagcattgaggtgtcatatag

SEQ ID NO: 822924 - DNA, 25 bp, Homo sapien
tttagaatcgaaatttgaatcagtc

SEQ ID NO: 822925 - DNA, 25 bp, Homo sapien
ttttccttaaatgggacaaagctga

SEQ ID NO: 822926 - DNA, 25 bp, Homo sapien
gacaaagctgaaaagtttattacca

SEQ ID NO: 822927 - DNA, 25 bp, Homo sapien
ccttaaatgggacaaagctgaaaag

SEQ ID NO: 822928 - DNA, 25 bp, Homo sapien
atgggacaaagctgaaaagtttatt

SEQ ID NO: 822929 - DNA, 25 bp, Homo sapien
ttctttgacgctctctgcagttaaa

SEQ ID NO: 822930 - DNA, 25 bp, Homo sapien
ctttgacgctctctgcagttaaagc

SEQ ID NO: 822931 - DNA, 25 bp, Homo sapien
gcagttaaagcagtgtagaacttct

SEQ ID NO: 822932 - DNA, 25 bp, Homo sapien
taaagcagtgtagaacttctgaaag

SEQ ID NO: 822933 - DNA, 25 bp, Homo sapien
agcaaagctggccttacttgaaagt

SEQ ID NO: 822934 - DNA, 25 bp, Homo sapien
gatttcaatttctctgatggtcagt

SEQ ID NO: 822935 - DNA, 25 bp, Homo sapien
ttgatttcaatttctctgatggtca

SEQ ID NO: 822936 - DNA, 25 bp, Homo sapien
tttcaatttctctgatggtcagtga

SEQ ID NO: 822937 - DNA, 25 bp, Homo sapien
tagttgtaggtatgtggcgttattt

SEQ ID NO: 822938 - DNA, 25 bp, Homo sapien
ctgcactctgtattgtcctttggaa

SEQ ID NO: 822939 - DNA, 25 bp, Homo sapien
tatgaagttcttaggctgctggact

SEQ ID NO: 822940 - DNA, 25 bp, Homo sapien
tacctctgtgttgcctatgaagttc

SEQ ID NO: 822941 - DNA, 25 bp, Homo sapien
ctggacttcatctacgagactgttt

SEQ ID NO: 822942 - DNA, 25 bp, Homo sapien
cagtctactgtgtagctaggagcac

SEQ ID NO: 822943 - DNA, 25 bp, Homo sapien
ctcagtctactgtgtagctaggagc

SEQ ID NO: 822944 - DNA, 25 bp, Homo sapien
ctactgtgtagctaggagcacaggc

SEQ ID NO: 822945 - DNA, 25 bp, Homo sapien
tctactgtgtagctaggagcacagg

SEQ ID NO: 822946 - DNA, 25 bp, Homo sapien
cctgggctcatggctgggcaccatg

SEQ ID NO: 822947 - DNA, 25 bp, Homo sapien
agatgttgccactggactcccgcct

SEQ ID NO: 822948 - DNA, 25 bp, Homo sapien
tcctgggctcatggctgggcaccat

SEQ ID NO: 822949 - DNA, 25 bp, Homo sapien
ctgagatgttgccactggactcccg

SEQ ID NO: 822950 - DNA, 25 bp, Homo sapien
caaagtgtgtcttcttggacagcat

SEQ ID NO: 822951 - DNA, 25 bp, Homo sapien
ctggccttttccggtacgtgaccat

SEQ ID NO: 822952 - DNA, 25 bp, Homo sapien
tggtggatgacttttccaaaaaata

SEQ ID NO: 822953 - DNA, 25 bp, Homo sapien
tgatcagtcatcatgggaagcagga

SEQ ID NO: 822954 - DNA, 25 bp, Homo sapien
cctgtctctccagatggtacttgag

SEQ ID NO: 822955 - DNA, 25 bp, Homo sapien
agatggtacttgagctgatcagtca

SEQ ID NO: 822956 - DNA, 25 bp, Homo sapien
caggttctcctgtctctccagatgg

SEQ ID NO: 822957 - DNA, 25 bp, Homo sapien
ttggccccatgtccttcctgtacag

SEQ ID NO: 822958 - DNA, 25 bp, Homo sapien
gttggccccatgtccttcctgtaca

SEQ ID NO: 822959 - DNA, 25 bp, Homo sapien
gccccatgtccttcctgtacagcac

SEQ ID NO: 822960 - DNA, 25 bp, Homo sapien
ctgagttggccccatgtccttcctg

SEQ ID NO: 822961 - DNA, 25 bp, Homo sapien
agtgagttcggaatcttgtcccatg

SEQ ID NO: 822962 - DNA, 25 bp, Homo sapien
gtgagttcggaatcttgtcccatgg

SEQ ID NO: 822963 - DNA, 25 bp, Homo sapien
tgggaatgtacgcagagtgtggagg

SEQ ID NO: 822964 - DNA, 25 bp, Homo sapien
ctatgggggtgggaatgtacgcaga

SEQ ID NO: 822965 - DNA, 25 bp, Homo sapien
cacaagtgtgtccttttactggaac

SEQ ID NO: 822966 - DNA, 25 bp, Homo sapien
ggctacacaagtgtgtccttttact

SEQ ID NO: 822967 - DNA, 25 bp, Homo sapien
agtacagcgaacaggttgcacgtgg

SEQ ID NO: 822968 - DNA, 25 bp, Homo sapien
agttagtacagcgaacaggttgcac

SEQ ID NO: 822969 - DNA, 25 bp, Homo sapien
ggcacagttagtacagcgaacaggt

SEQ ID NO: 822970 - DNA, 25 bp, Homo sapien
acagttagtacagcgaacaggttgc

SEQ ID NO: 822971 - DNA, 25 bp, Homo sapien
tttctccagagaataacctgtcttc

SEQ ID NO: 822972 - DNA, 25 bp, Homo sapien
agaataacctgtcttcagtctttaa

SEQ ID NO: 822973 - DNA, 25 bp, Homo sapien
tttttctccagagaataacctgtct

SEQ ID NO: 822974 - DNA, 25 bp, Homo sapien
agagaataacctgtcttcagtcttt

SEQ ID NO: 822975 - DNA, 25 bp, Homo sapien
cagcagctgcggatggcttgccctg

SEQ ID NO: 822976 - DNA, 25 bp, Homo sapien
tctctaactgttggatcggcactgt

SEQ ID NO: 822977 - DNA, 25 bp, Homo sapien
tgccctggcgtgtgcatccagcttc

SEQ ID NO: 822978 - DNA, 25 bp, Homo sapien
tactgaggtgaccaatgtctctaac

SEQ ID NO: 822979 - DNA, 25 bp, Homo sapien
ggtgcattcatgggtagtgactccc

SEQ ID NO: 822980 - DNA, 25 bp, Homo sapien
gataaggacggtgcagacatccact

SEQ ID NO: 822981 - DNA, 25 bp, Homo sapien
agtgactccccggataaggacggtg

SEQ ID NO: 822982 - DNA, 25 bp, Homo sapien
catccactttagtgaagtgaagcac

SEQ ID NO: 822983 - DNA, 25 bp, Homo sapien
agtcacatgggcgtttgtaactgtg

SEQ ID NO: 822984 - DNA, 25 bp, Homo sapien
catgggcgtttgtaactgtgctgca

SEQ ID NO: 822985 - DNA, 25 bp, Homo sapien
cagagtcacatgggcgtttgtaact

SEQ ID NO: 822986 - DNA, 25 bp, Homo sapien
tcacatgggcgtttgtaactgtgct

SEQ ID NO: 822987 - DNA, 25 bp, Homo sapien
gaccctgggcatgacgtttggtgta

SEQ ID NO: 822988 - DNA, 25 bp, Homo sapien
ggccccgagtgttctttcagctatc

SEQ ID NO: 822989 - DNA, 25 bp, Homo sapien
tgttctttcagctatctgtccatcc

SEQ ID NO: 822990 - DNA, 25 bp, Homo sapien
aacctgacagttggcatagttggcc

SEQ ID NO: 822991 - DNA, 25 bp, Homo sapien
gaagggcagtagttagctataactg

SEQ ID NO: 822992 - DNA, 25 bp, Homo sapien
tagaagggcagtagttagctataac

SEQ ID NO: 822993 - DNA, 25 bp, Homo sapien
cagtagttagctataactgcttcca

SEQ ID NO: 822994 - DNA, 25 bp, Homo sapien
cacaggtagaagggcagtagttagc

SEQ ID NO: 822995 - DNA, 25 bp, Homo sapien
tcctcatccttggatcttaataatg

SEQ ID NO: 822996 - DNA, 25 bp, Homo sapien
tatggcataggatgtcagtcctaaa

SEQ ID NO: 822997 - DNA, 25 bp, Homo sapien
tttattatcaaaacagtaggtggca

SEQ ID NO: 822998 - DNA, 25 bp, Homo sapien
caagtaattattatcataaatccag

SEQ ID NO: 822999 - DNA, 25 bp, Homo sapien
gtaggtggcaagtaattattatcat

SEQ ID NO: 823000 - DNA, 25 bp, Homo sapien
tactgagactcctgatgggttctgc

SEQ ID NO: 823001 - DNA, 25 bp, Homo sapien
cctggagggacccacaagttttctg

SEQ ID NO: 823002 - DNA, 25 bp, Homo sapien
cagcttccactgtaagtactgagac

SEQ ID NO: 823003 - DNA, 25 bp, Homo sapien
ttacttgctaggatgtcacacagct

SEQ ID NO: 823004 - DNA, 25 bp, Homo sapien
ttattactctttgacatgaggtaaa

SEQ ID NO: 823005 - DNA, 25 bp, Homo sapien
tatcattagtaaggctcaggtgaat

SEQ ID NO: 823006 - DNA, 25 bp, Homo sapien
tagtaaggctcaggtgaatgaagac

SEQ ID NO: 823007 - DNA, 25 bp, Homo sapien
cttgattatcattagtaaggctcag

SEQ ID NO: 823008 - DNA, 25 bp, Homo sapien
gattatcattagtaaggctcaggtg

SEQ ID NO: 823009 - DNA, 25 bp, Homo sapien
cactgtacttaaggtgggatatatt

SEQ ID NO: 823010 - DNA, 25 bp, Homo sapien
tagatgatttacaccagcaaacact

SEQ ID NO: 823011 - DNA, 25 bp, Homo sapien
ggcatctgcgttgaagaaatctgca

SEQ ID NO: 823012 - DNA, 25 bp, Homo sapien
gtgggatatattgaaggttggcatc

SEQ ID NO: 823013 - DNA, 25 bp, Homo sapien
aaaagtaatagtgaatggtgaattt

SEQ ID NO: 823014 - DNA, 25 bp, Homo sapien
caaaaagtaatagtgaatggtgaat

SEQ ID NO: 823015 - DNA, 25 bp, Homo sapien
agtaatagtgaatggtgaattttct

SEQ ID NO: 823016 - DNA, 25 bp, Homo sapien
tcaaaaagtaatagtgaatggtgaa

SEQ ID NO: 823017 - DNA, 25 bp, Homo sapien
tttgcagatagccacttctcatcca

SEQ ID NO: 823018 - DNA, 25 bp, Homo sapien
tcttttgcagatagccacttctcat

SEQ ID NO: 823019 - DNA, 25 bp, Homo sapien
cagatagccacttctcatccatgta

SEQ ID NO: 823020 - DNA, 25 bp, Homo sapien
cttcttttgcagatagccacttctc

SEQ ID NO: 823021 - DNA, 25 bp, Homo sapien
agttgtgcagtgtggtggttccttt

SEQ ID NO: 823022 - DNA, 25 bp, Homo sapien
acttatcattgtcaaaggtgtccgt

SEQ ID NO: 823023 - DNA, 25 bp, Homo sapien
gttgtgcagtgtggtggttcctttc

SEQ ID NO: 823024 - DNA, 25 bp, Homo sapien
tcaaaggtgtccgtggagttgtgca

SEQ ID NO: 823025 - DNA, 25 bp, Homo sapien
ctaatttgaagaggaaacagtgtct

SEQ ID NO: 823026 - DNA, 25 bp, Homo sapien
aggaaacagtgtcttttttgtctct

SEQ ID NO: 823027 - DNA, 25 bp, Homo sapien
atttgaagaggaaacagtgtctttt

SEQ ID NO: 823028 - DNA, 25 bp, Homo sapien
tgaagaggaaacagtgtcttttttg

SEQ ID NO: 823029 - DNA, 25 bp, Homo sapien
gccctctggataattgatctctgca

SEQ ID NO: 823030 - DNA, 25 bp, Homo sapien
aggcacctttagatcctgagcatgc

SEQ ID NO: 823031 - DNA, 25 bp, Homo sapien
gtgggtgccgccatctataatgcag

SEQ ID NO: 823032 - DNA, 25 bp, Homo sapien
catttgctccaagcaagctgtactg

SEQ ID NO: 823033 - DNA, 25 bp, Homo sapien
aagcccttttgtcctagttgtctgg

SEQ ID NO: 823034 - DNA, 25 bp, Homo sapien
tcactgagtatatgtggaaatgcct

SEQ ID NO: 823035 - DNA, 25 bp, Homo sapien
ggaaatgcctgagtaaagccttatg

SEQ ID NO: 823036 - DNA, 25 bp, Homo sapien
tgagacctgcttcgtcacttgacgc

SEQ ID NO: 823037 - DNA, 25 bp, Homo sapien
tggggcataccgctggggtaggcca

SEQ ID NO: 823038 - DNA, 25 bp, Homo sapien
tgggttggggcataccgctggggta

SEQ ID NO: 823039 - DNA, 25 bp, Homo sapien
ggggcataccgctggggtaggccac

SEQ ID NO: 823040 - DNA, 25 bp, Homo sapien
tctgtgggttggggcataccgctgg

SEQ ID NO: 823041 - DNA, 25 bp, Homo sapien
ctgtagtcgagtttggtccatggag

SEQ ID NO: 823042 - DNA, 25 bp, Homo sapien
gatggctgtagtcgagtttggtcca

SEQ ID NO: 823043 - DNA, 25 bp, Homo sapien
tagtcgagtttggtccatggagagc

SEQ ID NO: 823044 - DNA, 25 bp, Homo sapien
ccctgtggatggctgtagtcgagtt

SEQ ID NO: 823045 - DNA, 25 bp, Homo sapien
catggtagcctgtagataaatgggc

SEQ ID NO: 823046 - DNA, 25 bp, Homo sapien
tagataaatgggctcttccctagga

SEQ ID NO: 823047 - DNA, 25 bp, Homo sapien
tagcctgtagataaatgggctcttc

SEQ ID NO: 823048 - DNA, 25 bp, Homo sapien
cctgtagataaatgggctcttccct

SEQ ID NO: 823049 - DNA, 25 bp, Homo sapien
cagggacagatactgatagcatctg

SEQ ID NO: 823050 - DNA, 25 bp, Homo sapien
gatactgatagcatctgatcttgaa

SEQ ID NO: 823051 - DNA, 25 bp, Homo sapien
tactgtgagaacgttcagcctagac

SEQ ID NO: 823052 - DNA, 25 bp, Homo sapien
gctcctctactgtgagaacgttcag

SEQ ID NO: 823053 - DNA, 25 bp, Homo sapien
tgataaagatgttgcggacagctgg

SEQ ID NO: 823054 - DNA, 25 bp, Homo sapien
ccttggaaatctatggcagtggcat

SEQ ID NO: 823055 - DNA, 25 bp, Homo sapien
tgaactttgtgactttaccaaggaa

SEQ ID NO: 823056 - DNA, 25 bp, Homo sapien
ggaaagtgtgaataggtgataaaga

SEQ ID NO: 823057 - DNA, 25 bp, Homo sapien
cctgggccagagctgatgccatggt

SEQ ID NO: 823058 - DNA, 25 bp, Homo sapien
ggcctggcttgagatctgcccagaa

SEQ ID NO: 823059 - DNA, 25 bp, Homo sapien
ggaaacaccatagtgggaaactcat

SEQ ID NO: 823060 - DNA, 25 bp, Homo sapien
tagtgggaaactcatcatagttgat

SEQ ID NO: 823061 - DNA, 25 bp, Homo sapien
gttgccaagcaaggcccccaggtct

SEQ ID NO: 823062 - DNA, 25 bp, Homo sapien
ctgttgccaagcaaggcccccaggt

SEQ ID NO: 823063 - DNA, 25 bp, Homo sapien
aggcccccaggtcttcatcatcaaa

SEQ ID NO: 823064 - DNA, 25 bp, Homo sapien
caaggcccccaggtcttcatcatca

SEQ ID NO: 823065 - DNA, 25 bp, Homo sapien
tcggagttgttgatggatgccaggt

SEQ ID NO: 823066 - DNA, 25 bp, Homo sapien
gaagccacagatacgccctgttcag

SEQ ID NO: 823067 - DNA, 25 bp, Homo sapien
cacagatacgccctgttcagcagtt

SEQ ID NO: 823068 - DNA, 25 bp, Homo sapien
gtgggaagccacagatacgccctgt

SEQ ID NO: 823069 - DNA, 25 bp, Homo sapien
acagatacgccctgttcagcagttg

SEQ ID NO: 823070 - DNA, 25 bp, Homo sapien
cttcatcccctgaaaggaggctgct

SEQ ID NO: 823071 - DNA, 25 bp, Homo sapien
ttcatcccctgaaaggaggctgctg

SEQ ID NO: 823072 - DNA, 25 bp, Homo sapien
tccccacatccgcttttcgctcctg

SEQ ID NO: 823073 - DNA, 25 bp, Homo sapien
tcccttccccacatccgcttttcgc

SEQ ID NO: 823074 - DNA, 25 bp, Homo sapien
acatccgcttttcgctcctgcttcc

SEQ ID NO: 823075 - DNA, 25 bp, Homo sapien
cccacatccgcttttcgctcctgct

SEQ ID NO: 823076 - DNA, 25 bp, Homo sapien
ttgcaggcaaactgtagctgtagga

SEQ ID NO: 823077 - DNA, 25 bp, Homo sapien
tgcaggcaaactgtagctgtaggaa

SEQ ID NO: 823078 - DNA, 25 bp, Homo sapien
cttgcaggcaaactgtagctgtagg

SEQ ID NO: 823079 - DNA, 25 bp, Homo sapien
gcaggcaaactgtagctgtaggaag

SEQ ID NO: 823080 - DNA, 25 bp, Homo sapien
cgcggccagatctgtgagcccgagc

SEQ ID NO: 823081 - DNA, 25 bp, Homo sapien
agccccagcggcagctggacgatga

SEQ ID NO: 823082 - DNA, 25 bp, Homo sapien
tcttccagcgaagaggagtcggacg

SEQ ID NO: 823083 - DNA, 25 bp, Homo sapien
tggaagaggaaagccgcgatgtgct

SEQ ID NO: 823084 - DNA, 25 bp, Homo sapien
tgtttctgtgtttaacataagctgt

SEQ ID NO: 823085 - DNA, 25 bp, Homo sapien
ctttacgtagatgacaatgtttctg

SEQ ID NO: 823086 - DNA, 25 bp, Homo sapien
ttctgtgtttaacataagctgtcat

SEQ ID NO: 823087 - DNA, 25 bp, Homo sapien
caatgtttctgtgtttaacataagc

SEQ ID NO: 823088 - DNA, 25 bp, Homo sapien
tatgtgtctgagctttgtctaaatg

SEQ ID NO: 823089 - DNA, 25 bp, Homo sapien
gatacataggtttaattcatgcaag

SEQ ID NO: 823090 - DNA, 25 bp, Homo sapien
tgtctaaatgttatacagaagtttg

SEQ ID NO: 823091 - DNA, 25 bp, Homo sapien
gctctcttttatacaatatgcactg

SEQ ID NO: 823092 - DNA, 25 bp, Homo sapien
gcacagatagtactataagtaactt

SEQ ID NO: 823093 - DNA, 25 bp, Homo sapien
aaggtcatgaagttctggagcctct

SEQ ID NO: 823094 - DNA, 25 bp, Homo sapien
cataacagaaggtcatgaagttctg

SEQ ID NO: 823095 - DNA, 25 bp, Homo sapien
tgttgagcacagatagtactataag

SEQ ID NO: 823096 - DNA, 25 bp, Homo sapien
tcacaactattgtcttagattggac

SEQ ID NO: 823097 - DNA, 25 bp, Homo sapien
ggtcattttcaggtatgatcctata

SEQ ID NO: 823098 - DNA, 25 bp, Homo sapien
gttgattatcttcacaactattgtc

SEQ ID NO: 823099 - DNA, 25 bp, Homo sapien
gattggacaaatgccaggtcatttt

SEQ ID NO: 823100 - DNA, 25 bp, Homo sapien
tatagtaggtagcattaggccgagg

SEQ ID NO: 823101 - DNA, 25 bp, Homo sapien
tgtagctgtgcatggagttcttgct

SEQ ID NO: 823102 - DNA, 25 bp, Homo sapien
gctacaatagcaggccttgctatag

SEQ ID NO: 823103 - DNA, 25 bp, Homo sapien
aacagtatcaagcttgtagctgtgc

SEQ ID NO: 823104 - DNA, 25 bp, Homo sapien
catgcaaagtggctgtaattcacca

SEQ ID NO: 823105 - DNA, 25 bp, Homo sapien
tagatgctgtcaaaataagggtcat

SEQ ID NO: 823106 - DNA, 25 bp, Homo sapien
tcatttttgtggtagatgctgtcaa

SEQ ID NO: 823107 - DNA, 25 bp, Homo sapien
gggcttggaaacctgatgagatcat

SEQ ID NO: 823108 - DNA, 25 bp, Homo sapien
cagcctgaagagatgttgatcctaa

SEQ ID NO: 823109 - DNA, 25 bp, Homo sapien
tgatgtgctgcacgggttgcacgca

SEQ ID NO: 823110 - DNA, 25 bp, Homo sapien
cagatctgtcaggtaaatgcctggt

SEQ ID NO: 823111 - DNA, 25 bp, Homo sapien
gagagggcatgactctccttcctgc

SEQ ID NO: 823112 - DNA, 25 bp, Homo sapien
cgtgttctactgcatcaaggtctct

SEQ ID NO: 823113 - DNA, 25 bp, Homo sapien
gagcagaggctctgagcctgaatac

SEQ ID NO: 823114 - DNA, 25 bp, Homo sapien
ctacaatagcaaagagcagaggctc

SEQ ID NO: 823115 - DNA, 25 bp, Homo sapien
aggctctgagcctgaatacccccac

SEQ ID NO: 823116 - DNA, 25 bp, Homo sapien
cagaggctctgagcctgaatacccc

SEQ ID NO: 823117 - DNA, 25 bp, Homo sapien
ttcttaaatacttgcaggtcatagg

SEQ ID NO: 823118 - DNA, 25 bp, Homo sapien
ttcaataacttgcatcatattctta

SEQ ID NO: 823119 - DNA, 25 bp, Homo sapien
ttactcctcattgtgtaggagggta

SEQ ID NO: 823120 - DNA, 25 bp, Homo sapien
tactcctcattgtgtaggagggtac

SEQ ID NO: 823121 - DNA, 25 bp, Homo sapien
cactttgagttgagttgtggagcat

SEQ ID NO: 823122 - DNA, 25 bp, Homo sapien
tcactttgagttgagttgtggagca

SEQ ID NO: 823123 - DNA, 25 bp, Homo sapien
cttctctgtgagacacttgaagact

SEQ ID NO: 823124 - DNA, 25 bp, Homo sapien
gatatttgaaggcttcacagccctc

SEQ ID NO: 823125 - DNA, 25 bp, Homo sapien
tctctctagacttagcatctctttc

SEQ ID NO: 823126 - DNA, 25 bp, Homo sapien
tcctaattgtcaaaagaacttccag

SEQ ID NO: 823127 - DNA, 25 bp, Homo sapien
cacttccagtacaagtgtgtgcaca

SEQ ID NO: 823128 - DNA, 25 bp, Homo sapien
accacttccagtacaagtgtgtgca

SEQ ID NO: 823129 - DNA, 25 bp, Homo sapien
ccaccacttccagtacaagtgtgtg

SEQ ID NO: 823130 - DNA, 25 bp, Homo sapien
caccaccacttccagtacaagtgtg

SEQ ID NO: 823131 - DNA, 25 bp, Homo sapien
caaagcatcagaactgatcctaaca

SEQ ID NO: 823132 - DNA, 25 bp, Homo sapien
gcatcagaactgatcctaacacctt

SEQ ID NO: 823133 - DNA, 25 bp, Homo sapien
tcagaactgatcctaacaccttcac

SEQ ID NO: 823134 - DNA, 25 bp, Homo sapien
ccagcacctccagattggcaaagca

SEQ ID NO: 823135 - DNA, 25 bp, Homo sapien
gtaagtcagaagcaattaaggtgag

SEQ ID NO: 823136 - DNA, 25 bp, Homo sapien
tccctcacccgagctagtaaatttc

SEQ ID NO: 823137 - DNA, 25 bp, Homo sapien
ccaacaaccagtatgatgtggaatg

SEQ ID NO: 823138 - DNA, 25 bp, Homo sapien
taaggtgagagtaggaagttccttc

SEQ ID NO: 823139 - DNA, 25 bp, Homo sapien
gttgttgatttaccccagcagctgt

SEQ ID NO: 823140 - DNA, 25 bp, Homo sapien
cagcagcaagtctatggtggagcca

SEQ ID NO: 823141 - DNA, 25 bp, Homo sapien
tgctgagctgaacctaccctttgac

SEQ ID NO: 823142 - DNA, 25 bp, Homo sapien
tgagttagactccatgcctttgtgg

SEQ ID NO: 823143 - DNA, 25 bp, Homo sapien
cttcgttggcactttccagctgtta

SEQ ID NO: 823144 - DNA, 25 bp, Homo sapien
gctatttttaatcttcgttggcact

SEQ ID NO: 823145 - DNA, 25 bp, Homo sapien
ttttaatcttcgttggcactttcca

SEQ ID NO: 823146 - DNA, 25 bp, Homo sapien
aatcttcgttggcactttccagctg

SEQ ID NO: 823147 - DNA, 25 bp, Homo sapien
caatgatctcttttgtcgtaagcat

SEQ ID NO: 823148 - DNA, 25 bp, Homo sapien
ttcaatgatctcttttgtcgtaagc

SEQ ID NO: 823149 - DNA, 25 bp, Homo sapien
tctcaggggatctgacgtttctact

SEQ ID NO: 823150 - DNA, 25 bp, Homo sapien
gggatctgacgtttctacttcttgc

SEQ ID NO: 823151 - DNA, 25 bp, Homo sapien
caatgcgtgtctgctctgctgcctg

SEQ ID NO: 823152 - DNA, 25 bp, Homo sapien
catggatgggaagatatcgggcaca

SEQ ID NO: 823153 - DNA, 25 bp, Homo sapien
ggcagagactttgcaggtatcagaa

SEQ ID NO: 823154 - DNA, 25 bp, Homo sapien
ggccacagccgcagtgatttttctt

SEQ ID NO: 823155 - DNA, 25 bp, Homo sapien
gcccaagatcatgttcactggctgc

SEQ ID NO: 823156 - DNA, 25 bp, Homo sapien
aaaagctgcttccacctggcccaag

SEQ ID NO: 823157 - DNA, 25 bp, Homo sapien
gatcatgttcactggctgccagatt

SEQ ID NO: 823158 - DNA, 25 bp, Homo sapien
cctggcccaagatcatgttcactgg

SEQ ID NO: 823159 - DNA, 25 bp, Homo sapien
tcttctcttgatggttcttctccca

SEQ ID NO: 823160 - DNA, 25 bp, Homo sapien
catcttctcttgatggttcttctcc

SEQ ID NO: 823161 - DNA, 25 bp, Homo sapien
gtccttgatctcatcttctcttgat

SEQ ID NO: 823162 - DNA, 25 bp, Homo sapien
cctgtccttgatctcatcttctctt

SEQ ID NO: 823163 - DNA, 25 bp, Homo sapien
tttgtcctgtaatgtactacacaat

SEQ ID NO: 823164 - DNA, 25 bp, Homo sapien
tgtcctgtaatgtactacacaattc

SEQ ID NO: 823165 - DNA, 25 bp, Homo sapien
ttgtcctgtaatgtactacacaatt

SEQ ID NO: 823166 - DNA, 25 bp, Homo sapien
ggtgttgacagcaaacaaatctgtg

SEQ ID NO: 823167 - DNA, 25 bp, Homo sapien
gtgttgacagcaaacaaatctgtgg

SEQ ID NO: 823168 - DNA, 25 bp, Homo sapien
ttaattattgtcgtcagaatgatga

SEQ ID NO: 823169 - DNA, 25 bp, Homo sapien
attattgtcgtcagaatgatgaaag

SEQ ID NO: 823170 - DNA, 25 bp, Homo sapien
tgtacccttggaactggactcattg

SEQ ID NO: 823171 - DNA, 25 bp, Homo sapien
tgttcctcggaatgttgtacccttg

SEQ ID NO: 823172 - DNA, 25 bp, Homo sapien
caaggctctaaactatgttcctcgg

SEQ ID NO: 823173 - DNA, 25 bp, Homo sapien
tggctgggccttcattcaaatcctc

SEQ ID NO: 823174 - DNA, 25 bp, Homo sapien
acattaatggtgctttggataaagc

SEQ ID NO: 823175 - DNA, 25 bp, Homo sapien
attaatggtgctttggataaagcag

SEQ ID NO: 823176 - DNA, 25 bp, Homo sapien
cattaatggtgctttggataaagca

SEQ ID NO: 823177 - DNA, 25 bp, Homo sapien
ttacattaatggtgctttggataaa

SEQ ID NO: 823178 - DNA, 25 bp, Homo sapien
tgttatccagggcttcttttttgtc

SEQ ID NO: 823179 - DNA, 25 bp, Homo sapien
cttgcaatgttatccagggcttctt

SEQ ID NO: 823180 - DNA, 25 bp, Homo sapien
atcatggtccacatagaaattgctc

SEQ ID NO: 823181 - DNA, 25 bp, Homo sapien
ttttgtcatcatggtccacatagaa

SEQ ID NO: 823182 - DNA, 25 bp, Homo sapien
ctttaacagcagctattgtctcctc

SEQ ID NO: 823183 - DNA, 25 bp, Homo sapien
ttagacacaggagccaccttaaccg

SEQ ID NO: 823184 - DNA, 25 bp, Homo sapien
tttagacacaggagccaccttaacc

SEQ ID NO: 823185 - DNA, 25 bp, Homo sapien
ctttagacacaggagccaccttaac

SEQ ID NO: 823186 - DNA, 25 bp, Homo sapien
aacatgtccctctctcagtgggatc

SEQ ID NO: 823187 - DNA, 25 bp, Homo sapien
tctaaaggcaaaccatccaatccct

SEQ ID NO: 823188 - DNA, 25 bp, Homo sapien
cgccggttacgtccacatcgaggga

SEQ ID NO: 823189 - DNA, 25 bp, Homo sapien
cattactttgacgttggaagcagtc

SEQ ID NO: 823190 - DNA, 25 bp, Homo sapien
catagtccggagatctgatgttcag

SEQ ID NO: 823191 - DNA, 25 bp, Homo sapien
tgatgttcaggtgcccccgactgaa

SEQ ID NO: 823192 - DNA, 25 bp, Homo sapien
tcaggtgcccccgactgaatcaaag

SEQ ID NO: 823193 - DNA, 25 bp, Homo sapien
ttatggaaaccatagtccggagatc

SEQ ID NO: 823194 - DNA, 25 bp, Homo sapien
tgctgggactgcaagggactcctca

SEQ ID NO: 823195 - DNA, 25 bp, Homo sapien
ctgggactgcaagggactcctcatg

SEQ ID NO: 823196 - DNA, 25 bp, Homo sapien
cctcatggaaagattgaatgtcagc

SEQ ID NO: 823197 - DNA, 25 bp, Homo sapien
ggaaagattgaatgtcagcagccat

SEQ ID NO: 823198 - DNA, 25 bp, Homo sapien
aatttctgagctgaccactgatggc

SEQ ID NO: 823199 - DNA, 25 bp, Homo sapien
cagggttccttgctttggtctaggc

SEQ ID NO: 823200 - DNA, 25 bp, Homo sapien
gcatattgttcggaggattgccaca

SEQ ID NO: 823201 - DNA, 25 bp, Homo sapien
gccacattaagcctgaccctgagaa

SEQ ID NO: 823202 - DNA, 25 bp, Homo sapien
ttgttccctgggtaataggctctcc

SEQ ID NO: 823203 - DNA, 25 bp, Homo sapien
ctagttggtatgactttcttctttt

SEQ ID NO: 823204 - DNA, 25 bp, Homo sapien
tagttggtatgactttcttcttttc

SEQ ID NO: 823205 - DNA, 25 bp, Homo sapien
ctatttctcctatttttgttccctg

SEQ ID NO: 823206 - DNA, 25 bp, Homo sapien
tcagcaaggctgtagttctcaatac

SEQ ID NO: 823207 - DNA, 25 bp, Homo sapien
ctttccctcaggttgtggttgtgaa

SEQ ID NO: 823208 - DNA, 25 bp, Homo sapien
cttccacaggcccaaatcggttcat

SEQ ID NO: 823209 - DNA, 25 bp, Homo sapien
tagttctcaataccaccaacttcca

SEQ ID NO: 823210 - DNA, 25 bp, Homo sapien
gctgtgatcattgaaaaagtcacca

SEQ ID NO: 823211 - DNA, 25 bp, Homo sapien
taactgatttacacaggagactgct

SEQ ID NO: 823212 - DNA, 25 bp, Homo sapien
caagtgtcccactggtcatttggta

SEQ ID NO: 823213 - DNA, 25 bp, Homo sapien
tcatacacagcattaagacacaagt

SEQ ID NO: 823214 - DNA, 25 bp, Homo sapien
ttctctcttttcaatcacctctgag

SEQ ID NO: 823215 - DNA, 25 bp, Homo sapien
aatcacctctgagttcagtgaactc

SEQ ID NO: 823216 - DNA, 25 bp, Homo sapien
tcaatcacctctgagttcagtgaac

SEQ ID NO: 823217 - DNA, 25 bp, Homo sapien
tcttttcaatcacctctgagttcag

SEQ ID NO: 823218 - DNA, 25 bp, Homo sapien
caccaactcccagatgtttatctgt

SEQ ID NO: 823219 - DNA, 25 bp, Homo sapien
caaagaagttgcttatgtggccacc

SEQ ID NO: 823220 - DNA, 25 bp, Homo sapien
taagaatcagtgttttggcaaagaa

SEQ ID NO: 823221 - DNA, 25 bp, Homo sapien
gagacttttggatctttggctaata

SEQ ID NO: 823222 - DNA, 25 bp, Homo sapien
ccaaggctctaagggatggtttgct

SEQ ID NO: 823223 - DNA, 25 bp, Homo sapien
ggtgcaccggactgtctccctgatg

SEQ ID NO: 823224 - DNA, 25 bp, Homo sapien
gtttgctctttgtgtggtgcaccgg

SEQ ID NO: 823225 - DNA, 25 bp, Homo sapien
gagtggaacaatgatcagggcccaa

SEQ ID NO: 823226 - DNA, 25 bp, Homo sapien
cagcaaatgctgtaagaggcttgat

SEQ ID NO: 823227 - DNA, 25 bp, Homo sapien
tatcttgcctaaaatgaaagtgtaa

SEQ ID NO: 823228 - DNA, 25 bp, Homo sapien
cttgatgggcgatgtgtgtgtgata

SEQ ID NO: 823229 - DNA, 25 bp, Homo sapien
aaatgctgtaagaggcttgatgggc

SEQ ID NO: 823230 - DNA, 25 bp, Homo sapien
cctgcctctaccacctgtggcatca

SEQ ID NO: 823231 - DNA, 25 bp, Homo sapien
tgggatgtagttcatcttcagggac

SEQ ID NO: 823232 - DNA, 25 bp, Homo sapien
ctgcctctaccacctgtggcatcat

SEQ ID NO: 823233 - DNA, 25 bp, Homo sapien
aattctgggatgtagttcatcttca

SEQ ID NO: 823234 - DNA, 25 bp, Homo sapien
tcatctactcttaagagtttactgc

SEQ ID NO: 823235 - DNA, 25 bp, Homo sapien
tctactcttaagagtttactgcaca

SEQ ID NO: 823236 - DNA, 25 bp, Homo sapien
tactcttaagagtttactgcacaca

SEQ ID NO: 823237 - DNA, 25 bp, Homo sapien
catctactcttaagagtttactgca

SEQ ID NO: 823238 - DNA, 25 bp, Homo sapien
cgagagttaatactgattctctgca

SEQ ID NO: 823239 - DNA, 25 bp, Homo sapien
gggactcctgaagagttcgtagaga

SEQ ID NO: 823240 - DNA, 25 bp, Homo sapien
taggtccaggatcccgagagttaat

SEQ ID NO: 823241 - DNA, 25 bp, Homo sapien
gagctccatttacactaggtccagg

SEQ ID NO: 823242 - DNA, 25 bp, Homo sapien
tggaataaatccctggagtggtccc

SEQ ID NO: 823243 - DNA, 25 bp, Homo sapien
agtgcttgcgacaatctcagtgatc

SEQ ID NO: 823244 - DNA, 25 bp, Homo sapien
ccagtcagtcctcagtgcttgcgac

SEQ ID NO: 823245 - DNA, 25 bp, Homo sapien
gatggaataaatccctggagtggtc

SEQ ID NO: 823246 - DNA, 25 bp, Homo sapien
gagaatcttagatgtactagggctt

SEQ ID NO: 823247 - DNA, 25 bp, Homo sapien
tcaggaattattgacatgacagatg

SEQ ID NO: 823248 - DNA, 25 bp, Homo sapien
tactagggctttaatgtaagtcacc

SEQ ID NO: 823249 - DNA, 25 bp, Homo sapien
ccaagaagtgctggctcaatattcc

SEQ ID NO: 823250 - DNA, 25 bp, Homo sapien
gatgagagtgcaatttcagcagaac

SEQ ID NO: 823251 - DNA, 25 bp, Homo sapien
gaataagggaatggacctgtattaa

SEQ ID NO: 823252 - DNA, 25 bp, Homo sapien
ctgggacctggagttagattgctta

SEQ ID NO: 823253 - DNA, 25 bp, Homo sapien
aaaatggcattggatattacaaagt

SEQ ID NO: 823254 - DNA, 25 bp, Homo sapien
taggtgggtatcaaaacaagacaaa

SEQ ID NO: 823255 - DNA, 25 bp, Homo sapien
tcaaaacatcttagtcatacgacca

SEQ ID NO: 823256 - DNA, 25 bp, Homo sapien
ctgaaatttatatctggcatacgga

SEQ ID NO: 823257 - DNA, 25 bp, Homo sapien
ggcatacggataggcttatattcaa

SEQ ID NO: 823258 - DNA, 25 bp, Homo sapien
tagctttaggcttgtatgcccatcg

SEQ ID NO: 823259 - DNA, 25 bp, Homo sapien
cctcggtggtcgattgagcaggtct

SEQ ID NO: 823260 - DNA, 25 bp, Homo sapien
gaacagacagctgggaaaccctttc

SEQ ID NO: 823261 - DNA, 25 bp, Homo sapien
tcaatctttgggcaagccgtcagca

SEQ ID NO: 823262 - DNA, 25 bp, Homo sapien
tgaggtcatgatggtaacagtggcc

SEQ ID NO: 823263 - DNA, 25 bp, Homo sapien
tattgattgctatggactatgtccc

SEQ ID NO: 823264 - DNA, 25 bp, Homo sapien
catgagagggtaaccagtataagcc

SEQ ID NO: 823265 - DNA, 25 bp, Homo sapien
taaatatgagcataccatgagaggg

SEQ ID NO: 823266 - DNA, 25 bp, Homo sapien
cttagtcaggatcaaatagctctat

SEQ ID NO: 823267 - DNA, 25 bp, Homo sapien
gtcaggatcaaatagctctatctag

SEQ ID NO: 823268 - DNA, 25 bp, Homo sapien
tcaggatcaaatagctctatctagt

SEQ ID NO: 823269 - DNA, 25 bp, Homo sapien
tagtcaggatcaaatagctctatct

SEQ ID NO: 823270 - DNA, 25 bp, Homo sapien
atgatcatcttgtcattcttatcca

SEQ ID NO: 823271 - DNA, 25 bp, Homo sapien
tgatcatcttgtcattcttatccag

SEQ ID NO: 823272 - DNA, 25 bp, Homo sapien
tagtgttcctctgcaacacaggagc

SEQ ID NO: 823273 - DNA, 25 bp, Homo sapien
ctataagatggcctcacctcctgca

SEQ ID NO: 823274 - DNA, 25 bp, Homo sapien
ggaaggctgtcagatctccactgag

SEQ ID NO: 823275 - DNA, 25 bp, Homo sapien
acctcctgcactgtcttgactgctt

SEQ ID NO: 823276 - DNA, 25 bp, Homo sapien
agttacagcgattccttctttatgg

SEQ ID NO: 823277 - DNA, 25 bp, Homo sapien
aagcaataagttacagcgattcctt

SEQ ID NO: 823278 - DNA, 25 bp, Homo sapien
tacagcgattccttctttatggtat

SEQ ID NO: 823279 - DNA, 25 bp, Homo sapien
gcaataagttacagcgattccttct

SEQ ID NO: 823280 - DNA, 25 bp, Homo sapien
tagaggtccctgagagaatcatcag

SEQ ID NO: 823281 - DNA, 25 bp, Homo sapien
caatgattctcgagtgttgagctaa

SEQ ID NO: 823282 - DNA, 25 bp, Homo sapien
ttgaagctgcaatgattctcgagtg

SEQ ID NO: 823283 - DNA, 25 bp, Homo sapien
gagtgttgagctaatctactagagg

SEQ ID NO: 823284 - DNA, 25 bp, Homo sapien
caatgagggtaagatggataatggc

SEQ ID NO: 823285 - DNA, 25 bp, Homo sapien
tttcctgagcttctgattgatgcca

SEQ ID NO: 823286 - DNA, 25 bp, Homo sapien
taatggctgtaatggagaacagtca

SEQ ID NO: 823287 - DNA, 25 bp, Homo sapien
tcagtaatgactgcagttgggctta

SEQ ID NO: 823288 - DNA, 25 bp, Homo sapien
aggacaaagtgcagtcttgctggct

SEQ ID NO: 823289 - DNA, 25 bp, Homo sapien
ggacaaagtgcagtcttgctggctt

SEQ ID NO: 823290 - DNA, 25 bp, Homo sapien
tatggcctccacaagttttctgttt

SEQ ID NO: 823291 - DNA, 25 bp, Homo sapien
tgttttatggcctccacaagttttc

SEQ ID NO: 823292 - DNA, 25 bp, Homo sapien
ttttatggcctccacaagttttctg

SEQ ID NO: 823293 - DNA, 25 bp, Homo sapien
atggcctccacaagttttctgtttt

SEQ ID NO: 823294 - DNA, 25 bp, Homo sapien
tgggttgaacaacagcttcatgcaa

SEQ ID NO: 823295 - DNA, 25 bp, Homo sapien
catgcaatggaaaccatcctttttc

SEQ ID NO: 823296 - DNA, 25 bp, Homo sapien
gttgaatgggttgaacaacagcttc

SEQ ID NO: 823297 - DNA, 25 bp, Homo sapien
ccagaacaatctcaagtatttgttg

SEQ ID NO: 823298 - DNA, 25 bp, Homo sapien
aattcccagagtgtcttataggatg

SEQ ID NO: 823299 - DNA, 25 bp, Homo sapien
cattttccaccagaccagctttgac

SEQ ID NO: 823300 - DNA, 25 bp, Homo sapien
agaaggggggtctctcctttatcat

SEQ ID NO: 823301 - DNA, 25 bp, Homo sapien
gttcttacattttccaccagaccag

SEQ ID NO: 823302 - DNA, 25 bp, Homo sapien
tgattgttaaaaacaacagtaagta

SEQ ID NO: 823303 - DNA, 25 bp, Homo sapien
aatgattgttaaaaacaacagtaag

SEQ ID NO: 823304 - DNA, 25 bp, Homo sapien
aaacaacagtaagtatattaacaca

SEQ ID NO: 823305 - DNA, 25 bp, Homo sapien
ttgaaaatgattgttaaaaacaaca

SEQ ID NO: 823306 - DNA, 25 bp, Homo sapien
tgctgaccatcgcttgacacagggc

SEQ ID NO: 823307 - DNA, 25 bp, Homo sapien
tgaccatcgcttgacacagggctgg

SEQ ID NO: 823308 - DNA, 25 bp, Homo sapien
tatgtttgatcagagtcgacaccat

SEQ ID NO: 823309 - DNA, 25 bp, Homo sapien
agtgttatgtttgatcagagtcgac

SEQ ID NO: 823310 - DNA, 25 bp, Homo sapien
ctctcaggtggacattgcctccatg

SEQ ID NO: 823311 - DNA, 25 bp, Homo sapien
gcagcgacgcctagtggtgtgactc

SEQ ID NO: 823312 - DNA, 25 bp, Homo sapien
ctagtggtgtgactccaaatccatc

SEQ ID NO: 823313 - DNA, 25 bp, Homo sapien
catctctcaggtggacattgcctcc

SEQ ID NO: 823314 - DNA, 25 bp, Homo sapien
tttgtggattagatgttctaacacg

SEQ ID NO: 823315 - DNA, 25 bp, Homo sapien
aatgcagtcgggattgccacctcct

SEQ ID NO: 823316 - DNA, 25 bp, Homo sapien
gttaggtacatttccgcttcctcca

SEQ ID NO: 823317 - DNA, 25 bp, Homo sapien
gaagatgtcctgctcggttaggtac

SEQ ID NO: 823318 - DNA, 25 bp, Homo sapien
cagctcggtgtataggaagatgtcc

SEQ ID NO: 823319 - DNA, 25 bp, Homo sapien
tattggccctcactgcaacaagtag

SEQ ID NO: 823320 - DNA, 25 bp, Homo sapien
ggatctaagtttgggtctgcacctg

SEQ ID NO: 823321 - DNA, 25 bp, Homo sapien
tgttagcccacttttccgaattgca

SEQ ID NO: 823322 - DNA, 25 bp, Homo sapien
cctctcatcgtcatagctctgggaa

SEQ ID NO: 823323 - DNA, 25 bp, Homo sapien
attacacaagatgtccatcctggca

SEQ ID NO: 823324 - DNA, 25 bp, Homo sapien
ttattacacaagatgtccatcctgg

SEQ ID NO: 823325 - DNA, 25 bp, Homo sapien
tattacacaagatgtccatcctggc

SEQ ID NO: 823326 - DNA, 25 bp, Homo sapien
catgtaatctattagtacacgagta

SEQ ID NO: 823327 - DNA, 25 bp, Homo sapien
tctattagtacacgagtaactctgc

SEQ ID NO: 823328 - DNA, 25 bp, Homo sapien
tagtacacgagtaactctgcctacc

SEQ ID NO: 823329 - DNA, 25 bp, Homo sapien
tacacgagtaactctgcctaccaag

SEQ ID NO: 823330 - DNA, 25 bp, Homo sapien
tagtatttggcggatttctggccat

SEQ ID NO: 823331 - DNA, 25 bp, Homo sapien
ctgtacttctagtgcagacttcagt

SEQ ID NO: 823332 - DNA, 25 bp, Homo sapien
tctctgtacttctagtgcagacttc

SEQ ID NO: 823333 - DNA, 25 bp, Homo sapien
attctctctgtacttctagtgcaga

SEQ ID NO: 823334 - DNA, 25 bp, Homo sapien
tatctttgaatagctggtggtagag

SEQ ID NO: 823335 - DNA, 25 bp, Homo sapien
taaccgacacaaatgcttcaatgaa

SEQ ID NO: 823336 - DNA, 25 bp, Homo sapien
gtcaattttagctcttgtccataga

SEQ ID NO: 823337 - DNA, 25 bp, Homo sapien
tctggagacccataagccttcgaat

SEQ ID NO: 823338 - DNA, 25 bp, Homo sapien
ctgtgaacttacaggcaggaggagc

SEQ ID NO: 823339 - DNA, 25 bp, Homo sapien
acagcaagaccgtgaaagacaggag

SEQ ID NO: 823340 - DNA, 25 bp, Homo sapien
gaggccaattgtctacataggtcag

SEQ ID NO: 823341 - DNA, 25 bp, Homo sapien
cagatgccagatcacagtctgtgaa

SEQ ID NO: 823342 - DNA, 25 bp, Homo sapien
catgctctagggaatgtgtttggcc

SEQ ID NO: 823343 - DNA, 25 bp, Homo sapien
ctcagatatttgatggcccacagtg

SEQ ID NO: 823344 - DNA, 25 bp, Homo sapien
tacagcagaggttccccatacaaag

SEQ ID NO: 823345 - DNA, 25 bp, Homo sapien
gagcatggtctattctacagcagag

SEQ ID NO: 823346 - DNA, 25 bp, Homo sapien
gggactaaaacagccacagacatct

SEQ ID NO: 823347 - DNA, 25 bp, Homo sapien
gagcagctgttaccctttcccggat

SEQ ID NO: 823348 - DNA, 25 bp, Homo sapien
tcctaatgctgactagggaggagca

SEQ ID NO: 823349 - DNA, 25 bp, Homo sapien
caggctccactgtagaatgtttggc

SEQ ID NO: 823350 - DNA, 25 bp, Homo sapien
cagggtcatgacaactgtcacttta

SEQ ID NO: 823351 - DNA, 25 bp, Homo sapien
aaaccccgagtgttggtctgacaag

SEQ ID NO: 823352 - DNA, 25 bp, Homo sapien
cagcgatctccttggtatggttccc

SEQ ID NO: 823353 - DNA, 25 bp, Homo sapien
aggtgagcacccaagacagcgatct

SEQ ID NO: 823354 - DNA, 25 bp, Homo sapien
gtagaaggtcttccattcatttcag

SEQ ID NO: 823355 - DNA, 25 bp, Homo sapien
ggagtagaaggtcttccattcattt

SEQ ID NO: 823356 - DNA, 25 bp, Homo sapien
agtagaaggtcttccattcatttca

SEQ ID NO: 823357 - DNA, 25 bp, Homo sapien
gagtagaaggtcttccattcatttc

SEQ ID NO: 823358 - DNA, 25 bp, Homo sapien
taagtgctcatatctcgtagtggca

SEQ ID NO: 823359 - DNA, 25 bp, Homo sapien
cgtagtggcatttttgtccctttca

SEQ ID NO: 823360 - DNA, 25 bp, Homo sapien
aatgagtgagcccaactggccacta

SEQ ID NO: 823361 - DNA, 25 bp, Homo sapien
tatgtcccccaatctaatgagtgag

SEQ ID NO: 823362 - DNA, 25 bp, Homo sapien
ggaccaggcattcaaggcggccaga

SEQ ID NO: 823363 - DNA, 25 bp, Homo sapien
aggcaagtggcaggctggtcaacaa

SEQ ID NO: 823364 - DNA, 25 bp, Homo sapien
ccaggcattcaaggcggccagaagc

SEQ ID NO: 823365 - DNA, 25 bp, Homo sapien
tgaaggaccaggcattcaaggcggc

SEQ ID NO: 823366 - DNA, 25 bp, Homo sapien
cctgctttgtcagacccagaaggag

SEQ ID NO: 823367 - DNA, 25 bp, Homo sapien
gtccctgctttgtcagacccagaag

SEQ ID NO: 823368 - DNA, 25 bp, Homo sapien
tccctgctttgtcagacccagaagg

SEQ ID NO: 823369 - DNA, 25 bp, Homo sapien
ggtccctgctttgtcagacccagaa

SEQ ID NO: 823370 - DNA, 25 bp, Homo sapien
gcctctctgctgaatgtccctgtgg

SEQ ID NO: 823371 - DNA, 25 bp, Homo sapien
tactgagtcctcttcggtagccaaa

SEQ ID NO: 823372 - DNA, 25 bp, Homo sapien
tgccttagccccacgggaaggttgc

SEQ ID NO: 823373 - DNA, 25 bp, Homo sapien
gaaggttgcggtcaggttcaatgtc

SEQ ID NO: 823374 - DNA, 25 bp, Homo sapien
attcccccagcctctccttctccaa

SEQ ID NO: 823375 - DNA, 25 bp, Homo sapien
ttcccccagcctctccttctccaag

SEQ ID NO: 823376 - DNA, 25 bp, Homo sapien
agcctctccttctccaagagttttt

SEQ ID NO: 823377 - DNA, 25 bp, Homo sapien
cccagcctctccttctccaagagtt

SEQ ID NO: 823378 - DNA, 25 bp, Homo sapien
tgatggggaggtggggttagccaag

SEQ ID NO: 823379 - DNA, 25 bp, Homo sapien
gccaaggaaaagtcccgagagccta

SEQ ID NO: 823380 - DNA, 25 bp, Homo sapien
tctgggtttgggatggggtgatggg

SEQ ID NO: 823381 - DNA, 25 bp, Homo sapien
ttagccaaggaaaagtcccgagagc

SEQ ID NO: 823382 - DNA, 25 bp, Homo sapien
tggcccttcctgcaatgattgacgt

SEQ ID NO: 823383 - DNA, 25 bp, Homo sapien
gattagtactgtggccttggcagac

SEQ ID NO: 823384 - DNA, 25 bp, Homo sapien
gaggaattgacctgcccaagtactg

SEQ ID NO: 823385 - DNA, 25 bp, Homo sapien
gatgattccaacagagtgcaagggt

SEQ ID NO: 823386 - DNA, 25 bp, Homo sapien
cctgttgtgggaattggatttgcac

SEQ ID NO: 823387 - DNA, 25 bp, Homo sapien
catcatgcctggcaactacagacag

SEQ ID NO: 823388 - DNA, 25 bp, Homo sapien
caacagctgctcgaagattttccct

SEQ ID NO: 823389 - DNA, 25 bp, Homo sapien
ggatttgcaccctccatcagcaagt

SEQ ID NO: 823390 - DNA, 25 bp, Homo sapien
ctgcctgaagcatgtagatctagct

SEQ ID NO: 823391 - DNA, 25 bp, Homo sapien
tccaggttcgtttgcccagttgcta

SEQ ID NO: 823392 - DNA, 25 bp, Homo sapien
ttgcccagttgctatcacaaaatag

SEQ ID NO: 823393 - DNA, 25 bp, Homo sapien
ggttcgtttgcccagttgctatcac

SEQ ID NO: 823394 - DNA, 25 bp, Homo sapien
tttcagtaaagataagctcttcttc

SEQ ID NO: 823395 - DNA, 25 bp, Homo sapien
cagtaaagataagctcttcttcact

SEQ ID NO: 823396 - DNA, 25 bp, Homo sapien
taaagataagctcttcttcactttc

SEQ ID NO: 823397 - DNA, 25 bp, Homo sapien
gttactttcagtaaagataagctct

SEQ ID NO: 823398 - DNA, 25 bp, Homo sapien
ctcctcttcctcctgggactcctcc

SEQ ID NO: 823399 - DNA, 25 bp, Homo sapien
cctcctcttcctcctgggactcctc

SEQ ID NO: 823400 - DNA, 25 bp, Homo sapien
gaattgacactatcataatttacag

SEQ ID NO: 823401 - DNA, 25 bp, Homo sapien
cataatttacagttccattaatccc

SEQ ID NO: 823402 - DNA, 25 bp, Homo sapien
ttaatcccttttgcagtttcaattg

SEQ ID NO: 823403 - DNA, 25 bp, Homo sapien
tgtcagaattgacactatcataatt

SEQ ID NO: 823404 - DNA, 25 bp, Homo sapien
tccacaagggtgaatggcagctggg

SEQ ID NO: 823405 - DNA, 25 bp, Homo sapien
agggtgaatggcagctggggactct

SEQ ID NO: 823406 - DNA, 25 bp, Homo sapien
gccattggtcaaatttatgttctct

SEQ ID NO: 823407 - DNA, 25 bp, Homo sapien
cattggtcaaatttatgttctctat

SEQ ID NO: 823408 - DNA, 25 bp, Homo sapien
ggccatggctgcactgtcgtcggca

SEQ ID NO: 823409 - DNA, 25 bp, Homo sapien
gactgaacgtcttcaccacagtgtt

SEQ ID NO: 823410 - DNA, 25 bp, Homo sapien
tcgtcggcatgcgtgttggccagac

SEQ ID NO: 823411 - DNA, 25 bp, Homo sapien
taatcttgtccaaagcgtcctcaat

SEQ ID NO: 823412 - DNA, 25 bp, Homo sapien
ctttcccgttatgaagttggactcg

SEQ ID NO: 823413 - DNA, 25 bp, Homo sapien
ttcccgttatgaagttggactcgac

SEQ ID NO: 823414 - DNA, 25 bp, Homo sapien
cccgttatgaagttggactcgacgt

SEQ ID NO: 823415 - DNA, 25 bp, Homo sapien
ttatgaagttggactcgacgtttac

SEQ ID NO: 823416 - DNA, 25 bp, Homo sapien
cgcagctccgtgagcaccgtgttgt

SEQ ID NO: 823417 - DNA, 25 bp, Homo sapien
tggctgcccatgatgtgcctctggt

SEQ ID NO: 823418 - DNA, 25 bp, Homo sapien
tgttgtgctggagagctctcatgat

SEQ ID NO: 823419 - DNA, 25 bp, Homo sapien
gcctctggttatggaaacgcagctc

SEQ ID NO: 823420 - DNA, 25 bp, Homo sapien
gttcaaaatggtatcccagcctcag

SEQ ID NO: 823421 - DNA, 25 bp, Homo sapien
tcttgtcaaaatgctcgtcatgctc

SEQ ID NO: 823422 - DNA, 25 bp, Homo sapien
taagattgggtcctccatcgtatcc

SEQ ID NO: 823423 - DNA, 25 bp, Homo sapien
cataaggtgaagagctaggtgttcc

SEQ ID NO: 823424 - DNA, 25 bp, Homo sapien
caggagacagaggacggctcctcac

SEQ ID NO: 823425 - DNA, 25 bp, Homo sapien
gtgtggccacaggagacagaggacg

SEQ ID NO: 823426 - DNA, 25 bp, Homo sapien
gccacaggagacagaggacggctcc

SEQ ID NO: 823427 - DNA, 25 bp, Homo sapien
tggccacaggagacagaggacggct

SEQ ID NO: 823428 - DNA, 25 bp, Homo sapien
tggtggcagcctttgggaagaagga

SEQ ID NO: 823429 - DNA, 25 bp, Homo sapien
gtggtggcagcctttgggaagaagg

SEQ ID NO: 823430 - DNA, 25 bp, Homo sapien
tggcagcctttgggaagaaggaggg

SEQ ID NO: 823431 - DNA, 25 bp, Homo sapien
ggtggcagcctttgggaagaaggag

SEQ ID NO: 823432 - DNA, 25 bp, Homo sapien
tgggagtggaggagggggaggagga

SEQ ID NO: 823433 - DNA, 25 bp, Homo sapien
tgtttgatgacttctgcaatgtttc

SEQ ID NO: 823434 - DNA, 25 bp, Homo sapien
tgtccattttgtaatgcccgttggg

SEQ ID NO: 823435 - DNA, 25 bp, Homo sapien
ccattttgtaatgcccgttgggcac

SEQ ID NO: 823436 - DNA, 25 bp, Homo sapien
cgttgggcactctcctgttgtttga

SEQ ID NO: 823437 - DNA, 25 bp, Homo sapien
cctttagaatactgtttggctgttt

SEQ ID NO: 823438 - DNA, 25 bp, Homo sapien
tatttcctttagaatactgtttggc

SEQ ID NO: 823439 - DNA, 25 bp, Homo sapien
tttcctttagaatactgtttggctg

SEQ ID NO: 823440 - DNA, 25 bp, Homo sapien
agaatactgtttggctgtttcttga

SEQ ID NO: 823441 - DNA, 25 bp, Homo sapien
agaaggtcgggaactgtcttccatt

SEQ ID NO: 823442 - DNA, 25 bp, Homo sapien
ctgtggggtagaaggtcgggaactg

SEQ ID NO: 823443 - DNA, 25 bp, Homo sapien
tagaaggtcgggaactgtcttccat

SEQ ID NO: 823444 - DNA, 25 bp, Homo sapien
gtagaaggtcgggaactgtcttcca

SEQ ID NO: 823445 - DNA, 25 bp, Homo sapien
ccatgagattctcatgagctgatct

SEQ ID NO: 823446 - DNA, 25 bp, Homo sapien
ccgaattgcttccatgagattctca

SEQ ID NO: 823447 - DNA, 25 bp, Homo sapien
cccgaattgcttccatgagattctc

SEQ ID NO: 823448 - DNA, 25 bp, Homo sapien
ccccgaattgcttccatgagattct

SEQ ID NO: 823449 - DNA, 25 bp, Homo sapien
tatcgcagggcttctggaacttcca

SEQ ID NO: 823450 - DNA, 25 bp, Homo sapien
ttatcgcagggcttctggaacttcc

SEQ ID NO: 823451 - DNA, 25 bp, Homo sapien
atcgcagggcttctggaacttccac

SEQ ID NO: 823452 - DNA, 25 bp, Homo sapien
gcttcttgccaatacaaatctcacg

SEQ ID NO: 823453 - DNA, 25 bp, Homo sapien
tacaactcggagttaccaacacatc

SEQ ID NO: 823454 - DNA, 25 bp, Homo sapien
gattctctttggaattaatgggtga

SEQ ID NO: 823455 - DNA, 25 bp, Homo sapien
tcatgtaataccactgaacagttct

SEQ ID NO: 823456 - DNA, 25 bp, Homo sapien
tctgacagatgtatcaagtcacaga

SEQ ID NO: 823457 - DNA, 25 bp, Homo sapien
cagtaatgttacatacacacctgac

SEQ ID NO: 823458 - DNA, 25 bp, Homo sapien
cacacctgacagatgtattaactca

SEQ ID NO: 823459 - DNA, 25 bp, Homo sapien
acatttatcgagattacaaaaatct

SEQ ID NO: 823460 - DNA, 25 bp, Homo sapien
gtggcagcagggctcatgaagcagg

SEQ ID NO: 823461 - DNA, 25 bp, Homo sapien
gctcatgaagcagggggactcagca

SEQ ID NO: 823462 - DNA, 25 bp, Homo sapien
caggatgagctgtactgagctgtac

SEQ ID NO: 823463 - DNA, 25 bp, Homo sapien
tcctggccctgtttcaaatcaggat

SEQ ID NO: 823464 - DNA, 25 bp, Homo sapien
tcctgctgacaccgagttattaaat

SEQ ID NO: 823465 - DNA, 25 bp, Homo sapien
ctgctgacaccgagttattaaatac

SEQ ID NO: 823466 - DNA, 25 bp, Homo sapien
tcaagatcctgctgacaccgagtta

SEQ ID NO: 823467 - DNA, 25 bp, Homo sapien
aagatcctgctgacaccgagttatt

SEQ ID NO: 823468 - DNA, 25 bp, Homo sapien
tattgacccatttgggtatgcagcg

SEQ ID NO: 823469 - DNA, 25 bp, Homo sapien
catttgggtatgcagcggtagagct

SEQ ID NO: 823470 - DNA, 25 bp, Homo sapien
tgctggtcatattgacccatttggg

SEQ ID NO: 823471 - DNA, 25 bp, Homo sapien
tatgcagcggtagagctagagctgc

SEQ ID NO: 823472 - DNA, 25 bp, Homo sapien
caacttgcaaactgtaacctgagag

SEQ ID NO: 823473 - DNA, 25 bp, Homo sapien
tgcaaactgtaacctgagagtgact

SEQ ID NO: 823474 - DNA, 25 bp, Homo sapien
ggacaacttgcaaactgtaacctga

SEQ ID NO: 823475 - DNA, 25 bp, Homo sapien
gaaggacaacttgcaaactgtaacc

SEQ ID NO: 823476 - DNA, 25 bp, Homo sapien
ccaccagtaaatgggccttatgatt

SEQ ID NO: 823477 - DNA, 25 bp, Homo sapien
tgattccatttaagaggcctttctt

SEQ ID NO: 823478 - DNA, 25 bp, Homo sapien
cagtaaatgggccttatgattccat

SEQ ID NO: 823479 - DNA, 25 bp, Homo sapien
caaaccaccagtaaatgggccttat

SEQ ID NO: 823480 - DNA, 25 bp, Homo sapien
gagcatttggtcatcacagggcact

SEQ ID NO: 823481 - DNA, 25 bp, Homo sapien
ctatgtccatctctaaccagaaaag

SEQ ID NO: 823482 - DNA, 25 bp, Homo sapien
ttttggctcattggcggcagtcacc

SEQ ID NO: 823483 - DNA, 25 bp, Homo sapien
catctgggtgttgatagatgccgcc

SEQ ID NO: 823484 - DNA, 25 bp, Homo sapien
aaatgctacgtgatagacaatttca

SEQ ID NO: 823485 - DNA, 25 bp, Homo sapien
tgatagacaatttcagctagccaca

SEQ ID NO: 823486 - DNA, 25 bp, Homo sapien
aaatgtatagtgaataggatgttgc

SEQ ID NO: 823487 - DNA, 25 bp, Homo sapien
atgtatgagattcataaagactttc

SEQ ID NO: 823488 - DNA, 25 bp, Homo sapien
gagtacccattcttcgagttcaaag

SEQ ID NO: 823489 - DNA, 25 bp, Homo sapien
gatgaggctggacaactactaacca

SEQ ID NO: 823490 - DNA, 25 bp, Homo sapien
tatacctgtgcgttgtctgaaagcc

SEQ ID NO: 823491 - DNA, 25 bp, Homo sapien
agatctctcttaacttgtggccaag

SEQ ID NO: 823492 - DNA, 25 bp, Homo sapien
gatgcagaccttagtttctttagcc

SEQ ID NO: 823493 - DNA, 25 bp, Homo sapien
tgtgcaagtttacaccaggatgctc

SEQ ID NO: 823494 - DNA, 25 bp, Homo sapien
tgtagacatcactacaccgatgtag

SEQ ID NO: 823495 - DNA, 25 bp, Homo sapien
tcattccatcaacaagggagtttaa

SEQ ID NO: 823496 - DNA, 25 bp, Homo sapien
tactttcagaactggtactaattcc

SEQ ID NO: 823497 - DNA, 25 bp, Homo sapien
gatctttaggctgacaattctcaaa

SEQ ID NO: 823498 - DNA, 25 bp, Homo sapien
gggctttagcgcagattaatgtgaa

SEQ ID NO: 823499 - DNA, 25 bp, Homo sapien
ttttgcagtgtatggaaattctcag

SEQ ID NO: 823500 - DNA, 25 bp, Homo sapien
gaaagagagctaagggtcatacatt

SEQ ID NO: 823501 - DNA, 25 bp, Homo sapien
tataggtggagtgaaagtacaagct

SEQ ID NO: 823502 - DNA, 25 bp, Homo sapien
cacaaggtacacaaacaagcacttc

SEQ ID NO: 823503 - DNA, 25 bp, Homo sapien
caagcttgcagaactactttaagtg

SEQ ID NO: 823504 - DNA, 25 bp, Homo sapien
atctgtatatgattatccttctggt

SEQ ID NO: 823505 - DNA, 25 bp, Homo sapien
tatatgattatccttctggtagtag

SEQ ID NO: 823506 - DNA, 25 bp, Homo sapien
tctggtagtagaaagttgagaatac

SEQ ID NO: 823507 - DNA, 25 bp, Homo sapien
ttgagaatacagtaagacttgccat

SEQ ID NO: 823508 - DNA, 25 bp, Homo sapien
tgcattcttgatggaagtaccacga

SEQ ID NO: 823509 - DNA, 25 bp, Homo sapien
gatcatagtatgtcacacccagcag

SEQ ID NO: 823510 - DNA, 25 bp, Homo sapien
tgagtccggatgcatcatgtggtcc

SEQ ID NO: 823511 - DNA, 25 bp, Homo sapien
gaaattactgctaggagctaggcgg

SEQ ID NO: 823512 - DNA, 25 bp, Homo sapien
gggtgccgggagcttccctttctca

SEQ ID NO: 823513 - DNA, 25 bp, Homo sapien
gctgcgagatgtggcgcctctgact

SEQ ID NO: 823514 - DNA, 25 bp, Homo sapien
cggcgaaaccatgagctccgtccag

SEQ ID NO: 823515 - DNA, 25 bp, Homo sapien
gcgcgaaggtggctcgccgtcagcg

SEQ ID NO: 823516 - DNA, 25 bp, Homo sapien
cgcagtcgccggagtgcgaggacaa

SEQ ID NO: 823517 - DNA, 25 bp, Homo sapien
gcgcagtcgccggagtgcgaggaca

SEQ ID NO: 823518 - DNA, 25 bp, Homo sapien
ttagcgcagtcgccggagtgcgagg

SEQ ID NO: 823519 - DNA, 25 bp, Homo sapien
tagcgcagtcgccggagtgcgagga

SEQ ID NO: 823520 - DNA, 25 bp, Homo sapien
tagagcgtctcttcccagttttcag

SEQ ID NO: 823521 - DNA, 25 bp, Homo sapien
tgtgacacatacattaaacccgcgt

SEQ ID NO: 823522 - DNA, 25 bp, Homo sapien
agtacgaagttggaagcctgcgccc

SEQ ID NO: 823523 - DNA, 25 bp, Homo sapien
tccaccagggcgatctctttcacaa

SEQ ID NO: 823524 - DNA, 25 bp, Homo sapien
ttcactgcagtctgcatcatcatct

SEQ ID NO: 823525 - DNA, 25 bp, Homo sapien
tttgataattcactgcagtctgcat

SEQ ID NO: 823526 - DNA, 25 bp, Homo sapien
taatgtggagaacagtgagatgcat

SEQ ID NO: 823527 - DNA, 25 bp, Homo sapien
tatattccaaaatttcgtcttaagc

SEQ ID NO: 823528 - DNA, 25 bp, Homo sapien
tcactgtgctttcaacttagaggag

SEQ ID NO: 823529 - DNA, 25 bp, Homo sapien
tatgtgagaactcccaaggctatcc

SEQ ID NO: 823530 - DNA, 25 bp, Homo sapien
caacttgggcctatctgaatcttat

SEQ ID NO: 823531 - DNA, 25 bp, Homo sapien
aatatgtaattcagaggcaactcca

SEQ ID NO: 823532 - DNA, 25 bp, Homo sapien
ggacatataatggtagtaactatca

SEQ ID NO: 823533 - DNA, 25 bp, Homo sapien
tactaggtatttggagactaggaca

SEQ ID NO: 823534 - DNA, 25 bp, Homo sapien
gcatcctgggaactataacatactt

SEQ ID NO: 823535 - DNA, 25 bp, Homo sapien
tataatgtagattgaccttgagaac

SEQ ID NO: 823536 - DNA, 25 bp, Homo sapien
gagatgaccacactgaagggctcac

SEQ ID NO: 823537 - DNA, 25 bp, Homo sapien
tcttttgcagctagggtacaggtat

SEQ ID NO: 823538 - DNA, 25 bp, Homo sapien
ggtatgtgacctttccctcatcaga

SEQ ID NO: 823539 - DNA, 25 bp, Homo sapien
tgaccttatgaatccgcagaccctt

SEQ ID NO: 823540 - DNA, 25 bp, Homo sapien
aggtgagaacagaagtttcagccat

SEQ ID NO: 823541 - DNA, 25 bp, Homo sapien
acaggtgagaacagaagtttcagcc

SEQ ID NO: 823542 - DNA, 25 bp, Homo sapien
caggtgagaacagaagtttcagcca

SEQ ID NO: 823543 - DNA, 25 bp, Homo sapien
aaacaggtgagaacagaagtttcag

SEQ ID NO: 823544 - DNA, 25 bp, Homo sapien
cagttcccaaatgccacccagtcat

SEQ ID NO: 823545 - DNA, 25 bp, Homo sapien
gaagcatcatcactgtcaaaagaca

SEQ ID NO: 823546 - DNA, 25 bp, Homo sapien
ttctcctacgtatttcccaggataa

SEQ ID NO: 823547 - DNA, 25 bp, Homo sapien
taatggtctgttgcaaaattcccct

SEQ ID NO: 823548 - DNA, 25 bp, Homo sapien
gaagccacttgaagggaagcatcat

SEQ ID NO: 823549 - DNA, 25 bp, Homo sapien
taattccctggtaatcagttttgaa

SEQ ID NO: 823550 - DNA, 25 bp, Homo sapien
cagttttgaatgctgacaagcttgt

SEQ ID NO: 823551 - DNA, 25 bp, Homo sapien
tcctttggctggtcattaagtgagg

SEQ ID NO: 823552 - DNA, 25 bp, Homo sapien
gtcagtgtgaggcttatgtcacatt

SEQ ID NO: 823553 - DNA, 25 bp, Homo sapien
tagaaatgttaattaccctgtgttg

SEQ ID NO: 823554 - DNA, 25 bp, Homo sapien
gattttggtgctatcatcttcttag

SEQ ID NO: 823555 - DNA, 25 bp, Homo sapien
agaaactggattgtatattcagcag

SEQ ID NO: 823556 - DNA, 25 bp, Homo sapien
ccttggaactagcataggctgaaat

SEQ ID NO: 823557 - DNA, 25 bp, Homo sapien
ggcttgaggttttcagcattacagc

SEQ ID NO: 823558 - DNA, 25 bp, Homo sapien
tgaggttttcagcattacagcagtc

SEQ ID NO: 823559 - DNA, 25 bp, Homo sapien
ttgaggttttcagcattacagcagt

SEQ ID NO: 823560 - DNA, 25 bp, Homo sapien
aggttttcagcattacagcagtctc

SEQ ID NO: 823561 - DNA, 25 bp, Homo sapien
taaccacgccacccatgggttacac

SEQ ID NO: 823562 - DNA, 25 bp, Homo sapien
accacgccacccatgggttacacat

SEQ ID NO: 823563 - DNA, 25 bp, Homo sapien
ctaaccacgccacccatgggttaca

SEQ ID NO: 823564 - DNA, 25 bp, Homo sapien
aaccacgccacccatgggttacaca

SEQ ID NO: 823565 - DNA, 25 bp, Homo sapien
gggctgcctgagttaataggataaa

SEQ ID NO: 823566 - DNA, 25 bp, Homo sapien
tcctaaggtgttcagaaaggctcac

SEQ ID NO: 823567 - DNA, 25 bp, Homo sapien
cacgttgaaggaaggcatacaatac

SEQ ID NO: 823568 - DNA, 25 bp, Homo sapien
aaaggctcacattctgcggtattcc

SEQ ID NO: 823569 - DNA, 25 bp, Homo sapien
aaggctggctcttgatcaccggagg

SEQ ID NO: 823570 - DNA, 25 bp, Homo sapien
cagtctggatagagataaaagcccc

SEQ ID NO: 823571 - DNA, 25 bp, Homo sapien
tctaaagccaatgtgagagtaatgt

SEQ ID NO: 823572 - DNA, 25 bp, Homo sapien
taatcataattgtagcagtctggat

SEQ ID NO: 823573 - DNA, 25 bp, Homo sapien
attcctctcgggcaactgtttccac

SEQ ID NO: 823574 - DNA, 25 bp, Homo sapien
aatgtattgaaggataaagtgctgc

SEQ ID NO: 823575 - DNA, 25 bp, Homo sapien
ccacagccacaatttggacaattac

SEQ ID NO: 823576 - DNA, 25 bp, Homo sapien
ggataaagtgctgcgcttttttccc

SEQ ID NO: 823577 - DNA, 25 bp, Homo sapien
ttttttcccacagccacaatttgga

SEQ ID NO: 823578 - DNA, 25 bp, Homo sapien
acaaatttcaaagcatttaagcttg

SEQ ID NO: 823579 - DNA, 25 bp, Homo sapien
tcgatagtgaacaaatttcaaagca

SEQ ID NO: 823580 - DNA, 25 bp, Homo sapien
aatttcaaagcatttaagcttgact

SEQ ID NO: 823581 - DNA, 25 bp, Homo sapien
ctcgatagtgaacaaatttcaaagc

SEQ ID NO: 823582 - DNA, 25 bp, Homo sapien
aaactggcaaaacatagtcatgtct

SEQ ID NO: 823583 - DNA, 25 bp, Homo sapien
ggcaaaacatagtcatgtctagcca

SEQ ID NO: 823584 - DNA, 25 bp, Homo sapien
gccatttcagcaaccctcatggctt

SEQ ID NO: 823585 - DNA, 25 bp, Homo sapien
tagtcatgtctagccatttcagcaa

SEQ ID NO: 823586 - DNA, 25 bp, Homo sapien
tgtgacagagcttcagtactatgca

SEQ ID NO: 823587 - DNA, 25 bp, Homo sapien
gtgacagagcttcagtactatgcaa

SEQ ID NO: 823588 - DNA, 25 bp, Homo sapien
ctgcactttcgccaattgcatgcac

SEQ ID NO: 823589 - DNA, 25 bp, Homo sapien
gcactttcgccaattgcatgcacta

SEQ ID NO: 823590 - DNA, 25 bp, Homo sapien
actttcgccaattgcatgcactaag

SEQ ID NO: 823591 - DNA, 25 bp, Homo sapien
ccccacaatattactcctgctgccc

SEQ ID NO: 823592 - DNA, 25 bp, Homo sapien
ggactcaggtgtttttcgaatactc

SEQ ID NO: 823593 - DNA, 25 bp, Homo sapien
ggccctcggatagattgctgcacag

SEQ ID NO: 823594 - DNA, 25 bp, Homo sapien
gatgtcacattcacagcataatggc

SEQ ID NO: 823595 - DNA, 25 bp, Homo sapien
gcataatggcccaaaggccctcgga

SEQ ID NO: 823596 - DNA, 25 bp, Homo sapien
ctgaaactcttgtttagaacatatt

SEQ ID NO: 823597 - DNA, 25 bp, Homo sapien
gaaactcttgtttagaacatatttc

SEQ ID NO: 823598 - DNA, 25 bp, Homo sapien
tgaatctgaaactcttgtttagaac

SEQ ID NO: 823599 - DNA, 25 bp, Homo sapien
agaaatgatgaatctgaaactcttg

SEQ ID NO: 823600 - DNA, 25 bp, Homo sapien
ccagccgtaatagcagtgacacaca

SEQ ID NO: 823601 - DNA, 25 bp, Homo sapien
cagccgtaatagcagtgacacacaa

SEQ ID NO: 823602 - DNA, 25 bp, Homo sapien
gagtgatcgtgacaagacggtccat

SEQ ID NO: 823603 - DNA, 25 bp, Homo sapien
gttaatagtaggagccttattcatc

SEQ ID NO: 823604 - DNA, 25 bp, Homo sapien
cacttgctactgtttggtatttcaa

SEQ ID NO: 823605 - DNA, 25 bp, Homo sapien
aaaattggcattgtagtaagggcta

SEQ ID NO: 823606 - DNA, 25 bp, Homo sapien
tattgccttgcatgaggtaaacacc

SEQ ID NO: 823607 - DNA, 25 bp, Homo sapien
tttcttttccctattgccttgcatg

SEQ ID NO: 823608 - DNA, 25 bp, Homo sapien
cccacaagtatttaagctccctgag

SEQ ID NO: 823609 - DNA, 25 bp, Homo sapien
cattttcccacaagtatttaagctc

SEQ ID NO: 823610 - DNA, 25 bp, Homo sapien
caaatatatgtgtgcttgttagttt

SEQ ID NO: 823611 - DNA, 25 bp, Homo sapien
gttctctcacactccctaatcattt

SEQ ID NO: 823612 - DNA, 25 bp, Homo sapien
tttgactctcttacatttccagtgt

SEQ ID NO: 823613 - DNA, 25 bp, Homo sapien
ttgactctcttacatttccagtgtt

SEQ ID NO: 823614 - DNA, 25 bp, Homo sapien
acaataatgcgaggtaagaaacaat

SEQ ID NO: 823615 - DNA, 25 bp, Homo sapien
ttttctaacaataatgcgaggtaag

SEQ ID NO: 823616 - DNA, 25 bp, Homo sapien
ttatgtccagataaagagtgctgtg

SEQ ID NO: 823617 - DNA, 25 bp, Homo sapien
tccagataaagagtgctgtgttgtt

SEQ ID NO: 823618 - DNA, 25 bp, Homo sapien
tagatggcataaatagcaaggcacg

SEQ ID NO: 823619 - DNA, 25 bp, Homo sapien
tggcataaatagcaaggcacggtgg

SEQ ID NO: 823620 - DNA, 25 bp, Homo sapien
taagctaaacaaggaggcatcagaa

SEQ ID NO: 823621 - DNA, 25 bp, Homo sapien
agtgaaatagatggcataaatagca

SEQ ID NO: 823622 - DNA, 25 bp, Homo sapien
cagaggttgaatggcaaaggatgtc

SEQ ID NO: 823623 - DNA, 25 bp, Homo sapien
ttagtcaccttgtgcaaatcagagg

SEQ ID NO: 823624 - DNA, 25 bp, Homo sapien
caaatcagaggttgaatggcaaagg

SEQ ID NO: 823625 - DNA, 25 bp, Homo sapien
tgctggtcctttagtcaccttgtgc

SEQ ID NO: 823626 - DNA, 25 bp, Homo sapien
caaagaagcttacttgcttgtgata

SEQ ID NO: 823627 - DNA, 25 bp, Homo sapien
gaagcttacttgcttgtgataaatt

SEQ ID NO: 823628 - DNA, 25 bp, Homo sapien
cccaaagaagcttacttgcttgtga

SEQ ID NO: 823629 - DNA, 25 bp, Homo sapien
tccccaaagaagcttacttgcttgt

SEQ ID NO: 823630 - DNA, 25 bp, Homo sapien
gtacagctacaagagtctgcaaaaa

SEQ ID NO: 823631 - DNA, 25 bp, Homo sapien
agctacaagagtctgcaaaaaagcc

SEQ ID NO: 823632 - DNA, 25 bp, Homo sapien
catgtacagctacaagagtctgcaa

SEQ ID NO: 823633 - DNA, 25 bp, Homo sapien
caccatgtacagctacaagagtctg

SEQ ID NO: 823634 - DNA, 25 bp, Homo sapien
tatcttctgctttagtgcactctag

SEQ ID NO: 823635 - DNA, 25 bp, Homo sapien
ttctgctttagtgcactctagaaga

SEQ ID NO: 823636 - DNA, 25 bp, Homo sapien
tctgctttagtgcactctagaagac

SEQ ID NO: 823637 - DNA, 25 bp, Homo sapien
tcttctgctttagtgcactctagaa

SEQ ID NO: 823638 - DNA, 25 bp, Homo sapien
aacacaaagctttaactgtccttca

SEQ ID NO: 823639 - DNA, 25 bp, Homo sapien
taactgtccttcagataatactttc

SEQ ID NO: 823640 - DNA, 25 bp, Homo sapien
aggagccatgaagtgagatgtactg

SEQ ID NO: 823641 - DNA, 25 bp, Homo sapien
tgtactggttgaacaacacaaagct

SEQ ID NO: 823642 - DNA, 25 bp, Homo sapien
ggaagtcgagcaggttttagacaag

SEQ ID NO: 823643 - DNA, 25 bp, Homo sapien
tcctttgataaattggaagtcgagc

SEQ ID NO: 823644 - DNA, 25 bp, Homo sapien
aattggaagtcgagcaggttttaga

SEQ ID NO: 823645 - DNA, 25 bp, Homo sapien
tgataaattggaagtcgagcaggtt

SEQ ID NO: 823646 - DNA, 25 bp, Homo sapien
tatagtgacattttgccccctggcc

SEQ ID NO: 823647 - DNA, 25 bp, Homo sapien
cggatagtatcccaatctgttgaca

SEQ ID NO: 823648 - DNA, 25 bp, Homo sapien
ggccagtgggcttccaatcacagga

SEQ ID NO: 823649 - DNA, 25 bp, Homo sapien
tctgttgacataaaatatagtgaca

SEQ ID NO: 823650 - DNA, 25 bp, Homo sapien
tagaaggatataaagcagcactgct

SEQ ID NO: 823651 - DNA, 25 bp, Homo sapien
ttgagttccagttccgggcccactg

SEQ ID NO: 823652 - DNA, 25 bp, Homo sapien
tcatgcacccgaaatttggagaagc

SEQ ID NO: 823653 - DNA, 25 bp, Homo sapien
gggatttccagacaccgatagaagg

SEQ ID NO: 823654 - DNA, 25 bp, Homo sapien
ctcctatggtgctgactagatcttg

SEQ ID NO: 823655 - DNA, 25 bp, Homo sapien
tctcctatggtgctgactagatctt

SEQ ID NO: 823656 - DNA, 25 bp, Homo sapien
tcatatccctgataacaatgacagg

SEQ ID NO: 823657 - DNA, 25 bp, Homo sapien
tgaatgcttcgataacttgctaaaa

SEQ ID NO: 823658 - DNA, 25 bp, Homo sapien
tgctaaaagcagtagacaaagtgtc

SEQ ID NO: 823659 - DNA, 25 bp, Homo sapien
caagtgaaggtaactgggcgcgttc

SEQ ID NO: 823660 - DNA, 25 bp, Homo sapien
tggtttcctagccagactggaggca

SEQ ID NO: 823661 - DNA, 25 bp, Homo sapien
caataaggaggaagtgtacattgac

SEQ ID NO: 823662 - DNA, 25 bp, Homo sapien
gttaagtgacatacataatgtctac

SEQ ID NO: 823663 - DNA, 25 bp, Homo sapien
ctttaaatgactaggctagaggcca

SEQ ID NO: 823664 - DNA, 25 bp, Homo sapien
aacagaaacctagtgtgaacccgag

SEQ ID NO: 823665 - DNA, 25 bp, Homo sapien
actgccagggtctacgaaggaagga

SEQ ID NO: 823666 - DNA, 25 bp, Homo sapien
ctttgcaagttggtaatggctcccc

SEQ ID NO: 823667 - DNA, 25 bp, Homo sapien
cagtggaccagttgaccaggtgacc

SEQ ID NO: 823668 - DNA, 25 bp, Homo sapien
aggtcacacaactagatacgtagtg

SEQ ID NO: 823669 - DNA, 25 bp, Homo sapien
tataaaaagtcatacatgggaaggg

SEQ ID NO: 823670 - DNA, 25 bp, Homo sapien
gaaaccatgattcaaattgattcaa

SEQ ID NO: 823671 - DNA, 25 bp, Homo sapien
cactataaaaagtcatacatgggaa

SEQ ID NO: 823672 - DNA, 25 bp, Homo sapien
attactttggtaatcaacagttggt

SEQ ID NO: 823673 - DNA, 25 bp, Homo sapien
cattactttggtaatcaacagttgg

SEQ ID NO: 823674 - DNA, 25 bp, Homo sapien
gcatcaagaagtagaaattgcccaa

SEQ ID NO: 823675 - DNA, 25 bp, Homo sapien
caagtagattgtctccagaagaagg

SEQ ID NO: 823676 - DNA, 25 bp, Homo sapien
tcttctacaacagcatcattactta

SEQ ID NO: 823677 - DNA, 25 bp, Homo sapien
gagaaaaacacaatgcgtataagtg

SEQ ID NO: 823678 - DNA, 25 bp, Homo sapien
cggatactacttataatggatgggt

SEQ ID NO: 823679 - DNA, 25 bp, Homo sapien
taacctccaacaagcatagactcgc

SEQ ID NO: 823680 - DNA, 25 bp, Homo sapien
gctaatcaatgcaatactacctacc

SEQ ID NO: 823681 - DNA, 25 bp, Homo sapien
gatgggtaagtgaaaatgcatatgc

SEQ ID NO: 823682 - DNA, 25 bp, Homo sapien
ggtacagtgccttgcaaatattgtt

SEQ ID NO: 823683 - DNA, 25 bp, Homo sapien
aaatattgtttcatcattggaaggc

SEQ ID NO: 823684 - DNA, 25 bp, Homo sapien
ttacaataattggtacagtgccttg

SEQ ID NO: 823685 - DNA, 25 bp, Homo sapien
tattgtttcatcattggaaggcacc

SEQ ID NO: 823686 - DNA, 25 bp, Homo sapien
ctttctggatattcatagtcaggtc

SEQ ID NO: 823687 - DNA, 25 bp, Homo sapien
agtcaagtataattgtttccttctc

SEQ ID NO: 823688 - DNA, 25 bp, Homo sapien
tcagtaagttgaaggccaagtcagt

SEQ ID NO: 823689 - DNA, 25 bp, Homo sapien
tctgagggtaccaaagtaattgaga

SEQ ID NO: 823690 - DNA, 25 bp, Homo sapien
tcatccggcaataataatgccgtgg

SEQ ID NO: 823691 - DNA, 25 bp, Homo sapien
ttcctcatccggcaataataatgcc

SEQ ID NO: 823692 - DNA, 25 bp, Homo sapien
tccggcaataataatgccgtggact

SEQ ID NO: 823693 - DNA, 25 bp, Homo sapien
ggcaataataatgccgtggacttcc

SEQ ID NO: 823694 - DNA, 25 bp, Homo sapien
gaaacaggaactcaatgctaaagca

SEQ ID NO: 823695 - DNA, 25 bp, Homo sapien
ctgagcatctgggtagttgatgaca

SEQ ID NO: 823696 - DNA, 25 bp, Homo sapien
tcaatgctaaagcaacaggtgactg

SEQ ID NO: 823697 - DNA, 25 bp, Homo sapien
aaggtaggagtgtccctgagactca

SEQ ID NO: 823698 - DNA, 25 bp, Homo sapien
cttgctaggaaggaccttatgaggt

SEQ ID NO: 823699 - DNA, 25 bp, Homo sapien
tatgtgagccacatcaaggtggagc

SEQ ID NO: 823700 - DNA, 25 bp, Homo sapien
gaccttatgaggtgctgctaaccac

SEQ ID NO: 823701 - DNA, 25 bp, Homo sapien
tgctaaccacctacactgctatcat

SEQ ID NO: 823702 - DNA, 25 bp, Homo sapien
taggtgagggtcttccacatactag

SEQ ID NO: 823703 - DNA, 25 bp, Homo sapien
gtcttccacatactagctgagccct

SEQ ID NO: 823704 - DNA, 25 bp, Homo sapien
caaaataggtgagggtcttccacat

SEQ ID NO: 823705 - DNA, 25 bp, Homo sapien
ccgaggaagcacaacaaaataggtg

SEQ ID NO: 823706 - DNA, 25 bp, Homo sapien
gagatgggggtaaggaatcaactca

SEQ ID NO: 823707 - DNA, 25 bp, Homo sapien
gctctccacgatgcaacttcaagaa

SEQ ID NO: 823708 - DNA, 25 bp, Homo sapien
tctcctcaaggaaaagatttggatc

SEQ ID NO: 823709 - DNA, 25 bp, Homo sapien
tcataggcagttagaaacagattca

SEQ ID NO: 823710 - DNA, 25 bp, Homo sapien
caatctattagctctgcagtattta

SEQ ID NO: 823711 - DNA, 25 bp, Homo sapien
tgtgactaggtcagaagtcactcca

SEQ ID NO: 823712 - DNA, 25 bp, Homo sapien
ttcctttaagatgtgactaggtcag

SEQ ID NO: 823713 - DNA, 25 bp, Homo sapien
cagaagtcactccaatctattagct

SEQ ID NO: 823714 - DNA, 25 bp, Homo sapien
tcttcagtagttatcaaggcaagaa

SEQ ID NO: 823715 - DNA, 25 bp, Homo sapien
tgtcttcctagagcattggctagtc

SEQ ID NO: 823716 - DNA, 25 bp, Homo sapien
aaaatccagccacccaatgtctctt

SEQ ID NO: 823717 - DNA, 25 bp, Homo sapien
gagcattggctagtcattagcatcc

SEQ ID NO: 823718 - DNA, 25 bp, Homo sapien
tcactttgatggataaagaggtata

SEQ ID NO: 823719 - DNA, 25 bp, Homo sapien
tgtttttcaagttgcatcacctata

SEQ ID NO: 823720 - DNA, 25 bp, Homo sapien
ctttggtttacccaatatctgatgc

SEQ ID NO: 823721 - DNA, 25 bp, Homo sapien
ctacacactttggtttacccaatat

SEQ ID NO: 823722 - DNA, 25 bp, Homo sapien
tgaaaactatctgggatactccact

SEQ ID NO: 823723 - DNA, 25 bp, Homo sapien
tgtgcttgaattttagcactcccat

SEQ ID NO: 823724 - DNA, 25 bp, Homo sapien
attcagagtcaagcaacatggaatc

SEQ ID NO: 823725 - DNA, 25 bp, Homo sapien
aggtgaaaactatctgggatactcc

SEQ ID NO: 823726 - DNA, 25 bp, Homo sapien
aaattcacttggggcattccaggcc

SEQ ID NO: 823727 - DNA, 25 bp, Homo sapien
attttccaagacaaaattcacttgg

SEQ ID NO: 823728 - DNA, 25 bp, Homo sapien
atctagtggctcatcaaattttcca

SEQ ID NO: 823729 - DNA, 25 bp, Homo sapien
cagaggaaaggcacatttggaataa

SEQ ID NO: 823730 - DNA, 25 bp, Homo sapien
tatgtaaggatagtagccaagtcta

SEQ ID NO: 823731 - DNA, 25 bp, Homo sapien
cattcacagttactcctgtgattga

SEQ ID NO: 823732 - DNA, 25 bp, Homo sapien
tattgtaacaccttgcccggtggcg

SEQ ID NO: 823733 - DNA, 25 bp, Homo sapien
tagctttgtccagatggtcttgtaa

SEQ ID NO: 823734 - DNA, 25 bp, Homo sapien
gccattcccaaattgtctactggca

SEQ ID NO: 823735 - DNA, 25 bp, Homo sapien
cagtggcctctgtgagactaagttg

SEQ ID NO: 823736 - DNA, 25 bp, Homo sapien
tgttgctgaaccaattcaatagacc

SEQ ID NO: 823737 - DNA, 25 bp, Homo sapien
ccacaagtgatttggccgaagtaat

SEQ ID NO: 823738 - DNA, 25 bp, Homo sapien
ttatttctacattgaagcaacttcc

SEQ ID NO: 823739 - DNA, 25 bp, Homo sapien
cgggtttcttatagtgatggttgta

SEQ ID NO: 823740 - DNA, 25 bp, Homo sapien
tttcattccacaaccagctgagatc

SEQ ID NO: 823741 - DNA, 25 bp, Homo sapien
cattgtaaccgggtttcttatagtg

SEQ ID NO: 823742 - DNA, 25 bp, Homo sapien
ctcgattgcgcacatagagtgtagc

SEQ ID NO: 823743 - DNA, 25 bp, Homo sapien
tgatggcttcccgaactcgattgcg

SEQ ID NO: 823744 - DNA, 25 bp, Homo sapien
tatatgcaaaaaccggaagtggact

SEQ ID NO: 823745 - DNA, 25 bp, Homo sapien
cagtaaaaactatgcgggtatatgc

SEQ ID NO: 823746 - DNA, 25 bp, Homo sapien
cagtttcgccaaatgtatacacaag

SEQ ID NO: 823747 - DNA, 25 bp, Homo sapien
catacttcgcattatactgagggtt

SEQ ID NO: 823748 - DNA, 25 bp, Homo sapien
tacaattccagaagcacccagagca

SEQ ID NO: 823749 - DNA, 25 bp, Homo sapien
gagggttccccatattacaattcca

SEQ ID NO: 823750 - DNA, 25 bp, Homo sapien
tacaactcaaggtgctataacagct

SEQ ID NO: 823751 - DNA, 25 bp, Homo sapien
gctcctggcaaagcacttggctaca

SEQ ID NO: 823752 - DNA, 25 bp, Homo sapien
caggtcttcaagtgtcggttttcca

SEQ ID NO: 823753 - DNA, 25 bp, Homo sapien
catgtaattgtctaggagcaagcaa

SEQ ID NO: 823754 - DNA, 25 bp, Homo sapien
ttacaaactcgctacagaagaaatg

SEQ ID NO: 823755 - DNA, 25 bp, Homo sapien
gaaaaagcacactttaagatggaca

SEQ ID NO: 823756 - DNA, 25 bp, Homo sapien
tgttcatttcagctaacctgcgcaa

SEQ ID NO: 823757 - DNA, 25 bp, Homo sapien
gatttaattagtcgaaaaagcacac

SEQ ID NO: 823758 - DNA, 25 bp, Homo sapien
tattgttcatttcagctaacctgcg

SEQ ID NO: 823759 - DNA, 25 bp, Homo sapien
ctgctaataccttgatcccagactt

SEQ ID NO: 823760 - DNA, 25 bp, Homo sapien
cagaagaaaccaattctgctaatac

SEQ ID NO: 823761 - DNA, 25 bp, Homo sapien
aaaccaattctgctaataccttgat

SEQ ID NO: 823762 - DNA, 25 bp, Homo sapien
accaattctgctaataccttgatcc

SEQ ID NO: 823763 - DNA, 25 bp, Homo sapien
gcctgaaacacatttttccctcatg

SEQ ID NO: 823764 - DNA, 25 bp, Homo sapien
ggaagaggcctgaaacacatttttc

SEQ ID NO: 823765 - DNA, 25 bp, Homo sapien
gtaagccaagggaagaggcctgaaa

SEQ ID NO: 823766 - DNA, 25 bp, Homo sapien
ctgtaagccaagggaagaggcctga

SEQ ID NO: 823767 - DNA, 25 bp, Homo sapien
gagtgactgcacttaatacccaagg

SEQ ID NO: 823768 - DNA, 25 bp, Homo sapien
aatctgattatcttgagggaaggtc

SEQ ID NO: 823769 - DNA, 25 bp, Homo sapien
gaagaaaattgataggcttcatcag

SEQ ID NO: 823770 - DNA, 25 bp, Homo sapien
ccaaagcctccatgatgtcaaaaag

SEQ ID NO: 823771 - DNA, 25 bp, Homo sapien
gatgggcttcctctgttccaatagt

SEQ ID NO: 823772 - DNA, 25 bp, Homo sapien
tgctggttctaggtattaggcaaca

SEQ ID NO: 823773 - DNA, 25 bp, Homo sapien
tgagtgaccatcagaactaagtggg

SEQ ID NO: 823774 - DNA, 25 bp, Homo sapien
gatgtaaggccaattatcagagatg

SEQ ID NO: 823775 - DNA, 25 bp, Homo sapien
ttaaactaaatatgagacttcacag

SEQ ID NO: 823776 - DNA, 25 bp, Homo sapien
taaactaaatatgagacttcacagt

SEQ ID NO: 823777 - DNA, 25 bp, Homo sapien
tgctgtcagaagcattggaaccaga

SEQ ID NO: 823778 - DNA, 25 bp, Homo sapien
atgaggctgacacctcctgagctgc

SEQ ID NO: 823779 - DNA, 25 bp, Homo sapien
ctgtgttatctctactgctgtcaga

SEQ ID NO: 823780 - DNA, 25 bp, Homo sapien
ctaatctttagtggagctgtagggc

SEQ ID NO: 823781 - DNA, 25 bp, Homo sapien
tttactctaatctttagtggagctg

SEQ ID NO: 823782 - DNA, 25 bp, Homo sapien
ttgaagtgcagattttactctaatc

SEQ ID NO: 823783 - DNA, 25 bp, Homo sapien
tgaagtgcagattttactctaatct

SEQ ID NO: 823784 - DNA, 25 bp, Homo sapien
actagctgtaatgcagagatgcagc

SEQ ID NO: 823785 - DNA, 25 bp, Homo sapien
caaaggacgcacacaggtgatcagg

SEQ ID NO: 823786 - DNA, 25 bp, Homo sapien
gaaacagtgcttgaggcatagcaag

SEQ ID NO: 823787 - DNA, 25 bp, Homo sapien
gcagctgccatccactcaaaggacg

SEQ ID NO: 823788 - DNA, 25 bp, Homo sapien
gagtttctggcttgtaacttcaact

SEQ ID NO: 823789 - DNA, 25 bp, Homo sapien
ctagcgattgggcttttctgtggga

SEQ ID NO: 823790 - DNA, 25 bp, Homo sapien
tttcatcatctaatgctagcgattg

SEQ ID NO: 823791 - DNA, 25 bp, Homo sapien
tcaacttatgtctggaaagtcccat

SEQ ID NO: 823792 - DNA, 25 bp, Homo sapien
tatggcctctgcagcaatcacagtc

SEQ ID NO: 823793 - DNA, 25 bp, Homo sapien
tgcactaagccccacaaattaggtg

SEQ ID NO: 823794 - DNA, 25 bp, Homo sapien
ccagctacatgggtctatggcctct

SEQ ID NO: 823795 - DNA, 25 bp, Homo sapien
taataatgtttgaatgagtggccct

SEQ ID NO: 823796 - DNA, 25 bp, Homo sapien
taatacaaccaagatcctcacctct

SEQ ID NO: 823797 - DNA, 25 bp, Homo sapien
gtaactaatacaaccaagatcctca

SEQ ID NO: 823798 - DNA, 25 bp, Homo sapien
tataacagccccgtaactaatacaa

SEQ ID NO: 823799 - DNA, 25 bp, Homo sapien
taatgtcagtaatcctgtcctcttg

SEQ ID NO: 823800 - DNA, 25 bp, Homo sapien
tatcagcaaccttgatgattacgcc

SEQ ID NO: 823801 - DNA, 25 bp, Homo sapien
gattacgccatcagagcagcttccc

SEQ ID NO: 823802 - DNA, 25 bp, Homo sapien
tcctcttgctgtagacatctgctgt

SEQ ID NO: 823803 - DNA, 25 bp, Homo sapien
cgtcaatgctactcaagtcgcaaat

SEQ ID NO: 823804 - DNA, 25 bp, Homo sapien
tttcacgtttttagctagcttctta

SEQ ID NO: 823805 - DNA, 25 bp, Homo sapien
tcacgtttttagctagcttcttatc

SEQ ID NO: 823806 - DNA, 25 bp, Homo sapien
ttcacgtttttagctagcttcttat

SEQ ID NO: 823807 - DNA, 25 bp, Homo sapien
tctgttcccctccaatagtattttc

SEQ ID NO: 823808 - DNA, 25 bp, Homo sapien
tgcaaacatattcctggggatccaa

SEQ ID NO: 823809 - DNA, 25 bp, Homo sapien
ataaggagacacaatctgtacaaaa

SEQ ID NO: 823810 - DNA, 25 bp, Homo sapien
cataaggagacacaatctgtacaaa

SEQ ID NO: 823811 - DNA, 25 bp, Homo sapien
acataaggagacacaatctgtacaa

SEQ ID NO: 823812 - DNA, 25 bp, Homo sapien
aacataaggagacacaatctgtaca

SEQ ID NO: 823813 - DNA, 25 bp, Homo sapien
gaaacatggatccttaacacgcaca

SEQ ID NO: 823814 - DNA, 25 bp, Homo sapien
gaaagtatatagttcccacaccgct

SEQ ID NO: 823815 - DNA, 25 bp, Homo sapien
tgaaagatggtttctcggctcagct

SEQ ID NO: 823816 - DNA, 25 bp, Homo sapien
ctaaatgggaggaaagccgttggca

SEQ ID NO: 823817 - DNA, 25 bp, Homo sapien
cagaagttcctgtatcacacaagga

SEQ ID NO: 823818 - DNA, 25 bp, Homo sapien
aaatcaattctatttgagctctgaa

SEQ ID NO: 823819 - DNA, 25 bp, Homo sapien
taatgattcagtgtacttaactatg

SEQ ID NO: 823820 - DNA, 25 bp, Homo sapien
ggactccaataagatcgatcatcca

SEQ ID NO: 823821 - DNA, 25 bp, Homo sapien
gacatctgccgtcccaacgctttgg

SEQ ID NO: 823822 - DNA, 25 bp, Homo sapien
tgacatctgccgtcccaacgctttg

SEQ ID NO: 823823 - DNA, 25 bp, Homo sapien
ctgacatctgccgtcccaacgcttt

SEQ ID NO: 823824 - DNA, 25 bp, Homo sapien
gctgacatctgccgtcccaacgctt

SEQ ID NO: 823825 - DNA, 25 bp, Homo sapien
gaatccgtatatactggactccagt

SEQ ID NO: 823826 - DNA, 25 bp, Homo sapien
taaataacaagggagctaatagcag

SEQ ID NO: 823827 - DNA, 25 bp, Homo sapien
tattatagatgcaagagtagctgca

SEQ ID NO: 823828 - DNA, 25 bp, Homo sapien
cacagtggatcttctatggagttca

SEQ ID NO: 823829 - DNA, 25 bp, Homo sapien
cagggatgacgaatatcctctcagt

SEQ ID NO: 823830 - DNA, 25 bp, Homo sapien
aaagagtagaattcagtgcagctca

SEQ ID NO: 823831 - DNA, 25 bp, Homo sapien
gctcagccagggatgacgaatatcc

SEQ ID NO: 823832 - DNA, 25 bp, Homo sapien
gaaattcatgcctaattaataatgt

SEQ ID NO: 823833 - DNA, 25 bp, Homo sapien
gccgagggccaagtgaaattatatc

SEQ ID NO: 823834 - DNA, 25 bp, Homo sapien
tttctacatggaacttcaagggcag

SEQ ID NO: 823835 - DNA, 25 bp, Homo sapien
cagcaggtgtgttaacgttgatcag

SEQ ID NO: 823836 - DNA, 25 bp, Homo sapien
tgtttaccttacatagccgagggcc

SEQ ID NO: 823837 - DNA, 25 bp, Homo sapien
ttttcttcggaatgcacggctttct

SEQ ID NO: 823838 - DNA, 25 bp, Homo sapien
cttcggaatgcacggctttctggat

SEQ ID NO: 823839 - DNA, 25 bp, Homo sapien
tcttcggaatgcacggctttctgga

SEQ ID NO: 823840 - DNA, 25 bp, Homo sapien
ttcttttcttcggaatgcacggctt

SEQ ID NO: 823841 - DNA, 25 bp, Homo sapien
gttaggccgcgcagggtgagagcta

SEQ ID NO: 823842 - DNA, 25 bp, Homo sapien
ctgggccgcggtgcccgttaggccg

SEQ ID NO: 823843 - DNA, 25 bp, Homo sapien
cacctcgcccgggactggaagggag

SEQ ID NO: 823844 - DNA, 25 bp, Homo sapien
cgctgctcgcgttacgttcccagag

SEQ ID NO: 823845 - DNA, 25 bp, Homo sapien
caaactgctgaaacctaaagaccat

SEQ ID NO: 823846 - DNA, 25 bp, Homo sapien
tccctgacttaactgcaaactgctg

SEQ ID NO: 823847 - DNA, 25 bp, Homo sapien
actgcaaactgctgaaacctaaaga

SEQ ID NO: 823848 - DNA, 25 bp, Homo sapien
ccatgtccctgacttaactgcaaac

SEQ ID NO: 823849 - DNA, 25 bp, Homo sapien
cagattccacattatgtgaatgatc

SEQ ID NO: 823850 - DNA, 25 bp, Homo sapien
tcagattccacattatgtgaatgat

SEQ ID NO: 823851 - DNA, 25 bp, Homo sapien
atcagattccacattatgtgaatga

SEQ ID NO: 823852 - DNA, 25 bp, Homo sapien
ggaaagagtagcgttgtagttctct

SEQ ID NO: 823853 - DNA, 25 bp, Homo sapien
aagagtagcgttgtagttctctttc

SEQ ID NO: 823854 - DNA, 25 bp, Homo sapien
catgggaaagagtagcgttgtagtt

SEQ ID NO: 823855 - DNA, 25 bp, Homo sapien
gcaaggcatgggaaagagtagcgtt

SEQ ID NO: 823856 - DNA, 25 bp, Homo sapien
tgtggcatggtggtgacctctagat

SEQ ID NO: 823857 - DNA, 25 bp, Homo sapien
ctagattgctccacttaaaggtaca

SEQ ID NO: 823858 - DNA, 25 bp, Homo sapien
ccatcagcaggttcactattggtga

SEQ ID NO: 823859 - DNA, 25 bp, Homo sapien
tcaccagacggttttagtagccact

SEQ ID NO: 823860 - DNA, 25 bp, Homo sapien
aaataacctttgctagactaactgg

SEQ ID NO: 823861 - DNA, 25 bp, Homo sapien
tgccttcccgtcaaatcctgtaata

SEQ ID NO: 823862 - DNA, 25 bp, Homo sapien
tcctttctggcagtaatagcttcca

SEQ ID NO: 823863 - DNA, 25 bp, Homo sapien
tccacagaaagcctaaaggaataga

SEQ ID NO: 823864 - DNA, 25 bp, Homo sapien
taggtctgggctaataaatgtgttc

SEQ ID NO: 823865 - DNA, 25 bp, Homo sapien
tattgctccaagacaagacgttagg

SEQ ID NO: 823866 - DNA, 25 bp, Homo sapien
cattgggagatacacaggcctggat

SEQ ID NO: 823867 - DNA, 25 bp, Homo sapien
tgatcccgaccctgtgtaggtctgg

SEQ ID NO: 823868 - DNA, 25 bp, Homo sapien
ccaagtacgtattttctcactgacc

SEQ ID NO: 823869 - DNA, 25 bp, Homo sapien
gttccaagtacgtattttctcactg

SEQ ID NO: 823870 - DNA, 25 bp, Homo sapien
gaagttccaagtacgtattttctca

SEQ ID NO: 823871 - DNA, 25 bp, Homo sapien
tcagaagttccaagtacgtattttc

SEQ ID NO: 823872 - DNA, 25 bp, Homo sapien
aggaaaccttccctagaccattcag

SEQ ID NO: 823873 - DNA, 25 bp, Homo sapien
ctggttactaccagcccttcaaaat

SEQ ID NO: 823874 - DNA, 25 bp, Homo sapien
aacactggttactaccagcccttca

SEQ ID NO: 823875 - DNA, 25 bp, Homo sapien
ttccctagaccattcagtctgcatt

SEQ ID NO: 823876 - DNA, 25 bp, Homo sapien
ctgctccatcttcatccaatcctac

SEQ ID NO: 823877 - DNA, 25 bp, Homo sapien
tgtaaatttttccaagctgctccat

SEQ ID NO: 823878 - DNA, 25 bp, Homo sapien
ttacacttctgtgtggggggcaagt

SEQ ID NO: 823879 - DNA, 25 bp, Homo sapien
ggcttctgtaaatttttccaagctg

SEQ ID NO: 823880 - DNA, 25 bp, Homo sapien
gctgctaacatcagaatcacatcat

SEQ ID NO: 823881 - DNA, 25 bp, Homo sapien
ctaggcaatgggcaatatggctgct

SEQ ID NO: 823882 - DNA, 25 bp, Homo sapien
tttatcctcctcttgaggagtgcat

SEQ ID NO: 823883 - DNA, 25 bp, Homo sapien
gctgctgctaacatcagaatcacat

SEQ ID NO: 823884 - DNA, 25 bp, Homo sapien
tatgggagaacaggtagagtcttcc

SEQ ID NO: 823885 - DNA, 25 bp, Homo sapien
gttgtgaagccctaatcatacacag

SEQ ID NO: 823886 - DNA, 25 bp, Homo sapien
tatgtactaagtctgccttactgag

SEQ ID NO: 823887 - DNA, 25 bp, Homo sapien
aggctttagcttcaacacataatga

SEQ ID NO: 823888 - DNA, 25 bp, Homo sapien
tacatgatggcaccaagattaaaag

SEQ ID NO: 823889 - DNA, 25 bp, Homo sapien
acatgatggcaccaagattaaaagc

SEQ ID NO: 823890 - DNA, 25 bp, Homo sapien
cttacatgatggcaccaagattaaa

SEQ ID NO: 823891 - DNA, 25 bp, Homo sapien
ttcttacatgatggcaccaagatta

SEQ ID NO: 823892 - DNA, 25 bp, Homo sapien
ccaagatgaagggatctttgggttt

SEQ ID NO: 823893 - DNA, 25 bp, Homo sapien
aagatgataccttgttgctgcatct

SEQ ID NO: 823894 - DNA, 25 bp, Homo sapien
agtccaagatgaagggatctttggg

SEQ ID NO: 823895 - DNA, 25 bp, Homo sapien
tggtgaaggccctgtctctgcttcc

SEQ ID NO: 823896 - DNA, 25 bp, Homo sapien
aaagaagtatagattaccaacagcc

SEQ ID NO: 823897 - DNA, 25 bp, Homo sapien
agtatagattaccaacagccagagg

SEQ ID NO: 823898 - DNA, 25 bp, Homo sapien
agaagtatagattaccaacagccag

SEQ ID NO: 823899 - DNA, 25 bp, Homo sapien
gaagtatagattaccaacagccaga

SEQ ID NO: 823900 - DNA, 25 bp, Homo sapien
taagtctttataagccttctacaca

SEQ ID NO: 823901 - DNA, 25 bp, Homo sapien
ttccagttgttgctgggtcaatgta

SEQ ID NO: 823902 - DNA, 25 bp, Homo sapien
gggtcaatgtaagtctttataagcc

SEQ ID NO: 823903 - DNA, 25 bp, Homo sapien
tgttgctgggtcaatgtaagtcttt

SEQ ID NO: 823904 - DNA, 25 bp, Homo sapien
cctttgtgtatgatgacaaaaagaa

SEQ ID NO: 823905 - DNA, 25 bp, Homo sapien
tttgtgtatgatgacaaaaagaata

SEQ ID NO: 823906 - DNA, 25 bp, Homo sapien
ttcctttgtgtatgatgacaaaaag

SEQ ID NO: 823907 - DNA, 25 bp, Homo sapien
tataatgtgggtagtggtaagccat

SEQ ID NO: 823908 - DNA, 25 bp, Homo sapien
gctgctgagtagatatagatggtag

SEQ ID NO: 823909 - DNA, 25 bp, Homo sapien
caaaatgacatgacggcatcgatcc

SEQ ID NO: 823910 - DNA, 25 bp, Homo sapien
gacggcatcgatcctagcatgagac

SEQ ID NO: 823911 - DNA, 25 bp, Homo sapien
gatggtagtggtagaacaaaatgac

SEQ ID NO: 823912 - DNA, 25 bp, Homo sapien
gctcattgttagttgagatctcact

SEQ ID NO: 823913 - DNA, 25 bp, Homo sapien
gagaagctcattgttagttgagatc

SEQ ID NO: 823914 - DNA, 25 bp, Homo sapien
aaaagagaagctcattgttagttga

SEQ ID NO: 823915 - DNA, 25 bp, Homo sapien
gaagctcattgttagttgagatctc

SEQ ID NO: 823916 - DNA, 25 bp, Homo sapien
tcagcttttagagggcatggacact

SEQ ID NO: 823917 - DNA, 25 bp, Homo sapien
tctccactgggagcactgtagggaa

SEQ ID NO: 823918 - DNA, 25 bp, Homo sapien
tcatcccaagggctatgtactcaca

SEQ ID NO: 823919 - DNA, 25 bp, Homo sapien
tggtctgccttccaggtgtctccac

SEQ ID NO: 823920 - DNA, 25 bp, Homo sapien
gctgctcttgcctcaaccctgtagt

SEQ ID NO: 823921 - DNA, 25 bp, Homo sapien
tagacttctatcagcgagcaggtca

SEQ ID NO: 823922 - DNA, 25 bp, Homo sapien
tctgcagtgacttttggtcagctcc

SEQ ID NO: 823923 - DNA, 25 bp, Homo sapien
ccctgtagttatgcgctcaagcaga

SEQ ID NO: 823924 - DNA, 25 bp, Homo sapien
cagagtggacttcgtgacctccttt

SEQ ID NO: 823925 - DNA, 25 bp, Homo sapien
gcagacaaaacagagtggacttcgt

SEQ ID NO: 823926 - DNA, 25 bp, Homo sapien
tgccattcatcatgtgtgaagtcat

SEQ ID NO: 823927 - DNA, 25 bp, Homo sapien
gaagtcataactgacatcccatcca

SEQ ID NO: 823928 - DNA, 25 bp, Homo sapien
agccttcaaagcactcttgtgttta

SEQ ID NO: 823929 - DNA, 25 bp, Homo sapien
catagaaaatgtgcacattcgcttt

SEQ ID NO: 823930 - DNA, 25 bp, Homo sapien
tcatagaaaatgtgcacattcgctt

SEQ ID NO: 823931 - DNA, 25 bp, Homo sapien
ttcaaagcactcttgtgtttagcat

SEQ ID NO: 823932 - DNA, 25 bp, Homo sapien
cagtaatgatttctcgttcaaaagg

SEQ ID NO: 823933 - DNA, 25 bp, Homo sapien
tcatggcttgtggagcagtgagcaa

SEQ ID NO: 823934 - DNA, 25 bp, Homo sapien
cctaagggcataagacagtaatgat

SEQ ID NO: 823935 - DNA, 25 bp, Homo sapien
tgtgacattgcttgctgacagttac

SEQ ID NO: 823936 - DNA, 25 bp, Homo sapien
tcaagcaggcagcttaaagccatcc

SEQ ID NO: 823937 - DNA, 25 bp, Homo sapien
catccattggtcagcctctgggaca

SEQ ID NO: 823938 - DNA, 25 bp, Homo sapien
gactggaagttcatctactaaggca

SEQ ID NO: 823939 - DNA, 25 bp, Homo sapien
tacgtgtactcccagactggtagag

SEQ ID NO: 823940 - DNA, 25 bp, Homo sapien
cttaaatcccactgtcagagtgaag

SEQ ID NO: 823941 - DNA, 25 bp, Homo sapien
tcgcaaactcattctagatatccag

SEQ ID NO: 823942 - DNA, 25 bp, Homo sapien
cacaagcttcctgagaaatttgaaa

SEQ ID NO: 823943 - DNA, 25 bp, Homo sapien
tggaacaaacagtgaccatcacttc

SEQ ID NO: 823944 - DNA, 25 bp, Homo sapien
agacacagggttcaacaccttaaag

SEQ ID NO: 823945 - DNA, 25 bp, Homo sapien
taaaagggctagagggaactagcaa

SEQ ID NO: 823946 - DNA, 25 bp, Homo sapien
accttaaaggatgtagcaataaggc

SEQ ID NO: 823947 - DNA, 25 bp, Homo sapien
gagggaactagcaaggctcttttta

SEQ ID NO: 823948 - DNA, 25 bp, Homo sapien
ttctcttgcccaaagttgcagtcat

SEQ ID NO: 823949 - DNA, 25 bp, Homo sapien
cagcatgtttattctcttgcccaaa

SEQ ID NO: 823950 - DNA, 25 bp, Homo sapien
cagcagcatgtttattctcttgccc

SEQ ID NO: 823951 - DNA, 25 bp, Homo sapien
ctggacagcagcatgtttattctct

SEQ ID NO: 823952 - DNA, 25 bp, Homo sapien
agcagtctgtttcatttcctatgac

SEQ ID NO: 823953 - DNA, 25 bp, Homo sapien
ctcatgaaaacagcagtctgtttca

SEQ ID NO: 823954 - DNA, 25 bp, Homo sapien
tcatgaaaacagcagtctgtttcat

SEQ ID NO: 823955 - DNA, 25 bp, Homo sapien
aacagcagtctgtttcatttcctat

SEQ ID NO: 823956 - DNA, 25 bp, Homo sapien
tatggctgtcttagggcatagaaga

SEQ ID NO: 823957 - DNA, 25 bp, Homo sapien
tcctactaagtcagctgtgtccttc

SEQ ID NO: 823958 - DNA, 25 bp, Homo sapien
tagccctatttggtgagtgtcctta

SEQ ID NO: 823959 - DNA, 25 bp, Homo sapien
cagagtcttgattaccaggagataa

SEQ ID NO: 823960 - DNA, 25 bp, Homo sapien
aattctgtcattgcacttgttacaa

SEQ ID NO: 823961 - DNA, 25 bp, Homo sapien
ccactgctactgttaagaagtctgg

SEQ ID NO: 823962 - DNA, 25 bp, Homo sapien
gatgccttgccactgctactgttaa

SEQ ID NO: 823963 - DNA, 25 bp, Homo sapien
tggtttgatgccttgccactgctac

SEQ ID NO: 823964 - DNA, 25 bp, Homo sapien
caaacaggacatcacaaatgtgagt

SEQ ID NO: 823965 - DNA, 25 bp, Homo sapien
gatcttgcaatactcacactgtctt

SEQ ID NO: 823966 - DNA, 25 bp, Homo sapien
gactttcttttatgtgacaaacagg

SEQ ID NO: 823967 - DNA, 25 bp, Homo sapien
aacagcctttacctcgaagaactgc

SEQ ID NO: 823968 - DNA, 25 bp, Homo sapien
tggagagttgacctcctactggcct

SEQ ID NO: 823969 - DNA, 25 bp, Homo sapien
gagttgacctcctactggcctctgt

SEQ ID NO: 823970 - DNA, 25 bp, Homo sapien
gagagttgacctcctactggcctct

SEQ ID NO: 823971 - DNA, 25 bp, Homo sapien
gaggtggagagttgacctcctactg

SEQ ID NO: 823972 - DNA, 25 bp, Homo sapien
cagtgcttcactcaggatactttga

SEQ ID NO: 823973 - DNA, 25 bp, Homo sapien
ttgaccacaaatcgcaaatcccttg

SEQ ID NO: 823974 - DNA, 25 bp, Homo sapien
taaactctaaccacaagctcatctg

SEQ ID NO: 823975 - DNA, 25 bp, Homo sapien
taccctgtttagactccataattga

SEQ ID NO: 823976 - DNA, 25 bp, Homo sapien
ggtttctttcatggagccaaacacg

SEQ ID NO: 823977 - DNA, 25 bp, Homo sapien
gctactcccacactagaatcacatg

SEQ ID NO: 823978 - DNA, 25 bp, Homo sapien
ccaaacacgtctgtaaatgctactc

SEQ ID NO: 823979 - DNA, 25 bp, Homo sapien
caaggaggagctacatctgagtgac

SEQ ID NO: 823980 - DNA, 25 bp, Homo sapien
tgctacttcaattacaacatacttc

SEQ ID NO: 823981 - DNA, 25 bp, Homo sapien
agagcaacctcttgggtgtcaggca

SEQ ID NO: 823982 - DNA, 25 bp, Homo sapien
ggtgtcaggcagtatgctacttcaa

SEQ ID NO: 823983 - DNA, 25 bp, Homo sapien
tacaacatacttctcgcacactcgt

SEQ ID NO: 823984 - DNA, 25 bp, Homo sapien
atcatggcaggaggtgaaaggcaat

SEQ ID NO: 823985 - DNA, 25 bp, Homo sapien
aatcatggcaggaggtgaaaggcaa

SEQ ID NO: 823986 - DNA, 25 bp, Homo sapien
tcatggcaggaggtgaaaggcaatt

SEQ ID NO: 823987 - DNA, 25 bp, Homo sapien
taatcaatggtcttataatccacaa

SEQ ID NO: 823988 - DNA, 25 bp, Homo sapien
caatggtcttataatccacaaagaa

SEQ ID NO: 823989 - DNA, 25 bp, Homo sapien
tataatccacaaagaacaaggcgaa

SEQ ID NO: 823990 - DNA, 25 bp, Homo sapien
ggtcttataatccacaaagaacaag

SEQ ID NO: 823991 - DNA, 25 bp, Homo sapien
gctgtgcctggagattaagccattt

SEQ ID NO: 823992 - DNA, 25 bp, Homo sapien
gaatctggagcaacactagaggctg

SEQ ID NO: 823993 - DNA, 25 bp, Homo sapien
ccatttgttggtgtgatcatctatc

SEQ ID NO: 823994 - DNA, 25 bp, Homo sapien
cataaatggcctgtgatctagaaca

SEQ ID NO: 823995 - DNA, 25 bp, Homo sapien
gcaaggacacggcaaaaaggcagaa

SEQ ID NO: 823996 - DNA, 25 bp, Homo sapien
tgaatgaggtaatgagaatagggct

SEQ ID NO: 823997 - DNA, 25 bp, Homo sapien
gttacagcaacccaagcagcctaat

SEQ ID NO: 823998 - DNA, 25 bp, Homo sapien
tatgacggtatttggatgtgggccc

SEQ ID NO: 823999 - DNA, 25 bp, Homo sapien
gattatcagtacaggtgtatgcagt

SEQ ID NO: 824000 - DNA, 25 bp, Homo sapien
cattggtaactaatgcatgcttttc

SEQ ID NO: 824001 - DNA, 25 bp, Homo sapien
aacattctgaaccattggtaactaa

SEQ ID NO: 824002 - DNA, 25 bp, Homo sapien
gcagtattgactgcaagattatcag

SEQ ID NO: 824003 - DNA, 25 bp, Homo sapien
gatactgaaaatcccccgatgttcc

SEQ ID NO: 824004 - DNA, 25 bp, Homo sapien
gaaaatcccccgatgttcccatctg

SEQ ID NO: 824005 - DNA, 25 bp, Homo sapien
tgaggccagggcaaacaagccacag

SEQ ID NO: 824006 - DNA, 25 bp, Homo sapien
aacaagccacagatactgaaaatcc

SEQ ID NO: 824007 - DNA, 25 bp, Homo sapien
tgctctccacttctagtcctttatc

SEQ ID NO: 824008 - DNA, 25 bp, Homo sapien
tttatctgataagtgtccttcaatt

SEQ ID NO: 824009 - DNA, 25 bp, Homo sapien
atctgataagtgtccttcaattctc

SEQ ID NO: 824010 - DNA, 25 bp, Homo sapien
tatctgataagtgtccttcaattct

SEQ ID NO: 824011 - DNA, 25 bp, Homo sapien
ctggttgatggccggcagctttctc

SEQ ID NO: 824012 - DNA, 25 bp, Homo sapien
gttgatggccggcagctttctcatt

SEQ ID NO: 824013 - DNA, 25 bp, Homo sapien
ggttgatggccggcagctttctcat

SEQ ID NO: 824014 - DNA, 25 bp, Homo sapien
tggttgatggccggcagctttctca

SEQ ID NO: 824015 - DNA, 25 bp, Homo sapien
tgttgatgttgctcacacacaccac

SEQ ID NO: 824016 - DNA, 25 bp, Homo sapien
gctcctgttgatgttgctcacacac

SEQ ID NO: 824017 - DNA, 25 bp, Homo sapien
tcctgttgatgttgctcacacacac

SEQ ID NO: 824018 - DNA, 25 bp, Homo sapien
tgatgttgctcacacacaccacagc

SEQ ID NO: 824019 - DNA, 25 bp, Homo sapien
agcagacggtgtgaagaaagctttt

SEQ ID NO: 824020 - DNA, 25 bp, Homo sapien
tgatcacgtgcacaggctgaaaggt

SEQ ID NO: 824021 - DNA, 25 bp, Homo sapien
ttctctatctttcctgaggaggtca

SEQ ID NO: 824022 - DNA, 25 bp, Homo sapien
tggaacacagatcttccaccactgt

SEQ ID NO: 824023 - DNA, 25 bp, Homo sapien
ccggaagtcaccgctgttccccatc

SEQ ID NO: 824024 - DNA, 25 bp, Homo sapien
ctgggccccggatgctactgacgaa

SEQ ID NO: 824025 - DNA, 25 bp, Homo sapien
ggatgctactgacgaaacctccccg

SEQ ID NO: 824026 - DNA, 25 bp, Homo sapien
tgctactgacgaaacctccccggaa

SEQ ID NO: 824027 - DNA, 25 bp, Homo sapien
tggccggcgcgggtcagcttctgca

SEQ ID NO: 824028 - DNA, 25 bp, Homo sapien
ggccggcgcgggtcagcttctgcac

SEQ ID NO: 824029 - DNA, 25 bp, Homo sapien
gcgcgggtcagcttctgcaccggca

SEQ ID NO: 824030 - DNA, 25 bp, Homo sapien
cggcgcgggtcagcttctgcaccgg

SEQ ID NO: 824031 - DNA, 25 bp, Homo sapien
cttggagcacttaacacccagatcg

SEQ ID NO: 824032 - DNA, 25 bp, Homo sapien
tggagcacttaacacccagatcgac

SEQ ID NO: 824033 - DNA, 25 bp, Homo sapien
ttggagcacttaacacccagatcga

SEQ ID NO: 824034 - DNA, 25 bp, Homo sapien
cagaatgatggccccgagaatggca

SEQ ID NO: 824035 - DNA, 25 bp, Homo sapien
agaatgatggccccgagaatggcag

SEQ ID NO: 824036 - DNA, 25 bp, Homo sapien
ggccccgagaatggcagtgaccacc

SEQ ID NO: 824037 - DNA, 25 bp, Homo sapien
tgatggccccgagaatggcagtgac

SEQ ID NO: 824038 - DNA, 25 bp, Homo sapien
gcactagcacggagccgtctgtcac

SEQ ID NO: 824039 - DNA, 25 bp, Homo sapien
tagcacggagccgtctgtcaccttg

SEQ ID NO: 824040 - DNA, 25 bp, Homo sapien
gcacggagccgtctgtcaccttgca

SEQ ID NO: 824041 - DNA, 25 bp, Homo sapien
ggcgcactagcacggagccgtctgt

SEQ ID NO: 824042 - DNA, 25 bp, Homo sapien
taaaaccttggagacttatcacttc

SEQ ID NO: 824043 - DNA, 25 bp, Homo sapien
tttcctaagtgaggcacaatcaagg

SEQ ID NO: 824044 - DNA, 25 bp, Homo sapien
caaggtcagcctctcttttgtaaaa

SEQ ID NO: 824045 - DNA, 25 bp, Homo sapien
taagaatcaagctgtaactaaaagg

SEQ ID NO: 824046 - DNA, 25 bp, Homo sapien
cacgtggccgagtctgaagtccaga

SEQ ID NO: 824047 - DNA, 25 bp, Homo sapien
cagaatcttggttggagctgggaat

SEQ ID NO: 824048 - DNA, 25 bp, Homo sapien
gataattgcccaaatccacagagat

SEQ ID NO: 824049 - DNA, 25 bp, Homo sapien
gagatgccagaaggttgccgctctt

SEQ ID NO: 824050 - DNA, 25 bp, Homo sapien
gctcatactgttgactaataatagg

SEQ ID NO: 824051 - DNA, 25 bp, Homo sapien
gcctactgaaacttcaaccacaatg

SEQ ID NO: 824052 - DNA, 25 bp, Homo sapien
tatgccatttgggaacattattctg

SEQ ID NO: 824053 - DNA, 25 bp, Homo sapien
ttcaaccacaatgcagttcagattt

SEQ ID NO: 824054 - DNA, 25 bp, Homo sapien
tctgtccactagaaacaacgattcc

SEQ ID NO: 824055 - DNA, 25 bp, Homo sapien
tagaaacaacgattcctctagggag

SEQ ID NO: 824056 - DNA, 25 bp, Homo sapien
caacgattcctctagggagcaaggc

SEQ ID NO: 824057 - DNA, 25 bp, Homo sapien
ctggagaggcattagaaattcccat

SEQ ID NO: 824058 - DNA, 25 bp, Homo sapien
gaaaagtttccactgagtttgcaag

SEQ ID NO: 824059 - DNA, 25 bp, Homo sapien
tccactgagtttgcaagtggttgcc

SEQ ID NO: 824060 - DNA, 25 bp, Homo sapien
tgagtttgcaagtggttgccgtcat

SEQ ID NO: 824061 - DNA, 25 bp, Homo sapien
agaacttggaaaagtttccactgag

SEQ ID NO: 824062 - DNA, 25 bp, Homo sapien
tatacagccaaacctaaactaagat

SEQ ID NO: 824063 - DNA, 25 bp, Homo sapien
gccaaacctaaactaagataggcca

SEQ ID NO: 824064 - DNA, 25 bp, Homo sapien
gaattcagaagacttagaatataca

SEQ ID NO: 824065 - DNA, 25 bp, Homo sapien
gacttagaatatacagccaaaccta

SEQ ID NO: 824066 - DNA, 25 bp, Homo sapien
ttaaaaccaatgatgctttgagtcc

SEQ ID NO: 824067 - DNA, 25 bp, Homo sapien
tagcgatgtttaaaaccaatgatgc

SEQ ID NO: 824068 - DNA, 25 bp, Homo sapien
caatgatgctttgagtccagggacc

SEQ ID NO: 824069 - DNA, 25 bp, Homo sapien
tgctcctggcattagcgatgtttaa

SEQ ID NO: 824070 - DNA, 25 bp, Homo sapien
caggattccagcatacaaaagcaca

SEQ ID NO: 824071 - DNA, 25 bp, Homo sapien
gagttgttgaccaaggccagcagga

SEQ ID NO: 824072 - DNA, 25 bp, Homo sapien
cagtgagttgttgaccaaggccagc

SEQ ID NO: 824073 - DNA, 25 bp, Homo sapien
tacaaaagcacagtgagttgttgac

SEQ ID NO: 824074 - DNA, 25 bp, Homo sapien
gcaggagcagtgctaatctctgctt

SEQ ID NO: 824075 - DNA, 25 bp, Homo sapien
tgcaggagcagtgctaatctctgct

SEQ ID NO: 824076 - DNA, 25 bp, Homo sapien
gaagtggagggtgtcactttccttg

SEQ ID NO: 824077 - DNA, 25 bp, Homo sapien
taaaattacaaaggactgggccaca

SEQ ID NO: 824078 - DNA, 25 bp, Homo sapien
tcttgttcatgctcccttaaaatta

SEQ ID NO: 824079 - DNA, 25 bp, Homo sapien
aagtggagggtgtcactttccttgc

SEQ ID NO: 824080 - DNA, 25 bp, Homo sapien
aatattgctgacatcctgttggcag

SEQ ID NO: 824081 - DNA, 25 bp, Homo sapien
ggcagattcctgattggatgcaaat

SEQ ID NO: 824082 - DNA, 25 bp, Homo sapien
gatgcaaattgatccagtaaggtgt

SEQ ID NO: 824083 - DNA, 25 bp, Homo sapien
tggagtggataattaatccttgcct

SEQ ID NO: 824084 - DNA, 25 bp, Homo sapien
gttccctgccgttcattcttccttg

SEQ ID NO: 824085 - DNA, 25 bp, Homo sapien
tctattgtcaaacattgctaaagca

SEQ ID NO: 824086 - DNA, 25 bp, Homo sapien
ttgtcaaacattgctaaagcagttc

SEQ ID NO: 824087 - DNA, 25 bp, Homo sapien
aagcagttccctgccgttcattctt

SEQ ID NO: 824088 - DNA, 25 bp, Homo sapien
gaatcctacgtaaagcactctgagt

SEQ ID NO: 824089 - DNA, 25 bp, Homo sapien
tctatgcacaatttaaaaccggcct

SEQ ID NO: 824090 - DNA, 25 bp, Homo sapien
tctgaactagcacatagagctacag

SEQ ID NO: 824091 - DNA, 25 bp, Homo sapien
gatacaattactggttctatgcaca

SEQ ID NO: 824092 - DNA, 25 bp, Homo sapien
gagaaagcctgtacccgagggaata

SEQ ID NO: 824093 - DNA, 25 bp, Homo sapien
tctagtgactgcgaggaaaatccgc

SEQ ID NO: 824094 - DNA, 25 bp, Homo sapien
gaactgtacagtagtggcactgacc

SEQ ID NO: 824095 - DNA, 25 bp, Homo sapien
tgttactgcctacatggctacaggg

SEQ ID NO: 824096 - DNA, 25 bp, Homo sapien
cttctctgggagtcaccactttcac

SEQ ID NO: 824097 - DNA, 25 bp, Homo sapien
ggtcgcttctctgggagtcaccact

SEQ ID NO: 824098 - DNA, 25 bp, Homo sapien
aggtcgcttctctgggagtcaccac

SEQ ID NO: 824099 - DNA, 25 bp, Homo sapien
tcgcttctctgggagtcaccacttt

SEQ ID NO: 824100 - DNA, 25 bp, Homo sapien
tttaccagggaatagcctataacca

SEQ ID NO: 824101 - DNA, 25 bp, Homo sapien
ctgcccctttaccagggaatagcct

SEQ ID NO: 824102 - DNA, 25 bp, Homo sapien
tgcccctttaccagggaatagccta

SEQ ID NO: 824103 - DNA, 25 bp, Homo sapien
ttaccagggaatagcctataaccat

SEQ ID NO: 824104 - DNA, 25 bp, Homo sapien
agagcaactgcatcccaagcgctag

SEQ ID NO: 824105 - DNA, 25 bp, Homo sapien
gactgtttaccctgttgcagctgga

SEQ ID NO: 824106 - DNA, 25 bp, Homo sapien
caagcgctagctgcatttggagcag

SEQ ID NO: 824107 - DNA, 25 bp, Homo sapien
catttgggatgcagttgccaagagc

SEQ ID NO: 824108 - DNA, 25 bp, Homo sapien
gagcaactgttaccaagaaggccac

SEQ ID NO: 824109 - DNA, 25 bp, Homo sapien
caactggatcaaacgctgtcgaaag

SEQ ID NO: 824110 - DNA, 25 bp, Homo sapien
caacttcggcagcaggtgtcgatcc

SEQ ID NO: 824111 - DNA, 25 bp, Homo sapien
tagagacctcggcttgcaactggat

SEQ ID NO: 824112 - DNA, 25 bp, Homo sapien
tgaacatttcgcagtcactaggagg

SEQ ID NO: 824113 - DNA, 25 bp, Homo sapien
gcttcttttggaccaccacaaagat

SEQ ID NO: 824114 - DNA, 25 bp, Homo sapien
cactaggaggtgcttcttttggacc

SEQ ID NO: 824115 - DNA, 25 bp, Homo sapien
ccaaagacaccacccttgtgaacat

SEQ ID NO: 824116 - DNA, 25 bp, Homo sapien
ttctccaaccaatcggcaccaaaag

SEQ ID NO: 824117 - DNA, 25 bp, Homo sapien
cccattctccaaccaatcggcacca

SEQ ID NO: 824118 - DNA, 25 bp, Homo sapien
cccaagaagctattaggtacaaatt

SEQ ID NO: 824119 - DNA, 25 bp, Homo sapien
caagaagctattaggtacaaattcc

SEQ ID NO: 824120 - DNA, 25 bp, Homo sapien
cggaccttatctggtgcccaggaca

SEQ ID NO: 824121 - DNA, 25 bp, Homo sapien
tcaatgtaacccttggcgctcacca

SEQ ID NO: 824122 - DNA, 25 bp, Homo sapien
tgggaataagcggagatctcaatgt

SEQ ID NO: 824123 - DNA, 25 bp, Homo sapien
gggagctcggaccttatctggtgcc

SEQ ID NO: 824124 - DNA, 25 bp, Homo sapien
tcgtttagtactctggggtccaagc

SEQ ID NO: 824125 - DNA, 25 bp, Homo sapien
ctggggtccaagctgtattaaggtt

SEQ ID NO: 824126 - DNA, 25 bp, Homo sapien
tgctccgatcgtttagtactctggg

SEQ ID NO: 824127 - DNA, 25 bp, Homo sapien
ctttgctccgatcgtttagtactct

SEQ ID NO: 824128 - DNA, 25 bp, Homo sapien
caggaaattcagggtcttctacccg

SEQ ID NO: 824129 - DNA, 25 bp, Homo sapien
atgccgtaaaacaggaaattcaggg

SEQ ID NO: 824130 - DNA, 25 bp, Homo sapien
tcattccaaaaataaatgccgtaaa

SEQ ID NO: 824131 - DNA, 25 bp, Homo sapien
taaatgccgtaaaacaggaaattca

SEQ ID NO: 824132 - DNA, 25 bp, Homo sapien
ctttcctgtggttatgaaaaacaca

SEQ ID NO: 824133 - DNA, 25 bp, Homo sapien
tttcctgtggttatgaaaaacacaa

SEQ ID NO: 824134 - DNA, 25 bp, Homo sapien
ttcctgtggttatgaaaaacacaaa

SEQ ID NO: 824135 - DNA, 25 bp, Homo sapien
tgtaagtgtaagtgagaatccaaga

SEQ ID NO: 824136 - DNA, 25 bp, Homo sapien
gaggagggagcaccacaatataaat

SEQ ID NO: 824137 - DNA, 25 bp, Homo sapien
caatcccttgttgactatgtaagtg

SEQ ID NO: 824138 - DNA, 25 bp, Homo sapien
cggtggaaatcaatagctgaaagtt

SEQ ID NO: 824139 - DNA, 25 bp, Homo sapien
tttaatgattaatgtaaagggtctg

SEQ ID NO: 824140 - DNA, 25 bp, Homo sapien
atgtaaagggtctgaaatatctgca

SEQ ID NO: 824141 - DNA, 25 bp, Homo sapien
ttaatgtaaagggtctgaaatatct

SEQ ID NO: 824142 - DNA, 25 bp, Homo sapien
ttgtctcttatgtgaggaatgtgtt

SEQ ID NO: 824143 - DNA, 25 bp, Homo sapien
tcataattcctactcacaacgtgag

SEQ ID NO: 824144 - DNA, 25 bp, Homo sapien
tgtgggctcactaccttacctcagg

SEQ ID NO: 824145 - DNA, 25 bp, Homo sapien
gagggaaccttgtttgtgcttaatc

SEQ ID NO: 824146 - DNA, 25 bp, Homo sapien
cttgttaatagtgtatggctcatcc

SEQ ID NO: 824147 - DNA, 25 bp, Homo sapien
tgccgtggacacataccattcatca

SEQ ID NO: 824148 - DNA, 25 bp, Homo sapien
tcatcaatgatacgtactgtgcttc

SEQ ID NO: 824149 - DNA, 25 bp, Homo sapien
tatacttttgctttgggagctggct

SEQ ID NO: 824150 - DNA, 25 bp, Homo sapien
taggtatgcagtttttgccgtggac

SEQ ID NO: 824151 - DNA, 25 bp, Homo sapien
ctccatttaagaatgaccatttgtc

SEQ ID NO: 824152 - DNA, 25 bp, Homo sapien
agcatctatatataagagctaaatc

SEQ ID NO: 824153 - DNA, 25 bp, Homo sapien
catctatatataagagctaaatcca

SEQ ID NO: 824154 - DNA, 25 bp, Homo sapien
tccatttaagaatgaccatttgtct

SEQ ID NO: 824155 - DNA, 25 bp, Homo sapien
ttttcactactgagtcccgcgttgt

SEQ ID NO: 824156 - DNA, 25 bp, Homo sapien
tgcttctgctaactctgactttcgt

SEQ ID NO: 824157 - DNA, 25 bp, Homo sapien
ctgctgaaaagtccagttagtttta

SEQ ID NO: 824158 - DNA, 25 bp, Homo sapien
ggtttcattgaggtgtgatgctagt

SEQ ID NO: 824159 - DNA, 25 bp, Homo sapien
aacaagcgactatgcccagggatcc

SEQ ID NO: 824160 - DNA, 25 bp, Homo sapien
tgtgtgaaccgttacgcagctggtc

SEQ ID NO: 824161 - DNA, 25 bp, Homo sapien
cctccaggcgccatcagtgtgtgaa

SEQ ID NO: 824162 - DNA, 25 bp, Homo sapien
catcctgtcagtatttcgccaaacc

SEQ ID NO: 824163 - DNA, 25 bp, Homo sapien
gaaagatcctctttgactagtctac

SEQ ID NO: 824164 - DNA, 25 bp, Homo sapien
gatatgtaaatgaaggggacattaa

SEQ ID NO: 824165 - DNA, 25 bp, Homo sapien
ttcaagacataaacccctacttcca

SEQ ID NO: 824166 - DNA, 25 bp, Homo sapien
gatcctctttgactagtctactttc

SEQ ID NO: 824167 - DNA, 25 bp, Homo sapien
cttagagctggtccattattttcaa

SEQ ID NO: 824168 - DNA, 25 bp, Homo sapien
aggctaacaaattgctgtctgcttc

SEQ ID NO: 824169 - DNA, 25 bp, Homo sapien
aatatcaggctaacaaattgctgtc

SEQ ID NO: 824170 - DNA, 25 bp, Homo sapien
gaggctgtagacatgggcattatta

SEQ ID NO: 824171 - DNA, 25 bp, Homo sapien
gtagctatagcaatgaagacaggat

SEQ ID NO: 824172 - DNA, 25 bp, Homo sapien
gaatttgttacatgctcatttctga

SEQ ID NO: 824173 - DNA, 25 bp, Homo sapien
tttctgctccaggatagacggtttg

SEQ ID NO: 824174 - DNA, 25 bp, Homo sapien
gatagacggtttgatataaagggta

SEQ ID NO: 824175 - DNA, 25 bp, Homo sapien
gttcagtcaaccacaggattggttt

SEQ ID NO: 824176 - DNA, 25 bp, Homo sapien
tggaatggctgccagtaataatcgg

SEQ ID NO: 824177 - DNA, 25 bp, Homo sapien
cagtcaaccacaggattggtttcat

SEQ ID NO: 824178 - DNA, 25 bp, Homo sapien
taatcggattacacatttcctcaca

SEQ ID NO: 824179 - DNA, 25 bp, Homo sapien
gacatagatgttggcatagacggca

SEQ ID NO: 824180 - DNA, 25 bp, Homo sapien
tacagctgacatattgacatagatg

SEQ ID NO: 824181 - DNA, 25 bp, Homo sapien
tctgctagctctccttgctattgat

SEQ ID NO: 824182 - DNA, 25 bp, Homo sapien
gatataagtggtcctacagctgaca

SEQ ID NO: 824183 - DNA, 25 bp, Homo sapien
tgttgcacacccttgaatatgagaa

SEQ ID NO: 824184 - DNA, 25 bp, Homo sapien
tttggacatctaccacaatgacaga

SEQ ID NO: 824185 - DNA, 25 bp, Homo sapien
cactggatggtactaatcactttgg

SEQ ID NO: 824186 - DNA, 25 bp, Homo sapien
gaccaggtgaatactttaggctaac

SEQ ID NO: 824187 - DNA, 25 bp, Homo sapien
tattctggctaccagtccttcatca

SEQ ID NO: 824188 - DNA, 25 bp, Homo sapien
catggtatcatttgtagcaactttt

SEQ ID NO: 824189 - DNA, 25 bp, Homo sapien
ctttcttcatggtatcatttgtagc

SEQ ID NO: 824190 - DNA, 25 bp, Homo sapien
agccaatgggctgcctttcactttc

SEQ ID NO: 824191 - DNA, 25 bp, Homo sapien
gataatctagaaaacgacatgagca

SEQ ID NO: 824192 - DNA, 25 bp, Homo sapien
tccctctagggatgactctgcttcc

SEQ ID NO: 824193 - DNA, 25 bp, Homo sapien
caaaatgtgctgttggacggtgaat

SEQ ID NO: 824194 - DNA, 25 bp, Homo sapien
catgttccctctggatccctctagg

SEQ ID NO: 824195 - DNA, 25 bp, Homo sapien
aaaggacaaggagagtatgtctcaa

SEQ ID NO: 824196 - DNA, 25 bp, Homo sapien
caattaaaggacaaggagagtatgt

SEQ ID NO: 824197 - DNA, 25 bp, Homo sapien
tataaacaattaaaggacaaggaga

SEQ ID NO: 824198 - DNA, 25 bp, Homo sapien
caaggagagtatgtctcaatgtggt

SEQ ID NO: 824199 - DNA, 25 bp, Homo sapien
tttggtggaaggttgtatatcttcg

SEQ ID NO: 824200 - DNA, 25 bp, Homo sapien
tggatttggtggaaggttgtatatc

SEQ ID NO: 824201 - DNA, 25 bp, Homo sapien
ttggtggaaggttgtatatcttcgt

SEQ ID NO: 824202 - DNA, 25 bp, Homo sapien
gatttggtggaaggttgtatatctt

SEQ ID NO: 824203 - DNA, 25 bp, Homo sapien
caaaaagtgcaaatgaagcatcata

SEQ ID NO: 824204 - DNA, 25 bp, Homo sapien
gaggaaaggcttccgagaaaataca

SEQ ID NO: 824205 - DNA, 25 bp, Homo sapien
aatagaggcaagaatgacagcagct

SEQ ID NO: 824206 - DNA, 25 bp, Homo sapien
catcatagatttgaatagaggcaag

SEQ ID NO: 824207 - DNA, 25 bp, Homo sapien
tatttaagaatgttatttattacac

SEQ ID NO: 824208 - DNA, 25 bp, Homo sapien
tgtatttaagaatgttatttattac

SEQ ID NO: 824209 - DNA, 25 bp, Homo sapien
ccatgtatttaagaatgttatttat

SEQ ID NO: 824210 - DNA, 25 bp, Homo sapien
taagaatgttatttattacacccat

SEQ ID NO: 824211 - DNA, 25 bp, Homo sapien
ggctcttgaaagtggtttgatggga

SEQ ID NO: 824212 - DNA, 25 bp, Homo sapien
acactcacagtgacggttggttaac

SEQ ID NO: 824213 - DNA, 25 bp, Homo sapien
ggctaagtgataaattgctcgtcca

SEQ ID NO: 824214 - DNA, 25 bp, Homo sapien
cggttggttaacaagtctggatagt

SEQ ID NO: 824215 - DNA, 25 bp, Homo sapien
tgtttcatggattcttgagtgacag

SEQ ID NO: 824216 - DNA, 25 bp, Homo sapien
gaagctttcaggaacagtgtttctc

SEQ ID NO: 824217 - DNA, 25 bp, Homo sapien
tttcatggattcttgagtgacagaa

SEQ ID NO: 824218 - DNA, 25 bp, Homo sapien
tgtgaagttcatgaatgtttcatgg

SEQ ID NO: 824219 - DNA, 25 bp, Homo sapien
gactagaggtagagcaaaggaggaa

SEQ ID NO: 824220 - DNA, 25 bp, Homo sapien
tatgatgactagaggtagagcaaag

SEQ ID NO: 824221 - DNA, 25 bp, Homo sapien
tgactagaggtagagcaaaggagga

SEQ ID NO: 824222 - DNA, 25 bp, Homo sapien
ttcaggcgtgcagttgatttagcca

SEQ ID NO: 824223 - DNA, 25 bp, Homo sapien
gaaattcaggcgtgcagttgattta

SEQ ID NO: 824224 - DNA, 25 bp, Homo sapien
tgctgcttcgggtgtacttccccac

SEQ ID NO: 824225 - DNA, 25 bp, Homo sapien
gtggtgcggacagcacatgaacctg

SEQ ID NO: 824226 - DNA, 25 bp, Homo sapien
ttctgaatggcctgcttgttgtggt

SEQ ID NO: 824227 - DNA, 25 bp, Homo sapien
atgcccatgatgcggaacacccagg

SEQ ID NO: 824228 - DNA, 25 bp, Homo sapien
catgatgcggaacacccaggcactg

SEQ ID NO: 824229 - DNA, 25 bp, Homo sapien
gaatggcctgcttgttgtggtgcat

SEQ ID NO: 824230 - DNA, 25 bp, Homo sapien
tgcagacgactctgataacagccag

SEQ ID NO: 824231 - DNA, 25 bp, Homo sapien
cagacgactctgataacagccagtc

SEQ ID NO: 824232 - DNA, 25 bp, Homo sapien
gacgactctgataacagccagtcac

SEQ ID NO: 824233 - DNA, 25 bp, Homo sapien
gcagacgactctgataacagccagt

SEQ ID NO: 824234 - DNA, 25 bp, Homo sapien
actggttaatgcaggtgaggaacca

SEQ ID NO: 824235 - DNA, 25 bp, Homo sapien
gactggttaatgcaggtgaggaacc

SEQ ID NO: 824236 - DNA, 25 bp, Homo sapien
ctgagactggttaatgcaggtgagg

SEQ ID NO: 824237 - DNA, 25 bp, Homo sapien
gagactggttaatgcaggtgaggaa

SEQ ID NO: 824238 - DNA, 25 bp, Homo sapien
ttggcactcggcaaactttttagca

SEQ ID NO: 824239 - DNA, 25 bp, Homo sapien
gttggcactcggcaaactttttagc

SEQ ID NO: 824240 - DNA, 25 bp, Homo sapien
tcctccttccactcagcctggggct

SEQ ID NO: 824241 - DNA, 25 bp, Homo sapien
ggctctgctgctcttcctgtgaacc

SEQ ID NO: 824242 - DNA, 25 bp, Homo sapien
ggggctctgctgctcttcctgtgaa

SEQ ID NO: 824243 - DNA, 25 bp, Homo sapien
tccttccactcagcctggggctctg

SEQ ID NO: 824244 - DNA, 25 bp, Homo sapien
attcatccatctcctcctctggagc

SEQ ID NO: 824245 - DNA, 25 bp, Homo sapien
catctcctcctctggagcaggggca

SEQ ID NO: 824246 - DNA, 25 bp, Homo sapien
atctcctcctctggagcaggggcag

SEQ ID NO: 824247 - DNA, 25 bp, Homo sapien
atccatctcctcctctggagcaggg

SEQ ID NO: 824248 - DNA, 25 bp, Homo sapien
gatccttggccttaggctcagcggc

SEQ ID NO: 824249 - DNA, 25 bp, Homo sapien
cttgggcaggtgatcggagggatcc

SEQ ID NO: 824250 - DNA, 25 bp, Homo sapien
tgatcggagggatccttggccttag

SEQ ID NO: 824251 - DNA, 25 bp, Homo sapien
ggagggatccttggccttaggctca

SEQ ID NO: 824252 - DNA, 25 bp, Homo sapien
gttggagtccttgccgcttaaattc

SEQ ID NO: 824253 - DNA, 25 bp, Homo sapien
gagtccttgccgcttaaattcatcc

SEQ ID NO: 824254 - DNA, 25 bp, Homo sapien
tcatccaacacagccgggtgtggcg

SEQ ID NO: 824255 - DNA, 25 bp, Homo sapien
ccttgttggagtccttgccgcttaa

SEQ ID NO: 824256 - DNA, 25 bp, Homo sapien
gatgacactggtgaaggcattcttc

SEQ ID NO: 824257 - DNA, 25 bp, Homo sapien
gagtgagttcttcagggatgcgata

SEQ ID NO: 824258 - DNA, 25 bp, Homo sapien
aaatggagctgctactgttggttcc

SEQ ID NO: 824259 - DNA, 25 bp, Homo sapien
ggcattcttcctcaacttgtccagt

SEQ ID NO: 824260 - DNA, 25 bp, Homo sapien
gccccgattggaggtttggccaaca

SEQ ID NO: 824261 - DNA, 25 bp, Homo sapien
agatcttgccccgattggaggtttg

SEQ ID NO: 824262 - DNA, 25 bp, Homo sapien
agcatctacgtctcctcactgccag

SEQ ID NO: 824263 - DNA, 25 bp, Homo sapien
ggtttggccaacatgctggaaggcc

SEQ ID NO: 824264 - DNA, 25 bp, Homo sapien
gatcccctgcgctttactggcagag

SEQ ID NO: 824265 - DNA, 25 bp, Homo sapien
tttacaactgcacaactcataggcg

SEQ ID NO: 824266 - DNA, 25 bp, Homo sapien
taagctcttgacttagcagatcccc

SEQ ID NO: 824267 - DNA, 25 bp, Homo sapien
caaatgaagtaacggcaggcctctc

SEQ ID NO: 824268 - DNA, 25 bp, Homo sapien
caccttacggtttttgaacatcagc

SEQ ID NO: 824269 - DNA, 25 bp, Homo sapien
aaatgtcttacaggtcaccttacgg

SEQ ID NO: 824270 - DNA, 25 bp, Homo sapien
gctgctagagtttttgccctccttg

SEQ ID NO: 824271 - DNA, 25 bp, Homo sapien
catttgtgcagtggccttttagaaa

SEQ ID NO: 824272 - DNA, 25 bp, Homo sapien
aacatctcatggctgttcaacagaa

SEQ ID NO: 824273 - DNA, 25 bp, Homo sapien
gccattgactatgtctgcacagtaa

SEQ ID NO: 824274 - DNA, 25 bp, Homo sapien
tcatgcactgtgatgaacactgggt

SEQ ID NO: 824275 - DNA, 25 bp, Homo sapien
caatagatgagaggcatgccattga

SEQ ID NO: 824276 - DNA, 25 bp, Homo sapien
cacagtaatagtgagcaagtcatta

SEQ ID NO: 824277 - DNA, 25 bp, Homo sapien
ctgttcccatcaaacctcaattctt

SEQ ID NO: 824278 - DNA, 25 bp, Homo sapien
cctcaattcttgcatggtaagagac

SEQ ID NO: 824279 - DNA, 25 bp, Homo sapien
cacagtacaggtgagaataatactg

SEQ ID NO: 824280 - DNA, 25 bp, Homo sapien
cgaccctgtttctgtccacgtgaca

SEQ ID NO: 824281 - DNA, 25 bp, Homo sapien
agcagctggtcttcgaccctgtttc

SEQ ID NO: 824282 - DNA, 25 bp, Homo sapien
aaggagaactgtaaacaaggacttg

SEQ ID NO: 824283 - DNA, 25 bp, Homo sapien
gaactgtaaacaaggacttgagagc

SEQ ID NO: 824284 - DNA, 25 bp, Homo sapien
ttcaagccagtcttagtgttaagac

SEQ ID NO: 824285 - DNA, 25 bp, Homo sapien
cagtttcaagccagtcttagtgtta

SEQ ID NO: 824286 - DNA, 25 bp, Homo sapien
gtttcaagccagtcttagtgttaag

SEQ ID NO: 824287 - DNA, 25 bp, Homo sapien
ccagtttcaagccagtcttagtgtt

SEQ ID NO: 824288 - DNA, 25 bp, Homo sapien
gcctcttttgtctaatcctgaaata

SEQ ID NO: 824289 - DNA, 25 bp, Homo sapien
tcctttcactggcaacgtatagtac

SEQ ID NO: 824290 - DNA, 25 bp, Homo sapien
cttttgtctaatcctgaaatagagg

SEQ ID NO: 824291 - DNA, 25 bp, Homo sapien
catatcgatgttcttcctgaaagga

SEQ ID NO: 824292 - DNA, 25 bp, Homo sapien
caaagtagaaccttctaaagaagtg

SEQ ID NO: 824293 - DNA, 25 bp, Homo sapien
tttctcttgtattggacatataggc

SEQ ID NO: 824294 - DNA, 25 bp, Homo sapien
gacatataggcaaaccttaaaccca

SEQ ID NO: 824295 - DNA, 25 bp, Homo sapien
ccttctaaagaagtggaatgttctt

SEQ ID NO: 824296 - DNA, 25 bp, Homo sapien
tctataaagggactatattctttag

SEQ ID NO: 824297 - DNA, 25 bp, Homo sapien
aattctataaagggactatattctt

SEQ ID NO: 824298 - DNA, 25 bp, Homo sapien
ctataaagggactatattctttagg

SEQ ID NO: 824299 - DNA, 25 bp, Homo sapien
attctataaagggactatattcttt

SEQ ID NO: 824300 - DNA, 25 bp, Homo sapien
ttagcaacaacaaaactcaagagtt

SEQ ID NO: 824301 - DNA, 25 bp, Homo sapien
tagcaacaacaaaactcaagagtta

SEQ ID NO: 824302 - DNA, 25 bp, Homo sapien
attagcaacaacaaaactcaagagt

SEQ ID NO: 824303 - DNA, 25 bp, Homo sapien
atttgcttgtcggtgctcctctaga

SEQ ID NO: 824304 - DNA, 25 bp, Homo sapien
ctgccatttgcttgtcggtgctcct

SEQ ID NO: 824305 - DNA, 25 bp, Homo sapien
gcttgtcggtgctcctctagatcca

SEQ ID NO: 824306 - DNA, 25 bp, Homo sapien
tcggtgctcctctagatccaatcat

SEQ ID NO: 824307 - DNA, 25 bp, Homo sapien
ctgtctatgcaggtattcctcctcc

SEQ ID NO: 824308 - DNA, 25 bp, Homo sapien
gcttagaatatgtgccaacatttct

SEQ ID NO: 824309 - DNA, 25 bp, Homo sapien
tgcagagaatctcttctctgcttga

SEQ ID NO: 824310 - DNA, 25 bp, Homo sapien
tcacacttccctgtctatgcaggta

SEQ ID NO: 824311 - DNA, 25 bp, Homo sapien
caaactatctatgcattcgagcagc

SEQ ID NO: 824312 - DNA, 25 bp, Homo sapien
tctaagccagtctcagcaaagtgtt

SEQ ID NO: 824313 - DNA, 25 bp, Homo sapien
tataagtgtacttcctctaagccag

SEQ ID NO: 824314 - DNA, 25 bp, Homo sapien
cattttgcatgaaggctggcctcca

SEQ ID NO: 824315 - DNA, 25 bp, Homo sapien
ttccgtagacttgtacaagcatggc

SEQ ID NO: 824316 - DNA, 25 bp, Homo sapien
gttccgtagacttgtacaagcatgg

SEQ ID NO: 824317 - DNA, 25 bp, Homo sapien
tccgtagacttgtacaagcatggca

SEQ ID NO: 824318 - DNA, 25 bp, Homo sapien
tgccaactctaccaacatccaaagt

SEQ ID NO: 824319 - DNA, 25 bp, Homo sapien
cacaaccctgtcttctacctttaat

SEQ ID NO: 824320 - DNA, 25 bp, Homo sapien
gaaacctgaccaagcagatatagat

SEQ ID NO: 824321 - DNA, 25 bp, Homo sapien
tagacattagatagtgaaacctgac

SEQ ID NO: 824322 - DNA, 25 bp, Homo sapien
agccagagcatgaagctctagccca

SEQ ID NO: 824323 - DNA, 25 bp, Homo sapien
tcagccagagcatgaagctctagcc

SEQ ID NO: 824324 - DNA, 25 bp, Homo sapien
ctcagccagagcatgaagctctagc

SEQ ID NO: 824325 - DNA, 25 bp, Homo sapien
cagccagagcatgaagctctagccc

SEQ ID NO: 824326 - DNA, 25 bp, Homo sapien
tatccagaacaaataacagctcctc

SEQ ID NO: 824327 - DNA, 25 bp, Homo sapien
ctcctctgtgaggtcgacccagatt

SEQ ID NO: 824328 - DNA, 25 bp, Homo sapien
gacccagattccacgagacaaagct

SEQ ID NO: 824329 - DNA, 25 bp, Homo sapien
tcaaactgttgggtatgcacctcca

SEQ ID NO: 824330 - DNA, 25 bp, Homo sapien
accttgctcatagcatctccacagc

SEQ ID NO: 824331 - DNA, 25 bp, Homo sapien
ctcattgaaaaaggaccccacgtct

SEQ ID NO: 824332 - DNA, 25 bp, Homo sapien
tctgctagacttcaactcattgaaa

SEQ ID NO: 824333 - DNA, 25 bp, Homo sapien
caagttttccattattcttatatgc

SEQ ID NO: 824334 - DNA, 25 bp, Homo sapien
aagtcaaatatgtttgggttcatct

SEQ ID NO: 824335 - DNA, 25 bp, Homo sapien
aactatgtattaagcttttctgaaa

SEQ ID NO: 824336 - DNA, 25 bp, Homo sapien
tgggttcatcttgtgtaacaagttg

SEQ ID NO: 824337 - DNA, 25 bp, Homo sapien
catattcaaaactatgtattaagct

SEQ ID NO: 824338 - DNA, 25 bp, Homo sapien
gtctagattgtacacagccctgcaa

SEQ ID NO: 824339 - DNA, 25 bp, Homo sapien
aacaccattcgttgcttctggagaa

SEQ ID NO: 824340 - DNA, 25 bp, Homo sapien
tggcaggctactctgggaatcaact

SEQ ID NO: 824341 - DNA, 25 bp, Homo sapien
cagaggcatgggcttttcacaaaat

SEQ ID NO: 824342 - DNA, 25 bp, Homo sapien
ggaacaaaggcacgtacctcaagct

SEQ ID NO: 824343 - DNA, 25 bp, Homo sapien
gaggcactacacagtcactttttga

SEQ ID NO: 824344 - DNA, 25 bp, Homo sapien
aattgcctaatcagaggaacagagg

SEQ ID NO: 824345 - DNA, 25 bp, Homo sapien
taataaacatagtgaaaatgcagcc

SEQ ID NO: 824346 - DNA, 25 bp, Homo sapien
ctgaggtctagcttctggtcccaaa

SEQ ID NO: 824347 - DNA, 25 bp, Homo sapien
tgacaatttgttgaatctcactgga

SEQ ID NO: 824348 - DNA, 25 bp, Homo sapien
ttcagaagtgtgtaacttgacaatt

SEQ ID NO: 824349 - DNA, 25 bp, Homo sapien
cccaaatctgtcattcagaagtgtg

SEQ ID NO: 824350 - DNA, 25 bp, Homo sapien
tggagcactgcttataggcacaggc

SEQ ID NO: 824351 - DNA, 25 bp, Homo sapien
tcaaacatggaaacaagaccaacgt

SEQ ID NO: 824352 - DNA, 25 bp, Homo sapien
gagcaccccgaggaaacagaggatt

SEQ ID NO: 824353 - DNA, 25 bp, Homo sapien
gaccaacgttcttgaagttactaca

SEQ ID NO: 824354 - DNA, 25 bp, Homo sapien
tacccaacccagatttgtttttgca

SEQ ID NO: 824355 - DNA, 25 bp, Homo sapien
aaattagtcatatgtcctctagtga

SEQ ID NO: 824356 - DNA, 25 bp, Homo sapien
catctctctggtgagtcatctcaaa

SEQ ID NO: 824357 - DNA, 25 bp, Homo sapien
cacctatgtgtttcatacgtttaac

SEQ ID NO: 824358 - DNA, 25 bp, Homo sapien
tacagagcgctatacagtgcacatg

SEQ ID NO: 824359 - DNA, 25 bp, Homo sapien
cacatgttagatgctaggtaaatgt

SEQ ID NO: 824360 - DNA, 25 bp, Homo sapien
agttgtatccttaatcacactggac

SEQ ID NO: 824361 - DNA, 25 bp, Homo sapien
cactggactatttcaccaatgttga

SEQ ID NO: 824362 - DNA, 25 bp, Homo sapien
tttatgacctcacacaattcagaga

SEQ ID NO: 824363 - DNA, 25 bp, Homo sapien
tatgacctcacacaattcagagatt

SEQ ID NO: 824364 - DNA, 25 bp, Homo sapien
tgacctcacacaattcagagatttc

SEQ ID NO: 824365 - DNA, 25 bp, Homo sapien
ctttatgacctcacacaattcagag

SEQ ID NO: 824366 - DNA, 25 bp, Homo sapien
tatcactgttcttttcccccacaaa

SEQ ID NO: 824367 - DNA, 25 bp, Homo sapien
ttatcactgttcttttcccccacaa

SEQ ID NO: 824368 - DNA, 25 bp, Homo sapien
gaagctagttggtctagtcactcaa

SEQ ID NO: 824369 - DNA, 25 bp, Homo sapien
gacctaatgtgtgttactcccctct

SEQ ID NO: 824370 - DNA, 25 bp, Homo sapien
tgttggtgtacagcaatgcctgcga

SEQ ID NO: 824371 - DNA, 25 bp, Homo sapien
catatcttggcacaggacataatct

SEQ ID NO: 824372 - DNA, 25 bp, Homo sapien
cttatttgcacagcaattccaaaga

SEQ ID NO: 824373 - DNA, 25 bp, Homo sapien
atttgcacagcaattccaaagagaa

SEQ ID NO: 824374 - DNA, 25 bp, Homo sapien
gcacagcaattccaaagagaaagtc

SEQ ID NO: 824375 - DNA, 25 bp, Homo sapien
tgcacagcaattccaaagagaaagt

SEQ ID NO: 824376 - DNA, 25 bp, Homo sapien
taaataaaattagcaagcttatata

SEQ ID NO: 824377 - DNA, 25 bp, Homo sapien
aattcacttttatgatgtcatctag

SEQ ID NO: 824378 - DNA, 25 bp, Homo sapien
agaataattcttcttagtactcaaa

SEQ ID NO: 824379 - DNA, 25 bp, Homo sapien
taaacataattattagcaagcttac

SEQ ID NO: 824380 - DNA, 25 bp, Homo sapien
taggagtccaggtacattttttgca

SEQ ID NO: 824381 - DNA, 25 bp, Homo sapien
cctgcagggcaagttagggataatc

SEQ ID NO: 824382 - DNA, 25 bp, Homo sapien
cactggaaggttttttctggtcatc

SEQ ID NO: 824383 - DNA, 25 bp, Homo sapien
ttgtccttagggaagtaccatactg

SEQ ID NO: 824384 - DNA, 25 bp, Homo sapien
tgagtgtgtttgatgataactgtga

SEQ ID NO: 824385 - DNA, 25 bp, Homo sapien
gaacaaattctatgtatggcattga

SEQ ID NO: 824386 - DNA, 25 bp, Homo sapien
taaattctcattgaaccagttaaat

SEQ ID NO: 824387 - DNA, 25 bp, Homo sapien
taaattttgatataaagcagacctt

SEQ ID NO: 824388 - DNA, 25 bp, Homo sapien
gcaattggtgagaactacagcaggt

SEQ ID NO: 824389 - DNA, 25 bp, Homo sapien
gctgtggagccctgtaagacttagt

SEQ ID NO: 824390 - DNA, 25 bp, Homo sapien
cagcaggtgggagaatatgtatcct

SEQ ID NO: 824391 - DNA, 25 bp, Homo sapien
ggcttctagttgataacctctggac

SEQ ID NO: 824392 - DNA, 25 bp, Homo sapien
aaaactgaagtactttatcatgccg

SEQ ID NO: 824393 - DNA, 25 bp, Homo sapien
tgccaatggtatggacagtagtttt

SEQ ID NO: 824394 - DNA, 25 bp, Homo sapien
aagtactttatcatgccgttgttgc

SEQ ID NO: 824395 - DNA, 25 bp, Homo sapien
tgaacatgaagttaatgccaatggt

SEQ ID NO: 824396 - DNA, 25 bp, Homo sapien
ttgcctctaagtggacctttttata

SEQ ID NO: 824397 - DNA, 25 bp, Homo sapien
catatcttctcagccaggttctcca

SEQ ID NO: 824398 - DNA, 25 bp, Homo sapien
ttataggtacatatcttctcagcca

SEQ ID NO: 824399 - DNA, 25 bp, Homo sapien
taaagagttgcctctaagtggacct

SEQ ID NO: 824400 - DNA, 25 bp, Homo sapien
gagtctgtcacacgatcacagttca

SEQ ID NO: 824401 - DNA, 25 bp, Homo sapien
ctggagtctgtcacacgatcacagt

SEQ ID NO: 824402 - DNA, 25 bp, Homo sapien
caggctggagtctgtcacacgatca

SEQ ID NO: 824403 - DNA, 25 bp, Homo sapien
aggctggagtctgtcacacgatcac

SEQ ID NO: 824404 - DNA, 25 bp, Homo sapien
caagagagacaacatcagacatcga

SEQ ID NO: 824405 - DNA, 25 bp, Homo sapien
aaacacatattggatctttactatg

SEQ ID NO: 824406 - DNA, 25 bp, Homo sapien
tagtattcaacagcacaacagagtg

SEQ ID NO: 824407 - DNA, 25 bp, Homo sapien
atgtgtcaggcattttcccaggttc

SEQ ID NO: 824408 - DNA, 25 bp, Homo sapien
tcaccactacataagatagatggca

SEQ ID NO: 824409 - DNA, 25 bp, Homo sapien
ttcaccactacataagatagatggc

SEQ ID NO: 824410 - DNA, 25 bp, Homo sapien
ggcaccagacagttgagctccttga

SEQ ID NO: 824411 - DNA, 25 bp, Homo sapien
gagctccttgaagtggtaatggaga

SEQ ID NO: 824412 - DNA, 25 bp, Homo sapien
ctggcaccagacagttgagctcctt

SEQ ID NO: 824413 - DNA, 25 bp, Homo sapien
ccttgaagtggtaatggagagacat

SEQ ID NO: 824414 - DNA, 25 bp, Homo sapien
gacgtgccggtgtggaattctcatt

SEQ ID NO: 824415 - DNA, 25 bp, Homo sapien
tacaacatgatcttgtttgctctcc

SEQ ID NO: 824416 - DNA, 25 bp, Homo sapien
caagacagcaagtgatgttttacac

SEQ ID NO: 824417 - DNA, 25 bp, Homo sapien
ccccagtggaatgctttcaagacag

SEQ ID NO: 824418 - DNA, 25 bp, Homo sapien
gatctacatgatgtctgtgttagtt

SEQ ID NO: 824419 - DNA, 25 bp, Homo sapien
catgatctacatgatgtctgtgtta

SEQ ID NO: 824420 - DNA, 25 bp, Homo sapien
catccatgatctacatgatgtctgt

SEQ ID NO: 824421 - DNA, 25 bp, Homo sapien
tccatgatctacatgatgtctgtgt

SEQ ID NO: 824422 - DNA, 25 bp, Homo sapien
ccccggcattgcaagagagtatgga

SEQ ID NO: 824423 - DNA, 25 bp, Homo sapien
tgtttaccctcataatcttgtggcc

SEQ ID NO: 824424 - DNA, 25 bp, Homo sapien
gtgcactgcagaatatcagttgttt

SEQ ID NO: 824425 - DNA, 25 bp, Homo sapien
ggcctgactggtagcttcagttgct

SEQ ID NO: 824426 - DNA, 25 bp, Homo sapien
tgttttctagatggaggaactgtgt

SEQ ID NO: 824427 - DNA, 25 bp, Homo sapien
gaagaggccattcttctcccgatga

SEQ ID NO: 824428 - DNA, 25 bp, Homo sapien
cttacaaagaagtttatactcagaa

SEQ ID NO: 824429 - DNA, 25 bp, Homo sapien
gaactgtgtttaatggtaccaactg

SEQ ID NO: 824430 - DNA, 25 bp, Homo sapien
tatttcttatccgaatgcctaaggg

SEQ ID NO: 824431 - DNA, 25 bp, Homo sapien
tcttatccgaatgcctaagggtatg

SEQ ID NO: 824432 - DNA, 25 bp, Homo sapien
ccgaatgcctaagggtatgataggc

SEQ ID NO: 824433 - DNA, 25 bp, Homo sapien
cattatttcttatccgaatgcctaa

SEQ ID NO: 824434 - DNA, 25 bp, Homo sapien
ttatcacaatcgtcaaaatagtgcc

SEQ ID NO: 824435 - DNA, 25 bp, Homo sapien
gttgtgttaccagacttttagagag

SEQ ID NO: 824436 - DNA, 25 bp, Homo sapien
agagttttcttacgccatctgatag

SEQ ID NO: 824437 - DNA, 25 bp, Homo sapien
tacctagaatgagtgatctcccaga

SEQ ID NO: 824438 - DNA, 25 bp, Homo sapien
tgccaaacagagtggggttggccat

SEQ ID NO: 824439 - DNA, 25 bp, Homo sapien
gctatgccaaacagagtggggttgg

SEQ ID NO: 824440 - DNA, 25 bp, Homo sapien
ctatgccaaacagagtggggttggc

SEQ ID NO: 824441 - DNA, 25 bp, Homo sapien
tatgccaaacagagtggggttggcc

SEQ ID NO: 824442 - DNA, 25 bp, Homo sapien
ctttggaactttgcctacaaacagt

SEQ ID NO: 824443 - DNA, 25 bp, Homo sapien
acaaacagtttgaagaagacgtggc

SEQ ID NO: 824444 - DNA, 25 bp, Homo sapien
gcagaatctcgtataaccaaattct

SEQ ID NO: 824445 - DNA, 25 bp, Homo sapien
attttgtgaaagcagaatctcgtat

SEQ ID NO: 824446 - DNA, 25 bp, Homo sapien
tttcacattgtccaggcccacatgg

SEQ ID NO: 824447 - DNA, 25 bp, Homo sapien
aggacctctatgcttctggatgaaa

SEQ ID NO: 824448 - DNA, 25 bp, Homo sapien
gccttggcatggcagattaaaaatt

SEQ ID NO: 824449 - DNA, 25 bp, Homo sapien
taaccaaatttctcctcgcatatgg

SEQ ID NO: 824450 - DNA, 25 bp, Homo sapien
tttggaatccgttacatttaatcag

SEQ ID NO: 824451 - DNA, 25 bp, Homo sapien
tttgatccactccatttaacagctg

SEQ ID NO: 824452 - DNA, 25 bp, Homo sapien
ctccatttaacagctggaataactg

SEQ ID NO: 824453 - DNA, 25 bp, Homo sapien
tctttggaatccgttacatttaatc

SEQ ID NO: 824454 - DNA, 25 bp, Homo sapien
gtttcagggttaatggcttgtcttg

SEQ ID NO: 824455 - DNA, 25 bp, Homo sapien
agtggccgtcatgtgggaaccactg

SEQ ID NO: 824456 - DNA, 25 bp, Homo sapien
tcagaagtggccgtcatgtgggaac

SEQ ID NO: 824457 - DNA, 25 bp, Homo sapien
cagggttaatggcttgtcttgttct

SEQ ID NO: 824458 - DNA, 25 bp, Homo sapien
tcgtgtcatgccatttacctatgta

SEQ ID NO: 824459 - DNA, 25 bp, Homo sapien
tacatcaaaccttcgtgtcatgcca

SEQ ID NO: 824460 - DNA, 25 bp, Homo sapien
tagtctttacatcaaaccttcgtgt

SEQ ID NO: 824461 - DNA, 25 bp, Homo sapien
gggatgaaatagtctttacatcaaa

SEQ ID NO: 824462 - DNA, 25 bp, Homo sapien
atgaacctaggtctaatctcatgac

SEQ ID NO: 824463 - DNA, 25 bp, Homo sapien
gatcaggcatgaacctaggtctaat

SEQ ID NO: 824464 - DNA, 25 bp, Homo sapien
cttgtgagggaagtagaatttttct

SEQ ID NO: 824465 - DNA, 25 bp, Homo sapien
aaccccaggtaagatcaggcatgaa

SEQ ID NO: 824466 - DNA, 25 bp, Homo sapien
tcagctttgagcctatactgacttt

SEQ ID NO: 824467 - DNA, 25 bp, Homo sapien
ggaaatgatttgtaagaatgagaca

SEQ ID NO: 824468 - DNA, 25 bp, Homo sapien
ctgactttaacaggattttggaaag

SEQ ID NO: 824469 - DNA, 25 bp, Homo sapien
tttgtaagaatgagacaagtgatca

SEQ ID NO: 824470 - DNA, 25 bp, Homo sapien
caaatattaagtgtctctcggagga

SEQ ID NO: 824471 - DNA, 25 bp, Homo sapien
tatagaagaaggtccattactgtgg

SEQ ID NO: 824472 - DNA, 25 bp, Homo sapien
cagaatggtgcaataaaatttagcc

SEQ ID NO: 824473 - DNA, 25 bp, Homo sapien
tagaattctctcatgtgaaccaggt

SEQ ID NO: 824474 - DNA, 25 bp, Homo sapien
tcactttcctggttaggcaacacag

SEQ ID NO: 824475 - DNA, 25 bp, Homo sapien
catcgcccgagctgttaagacttca

SEQ ID NO: 824476 - DNA, 25 bp, Homo sapien
cacatgcttttagctggcaaggaag

SEQ ID NO: 824477 - DNA, 25 bp, Homo sapien
gatcaagtctaggtatctgcaatgc

SEQ ID NO: 824478 - DNA, 25 bp, Homo sapien
gtccaaaacagttgcataggtgaac

SEQ ID NO: 824479 - DNA, 25 bp, Homo sapien
tctcagttgctatgggaagtgctaa

SEQ ID NO: 824480 - DNA, 25 bp, Homo sapien
aagtgctaacatggagccccttatc

SEQ ID NO: 824481 - DNA, 25 bp, Homo sapien
aggaggagtccaaaacagttgcata

SEQ ID NO: 824482 - DNA, 25 bp, Homo sapien
cctgtgaaagaaaccctgaaggcat

SEQ ID NO: 824483 - DNA, 25 bp, Homo sapien
accaatggcttgttctggatgtgcc

SEQ ID NO: 824484 - DNA, 25 bp, Homo sapien
tgtgcctgtgaaagaaaccctgaag

SEQ ID NO: 824485 - DNA, 25 bp, Homo sapien
tttagttgttgccacggtaacacca

SEQ ID NO: 824486 - DNA, 25 bp, Homo sapien
aattaggagtcgtatggtgcctgca

SEQ ID NO: 824487 - DNA, 25 bp, Homo sapien
gatgtacagccctcatacgtagtgc

SEQ ID NO: 824488 - DNA, 25 bp, Homo sapien
tgactgccagacctaatgacaaaag

SEQ ID NO: 824489 - DNA, 25 bp, Homo sapien
gcagtggctgtcttcaatattggca

SEQ ID NO: 824490 - DNA, 25 bp, Homo sapien
ttctctccaaaaatgcttccctctc

SEQ ID NO: 824491 - DNA, 25 bp, Homo sapien
tccaaaaatgcttccctctccagag

SEQ ID NO: 824492 - DNA, 25 bp, Homo sapien
tcctttccatccttattaccaccat

SEQ ID NO: 824493 - DNA, 25 bp, Homo sapien
tctccaaaaatgcttccctctccag

SEQ ID NO: 824494 - DNA, 25 bp, Homo sapien
taatgggccttatgatgattaagga

SEQ ID NO: 824495 - DNA, 25 bp, Homo sapien
taaggaattcttccaagtgacagtt

SEQ ID NO: 824496 - DNA, 25 bp, Homo sapien
tctccccagcatgagtaactttagg

SEQ ID NO: 824497 - DNA, 25 bp, Homo sapien
gggctgcccgactccatacaaataa

SEQ ID NO: 824498 - DNA, 25 bp, Homo sapien
cagcagcaaagcgatgaatgttgtc

SEQ ID NO: 824499 - DNA, 25 bp, Homo sapien
gcagcaaagcgatgaatgttgtcac

SEQ ID NO: 824500 - DNA, 25 bp, Homo sapien
tcagatgcgtttttgctgggttaag

SEQ ID NO: 824501 - DNA, 25 bp, Homo sapien
ttaagagatcagatgcgtttttgct

SEQ ID NO: 824502 - DNA, 25 bp, Homo sapien
tgaaactccggagttcctaggtaga

SEQ ID NO: 824503 - DNA, 25 bp, Homo sapien
ggtgttgcacttggattagttccca

SEQ ID NO: 824504 - DNA, 25 bp, Homo sapien
tgtcctatcataccaagaattccct

SEQ ID NO: 824505 - DNA, 25 bp, Homo sapien
tatataaagacccatgagtaagagg

SEQ ID NO: 824506 - DNA, 25 bp, Homo sapien
cagcagttgaatagttaggttgtta

SEQ ID NO: 824507 - DNA, 25 bp, Homo sapien
cattgatattggaatgactatttct

SEQ ID NO: 824508 - DNA, 25 bp, Homo sapien
tcagtttctttagttgtcctaatgg

SEQ ID NO: 824509 - DNA, 25 bp, Homo sapien
agtaattgcatttcctccgtagtca

SEQ ID NO: 824510 - DNA, 25 bp, Homo sapien
gctggttactgcaatgggtttatta

SEQ ID NO: 824511 - DNA, 25 bp, Homo sapien
gcaaaagttctcaaattcctaagag

SEQ ID NO: 824512 - DNA, 25 bp, Homo sapien
gttctcaaattcctaagagccaaat

SEQ ID NO: 824513 - DNA, 25 bp, Homo sapien
ttaattcttgtataaaaatggtaca

SEQ ID NO: 824514 - DNA, 25 bp, Homo sapien
gaaacattcagtatgcaattacgca

SEQ ID NO: 824515 - DNA, 25 bp, Homo sapien
gagagtatctagagaaacattcagt

SEQ ID NO: 824516 - DNA, 25 bp, Homo sapien
gagaaacattcagtatgcaattacg

SEQ ID NO: 824517 - DNA, 25 bp, Homo sapien
ttccaagtttcagagagtatctaga

SEQ ID NO: 824518 - DNA, 25 bp, Homo sapien
tatgcctaatggtattaacttaaaa

SEQ ID NO: 824519 - DNA, 25 bp, Homo sapien
tagacacaaaagtcagtaaggttgc

SEQ ID NO: 824520 - DNA, 25 bp, Homo sapien
tattcagtaagcgataacaattttg

SEQ ID NO: 824521 - DNA, 25 bp, Homo sapien
cagccactgctagataaggtagaca

SEQ ID NO: 824522 - DNA, 25 bp, Homo sapien
ctgtagtcaaacttagggtcccaag

SEQ ID NO: 824523 - DNA, 25 bp, Homo sapien
tccccagaagcgactcaccagagtc

SEQ ID NO: 824524 - DNA, 25 bp, Homo sapien
tcactgtagtcaaacttagggtccc

SEQ ID NO: 824525 - DNA, 25 bp, Homo sapien
agaagcgactcaccagagtctcatt

SEQ ID NO: 824526 - DNA, 25 bp, Homo sapien
ggatactgctgactatagaatatac

SEQ ID NO: 824527 - DNA, 25 bp, Homo sapien
ttatgagtcaccaggatactgctga

SEQ ID NO: 824528 - DNA, 25 bp, Homo sapien
ccaggatactgctgactatagaata

SEQ ID NO: 824529 - DNA, 25 bp, Homo sapien
gagtcaccaggatactgctgactat

SEQ ID NO: 824530 - DNA, 25 bp, Homo sapien
ctgcacaccatttgcttttattcat

SEQ ID NO: 824531 - DNA, 25 bp, Homo sapien
tactgcacaccatttgcttttattc

SEQ ID NO: 824532 - DNA, 25 bp, Homo sapien
actgcacaccatttgcttttattca

SEQ ID NO: 824533 - DNA, 25 bp, Homo sapien
gcagtctaatttctactgggtcatc

SEQ ID NO: 824534 - DNA, 25 bp, Homo sapien
ctaatttctactgggtcatccatca

SEQ ID NO: 824535 - DNA, 25 bp, Homo sapien
agtctaatttctactgggtcatcca

SEQ ID NO: 824536 - DNA, 25 bp, Homo sapien
catgcagtctaatttctactgggtc

SEQ ID NO: 824537 - DNA, 25 bp, Homo sapien
gtgtcatgaactcgatgtttaggat

SEQ ID NO: 824538 - DNA, 25 bp, Homo sapien
aagtgtcatgaactcgatgtttagg

SEQ ID NO: 824539 - DNA, 25 bp, Homo sapien
agtgtcatgaactcgatgtttagga

SEQ ID NO: 824540 - DNA, 25 bp, Homo sapien
gcgcgtaagaatgcccgtgcaatca

SEQ ID NO: 824541 - DNA, 25 bp, Homo sapien
cagcttcaccggagagctctgctga

SEQ ID NO: 824542 - DNA, 25 bp, Homo sapien
tgctgaccggatgagcaaagcacga

SEQ ID NO: 824543 - DNA, 25 bp, Homo sapien
caaagcacgagtgtttgcgcgtaag

SEQ ID NO: 824544 - DNA, 25 bp, Homo sapien
cactttagcctgtggtaaggctcgc

SEQ ID NO: 824545 - DNA, 25 bp, Homo sapien
atgttttaataggtggcatggcccc

SEQ ID NO: 824546 - DNA, 25 bp, Homo sapien
ttgagggctctcaagcactttagcc

SEQ ID NO: 824547 - DNA, 25 bp, Homo sapien
taaggctcgccagaactcaagtttc

SEQ ID NO: 824548 - DNA, 25 bp, Homo sapien
tgttgattttactgagttggcagcc

SEQ ID NO: 824549 - DNA, 25 bp, Homo sapien
gttgattttactgagttggcagcca

SEQ ID NO: 824550 - DNA, 25 bp, Homo sapien
ctgttgattttactgagttggcagc

SEQ ID NO: 824551 - DNA, 25 bp, Homo sapien
tatggttcactatactttgaaattg

SEQ ID NO: 824552 - DNA, 25 bp, Homo sapien
gaaattgtttaaatgcctcaactga

SEQ ID NO: 824553 - DNA, 25 bp, Homo sapien
tacctgttctccatctagaatattt

SEQ ID NO: 824554 - DNA, 25 bp, Homo sapien
attcagtttatggttcactatactt

SEQ ID NO: 824555 - DNA, 25 bp, Homo sapien
tggcaatgtcaccaagtgcgagttt

SEQ ID NO: 824556 - DNA, 25 bp, Homo sapien
gtcaccaagtgcgagtttccagtca

SEQ ID NO: 824557 - DNA, 25 bp, Homo sapien
caccaagtgcgagtttccagtcatc

SEQ ID NO: 824558 - DNA, 25 bp, Homo sapien
aatgtcaccaagtgcgagtttccag

SEQ ID NO: 824559 - DNA, 25 bp, Homo sapien
tcatttcctataagttcgcaaattt

SEQ ID NO: 824560 - DNA, 25 bp, Homo sapien
catttcctataagttcgcaaatttt

SEQ ID NO: 824561 - DNA, 25 bp, Homo sapien
ttaatcatttcctataagttcgcaa

SEQ ID NO: 824562 - DNA, 25 bp, Homo sapien
aatcatttcctataagttcgcaaat

SEQ ID NO: 824563 - DNA, 25 bp, Homo sapien
ccaggtttatatctaggagcagtaa

SEQ ID NO: 824564 - DNA, 25 bp, Homo sapien
atatcttggacttgtcaagacattc

SEQ ID NO: 824565 - DNA, 25 bp, Homo sapien
tccataaaacctccaggtttatatc

SEQ ID NO: 824566 - DNA, 25 bp, Homo sapien
aaacctccaggtttatatctaggag

SEQ ID NO: 824567 - DNA, 25 bp, Homo sapien
catctgatatgcattgaagcttaac

SEQ ID NO: 824568 - DNA, 25 bp, Homo sapien
gactctgagtagtactgggggccaa

SEQ ID NO: 824569 - DNA, 25 bp, Homo sapien
caatctgaattattgaccacacagg

SEQ ID NO: 824570 - DNA, 25 bp, Homo sapien
tgatttaccatctctgccaagggca

SEQ ID NO: 824571 - DNA, 25 bp, Homo sapien
aattttcaatatagagttctctgtt

SEQ ID NO: 824572 - DNA, 25 bp, Homo sapien
ttcaatatagagttctctgttactc

SEQ ID NO: 824573 - DNA, 25 bp, Homo sapien
tttcaatatagagttctctgttact

SEQ ID NO: 824574 - DNA, 25 bp, Homo sapien
caaaattttcaatatagagttctct

SEQ ID NO: 824575 - DNA, 25 bp, Homo sapien
actgcattgggagctcttaggaggc

SEQ ID NO: 824576 - DNA, 25 bp, Homo sapien
aatgtcccaactgcattgggagctc

SEQ ID NO: 824577 - DNA, 25 bp, Homo sapien
tcaagttcaatcatgtaactgttac

SEQ ID NO: 824578 - DNA, 25 bp, Homo sapien
agttcaatcatgtaactgttactca

SEQ ID NO: 824579 - DNA, 25 bp, Homo sapien
gagtttgtggtgctgcttgctctga

SEQ ID NO: 824580 - DNA, 25 bp, Homo sapien
gctggattgcttttggtgctctaat

SEQ ID NO: 824581 - DNA, 25 bp, Homo sapien
tggtgctgcttgctctgatgctttc

SEQ ID NO: 824582 - DNA, 25 bp, Homo sapien
cattttgtatagttcaagatgctgg

SEQ ID NO: 824583 - DNA, 25 bp, Homo sapien
ggttggtcacaagcacttgctgtat

SEQ ID NO: 824584 - DNA, 25 bp, Homo sapien
tatctggttggtcacaagcacttgc

SEQ ID NO: 824585 - DNA, 25 bp, Homo sapien
taaaacccagtatctggttggtcac

SEQ ID NO: 824586 - DNA, 25 bp, Homo sapien
cccagtatctggttggtcacaagca

SEQ ID NO: 824587 - DNA, 25 bp, Homo sapien
ccagactgtgtccagattaggcccc

SEQ ID NO: 824588 - DNA, 25 bp, Homo sapien
tgcatagcccggcacataggcactg

SEQ ID NO: 824589 - DNA, 25 bp, Homo sapien
tgcgatggtgttcagaccagcagca

SEQ ID NO: 824590 - DNA, 25 bp, Homo sapien
taaagatcgaccagaatagagtgga

SEQ ID NO: 824591 - DNA, 25 bp, Homo sapien
aggcaactattacaatctgcagctg

SEQ ID NO: 824592 - DNA, 25 bp, Homo sapien
ggtataacccatattcttctaggct

SEQ ID NO: 824593 - DNA, 25 bp, Homo sapien
atagtttgcacaataagttgcaggc

SEQ ID NO: 824594 - DNA, 25 bp, Homo sapien
tttgtgtagaataacaaattcacta

SEQ ID NO: 824595 - DNA, 25 bp, Homo sapien
ggaaactcctcagtagatgtaactc

SEQ ID NO: 824596 - DNA, 25 bp, Homo sapien
gaaactcctcagtagatgtaactct

SEQ ID NO: 824597 - DNA, 25 bp, Homo sapien
aaactcctcagtagatgtaactctt

SEQ ID NO: 824598 - DNA, 25 bp, Homo sapien
gtcagaaacaacttgaagtttattg

SEQ ID NO: 824599 - DNA, 25 bp, Homo sapien
atctcttgcatagtaagttttctgc

SEQ ID NO: 824600 - DNA, 25 bp, Homo sapien
cacaataatgtgaatgatcaagggt

SEQ ID NO: 824601 - DNA, 25 bp, Homo sapien
gatcaagggtaaccaaactactcca

SEQ ID NO: 824602 - DNA, 25 bp, Homo sapien
ttcataagacgcatcagaaaatcca

SEQ ID NO: 824603 - DNA, 25 bp, Homo sapien
tcatctatttcataagacgcatcag

SEQ ID NO: 824604 - DNA, 25 bp, Homo sapien
ccaaaaagtgggacaggcatgcatt

SEQ ID NO: 824605 - DNA, 25 bp, Homo sapien
tcagaaaatccaaaaagtgggacag

SEQ ID NO: 824606 - DNA, 25 bp, Homo sapien
taaagaggcttaggataaactggaa

SEQ ID NO: 824607 - DNA, 25 bp, Homo sapien
tcctctctcagacacatctgttatg

SEQ ID NO: 824608 - DNA, 25 bp, Homo sapien
tctgagtttgcgaaaacaactgctt

SEQ ID NO: 824609 - DNA, 25 bp, Homo sapien
gacacatctgttatggtcaactcat

SEQ ID NO: 824610 - DNA, 25 bp, Homo sapien
catcttcagggtcccattccttgaa

SEQ ID NO: 824611 - DNA, 25 bp, Homo sapien
tgtcttcatcttcagggtcccattc

SEQ ID NO: 824612 - DNA, 25 bp, Homo sapien
tcagggtcccattccttgaacacag

SEQ ID NO: 824613 - DNA, 25 bp, Homo sapien
cagggtcccattccttgaacacagt

SEQ ID NO: 824614 - DNA, 25 bp, Homo sapien
gctacaagttggaggcttcgatcct

SEQ ID NO: 824615 - DNA, 25 bp, Homo sapien
ggaggcttcgatcctctacttgtag

SEQ ID NO: 824616 - DNA, 25 bp, Homo sapien
tcactgcagtccgtaagctacaagt

SEQ ID NO: 824617 - DNA, 25 bp, Homo sapien
gtccgtaagctacaagttggaggct

SEQ ID NO: 824618 - DNA, 25 bp, Homo sapien
ggagacttaattctcttaggcaaca

SEQ ID NO: 824619 - DNA, 25 bp, Homo sapien
tacaatttggagacttaattctctt

SEQ ID NO: 824620 - DNA, 25 bp, Homo sapien
cagttttgtagcagatgtaggaatt

SEQ ID NO: 824621 - DNA, 25 bp, Homo sapien
aattattacagttttgtagcagatg

SEQ ID NO: 824622 - DNA, 25 bp, Homo sapien
agcttttagctctgtgttggtgact

SEQ ID NO: 824623 - DNA, 25 bp, Homo sapien
gctctgtgttggtgacttcgttgaa

SEQ ID NO: 824624 - DNA, 25 bp, Homo sapien
tctgtgttggtgacttcgttgaata

SEQ ID NO: 824625 - DNA, 25 bp, Homo sapien
gttcctattagcttttagctctgtg

SEQ ID NO: 824626 - DNA, 25 bp, Homo sapien
ttgaatcaacaatctgccaactccc

SEQ ID NO: 824627 - DNA, 25 bp, Homo sapien
gaatcaacaatctgccaactcccat

SEQ ID NO: 824628 - DNA, 25 bp, Homo sapien
catcctggaatcacttcataccccc

SEQ ID NO: 824629 - DNA, 25 bp, Homo sapien
ccttgaatcaacaatctgccaactc

SEQ ID NO: 824630 - DNA, 25 bp, Homo sapien
atgctgctatcttttgctatctgtg

SEQ ID NO: 824631 - DNA, 25 bp, Homo sapien
cttttgtgcatatgcatgctgctat

SEQ ID NO: 824632 - DNA, 25 bp, Homo sapien
tgctgctatcttttgctatctgtgg

SEQ ID NO: 824633 - DNA, 25 bp, Homo sapien
tcttttgtgcatatgcatgctgcta

SEQ ID NO: 824634 - DNA, 25 bp, Homo sapien
atgattccaattattactggtggtg

SEQ ID NO: 824635 - DNA, 25 bp, Homo sapien
ggctgtgacatctcatcattagaag

SEQ ID NO: 824636 - DNA, 25 bp, Homo sapien
gggaagatacggcattgggaatggc

SEQ ID NO: 824637 - DNA, 25 bp, Homo sapien
gaaggattgggtatctgtttggttc

SEQ ID NO: 824638 - DNA, 25 bp, Homo sapien
atttagaaggggactggaatcatta

SEQ ID NO: 824639 - DNA, 25 bp, Homo sapien
tatttagaaggggactggaatcatt

SEQ ID NO: 824640 - DNA, 25 bp, Homo sapien
tttagaaggggactggaatcattac

SEQ ID NO: 824641 - DNA, 25 bp, Homo sapien
cttatttagaaggggactggaatca

SEQ ID NO: 824642 - DNA, 25 bp, Homo sapien
gaatacctagggatctgtaggaagt

SEQ ID NO: 824643 - DNA, 25 bp, Homo sapien
tagggatctgtaggaagttgacttc

SEQ ID NO: 824644 - DNA, 25 bp, Homo sapien
ctggaatacctagggatctgtagga

SEQ ID NO: 824645 - DNA, 25 bp, Homo sapien
tacctagggatctgtaggaagttga

SEQ ID NO: 824646 - DNA, 25 bp, Homo sapien
ggtcactaagatactcaagggaaga

SEQ ID NO: 824647 - DNA, 25 bp, Homo sapien
gaaaagggtatgctagaatttgcca

SEQ ID NO: 824648 - DNA, 25 bp, Homo sapien
tctagatggatggtcactaagatac

SEQ ID NO: 824649 - DNA, 25 bp, Homo sapien
gctagaatttgccaataaagcagca

SEQ ID NO: 824650 - DNA, 25 bp, Homo sapien
tgtcagttcatgcaagagctgatgg

SEQ ID NO: 824651 - DNA, 25 bp, Homo sapien
gcttggtttcctccccatagtaata

SEQ ID NO: 824652 - DNA, 25 bp, Homo sapien
gatgtatcggctcgcactttgcctt

SEQ ID NO: 824653 - DNA, 25 bp, Homo sapien
tgttgaagtacaatctccaatgttg

SEQ ID NO: 824654 - DNA, 25 bp, Homo sapien
ttctggcagcatgttagctctggtg

SEQ ID NO: 824655 - DNA, 25 bp, Homo sapien
tagctctggtggtccttaaagccca

SEQ ID NO: 824656 - DNA, 25 bp, Homo sapien
aagagttgctaaaagctgccttcag

SEQ ID NO: 824657 - DNA, 25 bp, Homo sapien
ccttaaagcccattgcaaagagttg

SEQ ID NO: 824658 - DNA, 25 bp, Homo sapien
tattagctggaatccataagtccag

SEQ ID NO: 824659 - DNA, 25 bp, Homo sapien
gtaatcgttataaatattaaggtgc

SEQ ID NO: 824660 - DNA, 25 bp, Homo sapien
tgttccattgcaaaggctatagtaa

SEQ ID NO: 824661 - DNA, 25 bp, Homo sapien
ccataagtccagatatctgcaagct

SEQ ID NO: 824662 - DNA, 25 bp, Homo sapien
taagtctctggggaatcggattgct

SEQ ID NO: 824663 - DNA, 25 bp, Homo sapien
ttaagtctctggggaatcggattgc

SEQ ID NO: 824664 - DNA, 25 bp, Homo sapien
ctggggaatcggattgctctgtctg

SEQ ID NO: 824665 - DNA, 25 bp, Homo sapien
tctggggaatcggattgctctgtct

SEQ ID NO: 824666 - DNA, 25 bp, Homo sapien
gcctttcagaatggttcctcctgtg

SEQ ID NO: 824667 - DNA, 25 bp, Homo sapien
tttcagaatggttcctcctgtggga

SEQ ID NO: 824668 - DNA, 25 bp, Homo sapien
cctcctgtgggatgttttatcatat

SEQ ID NO: 824669 - DNA, 25 bp, Homo sapien
tcagaatggttcctcctgtgggatg

SEQ ID NO: 824670 - DNA, 25 bp, Homo sapien
ccgatattgtactttggctcttcaa

SEQ ID NO: 824671 - DNA, 25 bp, Homo sapien
tcctgtatttctggcaccgatattg

SEQ ID NO: 824672 - DNA, 25 bp, Homo sapien
tggctcttcaatcatcaccttcacc

SEQ ID NO: 824673 - DNA, 25 bp, Homo sapien
ttcaccttcacattcaaaactctta

SEQ ID NO: 824674 - DNA, 25 bp, Homo sapien
cataggagcacgacctctaatcttc

SEQ ID NO: 824675 - DNA, 25 bp, Homo sapien
taaacacataggagcacgacctcta

SEQ ID NO: 824676 - DNA, 25 bp, Homo sapien
ctcccattaaacacataggagcacg

SEQ ID NO: 824677 - DNA, 25 bp, Homo sapien
taggagcacgacctctaatcttcat

SEQ ID NO: 824678 - DNA, 25 bp, Homo sapien
ttgatcagtgtttccctagtagtat

SEQ ID NO: 824679 - DNA, 25 bp, Homo sapien
tcttttgatcagtgtttccctagta

SEQ ID NO: 824680 - DNA, 25 bp, Homo sapien
tttgatcagtgtttccctagtagta

SEQ ID NO: 824681 - DNA, 25 bp, Homo sapien
cttttgatcagtgtttccctagtag

SEQ ID NO: 824682 - DNA, 25 bp, Homo sapien
ctgatgtgggatttatgaacatctt

SEQ ID NO: 824683 - DNA, 25 bp, Homo sapien
agttgtccttttgaatgtcaacatg

SEQ ID NO: 824684 - DNA, 25 bp, Homo sapien
tctcagaagtgatagctaaactctg

SEQ ID NO: 824685 - DNA, 25 bp, Homo sapien
cagaagtgatagctaaactctgaaa

SEQ ID NO: 824686 - DNA, 25 bp, Homo sapien
acaagttgtccttttgaatgtcaac

SEQ ID NO: 824687 - DNA, 25 bp, Homo sapien
agagaacttgtcttggtaaagccat

SEQ ID NO: 824688 - DNA, 25 bp, Homo sapien
tgcctggaaactctgagagagaact

SEQ ID NO: 824689 - DNA, 25 bp, Homo sapien
gagagaacttgtcttggtaaagcca

SEQ ID NO: 824690 - DNA, 25 bp, Homo sapien
cagttgcctggaaactctgagagag

SEQ ID NO: 824691 - DNA, 25 bp, Homo sapien
aagagtggcatttcttgcaatggct

SEQ ID NO: 824692 - DNA, 25 bp, Homo sapien
agagtggcatttcttgcaatggctt

SEQ ID NO: 824693 - DNA, 25 bp, Homo sapien
ataaaccatagacctgtgatcatgt

SEQ ID NO: 824694 - DNA, 25 bp, Homo sapien
tctgatgcccaagattgccaaactg

SEQ ID NO: 824695 - DNA, 25 bp, Homo sapien
ctgatgcccaagattgccaaactga

SEQ ID NO: 824696 - DNA, 25 bp, Homo sapien
cttttccggagggaccatcacaggc

SEQ ID NO: 824697 - DNA, 25 bp, Homo sapien
gctggtcaaacgtggctgcatgaaa

SEQ ID NO: 824698 - DNA, 25 bp, Homo sapien
gcacaatccttttccggagggacca

SEQ ID NO: 824699 - DNA, 25 bp, Homo sapien
catcacaggcttgctcatgtcgctg

SEQ ID NO: 824700 - DNA, 25 bp, Homo sapien
gaaatataagcaatttctaagagaa

SEQ ID NO: 824701 - DNA, 25 bp, Homo sapien
aagcaatttctaagagaataatcag

SEQ ID NO: 824702 - DNA, 25 bp, Homo sapien
tgaaatataagcaatttctaagaga

SEQ ID NO: 824703 - DNA, 25 bp, Homo sapien
caatttctaagagaataatcagcat

SEQ ID NO: 824704 - DNA, 25 bp, Homo sapien
tctttttggtctgatgtgctttcca

SEQ ID NO: 824705 - DNA, 25 bp, Homo sapien
tgttggctgttaggagattcttcgg

SEQ ID NO: 824706 - DNA, 25 bp, Homo sapien
gtgctttccaatgcaggttgttggc

SEQ ID NO: 824707 - DNA, 25 bp, Homo sapien
taggagattcttcggttcttagatt

SEQ ID NO: 824708 - DNA, 25 bp, Homo sapien
cccagtagcatcctccctcattggt

SEQ ID NO: 824709 - DNA, 25 bp, Homo sapien
tggaaagttgcccagtagcatcctc

SEQ ID NO: 824710 - DNA, 25 bp, Homo sapien
aaagttgcccagtagcatcctccct

SEQ ID NO: 824711 - DNA, 25 bp, Homo sapien
gtgctgctggcccctggaaagttgc

SEQ ID NO: 824712 - DNA, 25 bp, Homo sapien
ccaggttaaaacaagtcttggatca

SEQ ID NO: 824713 - DNA, 25 bp, Homo sapien
aaaacaagtcttggatcaagagtat

SEQ ID NO: 824714 - DNA, 25 bp, Homo sapien
cacctctgagctatggatacagcca

SEQ ID NO: 824715 - DNA, 25 bp, Homo sapien
ggagggcttcccaggttcctaatca

SEQ ID NO: 824716 - DNA, 25 bp, Homo sapien
tattggtagaaattgagtgatggac

SEQ ID NO: 824717 - DNA, 25 bp, Homo sapien
ccactgatgcccctgtccatgttta

SEQ ID NO: 824718 - DNA, 25 bp, Homo sapien
tacgtttgggttgatatacagaagc

SEQ ID NO: 824719 - DNA, 25 bp, Homo sapien
tctcattactccagtcagcattgtt

SEQ ID NO: 824720 - DNA, 25 bp, Homo sapien
ggtaggttttcctcgtctgctctgg

SEQ ID NO: 824721 - DNA, 25 bp, Homo sapien
aggttttcctcgtctgctctggttg

SEQ ID NO: 824722 - DNA, 25 bp, Homo sapien
tcataatgttgggtttcttcaacat

SEQ ID NO: 824723 - DNA, 25 bp, Homo sapien
gtggtaggttttcctcgtctgctct

SEQ ID NO: 824724 - DNA, 25 bp, Homo sapien
agctctaccagtccagaccaattta

SEQ ID NO: 824725 - DNA, 25 bp, Homo sapien
tccagaccaatttatgtgattctca

SEQ ID NO: 824726 - DNA, 25 bp, Homo sapien
taccagtccagaccaatttatgtga

SEQ ID NO: 824727 - DNA, 25 bp, Homo sapien
cagtccagaccaatttatgtgattc

SEQ ID NO: 824728 - DNA, 25 bp, Homo sapien
tgagggctacgaagtaaggtcacag

SEQ ID NO: 824729 - DNA, 25 bp, Homo sapien
cacagtcttcccctagatgttgaca

SEQ ID NO: 824730 - DNA, 25 bp, Homo sapien
ggctacgaagtaaggtcacagtctt

SEQ ID NO: 824731 - DNA, 25 bp, Homo sapien
gctcttatgtactcaggatgtcaat

SEQ ID NO: 824732 - DNA, 25 bp, Homo sapien
gtccttaagtgtgtagggcttctaa

SEQ ID NO: 824733 - DNA, 25 bp, Homo sapien
gaatgaagcaccacagtccttaagt

SEQ ID NO: 824734 - DNA, 25 bp, Homo sapien
tttttggacaaacttcgctgaacat

SEQ ID NO: 824735 - DNA, 25 bp, Homo sapien
ttaaggatgacatgtgaatgaagca

SEQ ID NO: 824736 - DNA, 25 bp, Homo sapien
ggtccggaacagaacctggaatatc

SEQ ID NO: 824737 - DNA, 25 bp, Homo sapien
cggaacagaacctggaatatctcca

SEQ ID NO: 824738 - DNA, 25 bp, Homo sapien
tataatggtccggaacagaacctgg

SEQ ID NO: 824739 - DNA, 25 bp, Homo sapien
tttattataatggtccggaacagaa

SEQ ID NO: 824740 - DNA, 25 bp, Homo sapien
aggtagtcatatagggtgggacaat

SEQ ID NO: 824741 - DNA, 25 bp, Homo sapien
ggtagtcatatagggtgggacaatg

SEQ ID NO: 824742 - DNA, 25 bp, Homo sapien
tttgctgagggcttgagaggtagtc

SEQ ID NO: 824743 - DNA, 25 bp, Homo sapien
gtagtcatatagggtgggacaatgg

SEQ ID NO: 824744 - DNA, 25 bp, Homo sapien
gcacagctgtccttgccaaaggctg

SEQ ID NO: 824745 - DNA, 25 bp, Homo sapien
gctgtccttgccaaaggctgccctg

SEQ ID NO: 824746 - DNA, 25 bp, Homo sapien
cacgtgggctgagtttgcacagctg

SEQ ID NO: 824747 - DNA, 25 bp, Homo sapien
tgagtttgcacagctgtccttgcca

SEQ ID NO: 824748 - DNA, 25 bp, Homo sapien
aacctattgaataaatcactattgg

SEQ ID NO: 824749 - DNA, 25 bp, Homo sapien
cctattgaataaatcactattggta

SEQ ID NO: 824750 - DNA, 25 bp, Homo sapien
ttgaaacctattgaataaatcacta

SEQ ID NO: 824751 - DNA, 25 bp, Homo sapien
tgaataaatcactattggtaaacat

SEQ ID NO: 824752 - DNA, 25 bp, Homo sapien
ccttctgtaagggagactcactgtg

SEQ ID NO: 824753 - DNA, 25 bp, Homo sapien
tgtgagctgtgattggcctttgttt

SEQ ID NO: 824754 - DNA, 25 bp, Homo sapien
tgtaagggagactcactgtgagctg

SEQ ID NO: 824755 - DNA, 25 bp, Homo sapien
tctgtaagggagactcactgtgagc

SEQ ID NO: 824756 - DNA, 25 bp, Homo sapien
gcatgtcttggttggccttcaggat

SEQ ID NO: 824757 - DNA, 25 bp, Homo sapien
tctgttgtggtagccccaagtatac

SEQ ID NO: 824758 - DNA, 25 bp, Homo sapien
gccttggacctgatgaaactctatt

SEQ ID NO: 824759 - DNA, 25 bp, Homo sapien
taccagcagtctccacaagtggttc

SEQ ID NO: 824760 - DNA, 25 bp, Homo sapien
gcttgccaagcctgcagtcagtcat

SEQ ID NO: 824761 - DNA, 25 bp, Homo sapien
tggtatcagatagtagatgtagtct

SEQ ID NO: 824762 - DNA, 25 bp, Homo sapien
gtcaggtcgatcaatggtatcagat

SEQ ID NO: 824763 - DNA, 25 bp, Homo sapien
tagtagatgtagtcttggggccagt

SEQ ID NO: 824764 - DNA, 25 bp, Homo sapien
tcaggtcgatcaatggtatcagata

SEQ ID NO: 824765 - DNA, 25 bp, Homo sapien
aaagcttgcacaacctgtgcttttg

SEQ ID NO: 824766 - DNA, 25 bp, Homo sapien
ctggagtcaaaagcttgcacaacct

SEQ ID NO: 824767 - DNA, 25 bp, Homo sapien
ctgtgcttttgaagaagacaagaag

SEQ ID NO: 824768 - DNA, 25 bp, Homo sapien
gtcaaaagcttgcacaacctgtgct

SEQ ID NO: 824769 - DNA, 25 bp, Homo sapien
gaacatggcttttatccgataacta

SEQ ID NO: 824770 - DNA, 25 bp, Homo sapien
tctaaggaaataacctgatgccagc

SEQ ID NO: 824771 - DNA, 25 bp, Homo sapien
ttaggaagattaactgtatcaatgt

SEQ ID NO: 824772 - DNA, 25 bp, Homo sapien
gatgccagctggacattaggaagat

SEQ ID NO: 824773 - DNA, 25 bp, Homo sapien
aattacttggtgaagaacctggtat

SEQ ID NO: 824774 - DNA, 25 bp, Homo sapien
ctccagggtgtctagactgggatgt

SEQ ID NO: 824775 - DNA, 25 bp, Homo sapien
tctagactgggatgtttctgacttg

SEQ ID NO: 824776 - DNA, 25 bp, Homo sapien
ttctgacttgttctgtagtgcccta

SEQ ID NO: 824777 - DNA, 25 bp, Homo sapien
catgagctttcccacctgtatacac

SEQ ID NO: 824778 - DNA, 25 bp, Homo sapien
tcatgagctttcccacctgtataca

SEQ ID NO: 824779 - DNA, 25 bp, Homo sapien
ttattgaatagtcacagaccattgc

SEQ ID NO: 824780 - DNA, 25 bp, Homo sapien
tattgaatagtcacagaccattgca

SEQ ID NO: 824781 - DNA, 25 bp, Homo sapien
ctttgcaaatgttgtcgcttacctc

SEQ ID NO: 824782 - DNA, 25 bp, Homo sapien
tgtcgcttacctcagcaaggctctt

SEQ ID NO: 824783 - DNA, 25 bp, Homo sapien
aatgttgtcgcttacctcagcaagg

SEQ ID NO: 824784 - DNA, 25 bp, Homo sapien
gcttacctcagcaaggctctttgat

SEQ ID NO: 824785 - DNA, 25 bp, Homo sapien
aataagatgccccaggccgtcaagg

SEQ ID NO: 824786 - DNA, 25 bp, Homo sapien
gctggcttttgcctaagcccctcct

SEQ ID NO: 824787 - DNA, 25 bp, Homo sapien
atgccccaggccgtcaaggctggct

SEQ ID NO: 824788 - DNA, 25 bp, Homo sapien
aatgccaataagatgccccaggccg

SEQ ID NO: 824789 - DNA, 25 bp, Homo sapien
gatcaccaatgaagccggggctatt

SEQ ID NO: 824790 - DNA, 25 bp, Homo sapien
catgatcaccaatgaagccggggct

SEQ ID NO: 824791 - DNA, 25 bp, Homo sapien
cctcatgatcaccaatgaagccggg

SEQ ID NO: 824792 - DNA, 25 bp, Homo sapien
tcatgatcaccaatgaagccggggc

SEQ ID NO: 824793 - DNA, 25 bp, Homo sapien
gctccttggctttacgactcttgtt

SEQ ID NO: 824794 - DNA, 25 bp, Homo sapien
ctgtgatgaacggaagctccttggc

SEQ ID NO: 824795 - DNA, 25 bp, Homo sapien
tgtctgtccagcttcgtgcctggct

SEQ ID NO: 824796 - DNA, 25 bp, Homo sapien
ggcttcatgccagtattgacaccaa

SEQ ID NO: 824797 - DNA, 25 bp, Homo sapien
tcacaaacagtttgaatggtgagta

SEQ ID NO: 824798 - DNA, 25 bp, Homo sapien
gagtccccacgttgcaggccaaaaa

SEQ ID NO: 824799 - DNA, 25 bp, Homo sapien
cctacggctatgaaaatttaggctc

SEQ ID NO: 824800 - DNA, 25 bp, Homo sapien
tcagctagcgatggggtccttgtcc

SEQ ID NO: 824801 - DNA, 25 bp, Homo sapien
tgcacctatgaaaccgttatctagg

SEQ ID NO: 824802 - DNA, 25 bp, Homo sapien
gctgcacctatgaaaccgttatcta

SEQ ID NO: 824803 - DNA, 25 bp, Homo sapien
cacctatgaaaccgttatctaggtt

SEQ ID NO: 824804 - DNA, 25 bp, Homo sapien
tgctgcacctatgaaaccgttatct

SEQ ID NO: 824805 - DNA, 25 bp, Homo sapien
gtgccattgaagtcttacaggtcta

SEQ ID NO: 824806 - DNA, 25 bp, Homo sapien
ccctgaaatttggtccatcaaagtg

SEQ ID NO: 824807 - DNA, 25 bp, Homo sapien
tgctaacctagtgcattccttgagg

SEQ ID NO: 824808 - DNA, 25 bp, Homo sapien
ctacagctatggtagataatcaagg

SEQ ID NO: 824809 - DNA, 25 bp, Homo sapien
tttcagaaggtgctcttgggtaggc

SEQ ID NO: 824810 - DNA, 25 bp, Homo sapien
aggtgctcttgggtaggccacttac

SEQ ID NO: 824811 - DNA, 25 bp, Homo sapien
tcaagccagacttttcagaaggtgc

SEQ ID NO: 824812 - DNA, 25 bp, Homo sapien
agaaggtgctcttgggtaggccact

SEQ ID NO: 824813 - DNA, 25 bp, Homo sapien
cagagactcctttaatttgacatcc

SEQ ID NO: 824814 - DNA, 25 bp, Homo sapien
agagactcctttaatttgacatcct

SEQ ID NO: 824815 - DNA, 25 bp, Homo sapien
attaattgtgagggtttcaccagag

SEQ ID NO: 824816 - DNA, 25 bp, Homo sapien
atttgacatcctgaatacgtagcat

SEQ ID NO: 824817 - DNA, 25 bp, Homo sapien
ggcctgaggaagtgttcgtgaattt

SEQ ID NO: 824818 - DNA, 25 bp, Homo sapien
tataggtagacagaagtcgtccagt

SEQ ID NO: 824819 - DNA, 25 bp, Homo sapien
aatcatttgctggtagtataggtag

SEQ ID NO: 824820 - DNA, 25 bp, Homo sapien
gttcgtgaatttgcaggtaaggaca

SEQ ID NO: 824821 - DNA, 25 bp, Homo sapien
tttccatctccacccttctagaatt

SEQ ID NO: 824822 - DNA, 25 bp, Homo sapien
tgcatgctacatgaaatctccacaa

SEQ ID NO: 824823 - DNA, 25 bp, Homo sapien
ctagaattatttgcctcagggatca

SEQ ID NO: 824824 - DNA, 25 bp, Homo sapien
tgtcagtcacaccagtgctttccat

SEQ ID NO: 824825 - DNA, 25 bp, Homo sapien
ttcacatcatgttttttaatgccac

SEQ ID NO: 824826 - DNA, 25 bp, Homo sapien
ccacccgcagttagatctgctttca

SEQ ID NO: 824827 - DNA, 25 bp, Homo sapien
tcatgttttttaatgccacccgcag

SEQ ID NO: 824828 - DNA, 25 bp, Homo sapien
taatgccacccgcagttagatctgc

SEQ ID NO: 824829 - DNA, 25 bp, Homo sapien
aacctcatctgagagatcccacaga

SEQ ID NO: 824830 - DNA, 25 bp, Homo sapien
cacagcatgaacctcatctgagaga

SEQ ID NO: 824831 - DNA, 25 bp, Homo sapien
ctgttcttgtcatctcctttgcaat

SEQ ID NO: 824832 - DNA, 25 bp, Homo sapien
tcttgtcatctcctttgcaattcat

SEQ ID NO: 824833 - DNA, 25 bp, Homo sapien
tagactgtacactttgatgctttca

SEQ ID NO: 824834 - DNA, 25 bp, Homo sapien
gctgataacttgtagactgtacact

SEQ ID NO: 824835 - DNA, 25 bp, Homo sapien
gtctgctgataacttgtagactgta

SEQ ID NO: 824836 - DNA, 25 bp, Homo sapien
gtagactgtacactttgatgctttc

SEQ ID NO: 824837 - DNA, 25 bp, Homo sapien
agcaaagggaaattagtggttctgc

SEQ ID NO: 824838 - DNA, 25 bp, Homo sapien
tctccagagccagtgtgggtatgct

SEQ ID NO: 824839 - DNA, 25 bp, Homo sapien
ttttcttctactcccgctgtgagcc

SEQ ID NO: 824840 - DNA, 25 bp, Homo sapien
tcctagtatctaggaggctttcctt

SEQ ID NO: 824841 - DNA, 25 bp, Homo sapien
ttgtgcatttgtgtggacggcccac

SEQ ID NO: 824842 - DNA, 25 bp, Homo sapien
tatttgtgcatttgtgtggacggcc

SEQ ID NO: 824843 - DNA, 25 bp, Homo sapien
tttgtgcatttgtgtggacggccca

SEQ ID NO: 824844 - DNA, 25 bp, Homo sapien
ttatttgtgcatttgtgtggacggc

SEQ ID NO: 824845 - DNA, 25 bp, Homo sapien
tgttccttttcctgaataattctct

SEQ ID NO: 824846 - DNA, 25 bp, Homo sapien
ttcctgaataattctctcttctgtt

SEQ ID NO: 824847 - DNA, 25 bp, Homo sapien
ctttatgatagcacatatgttgttc

SEQ ID NO: 824848 - DNA, 25 bp, Homo sapien
tttatgatagcacatatgttgttcc

SEQ ID NO: 824849 - DNA, 25 bp, Homo sapien
tattgtctttgtactgtatgtgccc

SEQ ID NO: 824850 - DNA, 25 bp, Homo sapien
cctgaaaaggttcttattgtctttg

SEQ ID NO: 824851 - DNA, 25 bp, Homo sapien
tttgtactgtatgtgcccttttctc

SEQ ID NO: 824852 - DNA, 25 bp, Homo sapien
aaaggttcttattgtctttgtactg

SEQ ID NO: 824853 - DNA, 25 bp, Homo sapien
ctcatcaagttcaaaattaggtgta

SEQ ID NO: 824854 - DNA, 25 bp, Homo sapien
ggtaatcttgaccactcctatggct

SEQ ID NO: 824855 - DNA, 25 bp, Homo sapien
ccaactgtatccttcacttggatgt

SEQ ID NO: 824856 - DNA, 25 bp, Homo sapien
aagatctagacctttcacttctcca

SEQ ID NO: 824857 - DNA, 25 bp, Homo sapien
tccctgtaccaatatttccttcaga

SEQ ID NO: 824858 - DNA, 25 bp, Homo sapien
tgtagtggttgatatgaggatgtct

SEQ ID NO: 824859 - DNA, 25 bp, Homo sapien
ctgtttggaaaactgccctacacta

SEQ ID NO: 824860 - DNA, 25 bp, Homo sapien
ggaaaactgccctacactacagcca

SEQ ID NO: 824861 - DNA, 25 bp, Homo sapien
gacaagactctgctgccaaaaccac

SEQ ID NO: 824862 - DNA, 25 bp, Homo sapien
taagacaagactctgctgccaaaac

SEQ ID NO: 824863 - DNA, 25 bp, Homo sapien
ttaagacaagactctgctgccaaaa

SEQ ID NO: 824864 - DNA, 25 bp, Homo sapien
agacaagactctgctgccaaaacca

SEQ ID NO: 824865 - DNA, 25 bp, Homo sapien
cgtttctcagaaaagcacgaggtca

SEQ ID NO: 824866 - DNA, 25 bp, Homo sapien
gcacagcactgcaccgtctatcata

SEQ ID NO: 824867 - DNA, 25 bp, Homo sapien
ccatacaatggacatgccttgagac

SEQ ID NO: 824868 - DNA, 25 bp, Homo sapien
gacctcagttgccagcgtttctcag

SEQ ID NO: 824869 - DNA, 25 bp, Homo sapien
agtactagtgttagttgaaactggt

SEQ ID NO: 824870 - DNA, 25 bp, Homo sapien
tagtgttagttgaaactggtctttc

SEQ ID NO: 824871 - DNA, 25 bp, Homo sapien
tactagtgttagttgaaactggtct

SEQ ID NO: 824872 - DNA, 25 bp, Homo sapien
actagtgttagttgaaactggtctt

SEQ ID NO: 824873 - DNA, 25 bp, Homo sapien
ctctgacttggcaaaaacttcttca

SEQ ID NO: 824874 - DNA, 25 bp, Homo sapien
actttacggagcatcgctgctgccc

SEQ ID NO: 824875 - DNA, 25 bp, Homo sapien
actgtctgcatccacactttacgga

SEQ ID NO: 824876 - DNA, 25 bp, Homo sapien
gattttatcatatgttcctgctatc

SEQ ID NO: 824877 - DNA, 25 bp, Homo sapien
gttgctgtaatcagccgtaaagaaa

SEQ ID NO: 824878 - DNA, 25 bp, Homo sapien
gcttgtagcacatccttaatgagga

SEQ ID NO: 824879 - DNA, 25 bp, Homo sapien
ggcactatttgtagttcaggctgta

SEQ ID NO: 824880 - DNA, 25 bp, Homo sapien
tgaggataaaatgcaggtgtcttcg

SEQ ID NO: 824881 - DNA, 25 bp, Homo sapien
cctttgagtatctctttccaccagc

SEQ ID NO: 824882 - DNA, 25 bp, Homo sapien
accagctgcatttggtgcagaaaag

SEQ ID NO: 824883 - DNA, 25 bp, Homo sapien
ggatttaaacttgtaagtgtcttca

SEQ ID NO: 824884 - DNA, 25 bp, Homo sapien
aaagttttcaaagcaccctcaggtg

SEQ ID NO: 824885 - DNA, 25 bp, Homo sapien
ttcttcgtgcaagacaatatttact

SEQ ID NO: 824886 - DNA, 25 bp, Homo sapien
tctgggttatgtgtttgccagaaca

SEQ ID NO: 824887 - DNA, 25 bp, Homo sapien
ctctgggttatgtgtttgccagaac

SEQ ID NO: 824888 - DNA, 25 bp, Homo sapien
tactctgggttatgtgtttgccaga

SEQ ID NO: 824889 - DNA, 25 bp, Homo sapien
gtggcccttccagctactaactgag

SEQ ID NO: 824890 - DNA, 25 bp, Homo sapien
gaggaactgctactgtcttcgattt

SEQ ID NO: 824891 - DNA, 25 bp, Homo sapien
gtaatgatacattcctccaactccc

SEQ ID NO: 824892 - DNA, 25 bp, Homo sapien
ccctagctaagcttttgtctaatga

SEQ ID NO: 824893 - DNA, 25 bp, Homo sapien
tcagccagagccaataaggatccat

SEQ ID NO: 824894 - DNA, 25 bp, Homo sapien
cactgatgggcaagcatgggtacct

SEQ ID NO: 824895 - DNA, 25 bp, Homo sapien
tttttactgcatagtgaaaagcaga

SEQ ID NO: 824896 - DNA, 25 bp, Homo sapien
gttgaccacaacttccactgatggg

SEQ ID NO: 824897 - DNA, 25 bp, Homo sapien
ttccactggcggaggggaaccatgg

SEQ ID NO: 824898 - DNA, 25 bp, Homo sapien
gatttccctgttacatttaagctag

SEQ ID NO: 824899 - DNA, 25 bp, Homo sapien
aggatttccctgttacatttaagct

SEQ ID NO: 824900 - DNA, 25 bp, Homo sapien
ctggcggaggggaaccatggaaaag

SEQ ID NO: 824901 - DNA, 25 bp, Homo sapien
atgctctctgctagagttcacacct

SEQ ID NO: 824902 - DNA, 25 bp, Homo sapien
catgctctctgctagagttcacacc

SEQ ID NO: 824903 - DNA, 25 bp, Homo sapien
tcaaacatttcccaaatgtgtttta

SEQ ID NO: 824904 - DNA, 25 bp, Homo sapien
catttcccaaatgtgttttaaatgg

SEQ ID NO: 824905 - DNA, 25 bp, Homo sapien
acatttcccaaatgtgttttaaatg

SEQ ID NO: 824906 - DNA, 25 bp, Homo sapien
cagagggatatactatccttacaaa

SEQ ID NO: 824907 - DNA, 25 bp, Homo sapien
gatgtacagagggatatactatcct

SEQ ID NO: 824908 - DNA, 25 bp, Homo sapien
gagggatatactatccttacaaata

SEQ ID NO: 824909 - DNA, 25 bp, Homo sapien
ctttgggatgtacagagggatatac

SEQ ID NO: 824910 - DNA, 25 bp, Homo sapien
aacagaagccctcttttgtgtattt

SEQ ID NO: 824911 - DNA, 25 bp, Homo sapien
gaaacagaagccctcttttgtgtat

SEQ ID NO: 824912 - DNA, 25 bp, Homo sapien
agagccacttttatgaaacagaagc

SEQ ID NO: 824913 - DNA, 25 bp, Homo sapien
ttgtcagagccacttttatgaaaca

SEQ ID NO: 824914 - DNA, 25 bp, Homo sapien
taggtctgaagcaggctgatagctt

SEQ ID NO: 824915 - DNA, 25 bp, Homo sapien
aagtgaaaagtactggcaggctgag

SEQ ID NO: 824916 - DNA, 25 bp, Homo sapien
cagagtgaaggcataggtctgaagc

SEQ ID NO: 824917 - DNA, 25 bp, Homo sapien
gaatgggctggctgccagtgttggg

SEQ ID NO: 824918 - DNA, 25 bp, Homo sapien
aggcttattagcagcacgcagaagg

SEQ ID NO: 824919 - DNA, 25 bp, Homo sapien
ctaaataggcttattagcagcacgc

SEQ ID NO: 824920 - DNA, 25 bp, Homo sapien
aataggcttattagcagcacgcaga

SEQ ID NO: 824921 - DNA, 25 bp, Homo sapien
taggcttattagcagcacgcagaag

SEQ ID NO: 824922 - DNA, 25 bp, Homo sapien
cgtattagaacttacataattcaca

SEQ ID NO: 824923 - DNA, 25 bp, Homo sapien
tttaacatgatgttctattcccgta

SEQ ID NO: 824924 - DNA, 25 bp, Homo sapien
gttcatctcctgtaggcttttcaaa

SEQ ID NO: 824925 - DNA, 25 bp, Homo sapien
cctctagttcatctcctgtaggctt

SEQ ID NO: 824926 - DNA, 25 bp, Homo sapien
agccttgcttcctcagacaaccttt

SEQ ID NO: 824927 - DNA, 25 bp, Homo sapien
ttttctgacctgcaagaggattctc

SEQ ID NO: 824928 - DNA, 25 bp, Homo sapien
tgccagagcccattaaatgcatcaa

SEQ ID NO: 824929 - DNA, 25 bp, Homo sapien
tctgatacagccagattggacctga

SEQ ID NO: 824930 - DNA, 25 bp, Homo sapien
gatggagactccacattcatcttta

SEQ ID NO: 824931 - DNA, 25 bp, Homo sapien
ttcttatggcctctgttgatggaga

SEQ ID NO: 824932 - DNA, 25 bp, Homo sapien
tcagtaagggctttgctccatgaga

SEQ ID NO: 824933 - DNA, 25 bp, Homo sapien
ggtgaagacacagggctatgattcc

SEQ ID NO: 824934 - DNA, 25 bp, Homo sapien
cacatagcatctcctcaactctgat

SEQ ID NO: 824935 - DNA, 25 bp, Homo sapien
tcagtgagttgacaagtaactgcag

SEQ ID NO: 824936 - DNA, 25 bp, Homo sapien
gtaactgcagatctgatgctctggc

SEQ ID NO: 824937 - DNA, 25 bp, Homo sapien
ggcctttgtctcattcagaccttga

SEQ ID NO: 824938 - DNA, 25 bp, Homo sapien
tgaatctctgctgcccctgaaaaca

SEQ ID NO: 824939 - DNA, 25 bp, Homo sapien
tttgaactggctgccattgtgtggc

SEQ ID NO: 824940 - DNA, 25 bp, Homo sapien
aatgtttgaactggctgccattgtg

SEQ ID NO: 824941 - DNA, 25 bp, Homo sapien
tgtttgaactggctgccattgtgtg

SEQ ID NO: 824942 - DNA, 25 bp, Homo sapien
ctgaatgtttgaactggctgccatt

SEQ ID NO: 824943 - DNA, 25 bp, Homo sapien
gtgggtgttagataatatgccctca

SEQ ID NO: 824944 - DNA, 25 bp, Homo sapien
cattggtagcttccctccttgtaca

SEQ ID NO: 824945 - DNA, 25 bp, Homo sapien
tctgggtataactccctgtccattg

SEQ ID NO: 824946 - DNA, 25 bp, Homo sapien
tctgtcttttgtggccacatctgtg

SEQ ID NO: 824947 - DNA, 25 bp, Homo sapien
aacactgacctctaaactgagcttg

SEQ ID NO: 824948 - DNA, 25 bp, Homo sapien
taatgagtgcttaagcacccactgc

SEQ ID NO: 824949 - DNA, 25 bp, Homo sapien
actgagcttgttactgtgatgttcc

SEQ ID NO: 824950 - DNA, 25 bp, Homo sapien
caggtctaggaccttggccttgtta

SEQ ID NO: 824951 - DNA, 25 bp, Homo sapien
actggggacttggactaggacattc

SEQ ID NO: 824952 - DNA, 25 bp, Homo sapien
ttggactaggacattcacatactcc

SEQ ID NO: 824953 - DNA, 25 bp, Homo sapien
ttctccaatcctagctgcactgggg

SEQ ID NO: 824954 - DNA, 25 bp, Homo sapien
tccaatcctagctgcactggggact

SEQ ID NO: 824955 - DNA, 25 bp, Homo sapien
gactctatagtcctaatttcggctg

SEQ ID NO: 824956 - DNA, 25 bp, Homo sapien
gaaatggataaggtttcaccttgaa

SEQ ID NO: 824957 - DNA, 25 bp, Homo sapien
gtttcaccttgaatcaccccaagag

SEQ ID NO: 824958 - DNA, 25 bp, Homo sapien
catacacggcgtcaatgagagagag

SEQ ID NO: 824959 - DNA, 25 bp, Homo sapien
tggagtgaaggaaatccaacagaga

SEQ ID NO: 824960 - DNA, 25 bp, Homo sapien
ctggagtgaaggaaatccaacagag

SEQ ID NO: 824961 - DNA, 25 bp, Homo sapien
cgagtgtctacagcgcttccccagg

SEQ ID NO: 824962 - DNA, 25 bp, Homo sapien
ccatctgagaatcccgagtgtctac

SEQ ID NO: 824963 - DNA, 25 bp, Homo sapien
tccccaggggatggcgtcattgatg

SEQ ID NO: 824964 - DNA, 25 bp, Homo sapien
ccagccatgagtggcagtaggctgt

SEQ ID NO: 824965 - DNA, 25 bp, Homo sapien
ccaagttcatgcttctcttgggttc

SEQ ID NO: 824966 - DNA, 25 bp, Homo sapien
aagttcatgcttctcttgggttcag

SEQ ID NO: 824967 - DNA, 25 bp, Homo sapien
agttcatgcttctcttgggttcagg

SEQ ID NO: 824968 - DNA, 25 bp, Homo sapien
caagttcatgcttctcttgggttca

SEQ ID NO: 824969 - DNA, 25 bp, Homo sapien
tgcttcataagaatctaagaaatgc

SEQ ID NO: 824970 - DNA, 25 bp, Homo sapien
atgcttcataagaatctaagaaatg

SEQ ID NO: 824971 - DNA, 25 bp, Homo sapien
tcttttttacagcattattgtactc

SEQ ID NO: 824972 - DNA, 25 bp, Homo sapien
taacagtacatcctggaagttagcc

SEQ ID NO: 824973 - DNA, 25 bp, Homo sapien
catcctggaagttagcctgtaacaa

SEQ ID NO: 824974 - DNA, 25 bp, Homo sapien
tttttacagcattattgtactccat

SEQ ID NO: 824975 - DNA, 25 bp, Homo sapien
tggctggctgatgaatgtgtagcat

SEQ ID NO: 824976 - DNA, 25 bp, Homo sapien
gctggctgatgaatgtgtagcatca

SEQ ID NO: 824977 - DNA, 25 bp, Homo sapien
gctgatgaatgtgtagcatcaggtg

SEQ ID NO: 824978 - DNA, 25 bp, Homo sapien
ttctggctggctgatgaatgtgtag

SEQ ID NO: 824979 - DNA, 25 bp, Homo sapien
tagttgggagagctttagaaggacc

SEQ ID NO: 824980 - DNA, 25 bp, Homo sapien
tacaattccccatactagttgggag

SEQ ID NO: 824981 - DNA, 25 bp, Homo sapien
tttgcataatgagcatagtcaaagc

SEQ ID NO: 824982 - DNA, 25 bp, Homo sapien
gctttagaaggaccacatgcttttc

SEQ ID NO: 824983 - DNA, 25 bp, Homo sapien
gaagaaatgtccttggcagtccctg

SEQ ID NO: 824984 - DNA, 25 bp, Homo sapien
aaatgtccttggcagtccctgattt

SEQ ID NO: 824985 - DNA, 25 bp, Homo sapien
aagaaatgtccttggcagtccctga

SEQ ID NO: 824986 - DNA, 25 bp, Homo sapien
agaaatgtccttggcagtccctgat

SEQ ID NO: 824987 - DNA, 25 bp, Homo sapien
tggtgggcttagcacctgacaggtg

SEQ ID NO: 824988 - DNA, 25 bp, Homo sapien
ttcaggggtgaaagactggggcaag

SEQ ID NO: 824989 - DNA, 25 bp, Homo sapien
cttagcacctgacaggtgctctcaa

SEQ ID NO: 824990 - DNA, 25 bp, Homo sapien
tagcacctgacaggtgctctcaaac

SEQ ID NO: 824991 - DNA, 25 bp, Homo sapien
tcagacagggttcttggcataatca

SEQ ID NO: 824992 - DNA, 25 bp, Homo sapien
gctatgccaatatcccttgaagtgg

SEQ ID NO: 824993 - DNA, 25 bp, Homo sapien
gacatatatagagtgcaaagcccca

SEQ ID NO: 824994 - DNA, 25 bp, Homo sapien
gctgcaattttagccccagagccag

SEQ ID NO: 824995 - DNA, 25 bp, Homo sapien
tttcttcctctttcgtaatgattag

SEQ ID NO: 824996 - DNA, 25 bp, Homo sapien
cttcctctttcgtaatgattaggta

SEQ ID NO: 824997 - DNA, 25 bp, Homo sapien
ttcttcctctttcgtaatgattagg

SEQ ID NO: 824998 - DNA, 25 bp, Homo sapien
tcttcctctttcgtaatgattaggt

SEQ ID NO: 824999 - DNA, 25 bp, Homo sapien
tcgtggagaggtatacagtgaacta

SEQ ID NO: 825000 - DNA, 25 bp, Homo sapien
tggttgaaatagttcacagcctggc

SEQ ID NO: 825001 - DNA, 25 bp, Homo sapien
ctaaagctagtgcatggagtagtcg

SEQ ID NO: 825002 - DNA, 25 bp, Homo sapien
ggaattgacattctaccagagacct

SEQ ID NO: 825003 - DNA, 25 bp, Homo sapien
ggtagtagccatgggtcaagtgttt

SEQ ID NO: 825004 - DNA, 25 bp, Homo sapien
taggtagtagccatgggtcaagtgt

SEQ ID NO: 825005 - DNA, 25 bp, Homo sapien
attaggtagtagccatgggtcaagt

SEQ ID NO: 825006 - DNA, 25 bp, Homo sapien
tcccctttgtggattaggtagtagc

SEQ ID NO: 825007 - DNA, 25 bp, Homo sapien
gcttctgtattgcatgttgctgaac

SEQ ID NO: 825008 - DNA, 25 bp, Homo sapien
tgcttctgtattgcatgttgctgaa

SEQ ID NO: 825009 - DNA, 25 bp, Homo sapien
gctgaacttgcagctggactataag

SEQ ID NO: 825010 - DNA, 25 bp, Homo sapien
gaacttgcagctggactataagctc

SEQ ID NO: 825011 - DNA, 25 bp, Homo sapien
tcccatgttggatgtgcctgaagta

SEQ ID NO: 825012 - DNA, 25 bp, Homo sapien
gcggttcttgctactcgtcaactga

SEQ ID NO: 825013 - DNA, 25 bp, Homo sapien
tcacaggaaggccacacttaagttg

SEQ ID NO: 825014 - DNA, 25 bp, Homo sapien
tatattggatgctcagaatgactct

SEQ ID NO: 825015 - DNA, 25 bp, Homo sapien
ttcccaaagaaacattccagctcca

SEQ ID NO: 825016 - DNA, 25 bp, Homo sapien
tcccaaagaaacattccagctccat

SEQ ID NO: 825017 - DNA, 25 bp, Homo sapien
tttcccaaagaaacattccagctcc

SEQ ID NO: 825018 - DNA, 25 bp, Homo sapien
ttttcccaaagaaacattccagctc

SEQ ID NO: 825019 - DNA, 25 bp, Homo sapien
tgatgataccattcacacctagttc

SEQ ID NO: 825020 - DNA, 25 bp, Homo sapien
tgaatgggcatttttgagcttggcc

SEQ ID NO: 825021 - DNA, 25 bp, Homo sapien
atgaatgggcatttttgagcttggc

SEQ ID NO: 825022 - DNA, 25 bp, Homo sapien
gatgatgataccattcacacctagt

SEQ ID NO: 825023 - DNA, 25 bp, Homo sapien
caggtgttagagcagctccacttgt

SEQ ID NO: 825024 - DNA, 25 bp, Homo sapien
gcagctccacttgtaggcatctggg

SEQ ID NO: 825025 - DNA, 25 bp, Homo sapien
gaccaatgtgtaggagtaggagttt

SEQ ID NO: 825026 - DNA, 25 bp, Homo sapien
gagtttgaagcactcaacttgagga

SEQ ID NO: 825027 - DNA, 25 bp, Homo sapien
agtcatcccctcttgtacccaaatc

SEQ ID NO: 825028 - DNA, 25 bp, Homo sapien
cttgtacccaaatctggaagagatc

SEQ ID NO: 825029 - DNA, 25 bp, Homo sapien
ttagtcatcccctcttgtacccaaa

SEQ ID NO: 825030 - DNA, 25 bp, Homo sapien
ttgtacccaaatctggaagagatcc

SEQ ID NO: 825031 - DNA, 25 bp, Homo sapien
tggtgtgaagtagcatttcctccat

SEQ ID NO: 825032 - DNA, 25 bp, Homo sapien
ctggtgtgaagtagcatttcctcca

SEQ ID NO: 825033 - DNA, 25 bp, Homo sapien
cgacaatgggtgtctctaagagcca

SEQ ID NO: 825034 - DNA, 25 bp, Homo sapien
ccaggaactgtgctagaggagctaa

SEQ ID NO: 825035 - DNA, 25 bp, Homo sapien
caagagttatgattgccctcagcta

SEQ ID NO: 825036 - DNA, 25 bp, Homo sapien
gttgatatcctctgtcgacaatggg

SEQ ID NO: 825037 - DNA, 25 bp, Homo sapien
gggaaccacagttttcagaaattgc

SEQ ID NO: 825038 - DNA, 25 bp, Homo sapien
ctgggaaccacagttttcagaaatt

SEQ ID NO: 825039 - DNA, 25 bp, Homo sapien
gaaccacagttttcagaaattgcca

SEQ ID NO: 825040 - DNA, 25 bp, Homo sapien
aaccacagttttcagaaattgccat

SEQ ID NO: 825041 - DNA, 25 bp, Homo sapien
ttgtgagtctcttcaagccatagct

SEQ ID NO: 825042 - DNA, 25 bp, Homo sapien
gagcagttgtgagtctcttcaagcc

SEQ ID NO: 825043 - DNA, 25 bp, Homo sapien
tggagagcagttgtgagtctcttca

SEQ ID NO: 825044 - DNA, 25 bp, Homo sapien
gcagttgtgagtctcttcaagccat

SEQ ID NO: 825045 - DNA, 25 bp, Homo sapien
ctggtggctcctggcttctacagag

SEQ ID NO: 825046 - DNA, 25 bp, Homo sapien
tgtcttgagaacagccactggtttc

SEQ ID NO: 825047 - DNA, 25 bp, Homo sapien
tgaagtccctgccattgcaatgcct

SEQ ID NO: 825048 - DNA, 25 bp, Homo sapien
cagtgaccagcctccttttgaagtc

SEQ ID NO: 825049 - DNA, 25 bp, Homo sapien
caccaggattggacttgtactagct

SEQ ID NO: 825050 - DNA, 25 bp, Homo sapien
gattagctgtaacttcttgcctgca

SEQ ID NO: 825051 - DNA, 25 bp, Homo sapien
tgatggctgtgaaatatgcctttcc

SEQ ID NO: 825052 - DNA, 25 bp, Homo sapien
tgtactagcttggtatagcacttgg

SEQ ID NO: 825053 - DNA, 25 bp, Homo sapien
atgcatcagcgtaatttccatacag

SEQ ID NO: 825054 - DNA, 25 bp, Homo sapien
gaggaatgcatcagcgtaatttcca

SEQ ID NO: 825055 - DNA, 25 bp, Homo sapien
caaacctgaatgcaaggaggaatgc

SEQ ID NO: 825056 - DNA, 25 bp, Homo sapien
tgcaaggaggaatgcatcagcgtaa

SEQ ID NO: 825057 - DNA, 25 bp, Homo sapien
ctgccccaaaggcttggagcctctt

SEQ ID NO: 825058 - DNA, 25 bp, Homo sapien
cccaaaggcttggagcctcttagtc

SEQ ID NO: 825059 - DNA, 25 bp, Homo sapien
caaaggcttggagcctcttagtctt

SEQ ID NO: 825060 - DNA, 25 bp, Homo sapien
gccccaaaggcttggagcctcttag

SEQ ID NO: 825061 - DNA, 25 bp, Homo sapien
atttggtgaagagtaacgacttact

SEQ ID NO: 825062 - DNA, 25 bp, Homo sapien
gagtaacgacttactgattcaggct

SEQ ID NO: 825063 - DNA, 25 bp, Homo sapien
taacgacttactgattcaggctgtc

SEQ ID NO: 825064 - DNA, 25 bp, Homo sapien
ggtgaagagtaacgacttactgatt

SEQ ID NO: 825065 - DNA, 25 bp, Homo sapien
gcagaatcggaagagaatcagcttt

SEQ ID NO: 825066 - DNA, 25 bp, Homo sapien
attatccacatatgccgtccaggaa

SEQ ID NO: 825067 - DNA, 25 bp, Homo sapien
tttgagagagactcaggattccagc

SEQ ID NO: 825068 - DNA, 25 bp, Homo sapien
tatgccgtccaggaaacctcaagca

SEQ ID NO: 825069 - DNA, 25 bp, Homo sapien
cttgttgctgcatgtgctttttctg

SEQ ID NO: 825070 - DNA, 25 bp, Homo sapien
ctgtctggatgcttttttccaccat

SEQ ID NO: 825071 - DNA, 25 bp, Homo sapien
tgcttgttgctgcatgtgctttttc

SEQ ID NO: 825072 - DNA, 25 bp, Homo sapien
ttttctgtctggatgcttttttcca

SEQ ID NO: 825073 - DNA, 25 bp, Homo sapien
gaaccattaggaggcatgaaagaaa

SEQ ID NO: 825074 - DNA, 25 bp, Homo sapien
aaggttcataatgacagacagaacc

SEQ ID NO: 825075 - DNA, 25 bp, Homo sapien
caaagacaacactactgacccactg

SEQ ID NO: 825076 - DNA, 25 bp, Homo sapien
ggagttgatgccctttgaacattca

SEQ ID NO: 825077 - DNA, 25 bp, Homo sapien
gaggaccactggaacaggatttcga

SEQ ID NO: 825078 - DNA, 25 bp, Homo sapien
acaggatttcgaatctacagtgagc

SEQ ID NO: 825079 - DNA, 25 bp, Homo sapien
gtagttcagttgatcaggaggttga

SEQ ID NO: 825080 - DNA, 25 bp, Homo sapien
gcctgggcaggaacatcacttgagg

SEQ ID NO: 825081 - DNA, 25 bp, Homo sapien
cttgggggctagggaccagaattat

SEQ ID NO: 825082 - DNA, 25 bp, Homo sapien
tgggggctagggaccagaattatac

SEQ ID NO: 825083 - DNA, 25 bp, Homo sapien
ttgggggctagggaccagaattata

SEQ ID NO: 825084 - DNA, 25 bp, Homo sapien
ctgcagggtagaaccagtctcaagc

SEQ ID NO: 825085 - DNA, 25 bp, Homo sapien
tgcagggtagaaccagtctcaagca

SEQ ID NO: 825086 - DNA, 25 bp, Homo sapien
cattaattcttgtacgaagcttagc

SEQ ID NO: 825087 - DNA, 25 bp, Homo sapien
gagaacgtccattaattcttgtacg

SEQ ID NO: 825088 - DNA, 25 bp, Homo sapien
cagggtgtacttttgagaacgtcca

SEQ ID NO: 825089 - DNA, 25 bp, Homo sapien
tcttgtacgaagcttagcttggaac

SEQ ID NO: 825090 - DNA, 25 bp, Homo sapien
agaaacgttgtgttcctttagcagc

SEQ ID NO: 825091 - DNA, 25 bp, Homo sapien
ttccctgctgccggaatgatcacat

SEQ ID NO: 825092 - DNA, 25 bp, Homo sapien
ttagcagcattgatgggagcttcct

SEQ ID NO: 825093 - DNA, 25 bp, Homo sapien
tgtgaccccatgtatcttccctgct

SEQ ID NO: 825094 - DNA, 25 bp, Homo sapien
caagtaagacccttgataggtggtg

SEQ ID NO: 825095 - DNA, 25 bp, Homo sapien
tcatgagacagtccttcaggtgttt

SEQ ID NO: 825096 - DNA, 25 bp, Homo sapien
tatctgcatgataagaattccctca

SEQ ID NO: 825097 - DNA, 25 bp, Homo sapien
ctagtagtagagttccatggttttc

SEQ ID NO: 825098 - DNA, 25 bp, Homo sapien
ccaacatcctctcgggattgtttgg

SEQ ID NO: 825099 - DNA, 25 bp, Homo sapien
tctgagccaacatcctctcgggatt

SEQ ID NO: 825100 - DNA, 25 bp, Homo sapien
gggccaagggtctgcatgtggagca

SEQ ID NO: 825101 - DNA, 25 bp, Homo sapien
ccaagggtctgcatgtggagcaggg

SEQ ID NO: 825102 - DNA, 25 bp, Homo sapien
tcctaacccttgagtatacagggag

SEQ ID NO: 825103 - DNA, 25 bp, Homo sapien
tatgctgcagcactttaacttgtaa

SEQ ID NO: 825104 - DNA, 25 bp, Homo sapien
caaaaggtggtcgtagatctcagca

SEQ ID NO: 825105 - DNA, 25 bp, Homo sapien
tgtagcccaggcatctagtgagttt

SEQ ID NO: 825106 - DNA, 25 bp, Homo sapien
taacttagaatcagcatggtggtca

SEQ ID NO: 825107 - DNA, 25 bp, Homo sapien
tggtgtagggccctttcttggacca

SEQ ID NO: 825108 - DNA, 25 bp, Homo sapien
agagcctcatccgaatactattagc

SEQ ID NO: 825109 - DNA, 25 bp, Homo sapien
tggtcatatgctcagacagttcagg

SEQ ID NO: 825110 - DNA, 25 bp, Homo sapien
tgttttcacaacaggagattatctt

SEQ ID NO: 825111 - DNA, 25 bp, Homo sapien
ttcttcagaatagcgatttagatgc

SEQ ID NO: 825112 - DNA, 25 bp, Homo sapien
tatcttgtcaccactttcttcagaa

SEQ ID NO: 825113 - DNA, 25 bp, Homo sapien
tagcgatttagatgctcagtgtcca

SEQ ID NO: 825114 - DNA, 25 bp, Homo sapien
ctgaaggtgcgggagtctctggaac

SEQ ID NO: 825115 - DNA, 25 bp, Homo sapien
ggctactaccgcgattgaatacaaa

SEQ ID NO: 825116 - DNA, 25 bp, Homo sapien
gaacacccaagaatacactagagtc

SEQ ID NO: 825117 - DNA, 25 bp, Homo sapien
ttgaatacaaatcctgccaactgac

SEQ ID NO: 825118 - DNA, 25 bp, Homo sapien
gcgagcttgggatttccgtgcccct

SEQ ID NO: 825119 - DNA, 25 bp, Homo sapien
agaaacgccggagttccgtgtcctg

SEQ ID NO: 825120 - DNA, 25 bp, Homo sapien
tctccgagttagcacggcgagcttg

SEQ ID NO: 825121 - DNA, 25 bp, Homo sapien
tcttttgtggctttcgagaaacgcc

SEQ ID NO: 825122 - DNA, 25 bp, Homo sapien
ttttaaagcgctctgcctcggatcg

SEQ ID NO: 825123 - DNA, 25 bp, Homo sapien
gatttctgaagttagcggcttccgg

SEQ ID NO: 825124 - DNA, 25 bp, Homo sapien
tcgcgaacctaacaggagggatttc

SEQ ID NO: 825125 - DNA, 25 bp, Homo sapien
tgccctggtggaatccggacttgcc

SEQ ID NO: 825126 - DNA, 25 bp, Homo sapien
gcaagtgccgaaccacgggacaaaa

SEQ ID NO: 825127 - DNA, 25 bp, Homo sapien
tccgaggaaagcaagtgccgaacca

SEQ ID NO: 825128 - DNA, 25 bp, Homo sapien
agcagggtaagactcgccgcccggc

SEQ ID NO: 825129 - DNA, 25 bp, Homo sapien
agcggctccgaggaaagcaagtgcc

SEQ ID NO: 825130 - DNA, 25 bp, Homo sapien
agcgctggactgtgcacgtcgagcc

SEQ ID NO: 825131 - DNA, 25 bp, Homo sapien
gtcgagcccggcaggtttccgcatg

SEQ ID NO: 825132 - DNA, 25 bp, Homo sapien
catgcggcatgcgaagggaatcccg

SEQ ID NO: 825133 - DNA, 25 bp, Homo sapien
gtctgcggctccttgaatcatctca

SEQ ID NO: 825134 - DNA, 25 bp, Homo sapien
agcaggatcatcagctttcgaatct

SEQ ID NO: 825135 - DNA, 25 bp, Homo sapien
tcagctttcgaatcttatttcatgg

SEQ ID NO: 825136 - DNA, 25 bp, Homo sapien
ttcatggttctttagtgcatcttaa

SEQ ID NO: 825137 - DNA, 25 bp, Homo sapien
tgcccagggtcatacggccagcggg

SEQ ID NO: 825138 - DNA, 25 bp, Homo sapien
gacatgctctgaagtccagatcttc

SEQ ID NO: 825139 - DNA, 25 bp, Homo sapien
gagtggtcaaagacatgctctgaag

SEQ ID NO: 825140 - DNA, 25 bp, Homo sapien
catgctctgaagtccagatcttcac

SEQ ID NO: 825141 - DNA, 25 bp, Homo sapien
aagacatgctctgaagtccagatct

SEQ ID NO: 825142 - DNA, 25 bp, Homo sapien
tcaactccaaccacagttggttcat

SEQ ID NO: 825143 - DNA, 25 bp, Homo sapien
ctccaaccacagttggttcataggg

SEQ ID NO: 825144 - DNA, 25 bp, Homo sapien
gtctatcaacttttatgatcacttg

SEQ ID NO: 825145 - DNA, 25 bp, Homo sapien
caaaaatcacatagccttatgccag

SEQ ID NO: 825146 - DNA, 25 bp, Homo sapien
gagagacctgggctacccaacgttg

SEQ ID NO: 825147 - DNA, 25 bp, Homo sapien
tgatcacttgtctgcaaaagctgct

SEQ ID NO: 825148 - DNA, 25 bp, Homo sapien
tcaaatctgaccattgagagcccct

SEQ ID NO: 825149 - DNA, 25 bp, Homo sapien
gagagcccctctaagttggttgctg

SEQ ID NO: 825150 - DNA, 25 bp, Homo sapien
gaagatacaaatccagagacttttc

SEQ ID NO: 825151 - DNA, 25 bp, Homo sapien
taaagacacgctaaaaatattggct

SEQ ID NO: 825152 - DNA, 25 bp, Homo sapien
tggcttggtctatccaatgccgctt

SEQ ID NO: 825153 - DNA, 25 bp, Homo sapien
gcttggtctatccaatgccgcttct

SEQ ID NO: 825154 - DNA, 25 bp, Homo sapien
ctggtggcttggtctatccaatgcc

SEQ ID NO: 825155 - DNA, 25 bp, Homo sapien
ggtggcttggtctatccaatgccgc

SEQ ID NO: 825156 - DNA, 25 bp, Homo sapien
gaccacgtgccttagggacaggctg

SEQ ID NO: 825157 - DNA, 25 bp, Homo sapien
ctcgccgtccctggtttgagccaga

SEQ ID NO: 825158 - DNA, 25 bp, Homo sapien
gcgaagccctctagaggaccacgtg

SEQ ID NO: 825159 - DNA, 25 bp, Homo sapien
tccgtgcgagtcgtggttgttcgca

SEQ ID NO: 825160 - DNA, 25 bp, Homo sapien
catatctttgtctttcctccctggg

SEQ ID NO: 825161 - DNA, 25 bp, Homo sapien
tatctttgtctttcctccctgggga

SEQ ID NO: 825162 - DNA, 25 bp, Homo sapien
ccgcatatctttgtctttcctccct

SEQ ID NO: 825163 - DNA, 25 bp, Homo sapien
gcatatctttgtctttcctccctgg

SEQ ID NO: 825164 - DNA, 25 bp, Homo sapien
actttataagtttgaatagtgcaaa

SEQ ID NO: 825165 - DNA, 25 bp, Homo sapien
tatagctgacattgggcaggtgttc

SEQ ID NO: 825166 - DNA, 25 bp, Homo sapien
caacaggcgtaggttgctcttcaac

SEQ ID NO: 825167 - DNA, 25 bp, Homo sapien
aaatgagagctgaagtatagctgac

SEQ ID NO: 825168 - DNA, 25 bp, Homo sapien
cctaagaagtttgtgccagaagctt

SEQ ID NO: 825169 - DNA, 25 bp, Homo sapien
gaagcttttctgcatgtaggctaca

SEQ ID NO: 825170 - DNA, 25 bp, Homo sapien
taagagaacctgaactaggaccagt

SEQ ID NO: 825171 - DNA, 25 bp, Homo sapien
gttccagggctgtcaaaagatttca

SEQ ID NO: 825172 - DNA, 25 bp, Homo sapien
acagtgtgtctcctccatagtaatt

SEQ ID NO: 825173 - DNA, 25 bp, Homo sapien
tccatagtaattctggggccacaga

SEQ ID NO: 825174 - DNA, 25 bp, Homo sapien
ctccatagtaattctggggccacag

SEQ ID NO: 825175 - DNA, 25 bp, Homo sapien
gaggggagcccattgctggaattct

SEQ ID NO: 825176 - DNA, 25 bp, Homo sapien
gaaaaattgatattggaggagggga

SEQ ID NO: 825177 - DNA, 25 bp, Homo sapien
agcccattgctggaattctcttact

SEQ ID NO: 825178 - DNA, 25 bp, Homo sapien
gggagcccattgctggaattctctt

SEQ ID NO: 825179 - DNA, 25 bp, Homo sapien
cctttccctctctgcttgcttgtta

SEQ ID NO: 825180 - DNA, 25 bp, Homo sapien
tttccctctctgcttgcttgttaaa

SEQ ID NO: 825181 - DNA, 25 bp, Homo sapien
tcatttgtatgccagcctttccctc

SEQ ID NO: 825182 - DNA, 25 bp, Homo sapien
tccctctctgcttgcttgttaaata

SEQ ID NO: 825183 - DNA, 25 bp, Homo sapien
tacaaaagcgaatgtaaggaggcat

SEQ ID NO: 825184 - DNA, 25 bp, Homo sapien
tcctgatatagcaacaaagcctggg

SEQ ID NO: 825185 - DNA, 25 bp, Homo sapien
catagaggactaaggagggattcaa

SEQ ID NO: 825186 - DNA, 25 bp, Homo sapien
tcaattctagacgaggtgttcgccg

SEQ ID NO: 825187 - DNA, 25 bp, Homo sapien
ttttttgactatccttaaaggcaga

SEQ ID NO: 825188 - DNA, 25 bp, Homo sapien
tctgtgattgagaagctggtaggca

SEQ ID NO: 825189 - DNA, 25 bp, Homo sapien
ctggtaggcaaagtgatgtgtctga

SEQ ID NO: 825190 - DNA, 25 bp, Homo sapien
gagaataaatatgcagtccctactg

SEQ ID NO: 825191 - DNA, 25 bp, Homo sapien
tgggatccagtttctattgaactgc

SEQ ID NO: 825192 - DNA, 25 bp, Homo sapien
gaactgctcttgacctgtttaactt

SEQ ID NO: 825193 - DNA, 25 bp, Homo sapien
aaacaggcaatccttggatgggatc

SEQ ID NO: 825194 - DNA, 25 bp, Homo sapien
caatccttggatgggatccagtttc

SEQ ID NO: 825195 - DNA, 25 bp, Homo sapien
tgctgtgaaccaggtagacccctct

SEQ ID NO: 825196 - DNA, 25 bp, Homo sapien
tcttcgtccgcagttgctttgccct

SEQ ID NO: 825197 - DNA, 25 bp, Homo sapien
atgctgtgaaccaggtagacccctc

SEQ ID NO: 825198 - DNA, 25 bp, Homo sapien
gtagacccctcttcgtccgcagttg

SEQ ID NO: 825199 - DNA, 25 bp, Homo sapien
tgatgggaacgtatctggaaaatgc

SEQ ID NO: 825200 - DNA, 25 bp, Homo sapien
tgttttcttttcgagagggaggtgc

SEQ ID NO: 825201 - DNA, 25 bp, Homo sapien
tttcaacagccacgccgcaatgaag

SEQ ID NO: 825202 - DNA, 25 bp, Homo sapien
ccccaggaagttcagggcgagtgac

SEQ ID NO: 825203 - DNA, 25 bp, Homo sapien
gggcggttcctcctgtcaactgcct

SEQ ID NO: 825204 - DNA, 25 bp, Homo sapien
cgggcggttcctcctgtcaactgcc

SEQ ID NO: 825205 - DNA, 25 bp, Homo sapien
ggcggttcctcctgtcaactgcctc

SEQ ID NO: 825206 - DNA, 25 bp, Homo sapien
tgccccggcgagggaagcctcaggt

SEQ ID NO: 825207 - DNA, 25 bp, Homo sapien
cggcggcagccgttgccccggcgag

SEQ ID NO: 825208 - DNA, 25 bp, Homo sapien
ctctcctaaagcctgagggaccgtt

SEQ ID NO: 825209 - DNA, 25 bp, Homo sapien
taaagcctgagggaccgttgcaggt

SEQ ID NO: 825210 - DNA, 25 bp, Homo sapien
agagtaaaagagaggctgacttaat

SEQ ID NO: 825211 - DNA, 25 bp, Homo sapien
tcctaaagcctgagggaccgttgca

SEQ ID NO: 825212 - DNA, 25 bp, Homo sapien
ctccgtccggggtcagtcagtcgct

SEQ ID NO: 825213 - DNA, 25 bp, Homo sapien
gtcgctgccggagagtctctgcttc

SEQ ID NO: 825214 - DNA, 25 bp, Homo sapien
tcgctgccggagagtctctgcttcc

SEQ ID NO: 825215 - DNA, 25 bp, Homo sapien
gtcagtcagtcgctccctgtcgctg

SEQ ID NO: 825216 - DNA, 25 bp, Homo sapien
ggcgtgccggccacactccccccac

SEQ ID NO: 825217 - DNA, 25 bp, Homo sapien
gggcgtgccggccacactcccccca

SEQ ID NO: 825218 - DNA, 25 bp, Homo sapien
tccccccacccactcggtgagcttg

SEQ ID NO: 825219 - DNA, 25 bp, Homo sapien
taattgcactgttacagcccactgt

SEQ ID NO: 825220 - DNA, 25 bp, Homo sapien
cattttaccacgcagaggtctccag

SEQ ID NO: 825221 - DNA, 25 bp, Homo sapien
tgatgcctcttaactatgggacaga

SEQ ID NO: 825222 - DNA, 25 bp, Homo sapien
tagtttcacgttgggtgatgcctct

SEQ ID NO: 825223 - DNA, 25 bp, Homo sapien
tctggataagccctggcaagaatac

SEQ ID NO: 825224 - DNA, 25 bp, Homo sapien
tggataagccctggcaagaatacag

SEQ ID NO: 825225 - DNA, 25 bp, Homo sapien
attctggataagccctggcaagaat

SEQ ID NO: 825226 - DNA, 25 bp, Homo sapien
ctggataagccctggcaagaataca

SEQ ID NO: 825227 - DNA, 25 bp, Homo sapien
gcagggctgctatggacggtctgag

SEQ ID NO: 825228 - DNA, 25 bp, Homo sapien
gtgttcagtaagagagaggtttagc

SEQ ID NO: 825229 - DNA, 25 bp, Homo sapien
ctatggacggtctgagccaggagct

SEQ ID NO: 825230 - DNA, 25 bp, Homo sapien
gagaggtttagcttgcattcctgat

SEQ ID NO: 825231 - DNA, 25 bp, Homo sapien
ggttcccgccacttgcctcttgctg

SEQ ID NO: 825232 - DNA, 25 bp, Homo sapien
ccgccacttgcctcttgctgttggg

SEQ ID NO: 825233 - DNA, 25 bp, Homo sapien
gggtcccattggctctttggccatt

SEQ ID NO: 825234 - DNA, 25 bp, Homo sapien
ggccattgttcagtggagtagatcg

SEQ ID NO: 825235 - DNA, 25 bp, Homo sapien
gcatttttggtagcaagcgcatacg

SEQ ID NO: 825236 - DNA, 25 bp, Homo sapien
tctttgcatagtccctggcattggg

SEQ ID NO: 825237 - DNA, 25 bp, Homo sapien
tctctgaggtgcgtttgttggttcc

SEQ ID NO: 825238 - DNA, 25 bp, Homo sapien
tcctgtaagggtgctaatagggacc

SEQ ID NO: 825239 - DNA, 25 bp, Homo sapien
gcttggaagctattacaacaaggag

SEQ ID NO: 825240 - DNA, 25 bp, Homo sapien
aagctattacaacaaggaggttctc

SEQ ID NO: 825241 - DNA, 25 bp, Homo sapien
cttggcttggaagctattacaacaa

SEQ ID NO: 825242 - DNA, 25 bp, Homo sapien
tggaagctattacaacaaggaggtt

SEQ ID NO: 825243 - DNA, 25 bp, Homo sapien
gaaaatgtcaacctgtggaggtaaa

SEQ ID NO: 825244 - DNA, 25 bp, Homo sapien
cctgtggaggtaaaaggtattcttg

SEQ ID NO: 825245 - DNA, 25 bp, Homo sapien
tgtcaacctgtggaggtaaaaggta

SEQ ID NO: 825246 - DNA, 25 bp, Homo sapien
tgtagttagaaaatgtcaacctgtg

SEQ ID NO: 825247 - DNA, 25 bp, Homo sapien
gtgaggctgcggctattaaacacgc

SEQ ID NO: 825248 - DNA, 25 bp, Homo sapien
gagtgcccttaaagttggtcttcaa

SEQ ID NO: 825249 - DNA, 25 bp, Homo sapien
tattaaacacgctaagtcgggacga

SEQ ID NO: 825250 - DNA, 25 bp, Homo sapien
tgcggctattaaacacgctaagtcg

SEQ ID NO: 825251 - DNA, 25 bp, Homo sapien
tttatgtttctactagctgtattca

SEQ ID NO: 825252 - DNA, 25 bp, Homo sapien
tatgtttctactagctgtattcaat

SEQ ID NO: 825253 - DNA, 25 bp, Homo sapien
ctactagctgtattcaattgattca

SEQ ID NO: 825254 - DNA, 25 bp, Homo sapien
gtttctactagctgtattcaattga

SEQ ID NO: 825255 - DNA, 25 bp, Homo sapien
tttccaaatgatttggtgatctgtt

SEQ ID NO: 825256 - DNA, 25 bp, Homo sapien
atgccagatgctttcttactgttta

SEQ ID NO: 825257 - DNA, 25 bp, Homo sapien
tttatgccagatgctttcttactgt

SEQ ID NO: 825258 - DNA, 25 bp, Homo sapien
ttccaaatgatttggtgatctgttc

SEQ ID NO: 825259 - DNA, 25 bp, Homo sapien
aagcgtgttccctccaaatgccaaa

SEQ ID NO: 825260 - DNA, 25 bp, Homo sapien
gactcttactcctaagcgtgttccc

SEQ ID NO: 825261 - DNA, 25 bp, Homo sapien
gcttcttggttgcagactcttactc

SEQ ID NO: 825262 - DNA, 25 bp, Homo sapien
cttagaatgtaagcttcttggttgc

SEQ ID NO: 825263 - DNA, 25 bp, Homo sapien
gatttgcagtatcatcaagtcccca

SEQ ID NO: 825264 - DNA, 25 bp, Homo sapien
gcaaaaagcattaggtcagtcccat

SEQ ID NO: 825265 - DNA, 25 bp, Homo sapien
gaccacgcctgaagctcaaaactga

SEQ ID NO: 825266 - DNA, 25 bp, Homo sapien
gccagctggattagagactcaaaca

SEQ ID NO: 825267 - DNA, 25 bp, Homo sapien
catctgccatattgtaatcatctgg

SEQ ID NO: 825268 - DNA, 25 bp, Homo sapien
tctgccatattgtaatcatctggga

SEQ ID NO: 825269 - DNA, 25 bp, Homo sapien
atctgccatattgtaatcatctggg

SEQ ID NO: 825270 - DNA, 25 bp, Homo sapien
ccatctgccatattgtaatcatctg

SEQ ID NO: 825271 - DNA, 25 bp, Homo sapien
tacactgctactaatgttaggacac

SEQ ID NO: 825272 - DNA, 25 bp, Homo sapien
cactgctactaatgttaggacactt

SEQ ID NO: 825273 - DNA, 25 bp, Homo sapien
gatacactgctactaatgttaggac

SEQ ID NO: 825274 - DNA, 25 bp, Homo sapien
cagatacactgctactaatgttagg

SEQ ID NO: 825275 - DNA, 25 bp, Homo sapien
ggctagatgttgcaggagaaaggag

SEQ ID NO: 825276 - DNA, 25 bp, Homo sapien
acagtgataggaacctttgaagagc

SEQ ID NO: 825277 - DNA, 25 bp, Homo sapien
agtacagtgataggaacctttgaag

SEQ ID NO: 825278 - DNA, 25 bp, Homo sapien
aggagtacagtgataggaacctttg

SEQ ID NO: 825279 - DNA, 25 bp, Homo sapien
gggcaagaaaagagctgactaacca

SEQ ID NO: 825280 - DNA, 25 bp, Homo sapien
gagggcaagaaaagagctgactaac

SEQ ID NO: 825281 - DNA, 25 bp, Homo sapien
ctagagggcaagaaaagagctgact

SEQ ID NO: 825282 - DNA, 25 bp, Homo sapien
tagagggcaagaaaagagctgacta

SEQ ID NO: 825283 - DNA, 25 bp, Homo sapien
tggagacctttgatatgtgggctgg

SEQ ID NO: 825284 - DNA, 25 bp, Homo sapien
ctggagacctttgatatgtgggctg

SEQ ID NO: 825285 - DNA, 25 bp, Homo sapien
ccgacacagagggagatactttctt

SEQ ID NO: 825286 - DNA, 25 bp, Homo sapien
tctactgaggaggactaccatggta

SEQ ID NO: 825287 - DNA, 25 bp, Homo sapien
gagaatgcactccatgacgtggtag

SEQ ID NO: 825288 - DNA, 25 bp, Homo sapien
tgaactaaatacacagctagagcaa

SEQ ID NO: 825289 - DNA, 25 bp, Homo sapien
acaggtcgtgtgtatgttttccgca

SEQ ID NO: 825290 - DNA, 25 bp, Homo sapien
tataatagccatgtatacaccagtc

SEQ ID NO: 825291 - DNA, 25 bp, Homo sapien
cctgattggtgcctagagcagattg

SEQ ID NO: 825292 - DNA, 25 bp, Homo sapien
tgaagggctcatgccttgtcacagt

SEQ ID NO: 825293 - DNA, 25 bp, Homo sapien
tatagagttgtgtgacgagtggagc

SEQ ID NO: 825294 - DNA, 25 bp, Homo sapien
gatggcggtattaggaataggtctc

SEQ ID NO: 825295 - DNA, 25 bp, Homo sapien
taagatgacccataaccattgggaa

SEQ ID NO: 825296 - DNA, 25 bp, Homo sapien
ccattgggaagaccaaatgtcagac

SEQ ID NO: 825297 - DNA, 25 bp, Homo sapien
caggcggatcatcgcggaattcgac

SEQ ID NO: 825298 - DNA, 25 bp, Homo sapien
cctgtaagaacctgggcttgcagca

SEQ ID NO: 825299 - DNA, 25 bp, Homo sapien
ttgcagcaggcggatcatcgcggaa

SEQ ID NO: 825300 - DNA, 25 bp, Homo sapien
agcccggtcagcgttcctgtaagaa

SEQ ID NO: 825301 - DNA, 25 bp, Homo sapien
gtagccgttgaagggtacagcttcg

SEQ ID NO: 825302 - DNA, 25 bp, Homo sapien
gtacagcttcggtgcagcatgccgg

SEQ ID NO: 825303 - DNA, 25 bp, Homo sapien
ctcagcacacaaaagtagccgttga

SEQ ID NO: 825304 - DNA, 25 bp, Homo sapien
gttccctcctcagtaaaatgttctc

SEQ ID NO: 825305 - DNA, 25 bp, Homo sapien
ccctgaagaggcagttgcacatctt

SEQ ID NO: 825306 - DNA, 25 bp, Homo sapien
tttgctggagctgcctattttcagt

SEQ ID NO: 825307 - DNA, 25 bp, Homo sapien
tgcacatcttgctgcacatgccctg

SEQ ID NO: 825308 - DNA, 25 bp, Homo sapien
gctggagctgcctattttcagtgct

SEQ ID NO: 825309 - DNA, 25 bp, Homo sapien
caaatatccgaggtgtctgagctgc

SEQ ID NO: 825310 - DNA, 25 bp, Homo sapien
ggagataatgcccagctcggaggct

SEQ ID NO: 825311 - DNA, 25 bp, Homo sapien
gatcaactccgtcagcaatctcagg

SEQ ID NO: 825312 - DNA, 25 bp, Homo sapien
tttagacagccatggagaggagtcc

SEQ ID NO: 825313 - DNA, 25 bp, Homo sapien
gccagatccccggctgcaagaactt

SEQ ID NO: 825314 - DNA, 25 bp, Homo sapien
aggaagaggctgcccgccttaagag

SEQ ID NO: 825315 - DNA, 25 bp, Homo sapien
tccaggctcagttacagcaggaaat

SEQ ID NO: 825316 - DNA, 25 bp, Homo sapien
gcccgccttaagagccatttccagg

SEQ ID NO: 825317 - DNA, 25 bp, Homo sapien
gacttgctggagactatagagaccc

SEQ ID NO: 825318 - DNA, 25 bp, Homo sapien
tcacagcgaggatagcactgggacc

SEQ ID NO: 825319 - DNA, 25 bp, Homo sapien
tgtggtccgtgcctataaaagcctg

SEQ ID NO: 825320 - DNA, 25 bp, Homo sapien
gcatcaaggtgctgtcggtatccca

SEQ ID NO: 825321 - DNA, 25 bp, Homo sapien
gcgggcaccgacgcggggtgcgggc

SEQ ID NO: 825322 - DNA, 25 bp, Homo sapien
cgggcaccgacgcggggtgcgggct

SEQ ID NO: 825323 - DNA, 25 bp, Homo sapien
gcttcttcccgaagatccgcgaaaa

SEQ ID NO: 825324 - DNA, 25 bp, Homo sapien
tccgcgaaaagagcgcggacacggt

SEQ ID NO: 825325 - DNA, 25 bp, Homo sapien
cttcccgaagatccgcgaaaagagc

SEQ ID NO: 825326 - DNA, 25 bp, Homo sapien
cgaagatccgcgaaaagagcgcgga

SEQ ID NO: 825327 - DNA, 25 bp, Homo sapien
acccgcccgagagcagaggccccgg

SEQ ID NO: 825328 - DNA, 25 bp, Homo sapien
gggccgcgcgctcgatctgcctcac

SEQ ID NO: 825329 - DNA, 25 bp, Homo sapien
gggtcggcgatgcagaccgggaccc

SEQ ID NO: 825330 - DNA, 25 bp, Homo sapien
ggcgttatgaggtgggtgactcggg

SEQ ID NO: 825331 - DNA, 25 bp, Homo sapien
gggatggagatgggagcgagggagc

SEQ ID NO: 825332 - DNA, 25 bp, Homo sapien
atggagatgggagcgagggagcccc

SEQ ID NO: 825333 - DNA, 25 bp, Homo sapien
cacagggatggagatgggagcgagg

SEQ ID NO: 825334 - DNA, 25 bp, Homo sapien
gcacagggatggagatgggagcgag

SEQ ID NO: 825335 - DNA, 25 bp, Homo sapien
caggattgtggtcttgccagccgca

SEQ ID NO: 825336 - DNA, 25 bp, Homo sapien
gatggtggtgacaatctcccccaac

SEQ ID NO: 825337 - DNA, 25 bp, Homo sapien
acttcagtttgtacaggattgtggt

SEQ ID NO: 825338 - DNA, 25 bp, Homo sapien
tatggttgggatggtggtgacaatc

SEQ ID NO: 825339 - DNA, 25 bp, Homo sapien
caaatagctgtatctggtgtcaggg

SEQ ID NO: 825340 - DNA, 25 bp, Homo sapien
cctgcctccggtatccacgtagaga

SEQ ID NO: 825341 - DNA, 25 bp, Homo sapien
gacccacttctcaaatagctgtatc

SEQ ID NO: 825342 - DNA, 25 bp, Homo sapien
cgtagagataccctgacccacttct

SEQ ID NO: 825343 - DNA, 25 bp, Homo sapien
tagtgccgccacagaggccgaatct

SEQ ID NO: 825344 - DNA, 25 bp, Homo sapien
tcccacgtcccagactgtgaaacag

SEQ ID NO: 825345 - DNA, 25 bp, Homo sapien
tgccgccacagaggccgaatcttgt

SEQ ID NO: 825346 - DNA, 25 bp, Homo sapien
agtagtgccgccacagaggccgaat

SEQ ID NO: 825347 - DNA, 25 bp, Homo sapien
gaactctatagaagctctacaggag

SEQ ID NO: 825348 - DNA, 25 bp, Homo sapien
ttctgcctgggacataccgtagtgt

SEQ ID NO: 825349 - DNA, 25 bp, Homo sapien
ccagaatcctgcttctaaagagaag

SEQ ID NO: 825350 - DNA, 25 bp, Homo sapien
ggagtcatggcacaaactagagacc

SEQ ID NO: 825351 - DNA, 25 bp, Homo sapien
gcagattcttggacccgctcccggt

SEQ ID NO: 825352 - DNA, 25 bp, Homo sapien
acccgctcccggtcattactgtcca

SEQ ID NO: 825353 - DNA, 25 bp, Homo sapien
atcagcagattcttggacccgctcc

SEQ ID NO: 825354 - DNA, 25 bp, Homo sapien
ttcttggacccgctcccggtcatta

SEQ ID NO: 825355 - DNA, 25 bp, Homo sapien
cagcttgtcagtcagctcgctcacg

SEQ ID NO: 825356 - DNA, 25 bp, Homo sapien
cggctgcgtaagtgctgtagcccca

SEQ ID NO: 825357 - DNA, 25 bp, Homo sapien
tgcggctgcgtaagtgctgtagccc

SEQ ID NO: 825358 - DNA, 25 bp, Homo sapien
gggcatggcgttgggcatgtcctgc

SEQ ID NO: 825359 - DNA, 25 bp, Homo sapien
tccagaccatcgtacagacctgtgc

SEQ ID NO: 825360 - DNA, 25 bp, Homo sapien
catcgtacagacctgtgccttgggt

SEQ ID NO: 825361 - DNA, 25 bp, Homo sapien
gtacagacctgtgccttgggtggca

SEQ ID NO: 825362 - DNA, 25 bp, Homo sapien
agccagtccagaccatcgtacagac

SEQ ID NO: 825363 - DNA, 25 bp, Homo sapien
tgccacattatagcaccacccgaag

SEQ ID NO: 825364 - DNA, 25 bp, Homo sapien
ggctccaggctccaacaacagagag

SEQ ID NO: 825365 - DNA, 25 bp, Homo sapien
cactgcctgaggagtccgggagtct

SEQ ID NO: 825366 - DNA, 25 bp, Homo sapien
tattactcaagatccagtgccacat

SEQ ID NO: 825367 - DNA, 25 bp, Homo sapien
cctcttatcacaccacagtggggaa

SEQ ID NO: 825368 - DNA, 25 bp, Homo sapien
actgtgagggcagcctcttatcaca

SEQ ID NO: 825369 - DNA, 25 bp, Homo sapien
gactgtgagggcagcctcttatcac

SEQ ID NO: 825370 - DNA, 25 bp, Homo sapien
agcctcttatcacaccacagtgggg

SEQ ID NO: 825371 - DNA, 25 bp, Homo sapien
agatgttcccagagagaacttccca

SEQ ID NO: 825372 - DNA, 25 bp, Homo sapien
tgaggttccacaggccatagggcct

SEQ ID NO: 825373 - DNA, 25 bp, Homo sapien
tccacaggccatagggcctggaata

SEQ ID NO: 825374 - DNA, 25 bp, Homo sapien
gtgaggttccacaggccatagggcc

SEQ ID NO: 825375 - DNA, 25 bp, Homo sapien
ggttccacaggccatagggcctgga

SEQ ID NO: 825376 - DNA, 25 bp, Homo sapien
tctgtgtatccactctgtctcatcc

SEQ ID NO: 825377 - DNA, 25 bp, Homo sapien
gtctgtgtatccactctgtctcatc

SEQ ID NO: 825378 - DNA, 25 bp, Homo sapien
caaactcttcgcagttgcagtgact

SEQ ID NO: 825379 - DNA, 25 bp, Homo sapien
tgcccaaactcttcgcagttgcagt

SEQ ID NO: 825380 - DNA, 25 bp, Homo sapien
caaaggtgaggtaggttcctgccca

SEQ ID NO: 825381 - DNA, 25 bp, Homo sapien
gtgactgtattcttgcatgcctcaa

SEQ ID NO: 825382 - DNA, 25 bp, Homo sapien
ttctttctgacacaaccaccctgtg

SEQ ID NO: 825383 - DNA, 25 bp, Homo sapien
ctcttctttctgacacaaccaccct

SEQ ID NO: 825384 - DNA, 25 bp, Homo sapien
cctctttctgacacaaccaccctgt

SEQ ID NO: 825385 - DNA, 25 bp, Homo sapien
caaccaccctgtgctctccacttct

SEQ ID NO: 825386 - DNA, 25 bp, Homo sapien
gaagaccgacactgctagggcttct

SEQ ID NO: 825387 - DNA, 25 bp, Homo sapien
ggagttccccattctcaaaccacaa

SEQ ID NO: 825388 - DNA, 25 bp, Homo sapien
taggctttgcaataactccactggt

SEQ ID NO: 825389 - DNA, 25 bp, Homo sapien
ttgttataagaggaagaactttgcc

SEQ ID NO: 825390 - DNA, 25 bp, Homo sapien
agccaatacctccatccccaaaggt

SEQ ID NO: 825391 - DNA, 25 bp, Homo sapien
cccaaaggttgccttccagcatggc

SEQ ID NO: 825392 - DNA, 25 bp, Homo sapien
cacagagagcacacttagccaatac

SEQ ID NO: 825393 - DNA, 25 bp, Homo sapien
tcagatgcaactgcctggttcagct

SEQ ID NO: 825394 - DNA, 25 bp, Homo sapien
gatgtctacctccttcagctaacag

SEQ ID NO: 825395 - DNA, 25 bp, Homo sapien
tcagctaacagaaggtaaaccctcc

SEQ ID NO: 825396 - DNA, 25 bp, Homo sapien
tcttaatcccactcttcaataccta

SEQ ID NO: 825397 - DNA, 25 bp, Homo sapien
gcagccagatggcactatccaaaga

SEQ ID NO: 825398 - DNA, 25 bp, Homo sapien
ggaaacgcagtagaaagcacccatg

SEQ ID NO: 825399 - DNA, 25 bp, Homo sapien
ttgggcggccataacacacggtgcc

SEQ ID NO: 825400 - DNA, 25 bp, Homo sapien
gaacagccggtctacatgggacaag

SEQ ID NO: 825401 - DNA, 25 bp, Homo sapien
cagagattaggcactggagggtcca

SEQ ID NO: 825402 - DNA, 25 bp, Homo sapien
agtctttgacctgaggctgacccag

SEQ ID NO: 825403 - DNA, 25 bp, Homo sapien
tgctgtaggatgaaccactcctcac

SEQ ID NO: 825404 - DNA, 25 bp, Homo sapien
gggcagtgctgtaggatgaaccact

SEQ ID NO: 825405 - DNA, 25 bp, Homo sapien
tgactgagatgaaccgcccagtctt

SEQ ID NO: 825406 - DNA, 25 bp, Homo sapien
gtagccattggctgaacgaagctgc

SEQ ID NO: 825407 - DNA, 25 bp, Homo sapien
tcggtttaagcgctcagaagcagca

SEQ ID NO: 825408 - DNA, 25 bp, Homo sapien
gctctcactgtcacattcaaactgg

SEQ ID NO: 825409 - DNA, 25 bp, Homo sapien
tggaacaaggacattcggtttaagc

SEQ ID NO: 825410 - DNA, 25 bp, Homo sapien
gcccccattgggtgaaaatgaatgt

SEQ ID NO: 825411 - DNA, 25 bp, Homo sapien
agagctcagagcttaaggtttctct

SEQ ID NO: 825412 - DNA, 25 bp, Homo sapien
agcccccattgggtgaaaatgaatg

SEQ ID NO: 825413 - DNA, 25 bp, Homo sapien
agctcagagcttaaggtttctcttg

SEQ ID NO: 825414 - DNA, 25 bp, Homo sapien
catcagttttattcctagaccctct

SEQ ID NO: 825415 - DNA, 25 bp, Homo sapien
atcagcctttttcatgctcccagag

SEQ ID NO: 825416 - DNA, 25 bp, Homo sapien
cctttttggaagatgtgctgtggcc

SEQ ID NO: 825417 - DNA, 25 bp, Homo sapien
gctcccagagttgatgctttcagaa

SEQ ID NO: 825418 - DNA, 25 bp, Homo sapien
agttccagtgcattcggaagaacgt

SEQ ID NO: 825419 - DNA, 25 bp, Homo sapien
tgcaggatgatcctgccacagttcc

SEQ ID NO: 825420 - DNA, 25 bp, Homo sapien
atcagccattactgccctgtggcgc

SEQ ID NO: 825421 - DNA, 25 bp, Homo sapien
tcggaagaacgtgtcagactccagg

SEQ ID NO: 825422 - DNA, 25 bp, Homo sapien
cactgtatgaggtcatggcccgatg

SEQ ID NO: 825423 - DNA, 25 bp, Homo sapien
ggctgatcctggttgcactgtatga

SEQ ID NO: 825424 - DNA, 25 bp, Homo sapien
tagatgaatgcggtcgggctgatcc

SEQ ID NO: 825425 - DNA, 25 bp, Homo sapien
taacgacctcgcaatacaaggaagg

SEQ ID NO: 825426 - DNA, 25 bp, Homo sapien
cactttggtcggctcgcatgtagaa

SEQ ID NO: 825427 - DNA, 25 bp, Homo sapien
tgccccaagggcgaaaggtgccaaa

SEQ ID NO: 825428 - DNA, 25 bp, Homo sapien
gatgttattgaccagaaggatcccc

SEQ ID NO: 825429 - DNA, 25 bp, Homo sapien
ccagtacagtgagtaagttgctccc

SEQ ID NO: 825430 - DNA, 25 bp, Homo sapien
actggattctaaacccttcagggca

SEQ ID NO: 825431 - DNA, 25 bp, Homo sapien
ttaccattatcctgtgctcacgaga

SEQ ID NO: 825432 - DNA, 25 bp, Homo sapien
tgtatagaacttagagcagcctggg

SEQ ID NO: 825433 - DNA, 25 bp, Homo sapien
gagtcagatgcacacaaggatcttg

SEQ ID NO: 825434 - DNA, 25 bp, Homo sapien
ttccagtctaacttttgcaatggtt

SEQ ID NO: 825435 - DNA, 25 bp, Homo sapien
ccagtctaacttttgcaatggtttc

SEQ ID NO: 825436 - DNA, 25 bp, Homo sapien
tccagtctaacttttgcaatggttt

SEQ ID NO: 825437 - DNA, 25 bp, Homo sapien
tcaagagcccaagacgaggtgtcag

SEQ ID NO: 825438 - DNA, 25 bp, Homo sapien
aggtgtcagaccaacgccagcgggt

SEQ ID NO: 825439 - DNA, 25 bp, Homo sapien
gacaagacttccctacagacacggg

SEQ ID NO: 825440 - DNA, 25 bp, Homo sapien
tctccagctttacgcacgggcttgg

SEQ ID NO: 825441 - DNA, 25 bp, Homo sapien
tgggctgagcaggtgttgctttggg

SEQ ID NO: 825442 - DNA, 25 bp, Homo sapien
tgggggcctttgtgggcacagcaaa

SEQ ID NO: 825443 - DNA, 25 bp, Homo sapien
cctctgggtcttgctaagcagtgga

SEQ ID NO: 825444 - DNA, 25 bp, Homo sapien
taggatccttatccttagggagtaa

SEQ ID NO: 825445 - DNA, 25 bp, Homo sapien
cctgggttgctgacaattactctca

SEQ ID NO: 825446 - DNA, 25 bp, Homo sapien
gagcctgggttgctgacaattactc

SEQ ID NO: 825447 - DNA, 25 bp, Homo sapien
actgctgaggctctccgggagaagt

SEQ ID NO: 825448 - DNA, 25 bp, Homo sapien
tgcccttctagtgctgtttcccctt

SEQ ID NO: 825449 - DNA, 25 bp, Homo sapien
gactgtagaaagtggtgttgacccc

SEQ ID NO: 825450 - DNA, 25 bp, Homo sapien
aagaatatgatgactgtagaaagtg

SEQ ID NO: 825451 - DNA, 25 bp, Homo sapien
gatgactgtagaaagtggtgttgac

SEQ ID NO: 825452 - DNA, 25 bp, Homo sapien
atatgatgactgtagaaagtggtgt

SEQ ID NO: 825453 - DNA, 25 bp, Homo sapien
agaactttcagggaaagaggatgaa

SEQ ID NO: 825454 - DNA, 25 bp, Homo sapien
tcagggaaagaggatgaatctaaac

SEQ ID NO: 825455 - DNA, 25 bp, Homo sapien
ttgaggcctagaactttcagggaaa

SEQ ID NO: 825456 - DNA, 25 bp, Homo sapien
gggaaagaggatgaatctaaactga

SEQ ID NO: 825457 - DNA, 25 bp, Homo sapien
tccattcatctatcaatggacactt

SEQ ID NO: 825458 - DNA, 25 bp, Homo sapien
ttcatctatcaatggacacttaggt

SEQ ID NO: 825459 - DNA, 25 bp, Homo sapien
tttatccattcatctatcaatggac

SEQ ID NO: 825460 - DNA, 25 bp, Homo sapien
tcatctatcaatggacacttaggtt

SEQ ID NO: 825461 - DNA, 25 bp, Homo sapien
gagccgaggaggagggactgcaagt

SEQ ID NO: 825462 - DNA, 25 bp, Homo sapien
tgaggaccctgaaacaccgttgttt

SEQ ID NO: 825463 - DNA, 25 bp, Homo sapien
tgccctttgatgacctgaagatctc

SEQ ID NO: 825464 - DNA, 25 bp, Homo sapien
gctgctgtgtaccgactgaagccag

SEQ ID NO: 825465 - DNA, 25 bp, Homo sapien
tggaagccggagccataactgctgc

SEQ ID NO: 825466 - DNA, 25 bp, Homo sapien
gtcagcctgaaactgccaaccagta

SEQ ID NO: 825467 - DNA, 25 bp, Homo sapien
aaccctgagaggtgtccatcttctt

SEQ ID NO: 825468 - DNA, 25 bp, Homo sapien
tgcagtttgggcccaggctatgtgc

SEQ ID NO: 825469 - DNA, 25 bp, Homo sapien
acccatgttgggtcagcctgaaact

SEQ ID NO: 825470 - DNA, 25 bp, Homo sapien
ccaggcagggtctgggatcctcagg

SEQ ID NO: 825471 - DNA, 25 bp, Homo sapien
gtatcctgggtgaagcctgtttgcc

SEQ ID NO: 825472 - DNA, 25 bp, Homo sapien
gcagcagttatggctccggcttcca

SEQ ID NO: 825473 - DNA, 25 bp, Homo sapien
ggcaaacaggcttcacccaggatac

SEQ ID NO: 825474 - DNA, 25 bp, Homo sapien
agtttcaggctgacccaacatgggt

SEQ ID NO: 825475 - DNA, 25 bp, Homo sapien
tactggttggcagtttcaggctgac

SEQ ID NO: 825476 - DNA, 25 bp, Homo sapien
aagaagatggacacctctcagggtt

SEQ ID NO: 825477 - DNA, 25 bp, Homo sapien
aaacaacggtgtttcagggtcctca

SEQ ID NO: 825478 - DNA, 25 bp, Homo sapien
acttgcagtccctcctcctcggctc

SEQ ID NO: 825479 - DNA, 25 bp, Homo sapien
ctggcttcagtcggtacacagcagc

SEQ ID NO: 825480 - DNA, 25 bp, Homo sapien
cctgaggatcccagaccctgcctgg

SEQ ID NO: 825481 - DNA, 25 bp, Homo sapien
gagatcttcaggtcatcaaagggca

SEQ ID NO: 825482 - DNA, 25 bp, Homo sapien
gcacatagcctgggcccaaactgca

SEQ ID NO: 825483 - DNA, 25 bp, Homo sapien
gactgggtgggcatcgtccccacta

SEQ ID NO: 825484 - DNA, 25 bp, Homo sapien
ccagactgaagatgaggccctttcc

SEQ ID NO: 825485 - DNA, 25 bp, Homo sapien
atcaccaggagtggatccagaccga

SEQ ID NO: 825486 - DNA, 25 bp, Homo sapien
cactaggacaactgctgtcagctgt

SEQ ID NO: 825487 - DNA, 25 bp, Homo sapien
ttgcattccttatatctgttatata

SEQ ID NO: 825488 - DNA, 25 bp, Homo sapien
atatctgttatatatcctttgtgat

SEQ ID NO: 825489 - DNA, 25 bp, Homo sapien
atctgttatatatcctttgtgattt

SEQ ID NO: 825490 - DNA, 25 bp, Homo sapien
ctttgcattccttatatctgttata

SEQ ID NO: 825491 - DNA, 25 bp, Homo sapien
catctcagtgcaggcatctcagcaa

SEQ ID NO: 825492 - DNA, 25 bp, Homo sapien
tcagtgcaggcatctcagcaatttc

SEQ ID NO: 825493 - DNA, 25 bp, Homo sapien
agttcaaccatctcagtgcaggcat

SEQ ID NO: 825494 - DNA, 25 bp, Homo sapien
ttgcaaaatagctgcttcagctcca

SEQ ID NO: 825495 - DNA, 25 bp, Homo sapien
tctgggttctcagtagtcttagata

SEQ ID NO: 825496 - DNA, 25 bp, Homo sapien
ctcagtagtcttagataattgtata

SEQ ID NO: 825497 - DNA, 25 bp, Homo sapien
gtatattaattcgctcctgctgcag

SEQ ID NO: 825498 - DNA, 25 bp, Homo sapien
tatattaattcgctcctgctgcagc

SEQ ID NO: 825499 - DNA, 25 bp, Homo sapien
taactggcagcgaacaatcagttga

SEQ ID NO: 825500 - DNA, 25 bp, Homo sapien
gaacaatcagttgatataacactac

SEQ ID NO: 825501 - DNA, 25 bp, Homo sapien
caatctataactggcagcgaacaat

SEQ ID NO: 825502 - DNA, 25 bp, Homo sapien
cagttgatataacactaccttcaga

SEQ ID NO: 825503 - DNA, 25 bp, Homo sapien
tccttggctagactccatgcactgt

SEQ ID NO: 825504 - DNA, 25 bp, Homo sapien
tggatccttggctagactccatgca

SEQ ID NO: 825505 - DNA, 25 bp, Homo sapien
cttggctagactccatgcactgtcc

SEQ ID NO: 825506 - DNA, 25 bp, Homo sapien
atccttggctagactccatgcactg

SEQ ID NO: 825507 - DNA, 25 bp, Homo sapien
gctgctcccgtgacgttagggaaaa

SEQ ID NO: 825508 - DNA, 25 bp, Homo sapien
ggaaaaggctcgcttcacgctctca

SEQ ID NO: 825509 - DNA, 25 bp, Homo sapien
agtgtgaagcgcctccagccaccgg

SEQ ID NO: 825510 - DNA, 25 bp, Homo sapien
tccagccaccggataccttccctag

SEQ ID NO: 825511 - DNA, 25 bp, Homo sapien
ttaccttggctaaaagtatggagag

SEQ ID NO: 825512 - DNA, 25 bp, Homo sapien
gctccactcgacttccgacatttta

SEQ ID NO: 825513 - DNA, 25 bp, Homo sapien
agagctttgtggaacctcctaccga

SEQ ID NO: 825514 - DNA, 25 bp, Homo sapien
acctcctaccgatgtgggctttgac

SEQ ID NO: 825515 - DNA, 25 bp, Homo sapien
gcagagtcctggaggaatctccgta

SEQ ID NO: 825516 - DNA, 25 bp, Homo sapien
cagagtcctggaggaatctccgtac

SEQ ID NO: 825517 - DNA, 25 bp, Homo sapien
ggcgccgctgtacccgggaatgcgg

SEQ ID NO: 825518 - DNA, 25 bp, Homo sapien
tgggcgccgctgtacccgggaatgc

SEQ ID NO: 825519 - DNA, 25 bp, Homo sapien
gtgggcgccgctgtacccgggaatg

SEQ ID NO: 825520 - DNA, 25 bp, Homo sapien
gggcgccgctgtacccgggaatgcg

SEQ ID NO: 825521 - DNA, 25 bp, Homo sapien
agcagcagcgggacacggagcgaaa

SEQ ID NO: 825522 - DNA, 25 bp, Homo sapien
gagcgaaagagacgcgatctccgcc

SEQ ID NO: 825523 - DNA, 25 bp, Homo sapien
acggactcgccgggcgctcacagga

SEQ ID NO: 825524 - DNA, 25 bp, Homo sapien
ctgcggacggtggacgggacggact

SEQ ID NO: 825525 - DNA, 25 bp, Homo sapien
ggtgttggtgaaagggagtcgaggc

SEQ ID NO: 825526 - DNA, 25 bp, Homo sapien
cggtgttggtgaaagggagtcgagg

SEQ ID NO: 825527 - DNA, 25 bp, Homo sapien
gtgttggtgaaagggagtcgaggcg

SEQ ID NO: 825528 - DNA, 25 bp, Homo sapien
tgttggtgaaagggagtcgaggcga

SEQ ID NO: 825529 - DNA, 25 bp, Homo sapien
aaggcaacgagtggagcggctggcc

SEQ ID NO: 825530 - DNA, 25 bp, Homo sapien
gagatgcaaaggcaacgagtggagc

SEQ ID NO: 825531 - DNA, 25 bp, Homo sapien
gcaacgagtggagcggctggccgga

SEQ ID NO: 825532 - DNA, 25 bp, Homo sapien
tgcaaaggcaacgagtggagcggct

SEQ ID NO: 825533 - DNA, 25 bp, Homo sapien
gatgatgccccgctgcacggtgggg

SEQ ID NO: 825534 - DNA, 25 bp, Homo sapien
tgatgccccgctgcacggtggggac

SEQ ID NO: 825535 - DNA, 25 bp, Homo sapien
atgccccgctgcacggtggggaccg

SEQ ID NO: 825536 - DNA, 25 bp, Homo sapien
cttgatgatgccccgctgcacggtg

SEQ ID NO: 825537 - DNA, 25 bp, Homo sapien
gacccctgatgtcaaggtgtccggg

SEQ ID NO: 825538 - DNA, 25 bp, Homo sapien
ccgtgtctgcttccgtctagtgaga

SEQ ID NO: 825539 - DNA, 25 bp, Homo sapien
gccgcaacctcggaaatcactgtga

SEQ ID NO: 825540 - DNA, 25 bp, Homo sapien
taaacagacaggagatccgaatgcc

SEQ ID NO: 825541 - DNA, 25 bp, Homo sapien
agacacaggtgtcaacatcaccctc

SEQ ID NO: 825542 - DNA, 25 bp, Homo sapien
gtgtcaacatcaccctcgtttttta

SEQ ID NO: 825543 - DNA, 25 bp, Homo sapien
cacaggtgtcaacatcaccctcgtt

SEQ ID NO: 825544 - DNA, 25 bp, Homo sapien
caggtgtcaacatcaccctcgtttt

SEQ ID NO: 825545 - DNA, 25 bp, Homo sapien
tgataattagttttgatcccctgaa

SEQ ID NO: 825546 - DNA, 25 bp, Homo sapien
ctgataattagttttgatcccctga

SEQ ID NO: 825547 - DNA, 25 bp, Homo sapien
aaaaatgagctggtcgtggtgtcga

SEQ ID NO: 825548 - DNA, 25 bp, Homo sapien
tgagtggttagaaatgagttaggta

SEQ ID NO: 825549 - DNA, 25 bp, Homo sapien
acattactgaagtgggtaacaaggg

SEQ ID NO: 825550 - DNA, 25 bp, Homo sapien
ctgtaaaaaggggaccgctggccag

SEQ ID NO: 825551 - DNA, 25 bp, Homo sapien
gctagaaacctcttagtgtctcaaa

SEQ ID NO: 825552 - DNA, 25 bp, Homo sapien
aagtgagacccattactacagaaaa

SEQ ID NO: 825553 - DNA, 25 bp, Homo sapien
aggttttatattcagacaagctaga

SEQ ID NO: 825554 - DNA, 25 bp, Homo sapien
caaggcaagatctctcggggccagg

SEQ ID NO: 825555 - DNA, 25 bp, Homo sapien
caaagaggactggtttaacgggcat

SEQ ID NO: 825556 - DNA, 25 bp, Homo sapien
gcaaagaggactggtttaacgggca

SEQ ID NO: 825557 - DNA, 25 bp, Homo sapien
tgcaaagaggactggtttaacgggc

SEQ ID NO: 825558 - DNA, 25 bp, Homo sapien
tgccctggcttcactagatctgaaa

SEQ ID NO: 825559 - DNA, 25 bp, Homo sapien
gaaagactctcaattccacgcttca

SEQ ID NO: 825560 - DNA, 25 bp, Homo sapien
cagaacactgtttagacaagaccat

SEQ ID NO: 825561 - DNA, 25 bp, Homo sapien
ggttggagggttctgtcaacacaga

SEQ ID NO: 825562 - DNA, 25 bp, Homo sapien
aaatgaatggtccagaggccgtatc

SEQ ID NO: 825563 - DNA, 25 bp, Homo sapien
aatgaatggtccagaggccgtatca

SEQ ID NO: 825564 - DNA, 25 bp, Homo sapien
aatggtccagaggccgtatcaccat

SEQ ID NO: 825565 - DNA, 25 bp, Homo sapien
tgaatggtccagaggccgtatcacc

SEQ ID NO: 825566 - DNA, 25 bp, Homo sapien
aatgttgctgaggttgatctgccgc

SEQ ID NO: 825567 - DNA, 25 bp, Homo sapien
gctgcccggcgagcaagatttccag

SEQ ID NO: 825568 - DNA, 25 bp, Homo sapien
ctttgcatcaggttgtgtggcggct

SEQ ID NO: 825569 - DNA, 25 bp, Homo sapien
gctgacctcggacaatgatggcgca

SEQ ID NO: 825570 - DNA, 25 bp, Homo sapien
tacaagctgcttgtgggcacatcca

SEQ ID NO: 825571 - DNA, 25 bp, Homo sapien
tggcatcagcgacagaagacagtgg

SEQ ID NO: 825572 - DNA, 25 bp, Homo sapien
tattacctaggtccacaggctcacg

SEQ ID NO: 825573 - DNA, 25 bp, Homo sapien
tttcaaatgcttaaggctacccagg

SEQ ID NO: 825574 - DNA, 25 bp, Homo sapien
tgcccaaagagcagaaacttaaggg

SEQ ID NO: 825575 - DNA, 25 bp, Homo sapien
ccaaattggtacacatagcagctgc

SEQ ID NO: 825576 - DNA, 25 bp, Homo sapien
ccttcagaggtgcatggatcccaga

SEQ ID NO: 825577 - DNA, 25 bp, Homo sapien
gaaggttctcaaatcaccattaggc

SEQ ID NO: 825578 - DNA, 25 bp, Homo sapien
aagagagtgctctgggacagaaccc

SEQ ID NO: 825579 - DNA, 25 bp, Homo sapien
tcctctgagggcaagagagtgctct

SEQ ID NO: 825580 - DNA, 25 bp, Homo sapien
tctgggacagaacccttatggaagt

SEQ ID NO: 825581 - DNA, 25 bp, Homo sapien
cccttatggaagtgaggccagtgtt

SEQ ID NO: 825582 - DNA, 25 bp, Homo sapien
ccaatcagcttctttcgaaggaact

SEQ ID NO: 825583 - DNA, 25 bp, Homo sapien
ggtagatcatgccatactctcgccc

SEQ ID NO: 825584 - DNA, 25 bp, Homo sapien
gaaggaactctcgagctggaaatgc

SEQ ID NO: 825585 - DNA, 25 bp, Homo sapien
cttttccaaggtagatcatgccata

SEQ ID NO: 825586 - DNA, 25 bp, Homo sapien
ttaagtaagggcacatggtaggaaa

SEQ ID NO: 825587 - DNA, 25 bp, Homo sapien
tcagaattctaacctacatctatgc

SEQ ID NO: 825588 - DNA, 25 bp, Homo sapien
tactatctctttcaactctctcaat

SEQ ID NO: 825589 - DNA, 25 bp, Homo sapien
tacatctatgcaaccccgacatctg

SEQ ID NO: 825590 - DNA, 25 bp, Homo sapien
tgccttctctccgggtggctaagcc

SEQ ID NO: 825591 - DNA, 25 bp, Homo sapien
tcatgccttctctccgggtggctaa

SEQ ID NO: 825592 - DNA, 25 bp, Homo sapien
catgccttctctccgggtggctaag

SEQ ID NO: 825593 - DNA, 25 bp, Homo sapien
ccttctctccgggtggctaagccct

SEQ ID NO: 825594 - DNA, 25 bp, Homo sapien
gatagtatgtgaaccgttcccctca

SEQ ID NO: 825595 - DNA, 25 bp, Homo sapien
ttcaatggtatacttgagatcccgg

SEQ ID NO: 825596 - DNA, 25 bp, Homo sapien
tgagtccacaaagtgccttgggttt

SEQ ID NO: 825597 - DNA, 25 bp, Homo sapien
cattaacaggcttctggtggtgtga

SEQ ID NO: 825598 - DNA, 25 bp, Homo sapien
aaccaggtagtaatctgggaggagc

SEQ ID NO: 825599 - DNA, 25 bp, Homo sapien
tgccgtcccgcacatgctcgatgat

SEQ ID NO: 825600 - DNA, 25 bp, Homo sapien
tgacagcatgactgtaaccaggtag

SEQ ID NO: 825601 - DNA, 25 bp, Homo sapien
ccgtcccgcacatgctcgatgatag

SEQ ID NO: 825602 - DNA, 25 bp, Homo sapien
aatgttctggttgtggcagctctcc

SEQ ID NO: 825603 - DNA, 25 bp, Homo sapien
gaatgatctgaacatctctctgaag

SEQ ID NO: 825604 - DNA, 25 bp, Homo sapien
tctgcttcccgtcgaaaagttgggc

SEQ ID NO: 825605 - DNA, 25 bp, Homo sapien
tcgcgactcagtgaaaaatttggct

SEQ ID NO: 825606 - DNA, 25 bp, Homo sapien
cacagcgtgcgaaaccttccttcag

SEQ ID NO: 825607 - DNA, 25 bp, Homo sapien
ctcagcttttctgcgccccgggtgt

SEQ ID NO: 825608 - DNA, 25 bp, Homo sapien
cccgggtgtaaactgcaatcgacca

SEQ ID NO: 825609 - DNA, 25 bp, Homo sapien
tgcaatcgaccagtccacacagcgt

SEQ ID NO: 825610 - DNA, 25 bp, Homo sapien
cttggcaacaaactgcttgtccttt

SEQ ID NO: 825611 - DNA, 25 bp, Homo sapien
ggtccaaattagctgtgggagccac

SEQ ID NO: 825612 - DNA, 25 bp, Homo sapien
tctcagcctgcgctctttggcaaac

SEQ ID NO: 825613 - DNA, 25 bp, Homo sapien
catattctcagcctgcgctctttgg

SEQ ID NO: 825614 - DNA, 25 bp, Homo sapien
tatgcagtgctttagttaactcccc

SEQ ID NO: 825615 - DNA, 25 bp, Homo sapien
gcaggccacgcagtttctatcacaa

SEQ ID NO: 825616 - DNA, 25 bp, Homo sapien
cagatcatgcaaaaacaagtgccca

SEQ ID NO: 825617 - DNA, 25 bp, Homo sapien
taagcggacgtgtacccaaacagtc

SEQ ID NO: 825618 - DNA, 25 bp, Homo sapien
caagccacgtgctcaggggaccata

SEQ ID NO: 825619 - DNA, 25 bp, Homo sapien
aggtctgtgaaatctgcaatgccca

SEQ ID NO: 825620 - DNA, 25 bp, Homo sapien
aacaatgttattcaggtctgtgaaa

SEQ ID NO: 825621 - DNA, 25 bp, Homo sapien
tgcaatgcccaaggatccagcagca

SEQ ID NO: 825622 - DNA, 25 bp, Homo sapien
tcggatgctggacaggtgaatcgtc

SEQ ID NO: 825623 - DNA, 25 bp, Homo sapien
ttgtaatcgcctgagttcagcttca

SEQ ID NO: 825624 - DNA, 25 bp, Homo sapien
ctccagcctcggtggtcggatgctg

SEQ ID NO: 825625 - DNA, 25 bp, Homo sapien
gtgaatcgtcttgtaatcgcctgag

SEQ ID NO: 825626 - DNA, 25 bp, Homo sapien
tgtttgctgcattaaactgcctcct

SEQ ID NO: 825627 - DNA, 25 bp, Homo sapien
ttgtggactactcccaatactgata

SEQ ID NO: 825628 - DNA, 25 bp, Homo sapien
tgtacggcacagatgcagaattgtg

SEQ ID NO: 825629 - DNA, 25 bp, Homo sapien
caatactgataaaattggagatgtg

SEQ ID NO: 825630 - DNA, 25 bp, Homo sapien
taattccaactgtacggcacagatg

SEQ ID NO: 825631 - DNA, 25 bp, Homo sapien
acttatttcttacgtggcccttcag

SEQ ID NO: 825632 - DNA, 25 bp, Homo sapien
taacaaatagagctcacatgtgtgg

SEQ ID NO: 825633 - DNA, 25 bp, Homo sapien
gaggtaacacgccttgtaagagaca

SEQ ID NO: 825634 - DNA, 25 bp, Homo sapien
gacagcgctggcctagagagccatt

SEQ ID NO: 825635 - DNA, 25 bp, Homo sapien
cactttttatctagctaattcctaa

SEQ ID NO: 825636 - DNA, 25 bp, Homo sapien
cacaggtgtcataccactcatgcac

SEQ ID NO: 825637 - DNA, 25 bp, Homo sapien
acaggacatgtttgatctggccttg

SEQ ID NO: 825638 - DNA, 25 bp, Homo sapien
tggccttgcctgtggtttcgtacca

SEQ ID NO: 825639 - DNA, 25 bp, Homo sapien
ccttcaacaagtggtccctgtctaa

SEQ ID NO: 825640 - DNA, 25 bp, Homo sapien
caacaagtggtccctgtctaactcc

SEQ ID NO: 825641 - DNA, 25 bp, Homo sapien
ttcaacaagtggtccctgtctaact

SEQ ID NO: 825642 - DNA, 25 bp, Homo sapien
gccttcaacaagtggtccctgtcta

SEQ ID NO: 825643 - DNA, 25 bp, Homo sapien
tctggtaactttaacataagcatac

SEQ ID NO: 825644 - DNA, 25 bp, Homo sapien
aagcatacagcaggatcttgtattc

SEQ ID NO: 825645 - DNA, 25 bp, Homo sapien
taaatctctggtaactttaacataa

SEQ ID NO: 825646 - DNA, 25 bp, Homo sapien
ataagcatacagcaggatcttgtat

SEQ ID NO: 825647 - DNA, 25 bp, Homo sapien
aaaccctgatacatggccaggttca

SEQ ID NO: 825648 - DNA, 25 bp, Homo sapien
cacacgtcagctttcttaactggct

SEQ ID NO: 825649 - DNA, 25 bp, Homo sapien
tggccaggttcacaagagcatcaca

SEQ ID NO: 825650 - DNA, 25 bp, Homo sapien
ggttcacaagagcatcacacgtcag

SEQ ID NO: 825651 - DNA, 25 bp, Homo sapien
tagataccagcacattggctcaagt

SEQ ID NO: 825652 - DNA, 25 bp, Homo sapien
tccctccggagatagttagatacca

SEQ ID NO: 825653 - DNA, 25 bp, Homo sapien
ggtctaagcctcagcagatattctg

SEQ ID NO: 825654 - DNA, 25 bp, Homo sapien
tcaagtcaagatggctgtcagagca

SEQ ID NO: 825655 - DNA, 25 bp, Homo sapien
agtcccgcgttcccagtagtgatga

SEQ ID NO: 825656 - DNA, 25 bp, Homo sapien
aagtcccgcgttcccagtagtgatg

SEQ ID NO: 825657 - DNA, 25 bp, Homo sapien
aaagtcccgcgttcccagtagtgat

SEQ ID NO: 825658 - DNA, 25 bp, Homo sapien
ctgctaaaggcagctccatacgaat

SEQ ID NO: 825659 - DNA, 25 bp, Homo sapien
gttctaaaacaagcctctccagctg

SEQ ID NO: 825660 - DNA, 25 bp, Homo sapien
tacgaatatgaatgtggctttctcc

SEQ ID NO: 825661 - DNA, 25 bp, Homo sapien
gcttccgcatgccagtcgttctaaa

SEQ ID NO: 825662 - DNA, 25 bp, Homo sapien
tcccacaggagcacactccactgta

SEQ ID NO: 825663 - DNA, 25 bp, Homo sapien
cacaggagcacactccactgtattc

SEQ ID NO: 825664 - DNA, 25 bp, Homo sapien
aggcaaagagacagcgtgttcccac

SEQ ID NO: 825665 - DNA, 25 bp, Homo sapien
aaagagacagcgtgttcccacagga

SEQ ID NO: 825666 - DNA, 25 bp, Homo sapien
aatgtgcttggccaaaagggccgaa

SEQ ID NO: 825667 - DNA, 25 bp, Homo sapien
caggtggaggaagacaatgtgcttg

SEQ ID NO: 825668 - DNA, 25 bp, Homo sapien
gaaatgctggcaagtcaaaacgcaa

SEQ ID NO: 825669 - DNA, 25 bp, Homo sapien
caaaacttttgagaaccatcaggtg

SEQ ID NO: 825670 - DNA, 25 bp, Homo sapien
gcagcatccaaagcatagcacagag

SEQ ID NO: 825671 - DNA, 25 bp, Homo sapien
gacaagggcatataagaacagcaac

SEQ ID NO: 825672 - DNA, 25 bp, Homo sapien
tttttgaacaacacaagacaagggc

SEQ ID NO: 825673 - DNA, 25 bp, Homo sapien
agcatccaaagcatagcacagagga

SEQ ID NO: 825674 - DNA, 25 bp, Homo sapien
tatattaatcctgaccaacaccaag

SEQ ID NO: 825675 - DNA, 25 bp, Homo sapien
ccttatattaatcctgaccaacacc

SEQ ID NO: 825676 - DNA, 25 bp, Homo sapien
taatcctgaccaacaccaagacagt

SEQ ID NO: 825677 - DNA, 25 bp, Homo sapien
cactcccttatattaatcctgacca

SEQ ID NO: 825678 - DNA, 25 bp, Homo sapien
ggaagaagtccactcaatactaagg

SEQ ID NO: 825679 - DNA, 25 bp, Homo sapien
gtcaacaaaatagtgcatgcccagc

SEQ ID NO: 825680 - DNA, 25 bp, Homo sapien
ttgtcattattctcccaaggacggg

SEQ ID NO: 825681 - DNA, 25 bp, Homo sapien
ctgggccaggcacatactcagggtc

SEQ ID NO: 825682 - DNA, 25 bp, Homo sapien
ttttatcacaatagggggcaattta

SEQ ID NO: 825683 - DNA, 25 bp, Homo sapien
tgtaattgtgcaaatactcacaagt

SEQ ID NO: 825684 - DNA, 25 bp, Homo sapien
gtaatgtaattgtgcaaatactcac

SEQ ID NO: 825685 - DNA, 25 bp, Homo sapien
aattgtgcaaatactcacaagtgca

SEQ ID NO: 825686 - DNA, 25 bp, Homo sapien
cagcaggatgcctgtggcgtttcca

SEQ ID NO: 825687 - DNA, 25 bp, Homo sapien
agcaggatgcctgtggcgtttccat

SEQ ID NO: 825688 - DNA, 25 bp, Homo sapien
tgattccgatccagaacccaaaggg

SEQ ID NO: 825689 - DNA, 25 bp, Homo sapien
ttctgaaaggacagtaccttgtaca

SEQ ID NO: 825690 - DNA, 25 bp, Homo sapien
atctgattccgatccagaacccaaa

SEQ ID NO: 825691 - DNA, 25 bp, Homo sapien
cgtgttctgaaaggacagtaccttg

SEQ ID NO: 825692 - DNA, 25 bp, Homo sapien
caattccgatccagacaatcagact

SEQ ID NO: 825693 - DNA, 25 bp, Homo sapien
tcagattaatgatgcaattccgatc

SEQ ID NO: 825694 - DNA, 25 bp, Homo sapien
ttcatgactaccaattcagacacac

SEQ ID NO: 825695 - DNA, 25 bp, Homo sapien
taatgatgcaattccgatccagaca

SEQ ID NO: 825696 - DNA, 25 bp, Homo sapien
tgcagaccagtccatgctatttgga

SEQ ID NO: 825697 - DNA, 25 bp, Homo sapien
gccaattgcccatgactaggccagt

SEQ ID NO: 825698 - DNA, 25 bp, Homo sapien
tcatcctcactaagagctccggctg

SEQ ID NO: 825699 - DNA, 25 bp, Homo sapien
taatgctcccgcgagcagtcagctg

SEQ ID NO: 825700 - DNA, 25 bp, Homo sapien
ggttgatactttctcagctaactga

SEQ ID NO: 825701 - DNA, 25 bp, Homo sapien
taggtggcctagaaaaccatatgga

SEQ ID NO: 825702 - DNA, 25 bp, Homo sapien
taccccaatatacttgaagacatgc

SEQ ID NO: 825703 - DNA, 25 bp, Homo sapien
aatgataaccacagacagcttttga

SEQ ID NO: 825704 - DNA, 25 bp, Homo sapien
tgagagcctcgggtatttccaagca

SEQ ID NO: 825705 - DNA, 25 bp, Homo sapien
tacagtgggtcctaatctggtgctc

SEQ ID NO: 825706 - DNA, 25 bp, Homo sapien
gaccaagggacaacaagaggcactt

SEQ ID NO: 825707 - DNA, 25 bp, Homo sapien
taaaatcaagctcggtgtggccatg

SEQ ID NO: 825708 - DNA, 25 bp, Homo sapien
gatcacctgctgtcaattatcaata

SEQ ID NO: 825709 - DNA, 25 bp, Homo sapien
agtgcaaagaactcgagtagctagg

SEQ ID NO: 825710 - DNA, 25 bp, Homo sapien
tatgcttgattttatgagacaggtc

SEQ ID NO: 825711 - DNA, 25 bp, Homo sapien
tgcctggccctacgcttttctagaa

SEQ ID NO: 825712 - DNA, 25 bp, Homo sapien
gaactattaaatagtaaccagtaca

SEQ ID NO: 825713 - DNA, 25 bp, Homo sapien
atagtaaccagtacaagggtccaca

SEQ ID NO: 825714 - DNA, 25 bp, Homo sapien
ctattaaatagtaaccagtacaagg

SEQ ID NO: 825715 - DNA, 25 bp, Homo sapien
tagtaaccagtacaagggtccacac

SEQ ID NO: 825716 - DNA, 25 bp, Homo sapien
gcatctggttggaaatctcaccaca

SEQ ID NO: 825717 - DNA, 25 bp, Homo sapien
ggttggaaatctcaccacactgtga

SEQ ID NO: 825718 - DNA, 25 bp, Homo sapien
ggaaatctcaccacactgtgaacca

SEQ ID NO: 825719 - DNA, 25 bp, Homo sapien
catgcaagcatctggttggaaatct

SEQ ID NO: 825720 - DNA, 25 bp, Homo sapien
gccaacgagatatcagtgtactcat

SEQ ID NO: 825721 - DNA, 25 bp, Homo sapien
acatgctttagccaacgagatatca

SEQ ID NO: 825722 - DNA, 25 bp, Homo sapien
tgacagctgtttgatgcttccatgc

SEQ ID NO: 825723 - DNA, 25 bp, Homo sapien
gaaaagatgctacacagtgacagct

SEQ ID NO: 825724 - DNA, 25 bp, Homo sapien
tctcttacacgaaaatactgagtcc

SEQ ID NO: 825725 - DNA, 25 bp, Homo sapien
gacaacacgattagcaagaaccatt

SEQ ID NO: 825726 - DNA, 25 bp, Homo sapien
ctgagtccagatgtcatcctggtgc

SEQ ID NO: 825727 - DNA, 25 bp, Homo sapien
tagctctgtttgatgtatgatcctg

SEQ ID NO: 825728 - DNA, 25 bp, Homo sapien
gctgctgtagtctgttaacacaata

SEQ ID NO: 825729 - DNA, 25 bp, Homo sapien
gcttatcactgtctactgaccagta

SEQ ID NO: 825730 - DNA, 25 bp, Homo sapien
tgctgtagcacaaagctgctgtagt

SEQ ID NO: 825731 - DNA, 25 bp, Homo sapien
ctatgacatcaaacgaatctgctgt

SEQ ID NO: 825732 - DNA, 25 bp, Homo sapien
ctcccttaagtgtttcattgtggct

SEQ ID NO: 825733 - DNA, 25 bp, Homo sapien
ttctcaatctttctgacaaccctat

SEQ ID NO: 825734 - DNA, 25 bp, Homo sapien
aagtgtttcattgtggcttgtgtag

SEQ ID NO: 825735 - DNA, 25 bp, Homo sapien
tgacaaccctatttgatcctgctga

SEQ ID NO: 825736 - DNA, 25 bp, Homo sapien
tagagatggaagaggtaacgtcagt

SEQ ID NO: 825737 - DNA, 25 bp, Homo sapien
attagagatggaagaggtaacgtca

SEQ ID NO: 825738 - DNA, 25 bp, Homo sapien
gagatggaagaggtaacgtcagtca

SEQ ID NO: 825739 - DNA, 25 bp, Homo sapien
agatggaagaggtaacgtcagtcat

SEQ ID NO: 825740 - DNA, 25 bp, Homo sapien
tacaggggacgcagtttcttgttct

SEQ ID NO: 825741 - DNA, 25 bp, Homo sapien
ttcccgggcctcaaacatgtaagga

SEQ ID NO: 825742 - DNA, 25 bp, Homo sapien
aattcccgggcctcaaacatgtaag

SEQ ID NO: 825743 - DNA, 25 bp, Homo sapien
tgtcatacaggggacgcagtttctt

SEQ ID NO: 825744 - DNA, 25 bp, Homo sapien
ctagtaaattccatagccctggaca

SEQ ID NO: 825745 - DNA, 25 bp, Homo sapien
tccatagccctggacatttaatgaa

SEQ ID NO: 825746 - DNA, 25 bp, Homo sapien
catagccctggacatttaatgaagg

SEQ ID NO: 825747 - DNA, 25 bp, Homo sapien
gtaaattccatagccctggacattt

SEQ ID NO: 825748 - DNA, 25 bp, Homo sapien
gggttgccaacctagctcacagaag

SEQ ID NO: 825749 - DNA, 25 bp, Homo sapien
tcttgtggcaaaaccagtaggaagg

SEQ ID NO: 825750 - DNA, 25 bp, Homo sapien
gatacgaggaggtagtctaacaccc

SEQ ID NO: 825751 - DNA, 25 bp, Homo sapien
gatataagcaaggtaggcgccgtgc

SEQ ID NO: 825752 - DNA, 25 bp, Homo sapien
caatgtcaagcacagtcttaggaac

SEQ ID NO: 825753 - DNA, 25 bp, Homo sapien
ggatctcgacgtcattgtcaatgtc

SEQ ID NO: 825754 - DNA, 25 bp, Homo sapien
gatctattgaggatctcgacgtcat

SEQ ID NO: 825755 - DNA, 25 bp, Homo sapien
tctgtaaagatctattgaggatctc

SEQ ID NO: 825756 - DNA, 25 bp, Homo sapien
atcttccatatgacaaagcagagga

SEQ ID NO: 825757 - DNA, 25 bp, Homo sapien
agagctatatgacaggccttctcca

SEQ ID NO: 825758 - DNA, 25 bp, Homo sapien
tatataacagtatgaggaaatttaa

SEQ ID NO: 825759 - DNA, 25 bp, Homo sapien
cttctccatatccaaatcttccata

SEQ ID NO: 825760 - DNA, 25 bp, Homo sapien
aaaaaggtccatcatacaacgcaca

SEQ ID NO: 825761 - DNA, 25 bp, Homo sapien
aaattctactaggacaggctctgag

SEQ ID NO: 825762 - DNA, 25 bp, Homo sapien
cagagtggagcaaggcactgacgta

SEQ ID NO: 825763 - DNA, 25 bp, Homo sapien
gcagcaacctgccaggcaaaaaggt

SEQ ID NO: 825764 - DNA, 25 bp, Homo sapien
tcagtgtctcaagggatggtccaaa

SEQ ID NO: 825765 - DNA, 25 bp, Homo sapien
gacaaacacaaactaagctatcaga

SEQ ID NO: 825766 - DNA, 25 bp, Homo sapien
gctccagatgaagagtacagccact

SEQ ID NO: 825767 - DNA, 25 bp, Homo sapien
gagaatcagttgagagcagtcagtg

SEQ ID NO: 825768 - DNA, 25 bp, Homo sapien
caatgctgtgcaacatcatgcttat

SEQ ID NO: 825769 - DNA, 25 bp, Homo sapien
cggtgtacttttgagactgcagcta

SEQ ID NO: 825770 - DNA, 25 bp, Homo sapien
cattttaaggtgtaccagttcagtg

SEQ ID NO: 825771 - DNA, 25 bp, Homo sapien
ggaaaccatcaaccacctatagatc

SEQ ID NO: 825772 - DNA, 25 bp, Homo sapien
aaggattatgcagggcaggctaaac

SEQ ID NO: 825773 - DNA, 25 bp, Homo sapien
caaccagtaaggattatgcagggca

SEQ ID NO: 825774 - DNA, 25 bp, Homo sapien
catcacaatagttcccacactgagg

SEQ ID NO: 825775 - DNA, 25 bp, Homo sapien
tgaggccacggtcactgctcagtaa

SEQ ID NO: 825776 - DNA, 25 bp, Homo sapien
aatgaacaatggtaaatatgatgta

SEQ ID NO: 825777 - DNA, 25 bp, Homo sapien
gctacacattctgctatggaaagat

SEQ ID NO: 825778 - DNA, 25 bp, Homo sapien
acattctgctatggaaagatgtcca

SEQ ID NO: 825779 - DNA, 25 bp, Homo sapien
ggagctacacattctgctatggaaa

SEQ ID NO: 825780 - DNA, 25 bp, Homo sapien
tactgaaaagacgacaccatttggc

SEQ ID NO: 825781 - DNA, 25 bp, Homo sapien
cctaatactgaaaagacgacaccat

SEQ ID NO: 825782 - DNA, 25 bp, Homo sapien
tgaaaagacgacaccatttggcctg

SEQ ID NO: 825783 - DNA, 25 bp, Homo sapien
aaagacgacaccatttggcctgagt

SEQ ID NO: 825784 - DNA, 25 bp, Homo sapien
gctggtctaatgtagtccaccgtca

SEQ ID NO: 825785 - DNA, 25 bp, Homo sapien
ggtctaatgtagtccaccgtcacat

SEQ ID NO: 825786 - DNA, 25 bp, Homo sapien
ctggctggtctaatgtagtccaccg

SEQ ID NO: 825787 - DNA, 25 bp, Homo sapien
taatgtagtccaccgtcacattgac

SEQ ID NO: 825788 - DNA, 25 bp, Homo sapien
tcagcatagggtactggcagatgcc

SEQ ID NO: 825789 - DNA, 25 bp, Homo sapien
gaacagagtgcacttttcagaggct

SEQ ID NO: 825790 - DNA, 25 bp, Homo sapien
ccactaggtgctgtgaaggcctaaa

SEQ ID NO: 825791 - DNA, 25 bp, Homo sapien
gaagctgaagcctatgtcacaccag

SEQ ID NO: 825792 - DNA, 25 bp, Homo sapien
catagacgactaaatcataagaaga

SEQ ID NO: 825793 - DNA, 25 bp, Homo sapien
gctaattacatagacgactaaatca

SEQ ID NO: 825794 - DNA, 25 bp, Homo sapien
gacgactaaatcataagaagagtta

SEQ ID NO: 825795 - DNA, 25 bp, Homo sapien
tcactgcagctaattacatagacga

SEQ ID NO: 825796 - DNA, 25 bp, Homo sapien
gactatgattaaagcgtaagtcatc

SEQ ID NO: 825797 - DNA, 25 bp, Homo sapien
tatgattaaagcgtaagtcatcaat

SEQ ID NO: 825798 - DNA, 25 bp, Homo sapien
cattgactatgattaaagcgtaagt

SEQ ID NO: 825799 - DNA, 25 bp, Homo sapien
tttcattgactatgattaaagcgta

SEQ ID NO: 825800 - DNA, 25 bp, Homo sapien
gctgataaagatatcgtgttcacct

SEQ ID NO: 825801 - DNA, 25 bp, Homo sapien
gataaagatatcgtgttcacctctt

SEQ ID NO: 825802 - DNA, 25 bp, Homo sapien
ctgagctgataaagatatcgtgttc

SEQ ID NO: 825803 - DNA, 25 bp, Homo sapien
gagctgataaagatatcgtgttcac

SEQ ID NO: 825804 - DNA, 25 bp, Homo sapien
gaaggacagaggtcctgtaacttag

SEQ ID NO: 825805 - DNA, 25 bp, Homo sapien
tatagatagaaggacagaggtcctg

SEQ ID NO: 825806 - DNA, 25 bp, Homo sapien
tctttatagatagaaggacagaggt

SEQ ID NO: 825807 - DNA, 25 bp, Homo sapien
aatcttgatcttcctaaacgaactt

SEQ ID NO: 825808 - DNA, 25 bp, Homo sapien
ttccaaacactgtcagctgaatctt

SEQ ID NO: 825809 - DNA, 25 bp, Homo sapien
ggtgatgctgaccaattccaaacac

SEQ ID NO: 825810 - DNA, 25 bp, Homo sapien
ggtctcctggtgatgctgaccaatt

SEQ ID NO: 825811 - DNA, 25 bp, Homo sapien
gaccaattccaaacactgtcagctg

SEQ ID NO: 825812 - DNA, 25 bp, Homo sapien
gacttgtctgaatctctctaaatgg

SEQ ID NO: 825813 - DNA, 25 bp, Homo sapien
cagccctatctggaggaccatcata

SEQ ID NO: 825814 - DNA, 25 bp, Homo sapien
catgcggtaatgtccccaaagtgac

SEQ ID NO: 825815 - DNA, 25 bp, Homo sapien
ggtccactcactgctaaatatgcca

SEQ ID NO: 825816 - DNA, 25 bp, Homo sapien
taaacaacattggtagaaatgctgc

SEQ ID NO: 825817 - DNA, 25 bp, Homo sapien
tttaagaactcaaaaggatgcatgg

SEQ ID NO: 825818 - DNA, 25 bp, Homo sapien
aaatacacccttgaatccctacagc

SEQ ID NO: 825819 - DNA, 25 bp, Homo sapien
taagcagcttacatttgagccctga

SEQ ID NO: 825820 - DNA, 25 bp, Homo sapien
ctcttgtatgggtatggaacatatt

SEQ ID NO: 825821 - DNA, 25 bp, Homo sapien
tctcttgtatgggtatggaacatat

SEQ ID NO: 825822 - DNA, 25 bp, Homo sapien
tcttgtatgggtatggaacatattt

SEQ ID NO: 825823 - DNA, 25 bp, Homo sapien
gttctcttgtatgggtatggaacat

SEQ ID NO: 825824 - DNA, 25 bp, Homo sapien
ggcaacagcctcaaatcagcagatg

SEQ ID NO: 825825 - DNA, 25 bp, Homo sapien
tcctgagtcaccacataagcgtgct

SEQ ID NO: 825826 - DNA, 25 bp, Homo sapien
gatgttgatacatggtgaggattta

SEQ ID NO: 825827 - DNA, 25 bp, Homo sapien
tgctggcaaatgctgtcattatcac

SEQ ID NO: 825828 - DNA, 25 bp, Homo sapien
cacacttgggaatgagagatgccac

SEQ ID NO: 825829 - DNA, 25 bp, Homo sapien
tgggagctgaaccaaccagtatctg

SEQ ID NO: 825830 - DNA, 25 bp, Homo sapien
tggtaagcaataggctaccgtgcca

SEQ ID NO: 825831 - DNA, 25 bp, Homo sapien
tgtggcctgcatctactagctagag

SEQ ID NO: 825832 - DNA, 25 bp, Homo sapien
tgcagcaagcagttcatcgtagtgt

SEQ ID NO: 825833 - DNA, 25 bp, Homo sapien
tcatcctgccggtatctgatcactg

SEQ ID NO: 825834 - DNA, 25 bp, Homo sapien
tgatcactgtggctagacctttgct

SEQ ID NO: 825835 - DNA, 25 bp, Homo sapien
catcgtagtgtgatgatctctggtc

SEQ ID NO: 825836 - DNA, 25 bp, Homo sapien
gttttctttcctttgtacatgacaa

SEQ ID NO: 825837 - DNA, 25 bp, Homo sapien
tctttcctttgtacatgacaaaagg

SEQ ID NO: 825838 - DNA, 25 bp, Homo sapien
ctttcctttgtacatgacaaaaggt

SEQ ID NO: 825839 - DNA, 25 bp, Homo sapien
tttctttcctttgtacatgacaaaa

SEQ ID NO: 825840 - DNA, 25 bp, Homo sapien
gtcagaattaacatattcactggtg

SEQ ID NO: 825841 - DNA, 25 bp, Homo sapien
aacatattcactggtggcagtgtga

SEQ ID NO: 825842 - DNA, 25 bp, Homo sapien
attaacatattcactggtggcagtg

SEQ ID NO: 825843 - DNA, 25 bp, Homo sapien
gaattaacatattcactggtggcag

SEQ ID NO: 825844 - DNA, 25 bp, Homo sapien
aagtactaatggccaagcagtgcac

SEQ ID NO: 825845 - DNA, 25 bp, Homo sapien
tactaatggccaagcagtgcactgg

SEQ ID NO: 825846 - DNA, 25 bp, Homo sapien
accactgccgatatcaccagcaata

SEQ ID NO: 825847 - DNA, 25 bp, Homo sapien
actctgcaccactgccgatatcacc

SEQ ID NO: 825848 - DNA, 25 bp, Homo sapien
ggcaccgaactaccgcttcctatga

SEQ ID NO: 825849 - DNA, 25 bp, Homo sapien
gcagtcgtaaggcaccgaactaccg

SEQ ID NO: 825850 - DNA, 25 bp, Homo sapien
cgaactaccgcttcctatgatgctt

SEQ ID NO: 825851 - DNA, 25 bp, Homo sapien
aagagggcagtcgtaaggcaccgaa

SEQ ID NO: 825852 - DNA, 25 bp, Homo sapien
gtctcctcctctgtgctggctttca

SEQ ID NO: 825853 - DNA, 25 bp, Homo sapien
ttaagagaaaggccagtctcctcct

SEQ ID NO: 825854 - DNA, 25 bp, Homo sapien
aagagaaaggccagtctcctcctct

SEQ ID NO: 825855 - DNA, 25 bp, Homo sapien
ctcctcctctgtgctggctttcaac

SEQ ID NO: 825856 - DNA, 25 bp, Homo sapien
agagcaatgggaagtaattcttctc

SEQ ID NO: 825857 - DNA, 25 bp, Homo sapien
gagcaatgggaagtaattcttctca

SEQ ID NO: 825858 - DNA, 25 bp, Homo sapien
gaaaaaattcattgccatagcccag

SEQ ID NO: 825859 - DNA, 25 bp, Homo sapien
tagcccagagatttggctctctggc

SEQ ID NO: 825860 - DNA, 25 bp, Homo sapien
tagtagcacactagacccaggctgc

SEQ ID NO: 825861 - DNA, 25 bp, Homo sapien
tgcaggaacgatgctgagtgagcca

SEQ ID NO: 825862 - DNA, 25 bp, Homo sapien
gcttgtcacaagtctgatgccacag

SEQ ID NO: 825863 - DNA, 25 bp, Homo sapien
gattctccacgaaagagtatctggg

SEQ ID NO: 825864 - DNA, 25 bp, Homo sapien
caagaatcacaatgggaaggggtag

SEQ ID NO: 825865 - DNA, 25 bp, Homo sapien
agagagaagcgagggttgttaaagt

SEQ ID NO: 825866 - DNA, 25 bp, Homo sapien
atgaagagagaagcgagggttgtta

SEQ ID NO: 825867 - DNA, 25 bp, Homo sapien
gaagagagaagcgagggttgttaaa

SEQ ID NO: 825868 - DNA, 25 bp, Homo sapien
gcaacacggtggataggcacttcct

SEQ ID NO: 825869 - DNA, 25 bp, Homo sapien
gataggcacttccttcttgctatgc

SEQ ID NO: 825870 - DNA, 25 bp, Homo sapien
tcttgctatgcaatcctttgccatt

SEQ ID NO: 825871 - DNA, 25 bp, Homo sapien
cccagatatatctgcaacacggtgg

SEQ ID NO: 825872 - DNA, 25 bp, Homo sapien
ttccagataataaaacaggctccct

SEQ ID NO: 825873 - DNA, 25 bp, Homo sapien
tagatacctaagtagatgccccggg

SEQ ID NO: 825874 - DNA, 25 bp, Homo sapien
cagcttgattcagggactcgactca

SEQ ID NO: 825875 - DNA, 25 bp, Homo sapien
aaatatgcagacacgctcttgagcc

SEQ ID NO: 825876 - DNA, 25 bp, Homo sapien
gtggctgccactttggcatcagagg

SEQ ID NO: 825877 - DNA, 25 bp, Homo sapien
cactttggcatcagaggttgtgtgc

SEQ ID NO: 825878 - DNA, 25 bp, Homo sapien
tgccactttggcatcagaggttgtg

SEQ ID NO: 825879 - DNA, 25 bp, Homo sapien
gcatcagaggttgtgtgccacagag

SEQ ID NO: 825880 - DNA, 25 bp, Homo sapien
tattgcccactatatatgtggtttt

SEQ ID NO: 825881 - DNA, 25 bp, Homo sapien
tttcaataaggtaaagtcttgactc

SEQ ID NO: 825882 - DNA, 25 bp, Homo sapien
gaacagatatagataagttactagg

SEQ ID NO: 825883 - DNA, 25 bp, Homo sapien
cattttaaccccactaattaatgag

SEQ ID NO: 825884 - DNA, 25 bp, Homo sapien
tccaaattcgatactgtattaggaa

SEQ ID NO: 825885 - DNA, 25 bp, Homo sapien
cttccaaattcgatactgtattagg

SEQ ID NO: 825886 - DNA, 25 bp, Homo sapien
ccttccaaattcgatactgtattag

SEQ ID NO: 825887 - DNA, 25 bp, Homo sapien
ttccaaattcgatactgtattagga

SEQ ID NO: 825888 - DNA, 25 bp, Homo sapien
tgttagtaaaggctaaatggctaaa

SEQ ID NO: 825889 - DNA, 25 bp, Homo sapien
taaatgttagtaaaggctaaatggc

SEQ ID NO: 825890 - DNA, 25 bp, Homo sapien
tcctaaaagtactttgaacattcat

SEQ ID NO: 825891 - DNA, 25 bp, Homo sapien
tagtaaaggctaaatggctaaaaca

SEQ ID NO: 825892 - DNA, 25 bp, Homo sapien
tgagacatgagaccgggctaaaaac

SEQ ID NO: 825893 - DNA, 25 bp, Homo sapien
tgagaggcagctatcaaggcagtgc

SEQ ID NO: 825894 - DNA, 25 bp, Homo sapien
ggtggcttgctaggattccccttga

SEQ ID NO: 825895 - DNA, 25 bp, Homo sapien
aatgatagccctccagttagagagc

SEQ ID NO: 825896 - DNA, 25 bp, Homo sapien
ttggtgcatcaacacaaagtctgtg

SEQ ID NO: 825897 - DNA, 25 bp, Homo sapien
tcacatagatgcgaagggccttcaa

SEQ ID NO: 825898 - DNA, 25 bp, Homo sapien
cttcaaatcctttcagtctctcaag

SEQ ID NO: 825899 - DNA, 25 bp, Homo sapien
ggacatttcgactctcagaactcag

SEQ ID NO: 825900 - DNA, 25 bp, Homo sapien
caaatagagtttgagacgagaacca

SEQ ID NO: 825901 - DNA, 25 bp, Homo sapien
tgaagacgtattccaccacagcttc

SEQ ID NO: 825902 - DNA, 25 bp, Homo sapien
gaaccactgaagacgtattccacca

SEQ ID NO: 825903 - DNA, 25 bp, Homo sapien
tcagaacgacctgcccgctgaagaa

SEQ ID NO: 825904 - DNA, 25 bp, Homo sapien
caggaggatccaatctagaaactgt

SEQ ID NO: 825905 - DNA, 25 bp, Homo sapien
gtgtttgcatatcccaaccagagag

SEQ ID NO: 825906 - DNA, 25 bp, Homo sapien
tataagggctgcgtgcttgcaagtt

SEQ ID NO: 825907 - DNA, 25 bp, Homo sapien
catcctgtgcttggtagaaatgagg

SEQ ID NO: 825908 - DNA, 25 bp, Homo sapien
gcagcatgaccctgatacctaagat

SEQ ID NO: 825909 - DNA, 25 bp, Homo sapien
ctgctatgctcatccaacagggcca

SEQ ID NO: 825910 - DNA, 25 bp, Homo sapien
tggtaatcaatggggatccaccatt

SEQ ID NO: 825911 - DNA, 25 bp, Homo sapien
tgctccacgagacctttgctcctgg

SEQ ID NO: 825912 - DNA, 25 bp, Homo sapien
taccatctggcaagagcaacggctg

SEQ ID NO: 825913 - DNA, 25 bp, Homo sapien
gaaccaaaattagagctcacagagg

SEQ ID NO: 825914 - DNA, 25 bp, Homo sapien
cacaatgaggcaagcctaggaaggc

SEQ ID NO: 825915 - DNA, 25 bp, Homo sapien
gcatcaaatgcaactcttcgtgtct

SEQ ID NO: 825916 - DNA, 25 bp, Homo sapien
gcaatgagactccttaaagggatca

SEQ ID NO: 825917 - DNA, 25 bp, Homo sapien
tatcatctgtacttggattatcagc

SEQ ID NO: 825918 - DNA, 25 bp, Homo sapien
taatatgccatgtgcagcaatgaga

SEQ ID NO: 825919 - DNA, 25 bp, Homo sapien
aagcacttcagatagctggtgagag

SEQ ID NO: 825920 - DNA, 25 bp, Homo sapien
ccacttaattcaaggtttccgtcag

SEQ ID NO: 825921 - DNA, 25 bp, Homo sapien
gggctcccgtgtatttcaaaaagca

SEQ ID NO: 825922 - DNA, 25 bp, Homo sapien
tcccgtgtatttcaaaaagcacttc

SEQ ID NO: 825923 - DNA, 25 bp, Homo sapien
tctgggaacagcaatctcaatttct

SEQ ID NO: 825924 - DNA, 25 bp, Homo sapien
ggctgaaggaaagcatacagagtcc

SEQ ID NO: 825925 - DNA, 25 bp, Homo sapien
caggcaagtgccaatatctgggaac

SEQ ID NO: 825926 - DNA, 25 bp, Homo sapien
ttgagcaggcgccacaatagagggc

SEQ ID NO: 825927 - DNA, 25 bp, Homo sapien
gaaattatacgaggtggcattaccc

SEQ ID NO: 825928 - DNA, 25 bp, Homo sapien
tctttgcagtgtaatctctaggaag

SEQ ID NO: 825929 - DNA, 25 bp, Homo sapien
ggtcttggtcttacctccctggcta

SEQ ID NO: 825930 - DNA, 25 bp, Homo sapien
gtaacactggtttcagcatatgcat

SEQ ID NO: 825931 - DNA, 25 bp, Homo sapien
ctcagaggaaagcccttttttagca

SEQ ID NO: 825932 - DNA, 25 bp, Homo sapien
cgccatagtcatgccattctgtgaa

SEQ ID NO: 825933 - DNA, 25 bp, Homo sapien
tcgccatagtcatgccattctgtga

SEQ ID NO: 825934 - DNA, 25 bp, Homo sapien
gaggaaagcccttttttagcagaca

SEQ ID NO: 825935 - DNA, 25 bp, Homo sapien
caactgccatgagtcgccttttaag

SEQ ID NO: 825936 - DNA, 25 bp, Homo sapien
atgtacaactgccatgagtcgcctt

SEQ ID NO: 825937 - DNA, 25 bp, Homo sapien
tgtacaactgccatgagtcgccttt

SEQ ID NO: 825938 - DNA, 25 bp, Homo sapien
tacaactgccatgagtcgcctttta

SEQ ID NO: 825939 - DNA, 25 bp, Homo sapien
gcctctgtagctggcgtcttgggaa

SEQ ID NO: 825940 - DNA, 25 bp, Homo sapien
ctgcattcagcaggttggcattcag

SEQ ID NO: 825941 - DNA, 25 bp, Homo sapien
cttgggaagcgccaccttgagggcc

SEQ ID NO: 825942 - DNA, 25 bp, Homo sapien
tcaggtactagttgccatccgtgcc

SEQ ID NO: 825943 - DNA, 25 bp, Homo sapien
cagtggctaacggatctactgagga

SEQ ID NO: 825944 - DNA, 25 bp, Homo sapien
ccataaaatcgaacacagctgcttt

SEQ ID NO: 825945 - DNA, 25 bp, Homo sapien
ctaacggatctactgaggaatctcc

SEQ ID NO: 825946 - DNA, 25 bp, Homo sapien
tttcctcagtggctaacggatctac

SEQ ID NO: 825947 - DNA, 25 bp, Homo sapien
agtccgcatcaatcagcaggtccat

SEQ ID NO: 825948 - DNA, 25 bp, Homo sapien
tccactgtccagtccgcatcaatca

SEQ ID NO: 825949 - DNA, 25 bp, Homo sapien
tccagtccgcatcaatcagcaggtc

SEQ ID NO: 825950 - DNA, 25 bp, Homo sapien
ctgtccagtccgcatcaatcagcag

SEQ ID NO: 825951 - DNA, 25 bp, Homo sapien
aaagtatccagatgtatctgccaca

SEQ ID NO: 825952 - DNA, 25 bp, Homo sapien
caaagtatccagatgtatctgccac

SEQ ID NO: 825953 - DNA, 25 bp, Homo sapien
aagtatccagatgtatctgccacag

SEQ ID NO: 825954 - DNA, 25 bp, Homo sapien
ctagatattgtaatgtgagcctggg

SEQ ID NO: 825955 - DNA, 25 bp, Homo sapien
gaggtgctgctagattggtcttgcc

SEQ ID NO: 825956 - DNA, 25 bp, Homo sapien
cctgggaaagcagcgacagaagcag

SEQ ID NO: 825957 - DNA, 25 bp, Homo sapien
tgccacccggtaagttccagagacg

SEQ ID NO: 825958 - DNA, 25 bp, Homo sapien
aggcacccgtaatgactaaccagag

SEQ ID NO: 825959 - DNA, 25 bp, Homo sapien
tgttgccagtgtcaaaactccaggc

SEQ ID NO: 825960 - DNA, 25 bp, Homo sapien
tatacgagcgaatggagccaggatc

SEQ ID NO: 825961 - DNA, 25 bp, Homo sapien
gactaggcaatagcagaggcagcaa

SEQ ID NO: 825962 - DNA, 25 bp, Homo sapien
cttcatgtatggtgtttacttgaaa

SEQ ID NO: 825963 - DNA, 25 bp, Homo sapien
cgaggtcggaaaggatactggttat

SEQ ID NO: 825964 - DNA, 25 bp, Homo sapien
gggtcctgtggagtgttagaaatac

SEQ ID NO: 825965 - DNA, 25 bp, Homo sapien
actaatctatgatgaccgaggtcgg

SEQ ID NO: 825966 - DNA, 25 bp, Homo sapien
tgatgattttccctggttgggagac

SEQ ID NO: 825967 - DNA, 25 bp, Homo sapien
caaatccaaaccactgcccagaatt

SEQ ID NO: 825968 - DNA, 25 bp, Homo sapien
agtgatgattttccctggttgggag

SEQ ID NO: 825969 - DNA, 25 bp, Homo sapien
gtgatgattttccctggttgggaga

SEQ ID NO: 825970 - DNA, 25 bp, Homo sapien
gacagctccattagtgcgggcggaa

SEQ ID NO: 825971 - DNA, 25 bp, Homo sapien
gggcggaatccccagactgaaggaa

SEQ ID NO: 825972 - DNA, 25 bp, Homo sapien
tgttgagagccgactccggaagcgt

SEQ ID NO: 825973 - DNA, 25 bp, Homo sapien
ggtggagcctgtcccagcaaaggtt

SEQ ID NO: 825974 - DNA, 25 bp, Homo sapien
actgtccaggttgctagagatttgc

SEQ ID NO: 825975 - DNA, 25 bp, Homo sapien
caaatgctacgtctgagcaaggagg

SEQ ID NO: 825976 - DNA, 25 bp, Homo sapien
tctgaggtcaaaagctagagctgca

SEQ ID NO: 825977 - DNA, 25 bp, Homo sapien
tagagctgcagtgttctgaatgaca

SEQ ID NO: 825978 - DNA, 25 bp, Homo sapien
gctgtccgcttcccaatgcccatgt

SEQ ID NO: 825979 - DNA, 25 bp, Homo sapien
ggagatcgcaggctgtccgcttccc

SEQ ID NO: 825980 - DNA, 25 bp, Homo sapien
ctgtccgcttcccaatgcccatgtt

SEQ ID NO: 825981 - DNA, 25 bp, Homo sapien
ttatacccttttgagattcctcacc

SEQ ID NO: 825982 - DNA, 25 bp, Homo sapien
tatacccttttgagattcctcaccc

SEQ ID NO: 825983 - DNA, 25 bp, Homo sapien
atacccttttgagattcctcaccca

SEQ ID NO: 825984 - DNA, 25 bp, Homo sapien
gagtaccactctactcctttgtcac

SEQ ID NO: 825985 - DNA, 25 bp, Homo sapien
gttggtgaagcttcagagattgcag

SEQ ID NO: 825986 - DNA, 25 bp, Homo sapien
ctttgtcactctcttggtattctga

SEQ ID NO: 825987 - DNA, 25 bp, Homo sapien
tctgaaatctcaccaggttggtgaa

SEQ ID NO: 825988 - DNA, 25 bp, Homo sapien
tgttgctaggatagaaggtacatct

SEQ ID NO: 825989 - DNA, 25 bp, Homo sapien
tcccactgttgctaggatagaaggt

SEQ ID NO: 825990 - DNA, 25 bp, Homo sapien
aagagatctggcataggagcagcag

SEQ ID NO: 825991 - DNA, 25 bp, Homo sapien
cagggtgtctcggtgatggcaaaca

SEQ ID NO: 825992 - DNA, 25 bp, Homo sapien
tacgaacagcctcaagggaacgtac

SEQ ID NO: 825993 - DNA, 25 bp, Homo sapien
tatttacgaacagcctcaagggaac

SEQ ID NO: 825994 - DNA, 25 bp, Homo sapien
cttttatttacgaacagcctcaagg

SEQ ID NO: 825995 - DNA, 25 bp, Homo sapien
tttatttacgaacagcctcaaggga

SEQ ID NO: 825996 - DNA, 25 bp, Homo sapien
ggcgttacatctaacttccatccat

SEQ ID NO: 825997 - DNA, 25 bp, Homo sapien
taggcttgctgtccaataaggacgg

SEQ ID NO: 825998 - DNA, 25 bp, Homo sapien
gtccaataaggacggtcccctgaca

SEQ ID NO: 825999 - DNA, 25 bp, Homo sapien
tccagtgaagcaggcgttacatcta

SEQ ID NO: 826000 - DNA, 25 bp, Homo sapien
ttccttggtgaaaagtgtagcttcc

SEQ ID NO: 826001 - DNA, 25 bp, Homo sapien
accagttccttggtgaaaagtgtag

SEQ ID NO: 826002 - DNA, 25 bp, Homo sapien
agcctgggaggtttcgggctcctct

SEQ ID NO: 826003 - DNA, 25 bp, Homo sapien
caagcctgggaggtttcgggctcct

SEQ ID NO: 826004 - DNA, 25 bp, Homo sapien
cctcctcacagaagaagcaacagga

SEQ ID NO: 826005 - DNA, 25 bp, Homo sapien
cagaagaagcaacaggaagatgtcc

SEQ ID NO: 826006 - DNA, 25 bp, Homo sapien
ccctcctcacagaagaagcaacagg

SEQ ID NO: 826007 - DNA, 25 bp, Homo sapien
aagaagcaacaggaagatgtcctac

SEQ ID NO: 826008 - DNA, 25 bp, Homo sapien
tctgacatggcagaccaagggagcc

SEQ ID NO: 826009 - DNA, 25 bp, Homo sapien
tcaggctaatacaccaaggaggaag

SEQ ID NO: 826010 - DNA, 25 bp, Homo sapien
gagatcctaactcctgcatgcaaga

SEQ ID NO: 826011 - DNA, 25 bp, Homo sapien
caaatggctggcatactcctggaaa

SEQ ID NO: 826012 - DNA, 25 bp, Homo sapien
tccctgctgctcctttcttgtgccc

SEQ ID NO: 826013 - DNA, 25 bp, Homo sapien
ccctgctgctcctttcttgtgccca

SEQ ID NO: 826014 - DNA, 25 bp, Homo sapien
ctccctgctgctcctttcttgtgcc

SEQ ID NO: 826015 - DNA, 25 bp, Homo sapien
cctgctgctcctttcttgtgcccac

SEQ ID NO: 826016 - DNA, 25 bp, Homo sapien
gggacaatggcagattcaaaaatcc

SEQ ID NO: 826017 - DNA, 25 bp, Homo sapien
caaaaatcctaaggctgagccaagc

SEQ ID NO: 826018 - DNA, 25 bp, Homo sapien
gattcaaaaatcctaaggctgagcc

SEQ ID NO: 826019 - DNA, 25 bp, Homo sapien
tgtaaaagaaatggggacaatggca

SEQ ID NO: 826020 - DNA, 25 bp, Homo sapien
tatcactgagcatcctaaagaagtc

SEQ ID NO: 826021 - DNA, 25 bp, Homo sapien
taaagaagtccacgcatctgctctc

SEQ ID NO: 826022 - DNA, 25 bp, Homo sapien
tacgaagactcattagagagacagc

SEQ ID NO: 826023 - DNA, 25 bp, Homo sapien
gagagacagcctctaggaccctata

SEQ ID NO: 826024 - DNA, 25 bp, Homo sapien
taaaagagttttgggccactcactc

SEQ ID NO: 826025 - DNA, 25 bp, Homo sapien
catgcattgctcaggacttctgctg

SEQ ID NO: 826026 - DNA, 25 bp, Homo sapien
gaagcattccccaagacaacttatg

SEQ ID NO: 826027 - DNA, 25 bp, Homo sapien
taccaagagcaccaaagagtttccc

SEQ ID NO: 826028 - DNA, 25 bp, Homo sapien
gacttgtctaaagcttgagggctcc

SEQ ID NO: 826029 - DNA, 25 bp, Homo sapien
taatgggagccacctgaaaacggag

SEQ ID NO: 826030 - DNA, 25 bp, Homo sapien
tggcctagaggcagtcaccgttaca

SEQ ID NO: 826031 - DNA, 25 bp, Homo sapien
aacttgatgaccaggcctctgtcgg

SEQ ID NO: 826032 - DNA, 25 bp, Homo sapien
tacaataatctcatgcagtccagcc

SEQ ID NO: 826033 - DNA, 25 bp, Homo sapien
tccaatgggacatggcactcagctc

SEQ ID NO: 826034 - DNA, 25 bp, Homo sapien
tgtcgtaactacacaactcggctgt

SEQ ID NO: 826035 - DNA, 25 bp, Homo sapien
tttattcagaacaagggccgcaaaa

SEQ ID NO: 826036 - DNA, 25 bp, Homo sapien
agcaactggtcagtgagtatgtgct

SEQ ID NO: 826037 - DNA, 25 bp, Homo sapien
gaaactgtacctcctacagcctgga

SEQ ID NO: 826038 - DNA, 25 bp, Homo sapien
gagagcatacaccacagcgcttgtg

SEQ ID NO: 826039 - DNA, 25 bp, Homo sapien
cgagggcacaagaaggacagagatt

SEQ ID NO: 826040 - DNA, 25 bp, Homo sapien
cagacacgatacagcacacttggag

SEQ ID NO: 826041 - DNA, 25 bp, Homo sapien
tgtggcttgaactgtcctcattcct

SEQ ID NO: 826042 - DNA, 25 bp, Homo sapien
tttgatccagagatataactttgct

SEQ ID NO: 826043 - DNA, 25 bp, Homo sapien
gatataactttgctagtgttccctc

SEQ ID NO: 826044 - DNA, 25 bp, Homo sapien
gctagtgttccctctcttgtgggtc

SEQ ID NO: 826045 - DNA, 25 bp, Homo sapien
tcccaagcgacatggccgtcaggga

SEQ ID NO: 826046 - DNA, 25 bp, Homo sapien
tcggagagggttcccaagcgacatg

SEQ ID NO: 826047 - DNA, 25 bp, Homo sapien
tgtggctcggagagggttcccaagc

SEQ ID NO: 826048 - DNA, 25 bp, Homo sapien
gagagtaggttgcactggattcacc

SEQ ID NO: 826049 - DNA, 25 bp, Homo sapien
gcttgaaattaaagaccactggtgg

SEQ ID NO: 826050 - DNA, 25 bp, Homo sapien
taaatgaaacattgccggacagcct

SEQ ID NO: 826051 - DNA, 25 bp, Homo sapien
ccactggtgggtgatgaactgtcaa

SEQ ID NO: 826052 - DNA, 25 bp, Homo sapien
gaatccatgccctatagaagactga

SEQ ID NO: 826053 - DNA, 25 bp, Homo sapien
cattagatataggaatatagacata

SEQ ID NO: 826054 - DNA, 25 bp, Homo sapien
tttaaacaaatgcacctacacagtc

SEQ ID NO: 826055 - DNA, 25 bp, Homo sapien
aactgagataagactttatcccaga

SEQ ID NO: 826056 - DNA, 25 bp, Homo sapien
aaagttggagaggttatcaagaata

SEQ ID NO: 826057 - DNA, 25 bp, Homo sapien
tatatggtgaactgccagtataaca

SEQ ID NO: 826058 - DNA, 25 bp, Homo sapien
taaggcacgaattacgaagtgagtg

SEQ ID NO: 826059 - DNA, 25 bp, Homo sapien
gccagtataacaggtccattctgat

SEQ ID NO: 826060 - DNA, 25 bp, Homo sapien
taacaggtccattctgataaggcac

SEQ ID NO: 826061 - DNA, 25 bp, Homo sapien
ctgatgtgctgggccgaaagtgtaa

SEQ ID NO: 826062 - DNA, 25 bp, Homo sapien
aaagcaagcaagggcgatgactgat

SEQ ID NO: 826063 - DNA, 25 bp, Homo sapien
caagcaagggcgatgactgatgtgc

SEQ ID NO: 826064 - DNA, 25 bp, Homo sapien
tgctgggccgaaagtgtaagtctac

SEQ ID NO: 826065 - DNA, 25 bp, Homo sapien
cttgggtcatagatcccttgtatac

SEQ ID NO: 826066 - DNA, 25 bp, Homo sapien
gaaggacatctcatctagcctggga

SEQ ID NO: 826067 - DNA, 25 bp, Homo sapien
tgtatactattggtaagtgcacaac

SEQ ID NO: 826068 - DNA, 25 bp, Homo sapien
caacagatacatgcacagggtgctg

SEQ ID NO: 826069 - DNA, 25 bp, Homo sapien
tcagggtcctatagtaagtgcacag

SEQ ID NO: 826070 - DNA, 25 bp, Homo sapien
gaattagcagccatgtgtccagtct

SEQ ID NO: 826071 - DNA, 25 bp, Homo sapien
taacaacctggtattcaggaacagc

SEQ ID NO: 826072 - DNA, 25 bp, Homo sapien
gcacagtcaggttttggctatggac

SEQ ID NO: 826073 - DNA, 25 bp, Homo sapien
aagtacttcgcaaagggccaggagc

SEQ ID NO: 826074 - DNA, 25 bp, Homo sapien
gccactttcatttaggggctggaat

SEQ ID NO: 826075 - DNA, 25 bp, Homo sapien
tctctaggctttctgaagtacttcg

SEQ ID NO: 826076 - DNA, 25 bp, Homo sapien
cacttttctccttgtgatgccactt

SEQ ID NO: 826077 - DNA, 25 bp, Homo sapien
gcagctttgcagagaggaatcccac

SEQ ID NO: 826078 - DNA, 25 bp, Homo sapien
gataggaacactagcctctggagag

SEQ ID NO: 826079 - DNA, 25 bp, Homo sapien
catgttccaaggaggccaaatctct

SEQ ID NO: 826080 - DNA, 25 bp, Homo sapien
gagactcagctacttccaggcgtta

SEQ ID NO: 826081 - DNA, 25 bp, Homo sapien
ctacatagctatgagagggagacca

SEQ ID NO: 826082 - DNA, 25 bp, Homo sapien
ccatttattctaggtcataggccct

SEQ ID NO: 826083 - DNA, 25 bp, Homo sapien
taagtactgtggacccttctagcag

SEQ ID NO: 826084 - DNA, 25 bp, Homo sapien
tatcgaataccatgagtggcaaggg

SEQ ID NO: 826085 - DNA, 25 bp, Homo sapien
caactggtagtagtagcgaggatcc

SEQ ID NO: 826086 - DNA, 25 bp, Homo sapien
taatactgcctaatgtgtgggacca

SEQ ID NO: 826087 - DNA, 25 bp, Homo sapien
caaatacccctatggcaagtggaga

SEQ ID NO: 826088 - DNA, 25 bp, Homo sapien
taataggcactgagattgccctcgg

SEQ ID NO: 826089 - DNA, 25 bp, Homo sapien
tctagttagttcatacccgtatccc

SEQ ID NO: 826090 - DNA, 25 bp, Homo sapien
cagccaggatctagttagttcatac

SEQ ID NO: 826091 - DNA, 25 bp, Homo sapien
tatccctcattttcaagttgctgtg

SEQ ID NO: 826092 - DNA, 25 bp, Homo sapien
acccgtatccctcattttcaagttg

SEQ ID NO: 826093 - DNA, 25 bp, Homo sapien
cttcaacttaatgcaggtcaaggac

SEQ ID NO: 826094 - DNA, 25 bp, Homo sapien
gaaagtatggagacacaaaggagca

SEQ ID NO: 826095 - DNA, 25 bp, Homo sapien
caaaggagcactgctattctgtcag

SEQ ID NO: 826096 - DNA, 25 bp, Homo sapien
tgcccagcctgtgttaccacctagt

SEQ ID NO: 826097 - DNA, 25 bp, Homo sapien
gtattgcctctgctagagagcccag

SEQ ID NO: 826098 - DNA, 25 bp, Homo sapien
taaagcaagcctcggagttggagac

SEQ ID NO: 826099 - DNA, 25 bp, Homo sapien
ccatcagctgatgccgtattgcctc

SEQ ID NO: 826100 - DNA, 25 bp, Homo sapien
cttgaaggctcatgaagggaatgac

SEQ ID NO: 826101 - DNA, 25 bp, Homo sapien
tgagcagggttctcttccaggtagc

SEQ ID NO: 826102 - DNA, 25 bp, Homo sapien
tgtgtgctcgggctgacacaaagac

SEQ ID NO: 826103 - DNA, 25 bp, Homo sapien
aagactgcgacctccatgctggcaa

SEQ ID NO: 826104 - DNA, 25 bp, Homo sapien
caagactgagatggcagtgctcctc

SEQ ID NO: 826105 - DNA, 25 bp, Homo sapien
gccctcaagcacctctgcactgggc

SEQ ID NO: 826106 - DNA, 25 bp, Homo sapien
cactgggccagtctgcatcattcct

SEQ ID NO: 826107 - DNA, 25 bp, Homo sapien
tctgcactgggccagtctgcatcat

SEQ ID NO: 826108 - DNA, 25 bp, Homo sapien
tcattcctccactctatttctagct

SEQ ID NO: 826109 - DNA, 25 bp, Homo sapien
tgtagccagagaggtccataggatg

SEQ ID NO: 826110 - DNA, 25 bp, Homo sapien
ctggtgtagccagagaggtccatag

SEQ ID NO: 826111 - DNA, 25 bp, Homo sapien
gccagagaggtccataggatgggac

SEQ ID NO: 826112 - DNA, 25 bp, Homo sapien
ccagagaggtccataggatgggaca

SEQ ID NO: 826113 - DNA, 25 bp, Homo sapien
cagctttaggcaaataccgcttggc

SEQ ID NO: 826114 - DNA, 25 bp, Homo sapien
tttaggcaaataccgcttggcaaac

SEQ ID NO: 826115 - DNA, 25 bp, Homo sapien
ggcaaataccgcttggcaaactgct

SEQ ID NO: 826116 - DNA, 25 bp, Homo sapien
ggggctttcttgtggcatgtgttac

SEQ ID NO: 826117 - DNA, 25 bp, Homo sapien
tgtggtatgtaaatgtagcatggaa

SEQ ID NO: 826118 - DNA, 25 bp, Homo sapien
ggtatgtaaatgtagcatggaagct

SEQ ID NO: 826119 - DNA, 25 bp, Homo sapien
ggtcctgagcaaggatgtggtatgt

SEQ ID NO: 826120 - DNA, 25 bp, Homo sapien
agcaaaatagtgcttgggagttgga

SEQ ID NO: 826121 - DNA, 25 bp, Homo sapien
ttggagtctggatgtagcactggac

SEQ ID NO: 826122 - DNA, 25 bp, Homo sapien
agtgtgggaccaacgctgactctga

SEQ ID NO: 826123 - DNA, 25 bp, Homo sapien
gtctggatgtagcactggacagtgt

SEQ ID NO: 826124 - DNA, 25 bp, Homo sapien
tgggctgaggaagcaaccccctcat

SEQ ID NO: 826125 - DNA, 25 bp, Homo sapien
tgccactgactccagaagcgcttgt

SEQ ID NO: 826126 - DNA, 25 bp, Homo sapien
gcttaagctgagtgactgttcctga

SEQ ID NO: 826127 - DNA, 25 bp, Homo sapien
gccaggtgttaattgactgactgcc

SEQ ID NO: 826128 - DNA, 25 bp, Homo sapien
gatcagacaggtttctgatagacag

SEQ ID NO: 826129 - DNA, 25 bp, Homo sapien
gctgcagccatatctttctcttgaa

SEQ ID NO: 826130 - DNA, 25 bp, Homo sapien
tggggaaaggcagagtggtgtcctg

SEQ ID NO: 826131 - DNA, 25 bp, Homo sapien
ggctgctgcagccatatctttctct

SEQ ID NO: 826132 - DNA, 25 bp, Homo sapien
ctttctcttgaacaaggtcacccat

SEQ ID NO: 826133 - DNA, 25 bp, Homo sapien
gctctggcgtgctgtgtgctcttct

SEQ ID NO: 826134 - DNA, 25 bp, Homo sapien
tccaaggctctggcgtgctgtgtgc

SEQ ID NO: 826135 - DNA, 25 bp, Homo sapien
aaggctctggcgtgctgtgtgctct

SEQ ID NO: 826136 - DNA, 25 bp, Homo sapien
caaggctctggcgtgctgtgtgctc

SEQ ID NO: 826137 - DNA, 25 bp, Homo sapien
tcagtgaatgcgacacatggagcct

SEQ ID NO: 826138 - DNA, 25 bp, Homo sapien
tgctgaaggccgcatggcaggcttt

SEQ ID NO: 826139 - DNA, 25 bp, Homo sapien
gagtcagctaggcaatcttttcctg

SEQ ID NO: 826140 - DNA, 25 bp, Homo sapien
ttttcattcggaactgagaccaggg

SEQ ID NO: 826141 - DNA, 25 bp, Homo sapien
cctcctggaagttcaggcttcgctg

SEQ ID NO: 826142 - DNA, 25 bp, Homo sapien
ggcttcgctgctgcagtttacaaaa

SEQ ID NO: 826143 - DNA, 25 bp, Homo sapien
tcaggcttcgctgctgcagtttaca

SEQ ID NO: 826144 - DNA, 25 bp, Homo sapien
gaagttcaggcttcgctgctgcagt

SEQ ID NO: 826145 - DNA, 25 bp, Homo sapien
tataggacttgaccaacaaaggcag

SEQ ID NO: 826146 - DNA, 25 bp, Homo sapien
aatgccaatgctggatagagagccc

SEQ ID NO: 826147 - DNA, 25 bp, Homo sapien
tagagagcccttgtcaggtgccaga

SEQ ID NO: 826148 - DNA, 25 bp, Homo sapien
caggcaaggaaggtcaggagcaact

SEQ ID NO: 826149 - DNA, 25 bp, Homo sapien
actttcccataaggcggtgccctga

SEQ ID NO: 826150 - DNA, 25 bp, Homo sapien
gactttcccataaggcggtgccctg

SEQ ID NO: 826151 - DNA, 25 bp, Homo sapien
acaggactttcccataaggcggtgc

SEQ ID NO: 826152 - DNA, 25 bp, Homo sapien
gacacacaggactttcccataaggc

SEQ ID NO: 826153 - DNA, 25 bp, Homo sapien
tacagctccgatgacctttctttgt

SEQ ID NO: 826154 - DNA, 25 bp, Homo sapien
gttggcaatgcccaaggttggaccc

SEQ ID NO: 826155 - DNA, 25 bp, Homo sapien
taaaagatgactgggtggcactccc

SEQ ID NO: 826156 - DNA, 25 bp, Homo sapien
tgctgacatgcaaacccatctgtgt

SEQ ID NO: 826157 - DNA, 25 bp, Homo sapien
tctgggttcgcgacctagcgcaatt

SEQ ID NO: 826158 - DNA, 25 bp, Homo sapien
tgtagtctctgggttcgcgacctag

SEQ ID NO: 826159 - DNA, 25 bp, Homo sapien
gttcgcgacctagcgcaattgctga

SEQ ID NO: 826160 - DNA, 25 bp, Homo sapien
cgcgacctagcgcaattgctgagcg

SEQ ID NO: 826161 - DNA, 25 bp, Homo sapien
ggaatgctgagtgcatccctcacaa

SEQ ID NO: 826162 - DNA, 25 bp, Homo sapien
cctgtgtgaactgacaatggcatcc

SEQ ID NO: 826163 - DNA, 25 bp, Homo sapien
gagactgttgaaggaaccagggaaa

SEQ ID NO: 826164 - DNA, 25 bp, Homo sapien
cacaataggcccagaaatggagctg

SEQ ID NO: 826165 - DNA, 25 bp, Homo sapien
cagcccccacctaccttcttatagc

SEQ ID NO: 826166 - DNA, 25 bp, Homo sapien
tcctggcgtcagcttcccgagttgc

SEQ ID NO: 826167 - DNA, 25 bp, Homo sapien
tctcctggcgtcagcttcccgagtt

SEQ ID NO: 826168 - DNA, 25 bp, Homo sapien
tggcgtcagcttcccgagttgctgg

SEQ ID NO: 826169 - DNA, 25 bp, Homo sapien
tggggcttccgagcagtattgcaga

SEQ ID NO: 826170 - DNA, 25 bp, Homo sapien
ttaagtgttaccaggactgggagtg

SEQ ID NO: 826171 - DNA, 25 bp, Homo sapien
gtagcactgaaagggccggtggggc

SEQ ID NO: 826172 - DNA, 25 bp, Homo sapien
gcactaggaggaagaaggtagcact

SEQ ID NO: 826173 - DNA, 25 bp, Homo sapien
cgtgagtaccaaaaatgcagccgtg

SEQ ID NO: 826174 - DNA, 25 bp, Homo sapien
tacctttccttgtggtgagccagaa

SEQ ID NO: 826175 - DNA, 25 bp, Homo sapien
gatttaagtatcctcagagctgcag

SEQ ID NO: 826176 - DNA, 25 bp, Homo sapien
caacttgctgagtgccgtggaacaa

SEQ ID NO: 826177 - DNA, 25 bp, Homo sapien
ccctgaacctatagattcttatgag

SEQ ID NO: 826178 - DNA, 25 bp, Homo sapien
tcttatgagccaatcatttctattt

SEQ ID NO: 826179 - DNA, 25 bp, Homo sapien
gaacctatagattcttatgagccaa

SEQ ID NO: 826180 - DNA, 25 bp, Homo sapien
taagaccctgaacctatagattctt

SEQ ID NO: 826181 - DNA, 25 bp, Homo sapien
cggcagccggcggactggagaactg

SEQ ID NO: 826182 - DNA, 25 bp, Homo sapien
ggcggaccgggtccgagcgcagccg

SEQ ID NO: 826183 - DNA, 25 bp, Homo sapien
gccggcggactggagaactgacccc

SEQ ID NO: 826184 - DNA, 25 bp, Homo sapien
ttgtctcttccaccctccgagaaga

SEQ ID NO: 826185 - DNA, 25 bp, Homo sapien
tcctggaacaccctatgaggcatta

SEQ ID NO: 826186 - DNA, 25 bp, Homo sapien
ttggcgacccaaagtcactaggaag

SEQ ID NO: 826187 - DNA, 25 bp, Homo sapien
tatggacatctagtggctgctcagg

SEQ ID NO: 826188 - DNA, 25 bp, Homo sapien
taaggaacccaattatcctggctgg

SEQ ID NO: 826189 - DNA, 25 bp, Homo sapien
ggcagtgactatttccatgtagacc

SEQ ID NO: 826190 - DNA, 25 bp, Homo sapien
aaggcagtgactatttccatgtaga

SEQ ID NO: 826191 - DNA, 25 bp, Homo sapien
cagtgactatttccatgtagaccat

SEQ ID NO: 826192 - DNA, 25 bp, Homo sapien
ttggaaagaaggcagtgactatttc

SEQ ID NO: 826193 - DNA, 25 bp, Homo sapien
tctgtgatcctgagaacacttctta

SEQ ID NO: 826194 - DNA, 25 bp, Homo sapien
caagtacctatcaacgctgcagtaa

SEQ ID NO: 826195 - DNA, 25 bp, Homo sapien
aaggaatgattctcccctacggcct

SEQ ID NO: 826196 - DNA, 25 bp, Homo sapien
ggaatgggccagtgtattttcatgc

SEQ ID NO: 826197 - DNA, 25 bp, Homo sapien
taagacttagatacagtggagccaa

SEQ ID NO: 826198 - DNA, 25 bp, Homo sapien
tactggtaaacgcttaagtgttcca

SEQ ID NO: 826199 - DNA, 25 bp, Homo sapien
taaacgcttaagtgttccaatatct

SEQ ID NO: 826200 - DNA, 25 bp, Homo sapien
ggcaatgccaggaggtacttttggt

SEQ ID NO: 826201 - DNA, 25 bp, Homo sapien
ggtacccgccgactgtgctatagct

SEQ ID NO: 826202 - DNA, 25 bp, Homo sapien
taattagcaaaaagcgttggcacag

SEQ ID NO: 826203 - DNA, 25 bp, Homo sapien
tgctatagctctggcactcagtggg

SEQ ID NO: 826204 - DNA, 25 bp, Homo sapien
ggaccttgctctgtttgatgaccag

SEQ ID NO: 826205 - DNA, 25 bp, Homo sapien
aaggacagggcgtaagttgctcagt

SEQ ID NO: 826206 - DNA, 25 bp, Homo sapien
agttgctcagtgttatctgggatcc

SEQ ID NO: 826207 - DNA, 25 bp, Homo sapien
aagcaccaataagttgctgggccag

SEQ ID NO: 826208 - DNA, 25 bp, Homo sapien
gagctctgtgccagatccaaagcac

SEQ ID NO: 826209 - DNA, 25 bp, Homo sapien
tctctcttgcatacacgggcaccac

SEQ ID NO: 826210 - DNA, 25 bp, Homo sapien
acgggcaccaccttgaatggatcct

SEQ ID NO: 826211 - DNA, 25 bp, Homo sapien
tctcttgcatacacgggcaccacct

SEQ ID NO: 826212 - DNA, 25 bp, Homo sapien
tgtctctcttgcatacacgggcacc

SEQ ID NO: 826213 - DNA, 25 bp, Homo sapien
tgagcagaggctacagccttcgcag

SEQ ID NO: 826214 - DNA, 25 bp, Homo sapien
cgcaggatctgagaagaatgacgac

SEQ ID NO: 826215 - DNA, 25 bp, Homo sapien
tcaaacaggttcagggtaccacagc

SEQ ID NO: 826216 - DNA, 25 bp, Homo sapien
gaatgacgacatccccagtttgttg

SEQ ID NO: 826217 - DNA, 25 bp, Homo sapien
gatgtggcctaagatggagctgttc

SEQ ID NO: 826218 - DNA, 25 bp, Homo sapien
tcatgtatgcgtgagcccttagaaa

SEQ ID NO: 826219 - DNA, 25 bp, Homo sapien
gcttttctcacaaagagatgtggcc

SEQ ID NO: 826220 - DNA, 25 bp, Homo sapien
gagatgggcacctgattaaacatac

SEQ ID NO: 826221 - DNA, 25 bp, Homo sapien
tccctttgtggatgcggcctgaata

SEQ ID NO: 826222 - DNA, 25 bp, Homo sapien
tccttgaccacaccgagtggagaag

SEQ ID NO: 826223 - DNA, 25 bp, Homo sapien
gatttcagcaaggtaagagcaagga

SEQ ID NO: 826224 - DNA, 25 bp, Homo sapien
tatgggacccatacaggaaattctg

SEQ ID NO: 826225 - DNA, 25 bp, Homo sapien
taaggattttagaaactcagatggc

SEQ ID NO: 826226 - DNA, 25 bp, Homo sapien
cataaatctgatacaaagcttggag

SEQ ID NO: 826227 - DNA, 25 bp, Homo sapien
gctggagcatggcttagaactctat

SEQ ID NO: 826228 - DNA, 25 bp, Homo sapien
cagcccagcacagttgtgaagtcaa

SEQ ID NO: 826229 - DNA, 25 bp, Homo sapien
gaaaaaaccaaggtgcctgattctg

SEQ ID NO: 826230 - DNA, 25 bp, Homo sapien
tcttgcagccaagaaaggtacttgt

SEQ ID NO: 826231 - DNA, 25 bp, Homo sapien
gaaaatattaggtggctgaatcccc

SEQ ID NO: 826232 - DNA, 25 bp, Homo sapien
gacccatgagtctttaccacagtta

SEQ ID NO: 826233 - DNA, 25 bp, Homo sapien
ccacgggttgcctgatcaacagcca

SEQ ID NO: 826234 - DNA, 25 bp, Homo sapien
tgtggaaaggtccacgggttgcctg

SEQ ID NO: 826235 - DNA, 25 bp, Homo sapien
aaaggtccacgggttgcctgatcaa

SEQ ID NO: 826236 - DNA, 25 bp, Homo sapien
ggtccacgggttgcctgatcaacag

SEQ ID NO: 826237 - DNA, 25 bp, Homo sapien
taggtccgcaccaatacacactgat

SEQ ID NO: 826238 - DNA, 25 bp, Homo sapien
catgcccagctttgagtaacaggtc

SEQ ID NO: 826239 - DNA, 25 bp, Homo sapien
taagctgtagacagtccctgcatcc

SEQ ID NO: 826240 - DNA, 25 bp, Homo sapien
tgagtagcacaggaatcacccctgg

SEQ ID NO: 826241 - DNA, 25 bp, Homo sapien
tgtcatcaccttcccgatttccttt

SEQ ID NO: 826242 - DNA, 25 bp, Homo sapien
ccggcatctaactcttcacctgcaa

SEQ ID NO: 826243 - DNA, 25 bp, Homo sapien
ttttcaccggcatctaactcttcac

SEQ ID NO: 826244 - DNA, 25 bp, Homo sapien
tcctttttcaccggcatctaactct

SEQ ID NO: 826245 - DNA, 25 bp, Homo sapien
tgtggaccttgattctcaggctcct

SEQ ID NO: 826246 - DNA, 25 bp, Homo sapien
tatacctgaaccacagtgggtttcc

SEQ ID NO: 826247 - DNA, 25 bp, Homo sapien
tcaggctcctatacctgaaccacag

SEQ ID NO: 826248 - DNA, 25 bp, Homo sapien
ctctgctttgtggaccttgattctc

SEQ ID NO: 826249 - DNA, 25 bp, Homo sapien
ggagatttaacactcttccctgagg

SEQ ID NO: 826250 - DNA, 25 bp, Homo sapien
ggaaaaacccgtgctggaagctgga

SEQ ID NO: 826251 - DNA, 25 bp, Homo sapien
ccagttgacgtgaagggcagtccca

SEQ ID NO: 826252 - DNA, 25 bp, Homo sapien
gaaggctgccttccattcggtgcgt

SEQ ID NO: 826253 - DNA, 25 bp, Homo sapien
ggcagcttcggtcctgcctgaggca

SEQ ID NO: 826254 - DNA, 25 bp, Homo sapien
gcgagcgctaacacagtttacaaac

SEQ ID NO: 826255 - DNA, 25 bp, Homo sapien
actccaggcctttgcgagcgctaac

SEQ ID NO: 826256 - DNA, 25 bp, Homo sapien
gtttacaaactgacgcaatctgttc

SEQ ID NO: 826257 - DNA, 25 bp, Homo sapien
gatgagctcaagtgtgtgactgtcc

SEQ ID NO: 826258 - DNA, 25 bp, Homo sapien
cctcccatgaaataccgagtgaagg

SEQ ID NO: 826259 - DNA, 25 bp, Homo sapien
tttattctccctgactctgaaagct

SEQ ID NO: 826260 - DNA, 25 bp, Homo sapien
gccaatccctgcttaatgagctcct

SEQ ID NO: 826261 - DNA, 25 bp, Homo sapien
actgctataacatagccactcatct

SEQ ID NO: 826262 - DNA, 25 bp, Homo sapien
gtgtaatttgcaaactgctataaca

SEQ ID NO: 826263 - DNA, 25 bp, Homo sapien
tgcaaactgctataacatagccact

SEQ ID NO: 826264 - DNA, 25 bp, Homo sapien
aatttgcaaactgctataacatagc

SEQ ID NO: 826265 - DNA, 25 bp, Homo sapien
acgaggctgtggaattcggtgtgac

SEQ ID NO: 826266 - DNA, 25 bp, Homo sapien
tcggtgtgacgcttctcgaactctg

SEQ ID NO: 826267 - DNA, 25 bp, Homo sapien
tgacgcttctcgaactctgggagaa

SEQ ID NO: 826268 - DNA, 25 bp, Homo sapien
ctgtggaattcggtgtgacgcttct

SEQ ID NO: 826269 - DNA, 25 bp, Homo sapien
cagccagccgcagatgaaagaaatc

SEQ ID NO: 826270 - DNA, 25 bp, Homo sapien
cagcctgtcgcctgcaatcgatatg

SEQ ID NO: 826271 - DNA, 25 bp, Homo sapien
tgctgccaccgaatccatcctgggt

SEQ ID NO: 826272 - DNA, 25 bp, Homo sapien
taacttgggcttgacaagtccctgg

SEQ ID NO: 826273 - DNA, 25 bp, Homo sapien
gaaggaacccagcaatgagcaggca

SEQ ID NO: 826274 - DNA, 25 bp, Homo sapien
ggaacccagcaatgagcaggcacac

SEQ ID NO: 826275 - DNA, 25 bp, Homo sapien
aaggaacccagcaatgagcaggcac

SEQ ID NO: 826276 - DNA, 25 bp, Homo sapien
aggaacccagcaatgagcaggcaca

SEQ ID NO: 826277 - DNA, 25 bp, Homo sapien
ctgggaattctcgaggtcggagctg

SEQ ID NO: 826278 - DNA, 25 bp, Homo sapien
ggaattctcgaggtcggagctggag

SEQ ID NO: 826279 - DNA, 25 bp, Homo sapien
gggaattctcgaggtcggagctgga

SEQ ID NO: 826280 - DNA, 25 bp, Homo sapien
tgggaattctcgaggtcggagctgg

SEQ ID NO: 826281 - DNA, 25 bp, Homo sapien
ttgcggcagaaagctaccggggcaa

SEQ ID NO: 826282 - DNA, 25 bp, Homo sapien
ctccttgcggcagaaagctaccggg

SEQ ID NO: 826283 - DNA, 25 bp, Homo sapien
cctccttgcggcagaaagctaccgg

SEQ ID NO: 826284 - DNA, 25 bp, Homo sapien
cggcagaaagctaccggggcaaacg

SEQ ID NO: 826285 - DNA, 25 bp, Homo sapien
tgcagccagccgataaagttgccgg

SEQ ID NO: 826286 - DNA, 25 bp, Homo sapien
acttgtagtaggagctgcgttcggc

SEQ ID NO: 826287 - DNA, 25 bp, Homo sapien
gacaggttggcaccgtcgatgtgca

SEQ ID NO: 826288 - DNA, 25 bp, Homo sapien
aaagttgccggccttgtccatgctc

SEQ ID NO: 826289 - DNA, 25 bp, Homo sapien
ccttggttagctacaggcacaaaca

SEQ ID NO: 826290 - DNA, 25 bp, Homo sapien
tcttgacaggtaaggcagcccttgt

SEQ ID NO: 826291 - DNA, 25 bp, Homo sapien
cactcagcagggaggtagttaagcc

SEQ ID NO: 826292 - DNA, 25 bp, Homo sapien
gacagacacactcacgaatgcatgc

SEQ ID NO: 826293 - DNA, 25 bp, Homo sapien
tgccatctgtggttccctccttggt

SEQ ID NO: 826294 - DNA, 25 bp, Homo sapien
tctgccatctgtggttccctccttg

SEQ ID NO: 826295 - DNA, 25 bp, Homo sapien
gccatctgtggttccctccttggtc

SEQ ID NO: 826296 - DNA, 25 bp, Homo sapien
catctgccatctgtggttccctcct

SEQ ID NO: 826297 - DNA, 25 bp, Homo sapien
aatcgatggccaatccagccctgtg

SEQ ID NO: 826298 - DNA, 25 bp, Homo sapien
cccaggtccttctcttggcaggtga

SEQ ID NO: 826299 - DNA, 25 bp, Homo sapien
gacagagaatccactggctggagtc

SEQ ID NO: 826300 - DNA, 25 bp, Homo sapien
gggaagccaagctcaataaaagcca

SEQ ID NO: 826301 - DNA, 25 bp, Homo sapien
ctgagggaaagagcccatcaagcca

SEQ ID NO: 826302 - DNA, 25 bp, Homo sapien
tgagggaaagagcccatcaagccag

SEQ ID NO: 826303 - DNA, 25 bp, Homo sapien
ccggtggccccagctacagagcaag

SEQ ID NO: 826304 - DNA, 25 bp, Homo sapien
cttgtgttctgttgctgcggccacc

SEQ ID NO: 826305 - DNA, 25 bp, Homo sapien
ggctgctctgccatgcaagttcctg

SEQ ID NO: 826306 - DNA, 25 bp, Homo sapien
tgctcgggtcccctctacactttgg

SEQ ID NO: 826307 - DNA, 25 bp, Homo sapien
agctgactgatgccagggtttgcgg

SEQ ID NO: 826308 - DNA, 25 bp, Homo sapien
tttgcggtcaggtgggggaagtgtc

SEQ ID NO: 826309 - DNA, 25 bp, Homo sapien
tgactgatgccagggtttgcggtca

SEQ ID NO: 826310 - DNA, 25 bp, Homo sapien
ctgactgatgccagggtttgcggtc

SEQ ID NO: 826311 - DNA, 25 bp, Homo sapien
cccaggaatgctgggagagccaacc

SEQ ID NO: 826312 - DNA, 25 bp, Homo sapien
agcttgacctaagcagcagggccca

SEQ ID NO: 826313 - DNA, 25 bp, Homo sapien
gggaagagcctctatggccaaagag

SEQ ID NO: 826314 - DNA, 25 bp, Homo sapien
ggagagccaaccacaggacagtctg

SEQ ID NO: 826315 - DNA, 25 bp, Homo sapien
atttggctcaggctgcccttctgca

SEQ ID NO: 826316 - DNA, 25 bp, Homo sapien
gacaggcgtggttgcccttgtcccc

SEQ ID NO: 826317 - DNA, 25 bp, Homo sapien
tgtccccatccttagaacaagggtg

SEQ ID NO: 826318 - DNA, 25 bp, Homo sapien
gaagctggtttctgggaatccccat

SEQ ID NO: 826319 - DNA, 25 bp, Homo sapien
cagctgttccttgggacttgcagcc

SEQ ID NO: 826320 - DNA, 25 bp, Homo sapien
ccacatgggcaagctggtccatgca

SEQ ID NO: 826321 - DNA, 25 bp, Homo sapien
gtgcagccatgacggttccctcttt

SEQ ID NO: 826322 - DNA, 25 bp, Homo sapien
ttgcagccacatgggcaagctggtc

SEQ ID NO: 826323 - DNA, 25 bp, Homo sapien
ggtgggtggggtggtgcacactgcc

SEQ ID NO: 826324 - DNA, 25 bp, Homo sapien
tgggtggggtggtgcacactgccac

SEQ ID NO: 826325 - DNA, 25 bp, Homo sapien
tcacttcgtggtgggtggggtggtg

SEQ ID NO: 826326 - DNA, 25 bp, Homo sapien
gtggtgggtggggtggtgcacactg

SEQ ID NO: 826327 - DNA, 25 bp, Homo sapien
agtcctgaatccctcagcacgtcct

SEQ ID NO: 826328 - DNA, 25 bp, Homo sapien
ctgagcttgttaacagagaccggca

SEQ ID NO: 826329 - DNA, 25 bp, Homo sapien
tgttaacagagaccggcattctgtg

SEQ ID NO: 826330 - DNA, 25 bp, Homo sapien
ttcccggcactgagcttgttaacag

SEQ ID NO: 826331 - DNA, 25 bp, Homo sapien
caaacacgggcttgtagctagcaga

SEQ ID NO: 826332 - DNA, 25 bp, Homo sapien
cgtagaagtgcaggtcatcagtgat

SEQ ID NO: 826333 - DNA, 25 bp, Homo sapien
tgtagctagcagatcgctccttctc

SEQ ID NO: 826334 - DNA, 25 bp, Homo sapien
tgatctcggtcacaaacacgggctt

SEQ ID NO: 826335 - DNA, 25 bp, Homo sapien
ggctcctggactgcctaggcattgt

SEQ ID NO: 826336 - DNA, 25 bp, Homo sapien
ctggaccaagccaggaaccacgagc

SEQ ID NO: 826337 - DNA, 25 bp, Homo sapien
tgaaggctcctgaagtaactccaag

SEQ ID NO: 826338 - DNA, 25 bp, Homo sapien
caagccagggctcatgtgaaggctc

SEQ ID NO: 826339 - DNA, 25 bp, Homo sapien
aggagaaggtccttcagagactgcc

SEQ ID NO: 826340 - DNA, 25 bp, Homo sapien
ttggaggtgtagtcgggctagcggc

SEQ ID NO: 826341 - DNA, 25 bp, Homo sapien
gtgcacaccactcaggacggaagga

SEQ ID NO: 826342 - DNA, 25 bp, Homo sapien
cacagggtggccatgagaaaaggga

SEQ ID NO: 826343 - DNA, 25 bp, Homo sapien
ggcaatgcagaactctcccctgcgg

SEQ ID NO: 826344 - DNA, 25 bp, Homo sapien
tggcaatgtcattgcgcatgttctc

SEQ ID NO: 826345 - DNA, 25 bp, Homo sapien
ttctccatctacaaatttggcaatg

SEQ ID NO: 826346 - DNA, 25 bp, Homo sapien
aatgtcattgcgcatgttctccatc

SEQ ID NO: 826347 - DNA, 25 bp, Homo sapien
gaagacatgtattttggcaggagac

SEQ ID NO: 826348 - DNA, 25 bp, Homo sapien
gccgtagtcaatgtagaagacatgt

SEQ ID NO: 826349 - DNA, 25 bp, Homo sapien
gactcgactttctctactcgggcac

SEQ ID NO: 826350 - DNA, 25 bp, Homo sapien
gttgccgtagtcaatgtagaagaca

SEQ ID NO: 826351 - DNA, 25 bp, Homo sapien
tagcgcatggaacaaacacccagtt

SEQ ID NO: 826352 - DNA, 25 bp, Homo sapien
taaaggccctccatgtgctacagag

SEQ ID NO: 826353 - DNA, 25 bp, Homo sapien
tgtgactgtcccttcccagcaaacc

SEQ ID NO: 826354 - DNA, 25 bp, Homo sapien
caggaactgtgggtgtaaaggccct

SEQ ID NO: 826355 - DNA, 25 bp, Homo sapien
ccaggcctctgggaatgctaactct

SEQ ID NO: 826356 - DNA, 25 bp, Homo sapien
gacaagtatccctgtggtcaccggg

SEQ ID NO: 826357 - DNA, 25 bp, Homo sapien
tagtggttcccatgaaaacaatcgc

SEQ ID NO: 826358 - DNA, 25 bp, Homo sapien
aatgtacaaaggctccccagtgggt

SEQ ID NO: 826359 - DNA, 25 bp, Homo sapien
ctgaaggcaggtgatagggtaccca

SEQ ID NO: 826360 - DNA, 25 bp, Homo sapien
ggcaggtgatagggtacccaggcgg

SEQ ID NO: 826361 - DNA, 25 bp, Homo sapien
aaggcaggtgatagggtacccaggc

SEQ ID NO: 826362 - DNA, 25 bp, Homo sapien
tgaaggcaggtgatagggtacccag

SEQ ID NO: 826363 - DNA, 25 bp, Homo sapien
tgaaggcgaaggcatactccgtggc

SEQ ID NO: 826364 - DNA, 25 bp, Homo sapien
aaggcatactccgtggcttgagctg

SEQ ID NO: 826365 - DNA, 25 bp, Homo sapien
catactccgtggcttgagctggcag

SEQ ID NO: 826366 - DNA, 25 bp, Homo sapien
ggcgaaggcatactccgtggcttga

SEQ ID NO: 826367 - DNA, 25 bp, Homo sapien
gagtactattactaagagaccatca

SEQ ID NO: 826368 - DNA, 25 bp, Homo sapien
taagagaccatcatagtttccatct

SEQ ID NO: 826369 - DNA, 25 bp, Homo sapien
caacttcccatctcttgagtactat

SEQ ID NO: 826370 - DNA, 25 bp, Homo sapien
ctgcagcggctaagtgtcagtggat

SEQ ID NO: 826371 - DNA, 25 bp, Homo sapien
tcccaagaaagtctggccagcaggg

SEQ ID NO: 826372 - DNA, 25 bp, Homo sapien
tctccccagagaaccctagtgaggt

SEQ ID NO: 826373 - DNA, 25 bp, Homo sapien
gagactatttgcaagtgaccccttt

SEQ ID NO: 826374 - DNA, 25 bp, Homo sapien
ccctagtgaggcagaaacaggctct

SEQ ID NO: 826375 - DNA, 25 bp, Homo sapien
tgttccacgttgagcaggcactgag

SEQ ID NO: 826376 - DNA, 25 bp, Homo sapien
tccacggcgtccgtgcgggcatcat

SEQ ID NO: 826377 - DNA, 25 bp, Homo sapien
atatcccgaactacgctgtccacgg

SEQ ID NO: 826378 - DNA, 25 bp, Homo sapien
tgagtgttctggatatcccgaacta

SEQ ID NO: 826379 - DNA, 25 bp, Homo sapien
ttcctggcttgtggaacagtccctt

SEQ ID NO: 826380 - DNA, 25 bp, Homo sapien
tgtgagggtggtggcgcaatgctgg

SEQ ID NO: 826381 - DNA, 25 bp, Homo sapien
tcctggcttgtggaacagtcccttt

SEQ ID NO: 826382 - DNA, 25 bp, Homo sapien
ctttctctgtgagggtggtggcgca

SEQ ID NO: 826383 - DNA, 25 bp, Homo sapien
ttaggtaagcgccagagctctccct

SEQ ID NO: 826384 - DNA, 25 bp, Homo sapien
cctcttaatgaggtctcgggcaacc

SEQ ID NO: 826385 - DNA, 25 bp, Homo sapien
tcagagttgccctcaaatgatcagc

SEQ ID NO: 826386 - DNA, 25 bp, Homo sapien
tgctcaagcctgtccaatggagcct

SEQ ID NO: 826387 - DNA, 25 bp, Homo sapien
tcttgggcattcaggtattctgtga

SEQ ID NO: 826388 - DNA, 25 bp, Homo sapien
tggctgactcttgggcattcaggta

SEQ ID NO: 826389 - DNA, 25 bp, Homo sapien
tggcgctcttggctgactcttgggc

SEQ ID NO: 826390 - DNA, 25 bp, Homo sapien
cctggcgctcttggctgactcttgg

SEQ ID NO: 826391 - DNA, 25 bp, Homo sapien
atacgggacccaccggaactcagag

SEQ ID NO: 826392 - DNA, 25 bp, Homo sapien
gaaaaaacagacaatagctcttcag

SEQ ID NO: 826393 - DNA, 25 bp, Homo sapien
aatagctcttcagggatacgggacc

SEQ ID NO: 826394 - DNA, 25 bp, Homo sapien
gacccaccggaactcagagggccaa

SEQ ID NO: 826395 - DNA, 25 bp, Homo sapien
aaagtctccatagcgccacaggttc

SEQ ID NO: 826396 - DNA, 25 bp, Homo sapien
gtctgcatcatcagctcgaaagtct

SEQ ID NO: 826397 - DNA, 25 bp, Homo sapien
gcatcatcagctcgaaagtctccat

SEQ ID NO: 826398 - DNA, 25 bp, Homo sapien
tcgaaagtctccatagcgccacagg

SEQ ID NO: 826399 - DNA, 25 bp, Homo sapien
actgaagcaaagctggacccaatct

SEQ ID NO: 826400 - DNA, 25 bp, Homo sapien
agcaaagctggacccaatctacaac

SEQ ID NO: 826401 - DNA, 25 bp, Homo sapien
ggacccaatctacaacccctctctg

SEQ ID NO: 826402 - DNA, 25 bp, Homo sapien
gatgccaccccacgagacatttcca

SEQ ID NO: 826403 - DNA, 25 bp, Homo sapien
tcatcccagaggacaagggtctgcc

SEQ ID NO: 826404 - DNA, 25 bp, Homo sapien
gaatggacgtatcagaaaaatcaca

SEQ ID NO: 826405 - DNA, 25 bp, Homo sapien
gattactccctccactaggacatag

SEQ ID NO: 826406 - DNA, 25 bp, Homo sapien
ccagcctgggtgttaggattactcc

SEQ ID NO: 826407 - DNA, 25 bp, Homo sapien
gctttaaatacagaatgggctggcc

SEQ ID NO: 826408 - DNA, 25 bp, Homo sapien
tattgggcctcaaaagctttaaata

SEQ ID NO: 826409 - DNA, 25 bp, Homo sapien
aaagctttaaatacagaatgggctg

SEQ ID NO: 826410 - DNA, 25 bp, Homo sapien
ctattttattgggcctcaaaagctt

SEQ ID NO: 826411 - DNA, 25 bp, Homo sapien
cccctaaggggctgcatgtagtcaa

SEQ ID NO: 826412 - DNA, 25 bp, Homo sapien
tgggaccataaagggtctgattcag

SEQ ID NO: 826413 - DNA, 25 bp, Homo sapien
tgtaagcgcttgttctggctaagcc

SEQ ID NO: 826414 - DNA, 25 bp, Homo sapien
agggaagcacagtttactgggacca

SEQ ID NO: 826415 - DNA, 25 bp, Homo sapien
aaaatggaggcagtcacgggagccc

SEQ ID NO: 826416 - DNA, 25 bp, Homo sapien
tatagatagcatggcatctgctgcc

SEQ ID NO: 826417 - DNA, 25 bp, Homo sapien
tgcccagagataagcgatgccttcc

SEQ ID NO: 826418 - DNA, 25 bp, Homo sapien
agatgaccttggcactcactggacc

SEQ ID NO: 826419 - DNA, 25 bp, Homo sapien
ctctcgccgctgtttctaggtcccc

SEQ ID NO: 826420 - DNA, 25 bp, Homo sapien
tctcgccgctgtttctaggtccccg

SEQ ID NO: 826421 - DNA, 25 bp, Homo sapien
ctcgccgctgtttctaggtccccgg

SEQ ID NO: 826422 - DNA, 25 bp, Homo sapien
gctctcgccgctgtttctaggtccc

SEQ ID NO: 826423 - DNA, 25 bp, Homo sapien
gcctgctgtgcttcagaggcaaagc

SEQ ID NO: 826424 - DNA, 25 bp, Homo sapien
tgaaaacttgttaagggcctgctgt

SEQ ID NO: 826425 - DNA, 25 bp, Homo sapien
cctgctgtgcttcagaggcaaagcc

SEQ ID NO: 826426 - DNA, 25 bp, Homo sapien
attcagtccgtgaaaacttgttaag

SEQ ID NO: 826427 - DNA, 25 bp, Homo sapien
gtgctgcagggcgtacatagctcat

SEQ ID NO: 826428 - DNA, 25 bp, Homo sapien
tcctacggctgactcccgcagtggc

SEQ ID NO: 826429 - DNA, 25 bp, Homo sapien
cgtacatagctcatgcattcagtcc

SEQ ID NO: 826430 - DNA, 25 bp, Homo sapien
cagggcgtacatagctcatgcattc

SEQ ID NO: 826431 - DNA, 25 bp, Homo sapien
tgaacgtaatacctcaggaatctgg

SEQ ID NO: 826432 - DNA, 25 bp, Homo sapien
gtgggaccagaaaggcgatggaaat

SEQ ID NO: 826433 - DNA, 25 bp, Homo sapien
gatttagtgcgttggtggacataag

SEQ ID NO: 826434 - DNA, 25 bp, Homo sapien
gggagctggcagtcttgattggaca

SEQ ID NO: 826435 - DNA, 25 bp, Homo sapien
atgtcgaagtccatgcagccgccaa

SEQ ID NO: 826436 - DNA, 25 bp, Homo sapien
tatgagctcacctaccgttagtccc

SEQ ID NO: 826437 - DNA, 25 bp, Homo sapien
taatgctgattcctccgtgcaggcc

SEQ ID NO: 826438 - DNA, 25 bp, Homo sapien
tctgatccccagagctatgagctca

SEQ ID NO: 826439 - DNA, 25 bp, Homo sapien
aagccatgacatcatctgaaccctc

SEQ ID NO: 826440 - DNA, 25 bp, Homo sapien
atccagcgcccccaaagccatgaca

SEQ ID NO: 826441 - DNA, 25 bp, Homo sapien
tgctgctggaaatggagagatggtt

SEQ ID NO: 826442 - DNA, 25 bp, Homo sapien
tgacatcatctgaaccctctctgct

SEQ ID NO: 826443 - DNA, 25 bp, Homo sapien
cacatctgtggtgagaatctgcaca

SEQ ID NO: 826444 - DNA, 25 bp, Homo sapien
tagagttgctgtatcctggattcca

SEQ ID NO: 826445 - DNA, 25 bp, Homo sapien
ggatgcgagcatcctcagaggtctc

SEQ ID NO: 826446 - DNA, 25 bp, Homo sapien
cacagagccgtggtcccacaaaagt

SEQ ID NO: 826447 - DNA, 25 bp, Homo sapien
gaggtgtctaggacgatattccaca

SEQ ID NO: 826448 - DNA, 25 bp, Homo sapien
tgtctaggacgatattccacacaac

SEQ ID NO: 826449 - DNA, 25 bp, Homo sapien
taaggagaggtgtctaggacgatat

SEQ ID NO: 826450 - DNA, 25 bp, Homo sapien
ggagaggtgtctaggacgatattcc

SEQ ID NO: 826451 - DNA, 25 bp, Homo sapien
tccgacaaggttggcctagtctctg

SEQ ID NO: 826452 - DNA, 25 bp, Homo sapien
ggaacaaagacaacacatggatctg

SEQ ID NO: 826453 - DNA, 25 bp, Homo sapien
caacacatggatctgtcctgggcca

SEQ ID NO: 826454 - DNA, 25 bp, Homo sapien
tgggccagatccgacaaggttggcc

SEQ ID NO: 826455 - DNA, 25 bp, Homo sapien
tttagtggaaggctcatcctcttgc

SEQ ID NO: 826456 - DNA, 25 bp, Homo sapien
ctgagtcatacgctgttctttttgt

SEQ ID NO: 826457 - DNA, 25 bp, Homo sapien
ggaaggctcatcctcttgctctctg

SEQ ID NO: 826458 - DNA, 25 bp, Homo sapien
actgccacctccttaactgagtcat

SEQ ID NO: 826459 - DNA, 25 bp, Homo sapien
tacctgcccgatcttggccagcctt

SEQ ID NO: 826460 - DNA, 25 bp, Homo sapien
tctctgtacctgcccgatcttggcc

SEQ ID NO: 826461 - DNA, 25 bp, Homo sapien
agaagccatgctcatatccacaagc

SEQ ID NO: 826462 - DNA, 25 bp, Homo sapien
gaagccatgctcatatccacaagca

SEQ ID NO: 826463 - DNA, 25 bp, Homo sapien
tctgcagtcagacaaggacaactgc

SEQ ID NO: 826464 - DNA, 25 bp, Homo sapien
gtctgcagtcagacaaggacaactg

SEQ ID NO: 826465 - DNA, 25 bp, Homo sapien
cacaatccaaacagcggccttgggc

SEQ ID NO: 826466 - DNA, 25 bp, Homo sapien
cactgtgagtattcctgtgatggct

SEQ ID NO: 826467 - DNA, 25 bp, Homo sapien
ccttgggcatgagatctgggtatcc

SEQ ID NO: 826468 - DNA, 25 bp, Homo sapien
tcaataaaatggctcgagggcactc

SEQ ID NO: 826469 - DNA, 25 bp, Homo sapien
ctgactctgtaaatctaccctggcg

SEQ ID NO: 826470 - DNA, 25 bp, Homo sapien
tgccacctgacccacggcaataagc

SEQ ID NO: 826471 - DNA, 25 bp, Homo sapien
ggcaataagcctgcaggtttgcacc

SEQ ID NO: 826472 - DNA, 25 bp, Homo sapien
gctgactctgtaaatctaccctggc

SEQ ID NO: 826473 - DNA, 25 bp, Homo sapien
ccgaaatatggaggacatcactgca

SEQ ID NO: 826474 - DNA, 25 bp, Homo sapien
gcttcaaacgccaaacgctggcagg

SEQ ID NO: 826475 - DNA, 25 bp, Homo sapien
tcatgcatgaactcccagctgcaag

SEQ ID NO: 826476 - DNA, 25 bp, Homo sapien
caaatggaatttggacgagtaccca

SEQ ID NO: 826477 - DNA, 25 bp, Homo sapien
gaggcacctcattgtccacagcgaa

SEQ ID NO: 826478 - DNA, 25 bp, Homo sapien
ccacaaaggccagtctgactcataa

SEQ ID NO: 826479 - DNA, 25 bp, Homo sapien
ggccagtctgactcataacattctt

SEQ ID NO: 826480 - DNA, 25 bp, Homo sapien
ttgtccacagcgaatgccaaggctc

SEQ ID NO: 826481 - DNA, 25 bp, Homo sapien
ctggccctgctgccgtctctctccc

SEQ ID NO: 826482 - DNA, 25 bp, Homo sapien
tggtgcctcgttgctctcctccttc

SEQ ID NO: 826483 - DNA, 25 bp, Homo sapien
cagtccaggtgatggttctgttctc

SEQ ID NO: 826484 - DNA, 25 bp, Homo sapien
cccaggacactggtgtgctggccct

SEQ ID NO: 826485 - DNA, 25 bp, Homo sapien
ggtgcttggattccttgaatttgag

SEQ ID NO: 826486 - DNA, 25 bp, Homo sapien
atttgagggcccaataaggcggcag

SEQ ID NO: 826487 - DNA, 25 bp, Homo sapien
agccagagcccgaagctggagctcc

SEQ ID NO: 826488 - DNA, 25 bp, Homo sapien
gagccagagcccgaagctggagctc

SEQ ID NO: 826489 - DNA, 25 bp, Homo sapien
gggttgcggttccagactcagccat

SEQ ID NO: 826490 - DNA, 25 bp, Homo sapien
tgggttgcggttccagactcagcca

SEQ ID NO: 826491 - DNA, 25 bp, Homo sapien
atgcaagcagaggagctggtctgaa

SEQ ID NO: 826492 - DNA, 25 bp, Homo sapien
tgggagctggctcaaacagatgcaa

SEQ ID NO: 826493 - DNA, 25 bp, Homo sapien
cctggagaaactctcagagatgttc

SEQ ID NO: 826494 - DNA, 25 bp, Homo sapien
tctgggggctcataactgtgggcaa

SEQ ID NO: 826495 - DNA, 25 bp, Homo sapien
ttttctgctctcaaagtgtaggact

SEQ ID NO: 826496 - DNA, 25 bp, Homo sapien
gctctcaaagtgtaggacttgataa

SEQ ID NO: 826497 - DNA, 25 bp, Homo sapien
tgtaggacttgataatgacaacgat

SEQ ID NO: 826498 - DNA, 25 bp, Homo sapien
caaagtgtaggacttgataatgaca

SEQ ID NO: 826499 - DNA, 25 bp, Homo sapien
gctgcaagtcggggagaaaacagag

SEQ ID NO: 826500 - DNA, 25 bp, Homo sapien
tccgtgccaggcgaagagcctgctt

SEQ ID NO: 826501 - DNA, 25 bp, Homo sapien
cgtgccaggcgaagagcctgctttt

SEQ ID NO: 826502 - DNA, 25 bp, Homo sapien
gtccgtgccaggcgaagagcctgct

SEQ ID NO: 826503 - DNA, 25 bp, Homo sapien
ccaggcgaagagcctgcttttcctc

SEQ ID NO: 826504 - DNA, 25 bp, Homo sapien
agggtcccagtactgcaaggcccgg

SEQ ID NO: 826505 - DNA, 25 bp, Homo sapien
ggcaaaatcagcatccatggggact

SEQ ID NO: 826506 - DNA, 25 bp, Homo sapien
gacgagggtcccagtactgcaaggc

SEQ ID NO: 826507 - DNA, 25 bp, Homo sapien
cacaaataatgatggggcaaaatca

SEQ ID NO: 826508 - DNA, 25 bp, Homo sapien
ccacgcaggcttttggaccaggttc

SEQ ID NO: 826509 - DNA, 25 bp, Homo sapien
agctgtgtacttggctgagattccc

SEQ ID NO: 826510 - DNA, 25 bp, Homo sapien
aggccactcccctgaagaggataag

SEQ ID NO: 826511 - DNA, 25 bp, Homo sapien
gcccctccgggaataagctgtgtac

SEQ ID NO: 826512 - DNA, 25 bp, Homo sapien
cttcctgactactgttgagaggaac

SEQ ID NO: 826513 - DNA, 25 bp, Homo sapien
ctccagggcccgcaactaaggagcg

SEQ ID NO: 826514 - DNA, 25 bp, Homo sapien
acaggacgggtgcacgcgagtccca

SEQ ID NO: 826515 - DNA, 25 bp, Homo sapien
gaggctttccctctcaagaggacga

SEQ ID NO: 826516 - DNA, 25 bp, Homo sapien
tgcctcaggcgaaagtccactccca

SEQ ID NO: 826517 - DNA, 25 bp, Homo sapien
atgcccccctggccacagaccacta

SEQ ID NO: 826518 - DNA, 25 bp, Homo sapien
gaaatgcccccctggccacagacca

SEQ ID NO: 826519 - DNA, 25 bp, Homo sapien
cttgaaatgcccccctggccacaga

SEQ ID NO: 826520 - DNA, 25 bp, Homo sapien
tgcccccctggccacagaccactaa

SEQ ID NO: 826521 - DNA, 25 bp, Homo sapien
agctggcatggtgaaggaaggacac

SEQ ID NO: 826522 - DNA, 25 bp, Homo sapien
ttgttcctccatcaggcaagacttg

SEQ ID NO: 826523 - DNA, 25 bp, Homo sapien
ctggcatggtgaaggaaggacacac

SEQ ID NO: 826524 - DNA, 25 bp, Homo sapien
ccgtcctctgactgctcttgttcct

SEQ ID NO: 826525 - DNA, 25 bp, Homo sapien
cattctcgccatgctttaaaccctg

SEQ ID NO: 826526 - DNA, 25 bp, Homo sapien
catccggtttccattctcgccatgc

SEQ ID NO: 826527 - DNA, 25 bp, Homo sapien
gccatgctttaaaccctgagcacag

SEQ ID NO: 826528 - DNA, 25 bp, Homo sapien
atgctttaaaccctgagcacagggt

SEQ ID NO: 826529 - DNA, 25 bp, Homo sapien
cccaagaaggctttggtttcttctg

SEQ ID NO: 826530 - DNA, 25 bp, Homo sapien
aaggctttggtttcttctgggcatc

SEQ ID NO: 826531 - DNA, 25 bp, Homo sapien
ctttatctccatcctgctttgggcc

SEQ ID NO: 826532 - DNA, 25 bp, Homo sapien
ttcttctgggcatctttatctccat

SEQ ID NO: 826533 - DNA, 25 bp, Homo sapien
ttcgatgcataaaggagggcaagtg

SEQ ID NO: 826534 - DNA, 25 bp, Homo sapien
taacattcgatgcataaaggagggc

SEQ ID NO: 826535 - DNA, 25 bp, Homo sapien
aaagaagtttaacattcgatgcata

SEQ ID NO: 826536 - DNA, 25 bp, Homo sapien
ggcaagtgaacccagggcagagagc

SEQ ID NO: 826537 - DNA, 25 bp, Homo sapien
gcatctgtatgcaaagcgggcaaga

SEQ ID NO: 826538 - DNA, 25 bp, Homo sapien
tctgtatgcaaagcgggcaagaact

SEQ ID NO: 826539 - DNA, 25 bp, Homo sapien
cacagcatctgtatgcaaagcgggc

SEQ ID NO: 826540 - DNA, 25 bp, Homo sapien
cagcatctgtatgcaaagcgggcaa

SEQ ID NO: 826541 - DNA, 25 bp, Homo sapien
agaaggcacagccttgcgggaagct

SEQ ID NO: 826542 - DNA, 25 bp, Homo sapien
ttgctcgatgacctgagaaggcaca

SEQ ID NO: 826543 - DNA, 25 bp, Homo sapien
cagggatggcttccttgctcgatga

SEQ ID NO: 826544 - DNA, 25 bp, Homo sapien
cttgcgggaagctgggcagaactct

SEQ ID NO: 826545 - DNA, 25 bp, Homo sapien
cagggcaagttgtctctggctggca

SEQ ID NO: 826546 - DNA, 25 bp, Homo sapien
cactctggacatactgtgggtctcc

SEQ ID NO: 826547 - DNA, 25 bp, Homo sapien
gtgggtctccatcctcaactccgta

SEQ ID NO: 826548 - DNA, 25 bp, Homo sapien
gagaatcgagttccaagcctcaggg

SEQ ID NO: 826549 - DNA, 25 bp, Homo sapien
cttgcaaccgctggcgctgcgattc

SEQ ID NO: 826550 - DNA, 25 bp, Homo sapien
ggcgctgcgattcctacggggctcc

SEQ ID NO: 826551 - DNA, 25 bp, Homo sapien
cgctgcgattcctacggggctccat

SEQ ID NO: 826552 - DNA, 25 bp, Homo sapien
accgctggcgctgcgattcctacgg

SEQ ID NO: 826553 - DNA, 25 bp, Homo sapien
caatttccaatgcatctcagctctg

SEQ ID NO: 826554 - DNA, 25 bp, Homo sapien
acctggctggttctgcaaggtcctg

SEQ ID NO: 826555 - DNA, 25 bp, Homo sapien
tctggctagaactcggtacaaagct

SEQ ID NO: 826556 - DNA, 25 bp, Homo sapien
tcagctctgcgaatgccaccaggtt

SEQ ID NO: 826557 - DNA, 25 bp, Homo sapien
aggaattcattgcaacttccctggc

SEQ ID NO: 826558 - DNA, 25 bp, Homo sapien
ggaattcattgcaacttccctggct

SEQ ID NO: 826559 - DNA, 25 bp, Homo sapien
gtgggacattgacccaggttccgtg

SEQ ID NO: 826560 - DNA, 25 bp, Homo sapien
attgacccaggttccgtggcggcca

SEQ ID NO: 826561 - DNA, 25 bp, Homo sapien
ggccactcagacgtgcaaggcatct

SEQ ID NO: 826562 - DNA, 25 bp, Homo sapien
ctccttggctcccacgcccctggtg

SEQ ID NO: 826563 - DNA, 25 bp, Homo sapien
ttcccaccattgcaggggacaaggc

SEQ ID NO: 826564 - DNA, 25 bp, Homo sapien
cttcccaccattgcaggggacaagg

SEQ ID NO: 826565 - DNA, 25 bp, Homo sapien
tcctttaatcaaggcctggctgccc

SEQ ID NO: 826566 - DNA, 25 bp, Homo sapien
agtgggctgtatgctcatttgggac

SEQ ID NO: 826567 - DNA, 25 bp, Homo sapien
tctcctttaatcaaggcctggctgc

SEQ ID NO: 826568 - DNA, 25 bp, Homo sapien
gtatgctcatttgggacgcagcctg

SEQ ID NO: 826569 - DNA, 25 bp, Homo sapien
ccaaatgtttgtgcaacagagttaa

SEQ ID NO: 826570 - DNA, 25 bp, Homo sapien
aataatacaccaaatgtttgtgcaa

SEQ ID NO: 826571 - DNA, 25 bp, Homo sapien
aatccccgatacgaagtcatgaaac

SEQ ID NO: 826572 - DNA, 25 bp, Homo sapien
taaatactgctaatccccgatacga

SEQ ID NO: 826573 - DNA, 25 bp, Homo sapien
ccttcccaggatgggcttcttgggc

SEQ ID NO: 826574 - DNA, 25 bp, Homo sapien
tttccttcccaggatgggcttcttg

SEQ ID NO: 826575 - DNA, 25 bp, Homo sapien
ttccttcccaggatgggcttcttgg

SEQ ID NO: 826576 - DNA, 25 bp, Homo sapien
tccttcccaggatgggcttcttggg

SEQ ID NO: 826577 - DNA, 25 bp, Homo sapien
gaaatgtcattgatcctggtgacaa

SEQ ID NO: 826578 - DNA, 25 bp, Homo sapien
gactttttggatgggcacagcttgg

SEQ ID NO: 826579 - DNA, 25 bp, Homo sapien
aaagccacaagaatccgcacagggt

SEQ ID NO: 826580 - DNA, 25 bp, Homo sapien
gacatagaaaagatagggccaaagc

SEQ ID NO: 826581 - DNA, 25 bp, Homo sapien
gaaggccagcacgtgaagaagatcc

SEQ ID NO: 826582 - DNA, 25 bp, Homo sapien
ctggaaggcatactggtgaggatct

SEQ ID NO: 826583 - DNA, 25 bp, Homo sapien
gaagatcccggaggttctccaggtc

SEQ ID NO: 826584 - DNA, 25 bp, Homo sapien
cacctctgtggagtagcctgaagct

SEQ ID NO: 826585 - DNA, 25 bp, Homo sapien
cactcaaaatgggttcagctcagcc

SEQ ID NO: 826586 - DNA, 25 bp, Homo sapien
tgaagatcgcagtcaccagtgtggg

SEQ ID NO: 826587 - DNA, 25 bp, Homo sapien
gaaatcacccctggtcacattgagg

SEQ ID NO: 826588 - DNA, 25 bp, Homo sapien
gctgaagaccttggtgggaatccca

SEQ ID NO: 826589 - DNA, 25 bp, Homo sapien
gaaagcgctcggtctccctggttcc

SEQ ID NO: 826590 - DNA, 25 bp, Homo sapien
aaagcgctcggtctccctggttcca

SEQ ID NO: 826591 - DNA, 25 bp, Homo sapien
agaaagcgctcggtctccctggttc

SEQ ID NO: 826592 - DNA, 25 bp, Homo sapien
tgccaggttttgtgagcaaaaggct

SEQ ID NO: 826593 - DNA, 25 bp, Homo sapien
actctgggaattagccattgtgcca

SEQ ID NO: 826594 - DNA, 25 bp, Homo sapien
aacagacaaccatttatacttagga

SEQ ID NO: 826595 - DNA, 25 bp, Homo sapien
gatgctcgccatctagtgaccttgt

SEQ ID NO: 826596 - DNA, 25 bp, Homo sapien
ctgtgagcttcaggacatgcctctc

SEQ ID NO: 826597 - DNA, 25 bp, Homo sapien
tgtgagcttcaggacatgcctctcc

SEQ ID NO: 826598 - DNA, 25 bp, Homo sapien
gccccttgcagctggttcttaccat

SEQ ID NO: 826599 - DNA, 25 bp, Homo sapien
ggaagagatgggatgagccggccac

SEQ ID NO: 826600 - DNA, 25 bp, Homo sapien
ggtctaagtaagcaagggaagagat

SEQ ID NO: 826601 - DNA, 25 bp, Homo sapien
agggagaaataggagcctcgtttct

SEQ ID NO: 826602 - DNA, 25 bp, Homo sapien
ctgctgctggatcaaggttgtgaag

SEQ ID NO: 826603 - DNA, 25 bp, Homo sapien
ctggagggcccagtttaggctggct

SEQ ID NO: 826604 - DNA, 25 bp, Homo sapien
ttgtctggaagcctccggcgctgga

SEQ ID NO: 826605 - DNA, 25 bp, Homo sapien
ggcgctggagggcccagtttaggct

SEQ ID NO: 826606 - DNA, 25 bp, Homo sapien
ggagggcccagtttaggctggctga

SEQ ID NO: 826607 - DNA, 25 bp, Homo sapien
tttgtacccaaatgcaaaggggaca

SEQ ID NO: 826608 - DNA, 25 bp, Homo sapien
ttgtacccaaatgcaaaggggacat

SEQ ID NO: 826609 - DNA, 25 bp, Homo sapien
tcttgtccacatgacaggactttgg

SEQ ID NO: 826610 - DNA, 25 bp, Homo sapien
gaatcctctaagtggacagactgct

SEQ ID NO: 826611 - DNA, 25 bp, Homo sapien
tgttgatccccaatctccctccagt

SEQ ID NO: 826612 - DNA, 25 bp, Homo sapien
ctggcttggaatcctctaagtggac

SEQ ID NO: 826613 - DNA, 25 bp, Homo sapien
aagccaaagcttgccttctgccaca

SEQ ID NO: 826614 - DNA, 25 bp, Homo sapien
ctaagccaaagcttgccttctgcca

SEQ ID NO: 826615 - DNA, 25 bp, Homo sapien
gggagtgggtaattgcagttgttcc

SEQ ID NO: 826616 - DNA, 25 bp, Homo sapien
cagttgttccaagtgggagatggtg

SEQ ID NO: 826617 - DNA, 25 bp, Homo sapien
agtgggtaattgcagttgttccaag

SEQ ID NO: 826618 - DNA, 25 bp, Homo sapien
gagatggtgtgattgggtttttctc

SEQ ID NO: 826619 - DNA, 25 bp, Homo sapien
tgtctgaggaccaattccatccggg

SEQ ID NO: 826620 - DNA, 25 bp, Homo sapien
gctgcatagggtggacccgagatct

SEQ ID NO: 826621 - DNA, 25 bp, Homo sapien
gaagacattgaagctcaccaggagg

SEQ ID NO: 826622 - DNA, 25 bp, Homo sapien
ttcctcaacccggtcaggctggctg

SEQ ID NO: 826623 - DNA, 25 bp, Homo sapien
tacacagtcgaggtacatatttatg

SEQ ID NO: 826624 - DNA, 25 bp, Homo sapien
ttgtgggtacacagtcgaggtacat

SEQ ID NO: 826625 - DNA, 25 bp, Homo sapien
tgggtacacagtcgaggtacatatt

SEQ ID NO: 826626 - DNA, 25 bp, Homo sapien
ggtacacagtcgaggtacatattta

SEQ ID NO: 826627 - DNA, 25 bp, Homo sapien
aaaaagaaaaggcacccgagcagct

SEQ ID NO: 826628 - DNA, 25 bp, Homo sapien
tccgactcgactccttgtgagagag

SEQ ID NO: 826629 - DNA, 25 bp, Homo sapien
ggtcttggcagaaaagaggcccaga

SEQ ID NO: 826630 - DNA, 25 bp, Homo sapien
tcagcggtttccagaggactcgagt

SEQ ID NO: 826631 - DNA, 25 bp, Homo sapien
cacagtctcatcctggcaagggagg

SEQ ID NO: 826632 - DNA, 25 bp, Homo sapien
caggcatcttgacgtggaaaataca

SEQ ID NO: 826633 - DNA, 25 bp, Homo sapien
ttggagcccttaaacgacacctgga

SEQ ID NO: 826634 - DNA, 25 bp, Homo sapien
tgagaagcagatgtcaccacctagt

SEQ ID NO: 826635 - DNA, 25 bp, Homo sapien
acatacttttgaaagtgcccagaca

SEQ ID NO: 826636 - DNA, 25 bp, Homo sapien
gccgtgatgcgcaactttctaataa

SEQ ID NO: 826637 - DNA, 25 bp, Homo sapien
tggtaccacagtggccatcagttgc

SEQ ID NO: 826638 - DNA, 25 bp, Homo sapien
tgaaagtgcccagacatacatccct

SEQ ID NO: 826639 - DNA, 25 bp, Homo sapien
gaacctggcaactcaagtggaggga

SEQ ID NO: 826640 - DNA, 25 bp, Homo sapien
tgctatcttgtattctggtccatgg

SEQ ID NO: 826641 - DNA, 25 bp, Homo sapien
tcccctggatctgacactcaattgt

SEQ ID NO: 826642 - DNA, 25 bp, Homo sapien
ggaagaccctgtcgtagaacctggc

SEQ ID NO: 826643 - DNA, 25 bp, Homo sapien
ctgctggtgagagtacaccttgtgg

SEQ ID NO: 826644 - DNA, 25 bp, Homo sapien
tggcccagccactggtaagactcct

SEQ ID NO: 826645 - DNA, 25 bp, Homo sapien
tgagagtacaccttgtggcccagcc

SEQ ID NO: 826646 - DNA, 25 bp, Homo sapien
actggtaagactcctctcctggccg

SEQ ID NO: 826647 - DNA, 25 bp, Homo sapien
ctggtggctttgttgtggtcctccc

SEQ ID NO: 826648 - DNA, 25 bp, Homo sapien
ctctgaggacctgagggatcatgac

SEQ ID NO: 826649 - DNA, 25 bp, Homo sapien
tctgttctctgaggacctgagggat

SEQ ID NO: 826650 - DNA, 25 bp, Homo sapien
tggctttgttgtggtcctccccctg

SEQ ID NO: 826651 - DNA, 25 bp, Homo sapien
ggcctcagatctcagaggagacagg

SEQ ID NO: 826652 - DNA, 25 bp, Homo sapien
gccatgaggttccttcccagctctt

SEQ ID NO: 826653 - DNA, 25 bp, Homo sapien
atcacgaaggcctcagatctcagag

SEQ ID NO: 826654 - DNA, 25 bp, Homo sapien
ggaggagccagagattgccatgagg

SEQ ID NO: 826655 - DNA, 25 bp, Homo sapien
gtgtagttccagttcgagtccaaag

SEQ ID NO: 826656 - DNA, 25 bp, Homo sapien
ggtgtagttccagttcgagtccaaa

SEQ ID NO: 826657 - DNA, 25 bp, Homo sapien
tgtagttccagttcgagtccaaagg

SEQ ID NO: 826658 - DNA, 25 bp, Homo sapien
taaccaatgctgaatttcggactcc

SEQ ID NO: 826659 - DNA, 25 bp, Homo sapien
gcagaggagaaaaccgacttcaagt

SEQ ID NO: 826660 - DNA, 25 bp, Homo sapien
gacttcaagtaggtcaagggacaga

SEQ ID NO: 826661 - DNA, 25 bp, Homo sapien
ttcggactccctgtagtagtctggg

SEQ ID NO: 826662 - DNA, 25 bp, Homo sapien
gagctctttccttgcttggcctggt

SEQ ID NO: 826663 - DNA, 25 bp, Homo sapien
gcagctgtgaagtgtccaagccctg

SEQ ID NO: 826664 - DNA, 25 bp, Homo sapien
tagcagttcagactgtggaggtcat

SEQ ID NO: 826665 - DNA, 25 bp, Homo sapien
gaggcgagaatgaatccagcccctt

SEQ ID NO: 826666 - DNA, 25 bp, Homo sapien
ttaagcccattgacaacatcagctt

SEQ ID NO: 826667 - DNA, 25 bp, Homo sapien
agcccattgacaacatcagcttctg

SEQ ID NO: 826668 - DNA, 25 bp, Homo sapien
aagcccattgacaacatcagcttct

SEQ ID NO: 826669 - DNA, 25 bp, Homo sapien
taagcccattgacaacatcagcttc

SEQ ID NO: 826670 - DNA, 25 bp, Homo sapien
cttacccctgaagccctcctgcttc

SEQ ID NO: 826671 - DNA, 25 bp, Homo sapien
agcaacattagcattcaggcagcct

SEQ ID NO: 826672 - DNA, 25 bp, Homo sapien
aggttccagctcatgggcagcggca

SEQ ID NO: 826673 - DNA, 25 bp, Homo sapien
gcagcggcatctgcgcaaaggtgta

SEQ ID NO: 826674 - DNA, 25 bp, Homo sapien
caggcgctgaaccacgctgctgtgg

SEQ ID NO: 826675 - DNA, 25 bp, Homo sapien
caaaggtgtagccacccagggagag

SEQ ID NO: 826676 - DNA, 25 bp, Homo sapien
cagcaccatgtgatccaggctgctc

SEQ ID NO: 826677 - DNA, 25 bp, Homo sapien
ccagcaccatgtgatccaggctgct

SEQ ID NO: 826678 - DNA, 25 bp, Homo sapien
gcaccatgtgatccaggctgctcac

SEQ ID NO: 826679 - DNA, 25 bp, Homo sapien
agcaccatgtgatccaggctgctca

SEQ ID NO: 826680 - DNA, 25 bp, Homo sapien
gcaaattcagccacagtgcaggagg

SEQ ID NO: 826681 - DNA, 25 bp, Homo sapien
gatgcaaattcagccacagtgcagg

SEQ ID NO: 826682 - DNA, 25 bp, Homo sapien
agatgcaaattcagccacagtgcag

SEQ ID NO: 826683 - DNA, 25 bp, Homo sapien
tgtgagatgcaaattcagccacagt

SEQ ID NO: 826684 - DNA, 25 bp, Homo sapien
aaggtacagataccactcaagtggg

SEQ ID NO: 826685 - DNA, 25 bp, Homo sapien
ctcaggtggcgggaatgagcagacc

SEQ ID NO: 826686 - DNA, 25 bp, Homo sapien
ggcacaaagctgtccatcaaaggta

SEQ ID NO: 826687 - DNA, 25 bp, Homo sapien
gttgaggggttttggaacattcaca

SEQ ID NO: 826688 - DNA, 25 bp, Homo sapien
tgtcaggaggtctcccaggcttcac

SEQ ID NO: 826689 - DNA, 25 bp, Homo sapien
tatgccctgtccattgggtggctgg

SEQ ID NO: 826690 - DNA, 25 bp, Homo sapien
cacacttgggatcacagttgcgtca

SEQ ID NO: 826691 - DNA, 25 bp, Homo sapien
catgggtaggagactgccctggtca

SEQ ID NO: 826692 - DNA, 25 bp, Homo sapien
ctgcaggccggctacgagcccgaga

SEQ ID NO: 826693 - DNA, 25 bp, Homo sapien
ggcaacacccgggacacgagacggc

SEQ ID NO: 826694 - DNA, 25 bp, Homo sapien
gctacgagcccgagaggtgacgccc

SEQ ID NO: 826695 - DNA, 25 bp, Homo sapien
gcggtacagcgcccgactgctgcag

SEQ ID NO: 826696 - DNA, 25 bp, Homo sapien
tgtgtgtctgtgctcttcggaacat

SEQ ID NO: 826697 - DNA, 25 bp, Homo sapien
ctgtgtgtctgtgctcttcggaaca

SEQ ID NO: 826698 - DNA, 25 bp, Homo sapien
ctgttccgtggcttctgtaccagca

SEQ ID NO: 826699 - DNA, 25 bp, Homo sapien
gattctcttcttaactggtattcca

SEQ ID NO: 826700 - DNA, 25 bp, Homo sapien
gtggcttctgtaccagcagattctc

SEQ ID NO: 826701 - DNA, 25 bp, Homo sapien
ttccgtggcttctgtaccagcagat

SEQ ID NO: 826702 - DNA, 25 bp, Homo sapien
ctttctgactatgctccaggctgct

SEQ ID NO: 826703 - DNA, 25 bp, Homo sapien
tctggcaatgctgaacacccatctg

SEQ ID NO: 826704 - DNA, 25 bp, Homo sapien
gaactgaggttgtataagaattccc

SEQ ID NO: 826705 - DNA, 25 bp, Homo sapien
gggacccctggcagtcaaaacagac

SEQ ID NO: 826706 - DNA, 25 bp, Homo sapien
cctgcatgtctcttcgcagctgcac

SEQ ID NO: 826707 - DNA, 25 bp, Homo sapien
cctcctgcatgtctcttcgcagctg

SEQ ID NO: 826708 - DNA, 25 bp, Homo sapien
tgcatgtctcttcgcagctgcacct

SEQ ID NO: 826709 - DNA, 25 bp, Homo sapien
tcctgcatgtctcttcgcagctgca

SEQ ID NO: 826710 - DNA, 25 bp, Homo sapien
ttgaccgtgggtaactgaacctcag

SEQ ID NO: 826711 - DNA, 25 bp, Homo sapien
gggagaagagtcatagcactggtgc

SEQ ID NO: 826712 - DNA, 25 bp, Homo sapien
actggtgcctcggtccctgcttgct

SEQ ID NO: 826713 - DNA, 25 bp, Homo sapien
gactactgtatttcagccctagagg

SEQ ID NO: 826714 - DNA, 25 bp, Homo sapien
gaacagctgtgggaaccaacaaggt

SEQ ID NO: 826715 - DNA, 25 bp, Homo sapien
ggaaccaacaaggtctcaaggcctg

SEQ ID NO: 826716 - DNA, 25 bp, Homo sapien
gaaacaggagcacagggaattcctc

SEQ ID NO: 826717 - DNA, 25 bp, Homo sapien
agatgtgcccttggactgatcaggc

SEQ ID NO: 826718 - DNA, 25 bp, Homo sapien
agggccccattccagtgaatgaagg

SEQ ID NO: 826719 - DNA, 25 bp, Homo sapien
tagatgcggcctctttcctcaaaga

SEQ ID NO: 826720 - DNA, 25 bp, Homo sapien
caatgttgaggagtagatgcggcct

SEQ ID NO: 826721 - DNA, 25 bp, Homo sapien
agtctgaacaccatggagaggccca

SEQ ID NO: 826722 - DNA, 25 bp, Homo sapien
tgggtagcctataccaatgtaaggc

SEQ ID NO: 826723 - DNA, 25 bp, Homo sapien
taaaagccttgagggcagtgactgg

SEQ ID NO: 826724 - DNA, 25 bp, Homo sapien
tagagttcaaccatctgctgagtga

SEQ ID NO: 826725 - DNA, 25 bp, Homo sapien
tggattagcatacatcacatgggac

SEQ ID NO: 826726 - DNA, 25 bp, Homo sapien
ggaagtctttgccaatgctctgagt

SEQ ID NO: 826727 - DNA, 25 bp, Homo sapien
tccagcctgtgacaaagcaaggctc

SEQ ID NO: 826728 - DNA, 25 bp, Homo sapien
cagcctgtgacaaagcaaggctctg

SEQ ID NO: 826729 - DNA, 25 bp, Homo sapien
ctccagcctgtgacaaagcaaggct

SEQ ID NO: 826730 - DNA, 25 bp, Homo sapien
gcctgtgacaaagcaaggctctgtc

SEQ ID NO: 826731 - DNA, 25 bp, Homo sapien
tgagcgggccagttctaccactggc

SEQ ID NO: 826732 - DNA, 25 bp, Homo sapien
ggtagccagacctcccagctcgggg

SEQ ID NO: 826733 - DNA, 25 bp, Homo sapien
ggccagttctaccactggccagagc

SEQ ID NO: 826734 - DNA, 25 bp, Homo sapien
aggaagtgagcgggccagttctacc

SEQ ID NO: 826735 - DNA, 25 bp, Homo sapien
cccaccacctccagaagacgacctg

SEQ ID NO: 826736 - DNA, 25 bp, Homo sapien
cacacacattgtgccaccactgtgg

SEQ ID NO: 826737 - DNA, 25 bp, Homo sapien
caccacctccagaagacgacctgtg

SEQ ID NO: 826738 - DNA, 25 bp, Homo sapien
ggcccaccacctccagaagacgacc

SEQ ID NO: 826739 - DNA, 25 bp, Homo sapien
cctcatcagtattacccagggagta

SEQ ID NO: 826740 - DNA, 25 bp, Homo sapien
tgcaagggaccagaagaaacaaggc

SEQ ID NO: 826741 - DNA, 25 bp, Homo sapien
tccgtacaaaggaagagtattctgg

SEQ ID NO: 826742 - DNA, 25 bp, Homo sapien
tggtgggacttcagccgtgagccat

SEQ ID NO: 826743 - DNA, 25 bp, Homo sapien
aatttttctaacgatgctatgaggt

SEQ ID NO: 826744 - DNA, 25 bp, Homo sapien
tgctaaatgcattacatgtattatt

SEQ ID NO: 826745 - DNA, 25 bp, Homo sapien
ggtaggtattattgcctctcttctt

SEQ ID NO: 826746 - DNA, 25 bp, Homo sapien
ttttctaacgatgctatgaggtagg

SEQ ID NO: 826747 - DNA, 25 bp, Homo sapien
tgctctcccgcggagctgtttccaa

SEQ ID NO: 826748 - DNA, 25 bp, Homo sapien
ggacgcacacgacgtggcgcacgtc

SEQ ID NO: 826749 - DNA, 25 bp, Homo sapien
tgtttccaaaagtacacgtcgtgcg

SEQ ID NO: 826750 - DNA, 25 bp, Homo sapien
gacaaaagcgccgtcagccgcagag

SEQ ID NO: 826751 - DNA, 25 bp, Homo sapien
gaggaaagtcggttactaagcacca

SEQ ID NO: 826752 - DNA, 25 bp, Homo sapien
agcgcagaagcttcccgccacaaaa

SEQ ID NO: 826753 - DNA, 25 bp, Homo sapien
tggatcgccggctgtaggagcaggt

SEQ ID NO: 826754 - DNA, 25 bp, Homo sapien
tcgtgcaggagtccggaggaaagtc

SEQ ID NO: 826755 - DNA, 25 bp, Homo sapien
gatactagggccacattgcaaacct

SEQ ID NO: 826756 - DNA, 25 bp, Homo sapien
ttaggacaaaacagggctgacggct

SEQ ID NO: 826757 - DNA, 25 bp, Homo sapien
tatctgcaatgtgttaggtaccctg

SEQ ID NO: 826758 - DNA, 25 bp, Homo sapien
tagttaacacgcaacacgctaagtg

SEQ ID NO: 826759 - DNA, 25 bp, Homo sapien
ggctgaaaggaccctactcctctgc

SEQ ID NO: 826760 - DNA, 25 bp, Homo sapien
ctgaaaggaccctactcctctgcag

SEQ ID NO: 826761 - DNA, 25 bp, Homo sapien
tgaaaggaccctactcctctgcaga

SEQ ID NO: 826762 - DNA, 25 bp, Homo sapien
gctgaaaggaccctactcctctgca

SEQ ID NO: 826763 - DNA, 25 bp, Homo sapien
ggtagaggttcaacacatgcttcat

SEQ ID NO: 826764 - DNA, 25 bp, Homo sapien
aggtagaggttcaacacatgcttca

SEQ ID NO: 826765 - DNA, 25 bp, Homo sapien
ctaacaggtagaggttcaacacatg

SEQ ID NO: 826766 - DNA, 25 bp, Homo sapien
atggagagtagggtcagtaccacac

SEQ ID NO: 826767 - DNA, 25 bp, Homo sapien
ccaggcgatgggctctctagtaagc

SEQ ID NO: 826768 - DNA, 25 bp, Homo sapien
actccatcactctaacgaagatgga

SEQ ID NO: 826769 - DNA, 25 bp, Homo sapien
cgatgggctctctagtaagccctct

SEQ ID NO: 826770 - DNA, 25 bp, Homo sapien
tctgtgttggctagttggcttctgg

SEQ ID NO: 826771 - DNA, 25 bp, Homo sapien
ctgtgttggctagttggcttctggt

SEQ ID NO: 826772 - DNA, 25 bp, Homo sapien
ctctgtgttggctagttggcttctg

SEQ ID NO: 826773 - DNA, 25 bp, Homo sapien
aatagttctctggttacaacggtgc

SEQ ID NO: 826774 - DNA, 25 bp, Homo sapien
ttgcccaggcaatgagcatccagtt

SEQ ID NO: 826775 - DNA, 25 bp, Homo sapien
catccagttagacaggttcttcaag

SEQ ID NO: 826776 - DNA, 25 bp, Homo sapien
taggtcagtgttccaaaatatggcc

SEQ ID NO: 826777 - DNA, 25 bp, Homo sapien
gaggaaagcacagcatacaccagac

SEQ ID NO: 826778 - DNA, 25 bp, Homo sapien
tacacactatgttggaggaacgact

SEQ ID NO: 826779 - DNA, 25 bp, Homo sapien
ggaaccccagacagatgtttaggaa

SEQ ID NO: 826780 - DNA, 25 bp, Homo sapien
tgctatccaaacatggaggagctct

SEQ ID NO: 826781 - DNA, 25 bp, Homo sapien
gactgatagtcctctttgccccaga

SEQ ID NO: 826782 - DNA, 25 bp, Homo sapien
actggttgatacatggcagacccaa

SEQ ID NO: 826783 - DNA, 25 bp, Homo sapien
tacagatctagtcatgacaggcctg

SEQ ID NO: 826784 - DNA, 25 bp, Homo sapien
tgcaataatcgtggcctaggctcac

SEQ ID NO: 826785 - DNA, 25 bp, Homo sapien
caattcctgtgctacagtgcgggta

SEQ ID NO: 826786 - DNA, 25 bp, Homo sapien
gaggtcctcgcaggtttctccagca

SEQ ID NO: 826787 - DNA, 25 bp, Homo sapien
caataccttgtgtacatctgaggca

SEQ ID NO: 826788 - DNA, 25 bp, Homo sapien
tcagattggacagattaagggccct

SEQ ID NO: 826789 - DNA, 25 bp, Homo sapien
tgcccagctaacgcttaaaaaaatg

SEQ ID NO: 826790 - DNA, 25 bp, Homo sapien
cagctaacgcttaaaaaaatgttgg

SEQ ID NO: 826791 - DNA, 25 bp, Homo sapien
tgagtccaaggggttcgaggacagt

SEQ ID NO: 826792 - DNA, 25 bp, Homo sapien
caaggggttcgaggacagtctgggc

SEQ ID NO: 826793 - DNA, 25 bp, Homo sapien
gagggagagggcacatttttgctac

SEQ ID NO: 826794 - DNA, 25 bp, Homo sapien
gctactttgtcccttgaatctaaaa

SEQ ID NO: 826795 - DNA, 25 bp, Homo sapien
acagagacgacggagacgggagaga

SEQ ID NO: 826796 - DNA, 25 bp, Homo sapien
gcaggagacagagacgacggagacg

SEQ ID NO: 826797 - DNA, 25 bp, Homo sapien
tagggagtggtaatgactctttaac

SEQ ID NO: 826798 - DNA, 25 bp, Homo sapien
gagtggtaatgactctttaacgagc

SEQ ID NO: 826799 - DNA, 25 bp, Homo sapien
gggagtggtaatgactctttaacga

SEQ ID NO: 826800 - DNA, 25 bp, Homo sapien
gtggtaatgactctttaacgagcat

SEQ ID NO: 826801 - DNA, 25 bp, Homo sapien
cctcttgaatgatagcttagctgga

SEQ ID NO: 826802 - DNA, 25 bp, Homo sapien
tgcatgaagtctcctgttagtctac

SEQ ID NO: 826803 - DNA, 25 bp, Homo sapien
gatattatttgattgtcttctggcc

SEQ ID NO: 826804 - DNA, 25 bp, Homo sapien
gatagcttagctggaaatacttttc

SEQ ID NO: 826805 - DNA, 25 bp, Homo sapien
aggagttcaagaccagccaacatgg

SEQ ID NO: 826806 - DNA, 25 bp, Homo sapien
tgaggagggtggactgcttgagccc

SEQ ID NO: 826807 - DNA, 25 bp, Homo sapien
gtgattccagcactttgggaggctg

SEQ ID NO: 826808 - DNA, 25 bp, Homo sapien
aaagtcatgaaagtggctcatgcct

SEQ ID NO: 826809 - DNA, 25 bp, Homo sapien
tccctcaggagtggcatttggcata

SEQ ID NO: 826810 - DNA, 25 bp, Homo sapien
tgtatcacagttagggaggccttcc

SEQ ID NO: 826811 - DNA, 25 bp, Homo sapien
tggtgccctaggactggaattgcta

SEQ ID NO: 826812 - DNA, 25 bp, Homo sapien
tctgtatatcctagatggtgcccta

SEQ ID NO: 826813 - DNA, 25 bp, Homo sapien
ttatgcatatttaaaaaagaaggta

SEQ ID NO: 826814 - DNA, 25 bp, Homo sapien
tatgcatatttaaaaaagaaggtaa

SEQ ID NO: 826815 - DNA, 25 bp, Homo sapien
tgcatatttaaaaaagaaggtaata

SEQ ID NO: 826816 - DNA, 25 bp, Homo sapien
ctttatgcatatttaaaaaagaagg

SEQ ID NO: 826817 - DNA, 25 bp, Homo sapien
gggtccatagacttcatatttgctg

SEQ ID NO: 826818 - DNA, 25 bp, Homo sapien
gaggcagggtccatagacttcatat

SEQ ID NO: 826819 - DNA, 25 bp, Homo sapien
ggcagggtccatagacttcatattt

SEQ ID NO: 826820 - DNA, 25 bp, Homo sapien
ctgaggcagggtccatagacttcat

SEQ ID NO: 826821 - DNA, 25 bp, Homo sapien
caatggtgaggatgttatttgaata

SEQ ID NO: 826822 - DNA, 25 bp, Homo sapien
tttgatcaatggtgaggatgttatt

SEQ ID NO: 826823 - DNA, 25 bp, Homo sapien
tcggccactatacaagtctgctttt

SEQ ID NO: 826824 - DNA, 25 bp, Homo sapien
tttaatagtagttgcatcggccact

SEQ ID NO: 826825 - DNA, 25 bp, Homo sapien
gtaattcttggcaaacattccagga

SEQ ID NO: 826826 - DNA, 25 bp, Homo sapien
aatcccctcggatcttctgccagag

SEQ ID NO: 826827 - DNA, 25 bp, Homo sapien
tcttttcggtgttcaagggcaattc

SEQ ID NO: 826828 - DNA, 25 bp, Homo sapien
tataggtatcagtagctctcttcac

SEQ ID NO: 826829 - DNA, 25 bp, Homo sapien
tggagggcccttagctcaggccaac

SEQ ID NO: 826830 - DNA, 25 bp, Homo sapien
gaaaggtcatcctcgtctgctgtct

SEQ ID NO: 826831 - DNA, 25 bp, Homo sapien
cagaggtttattgcttggagggccc

SEQ ID NO: 826832 - DNA, 25 bp, Homo sapien
tcctgatgaggcttaggcagtctta

SEQ ID NO: 826833 - DNA, 25 bp, Homo sapien
gcaacaataaatacaatggatgtga

SEQ ID NO: 826834 - DNA, 25 bp, Homo sapien
cagcaacaataaatacaatggatgt

SEQ ID NO: 826835 - DNA, 25 bp, Homo sapien
caataaatacaatggatgtgatcag

SEQ ID NO: 826836 - DNA, 25 bp, Homo sapien
aatacaatggatgtgatcagctatt

SEQ ID NO: 826837 - DNA, 25 bp, Homo sapien
gagaagcatgatgaataccacttgg

SEQ ID NO: 826838 - DNA, 25 bp, Homo sapien
gctggatctcagctcgttataacct

SEQ ID NO: 826839 - DNA, 25 bp, Homo sapien
aaggaccagcccaatatctcttgga

SEQ ID NO: 826840 - DNA, 25 bp, Homo sapien
gctagacatagcacattggtaatta

SEQ ID NO: 826841 - DNA, 25 bp, Homo sapien
tgcaccttcagggtaggagccggcc

SEQ ID NO: 826842 - DNA, 25 bp, Homo sapien
taggagccggccatgacaccggagc

SEQ ID NO: 826843 - DNA, 25 bp, Homo sapien
tatcggcgaggattgcaggtgcacc

SEQ ID NO: 826844 - DNA, 25 bp, Homo sapien
ctgctgcctcttatcggcgaggatt

SEQ ID NO: 826845 - DNA, 25 bp, Homo sapien
tgtggtggaagacgcgcgccggatc

SEQ ID NO: 826846 - DNA, 25 bp, Homo sapien
cagcttgactcgtggccggcggtca

SEQ ID NO: 826847 - DNA, 25 bp, Homo sapien
cttggagagtgcctcgggtagggca

SEQ ID NO: 826848 - DNA, 25 bp, Homo sapien
agtcgctggcctaggagtttctctc

SEQ ID NO: 826849 - DNA, 25 bp, Homo sapien
gtgcctcgggtagggcagcttgact

SEQ ID NO: 826850 - DNA, 25 bp, Homo sapien
ctgagaaaatcaaacgggcagctta

SEQ ID NO: 826851 - DNA, 25 bp, Homo sapien
tgagaaaatcaaacgggcagcttag

SEQ ID NO: 826852 - DNA, 25 bp, Homo sapien
gagaaaatcaaacgggcagcttagg

SEQ ID NO: 826853 - DNA, 25 bp, Homo sapien
gccgcggcttgctcttccgaccact

SEQ ID NO: 826854 - DNA, 25 bp, Homo sapien
tgctcttccgaccactccacattgt

SEQ ID NO: 826855 - DNA, 25 bp, Homo sapien
ctggcacacccgctggatactgttc

SEQ ID NO: 826856 - DNA, 25 bp, Homo sapien
ccgctggatactgttctcctggact

SEQ ID NO: 826857 - DNA, 25 bp, Homo sapien
ttgattttggctaggtgccagctca

SEQ ID NO: 826858 - DNA, 25 bp, Homo sapien
tattaaaccaggtccatcctcattg

SEQ ID NO: 826859 - DNA, 25 bp, Homo sapien
cattccagtatttgtgggcattgat

SEQ ID NO: 826860 - DNA, 25 bp, Homo sapien
gctcagggaattcggtaaaaagcca

SEQ ID NO: 826861 - DNA, 25 bp, Homo sapien
cattctcctccacaggaggtgtctg

SEQ ID NO: 826862 - DNA, 25 bp, Homo sapien
aaggctcttcgaagaacacttgtgc

SEQ ID NO: 826863 - DNA, 25 bp, Homo sapien
tgtgttttatgttcaaggctcttcg

SEQ ID NO: 826864 - DNA, 25 bp, Homo sapien
tgagttacattctcctccacaggag

SEQ ID NO: 826865 - DNA, 25 bp, Homo sapien
ctccagtattcggtaggtggctgag

SEQ ID NO: 826866 - DNA, 25 bp, Homo sapien
acatatcccactaccaagacaataa

SEQ ID NO: 826867 - DNA, 25 bp, Homo sapien
atcccactaccaagacaataaaagg

SEQ ID NO: 826868 - DNA, 25 bp, Homo sapien
tataatagcttcacatatcccacta

SEQ ID NO: 826869 - DNA, 25 bp, Homo sapien
aatataatagcttcacatatcccac

SEQ ID NO: 826870 - DNA, 25 bp, Homo sapien
agactgtgtttcccacaccacagcc

SEQ ID NO: 826871 - DNA, 25 bp, Homo sapien
cagtggattccagtaatgaatacag

SEQ ID NO: 826872 - DNA, 25 bp, Homo sapien
cctgttaatgaatactgtgggctaa

SEQ ID NO: 826873 - DNA, 25 bp, Homo sapien
cagctatagggccaggagccatggc

SEQ ID NO: 826874 - DNA, 25 bp, Homo sapien
ttatatgaaacctttgagaaacagt

SEQ ID NO: 826875 - DNA, 25 bp, Homo sapien
gaaaacatgccaattctaagccagt

SEQ ID NO: 826876 - DNA, 25 bp, Homo sapien
tgtagaggactttgaaaactatgcc

SEQ ID NO: 826877 - DNA, 25 bp, Homo sapien
ggtgggttcctcagactgtaacttc

SEQ ID NO: 826878 - DNA, 25 bp, Homo sapien
tcagtgttagtactaggacttgcca

SEQ ID NO: 826879 - DNA, 25 bp, Homo sapien
tattaagaaccctggcctgggcaac

SEQ ID NO: 826880 - DNA, 25 bp, Homo sapien
gatcctaaggctttatcagatacat

SEQ ID NO: 826881 - DNA, 25 bp, Homo sapien
ggcaatagggtaactcaagaaacat

SEQ ID NO: 826882 - DNA, 25 bp, Homo sapien
tgaaccctggaaggttgaagctaca

SEQ ID NO: 826883 - DNA, 25 bp, Homo sapien
ctgcagccccaaccaatcctctggc

SEQ ID NO: 826884 - DNA, 25 bp, Homo sapien
gcagccccaaccaatcctctggcct

SEQ ID NO: 826885 - DNA, 25 bp, Homo sapien
tgcagccccaaccaatcctctggcc

SEQ ID NO: 826886 - DNA, 25 bp, Homo sapien
tattagttcaccaaacactactgag

SEQ ID NO: 826887 - DNA, 25 bp, Homo sapien
tgagtgagtgctttcacagcggcga

SEQ ID NO: 826888 - DNA, 25 bp, Homo sapien
ggtatcctcactatctagcacaagt

SEQ ID NO: 826889 - DNA, 25 bp, Homo sapien
tactgagagcccactatgcattgtg

SEQ ID NO: 826890 - DNA, 25 bp, Homo sapien
aacaatgagactacaaatcgagcta

SEQ ID NO: 826891 - DNA, 25 bp, Homo sapien
aactgtatctattagtcacaacata

SEQ ID NO: 826892 - DNA, 25 bp, Homo sapien
tactctcattcttgtgtagcacagt

SEQ ID NO: 826893 - DNA, 25 bp, Homo sapien
tacaaatcgagctatgtctactctc

SEQ ID NO: 826894 - DNA, 25 bp, Homo sapien
acagcaataaacaaagagtcctggg

SEQ ID NO: 826895 - DNA, 25 bp, Homo sapien
ctggaccagttctatagctgtggaa

SEQ ID NO: 826896 - DNA, 25 bp, Homo sapien
gaccagttctatagctgtggaagaa

SEQ ID NO: 826897 - DNA, 25 bp, Homo sapien
gcaataaacaaagagtcctgggtca

SEQ ID NO: 826898 - DNA, 25 bp, Homo sapien
taagaacacagccagagaccttgat

SEQ ID NO: 826899 - DNA, 25 bp, Homo sapien
tacttttagaccgtaagaacacaga

SEQ ID NO: 826900 - DNA, 25 bp, Homo sapien
caataggtaatttcccatcgtactc

SEQ ID NO: 826901 - DNA, 25 bp, Homo sapien
acaaggtatgctcgttatcagtaaa

SEQ ID NO: 826902 - DNA, 25 bp, Homo sapien
tctgagaatcaccaaagcatgacac

SEQ ID NO: 826903 - DNA, 25 bp, Homo sapien
gatgtgatttgtggaaccccaaacc

SEQ ID NO: 826904 - DNA, 25 bp, Homo sapien
catatggtggtggagaaacggcact

SEQ ID NO: 826905 - DNA, 25 bp, Homo sapien
aaacggcactggtaggcttgcttga

SEQ ID NO: 826906 - DNA, 25 bp, Homo sapien
gacagtgaggaatctaatagttgcg

SEQ ID NO: 826907 - DNA, 25 bp, Homo sapien
gcctcaaactgttgggttcacgcga

SEQ ID NO: 826908 - DNA, 25 bp, Homo sapien
gactcaaagagtaaagatcaggaat

SEQ ID NO: 826909 - DNA, 25 bp, Homo sapien
tctaagaattggaaaacgatcatga

SEQ ID NO: 826910 - DNA, 25 bp, Homo sapien
gggcactgggtaactcttctcttca

SEQ ID NO: 826911 - DNA, 25 bp, Homo sapien
tgctgaaagaacaaatatgagaatg

SEQ ID NO: 826912 - DNA, 25 bp, Homo sapien
atcacacaggtcgtgaacaaaggca

SEQ ID NO: 826913 - DNA, 25 bp, Homo sapien
caaaggcaaaacaccgagaaggatc

SEQ ID NO: 826914 - DNA, 25 bp, Homo sapien
catagcggccgtaatctcgcagaag

SEQ ID NO: 826915 - DNA, 25 bp, Homo sapien
ttttaaaccgaagctgagccatgtc

SEQ ID NO: 826916 - DNA, 25 bp, Homo sapien
cagcctgttgatagccttctgcatc

SEQ ID NO: 826917 - DNA, 25 bp, Homo sapien
cagaagcctgctcagcctgttgata

SEQ ID NO: 826918 - DNA, 25 bp, Homo sapien
aaaggacatgatctctagtggttag

SEQ ID NO: 826919 - DNA, 25 bp, Homo sapien
aaggacatgatctctagtggttagg

SEQ ID NO: 826920 - DNA, 25 bp, Homo sapien
gacatgatctctagtggttaggatt

SEQ ID NO: 826921 - DNA, 25 bp, Homo sapien
aggacatgatctctagtggttagga

SEQ ID NO: 826922 - DNA, 25 bp, Homo sapien
gactgaacaataattgggtacttaa

SEQ ID NO: 826923 - DNA, 25 bp, Homo sapien
catgtattatgtgctagttcttgac

SEQ ID NO: 826924 - DNA, 25 bp, Homo sapien
taaaaaaaggctgtaagctgggagc

SEQ ID NO: 826925 - DNA, 25 bp, Homo sapien
aaaaaagactggactgaacaataat

SEQ ID NO: 826926 - DNA, 25 bp, Homo sapien
cagtttgttgggtggagagcactcc

SEQ ID NO: 826927 - DNA, 25 bp, Homo sapien
taaggaatgttaactgagaggccag

SEQ ID NO: 826928 - DNA, 25 bp, Homo sapien
gctcaacgggagtaagtcacaatgt

SEQ ID NO: 826929 - DNA, 25 bp, Homo sapien
tgcttcgggaagagcagctcaacgg

SEQ ID NO: 826930 - DNA, 25 bp, Homo sapien
tgaagaagtaaactctggttccatc

SEQ ID NO: 826931 - DNA, 25 bp, Homo sapien
gtgtgaagaagtaaactctggttcc

SEQ ID NO: 826932 - DNA, 25 bp, Homo sapien
tgtgtgaagaagtaaactctggttc

SEQ ID NO: 826933 - DNA, 25 bp, Homo sapien
tgtgaagaagtaaactctggttcca

SEQ ID NO: 826934 - DNA, 25 bp, Homo sapien
acttttagcgtaaaaagatgagtgt

SEQ ID NO: 826935 - DNA, 25 bp, Homo sapien
ctgccatgggtagcctagcccaggg

SEQ ID NO: 826936 - DNA, 25 bp, Homo sapien
gccttgaagaccatctggtactggg

SEQ ID NO: 826937 - DNA, 25 bp, Homo sapien
ggaaccgaaggaaacagcctgccta

SEQ ID NO: 826938 - DNA, 25 bp, Homo sapien
acaccaaagcacaaccccgtgtaga

SEQ ID NO: 826939 - DNA, 25 bp, Homo sapien
cagaggagagcagttcccggcaccc

SEQ ID NO: 826940 - DNA, 25 bp, Homo sapien
caaccccgtgtagagggtgagacag

SEQ ID NO: 826941 - DNA, 25 bp, Homo sapien
aagcacaaccccgtgtagagggtga

SEQ ID NO: 826942 - DNA, 25 bp, Homo sapien
tatctacgtatgtcaaagcaattgc

SEQ ID NO: 826943 - DNA, 25 bp, Homo sapien
acaacaagttcatgtttaggtaggg

SEQ ID NO: 826944 - DNA, 25 bp, Homo sapien
gaagccactgtgtataggccgcggt

SEQ ID NO: 826945 - DNA, 25 bp, Homo sapien
cagtggtggcttggtaacaacaagt

SEQ ID NO: 826946 - DNA, 25 bp, Homo sapien
ccagcagtggtgaaaagcgtgtcca

SEQ ID NO: 826947 - DNA, 25 bp, Homo sapien
ccagtccagcagtggtgaaaagcgt

SEQ ID NO: 826948 - DNA, 25 bp, Homo sapien
cagtggtgaaaagcgtgtccagttc

SEQ ID NO: 826949 - DNA, 25 bp, Homo sapien
gtccagcagtggtgaaaagcgtgtc

SEQ ID NO: 826950 - DNA, 25 bp, Homo sapien
caaacccggtacattgtcagttgct

SEQ ID NO: 826951 - DNA, 25 bp, Homo sapien
aaacccggtacattgtcagttgctt

SEQ ID NO: 826952 - DNA, 25 bp, Homo sapien
cagaaggggcttgcagtatttgcac

SEQ ID NO: 826953 - DNA, 25 bp, Homo sapien
ggggcttgcagtatttgcactgaat

SEQ ID NO: 826954 - DNA, 25 bp, Homo sapien
gaaggggcttgcagtatttgcactg

SEQ ID NO: 826955 - DNA, 25 bp, Homo sapien
gacagaaggggcttgcagtatttgc

SEQ ID NO: 826956 - DNA, 25 bp, Homo sapien
aacgggcttgcatcgtgttggcagc

SEQ ID NO: 826957 - DNA, 25 bp, Homo sapien
tcggaaacacaacgggcttgcatcg

SEQ ID NO: 826958 - DNA, 25 bp, Homo sapien
aaagctcggaaacacaacgggcttg

SEQ ID NO: 826959 - DNA, 25 bp, Homo sapien
aacacaacgggcttgcatcgtgttg

SEQ ID NO: 826960 - DNA, 25 bp, Homo sapien
tttatcattactttcagattcaggg

SEQ ID NO: 826961 - DNA, 25 bp, Homo sapien
tatcattactttcagattcagggtc

SEQ ID NO: 826962 - DNA, 25 bp, Homo sapien
atgcaccatgcccggtgctacaaat

SEQ ID NO: 826963 - DNA, 25 bp, Homo sapien
tcattactttcagattcagggtctc

SEQ ID NO: 826964 - DNA, 25 bp, Homo sapien
agttacaaaatgctaagacagattg

SEQ ID NO: 826965 - DNA, 25 bp, Homo sapien
tgttagaatcctgatacaaagtaac

SEQ ID NO: 826966 - DNA, 25 bp, Homo sapien
agaccacgatcaattacttaacaag

SEQ ID NO: 826967 - DNA, 25 bp, Homo sapien
tattaactgcaattgcctagcccgg

SEQ ID NO: 826968 - DNA, 25 bp, Homo sapien
tggagcgatggctcaagccagaagt

SEQ ID NO: 826969 - DNA, 25 bp, Homo sapien
gtgtcaaacacttaagggtgcagta

SEQ ID NO: 826970 - DNA, 25 bp, Homo sapien
aagttcgaggtgataatgagctatc

SEQ ID NO: 826971 - DNA, 25 bp, Homo sapien
aattaagaagttctctcaattcctt

SEQ ID NO: 826972 - DNA, 25 bp, Homo sapien
aaggatatatcctataactgcatgg

SEQ ID NO: 826973 - DNA, 25 bp, Homo sapien
tataactgcatggatcaagacagaa

SEQ ID NO: 826974 - DNA, 25 bp, Homo sapien
catgcctggtcgaaaagtccttact

SEQ ID NO: 826975 - DNA, 25 bp, Homo sapien
caaggtgaaagctaggcatctttgt

SEQ ID NO: 826976 - DNA, 25 bp, Homo sapien
tagtggctggcattaatgtttccat

SEQ ID NO: 826977 - DNA, 25 bp, Homo sapien
ccatgtattcctacttgtgatggat

SEQ ID NO: 826978 - DNA, 25 bp, Homo sapien
tgacaaagctattattgggactact

SEQ ID NO: 826979 - DNA, 25 bp, Homo sapien
ggtaaacatgaatggttagtggctg

SEQ ID NO: 826980 - DNA, 25 bp, Homo sapien
gcgccatcacacctggctattttgt

SEQ ID NO: 826981 - DNA, 25 bp, Homo sapien
ttccaagtagatggggttacaggca

SEQ ID NO: 826982 - DNA, 25 bp, Homo sapien
tccaagtagatggggttacaggcat

SEQ ID NO: 826983 - DNA, 25 bp, Homo sapien
cttccaagtagatggggttacaggc

SEQ ID NO: 826984 - DNA, 25 bp, Homo sapien
ggtgcaaaagcaagcctaaactgta

SEQ ID NO: 826985 - DNA, 25 bp, Homo sapien
cgcctgatacgatcctatgggagga

SEQ ID NO: 826986 - DNA, 25 bp, Homo sapien
gcagagcctgaaccaaatcatgaag

SEQ ID NO: 826987 - DNA, 25 bp, Homo sapien
gaacctggcagacaacacaactaag

SEQ ID NO: 826988 - DNA, 25 bp, Homo sapien
ccttcattctttgctcccacctctg

SEQ ID NO: 826989 - DNA, 25 bp, Homo sapien
agtaaatacggtaatggaaaagatg

SEQ ID NO: 826990 - DNA, 25 bp, Homo sapien
aacccattaagtggggccagtcacg

SEQ ID NO: 826991 - DNA, 25 bp, Homo sapien
ggaaaagatgggagctctcttcctc

SEQ ID NO: 826992 - DNA, 25 bp, Homo sapien
taaaaagtcgagcttagcagatggc

SEQ ID NO: 826993 - DNA, 25 bp, Homo sapien
ggcaggagaaggctcgtctttttaa

SEQ ID NO: 826994 - DNA, 25 bp, Homo sapien
tgcccatcattagcgattctgagga

SEQ ID NO: 826995 - DNA, 25 bp, Homo sapien
gatgaaacgttatgcaaagtccctt

SEQ ID NO: 826996 - DNA, 25 bp, Homo sapien
gctcagcagttgcttcgttggtgcg

SEQ ID NO: 826997 - DNA, 25 bp, Homo sapien
cagcagttgcttcgttggtgcgatg

SEQ ID NO: 826998 - DNA, 25 bp, Homo sapien
tcagcagttgcttcgttggtgcgat

SEQ ID NO: 826999 - DNA, 25 bp, Homo sapien
ctcagcagttgcttcgttggtgcga

SEQ ID NO: 827000 - DNA, 25 bp, Homo sapien
tggatcgggtggcaaaacttgtctt

SEQ ID NO: 827001 - DNA, 25 bp, Homo sapien
gatcgggtggcaaaacttgtctttc

SEQ ID NO: 827002 - DNA, 25 bp, Homo sapien
gctggatcgggtggcaaaacttgtc

SEQ ID NO: 827003 - DNA, 25 bp, Homo sapien
ctgctggatcgggtggcaaaacttg

SEQ ID NO: 827004 - DNA, 25 bp, Homo sapien
gctgcctggagcaggctgtcctctc

SEQ ID NO: 827005 - DNA, 25 bp, Homo sapien
ctgctgcctggagcaggctgtcctc

SEQ ID NO: 827006 - DNA, 25 bp, Homo sapien
cctgctgcctggagcaggctgtcct

SEQ ID NO: 827007 - DNA, 25 bp, Homo sapien
gcctggagcaggctgtcctctccat

SEQ ID NO: 827008 - DNA, 25 bp, Homo sapien
ttccctgcgggaacctccccattgc

SEQ ID NO: 827009 - DNA, 25 bp, Homo sapien
cgggaacctccccattgctctcctg

SEQ ID NO: 827010 - DNA, 25 bp, Homo sapien
cctgcgggaacctccccattgctct

SEQ ID NO: 827011 - DNA, 25 bp, Homo sapien
ctgcgggaacctccccattgctctc

SEQ ID NO: 827012 - DNA, 25 bp, Homo sapien
gggagacatgacctgctcagaggag

SEQ ID NO: 827013 - DNA, 25 bp, Homo sapien
cgggagacatgacctgctcagagga

SEQ ID NO: 827014 - DNA, 25 bp, Homo sapien
ggagacatgacctgctcagaggaga

SEQ ID NO: 827015 - DNA, 25 bp, Homo sapien
gagacatgacctgctcagaggagac

SEQ ID NO: 827016 - DNA, 25 bp, Homo sapien
gagaaagcactcaacggagtcagag

SEQ ID NO: 827017 - DNA, 25 bp, Homo sapien
tctttccacagacaagctacatggg

SEQ ID NO: 827018 - DNA, 25 bp, Homo sapien
gctacatgggcctatcatctaacct

SEQ ID NO: 827019 - DNA, 25 bp, Homo sapien
ccgactgcttctgtgttggagggat

SEQ ID NO: 827020 - DNA, 25 bp, Homo sapien
tagtgaaaccgcgtgtttcctcgcg

SEQ ID NO: 827021 - DNA, 25 bp, Homo sapien
gtaaacacactagtgaaaccgcgtg

SEQ ID NO: 827022 - DNA, 25 bp, Homo sapien
tgatcggtgtaaacacactagtgaa

SEQ ID NO: 827023 - DNA, 25 bp, Homo sapien
gtgtttcctcgcgagatttgcacgg

SEQ ID NO: 827024 - DNA, 25 bp, Homo sapien
ggggggcacgaaggccgcagatccc

SEQ ID NO: 827025 - DNA, 25 bp, Homo sapien
gggggcacgaaggccgcagatcccc

SEQ ID NO: 827026 - DNA, 25 bp, Homo sapien
ggcacgaaggccgcagatccccggg

SEQ ID NO: 827027 - DNA, 25 bp, Homo sapien
gggcacgaaggccgcagatccccgg

SEQ ID NO: 827028 - DNA, 25 bp, Homo sapien
ctaacacctactccagtaaacctgg

SEQ ID NO: 827029 - DNA, 25 bp, Homo sapien
actaacacctactccagtaaacctg

SEQ ID NO: 827030 - DNA, 25 bp, Homo sapien
taacacctactccagtaaacctggc

SEQ ID NO: 827031 - DNA, 25 bp, Homo sapien
tatgccctactccatcaaaagtata

SEQ ID NO: 827032 - DNA, 25 bp, Homo sapien
tcacttatgccctactccatcaaaa

SEQ ID NO: 827033 - DNA, 25 bp, Homo sapien
cacttatgccctactccatcaaaag

SEQ ID NO: 827034 - DNA, 25 bp, Homo sapien
cttatgccctactccatcaaaagta

SEQ ID NO: 827035 - DNA, 25 bp, Homo sapien
tacataatgtgatgtatcagactta

SEQ ID NO: 827036 - DNA, 25 bp, Homo sapien
cttaaaagatacttgccgccgggcg

SEQ ID NO: 827037 - DNA, 25 bp, Homo sapien
tgtgatgtatcagacttaaaaattt

SEQ ID NO: 827038 - DNA, 25 bp, Homo sapien
taaaagatacttgccgccgggcgca

SEQ ID NO: 827039 - DNA, 25 bp, Homo sapien
taaaaagttctgtaagaatggccca

SEQ ID NO: 827040 - DNA, 25 bp, Homo sapien
catatacatttaggaccgctgtgtc

SEQ ID NO: 827041 - DNA, 25 bp, Homo sapien
gtttgctagtaaaagcaggatccca

SEQ ID NO: 827042 - DNA, 25 bp, Homo sapien
gaatcgtgcttcattactcctacca

SEQ ID NO: 827043 - DNA, 25 bp, Homo sapien
tattaaggcagaatgttaggtcact

SEQ ID NO: 827044 - DNA, 25 bp, Homo sapien
taaggcagaatgttaggtcactgat

SEQ ID NO: 827045 - DNA, 25 bp, Homo sapien
tttctattaaggcagaatgttaggt

SEQ ID NO: 827046 - DNA, 25 bp, Homo sapien
gcagaatgttaggtcactgatttta

SEQ ID NO: 827047 - DNA, 25 bp, Homo sapien
cacataatgtagcactttacaggca

SEQ ID NO: 827048 - DNA, 25 bp, Homo sapien
agcaatttaatagggttcacccctg

SEQ ID NO: 827049 - DNA, 25 bp, Homo sapien
acaggcaagacattctatattagca

SEQ ID NO: 827050 - DNA, 25 bp, Homo sapien
aacacaatcctcaaaagctcacata

SEQ ID NO: 827051 - DNA, 25 bp, Homo sapien
ctcagtaaaactggagaggattctt

SEQ ID NO: 827052 - DNA, 25 bp, Homo sapien
ttctagtttagaggcggatttggtc

SEQ ID NO: 827053 - DNA, 25 bp, Homo sapien
ttttgcattgaataaacttacagcc

SEQ ID NO: 827054 - DNA, 25 bp, Homo sapien
tcagcaaccgaattctagtttagag

SEQ ID NO: 827055 - DNA, 25 bp, Homo sapien
gcagccgcagagatgttgacgccta

SEQ ID NO: 827056 - DNA, 25 bp, Homo sapien
cctgcagccgcagagatgttgacgc

SEQ ID NO: 827057 - DNA, 25 bp, Homo sapien
ttgacgcctaagaagaaccggattg

SEQ ID NO: 827058 - DNA, 25 bp, Homo sapien
acgcctaagaagaaccggattgcca

SEQ ID NO: 827059 - DNA, 25 bp, Homo sapien
actaaaactagctttccagccccag

SEQ ID NO: 827060 - DNA, 25 bp, Homo sapien
gagatggtctcaaaacatggtgctg

SEQ ID NO: 827061 - DNA, 25 bp, Homo sapien
gaaagttggaccattactacatgca

SEQ ID NO: 827062 - DNA, 25 bp, Homo sapien
tcaaagacctcaacataagaactaa

SEQ ID NO: 827063 - DNA, 25 bp, Homo sapien
gcaaagatgtgatatcaactcactg

SEQ ID NO: 827064 - DNA, 25 bp, Homo sapien
cactgagcgtggcccagtttgttcc

SEQ ID NO: 827065 - DNA, 25 bp, Homo sapien
gagcgtggcccagtttgttcctttc

SEQ ID NO: 827066 - DNA, 25 bp, Homo sapien
gcgtggcccagtttgttcctttcca

SEQ ID NO: 827067 - DNA, 25 bp, Homo sapien
cacaagctctggttggaagactcac

SEQ ID NO: 827068 - DNA, 25 bp, Homo sapien
ttggaagactcactattaagtggtc

SEQ ID NO: 827069 - DNA, 25 bp, Homo sapien
tggaagactcactattaagtggtcc

SEQ ID NO: 827070 - DNA, 25 bp, Homo sapien
gttggaagactcactattaagtggt

SEQ ID NO: 827071 - DNA, 25 bp, Homo sapien
cttggctagtttcatatggttcagc

SEQ ID NO: 827072 - DNA, 25 bp, Homo sapien
tttcttttccgatttcgctgatcat

SEQ ID NO: 827073 - DNA, 25 bp, Homo sapien
cagcttttcttttccgatttcgctg

SEQ ID NO: 827074 - DNA, 25 bp, Homo sapien
ctagtttcatatggttcagcttttc

SEQ ID NO: 827075 - DNA, 25 bp, Homo sapien
taaatgaagcactttcagccggctg

SEQ ID NO: 827076 - DNA, 25 bp, Homo sapien
gataagaaggatgcaacaagactgg

SEQ ID NO: 827077 - DNA, 25 bp, Homo sapien
gccggctgtcattaacaaatcactg

SEQ ID NO: 827078 - DNA, 25 bp, Homo sapien
tgagccaaaataccttagcctaaga

SEQ ID NO: 827079 - DNA, 25 bp, Homo sapien
ctaattttatgtcccctaggagtgc

SEQ ID NO: 827080 - DNA, 25 bp, Homo sapien
ttatgtcccctaggagtgcctttcc

SEQ ID NO: 827081 - DNA, 25 bp, Homo sapien
aatcactaattttatgtcccctagg

SEQ ID NO: 827082 - DNA, 25 bp, Homo sapien
attttatgtcccctaggagtgcctt

SEQ ID NO: 827083 - DNA, 25 bp, Homo sapien
aacagatatgaataattcaaaacag

SEQ ID NO: 827084 - DNA, 25 bp, Homo sapien
cagggaaaaacagatatgaataatt

SEQ ID NO: 827085 - DNA, 25 bp, Homo sapien
gaaaaacagatatgaataattcaaa

SEQ ID NO: 827086 - DNA, 25 bp, Homo sapien
tggccaacagggaaaaacagatatg

SEQ ID NO: 827087 - DNA, 25 bp, Homo sapien
taagggattggataaggaatgttgc

SEQ ID NO: 827088 - DNA, 25 bp, Homo sapien
gtaagggattggataaggaatgttg

SEQ ID NO: 827089 - DNA, 25 bp, Homo sapien
tgtcaaatttctccaggtgaatgct

SEQ ID NO: 827090 - DNA, 25 bp, Homo sapien
aggtgtcaaatttctccaggtgaat

SEQ ID NO: 827091 - DNA, 25 bp, Homo sapien
ggtgtcaaatttctccaggtgaatg

SEQ ID NO: 827092 - DNA, 25 bp, Homo sapien
caaatttctccaggtgaatgcttac

SEQ ID NO: 827093 - DNA, 25 bp, Homo sapien
taatgcaatgaagagtatgtttttc

SEQ ID NO: 827094 - DNA, 25 bp, Homo sapien
ataattaatggtgctaagactggag

SEQ ID NO: 827095 - DNA, 25 bp, Homo sapien
aattatccacttttaatgcaatgaa

SEQ ID NO: 827096 - DNA, 25 bp, Homo sapien
taatggtgctaagactggagaccct

SEQ ID NO: 827097 - DNA, 25 bp, Homo sapien
cagttatcaaacataagatgaatgg

SEQ ID NO: 827098 - DNA, 25 bp, Homo sapien
taatgccctcaaccctacacaggaa

SEQ ID NO: 827099 - DNA, 25 bp, Homo sapien
ggagagcataccaacattatcattg

SEQ ID NO: 827100 - DNA, 25 bp, Homo sapien
gaaaattaagacattgtcccatgac

SEQ ID NO: 827101 - DNA, 25 bp, Homo sapien
cagagcagactgctcctctgttgcc

SEQ ID NO: 827102 - DNA, 25 bp, Homo sapien
tgaggattggcagagcagactgctc

SEQ ID NO: 827103 - DNA, 25 bp, Homo sapien
ggcagagcagactgctcctctgttg

SEQ ID NO: 827104 - DNA, 25 bp, Homo sapien
tgttgcctcctttgcagcactgcca

SEQ ID NO: 827105 - DNA, 25 bp, Homo sapien
aggccagctctcctttacgccagct

SEQ ID NO: 827106 - DNA, 25 bp, Homo sapien
ctcctttacgccagctgctctgtgt

SEQ ID NO: 827107 - DNA, 25 bp, Homo sapien
ccgaggttttgctagcatcactgac

SEQ ID NO: 827108 - DNA, 25 bp, Homo sapien
tgtgtcaagccgaggttttgctagc

SEQ ID NO: 827109 - DNA, 25 bp, Homo sapien
ttagacacgtttgggaatgatgata

SEQ ID NO: 827110 - DNA, 25 bp, Homo sapien
cccattgtgggttcaggctttgaca

SEQ ID NO: 827111 - DNA, 25 bp, Homo sapien
tctccctcaggagcttgaaccaagg

SEQ ID NO: 827112 - DNA, 25 bp, Homo sapien
aataattaatccaacctcatcaagg

SEQ ID NO: 827113 - DNA, 25 bp, Homo sapien
tcatactgtttccatgttccttctt

SEQ ID NO: 827114 - DNA, 25 bp, Homo sapien
cttttggttttcatactgtttccat

SEQ ID NO: 827115 - DNA, 25 bp, Homo sapien
cagagcattcagacttttggttttc

SEQ ID NO: 827116 - DNA, 25 bp, Homo sapien
tggttttcatactgtttccatgttc

SEQ ID NO: 827117 - DNA, 25 bp, Homo sapien
gtatgctataatgctatgattgcac

SEQ ID NO: 827118 - DNA, 25 bp, Homo sapien
tatgctataatgctatgattgcacc

SEQ ID NO: 827119 - DNA, 25 bp, Homo sapien
aaatcatgaacaagaaagacaagga

SEQ ID NO: 827120 - DNA, 25 bp, Homo sapien
aagacaaggatgtcccagaaaaact

SEQ ID NO: 827121 - DNA, 25 bp, Homo sapien
agacaaggatgtcccagaaaaactg

SEQ ID NO: 827122 - DNA, 25 bp, Homo sapien
caaggatgtcccagaaaaactggat

SEQ ID NO: 827123 - DNA, 25 bp, Homo sapien
aatgtcaagaaaatctcccagaaga

SEQ ID NO: 827124 - DNA, 25 bp, Homo sapien
gggaggcgagacgggtggatcacct

SEQ ID NO: 827125 - DNA, 25 bp, Homo sapien
taatcccagcactttgggaggcgag

SEQ ID NO: 827126 - DNA, 25 bp, Homo sapien
ggccaggtgcagtgtctcacgcctg

SEQ ID NO: 827127 - DNA, 25 bp, Homo sapien
gagtgccaagtctatataattccaa

SEQ ID NO: 827128 - DNA, 25 bp, Homo sapien
cagcaaatccaatctttccttacta

SEQ ID NO: 827129 - DNA, 25 bp, Homo sapien
gcactaggatacgagcattctttcc

SEQ ID NO: 827130 - DNA, 25 bp, Homo sapien
gaacctcaagtattataatgcacta

SEQ ID NO: 827131 - DNA, 25 bp, Homo sapien
tggagatctgtttttgggagctgca

SEQ ID NO: 827132 - DNA, 25 bp, Homo sapien
gctctgtgttgccagatcccgtaga

SEQ ID NO: 827133 - DNA, 25 bp, Homo sapien
cgtagatgagggactgttttgctga

SEQ ID NO: 827134 - DNA, 25 bp, Homo sapien
ctgtctgtgctggatggagatctgt

SEQ ID NO: 827135 - DNA, 25 bp, Homo sapien
taaggaacaaatgcgccatctggtg

SEQ ID NO: 827136 - DNA, 25 bp, Homo sapien
ggagacttgacacaactctctaagg

SEQ ID NO: 827137 - DNA, 25 bp, Homo sapien
taaaattcaaatgtgctccagggag

SEQ ID NO: 827138 - DNA, 25 bp, Homo sapien
gaagaagctacctgagtgctcaact

SEQ ID NO: 827139 - DNA, 25 bp, Homo sapien
tctaggtcagaattcttactgtttt

SEQ ID NO: 827140 - DNA, 25 bp, Homo sapien
tcttaataaatcatctattcttccc

SEQ ID NO: 827141 - DNA, 25 bp, Homo sapien
cttctctaggtcagaattcttactg

SEQ ID NO: 827142 - DNA, 25 bp, Homo sapien
ctcttctctaggtcagaattcttac

SEQ ID NO: 827143 - DNA, 25 bp, Homo sapien
taatttctctggaatgggaaaacaa

SEQ ID NO: 827144 - DNA, 25 bp, Homo sapien
caacactttatacttattcccacag

SEQ ID NO: 827145 - DNA, 25 bp, Homo sapien
tctggaatgggaaaacaacacttta

SEQ ID NO: 827146 - DNA, 25 bp, Homo sapien
taacactccacatatctatttctcc

SEQ ID NO: 827147 - DNA, 25 bp, Homo sapien
tgctcattgtcacacatctatttaa

SEQ ID NO: 827148 - DNA, 25 bp, Homo sapien
ctgttcatcaatctgccgtctcaaa

SEQ ID NO: 827149 - DNA, 25 bp, Homo sapien
gttcatcaatctgccgtctcaaatc

SEQ ID NO: 827150 - DNA, 25 bp, Homo sapien
atcaatctgccgtctcaaatcacag

SEQ ID NO: 827151 - DNA, 25 bp, Homo sapien
cttagaaggtggggaataatcatca

SEQ ID NO: 827152 - DNA, 25 bp, Homo sapien
ttagaaggtggggaataatcatcat

SEQ ID NO: 827153 - DNA, 25 bp, Homo sapien
ctcattttccgttccccagcattgg

SEQ ID NO: 827154 - DNA, 25 bp, Homo sapien
cccagcattggcgggttctgggacc

SEQ ID NO: 827155 - DNA, 25 bp, Homo sapien
cgggttctgggaccggtggctgtgg

SEQ ID NO: 827156 - DNA, 25 bp, Homo sapien
attttccgttccccagcattggcgg

SEQ ID NO: 827157 - DNA, 25 bp, Homo sapien
ctgagtttcgtctcctccactggat

SEQ ID NO: 827158 - DNA, 25 bp, Homo sapien
aggcagctgagtttcgtctcctcca

SEQ ID NO: 827159 - DNA, 25 bp, Homo sapien
gcagctgagtttcgtctcctccact

SEQ ID NO: 827160 - DNA, 25 bp, Homo sapien
agctgagtttcgtctcctccactgg

SEQ ID NO: 827161 - DNA, 25 bp, Homo sapien
ctttctccaactttggaagcccagg

SEQ ID NO: 827162 - DNA, 25 bp, Homo sapien
gaagcccaggagcatggcccctgtc

SEQ ID NO: 827163 - DNA, 25 bp, Homo sapien
ggagcatggcccctgtccacagatg

SEQ ID NO: 827164 - DNA, 25 bp, Homo sapien
ggcagctttctccaactttggaagc

SEQ ID NO: 827165 - DNA, 25 bp, Homo sapien
tgaccagtagggccttcccagatac

SEQ ID NO: 827166 - DNA, 25 bp, Homo sapien
caggtaaatgccttggtctctgtca

SEQ ID NO: 827167 - DNA, 25 bp, Homo sapien
cagtagggccttcccagatacagtg

SEQ ID NO: 827168 - DNA, 25 bp, Homo sapien
ttacaggagtgtagcatgcctagct

SEQ ID NO: 827169 - DNA, 25 bp, Homo sapien
tcttctcacctagttggaatctcta

SEQ ID NO: 827170 - DNA, 25 bp, Homo sapien
gatgaccggctttttccaggtgatc

SEQ ID NO: 827171 - DNA, 25 bp, Homo sapien
ccaagacctttgatgaccggctttt

SEQ ID NO: 827172 - DNA, 25 bp, Homo sapien
tgtagtgacagaagcaggaaactcc

SEQ ID NO: 827173 - DNA, 25 bp, Homo sapien
ctccacggccaggaaacggattctc

SEQ ID NO: 827174 - DNA, 25 bp, Homo sapien
ggaaactccagtcattcgagacggg

SEQ ID NO: 827175 - DNA, 25 bp, Homo sapien
tcggatccttataagagcagagcag

SEQ ID NO: 827176 - DNA, 25 bp, Homo sapien
gtttacgtagatcagcgatacgatt

SEQ ID NO: 827177 - DNA, 25 bp, Homo sapien
acgtagatcagcgatacgattattc

SEQ ID NO: 827178 - DNA, 25 bp, Homo sapien
tcagcgatacgattattccatttct

SEQ ID NO: 827179 - DNA, 25 bp, Homo sapien
gtagatcagcgatacgattattcca

SEQ ID NO: 827180 - DNA, 25 bp, Homo sapien
agcccatgaacataagattacagga

SEQ ID NO: 827181 - DNA, 25 bp, Homo sapien
attgtgtaaaagcccatgaacataa

SEQ ID NO: 827182 - DNA, 25 bp, Homo sapien
aaagcccatgaacataagattacag

SEQ ID NO: 827183 - DNA, 25 bp, Homo sapien
gattacaggacttttccagtttaga

SEQ ID NO: 827184 - DNA, 25 bp, Homo sapien
aggatggcatgactcgccggcagct

SEQ ID NO: 827185 - DNA, 25 bp, Homo sapien
cttccaaggagaaacgtgtaaggat

SEQ ID NO: 827186 - DNA, 25 bp, Homo sapien
tccaaggagaaacgtgtaaggatgg

SEQ ID NO: 827187 - DNA, 25 bp, Homo sapien
gatggcatgactcgccggcagctct

SEQ ID NO: 827188 - DNA, 25 bp, Homo sapien
ttcacctgttgaattcataagttca

SEQ ID NO: 827189 - DNA, 25 bp, Homo sapien
cacctgttgaattcataagttcacg

SEQ ID NO: 827190 - DNA, 25 bp, Homo sapien
ctcatgaagctgatttatcaagttg

SEQ ID NO: 827191 - DNA, 25 bp, Homo sapien
atcttcacctgttgaattcataagt

SEQ ID NO: 827192 - DNA, 25 bp, Homo sapien
ggacagtacttgttctcaagggaat

SEQ ID NO: 827193 - DNA, 25 bp, Homo sapien
ctgtggaatccacatataacacaaa

SEQ ID NO: 827194 - DNA, 25 bp, Homo sapien
actcaagttttcgaagtcagtcctg

SEQ ID NO: 827195 - DNA, 25 bp, Homo sapien
tgggaaaattagtgaggtgtggtga

SEQ ID NO: 827196 - DNA, 25 bp, Homo sapien
ttagtgaggtgtggtgacaagcacc

SEQ ID NO: 827197 - DNA, 25 bp, Homo sapien
gtatgtgtgctactgaggcaagcat

SEQ ID NO: 827198 - DNA, 25 bp, Homo sapien
acttaagtatgtgtgctactgaggc

SEQ ID NO: 827199 - DNA, 25 bp, Homo sapien
ttgcacgtcattctttcacagaggc

SEQ ID NO: 827200 - DNA, 25 bp, Homo sapien
gcacgtcattctttcacagaggcca

SEQ ID NO: 827201 - DNA, 25 bp, Homo sapien
ccagcagttgactggtactggtaaa

SEQ ID NO: 827202 - DNA, 25 bp, Homo sapien
catgcaaccatgaaaaggattaaga

SEQ ID NO: 827203 - DNA, 25 bp, Homo sapien
atatcagaaggagcctaaatgcctc

SEQ ID NO: 827204 - DNA, 25 bp, Homo sapien
tatcttgaaggatatggcccatttt

SEQ ID NO: 827205 - DNA, 25 bp, Homo sapien
aataacatgtttcccagtcagtctc

SEQ ID NO: 827206 - DNA, 25 bp, Homo sapien
ctgaataacatgtttcccagtcagt

SEQ ID NO: 827207 - DNA, 25 bp, Homo sapien
cagaagtctttcatggtaggtccag

SEQ ID NO: 827208 - DNA, 25 bp, Homo sapien
tcagaagtctttcatggtaggtcca

SEQ ID NO: 827209 - DNA, 25 bp, Homo sapien
tggccagatgcgctggctcatgact

SEQ ID NO: 827210 - DNA, 25 bp, Homo sapien
tagaaaataaggtggccagatgcgc

SEQ ID NO: 827211 - DNA, 25 bp, Homo sapien
tcctgtgcatctctttcattggctg

SEQ ID NO: 827212 - DNA, 25 bp, Homo sapien
gagccattacattgagccagtaata

SEQ ID NO: 827213 - DNA, 25 bp, Homo sapien
cctggccccaactacattttttgag

SEQ ID NO: 827214 - DNA, 25 bp, Homo sapien
agtagtccatgtgcgtcagccttcc

SEQ ID NO: 827215 - DNA, 25 bp, Homo sapien
cacctgctgaactccaagaggcaaa

SEQ ID NO: 827216 - DNA, 25 bp, Homo sapien
cctgacctcaagtagtccatgtgcg

SEQ ID NO: 827217 - DNA, 25 bp, Homo sapien
tctcttataagatccttgtgattgg

SEQ ID NO: 827218 - DNA, 25 bp, Homo sapien
catcactttctctaattctgactct

SEQ ID NO: 827219 - DNA, 25 bp, Homo sapien
ttctcttataagatccttgtgattg

SEQ ID NO: 827220 - DNA, 25 bp, Homo sapien
tcttataagatccttgtgattggtg

SEQ ID NO: 827221 - DNA, 25 bp, Homo sapien
tcttaaactcctgggcttaagcgat

SEQ ID NO: 827222 - DNA, 25 bp, Homo sapien
ttttttagacatgaggtctcattat

SEQ ID NO: 827223 - DNA, 25 bp, Homo sapien
gtcttaaactcctgggcttaagcga

SEQ ID NO: 827224 - DNA, 25 bp, Homo sapien
aattttttttagacatgaggtctca

SEQ ID NO: 827225 - DNA, 25 bp, Homo sapien
ccattcccaccatgctcatttcttt

SEQ ID NO: 827226 - DNA, 25 bp, Homo sapien
cctaggaactgagactacagctgca

SEQ ID NO: 827227 - DNA, 25 bp, Homo sapien
ccccattcccaccatgctcatttct

SEQ ID NO: 827228 - DNA, 25 bp, Homo sapien
tccctaggaactgagactacagctg

SEQ ID NO: 827229 - DNA, 25 bp, Homo sapien
aatcttcccatagtctttctcaact

SEQ ID NO: 827230 - DNA, 25 bp, Homo sapien
caaatcttcccatagtctttctcaa

SEQ ID NO: 827231 - DNA, 25 bp, Homo sapien
ccaaatcttcccatagtctttctca

SEQ ID NO: 827232 - DNA, 25 bp, Homo sapien
aaatcttcccatagtctttctcaac

SEQ ID NO: 827233 - DNA, 25 bp, Homo sapien
ctactgaattgcagatttcaataaa

SEQ ID NO: 827234 - DNA, 25 bp, Homo sapien
gagagtaggaggtagtggctaaggg

SEQ ID NO: 827235 - DNA, 25 bp, Homo sapien
tctctatagggtaatgaaaggttct

SEQ ID NO: 827236 - DNA, 25 bp, Homo sapien
aaaagtgactgtggtgatcgatgca

SEQ ID NO: 827237 - DNA, 25 bp, Homo sapien
gagccattgcactcaactggtgtag

SEQ ID NO: 827238 - DNA, 25 bp, Homo sapien
ttgcactcaactggtgtagccactt

SEQ ID NO: 827239 - DNA, 25 bp, Homo sapien
atggaatactgccatagaaggaatg

SEQ ID NO: 827240 - DNA, 25 bp, Homo sapien
cctaggcatatatcccagaaaaata

SEQ ID NO: 827241 - DNA, 25 bp, Homo sapien
ctacaatgagccataattggaccac

SEQ ID NO: 827242 - DNA, 25 bp, Homo sapien
aggctacaatgagccataattggac

SEQ ID NO: 827243 - DNA, 25 bp, Homo sapien
caatgagccataattggaccactga

SEQ ID NO: 827244 - DNA, 25 bp, Homo sapien
gctacaatgagccataattggacca

SEQ ID NO: 827245 - DNA, 25 bp, Homo sapien
attcactgagtgtcacgatgcttac

SEQ ID NO: 827246 - DNA, 25 bp, Homo sapien
aattcactgagtgtcacgatgctta

SEQ ID NO: 827247 - DNA, 25 bp, Homo sapien
aaaattcactgagtgtcacgatgct

SEQ ID NO: 827248 - DNA, 25 bp, Homo sapien
acaaaattcactgagtgtcacgatg

SEQ ID NO: 827249 - DNA, 25 bp, Homo sapien
aagaaccagagacggtgggcacaat

SEQ ID NO: 827250 - DNA, 25 bp, Homo sapien
taagaaccagagacggtgggcacaa

SEQ ID NO: 827251 - DNA, 25 bp, Homo sapien
ttaagaaccagagacggtgggcaca

SEQ ID NO: 827252 - DNA, 25 bp, Homo sapien
taaagacaactctagagaatacaga

SEQ ID NO: 827253 - DNA, 25 bp, Homo sapien
gagaggtctcctacacacccattga

SEQ ID NO: 827254 - DNA, 25 bp, Homo sapien
gaccaatcagcgcaaaatagtgaga

SEQ ID NO: 827255 - DNA, 25 bp, Homo sapien
cagaggattagcacaatgagggaca

SEQ ID NO: 827256 - DNA, 25 bp, Homo sapien
tatttgcaggagtccaatcaggaga

SEQ ID NO: 827257 - DNA, 25 bp, Homo sapien
atcaggagacacaaaccactccaaa

SEQ ID NO: 827258 - DNA, 25 bp, Homo sapien
ttcctagcatcaattctgtatttgc

SEQ ID NO: 827259 - DNA, 25 bp, Homo sapien
taaactagaatgagcaaggtggctc

SEQ ID NO: 827260 - DNA, 25 bp, Homo sapien
catatcccattagcaaggagctcag

SEQ ID NO: 827261 - DNA, 25 bp, Homo sapien
gctccttggataaccaaacctattc

SEQ ID NO: 827262 - DNA, 25 bp, Homo sapien
accagcatcccatatcccattagca

SEQ ID NO: 827263 - DNA, 25 bp, Homo sapien
agcatcccatatcccattagcaagg

SEQ ID NO: 827264 - DNA, 25 bp, Homo sapien
cccctaagctcgcaggacaggtgct

SEQ ID NO: 827265 - DNA, 25 bp, Homo sapien
gtgcattcgaaaggatccatcccat

SEQ ID NO: 827266 - DNA, 25 bp, Homo sapien
gcacccctaagctcgcaggacaggt

SEQ ID NO: 827267 - DNA, 25 bp, Homo sapien
tcgaaaggatccatcccatgccatt

SEQ ID NO: 827268 - DNA, 25 bp, Homo sapien
ataacgtagactcagtgggatctct

SEQ ID NO: 827269 - DNA, 25 bp, Homo sapien
cacagactgggagtgagggaataat

SEQ ID NO: 827270 - DNA, 25 bp, Homo sapien
gagtgagggaataatttcaggatga

SEQ ID NO: 827271 - DNA, 25 bp, Homo sapien
aaacagagtgaatgtgtggaagaca

SEQ ID NO: 827272 - DNA, 25 bp, Homo sapien
agagaggtatattacttgaggccaa

SEQ ID NO: 827273 - DNA, 25 bp, Homo sapien
tcctggattcagaggtctttcatgg

SEQ ID NO: 827274 - DNA, 25 bp, Homo sapien
cttcctggattcagaggtctttcat

SEQ ID NO: 827275 - DNA, 25 bp, Homo sapien
tctctcttcctggattcagaggtct

SEQ ID NO: 827276 - DNA, 25 bp, Homo sapien
tggattcagaggtctttcatggtag

SEQ ID NO: 827277 - DNA, 25 bp, Homo sapien
ctgtttttctgagttccgtaaactg

SEQ ID NO: 827278 - DNA, 25 bp, Homo sapien
gacagttatgggaacccctgatttg

SEQ ID NO: 827279 - DNA, 25 bp, Homo sapien
tatgggaacccctgatttgtaacag

SEQ ID NO: 827280 - DNA, 25 bp, Homo sapien
tttctgagttccgtaaactgttcta

SEQ ID NO: 827281 - DNA, 25 bp, Homo sapien
agcactactgtagtcaagcctgggt

SEQ ID NO: 827282 - DNA, 25 bp, Homo sapien
tcaggtaggaggatccttagcccag

SEQ ID NO: 827283 - DNA, 25 bp, Homo sapien
tgtgatagcactactgtagtcaagc

SEQ ID NO: 827284 - DNA, 25 bp, Homo sapien
gatagcactactgtagtcaagcctg

SEQ ID NO: 827285 - DNA, 25 bp, Homo sapien
cagtcagctgtgatagcactactac

SEQ ID NO: 827286 - DNA, 25 bp, Homo sapien
tcagctgtgatagcactactacact

SEQ ID NO: 827287 - DNA, 25 bp, Homo sapien
cagccttggacaacagatggagacc

SEQ ID NO: 827288 - DNA, 25 bp, Homo sapien
tctcagccacgtgggaggttgagat

SEQ ID NO: 827289 - DNA, 25 bp, Homo sapien
cctctggaatccacgtatacgaaaa

SEQ ID NO: 827290 - DNA, 25 bp, Homo sapien
tccacgtatacgaaaattccaaata

SEQ ID NO: 827291 - DNA, 25 bp, Homo sapien
gtttcactgtcacccctctggaatc

SEQ ID NO: 827292 - DNA, 25 bp, Homo sapien
acccctctggaatccacgtatacga

SEQ ID NO: 827293 - DNA, 25 bp, Homo sapien
agtggtagcttgagtcactgtgagg

SEQ ID NO: 827294 - DNA, 25 bp, Homo sapien
gtaagtggtagcttgagtcactgtg

SEQ ID NO: 827295 - DNA, 25 bp, Homo sapien
ggtagcttgagtcactgtgaggtca

SEQ ID NO: 827296 - DNA, 25 bp, Homo sapien
gcttgagtcactgtgaggtcaccta

SEQ ID NO: 827297 - DNA, 25 bp, Homo sapien
caacagggtgcgttctcctatgaga

SEQ ID NO: 827298 - DNA, 25 bp, Homo sapien
ataaggacagcgcaacctagatctc

SEQ ID NO: 827299 - DNA, 25 bp, Homo sapien
ctcaggcgggaatgtgagcaaaggg

SEQ ID NO: 827300 - DNA, 25 bp, Homo sapien
agttcacaacagggtgcgttctcct

SEQ ID NO: 827301 - DNA, 25 bp, Homo sapien
agaatcagtgggcgtcttaagcttg

SEQ ID NO: 827302 - DNA, 25 bp, Homo sapien
tgtagaatcagtgggcgtcttaagc

SEQ ID NO: 827303 - DNA, 25 bp, Homo sapien
ttttcctgcaactggatggtcccac

SEQ ID NO: 827304 - DNA, 25 bp, Homo sapien
atcagtgggcgtcttaagcttgttt

SEQ ID NO: 827305 - DNA, 25 bp, Homo sapien
gtagggtatgggcctaaataggcca

SEQ ID NO: 827306 - DNA, 25 bp, Homo sapien
tagggtatgggcctaaataggccat

SEQ ID NO: 827307 - DNA, 25 bp, Homo sapien
agggtatgggcctaaataggccatt

SEQ ID NO: 827308 - DNA, 25 bp, Homo sapien
gggtatgggcctaaataggccattg

SEQ ID NO: 827309 - DNA, 25 bp, Homo sapien
gaaaggtcaacttgaggagattttg

SEQ ID NO: 827310 - DNA, 25 bp, Homo sapien
gcctggaaaggtcaacttgaggaga

SEQ ID NO: 827311 - DNA, 25 bp, Homo sapien
ctgggcctggaaaggtcaacttgag

SEQ ID NO: 827312 - DNA, 25 bp, Homo sapien
tggaaaggtcaacttgaggagattt

SEQ ID NO: 827313 - DNA, 25 bp, Homo sapien
tgtagacgctgacaggaggcaggag

SEQ ID NO: 827314 - DNA, 25 bp, Homo sapien
ctgtagacgctgacaggaggcagga

SEQ ID NO: 827315 - DNA, 25 bp, Homo sapien
actgggccaaaaaaggctgttgtga

SEQ ID NO: 827316 - DNA, 25 bp, Homo sapien
aactgggccaaaaaaggctgttgtg

SEQ ID NO: 827317 - DNA, 25 bp, Homo sapien
gaaatggcccgacagtcatgagttg

SEQ ID NO: 827318 - DNA, 25 bp, Homo sapien
cagaaatttggcctggggcagctgc

SEQ ID NO: 827319 - DNA, 25 bp, Homo sapien
gcaggagcttcgactgaggatgcca

SEQ ID NO: 827320 - DNA, 25 bp, Homo sapien
cccgacagtcatgagttgggcctaa

SEQ ID NO: 827321 - DNA, 25 bp, Homo sapien
actcgggaggccgcaatgaggcgac

SEQ ID NO: 827322 - DNA, 25 bp, Homo sapien
aggctgggccttgtcgaggcctgca

SEQ ID NO: 827323 - DNA, 25 bp, Homo sapien
ggagacgcaaccaggaagaagagct

SEQ ID NO: 827324 - DNA, 25 bp, Homo sapien
cgggaggccgcaatgaggcgacagc

SEQ ID NO: 827325 - DNA, 25 bp, Homo sapien
gaccaatgccgccaggagatgggta

SEQ ID NO: 827326 - DNA, 25 bp, Homo sapien
gccgaccaatgccgccaggagatgg

SEQ ID NO: 827327 - DNA, 25 bp, Homo sapien
aagctgtgggccgaccaatgccgcc

SEQ ID NO: 827328 - DNA, 25 bp, Homo sapien
tgggccgaccaatgccgccaggaga

SEQ ID NO: 827329 - DNA, 25 bp, Homo sapien
aggagcccaccgaccggagaccatt

SEQ ID NO: 827330 - DNA, 25 bp, Homo sapien
gagaccatttggggcctggagatgc

SEQ ID NO: 827331 - DNA, 25 bp, Homo sapien
tgccatcggagggcaggagctcatc

SEQ ID NO: 827332 - DNA, 25 bp, Homo sapien
gggcaggagctcatcctggagaggc

SEQ ID NO: 827333 - DNA, 25 bp, Homo sapien
tggctgcatctcccgcctcccagca

SEQ ID NO: 827334 - DNA, 25 bp, Homo sapien
cagcagcccgcgtgcgaccctgctc

SEQ ID NO: 827335 - DNA, 25 bp, Homo sapien
tgcctcccgcatggcccagctgttc

SEQ ID NO: 827336 - DNA, 25 bp, Homo sapien
cctcccgcatggcccagctgttcct

SEQ ID NO: 827337 - DNA, 25 bp, Homo sapien
aagacgttgttgggacctggagtcg

SEQ ID NO: 827338 - DNA, 25 bp, Homo sapien
gcttggcttagggaagttgtgggcc

SEQ ID NO: 827339 - DNA, 25 bp, Homo sapien
gagcttggcttagggaagttgtggg

SEQ ID NO: 827340 - DNA, 25 bp, Homo sapien
tggcttagggaagttgtgggcctac

SEQ ID NO: 827341 - DNA, 25 bp, Homo sapien
ctgcagatgccatcggagggcagga

SEQ ID NO: 827342 - DNA, 25 bp, Homo sapien
agagaagcccaccaaccggaggccg

SEQ ID NO: 827343 - DNA, 25 bp, Homo sapien
tgggcctagagaagcccaccaaccg

SEQ ID NO: 827344 - DNA, 25 bp, Homo sapien
gctgggcctagagaagcccaccaac

SEQ ID NO: 827345 - DNA, 25 bp, Homo sapien
gcctagagaagcccaccaaccggag

SEQ ID NO: 827346 - DNA, 25 bp, Homo sapien
gaggccgctgggaggccggagctgg

SEQ ID NO: 827347 - DNA, 25 bp, Homo sapien
cggggaggccgacttgctgctcttc

SEQ ID NO: 827348 - DNA, 25 bp, Homo sapien
tggagaggccgacttcgggacgatt

SEQ ID NO: 827349 - DNA, 25 bp, Homo sapien
agaggccgacttcgggacgatttgg

SEQ ID NO: 827350 - DNA, 25 bp, Homo sapien
agagtccactgtgaggccaaggcca

SEQ ID NO: 827351 - DNA, 25 bp, Homo sapien
aaacaaaaagttcgggcatggtgca

SEQ ID NO: 827352 - DNA, 25 bp, Homo sapien
caaggccaaggccaggcccgtgcag

SEQ ID NO: 827353 - DNA, 25 bp, Homo sapien
gagtccactgtgaggccaaggccaa

SEQ ID NO: 827354 - DNA, 25 bp, Homo sapien
ttgtgccaaaaagttgccatgaccg

SEQ ID NO: 827355 - DNA, 25 bp, Homo sapien
catgggcgatatttttcattgtgcc

SEQ ID NO: 827356 - DNA, 25 bp, Homo sapien
tcatgggcgatatttttcattgtgc

SEQ ID NO: 827357 - DNA, 25 bp, Homo sapien
tcattgtgccaaaaagttgccatga

SEQ ID NO: 827358 - DNA, 25 bp, Homo sapien
aagacgatgtgtgcatagcgggtcc

SEQ ID NO: 827359 - DNA, 25 bp, Homo sapien
cagtttgggacggagtaaggcctgc

SEQ ID NO: 827360 - DNA, 25 bp, Homo sapien
aggcaggtgggcaaccccaaagatc

SEQ ID NO: 827361 - DNA, 25 bp, Homo sapien
ttctcccaggtaaagccatttaatc

SEQ ID NO: 827362 - DNA, 25 bp, Homo sapien
gagctgctgcatggttcccagaggc

SEQ ID NO: 827363 - DNA, 25 bp, Homo sapien
catgggcaggatgttctgcacacaa

SEQ ID NO: 827364 - DNA, 25 bp, Homo sapien
ggccgctgggagctgctgcatggtt

SEQ ID NO: 827365 - DNA, 25 bp, Homo sapien
caactgcaggtgaaacggatgctgg

SEQ ID NO: 827366 - DNA, 25 bp, Homo sapien
acaggctcagggaaccggagaccga

SEQ ID NO: 827367 - DNA, 25 bp, Homo sapien
ttcactgcacgtgccctggaccagt

SEQ ID NO: 827368 - DNA, 25 bp, Homo sapien
ccgagaaggcgctgtcctcttcact

SEQ ID NO: 827369 - DNA, 25 bp, Homo sapien
ttgcctgtacaggtggagaagccaa

SEQ ID NO: 827370 - DNA, 25 bp, Homo sapien
caaagcccaacacccccaagtgtgc

SEQ ID NO: 827371 - DNA, 25 bp, Homo sapien
ccaaagcccaacacccccaagtgtg

SEQ ID NO: 827372 - DNA, 25 bp, Homo sapien
cctgcagctatgtgaggtccagcaa

SEQ ID NO: 827373 - DNA, 25 bp, Homo sapien
acttccgtgggtccaagctgccttg

SEQ ID NO: 827374 - DNA, 25 bp, Homo sapien
cactacgggaactgacacaggtggt

SEQ ID NO: 827375 - DNA, 25 bp, Homo sapien
tgtctggcactgcatcatactctgg

SEQ ID NO: 827376 - DNA, 25 bp, Homo sapien
caaagacccttgtaagtgacctgaa

SEQ ID NO: 827377 - DNA, 25 bp, Homo sapien
taagaagcgtgtgtgaatactctcc

SEQ ID NO: 827378 - DNA, 25 bp, Homo sapien
catgagcagccttgtggagaatcct

SEQ ID NO: 827379 - DNA, 25 bp, Homo sapien
tcttgtaactattaaggccccagga

SEQ ID NO: 827380 - DNA, 25 bp, Homo sapien
atgcagtggaccaaaccccaggctg

SEQ ID NO: 827381 - DNA, 25 bp, Homo sapien
gcaaaaagtgagatctcatgcaggg

SEQ ID NO: 827382 - DNA, 25 bp, Homo sapien
tcagctccatcggagaccacgtcag

SEQ ID NO: 827383 - DNA, 25 bp, Homo sapien
ggcttgcaccatctaaagccagggc

SEQ ID NO: 827384 - DNA, 25 bp, Homo sapien
actggataaaactcatagtagcaaa

SEQ ID NO: 827385 - DNA, 25 bp, Homo sapien
gaagtacctgactataactgccaaa

SEQ ID NO: 827386 - DNA, 25 bp, Homo sapien
aataacagctcctgaaaagttgaag

SEQ ID NO: 827387 - DNA, 25 bp, Homo sapien
tgtacaactgacctgtatcagagtg

SEQ ID NO: 827388 - DNA, 25 bp, Homo sapien
tattcacactctggtactacactgt

SEQ ID NO: 827389 - DNA, 25 bp, Homo sapien
aataatcgcatagtgtgttaggagg

SEQ ID NO: 827390 - DNA, 25 bp, Homo sapien
gctatcaattgtccagtgtcactta

SEQ ID NO: 827391 - DNA, 25 bp, Homo sapien
tatggtaggcactttcctagatgct

SEQ ID NO: 827392 - DNA, 25 bp, Homo sapien
aaattagtagttcatggtgcatccc

SEQ ID NO: 827393 - DNA, 25 bp, Homo sapien
gaccagacgacttgaatatccacca

SEQ ID NO: 827394 - DNA, 25 bp, Homo sapien
ggaaatgctaacagtgatggcctta

SEQ ID NO: 827395 - DNA, 25 bp, Homo sapien
gaacatgcacagacaattttgggag

SEQ ID NO: 827396 - DNA, 25 bp, Homo sapien
gaacatttctggggctccacgccga

SEQ ID NO: 827397 - DNA, 25 bp, Homo sapien
tccacgccgacccagcccaatgcca

SEQ ID NO: 827398 - DNA, 25 bp, Homo sapien
ccaggatgttgatgtgatctgcccc

SEQ ID NO: 827399 - DNA, 25 bp, Homo sapien
tccccatttacttacgggctgtcca

SEQ ID NO: 827400 - DNA, 25 bp, Homo sapien
gttggagaacaaattgaattctgga

SEQ ID NO: 827401 - DNA, 25 bp, Homo sapien
gagaatgaatcagttgacaaagaag

SEQ ID NO: 827402 - DNA, 25 bp, Homo sapien
accccaagttccactccagggcctg

SEQ ID NO: 827403 - DNA, 25 bp, Homo sapien
caaattgaattctggagaatgaatc

SEQ ID NO: 827404 - DNA, 25 bp, Homo sapien
ccatcccaggctcacttccattggt

SEQ ID NO: 827405 - DNA, 25 bp, Homo sapien
atcccaggctcacttccattggtca

SEQ ID NO: 827406 - DNA, 25 bp, Homo sapien
ccccatcccaggctcacttccattg

SEQ ID NO: 827407 - DNA, 25 bp, Homo sapien
gtggccccatcccaggctcacttcc

SEQ ID NO: 827408 - DNA, 25 bp, Homo sapien
agcagaaaacaaggggtggaataca

SEQ ID NO: 827409 - DNA, 25 bp, Homo sapien
aggagcagaaaacaaggggtggaat

SEQ ID NO: 827410 - DNA, 25 bp, Homo sapien
gaaaacaaggggtggaatacagatg

SEQ ID NO: 827411 - DNA, 25 bp, Homo sapien
agaaaacaaggggtggaatacagat

SEQ ID NO: 827412 - DNA, 25 bp, Homo sapien
tggaaatcagcctcaggtacatggg

SEQ ID NO: 827413 - DNA, 25 bp, Homo sapien
ctggaaatcagcctcaggtacatgg

SEQ ID NO: 827414 - DNA, 25 bp, Homo sapien
ggaaatcagcctcaggtacatgggt

SEQ ID NO: 827415 - DNA, 25 bp, Homo sapien
gctccaggtggtaaatggaccctgg

SEQ ID NO: 827416 - DNA, 25 bp, Homo sapien
tgaccccgaggatcacggtggcaga

SEQ ID NO: 827417 - DNA, 25 bp, Homo sapien
cggtggcagacccttcacagacatc

SEQ ID NO: 827418 - DNA, 25 bp, Homo sapien
ccaggtaacattggccatcaggagg

SEQ ID NO: 827419 - DNA, 25 bp, Homo sapien
gattcgtagctccacgtacttcagg

SEQ ID NO: 827420 - DNA, 25 bp, Homo sapien
tgtcctaaccctcaggatgcgctgg

SEQ ID NO: 827421 - DNA, 25 bp, Homo sapien
cgctggagccggtcgtagattcgta

SEQ ID NO: 827422 - DNA, 25 bp, Homo sapien
ggcaccaggcagtgagtgaatttga

SEQ ID NO: 827423 - DNA, 25 bp, Homo sapien
tctcgacaggtcccggaaggaggcc

SEQ ID NO: 827424 - DNA, 25 bp, Homo sapien
ttctcgacaggtcccggaaggaggc

SEQ ID NO: 827425 - DNA, 25 bp, Homo sapien
tcgacaggtcccggaaggaggccca

SEQ ID NO: 827426 - DNA, 25 bp, Homo sapien
tatatatacttatttctcgacaggt

SEQ ID NO: 827427 - DNA, 25 bp, Homo sapien
tgtaataagatacacagtaacatac

SEQ ID NO: 827428 - DNA, 25 bp, Homo sapien
gacactcatatgattggtgagagta

SEQ ID NO: 827429 - DNA, 25 bp, Homo sapien
gatacacagtaacatactaatcttt

SEQ ID NO: 827430 - DNA, 25 bp, Homo sapien
agtagtattataggggcctgccacc

SEQ ID NO: 827431 - DNA, 25 bp, Homo sapien
tagcgtcagatggctaggtctgctc

SEQ ID NO: 827432 - DNA, 25 bp, Homo sapien
aatttagcgtcagatggctaggtct

SEQ ID NO: 827433 - DNA, 25 bp, Homo sapien
ctggatggagaaatttagcgtcaga

SEQ ID NO: 827434 - DNA, 25 bp, Homo sapien
tttagcgtcagatggctaggtctgc

SEQ ID NO: 827435 - DNA, 25 bp, Homo sapien
tggggggatgacaggaggctgtttt

SEQ ID NO: 827436 - DNA, 25 bp, Homo sapien
ggggggatgacaggaggctgttttc

SEQ ID NO: 827437 - DNA, 25 bp, Homo sapien
gggggatgacaggaggctgttttca

SEQ ID NO: 827438 - DNA, 25 bp, Homo sapien
tgccactggtctgctcagccgccag

SEQ ID NO: 827439 - DNA, 25 bp, Homo sapien
ctgagagctgtgagaaactgccact

SEQ ID NO: 827440 - DNA, 25 bp, Homo sapien
gctgtgagaaactgccactggtctg

SEQ ID NO: 827441 - DNA, 25 bp, Homo sapien
gagaaactgccactggtctgctcag

SEQ ID NO: 827442 - DNA, 25 bp, Homo sapien
gttttgcctaggtgtcaggctccca

SEQ ID NO: 827443 - DNA, 25 bp, Homo sapien
ggcagctctcatgggtatattcaaa

SEQ ID NO: 827444 - DNA, 25 bp, Homo sapien
tgtagaaggtgctcattccagtcct

SEQ ID NO: 827445 - DNA, 25 bp, Homo sapien
ggctcccaagaagtgctctcctagg

SEQ ID NO: 827446 - DNA, 25 bp, Homo sapien
tggaagtttattggtggaagtagag

SEQ ID NO: 827447 - DNA, 25 bp, Homo sapien
tattgtgtggtttcaactgagcaga

SEQ ID NO: 827448 - DNA, 25 bp, Homo sapien
tattttgggcttgcagtagctcaac

SEQ ID NO: 827449 - DNA, 25 bp, Homo sapien
tgctccagactcgtaggacaggtct

SEQ ID NO: 827450 - DNA, 25 bp, Homo sapien
tacccagactcgaggctgggcctgg

SEQ ID NO: 827451 - DNA, 25 bp, Homo sapien
tgcacaagaggagggcaaccatgtt

SEQ ID NO: 827452 - DNA, 25 bp, Homo sapien
tagcgtcaaacgcagtgtctagcac

SEQ ID NO: 827453 - DNA, 25 bp, Homo sapien
gacaaaaccaacaagcatcaggcat

SEQ ID NO: 827454 - DNA, 25 bp, Homo sapien
tctagcacctagcaggagcctgaca

SEQ ID NO: 827455 - DNA, 25 bp, Homo sapien
cagatttatgtgtcaaaaagttgct

SEQ ID NO: 827456 - DNA, 25 bp, Homo sapien
tggtcctttctgtcagatttatgtg

SEQ ID NO: 827457 - DNA, 25 bp, Homo sapien
tgaaatttgacacgcttagcaagga

SEQ ID NO: 827458 - DNA, 25 bp, Homo sapien
tgctcaaggcccatggtggagtacc

SEQ ID NO: 827459 - DNA, 25 bp, Homo sapien
gatcggctccgcagttgtccctttg

SEQ ID NO: 827460 - DNA, 25 bp, Homo sapien
tggagtacctcttccaacagagagc

SEQ ID NO: 827461 - DNA, 25 bp, Homo sapien
gcaacaatctgatttctctaacttt

SEQ ID NO: 827462 - DNA, 25 bp, Homo sapien
caatctgatttctctaacttttccc

SEQ ID NO: 827463 - DNA, 25 bp, Homo sapien
cagcaacaatctgatttctctaact

SEQ ID NO: 827464 - DNA, 25 bp, Homo sapien
tctgatttctctaacttttccccac

SEQ ID NO: 827465 - DNA, 25 bp, Homo sapien
cctgctccagtaagagctgactgct

SEQ ID NO: 827466 - DNA, 25 bp, Homo sapien
ccataagcgtaagtctctcagtgca

SEQ ID NO: 827467 - DNA, 25 bp, Homo sapien
ctgaaaactgaactgcggctgccat

SEQ ID NO: 827468 - DNA, 25 bp, Homo sapien
tttaattgcgtacatcctctaggag

SEQ ID NO: 827469 - DNA, 25 bp, Homo sapien
tagcagccctttcgcatgctaatgc

SEQ ID NO: 827470 - DNA, 25 bp, Homo sapien
gcctaccttatgtcaccacaaggga

SEQ ID NO: 827471 - DNA, 25 bp, Homo sapien
cctggaaaccagacgtgatgagctc

SEQ ID NO: 827472 - DNA, 25 bp, Homo sapien
ccacaagggaggaaatagttgtcct

SEQ ID NO: 827473 - DNA, 25 bp, Homo sapien
caccacatcttttaagagggtccat

SEQ ID NO: 827474 - DNA, 25 bp, Homo sapien
catcttttaagagggtccatttggg

SEQ ID NO: 827475 - DNA, 25 bp, Homo sapien
ttccatgtcagaaactttaagatgc

SEQ ID NO: 827476 - DNA, 25 bp, Homo sapien
gcttccatataatttccaccacatc

SEQ ID NO: 827477 - DNA, 25 bp, Homo sapien
accacattcctcttgcatccagata

SEQ ID NO: 827478 - DNA, 25 bp, Homo sapien
tacagacagagtggcaggaccccaa

SEQ ID NO: 827479 - DNA, 25 bp, Homo sapien
attcctcttgcatccagatatggcc

SEQ ID NO: 827480 - DNA, 25 bp, Homo sapien
aaacaccacattcctcttgcatcca

SEQ ID NO: 827481 - DNA, 25 bp, Homo sapien
gcttgtgcagcagtgtttgggcagc

SEQ ID NO: 827482 - DNA, 25 bp, Homo sapien
aacttaagcttcagcaccacgatga

SEQ ID NO: 827483 - DNA, 25 bp, Homo sapien
tggcatgcaaggctccgctggctgc

SEQ ID NO: 827484 - DNA, 25 bp, Homo sapien
tggaggctgtggtccgtgacctccc

SEQ ID NO: 827485 - DNA, 25 bp, Homo sapien
ctgaggagaatggtagggaggaggc

SEQ ID NO: 827486 - DNA, 25 bp, Homo sapien
gacaaagccctgacaatgtcgcaga

SEQ ID NO: 827487 - DNA, 25 bp, Homo sapien
tgtcgcagagttcgagcaagccatg

SEQ ID NO: 827488 - DNA, 25 bp, Homo sapien
cagcagcgacaacgacaaggacaag

SEQ ID NO: 827489 - DNA, 25 bp, Homo sapien
cacatggctttgctccatgaaggcc

SEQ ID NO: 827490 - DNA, 25 bp, Homo sapien
agcacatggctttgctccatgaagg

SEQ ID NO: 827491 - DNA, 25 bp, Homo sapien
caagcacatggctttgctccatgaa

SEQ ID NO: 827492 - DNA, 25 bp, Homo sapien
ctacaagcacatggctttgctccat

SEQ ID NO: 827493 - DNA, 25 bp, Homo sapien
tccatgcggcatgtgacaaagaaag

SEQ ID NO: 827494 - DNA, 25 bp, Homo sapien
cagatcgaagtcattgcactccccg

SEQ ID NO: 827495 - DNA, 25 bp, Homo sapien
gcactccccgttgtatgatggcatg

SEQ ID NO: 827496 - DNA, 25 bp, Homo sapien
tgatcttggatgagccgacccaggt

SEQ ID NO: 827497 - DNA, 25 bp, Homo sapien
cccggtatttccaggcgatctccca

SEQ ID NO: 827498 - DNA, 25 bp, Homo sapien
gcacccggtatttccaggcgatctc

SEQ ID NO: 827499 - DNA, 25 bp, Homo sapien
acagcacccggtatttccaggcgat

SEQ ID NO: 827500 - DNA, 25 bp, Homo sapien
cggtatttccaggcgatctcccatc

SEQ ID NO: 827501 - DNA, 25 bp, Homo sapien
tatgtctgcatcctggccggtgaga

SEQ ID NO: 827502 - DNA, 25 bp, Homo sapien
ctttgagctctgggtcctcaggtgg

SEQ ID NO: 827503 - DNA, 25 bp, Homo sapien
gcagtccagagtggatacagttatc

SEQ ID NO: 827504 - DNA, 25 bp, Homo sapien
tgccatcattatgtctgcatcctgg

SEQ ID NO: 827505 - DNA, 25 bp, Homo sapien
catggtcacattctctaaggattag

SEQ ID NO: 827506 - DNA, 25 bp, Homo sapien
gtcacattctctaaggattagatca

SEQ ID NO: 827507 - DNA, 25 bp, Homo sapien
tcagagaccacatcctttggtttgc

SEQ ID NO: 827508 - DNA, 25 bp, Homo sapien
agagaccacatcctttggtttgcat

SEQ ID NO: 827509 - DNA, 25 bp, Homo sapien
ctggctcagtaaaccaacttccaac

SEQ ID NO: 827510 - DNA, 25 bp, Homo sapien
tggctcagtaaaccaacttccaacc

SEQ ID NO: 827511 - DNA, 25 bp, Homo sapien
gctcagtaaaccaacttccaacctc

SEQ ID NO: 827512 - DNA, 25 bp, Homo sapien
tctggtcattcagatcacacccctg

SEQ ID NO: 827513 - DNA, 25 bp, Homo sapien
atccaattccatcagtccttccctc

SEQ ID NO: 827514 - DNA, 25 bp, Homo sapien
tccctctggtcattcagatcacacc

SEQ ID NO: 827515 - DNA, 25 bp, Homo sapien
tggtcattcagatcacacccctgct

SEQ ID NO: 827516 - DNA, 25 bp, Homo sapien
gagaagcctaaagggcctggaggct

SEQ ID NO: 827517 - DNA, 25 bp, Homo sapien
ggagaagcctaaagggcctggaggc

SEQ ID NO: 827518 - DNA, 25 bp, Homo sapien
agtcagggagaagcctaaagggcct

SEQ ID NO: 827519 - DNA, 25 bp, Homo sapien
ttctacacatgctcaggggcctgct

SEQ ID NO: 827520 - DNA, 25 bp, Homo sapien
gctttcaaacaccacggagtcaaga

SEQ ID NO: 827521 - DNA, 25 bp, Homo sapien
aattctggagaatgaaccacccggc

SEQ ID NO: 827522 - DNA, 25 bp, Homo sapien
gcaagaggcccctgaattcttccca

SEQ ID NO: 827523 - DNA, 25 bp, Homo sapien
taggcccgctccagggttcggctct

SEQ ID NO: 827524 - DNA, 25 bp, Homo sapien
gctgtctgtaggagaagccccgtct

SEQ ID NO: 827525 - DNA, 25 bp, Homo sapien
gattcaggctgcacaggttacttgc

SEQ ID NO: 827526 - DNA, 25 bp, Homo sapien
tgcaccgagtgcctgttagacaagg

SEQ ID NO: 827527 - DNA, 25 bp, Homo sapien
aaagagtgctattctgcgccaccca

SEQ ID NO: 827528 - DNA, 25 bp, Homo sapien
ctgcaacacagcccccaggcacaac

SEQ ID NO: 827529 - DNA, 25 bp, Homo sapien
tgacactggccatgagtaggatgtt

SEQ ID NO: 827530 - DNA, 25 bp, Homo sapien
tttgacactggccatgagtaggatg

SEQ ID NO: 827531 - DNA, 25 bp, Homo sapien
tggtgttggaagctttgtagacgtc

SEQ ID NO: 827532 - DNA, 25 bp, Homo sapien
tgtagacgtctctccaattcctgcc

SEQ ID NO: 827533 - DNA, 25 bp, Homo sapien
tgcatccaatctgaccctgtcttcg

SEQ ID NO: 827534 - DNA, 25 bp, Homo sapien
ggaagacacacactgacaaccctat

SEQ ID NO: 827535 - DNA, 25 bp, Homo sapien
tgtcttcgttaaaatgaggcaggtc

SEQ ID NO: 827536 - DNA, 25 bp, Homo sapien
tgacaaccctattgcatccaatctg

SEQ ID NO: 827537 - DNA, 25 bp, Homo sapien
cgttgatagtggtcacatacctgga

SEQ ID NO: 827538 - DNA, 25 bp, Homo sapien
ctgcaggatgcgttgatagtggtca

SEQ ID NO: 827539 - DNA, 25 bp, Homo sapien
gatgcgttgatagtggtcacatacc

SEQ ID NO: 827540 - DNA, 25 bp, Homo sapien
ctggagctccacaaacctcaatggg

SEQ ID NO: 827541 - DNA, 25 bp, Homo sapien
ggtaataaatcttctcagtgactgt

SEQ ID NO: 827542 - DNA, 25 bp, Homo sapien
taataaatcttctcagtgactgtcc

SEQ ID NO: 827543 - DNA, 25 bp, Homo sapien
ctttaggtaataaatcttctcagtg

SEQ ID NO: 827544 - DNA, 25 bp, Homo sapien
ttaggtaataaatcttctcagtgac

SEQ ID NO: 827545 - DNA, 25 bp, Homo sapien
cagaatttgaaccagtcggatccag

SEQ ID NO: 827546 - DNA, 25 bp, Homo sapien
ggcagtgcgtgacaagaatcctagg

SEQ ID NO: 827547 - DNA, 25 bp, Homo sapien
agttcttgggtaccaggcagtgcgt

SEQ ID NO: 827548 - DNA, 25 bp, Homo sapien
agacagtctcaggatggtcaggatg

SEQ ID NO: 827549 - DNA, 25 bp, Homo sapien
gaggcttggagtttcttctgtacta

SEQ ID NO: 827550 - DNA, 25 bp, Homo sapien
aggcttggagtttcttctgtactaa

SEQ ID NO: 827551 - DNA, 25 bp, Homo sapien
gggaggcttggagtttcttctgtac

SEQ ID NO: 827552 - DNA, 25 bp, Homo sapien
ctgggaggcttggagtttcttctgt

SEQ ID NO: 827553 - DNA, 25 bp, Homo sapien
gtaagtcggcaaaaatctgagacag

SEQ ID NO: 827554 - DNA, 25 bp, Homo sapien
actctcccccttggtcattagctga

SEQ ID NO: 827555 - DNA, 25 bp, Homo sapien
ctggttctgctggtgtaagtcggca

SEQ ID NO: 827556 - DNA, 25 bp, Homo sapien
gctggtgtaagtcggcaaaaatctg

SEQ ID NO: 827557 - DNA, 25 bp, Homo sapien
tcttcgttgctataagcgcttgcct

SEQ ID NO: 827558 - DNA, 25 bp, Homo sapien
cattggatcctgacatctggatggc

SEQ ID NO: 827559 - DNA, 25 bp, Homo sapien
gacttgggcccatgtctttgcgagc

SEQ ID NO: 827560 - DNA, 25 bp, Homo sapien
caggtttcgatatgctcaagggtgc

SEQ ID NO: 827561 - DNA, 25 bp, Homo sapien
ctgttcttgttggtctccacctttc

SEQ ID NO: 827562 - DNA, 25 bp, Homo sapien
ttcttgttggtctccacctttctgc

SEQ ID NO: 827563 - DNA, 25 bp, Homo sapien
tgagctgttcttgttggtctccacc

SEQ ID NO: 827564 - DNA, 25 bp, Homo sapien
ctgagctgttcttgttggtctccac

SEQ ID NO: 827565 - DNA, 25 bp, Homo sapien
tccaacgtaggtcacaggtgcaagg

SEQ ID NO: 827566 - DNA, 25 bp, Homo sapien
gtcacaggtgcaagggatgctgtct

SEQ ID NO: 827567 - DNA, 25 bp, Homo sapien
ctgtcttcacgggaagaatctttcc

SEQ ID NO: 827568 - DNA, 25 bp, Homo sapien
gtgaatgaagccctccaacgtaggt

SEQ ID NO: 827569 - DNA, 25 bp, Homo sapien
ctgcaggccggaggggttctctctt

SEQ ID NO: 827570 - DNA, 25 bp, Homo sapien
tgctgagtagtgagaggggctgcag

SEQ ID NO: 827571 - DNA, 25 bp, Homo sapien
gcaggccggaggggttctctctttc

SEQ ID NO: 827572 - DNA, 25 bp, Homo sapien
ggccagctgtggcccggtggaggct

SEQ ID NO: 827573 - DNA, 25 bp, Homo sapien
ttatgtacagctggaaaggctctgc

SEQ ID NO: 827574 - DNA, 25 bp, Homo sapien
gcacatcttgctaggccagctctgg

SEQ ID NO: 827575 - DNA, 25 bp, Homo sapien
caaagtggtgttgacgaggcttgca

SEQ ID NO: 827576 - DNA, 25 bp, Homo sapien
tgcatagattctccccagtgcggaa

SEQ ID NO: 827577 - DNA, 25 bp, Homo sapien
cgagttgcgtggagcggattcccgc

SEQ ID NO: 827578 - DNA, 25 bp, Homo sapien
gcgccgagttgcgtggagcggattc

SEQ ID NO: 827579 - DNA, 25 bp, Homo sapien
ttgcgtggagcggattcccgcccaa

SEQ ID NO: 827580 - DNA, 25 bp, Homo sapien
gaccgcgccgagttgcgtggagcgg

SEQ ID NO: 827581 - DNA, 25 bp, Homo sapien
cgaccaatcatcagcaaacccgccg

SEQ ID NO: 827582 - DNA, 25 bp, Homo sapien
cgtccccgagtagccattggtctaa

SEQ ID NO: 827583 - DNA, 25 bp, Homo sapien
cgctgtcgcatagcgtccccgagta

SEQ ID NO: 827584 - DNA, 25 bp, Homo sapien
acagcacaggatgccgtggccgccg

SEQ ID NO: 827585 - DNA, 25 bp, Homo sapien
agaaagaaagcgaataaagatgagg

SEQ ID NO: 827586 - DNA, 25 bp, Homo sapien
ctgccgcgccaagaacaagaccggg

SEQ ID NO: 827587 - DNA, 25 bp, Homo sapien
aagaaagcgaataaagatgaggcag

SEQ ID NO: 827588 - DNA, 25 bp, Homo sapien
aaagcgaataaagatgaggcagtgg

SEQ ID NO: 827589 - DNA, 25 bp, Homo sapien
ggacccgggcgccagcagagacagc

SEQ ID NO: 827590 - DNA, 25 bp, Homo sapien
acccgggcgccagcagagacagcgg

SEQ ID NO: 827591 - DNA, 25 bp, Homo sapien
tgggacccgggcgccagcagagaca

SEQ ID NO: 827592 - DNA, 25 bp, Homo sapien
tcaggcctgggacccgggcgccagc

SEQ ID NO: 827593 - DNA, 25 bp, Homo sapien
tggaggcggcaaggaactcttacaa

SEQ ID NO: 827594 - DNA, 25 bp, Homo sapien
tgagtgaacacgaccttggcagatg

SEQ ID NO: 827595 - DNA, 25 bp, Homo sapien
aggcacagaacagtacccaacggga

SEQ ID NO: 827596 - DNA, 25 bp, Homo sapien
ttggcagatgcaccctactgtcggg

SEQ ID NO: 827597 - DNA, 25 bp, Homo sapien
tcgcggcagctatagggaattaagt

SEQ ID NO: 827598 - DNA, 25 bp, Homo sapien
ttttgaaactgcaagccactctacg

SEQ ID NO: 827599 - DNA, 25 bp, Homo sapien
taggaattcagatcacaggctcaaa

SEQ ID NO: 827600 - DNA, 25 bp, Homo sapien
ttttagcaggagacccacggagctt

SEQ ID NO: 827601 - DNA, 25 bp, Homo sapien
aaataacaccaatatatagatccca

SEQ ID NO: 827602 - DNA, 25 bp, Homo sapien
gctctaatggatattaagtgctatc

SEQ ID NO: 827603 - DNA, 25 bp, Homo sapien
taagtacttcttgacacatcactgg

SEQ ID NO: 827604 - DNA, 25 bp, Homo sapien
tcccaatactgctctaatggatatt

SEQ ID NO: 827605 - DNA, 25 bp, Homo sapien
tttcaatatccctggtatacctacg

SEQ ID NO: 827606 - DNA, 25 bp, Homo sapien
agtggctatccttggctacacctct

SEQ ID NO: 827607 - DNA, 25 bp, Homo sapien
tatccctggtatacctacgttacag

SEQ ID NO: 827608 - DNA, 25 bp, Homo sapien
ctggtatacctacgttacagaaaat

SEQ ID NO: 827609 - DNA, 25 bp, Homo sapien
ctctagctggaagtgatctgttatc

SEQ ID NO: 827610 - DNA, 25 bp, Homo sapien
gatcactctagctggaagtgatctg

SEQ ID NO: 827611 - DNA, 25 bp, Homo sapien
ctatgatcactctagctggaagtga

SEQ ID NO: 827612 - DNA, 25 bp, Homo sapien
ctactatgatcactctagctggaag

SEQ ID NO: 827613 - DNA, 25 bp, Homo sapien
tagaagtgtaaaatctggctgcaga

SEQ ID NO: 827614 - DNA, 25 bp, Homo sapien
tatttgaaatgtagggataggagcc

SEQ ID NO: 827615 - DNA, 25 bp, Homo sapien
gaaaaaccctgagaatgtctgaaac

SEQ ID NO: 827616 - DNA, 25 bp, Homo sapien
ggcccaggttatgagatctcgaaaa

SEQ ID NO: 827617 - DNA, 25 bp, Homo sapien
gctgtatgagcttttatcatgtgat

SEQ ID NO: 827618 - DNA, 25 bp, Homo sapien
ttagctgtatgagcttttatcatgt

SEQ ID NO: 827619 - DNA, 25 bp, Homo sapien
tagctgtatgagcttttatcatgtg

SEQ ID NO: 827620 - DNA, 25 bp, Homo sapien
agctgtatgagcttttatcatgtga

SEQ ID NO: 827621 - DNA, 25 bp, Homo sapien
gattaggaaccagcgaaatacttgg

SEQ ID NO: 827622 - DNA, 25 bp, Homo sapien
tgataccccgtgatactatccagag

SEQ ID NO: 827623 - DNA, 25 bp, Homo sapien
tcttgtacgcattggtggtctggtc

SEQ ID NO: 827624 - DNA, 25 bp, Homo sapien
tgtttcccatacttgcctaggcata

SEQ ID NO: 827625 - DNA, 25 bp, Homo sapien
tttccttcatctgattgtaggctga

SEQ ID NO: 827626 - DNA, 25 bp, Homo sapien
tccttcatctgattgtaggctgata

SEQ ID NO: 827627 - DNA, 25 bp, Homo sapien
cttcatctgattgtaggctgataag

SEQ ID NO: 827628 - DNA, 25 bp, Homo sapien
gtttccttcatctgattgtaggctg

SEQ ID NO: 827629 - DNA, 25 bp, Homo sapien
agtatggtggaatatcagactcttc

SEQ ID NO: 827630 - DNA, 25 bp, Homo sapien
taaaagctcacatccgagttaaact

SEQ ID NO: 827631 - DNA, 25 bp, Homo sapien
caggaggcagtatgcttaataacta

SEQ ID NO: 827632 - DNA, 25 bp, Homo sapien
cagactcttcaattattacagtgag

SEQ ID NO: 827633 - DNA, 25 bp, Homo sapien
tgaaccttgtcactgagctgaggct

SEQ ID NO: 827634 - DNA, 25 bp, Homo sapien
cacataagaaactgtcgcaggtcca

SEQ ID NO: 827635 - DNA, 25 bp, Homo sapien
tcttttctgtgggtttgctcaaggc

SEQ ID NO: 827636 - DNA, 25 bp, Homo sapien
gctgaggctcatgatgtacacggtc

SEQ ID NO: 827637 - DNA, 25 bp, Homo sapien
ggcaaagtcatcctatgtaatgtca

SEQ ID NO: 827638 - DNA, 25 bp, Homo sapien
tgtcacttggtagcaaataatgtct

SEQ ID NO: 827639 - DNA, 25 bp, Homo sapien
gagaaatcttggtatagtcctatgc

SEQ ID NO: 827640 - DNA, 25 bp, Homo sapien
gtcacccaagtaagcagcccagttt

SEQ ID NO: 827641 - DNA, 25 bp, Homo sapien
gacacagaactctggacttagccag

SEQ ID NO: 827642 - DNA, 25 bp, Homo sapien
tctgtaataagccacgtgaataagg

SEQ ID NO: 827643 - DNA, 25 bp, Homo sapien
caaactcagcctatctctttggagg

SEQ ID NO: 827644 - DNA, 25 bp, Homo sapien
ttctctagcgaagatgtggctgaac

SEQ ID NO: 827645 - DNA, 25 bp, Homo sapien
cactgtcgctctacatcctcgtaaa

SEQ ID NO: 827646 - DNA, 25 bp, Homo sapien
ggcatttttatactcctcccaggaa

SEQ ID NO: 827647 - DNA, 25 bp, Homo sapien
taaatccagcgcttttgtgcaaatt

SEQ ID NO: 827648 - DNA, 25 bp, Homo sapien
ggaaacgaggccgtcctcattgagg

SEQ ID NO: 827649 - DNA, 25 bp, Homo sapien
gccagctccacaaggctttttcccc

SEQ ID NO: 827650 - DNA, 25 bp, Homo sapien
cacaaggctttttcccccagacagt

SEQ ID NO: 827651 - DNA, 25 bp, Homo sapien
aaggtgccagctccacaaggctttt

SEQ ID NO: 827652 - DNA, 25 bp, Homo sapien
gtgccagctccacaaggctttttcc

SEQ ID NO: 827653 - DNA, 25 bp, Homo sapien
gattcatatcaaactcctgccattg

SEQ ID NO: 827654 - DNA, 25 bp, Homo sapien
tcttctgggcgtgcttaatccagga

SEQ ID NO: 827655 - DNA, 25 bp, Homo sapien
catcccaggagattaagccgtcttg

SEQ ID NO: 827656 - DNA, 25 bp, Homo sapien
ccaggtaagtgccataagtcacgtt

SEQ ID NO: 827657 - DNA, 25 bp, Homo sapien
tttgactcaagaccacggtccctgc

SEQ ID NO: 827658 - DNA, 25 bp, Homo sapien
aaagggaatcagcttagcactgaat

SEQ ID NO: 827659 - DNA, 25 bp, Homo sapien
tgagctatcggcacccagcccaatg

SEQ ID NO: 827660 - DNA, 25 bp, Homo sapien
ctccaaaaattgtctctatgaggga

SEQ ID NO: 827661 - DNA, 25 bp, Homo sapien
taggcagggtagatctcagtatttc

SEQ ID NO: 827662 - DNA, 25 bp, Homo sapien
tactgacaagtattaccactcctgg

SEQ ID NO: 827663 - DNA, 25 bp, Homo sapien
gacagtgttaacctttctctcatgg

SEQ ID NO: 827664 - DNA, 25 bp, Homo sapien
catggatagcggattcattgagaca

SEQ ID NO: 827665 - DNA, 25 bp, Homo sapien
cattttaaacctccgctcatctcta

SEQ ID NO: 827666 - DNA, 25 bp, Homo sapien
ccttgtctgccattttaaacctccg

SEQ ID NO: 827667 - DNA, 25 bp, Homo sapien
tatctttcatgtagtcatactcctc

SEQ ID NO: 827668 - DNA, 25 bp, Homo sapien
tatatctttcatgtagtcatactcc

SEQ ID NO: 827669 - DNA, 25 bp, Homo sapien
cattcttatctatatcttccattgt

SEQ ID NO: 827670 - DNA, 25 bp, Homo sapien
atcagcattcttatctatatcttcc

SEQ ID NO: 827671 - DNA, 25 bp, Homo sapien
gcattcttatctatatcttccattg

SEQ ID NO: 827672 - DNA, 25 bp, Homo sapien
cagcattcttatctatatcttccat

SEQ ID NO: 827673 - DNA, 25 bp, Homo sapien
tctgattctgtcccgggccggttca

SEQ ID NO: 827674 - DNA, 25 bp, Homo sapien
ccaagtaaccgggtatgccaccaca

SEQ ID NO: 827675 - DNA, 25 bp, Homo sapien
gagtacaattgctatccacaggcac

SEQ ID NO: 827676 - DNA, 25 bp, Homo sapien
tgtgactatagtccagactcttgga

SEQ ID NO: 827677 - DNA, 25 bp, Homo sapien
gtaacagtcttatactttccatctt

SEQ ID NO: 827678 - DNA, 25 bp, Homo sapien
tagtaacagtcttatactttccatc

SEQ ID NO: 827679 - DNA, 25 bp, Homo sapien
tgtagtaacagtcttatactttcca

SEQ ID NO: 827680 - DNA, 25 bp, Homo sapien
aacagtcttatactttccatcttta

SEQ ID NO: 827681 - DNA, 25 bp, Homo sapien
ctcatcagtattcccatcatggctg

SEQ ID NO: 827682 - DNA, 25 bp, Homo sapien
tgtccatcttcccatcacggttctt

SEQ ID NO: 827683 - DNA, 25 bp, Homo sapien
gatcatagtctgagggaaggatcca

SEQ ID NO: 827684 - DNA, 25 bp, Homo sapien
tatcccgaaactcaacaaactgctc

SEQ ID NO: 827685 - DNA, 25 bp, Homo sapien
gatttatagcccatacaaaggaccc

SEQ ID NO: 827686 - DNA, 25 bp, Homo sapien
caggagtaatctctgaagcaggtga

SEQ ID NO: 827687 - DNA, 25 bp, Homo sapien
tttcagcttactccaagcagggcag

SEQ ID NO: 827688 - DNA, 25 bp, Homo sapien
tcaaggacaatttgaacaggctcca

SEQ ID NO: 827689 - DNA, 25 bp, Homo sapien
aataagtcatacttgtcaacgatct

SEQ ID NO: 827690 - DNA, 25 bp, Homo sapien
gtcatacttgtcaacgatctcctcc

SEQ ID NO: 827691 - DNA, 25 bp, Homo sapien
taagtcatacttgtcaacgatctcc

SEQ ID NO: 827692 - DNA, 25 bp, Homo sapien
atacttgtcaacgatctcctccttg

SEQ ID NO: 827693 - DNA, 25 bp, Homo sapien
gaggaaatgagggttcctccgtagc

SEQ ID NO: 827694 - DNA, 25 bp, Homo sapien
tgaggaaatgagggttcctccgtag

SEQ ID NO: 827695 - DNA, 25 bp, Homo sapien
ttgaggaaatgagggttcctccgta

SEQ ID NO: 827696 - DNA, 25 bp, Homo sapien
tagtaacagtctcagtagcgcaaac

SEQ ID NO: 827697 - DNA, 25 bp, Homo sapien
tagagttgttcctcagaagcacggc

SEQ ID NO: 827698 - DNA, 25 bp, Homo sapien
caactgaatgtaatatgtggcccct

SEQ ID NO: 827699 - DNA, 25 bp, Homo sapien
ttagccaacagtcagtcctacaggg

SEQ ID NO: 827700 - DNA, 25 bp, Homo sapien
agtgaaaccaagattaattccttgg

SEQ ID NO: 827701 - DNA, 25 bp, Homo sapien
gtgaaaccaagattaattccttggc

SEQ ID NO: 827702 - DNA, 25 bp, Homo sapien
gatgaccgtataatgcttgctgctg

SEQ ID NO: 827703 - DNA, 25 bp, Homo sapien
ctgagggctaaaaacgtggaatacg

SEQ ID NO: 827704 - DNA, 25 bp, Homo sapien
gggagcccacctcaacatgactgtg

SEQ ID NO: 827705 - DNA, 25 bp, Homo sapien
catgattttaacataaggcctgggc

SEQ ID NO: 827706 - DNA, 25 bp, Homo sapien
ttatttagaaacagataggtacctg

SEQ ID NO: 827707 - DNA, 25 bp, Homo sapien
aaacagataggtacctgttcgcatt

SEQ ID NO: 827708 - DNA, 25 bp, Homo sapien
tatttagaaacagataggtacctgt

SEQ ID NO: 827709 - DNA, 25 bp, Homo sapien
ataggtacctgttcgcattgcagaa

SEQ ID NO: 827710 - DNA, 25 bp, Homo sapien
taaaaaagggttatggctgtggtga

SEQ ID NO: 827711 - DNA, 25 bp, Homo sapien
tgctgtctctgagtttgggagaact

SEQ ID NO: 827712 - DNA, 25 bp, Homo sapien
ggaaaatgaaggtcatacatacccc

SEQ ID NO: 827713 - DNA, 25 bp, Homo sapien
agagcatccataattctaagctaga

SEQ ID NO: 827714 - DNA, 25 bp, Homo sapien
aacgtgtgtgtacattcagaatcgc

SEQ ID NO: 827715 - DNA, 25 bp, Homo sapien
cagcaggtctctccagttatacggc

SEQ ID NO: 827716 - DNA, 25 bp, Homo sapien
cagaatcgcttgtgtttggtatcag

SEQ ID NO: 827717 - DNA, 25 bp, Homo sapien
taattatataacgagcagcaggtct

SEQ ID NO: 827718 - DNA, 25 bp, Homo sapien
ccaacttttagcctgcacgagcatg

SEQ ID NO: 827719 - DNA, 25 bp, Homo sapien
cagtttctactcctaagtggcacca

SEQ ID NO: 827720 - DNA, 25 bp, Homo sapien
taggattaccgtagacccaggagta

SEQ ID NO: 827721 - DNA, 25 bp, Homo sapien
tactgtctcgtctacccaagttggc

SEQ ID NO: 827722 - DNA, 25 bp, Homo sapien
ggttctgagcatttgtaagtctaaa

SEQ ID NO: 827723 - DNA, 25 bp, Homo sapien
aagtctaaatctaaatcaatggttg

SEQ ID NO: 827724 - DNA, 25 bp, Homo sapien
gccatatatatatgcggccacacac

SEQ ID NO: 827725 - DNA, 25 bp, Homo sapien
gattgtattatattgggttctgagc

SEQ ID NO: 827726 - DNA, 25 bp, Homo sapien
tagaaatggtaaccctggagaaatc

SEQ ID NO: 827727 - DNA, 25 bp, Homo sapien
tggcttgaagtagaaatggtaaccc

SEQ ID NO: 827728 - DNA, 25 bp, Homo sapien
gaagtagaaatggtaaccctggaga

SEQ ID NO: 827729 - DNA, 25 bp, Homo sapien
gcttgaagtagaaatggtaaccctg

SEQ ID NO: 827730 - DNA, 25 bp, Homo sapien
atcatacccctagaccaacgagcca

SEQ ID NO: 827731 - DNA, 25 bp, Homo sapien
ctcgcaccctaagcgagaatcatac

SEQ ID NO: 827732 - DNA, 25 bp, Homo sapien
gggacctctcgcaccctaagcgaga

SEQ ID NO: 827733 - DNA, 25 bp, Homo sapien
ggatttgaacccgggacctctcgca

SEQ ID NO: 827734 - DNA, 25 bp, Homo sapien
agatgctctgccagtccactcttgg

SEQ ID NO: 827735 - DNA, 25 bp, Homo sapien
cagtccactcttggtcagtttggcc

SEQ ID NO: 827736 - DNA, 25 bp, Homo sapien
gaaataatggggtacatataggcca

SEQ ID NO: 827737 - DNA, 25 bp, Homo sapien
gctctgccagtccactcttggtcag

SEQ ID NO: 827738 - DNA, 25 bp, Homo sapien
ggcagggccctgacctctccgcttt

SEQ ID NO: 827739 - DNA, 25 bp, Homo sapien
gaggagggaagtcgaggcccggatg

SEQ ID NO: 827740 - DNA, 25 bp, Homo sapien
caaggaccctcttaggaggagccct

SEQ ID NO: 827741 - DNA, 25 bp, Homo sapien
ccggatgggcgaacggcagggccct

SEQ ID NO: 827742 - DNA, 25 bp, Homo sapien
cgccgccttccgcctccctgagcag

SEQ ID NO: 827743 - DNA, 25 bp, Homo sapien
gcgcccgcctccatgaccgctcccg

SEQ ID NO: 827744 - DNA, 25 bp, Homo sapien
cgcccgcctccatgaccgctcccgc

SEQ ID NO: 827745 - DNA, 25 bp, Homo sapien
gccgccttccgcctccctgagcaga

SEQ ID NO: 827746 - DNA, 25 bp, Homo sapien
gtagggctgcgaccgctcccctccc

SEQ ID NO: 827747 - DNA, 25 bp, Homo sapien
gggtagggctgcgaccgctcccctc

SEQ ID NO: 827748 - DNA, 25 bp, Homo sapien
gaaggggtagggctgcgaccgctcc

SEQ ID NO: 827749 - DNA, 25 bp, Homo sapien
tgcgggaaggggtagggctgcgacc

SEQ ID NO: 827750 - DNA, 25 bp, Homo sapien
caggaccctcttgcttgcacagaaa

SEQ ID NO: 827751 - DNA, 25 bp, Homo sapien
tggcggctctgcgactcctctctct

SEQ ID NO: 827752 - DNA, 25 bp, Homo sapien
ggctctgcgactcctctctctcggc

SEQ ID NO: 827753 - DNA, 25 bp, Homo sapien
ctcagaacccgctgttccaggaccc

SEQ ID NO: 827754 - DNA, 25 bp, Homo sapien
cctcataggagcctagagtggtcac

SEQ ID NO: 827755 - DNA, 25 bp, Homo sapien
tcacagccctcggaagcctcatagg

SEQ ID NO: 827756 - DNA, 25 bp, Homo sapien
gaagcctcataggagcctagagtgg

SEQ ID NO: 827757 - DNA, 25 bp, Homo sapien
cctcggaagcctcataggagcctag

SEQ ID NO: 827758 - DNA, 25 bp, Homo sapien
cctcatagagagctgggagtaacac

SEQ ID NO: 827759 - DNA, 25 bp, Homo sapien
cttcctcctcatagagagctgggag

SEQ ID NO: 827760 - DNA, 25 bp, Homo sapien
tcatagagagctgggagtaacacct

SEQ ID NO: 827761 - DNA, 25 bp, Homo sapien
cctcctcatagagagctgggagtaa

SEQ ID NO: 827762 - DNA, 25 bp, Homo sapien
ctgacagagagccaacactgccacc

SEQ ID NO: 827763 - DNA, 25 bp, Homo sapien
tgacagagagccaacactgccacct

SEQ ID NO: 827764 - DNA, 25 bp, Homo sapien
acagagagccaacactgccaccttt

SEQ ID NO: 827765 - DNA, 25 bp, Homo sapien
gacagagagccaacactgccacctt

SEQ ID NO: 827766 - DNA, 25 bp, Homo sapien
tgccagttcccgggtctcctccagt

SEQ ID NO: 827767 - DNA, 25 bp, Homo sapien
tgtagctccaaggagtcatcctcat

SEQ ID NO: 827768 - DNA, 25 bp, Homo sapien
tagctccaaggagtcatcctcatgc

SEQ ID NO: 827769 - DNA, 25 bp, Homo sapien
gctccaaggagtcatcctcatgctg

SEQ ID NO: 827770 - DNA, 25 bp, Homo sapien
gggcgctggctagccgttcatcctc

SEQ ID NO: 827771 - DNA, 25 bp, Homo sapien
tgggcgctggctagccgttcatcct

SEQ ID NO: 827772 - DNA, 25 bp, Homo sapien
cgctggctagccgttcatcctccag

SEQ ID NO: 827773 - DNA, 25 bp, Homo sapien
tggctagccgttcatcctccaggag

SEQ ID NO: 827774 - DNA, 25 bp, Homo sapien
ttcagttgcggaatcctctgctgct

SEQ ID NO: 827775 - DNA, 25 bp, Homo sapien
tcctgcagggatgctatgtcactct

SEQ ID NO: 827776 - DNA, 25 bp, Homo sapien
taatctccccgaatgcgttccatgt

SEQ ID NO: 827777 - DNA, 25 bp, Homo sapien
tccatttctgcacggagggaggcga

SEQ ID NO: 827778 - DNA, 25 bp, Homo sapien
gagtaatctgagagacctaaactac

SEQ ID NO: 827779 - DNA, 25 bp, Homo sapien
cagagtaatctgagagacctaaact

SEQ ID NO: 827780 - DNA, 25 bp, Homo sapien
ccagagtaatctgagagacctaaac

SEQ ID NO: 827781 - DNA, 25 bp, Homo sapien
cccagagtaatctgagagacctaaa

SEQ ID NO: 827782 - DNA, 25 bp, Homo sapien
cagttttcctgtcttgaaacctgag

SEQ ID NO: 827783 - DNA, 25 bp, Homo sapien
acctgagagcagaaggttaaagagc

SEQ ID NO: 827784 - DNA, 25 bp, Homo sapien
tcctgtcttgaaacctgagagcaga

SEQ ID NO: 827785 - DNA, 25 bp, Homo sapien
gcagaaggttaaagagcttctcttt

SEQ ID NO: 827786 - DNA, 25 bp, Homo sapien
cactctccagatctgcaagctgccc

SEQ ID NO: 827787 - DNA, 25 bp, Homo sapien
agggcccggtattcctcattcagga

SEQ ID NO: 827788 - DNA, 25 bp, Homo sapien
ggaaatggtagcgttcccgcagctc

SEQ ID NO: 827789 - DNA, 25 bp, Homo sapien
caagctgccccgtgaggctgctgtt

SEQ ID NO: 827790 - DNA, 25 bp, Homo sapien
gctgccgtaacaactgcatttcagg

SEQ ID NO: 827791 - DNA, 25 bp, Homo sapien
caggatcaggctctaagaaatccat

SEQ ID NO: 827792 - DNA, 25 bp, Homo sapien
tgctgacgtcatactcagtgtttgg

SEQ ID NO: 827793 - DNA, 25 bp, Homo sapien
ttcagcatcccgtagctgctgccgt

SEQ ID NO: 827794 - DNA, 25 bp, Homo sapien
cctcactgacctggcgatgatgctg

SEQ ID NO: 827795 - DNA, 25 bp, Homo sapien
tgaaaccgaagcacctcattctgag

SEQ ID NO: 827796 - DNA, 25 bp, Homo sapien
ctgtgggaggtctgaaaccgaagca

SEQ ID NO: 827797 - DNA, 25 bp, Homo sapien
cactgacctggcgatgatgctgtag

SEQ ID NO: 827798 - DNA, 25 bp, Homo sapien
ggtacagagtctggacttcagctcc

SEQ ID NO: 827799 - DNA, 25 bp, Homo sapien
tacagagtctggacttcagctcctc

SEQ ID NO: 827800 - DNA, 25 bp, Homo sapien
agggtacagagtctggacttcagct

SEQ ID NO: 827801 - DNA, 25 bp, Homo sapien
ctgcagggtacagagtctggacttc

SEQ ID NO: 827802 - DNA, 25 bp, Homo sapien
actctggttttctacaagtgtggat

SEQ ID NO: 827803 - DNA, 25 bp, Homo sapien
tcttcaagagctcgttctgctcatc

SEQ ID NO: 827804 - DNA, 25 bp, Homo sapien
gctcatcctggctagtatcatattt

SEQ ID NO: 827805 - DNA, 25 bp, Homo sapien
aagtgtggatttcatgactttgagc

SEQ ID NO: 827806 - DNA, 25 bp, Homo sapien
gccaccgtatccctgaggtgctgca

SEQ ID NO: 827807 - DNA, 25 bp, Homo sapien
tttccttctcacatgtgacgttctg

SEQ ID NO: 827808 - DNA, 25 bp, Homo sapien
cacatgtgacgttctggtgctggag

SEQ ID NO: 827809 - DNA, 25 bp, Homo sapien
aaggaggccaccgtatccctgaggt

SEQ ID NO: 827810 - DNA, 25 bp, Homo sapien
caagatgatgcctggctacatcctc

SEQ ID NO: 827811 - DNA, 25 bp, Homo sapien
cacacaagatgatgcctggctacat

SEQ ID NO: 827812 - DNA, 25 bp, Homo sapien
gatgatgcctggctacatcctccct

SEQ ID NO: 827813 - DNA, 25 bp, Homo sapien
cctcacacaagatgatgcctggcta

SEQ ID NO: 827814 - DNA, 25 bp, Homo sapien
cagctcgtccttgctggcctggtac

SEQ ID NO: 827815 - DNA, 25 bp, Homo sapien
ctgctccagctggtcatacatgtgc

SEQ ID NO: 827816 - DNA, 25 bp, Homo sapien
tgggaggccttgagctctttcagct

SEQ ID NO: 827817 - DNA, 25 bp, Homo sapien
gtcatacatgtgcttctgccgctcc

SEQ ID NO: 827818 - DNA, 25 bp, Homo sapien
gcaaacaattttgaagttagcagca

SEQ ID NO: 827819 - DNA, 25 bp, Homo sapien
agactgggatccaaaggtattgatc

SEQ ID NO: 827820 - DNA, 25 bp, Homo sapien
tcaagcccttgggttgggtgccttc

SEQ ID NO: 827821 - DNA, 25 bp, Homo sapien
tcctgcctaggaaggccatcaagcc

SEQ ID NO: 827822 - DNA, 25 bp, Homo sapien
gaaacgtgagcctggatatagaaag

SEQ ID NO: 827823 - DNA, 25 bp, Homo sapien
gtgaccaactccaccatcgttagag

SEQ ID NO: 827824 - DNA, 25 bp, Homo sapien
caatgctgttttacggctagagaaa

SEQ ID NO: 827825 - DNA, 25 bp, Homo sapien
aaagagactgctgaggtggcccaaa

SEQ ID NO: 827826 - DNA, 25 bp, Homo sapien
ttttcctgcaattctgtcagtctgg

SEQ ID NO: 827827 - DNA, 25 bp, Homo sapien
tctggctggccttgtacttttcctg

SEQ ID NO: 827828 - DNA, 25 bp, Homo sapien
tcagtctggacagcagtgtgtcaca

SEQ ID NO: 827829 - DNA, 25 bp, Homo sapien
gcaattctgtcagtctggacagcag

SEQ ID NO: 827830 - DNA, 25 bp, Homo sapien
gaaatgagactctttgaaacgtcgc

SEQ ID NO: 827831 - DNA, 25 bp, Homo sapien
tagccaatttggaatcatcgggatt

SEQ ID NO: 827832 - DNA, 25 bp, Homo sapien
tcgattacatttggaggacttagcc

SEQ ID NO: 827833 - DNA, 25 bp, Homo sapien
gcagctcttcgtggatctctaattg

SEQ ID NO: 827834 - DNA, 25 bp, Homo sapien
tgatgcccctggaatatgatccagc

SEQ ID NO: 827835 - DNA, 25 bp, Homo sapien
ggaatatgatccagcctcacagtgt

SEQ ID NO: 827836 - DNA, 25 bp, Homo sapien
tggacatctgatgcccctggaatat

SEQ ID NO: 827837 - DNA, 25 bp, Homo sapien
gcccctggaatatgatccagcctca

SEQ ID NO: 827838 - DNA, 25 bp, Homo sapien
tcagagctactggtgctgccgtaac

SEQ ID NO: 827839 - DNA, 25 bp, Homo sapien
gcgtcatacatcacctgcagggcct

SEQ ID NO: 827840 - DNA, 25 bp, Homo sapien
gcagctgctgacaaaactcttctgg

SEQ ID NO: 827841 - DNA, 25 bp, Homo sapien
tcagcaggttcctcgtcagtgcagc

SEQ ID NO: 827842 - DNA, 25 bp, Homo sapien
catgggcttttcaaggcattccatg

SEQ ID NO: 827843 - DNA, 25 bp, Homo sapien
ggcattccatgcactccttgaactc

SEQ ID NO: 827844 - DNA, 25 bp, Homo sapien
tggcttatctggtacatggcctgca

SEQ ID NO: 827845 - DNA, 25 bp, Homo sapien
tctgcttggccagtaacttttccat

SEQ ID NO: 827846 - DNA, 25 bp, Homo sapien
aatcattcgatgagagaagtcctga

SEQ ID NO: 827847 - DNA, 25 bp, Homo sapien
cagctccacgggcacttgggaaatg

SEQ ID NO: 827848 - DNA, 25 bp, Homo sapien
tgatgactagtaaaccccagctcca

SEQ ID NO: 827849 - DNA, 25 bp, Homo sapien
gcctctgaggtgcatattctccctg

SEQ ID NO: 827850 - DNA, 25 bp, Homo sapien
ctgggcttattggagcgcgcctgta

SEQ ID NO: 827851 - DNA, 25 bp, Homo sapien
tacaaacattcgctgggcttattgg

SEQ ID NO: 827852 - DNA, 25 bp, Homo sapien
cctgatgatgtccatctaataagat

SEQ ID NO: 827853 - DNA, 25 bp, Homo sapien
gctaccaattctgaacctcagggat

SEQ ID NO: 827854 - DNA, 25 bp, Homo sapien
catgctagcctggtattgcagctgc

SEQ ID NO: 827855 - DNA, 25 bp, Homo sapien
tcccccgggcttctttgacaacaga

SEQ ID NO: 827856 - DNA, 25 bp, Homo sapien
ttctccctgagctggcggagctcct

SEQ ID NO: 827857 - DNA, 25 bp, Homo sapien
tctttgacaacagaaggcctcttct

SEQ ID NO: 827858 - DNA, 25 bp, Homo sapien
ctttctggtctcaaggtcgctctca

SEQ ID NO: 827859 - DNA, 25 bp, Homo sapien
ccgagcatggcttggtcaccttttt

SEQ ID NO: 827860 - DNA, 25 bp, Homo sapien
tcaaggtcgctctcagaagtatccg

SEQ ID NO: 827861 - DNA, 25 bp, Homo sapien
tctcagaagtatccgagcatggctt

SEQ ID NO: 827862 - DNA, 25 bp, Homo sapien
tgtagacacttcagagatcccagaa

SEQ ID NO: 827863 - DNA, 25 bp, Homo sapien
gggagcacccactttccattaagat

SEQ ID NO: 827864 - DNA, 25 bp, Homo sapien
tctggctaccaaggttactactcac

SEQ ID NO: 827865 - DNA, 25 bp, Homo sapien
caaatcccttgcctggttgaaaggg

SEQ ID NO: 827866 - DNA, 25 bp, Homo sapien
tgcacctcccgatgtgagttgtctg

SEQ ID NO: 827867 - DNA, 25 bp, Homo sapien
gctgcgttacctgtgaagctcctaa

SEQ ID NO: 827868 - DNA, 25 bp, Homo sapien
gacaatgctgtactagctccaggaa

SEQ ID NO: 827869 - DNA, 25 bp, Homo sapien
tgggctctgcacctaaattgttgct

SEQ ID NO: 827870 - DNA, 25 bp, Homo sapien
tgtagtacagcactacctccagact

SEQ ID NO: 827871 - DNA, 25 bp, Homo sapien
cctcctcttttgctagtccatctaa

SEQ ID NO: 827872 - DNA, 25 bp, Homo sapien
ctctggctggccttgtagtacagca

SEQ ID NO: 827873 - DNA, 25 bp, Homo sapien
tggctcagcaactagctcatcccca

SEQ ID NO: 827874 - DNA, 25 bp, Homo sapien
gactttcaagggaagagtcggcgtc

SEQ ID NO: 827875 - DNA, 25 bp, Homo sapien
gaagagtcggcgtcatcctcctcct

SEQ ID NO: 827876 - DNA, 25 bp, Homo sapien
caagggaagagtcggcgtcatcctc

SEQ ID NO: 827877 - DNA, 25 bp, Homo sapien
tttttgctctcggaaagtctgaggg

SEQ ID NO: 827878 - DNA, 25 bp, Homo sapien
tgtgaggctctgaaccagcacgtgg

SEQ ID NO: 827879 - DNA, 25 bp, Homo sapien
tcttaggtaatggtcccctggcaca

SEQ ID NO: 827880 - DNA, 25 bp, Homo sapien
cacgtggtggaatatgatgagctca

SEQ ID NO: 827881 - DNA, 25 bp, Homo sapien
taggtccaagtcaggcggtgagtcc

SEQ ID NO: 827882 - DNA, 25 bp, Homo sapien
aagaggcaaggagaagatgggggga

SEQ ID NO: 827883 - DNA, 25 bp, Homo sapien
gaggcaaggagaagatggggggatt

SEQ ID NO: 827884 - DNA, 25 bp, Homo sapien
caagaggcaaggagaagatgggggg

SEQ ID NO: 827885 - DNA, 25 bp, Homo sapien
tacaagaggcaaggagaagatgggg

SEQ ID NO: 827886 - DNA, 25 bp, Homo sapien
ttaggacgacgtctcagcccaccag

SEQ ID NO: 827887 - DNA, 25 bp, Homo sapien
agcaccagagcaaagccgagatgac

SEQ ID NO: 827888 - DNA, 25 bp, Homo sapien
ccagagcaaagccgagatgaccacc

SEQ ID NO: 827889 - DNA, 25 bp, Homo sapien
agcaaagccgagatgaccaccaggc

SEQ ID NO: 827890 - DNA, 25 bp, Homo sapien
taccaatgcccctgggaggatcatg

SEQ ID NO: 827891 - DNA, 25 bp, Homo sapien
tcactaaagcagttgtggaccaggg

SEQ ID NO: 827892 - DNA, 25 bp, Homo sapien
gatggaccagcttaggttgccctcc

SEQ ID NO: 827893 - DNA, 25 bp, Homo sapien
ccaatgcaggactagagagaatacc

SEQ ID NO: 827894 - DNA, 25 bp, Homo sapien
cactgggcctaggtcattagaacac

SEQ ID NO: 827895 - DNA, 25 bp, Homo sapien
ggcttgccacccctgtagatgatgt

SEQ ID NO: 827896 - DNA, 25 bp, Homo sapien
cctgctgattcatgggacaagtggc

SEQ ID NO: 827897 - DNA, 25 bp, Homo sapien
tatgggtgcccaagacacctcagga

SEQ ID NO: 827898 - DNA, 25 bp, Homo sapien
gccaagaataccataggcttccaca

SEQ ID NO: 827899 - DNA, 25 bp, Homo sapien
tctgactcctgctgtcgcatgttgg

SEQ ID NO: 827900 - DNA, 25 bp, Homo sapien
gaataccataggcttccacaaccca

SEQ ID NO: 827901 - DNA, 25 bp, Homo sapien
catgttgggtaacacatacagagcc

SEQ ID NO: 827902 - DNA, 25 bp, Homo sapien
aggaactcaggttcttacacaaggc

SEQ ID NO: 827903 - DNA, 25 bp, Homo sapien
tgtcctgcccaaagctgagggtggt

SEQ ID NO: 827904 - DNA, 25 bp, Homo sapien
caggttcttacacaaggcaggagat

SEQ ID NO: 827905 - DNA, 25 bp, Homo sapien
caggagatggaagtcagccgctccc

SEQ ID NO: 827906 - DNA, 25 bp, Homo sapien
cgaccacgggactcgctgcgctgcg

SEQ ID NO: 827907 - DNA, 25 bp, Homo sapien
tccaacttctctcgcgccggggctg

SEQ ID NO: 827908 - DNA, 25 bp, Homo sapien
ctcctaggcgctcggccgctctctg

SEQ ID NO: 827909 - DNA, 25 bp, Homo sapien
gctagggccgcggtttgggctatcg

SEQ ID NO: 827910 - DNA, 25 bp, Homo sapien
gaggccggcgtctgagtagccgctg

SEQ ID NO: 827911 - DNA, 25 bp, Homo sapien
gccgaggccggcgtctgagtagccg

SEQ ID NO: 827912 - DNA, 25 bp, Homo sapien
ctgagtagccgctgttgttcatcat

SEQ ID NO: 827913 - DNA, 25 bp, Homo sapien
ccaggccgaggccggcgtctgagta

SEQ ID NO: 827914 - DNA, 25 bp, Homo sapien
ctcgaggaactcgagggccacggac

SEQ ID NO: 827915 - DNA, 25 bp, Homo sapien
agcttgatgtgctcgcgctcgagga

SEQ ID NO: 827916 - DNA, 25 bp, Homo sapien
tccagcttcatttggcggaagttgg

SEQ ID NO: 827917 - DNA, 25 bp, Homo sapien
ggcgcttgcccacgcacttgaggtg

SEQ ID NO: 827918 - DNA, 25 bp, Homo sapien
cagggcctggacttgcggaagcccc

SEQ ID NO: 827919 - DNA, 25 bp, Homo sapien
agctgcagccaatcccgcggtaggg

SEQ ID NO: 827920 - DNA, 25 bp, Homo sapien
ttagctgcagccaatcccgcggtag

SEQ ID NO: 827921 - DNA, 25 bp, Homo sapien
cgttagctgcagccaatcccgcggt

SEQ ID NO: 827922 - DNA, 25 bp, Homo sapien
tcctgccagtcacggttgaagttgg

SEQ ID NO: 827923 - DNA, 25 bp, Homo sapien
cagagctttgccgtcctgccagtca

SEQ ID NO: 827924 - DNA, 25 bp, Homo sapien
ttgggcgtctgtttgcgggcatcct

SEQ ID NO: 827925 - DNA, 25 bp, Homo sapien
tgtttgcgggcatcctcatcatctt

SEQ ID NO: 827926 - DNA, 25 bp, Homo sapien
ctctgtctttgggagctaagggctc

SEQ ID NO: 827927 - DNA, 25 bp, Homo sapien
tgatcttggataagtcaccagccct

SEQ ID NO: 827928 - DNA, 25 bp, Homo sapien
tgggctctaggtggttctgccacag

SEQ ID NO: 827929 - DNA, 25 bp, Homo sapien
attctgacaaccacacgccttggca

SEQ ID NO: 827930 - DNA, 25 bp, Homo sapien
ggaatagtgcctcgtggcacagtaa

SEQ ID NO: 827931 - DNA, 25 bp, Homo sapien
catggcctcccgggcgttctccacg

SEQ ID NO: 827932 - DNA, 25 bp, Homo sapien
aacaggggcaccaggtttgagcttg

SEQ ID NO: 827933 - DNA, 25 bp, Homo sapien
cagctgcttggatcgaacaggggca

SEQ ID NO: 827934 - DNA, 25 bp, Homo sapien
taacagaatgctcatccacgttggg

SEQ ID NO: 827935 - DNA, 25 bp, Homo sapien
ctttcttggggttcagctgcttgga

SEQ ID NO: 827936 - DNA, 25 bp, Homo sapien
gtcctcgatgtagaccagcacctcg

SEQ ID NO: 827937 - DNA, 25 bp, Homo sapien
tgcagcacggtgttgccctgtggct

SEQ ID NO: 827938 - DNA, 25 bp, Homo sapien
ggccttcagggtcctcgatgtagac

SEQ ID NO: 827939 - DNA, 25 bp, Homo sapien
tctgcacggtgaagtgggcaggctg

SEQ ID NO: 827940 - DNA, 25 bp, Homo sapien
gcataggtgcgatccttgtcattgt

SEQ ID NO: 827941 - DNA, 25 bp, Homo sapien
tgtcattgttgggaaccaccttagc

SEQ ID NO: 827942 - DNA, 25 bp, Homo sapien
cttgtgtaacccagcgaccttgggc

SEQ ID NO: 827943 - DNA, 25 bp, Homo sapien
gaccttgggcacataggagacagca

SEQ ID NO: 827944 - DNA, 25 bp, Homo sapien
caaagggactgcgttcaatgttctg

SEQ ID NO: 827945 - DNA, 25 bp, Homo sapien
tgcgttcaatgttctggccagcaaa

SEQ ID NO: 827946 - DNA, 25 bp, Homo sapien
cacgttcacctcaaagggactgcgt

SEQ ID NO: 827947 - DNA, 25 bp, Homo sapien
ggtgggtttgttggccacattgccc

SEQ ID NO: 827948 - DNA, 25 bp, Homo sapien
gcaaaggccacatgcacggtatgtg

SEQ ID NO: 827949 - DNA, 25 bp, Homo sapien
cctccatggcaggtctgtatgtgca

SEQ ID NO: 827950 - DNA, 25 bp, Homo sapien
cagcggaacgtgctgtcacccttgt

SEQ ID NO: 827951 - DNA, 25 bp, Homo sapien
gccctgtgggtccacgatcaccaca

SEQ ID NO: 827952 - DNA, 25 bp, Homo sapien
ctgccggcacccttggtaaacacct

SEQ ID NO: 827953 - DNA, 25 bp, Homo sapien
tctttcacgcgaacacccttgggct

SEQ ID NO: 827954 - DNA, 25 bp, Homo sapien
gaagtcagccacctctttcacgcga

SEQ ID NO: 827955 - DNA, 25 bp, Homo sapien
ttggccccttgaccgtgaccttgag

SEQ ID NO: 827956 - DNA, 25 bp, Homo sapien
tagtactcgcactcgaacacaccat

SEQ ID NO: 827957 - DNA, 25 bp, Homo sapien
aggcaccaccgggtagtactcgcac

SEQ ID NO: 827958 - DNA, 25 bp, Homo sapien
gcgtagccgccccacgtgatggtca

SEQ ID NO: 827959 - DNA, 25 bp, Homo sapien
gcgagggatggcgtagccgccccac

SEQ ID NO: 827960 - DNA, 25 bp, Homo sapien
aggcccggaccttttgcactcctgc

SEQ ID NO: 827961 - DNA, 25 bp, Homo sapien
ccacctcggtgccaatggcttccac

SEQ ID NO: 827962 - DNA, 25 bp, Homo sapien
aaaatcggctgacttgcccacctgg

SEQ ID NO: 827963 - DNA, 25 bp, Homo sapien
ccaatggcttccaccacaaaatcgg

SEQ ID NO: 827964 - DNA, 25 bp, Homo sapien
tcacagatgacgtgcacagcgtact

SEQ ID NO: 827965 - DNA, 25 bp, Homo sapien
cggatgtcctcatcgtcacagatga

SEQ ID NO: 827966 - DNA, 25 bp, Homo sapien
gatcttggcttgtgagggcccctcg

SEQ ID NO: 827967 - DNA, 25 bp, Homo sapien
agtaccgcacatcgcaggagccatc

SEQ ID NO: 827968 - DNA, 25 bp, Homo sapien
ggaggggaggagaaccagcttgccc

SEQ ID NO: 827969 - DNA, 25 bp, Homo sapien
aggggaggagaaccagcttgcccca

SEQ ID NO: 827970 - DNA, 25 bp, Homo sapien
ctgtgcggagggaagaaggctgagt

SEQ ID NO: 827971 - DNA, 25 bp, Homo sapien
ggaggagaaccagcttgccccaccc

SEQ ID NO: 827972 - DNA, 25 bp, Homo sapien
ttgccagctgcacgagcatcaatgg

SEQ ID NO: 827973 - DNA, 25 bp, Homo sapien
ttgtccacgatgcagccggtaggct

SEQ ID NO: 827974 - DNA, 25 bp, Homo sapien
gaactcagcgggcttgtccacgatg

SEQ ID NO: 827975 - DNA, 25 bp, Homo sapien
gcatcaatggtgaactcagcgggct

SEQ ID NO: 827976 - DNA, 25 bp, Homo sapien
caggagatgatgatggtgtgcttaa

SEQ ID NO: 827977 - DNA, 25 bp, Homo sapien
tgggcacgtttacgcctccccagga

SEQ ID NO: 827978 - DNA, 25 bp, Homo sapien
ccttgatgtcgatgggacagccgtc

SEQ ID NO: 827979 - DNA, 25 bp, Homo sapien
gggctcttgggcacgtttacgcctc

SEQ ID NO: 827980 - DNA, 25 bp, Homo sapien
gtcttctccactccggggccgtaca

SEQ ID NO: 827981 - DNA, 25 bp, Homo sapien
ctgtcttctccactccggggccgta

SEQ ID NO: 827982 - DNA, 25 bp, Homo sapien
ggtgggctcattggccttgaggcct

SEQ ID NO: 827983 - DNA, 25 bp, Homo sapien
taggtgggctcattggccttgaggc

SEQ ID NO: 827984 - DNA, 25 bp, Homo sapien
cggcccgcccctggtggcgtgtact

SEQ ID NO: 827985 - DNA, 25 bp, Homo sapien
ggtggcgtgtacttgacggtgaagg

SEQ ID NO: 827986 - DNA, 25 bp, Homo sapien
gaaggtgtcgttgtcattcttgatg

SEQ ID NO: 827987 - DNA, 25 bp, Homo sapien
ttgatgatgtcgaagtcaatgtcag

SEQ ID NO: 827988 - DNA, 25 bp, Homo sapien
ctggcatcgtgggatgggtccacct

SEQ ID NO: 827989 - DNA, 25 bp, Homo sapien
tggcatcgtgggatgggtccacctt

SEQ ID NO: 827990 - DNA, 25 bp, Homo sapien
tggccttgccggctcccttggtcag

SEQ ID NO: 827991 - DNA, 25 bp, Homo sapien
tgctggacagcggtgtacttgacag

SEQ ID NO: 827992 - DNA, 25 bp, Homo sapien
ccttggtcagcaccgtgaagtgggt

SEQ ID NO: 827993 - DNA, 25 bp, Homo sapien
acagtgtaggagtagtcatggttgt

SEQ ID NO: 827994 - DNA, 25 bp, Homo sapien
gctattaaggccctgaactttgatt

SEQ ID NO: 827995 - DNA, 25 bp, Homo sapien
acattcaccacaaaggggctcttgg

SEQ ID NO: 827996 - DNA, 25 bp, Homo sapien
ggtccagcgggggtgccacattcac

SEQ ID NO: 827997 - DNA, 25 bp, Homo sapien
agggtccccgccataagtcactgtc

SEQ ID NO: 827998 - DNA, 25 bp, Homo sapien
aagtgacaccatgaggagactccgg

SEQ ID NO: 827999 - DNA, 25 bp, Homo sapien
ggcaagtgacaccatgaggagactc

SEQ ID NO: 828000 - DNA, 25 bp, Homo sapien
caagtgacaccatgaggagactccg

SEQ ID NO: 828001 - DNA, 25 bp, Homo sapien
agtgacaccatgaggagactccggt

SEQ ID NO: 828002 - DNA, 25 bp, Homo sapien
gccaggcaccgggtgaccatcgtag

SEQ ID NO: 828003 - DNA, 25 bp, Homo sapien
gacaccctccacagcaaacgggctg

SEQ ID NO: 828004 - DNA, 25 bp, Homo sapien
gtaggtgatatccaccttgtagggc

SEQ ID NO: 828005 - DNA, 25 bp, Homo sapien
tccgggggcatgtagcgcacagcct

SEQ ID NO: 828006 - DNA, 25 bp, Homo sapien
tgctcgggtcaaacacaggccgaat

SEQ ID NO: 828007 - DNA, 25 bp, Homo sapien
ggatgcccgccatacttgatggtaa

SEQ ID NO: 828008 - DNA, 25 bp, Homo sapien
ttgacgccactggtatcgaccgcag

SEQ ID NO: 828009 - DNA, 25 bp, Homo sapien
cattgtcctggcactcgatcttggc

SEQ ID NO: 828010 - DNA, 25 bp, Homo sapien
tgtcacataggtgtctgtcttggcc

SEQ ID NO: 828011 - DNA, 25 bp, Homo sapien
ggttgagcacacgagccgtcacgtg

SEQ ID NO: 828012 - DNA, 25 bp, Homo sapien
ggtgccgtccccattgtctgtcaca

SEQ ID NO: 828013 - DNA, 25 bp, Homo sapien
cgtcacgtggttgccgcctgtggct

SEQ ID NO: 828014 - DNA, 25 bp, Homo sapien
gggtgggatcacagccctcggtcac

SEQ ID NO: 828015 - DNA, 25 bp, Homo sapien
ccgaaggctcggacgcgggtgggat

SEQ ID NO: 828016 - DNA, 25 bp, Homo sapien
ggcacagcgacctcatcatacagga

SEQ ID NO: 828017 - DNA, 25 bp, Homo sapien
ggtctccacagtgaatcggttggcc

SEQ ID NO: 828018 - DNA, 25 bp, Homo sapien
tcagcttcataagaccagtgagtga

SEQ ID NO: 828019 - DNA, 25 bp, Homo sapien
tcataagaccagtgagtgaggatga

SEQ ID NO: 828020 - DNA, 25 bp, Homo sapien
ccccatcagcttcataagaccagtg

SEQ ID NO: 828021 - DNA, 25 bp, Homo sapien
gcttcataagaccagtgagtgagga

SEQ ID NO: 828022 - DNA, 25 bp, Homo sapien
cgagggaccctcgatggctaggcca

SEQ ID NO: 828023 - DNA, 25 bp, Homo sapien
ttgacgtcatagtctccaggagtga

SEQ ID NO: 828024 - DNA, 25 bp, Homo sapien
ccccgaaggtgatgttgacgtcata

SEQ ID NO: 828025 - DNA, 25 bp, Homo sapien
gcaggacatcttggcttccgaggga

SEQ ID NO: 828026 - DNA, 25 bp, Homo sapien
ctgcaatccactgtgaaggtctgag

SEQ ID NO: 828027 - DNA, 25 bp, Homo sapien
cactgtgaaggtctgaggaacccgg

SEQ ID NO: 828028 - DNA, 25 bp, Homo sapien
atccttcactggcacgcggaacggg

SEQ ID NO: 828029 - DNA, 25 bp, Homo sapien
acatccttcactggcacgcggaacg

SEQ ID NO: 828030 - DNA, 25 bp, Homo sapien
cggctaccgtgtagggcccgtcagt

SEQ ID NO: 828031 - DNA, 25 bp, Homo sapien
tgcgtggcacctcctggtcagcata

SEQ ID NO: 828032 - DNA, 25 bp, Homo sapien
tcagcatacttgacggctaccgtgt

SEQ ID NO: 828033 - DNA, 25 bp, Homo sapien
tagtggacagtgtgggtgccatctc

SEQ ID NO: 828034 - DNA, 25 bp, Homo sapien
gcatcatgagctgggaggaccttga

SEQ ID NO: 828035 - DNA, 25 bp, Homo sapien
tgagctgggaggaccttgatcttga

SEQ ID NO: 828036 - DNA, 25 bp, Homo sapien
gtcccgtgcgtcgatggtgaactcc

SEQ ID NO: 828037 - DNA, 25 bp, Homo sapien
cccgcgtcccgtgcgtcgatggtga

SEQ ID NO: 828038 - DNA, 25 bp, Homo sapien
tggtgatggtgtaccggccactcat

SEQ ID NO: 828039 - DNA, 25 bp, Homo sapien
gggatctcatcaccgccatacttga

SEQ ID NO: 828040 - DNA, 25 bp, Homo sapien
taggacacagtgtacgtgccatccc

SEQ ID NO: 828041 - DNA, 25 bp, Homo sapien
ggccactcatgtccggcaggtagga

SEQ ID NO: 828042 - DNA, 25 bp, Homo sapien
ctcgggcgctgtgtagtagatgtca

SEQ ID NO: 828043 - DNA, 25 bp, Homo sapien
gtcaaaggtaccgtcatggttctca

SEQ ID NO: 828044 - DNA, 25 bp, Homo sapien
ccccgaagcggatggtgatgacgta

SEQ ID NO: 828045 - DNA, 25 bp, Homo sapien
tcctgcccaatctggattcgagggc

SEQ ID NO: 828046 - DNA, 25 bp, Homo sapien
ctcctcgtgcggcagggggtcacac

SEQ ID NO: 828047 - DNA, 25 bp, Homo sapien
cagagggctcctcctcgtgcggcag

SEQ ID NO: 828048 - DNA, 25 bp, Homo sapien
gctggcgcagctgtggcacttcaga

SEQ ID NO: 828049 - DNA, 25 bp, Homo sapien
gggaggagcgtagggctggcgcagc

SEQ ID NO: 828050 - DNA, 25 bp, Homo sapien
gcaggtgagagggaacagtcagtga

SEQ ID NO: 828051 - DNA, 25 bp, Homo sapien
gcctcagcatggactccattggctc

SEQ ID NO: 828052 - DNA, 25 bp, Homo sapien
tctgcaccgcgaaggggatgaccag

SEQ ID NO: 828053 - DNA, 25 bp, Homo sapien
tttctgcaccgcgaaggggatgacc

SEQ ID NO: 828054 - DNA, 25 bp, Homo sapien
ggcctcagcatggactccattggct

SEQ ID NO: 828055 - DNA, 25 bp, Homo sapien
tccttgttgtcggtgatgttgggcc

SEQ ID NO: 828056 - DNA, 25 bp, Homo sapien
ttctcagtgggtgcatacctcaccg

SEQ ID NO: 828057 - DNA, 25 bp, Homo sapien
cagggatgtggttgccgtcatactt

SEQ ID NO: 828058 - DNA, 25 bp, Homo sapien
tgatccccatctggtgcaggccttt

SEQ ID NO: 828059 - DNA, 25 bp, Homo sapien
tctttggtgacaatagtgaaggtgg

SEQ ID NO: 828060 - DNA, 25 bp, Homo sapien
ctggcttgttgaccatgccatggct

SEQ ID NO: 828061 - DNA, 25 bp, Homo sapien
tggctggcttgttgaccatgccatg

SEQ ID NO: 828062 - DNA, 25 bp, Homo sapien
gcatccacatagaactgtaaggggc

SEQ ID NO: 828063 - DNA, 25 bp, Homo sapien
tgatgctgtagtctccaggcgcagt

SEQ ID NO: 828064 - DNA, 25 bp, Homo sapien
cagtcggcagataggacacggtgca

SEQ ID NO: 828065 - DNA, 25 bp, Homo sapien
gatgtgcttgtcatcgaagcgcacg

SEQ ID NO: 828066 - DNA, 25 bp, Homo sapien
tgatctctgccttggatgggccctc

SEQ ID NO: 828067 - DNA, 25 bp, Homo sapien
tgtgaggtcctcatggagtcatcac

SEQ ID NO: 828068 - DNA, 25 bp, Homo sapien
ggcagggctcctcgttgcccgaggg

SEQ ID NO: 828069 - DNA, 25 bp, Homo sapien
tcagctggctcagatcactctcggt

SEQ ID NO: 828070 - DNA, 25 bp, Homo sapien
tctcggtgatcttcagtgacacgtc

SEQ ID NO: 828071 - DNA, 25 bp, Homo sapien
tgcattgcgagtgtccacgatgaac

SEQ ID NO: 828072 - DNA, 25 bp, Homo sapien
aatgtgtgtccctcggaaagcccct

SEQ ID NO: 828073 - DNA, 25 bp, Homo sapien
gacatgcttgccactcttgcgcacg

SEQ ID NO: 828074 - DNA, 25 bp, Homo sapien
cgatctcagatggccccaccaggat

SEQ ID NO: 828075 - DNA, 25 bp, Homo sapien
ttgatgatgtaggtgccgggctcgg

SEQ ID NO: 828076 - DNA, 25 bp, Homo sapien
tgggccttcaatactcagccccaag

SEQ ID NO: 828077 - DNA, 25 bp, Homo sapien
ccttgcttgggccttcaatactcag

SEQ ID NO: 828078 - DNA, 25 bp, Homo sapien
gtgactttgcatgtcccgtcctcca

SEQ ID NO: 828079 - DNA, 25 bp, Homo sapien
aaggtgcctgtctccgccgggtgat

SEQ ID NO: 828080 - DNA, 25 bp, Homo sapien
gccgggtgatgctctccttcatgcg

SEQ ID NO: 828081 - DNA, 25 bp, Homo sapien
ctgggatcttgaggttgaggtcaca

SEQ ID NO: 828082 - DNA, 25 bp, Homo sapien
ggtgctgccgatggtggcgatggaa

SEQ ID NO: 828083 - DNA, 25 bp, Homo sapien
ccgggtgatgctgccgaaggatccc

SEQ ID NO: 828084 - DNA, 25 bp, Homo sapien
tgtgaaggtgcgtgtcaggcgctcc

SEQ ID NO: 828085 - DNA, 25 bp, Homo sapien
cgctccgtgcgggtgtaggtgtggc

SEQ ID NO: 828086 - DNA, 25 bp, Homo sapien
ttgctgatctccgtgcgctccgtgc

SEQ ID NO: 828087 - DNA, 25 bp, Homo sapien
cggtacttgacagcgaccgtatggg

SEQ ID NO: 828088 - DNA, 25 bp, Homo sapien
gtcacctgtgcagtcatgtcctgag

SEQ ID NO: 828089 - DNA, 25 bp, Homo sapien
aaagcgcacgctgtaggcgctgtcc

SEQ ID NO: 828090 - DNA, 25 bp, Homo sapien
tgctggccacggtacttgacagcga

SEQ ID NO: 828091 - DNA, 25 bp, Homo sapien
tggttcctggacgacataggagacg

SEQ ID NO: 828092 - DNA, 25 bp, Homo sapien
gctttgctaggaccctccacagcaa

SEQ ID NO: 828093 - DNA, 25 bp, Homo sapien
caaatgcaatctccgctttgctagg

SEQ ID NO: 828094 - DNA, 25 bp, Homo sapien
ggagccatctttgcgatcctcaaat

SEQ ID NO: 828095 - DNA, 25 bp, Homo sapien
cagtgagacggcgagcgtcatccga

SEQ ID NO: 828096 - DNA, 25 bp, Homo sapien
cgagcgtcatccgagagggaggcca

SEQ ID NO: 828097 - DNA, 25 bp, Homo sapien
tggtgacagtgagacggcgagcgtc

SEQ ID NO: 828098 - DNA, 25 bp, Homo sapien
agcgtcatccgagagggaggccaca

SEQ ID NO: 828099 - DNA, 25 bp, Homo sapien
actggtttactcttagtttgtatag

SEQ ID NO: 828100 - DNA, 25 bp, Homo sapien
ttataaatgttgtcatctagcattc

SEQ ID NO: 828101 - DNA, 25 bp, Homo sapien
tgtcatctagcattcttacaacaga

SEQ ID NO: 828102 - DNA, 25 bp, Homo sapien
tagcattcttacaacagaaggtgga

SEQ ID NO: 828103 - DNA, 25 bp, Homo sapien
ggctggttcaccttgagccccgtct

SEQ ID NO: 828104 - DNA, 25 bp, Homo sapien
cgttcagctgcacggcaaaggacgc

SEQ ID NO: 828105 - DNA, 25 bp, Homo sapien
tgtccagctcagagacgtagcactc

SEQ ID NO: 828106 - DNA, 25 bp, Homo sapien
agggtgtgtgcacccgggcatcaat

SEQ ID NO: 828107 - DNA, 25 bp, Homo sapien
acgccattctcgtgggggatgaagc

SEQ ID NO: 828108 - DNA, 25 bp, Homo sapien
tctgctccccaacgcggatcttgaa

SEQ ID NO: 828109 - DNA, 25 bp, Homo sapien
cctcgagcccaggaccgtaggctga

SEQ ID NO: 828110 - DNA, 25 bp, Homo sapien
gggatgaagcggatggtgtgcttgt

SEQ ID NO: 828111 - DNA, 25 bp, Homo sapien
gccatgggagtataagtgaccacat

SEQ ID NO: 828112 - DNA, 25 bp, Homo sapien
ttcacgatgaactctgatgacacac

SEQ ID NO: 828113 - DNA, 25 bp, Homo sapien
gggagtataagtgaccacatggccc

SEQ ID NO: 828114 - DNA, 25 bp, Homo sapien
cccccgagccggcattcagggtgtt

SEQ ID NO: 828115 - DNA, 25 bp, Homo sapien
cagtctccaccagaaccgtggatgt

SEQ ID NO: 828116 - DNA, 25 bp, Homo sapien
gaaccgtggatgtttcgtgaaggct

SEQ ID NO: 828117 - DNA, 25 bp, Homo sapien
aaggctgtggcctccggacagcctc

SEQ ID NO: 828118 - DNA, 25 bp, Homo sapien
ccccggcttgaggaggacttggtca

SEQ ID NO: 828119 - DNA, 25 bp, Homo sapien
gggacagcccagggccccgagtcac

SEQ ID NO: 828120 - DNA, 25 bp, Homo sapien
tttgctgcagtccacggtgaaggag

SEQ ID NO: 828121 - DNA, 25 bp, Homo sapien
cacggtgaaggagttcttctggccc

SEQ ID NO: 828122 - DNA, 25 bp, Homo sapien
gaaggagttcttctggcccacgaag

SEQ ID NO: 828123 - DNA, 25 bp, Homo sapien
cagtccacggtgaaggagttcttct

SEQ ID NO: 828124 - DNA, 25 bp, Homo sapien
acttgacaatgaggatgtagtcccc

SEQ ID NO: 828125 - DNA, 25 bp, Homo sapien
caatgaggatgtagtcccctttctc

SEQ ID NO: 828126 - DNA, 25 bp, Homo sapien
gacaatgaggatgtagtcccctttc

SEQ ID NO: 828127 - DNA, 25 bp, Homo sapien
ttgacaatgaggatgtagtcccctt

SEQ ID NO: 828128 - DNA, 25 bp, Homo sapien
ctttgaaggggcttccagggacact

SEQ ID NO: 828129 - DNA, 25 bp, Homo sapien
cttgactttgaaggggcttccaggg

SEQ ID NO: 828130 - DNA, 25 bp, Homo sapien
tgaaggggcttccagggacactttc

SEQ ID NO: 828131 - DNA, 25 bp, Homo sapien
gggcttccagggacactttcgtcac

SEQ ID NO: 828132 - DNA, 25 bp, Homo sapien
catgtgcaaaagtcccctagaaagc

SEQ ID NO: 828133 - DNA, 25 bp, Homo sapien
gctgggcctcgcagtgtgtaaaaaa

SEQ ID NO: 828134 - DNA, 25 bp, Homo sapien
gagggacactgtcctgacacagaca

SEQ ID NO: 828135 - DNA, 25 bp, Homo sapien
ccagctgagctgcatgacatgtgca

SEQ ID NO: 828136 - DNA, 25 bp, Homo sapien
agaagccactgaaaccccgcctccg

SEQ ID NO: 828137 - DNA, 25 bp, Homo sapien
gaagccactgaaaccccgcctccgc

SEQ ID NO: 828138 - DNA, 25 bp, Homo sapien
ccagaagccactgaaaccccgcctc

SEQ ID NO: 828139 - DNA, 25 bp, Homo sapien
caccagaagccactgaaaccccgcc

SEQ ID NO: 828140 - DNA, 25 bp, Homo sapien
cggaaagtgtcttcgatctcattga

SEQ ID NO: 828141 - DNA, 25 bp, Homo sapien
agggcccgttcaggcctcgcgcggt

SEQ ID NO: 828142 - DNA, 25 bp, Homo sapien
agaagggcccgttcaggcctcgcgc

SEQ ID NO: 828143 - DNA, 25 bp, Homo sapien
gcagaagggcccgttcaggcctcgc

SEQ ID NO: 828144 - DNA, 25 bp, Homo sapien
agcagaagggcccgttcaggcctcg

SEQ ID NO: 828145 - DNA, 25 bp, Homo sapien
ggcagcctccagcctcgccccgcac

SEQ ID NO: 828146 - DNA, 25 bp, Homo sapien
ccccgtccgggcagcctccagcctc

SEQ ID NO: 828147 - DNA, 25 bp, Homo sapien
ccgggcagcctccagcctcgccccg

SEQ ID NO: 828148 - DNA, 25 bp, Homo sapien
cccgtccgggcagcctccagcctcg

SEQ ID NO: 828149 - DNA, 25 bp, Homo sapien
tacaaggaaattccgaggccgcctg

SEQ ID NO: 828150 - DNA, 25 bp, Homo sapien
tgtacctggcttaccggaggcagaa

SEQ ID NO: 828151 - DNA, 25 bp, Homo sapien
cctgccttacgggacgatggtgagc

SEQ ID NO: 828152 - DNA, 25 bp, Homo sapien
ttagcagaaggctctcacagtcccg

SEQ ID NO: 828153 - DNA, 25 bp, Homo sapien
tagggttggcttctacaacactgcc

SEQ ID NO: 828154 - DNA, 25 bp, Homo sapien
ttctacaacactgcccggaaggctt

SEQ ID NO: 828155 - DNA, 25 bp, Homo sapien
catcccaaagcggagggtcacgctg

SEQ ID NO: 828156 - DNA, 25 bp, Homo sapien
ggtcacgctgattagggttggcttc

SEQ ID NO: 828157 - DNA, 25 bp, Homo sapien
aggcagccctctccgagttgttggg

SEQ ID NO: 828158 - DNA, 25 bp, Homo sapien
gcagccctctccgagttgttgggct

SEQ ID NO: 828159 - DNA, 25 bp, Homo sapien
ccaggcagccctctccgagttgttg

SEQ ID NO: 828160 - DNA, 25 bp, Homo sapien
cagccctctccgagttgttgggctg

SEQ ID NO: 828161 - DNA, 25 bp, Homo sapien
caccatctctgcgatgtactggttg

SEQ ID NO: 828162 - DNA, 25 bp, Homo sapien
ccatctctgcgatgtactggttgat

SEQ ID NO: 828163 - DNA, 25 bp, Homo sapien
tctctgcgatgtactggttgatgag

SEQ ID NO: 828164 - DNA, 25 bp, Homo sapien
catctctgcgatgtactggttgatg

SEQ ID NO: 828165 - DNA, 25 bp, Homo sapien
gcctggaaacgagggaagggctgag

SEQ ID NO: 828166 - DNA, 25 bp, Homo sapien
tgttccttaaccagcagagccccag

SEQ ID NO: 828167 - DNA, 25 bp, Homo sapien
agcagggaattggaaatcagaggct

SEQ ID NO: 828168 - DNA, 25 bp, Homo sapien
ggcctggaaacgagggaagggctga

SEQ ID NO: 828169 - DNA, 25 bp, Homo sapien
ggtaccattcacagcgcaacatctt

SEQ ID NO: 828170 - DNA, 25 bp, Homo sapien
tttccgactgaaaaggcgcctctgg

SEQ ID NO: 828171 - DNA, 25 bp, Homo sapien
tcaccatcgacccatacttgcggta

SEQ ID NO: 828172 - DNA, 25 bp, Homo sapien
tccagaagttctgccgtaacgcgtc

SEQ ID NO: 828173 - DNA, 25 bp, Homo sapien
gcagggctcgggtgataggtggtac

SEQ ID NO: 828174 - DNA, 25 bp, Homo sapien
cttcatacagcagggctcgggtgat

SEQ ID NO: 828175 - DNA, 25 bp, Homo sapien
catacagcagggctcgggtgatagg

SEQ ID NO: 828176 - DNA, 25 bp, Homo sapien
tacagcagggctcgggtgataggtg

SEQ ID NO: 828177 - DNA, 25 bp, Homo sapien
gaggtatcgcgtctctggcatgtcc

SEQ ID NO: 828178 - DNA, 25 bp, Homo sapien
cagctgccagccatacgtgaagctg

SEQ ID NO: 828179 - DNA, 25 bp, Homo sapien
ttttcgagtgttgaggtagcggtac

SEQ ID NO: 828180 - DNA, 25 bp, Homo sapien
ggcatgtccagttttcgagtgttga

SEQ ID NO: 828181 - DNA, 25 bp, Homo sapien
gaatgactcaatgcggcacatcttg

SEQ ID NO: 828182 - DNA, 25 bp, Homo sapien
ccaggtctcggggatcaagcagtgc

SEQ ID NO: 828183 - DNA, 25 bp, Homo sapien
ccgttcttgcggaagaatgactcaa

SEQ ID NO: 828184 - DNA, 25 bp, Homo sapien
ggatcaagcagtgcgaaggccccgt

SEQ ID NO: 828185 - DNA, 25 bp, Homo sapien
acagcctgaggttcagacagcgccc

SEQ ID NO: 828186 - DNA, 25 bp, Homo sapien
gattgatgaactgtgacagcctgag

SEQ ID NO: 828187 - DNA, 25 bp, Homo sapien
ggctctagtctaggtgaactgtgca

SEQ ID NO: 828188 - DNA, 25 bp, Homo sapien
gacatgagctcccaatactggtctt

SEQ ID NO: 828189 - DNA, 25 bp, Homo sapien
gatgcagtattcttgggaaagttct

SEQ ID NO: 828190 - DNA, 25 bp, Homo sapien
tgaaagatgcgttttcacagagagt

SEQ ID NO: 828191 - DNA, 25 bp, Homo sapien
agagagtgcacccatttggttactg

SEQ ID NO: 828192 - DNA, 25 bp, Homo sapien
tacatcttgagaagacagggatatc

SEQ ID NO: 828193 - DNA, 25 bp, Homo sapien
tatccaggtgtgacagcatatgcct

SEQ ID NO: 828194 - DNA, 25 bp, Homo sapien
gcggggacagaggttctgggaacac

SEQ ID NO: 828195 - DNA, 25 bp, Homo sapien
ccaggtggtagcacaggtggggacc

SEQ ID NO: 828196 - DNA, 25 bp, Homo sapien
tcctcagctagaaaatgcccacgag

SEQ ID NO: 828197 - DNA, 25 bp, Homo sapien
gcaggagccgctgctgtatgtggag

SEQ ID NO: 828198 - DNA, 25 bp, Homo sapien
tgtatgtggagctgcgaggacacac

SEQ ID NO: 828199 - DNA, 25 bp, Homo sapien
ggatgccagctacctcctagccaaa

SEQ ID NO: 828200 - DNA, 25 bp, Homo sapien
tgggagcttcagtcctgtttaggcc

SEQ ID NO: 828201 - DNA, 25 bp, Homo sapien
ctaagtcatatcagcattataggag

SEQ ID NO: 828202 - DNA, 25 bp, Homo sapien
aatgtcactgttgcacgggtgcatt

SEQ ID NO: 828203 - DNA, 25 bp, Homo sapien
gcacctgttgaagtcctatagttgg

SEQ ID NO: 828204 - DNA, 25 bp, Homo sapien
taggacagccgctattaaagccaca

SEQ ID NO: 828205 - DNA, 25 bp, Homo sapien
ttggggcttccttgtccaaggccat

SEQ ID NO: 828206 - DNA, 25 bp, Homo sapien
ttgccgaaactcctagaaccgtaca

SEQ ID NO: 828207 - DNA, 25 bp, Homo sapien
gctgaccactaagggacggcatgaa

SEQ ID NO: 828208 - DNA, 25 bp, Homo sapien
aaggaggcccatgtgccagaagaat

SEQ ID NO: 828209 - DNA, 25 bp, Homo sapien
tactacaggaacaggcccaagagaa

SEQ ID NO: 828210 - DNA, 25 bp, Homo sapien
tgcagtagcagaccataggacagcc

SEQ ID NO: 828211 - DNA, 25 bp, Homo sapien
gaaagggcagcctgctcaggcaaga

SEQ ID NO: 828212 - DNA, 25 bp, Homo sapien
tcactggctcgaaggaggctctgct

SEQ ID NO: 828213 - DNA, 25 bp, Homo sapien
gacatgaggcactggcacttgaacc

SEQ ID NO: 828214 - DNA, 25 bp, Homo sapien
catgcctgtctcgagggtcgggtct

SEQ ID NO: 828215 - DNA, 25 bp, Homo sapien
taccctgataacctgtccagggccg

SEQ ID NO: 828216 - DNA, 25 bp, Homo sapien
cagtgtcccggagccttggtgcttt

SEQ ID NO: 828217 - DNA, 25 bp, Homo sapien
gacctgtggattcaggaacatctcc

SEQ ID NO: 828218 - DNA, 25 bp, Homo sapien
caggcctcattagagagggttctgg

SEQ ID NO: 828219 - DNA, 25 bp, Homo sapien
aggcctcattagagagggttctggg

SEQ ID NO: 828220 - DNA, 25 bp, Homo sapien
tgaagaaccctggcggggaccatgg

SEQ ID NO: 828221 - DNA, 25 bp, Homo sapien
gctgaagaaccctggcggggaccat

SEQ ID NO: 828222 - DNA, 25 bp, Homo sapien
ggctgaagaaccctggcggggacca

SEQ ID NO: 828223 - DNA, 25 bp, Homo sapien
ctgaagaaccctggcggggaccatg

SEQ ID NO: 828224 - DNA, 25 bp, Homo sapien
tagcctctgattctgggagcagaaa

SEQ ID NO: 828225 - DNA, 25 bp, Homo sapien
tgttcccgtagcctctgattctggg

SEQ ID NO: 828226 - DNA, 25 bp, Homo sapien
caggagtctgtcctgttcccgtagc

SEQ ID NO: 828227 - DNA, 25 bp, Homo sapien
tgtcctgttcccgtagcctctgatt

SEQ ID NO: 828228 - DNA, 25 bp, Homo sapien
gcctcccgccggtccgccaacctgc

SEQ ID NO: 828229 - DNA, 25 bp, Homo sapien
ggctgcgccagggagcaccggccgg

SEQ ID NO: 828230 - DNA, 25 bp, Homo sapien
ctcccgccggtccgccaacctgccg

SEQ ID NO: 828231 - DNA, 25 bp, Homo sapien
cgtggctgcgccagggagcaccggc

SEQ ID NO: 828232 - DNA, 25 bp, Homo sapien
gagctcgctttccaggcgcagctgg

SEQ ID NO: 828233 - DNA, 25 bp, Homo sapien
gctcgctttccaggcgcagctggac

SEQ ID NO: 828234 - DNA, 25 bp, Homo sapien
agctcgctttccaggcgcagctgga

SEQ ID NO: 828235 - DNA, 25 bp, Homo sapien
ggtggcccggtaagagcaagggcga

SEQ ID NO: 828236 - DNA, 25 bp, Homo sapien
ggcgagtgcatcgaaagtaaggatc

SEQ ID NO: 828237 - DNA, 25 bp, Homo sapien
ctgccattggcctgaagatcccggg

SEQ ID NO: 828238 - DNA, 25 bp, Homo sapien
gaaagtaaggatcgggcctcgctcc

SEQ ID NO: 828239 - DNA, 25 bp, Homo sapien
tgagctgctactgtctcacattgca

SEQ ID NO: 828240 - DNA, 25 bp, Homo sapien
gcctagtgccgcctctgagctgcta

SEQ ID NO: 828241 - DNA, 25 bp, Homo sapien
tctcacattgcaggcctccctcaga

SEQ ID NO: 828242 - DNA, 25 bp, Homo sapien
gggttgcacctgcctagtgccgcct

SEQ ID NO: 828243 - DNA, 25 bp, Homo sapien
ctcccactggacacgcattcgggta

SEQ ID NO: 828244 - DNA, 25 bp, Homo sapien
acgcctgccggagcctgttaggaag

SEQ ID NO: 828245 - DNA, 25 bp, Homo sapien
cacgcattcgggtagcacttaggaa

SEQ ID NO: 828246 - DNA, 25 bp, Homo sapien
tctctagggccattcatctaggttc

SEQ ID NO: 828247 - DNA, 25 bp, Homo sapien
accatgccttgtggcatgcctccag

SEQ ID NO: 828248 - DNA, 25 bp, Homo sapien
gatggtgttatctccgtcctggctg

SEQ ID NO: 828249 - DNA, 25 bp, Homo sapien
ccgttgacccattgaagccctgggt

SEQ ID NO: 828250 - DNA, 25 bp, Homo sapien
agccctgggtactggcagctgttca

SEQ ID NO: 828251 - DNA, 25 bp, Homo sapien
acagcgcaggttggccttccacttg

SEQ ID NO: 828252 - DNA, 25 bp, Homo sapien
gaagtcccggctcttgttaagggca

SEQ ID NO: 828253 - DNA, 25 bp, Homo sapien
ccgtcgtagatgaggcggaagtccc

SEQ ID NO: 828254 - DNA, 25 bp, Homo sapien
gatcggcttcatccacgccttcggt

SEQ ID NO: 828255 - DNA, 25 bp, Homo sapien
ctgcaccaaaagagtaatcctcagg

SEQ ID NO: 828256 - DNA, 25 bp, Homo sapien
caaaagagtaatcctcagggggctg

SEQ ID NO: 828257 - DNA, 25 bp, Homo sapien
aaaagagtaatcctcagggggctgg

SEQ ID NO: 828258 - DNA, 25 bp, Homo sapien
ggacaggttattccactgacctggg

SEQ ID NO: 828259 - DNA, 25 bp, Homo sapien
taacaggcgagaactatgaggcaac

SEQ ID NO: 828260 - DNA, 25 bp, Homo sapien
tatgaggcaactcccctagcctcag

SEQ ID NO: 828261 - DNA, 25 bp, Homo sapien
cctcagtttagctcaggcaagaccc

SEQ ID NO: 828262 - DNA, 25 bp, Homo sapien
tcaggcttggcaacatcctctgcag

SEQ ID NO: 828263 - DNA, 25 bp, Homo sapien
ggctcaggcttggcaacatcctctg

SEQ ID NO: 828264 - DNA, 25 bp, Homo sapien
gtgaggctcaggcttggcaacatcc

SEQ ID NO: 828265 - DNA, 25 bp, Homo sapien
tgaggctcaggcttggcaacatcct

SEQ ID NO: 828266 - DNA, 25 bp, Homo sapien
tacagagagtgcgtgtggacggctg

SEQ ID NO: 828267 - DNA, 25 bp, Homo sapien
tccaggtacctatggtacctatagc

SEQ ID NO: 828268 - DNA, 25 bp, Homo sapien
gcttctctgtatactagacccccaa

SEQ ID NO: 828269 - DNA, 25 bp, Homo sapien
tatggtacctatagcttctctgtat

SEQ ID NO: 828270 - DNA, 25 bp, Homo sapien
ctttgagtaaagaatagggtgtcat

SEQ ID NO: 828271 - DNA, 25 bp, Homo sapien
gaatagggtgtcatgtgggggccag

SEQ ID NO: 828272 - DNA, 25 bp, Homo sapien
tgagtaaagaatagggtgtcatgtg

SEQ ID NO: 828273 - DNA, 25 bp, Homo sapien
agaatagggtgtcatgtgggggcca

SEQ ID NO: 828274 - DNA, 25 bp, Homo sapien
gcaggtctggcaggagctgttcgcc

SEQ ID NO: 828275 - DNA, 25 bp, Homo sapien
gtctggcaggagctgttcgcctgca

SEQ ID NO: 828276 - DNA, 25 bp, Homo sapien
tgggggctgatcagcaggtctggca

SEQ ID NO: 828277 - DNA, 25 bp, Homo sapien
gaggcagcatgtgggggctgatcag

SEQ ID NO: 828278 - DNA, 25 bp, Homo sapien
cattgagaaaatgctccaggctgaa

SEQ ID NO: 828279 - DNA, 25 bp, Homo sapien
cttgcactgacacaggcggatggca

SEQ ID NO: 828280 - DNA, 25 bp, Homo sapien
ccctgtagctggaggatgagcccgc

SEQ ID NO: 828281 - DNA, 25 bp, Homo sapien
catccagcagctggttcgtgtagaa

SEQ ID NO: 828282 - DNA, 25 bp, Homo sapien
ttccccaaagcagaagaagatctcg

SEQ ID NO: 828283 - DNA, 25 bp, Homo sapien
tgagcttcttctctcggggtttgcg

SEQ ID NO: 828284 - DNA, 25 bp, Homo sapien
ggtttgcggtcaggccattcttccc

SEQ ID NO: 828285 - DNA, 25 bp, Homo sapien
gtgttggtctggcccttttggaaca

SEQ ID NO: 828286 - DNA, 25 bp, Homo sapien
cttgaattgctccaccatgcggtct

SEQ ID NO: 828287 - DNA, 25 bp, Homo sapien
ggtttgagatctgtagccggatact

SEQ ID NO: 828288 - DNA, 25 bp, Homo sapien
gccggatactatcagctgaccaaga

SEQ ID NO: 828289 - DNA, 25 bp, Homo sapien
ctgaccaagatagctcccctgagaa

SEQ ID NO: 828290 - DNA, 25 bp, Homo sapien
gcaatcacaagagtgggccaccctt

SEQ ID NO: 828291 - DNA, 25 bp, Homo sapien
aagtgagtctcaaaccagggaaatc

SEQ ID NO: 828292 - DNA, 25 bp, Homo sapien
tcctatacagctaggccccagggtt

SEQ ID NO: 828293 - DNA, 25 bp, Homo sapien
aatttcccgagagccaggctgacca

SEQ ID NO: 828294 - DNA, 25 bp, Homo sapien
gagtgacagatttgaatggtcccaa

SEQ ID NO: 828295 - DNA, 25 bp, Homo sapien
aatgctagcccacccttttatggga

SEQ ID NO: 828296 - DNA, 25 bp, Homo sapien
tcccagtgccaatggtcgcaagctg

SEQ ID NO: 828297 - DNA, 25 bp, Homo sapien
catgggagcaactggtagtagtaaa

SEQ ID NO: 828298 - DNA, 25 bp, Homo sapien
gtttacagggctaacaagggatgat

SEQ ID NO: 828299 - DNA, 25 bp, Homo sapien
gagggaagcccaaagcagatcttaa

SEQ ID NO: 828300 - DNA, 25 bp, Homo sapien
ccatcagatatgagggcactgttct

SEQ ID NO: 828301 - DNA, 25 bp, Homo sapien
tcaaaggagtgcagcccttcacagc

SEQ ID NO: 828302 - DNA, 25 bp, Homo sapien
taaaatcgacatgaagcctgtggga

SEQ ID NO: 828303 - DNA, 25 bp, Homo sapien
taaagcagtagctcccttgaaccca

SEQ ID NO: 828304 - DNA, 25 bp, Homo sapien
gccagtgcgcacgtgtacacagaaa

SEQ ID NO: 828305 - DNA, 25 bp, Homo sapien
tggcagacttcagaatgaggtacct

SEQ ID NO: 828306 - DNA, 25 bp, Homo sapien
tgtgttacccagacagactgtagtg

SEQ ID NO: 828307 - DNA, 25 bp, Homo sapien
tgttcccctacctgcgcctttggag

SEQ ID NO: 828308 - DNA, 25 bp, Homo sapien
cttgggctgttcacccctccctcct

SEQ ID NO: 828309 - DNA, 25 bp, Homo sapien
caattggtatagcatgctctagccc

SEQ ID NO: 828310 - DNA, 25 bp, Homo sapien
gctctgctgtcattataattgactg

SEQ ID NO: 828311 - DNA, 25 bp, Homo sapien
ttagaatgtctctaaggtccatgac

SEQ ID NO: 828312 - DNA, 25 bp, Homo sapien
gaaggcatcctaatcatcatcagaa

SEQ ID NO: 828313 - DNA, 25 bp, Homo sapien
gaggaagagcttttaactatcttag

SEQ ID NO: 828314 - DNA, 25 bp, Homo sapien
ttctggcaactgacatcaacttgac

SEQ ID NO: 828315 - DNA, 25 bp, Homo sapien
gctcattccaaaagaagcctgctgg

SEQ ID NO: 828316 - DNA, 25 bp, Homo sapien
acactgatgtgacgggctgctttga

SEQ ID NO: 828317 - DNA, 25 bp, Homo sapien
tgtcccgatggcagcaagagtcttc

SEQ ID NO: 828318 - DNA, 25 bp, Homo sapien
cagatttaagcctcacgtcctcaga

SEQ ID NO: 828319 - DNA, 25 bp, Homo sapien
gatgctgggttgattacactggtaa

SEQ ID NO: 828320 - DNA, 25 bp, Homo sapien
ccaaactcaactcccgtgtcaaaga

SEQ ID NO: 828321 - DNA, 25 bp, Homo sapien
gattggtacagctacttcctacatg

SEQ ID NO: 828322 - DNA, 25 bp, Homo sapien
catgagtttcgatgctggtcctgac

SEQ ID NO: 828323 - DNA, 25 bp, Homo sapien
caagtagcagcaacagtgtcagcgc

SEQ ID NO: 828324 - DNA, 25 bp, Homo sapien
tattttgggcagatcacagtgctca

SEQ ID NO: 828325 - DNA, 25 bp, Homo sapien
cataaaggtctgttcgcttgactca

SEQ ID NO: 828326 - DNA, 25 bp, Homo sapien
tgggaaacagcaagattgtacaaaa

SEQ ID NO: 828327 - DNA, 25 bp, Homo sapien
gctagcgaggaacagagagaacacc

SEQ ID NO: 828328 - DNA, 25 bp, Homo sapien
aattgacgcgccttgatcaccaggg

SEQ ID NO: 828329 - DNA, 25 bp, Homo sapien
ggattcggacagaaaggcattcaca

SEQ ID NO: 828330 - DNA, 25 bp, Homo sapien
tccactagagccagcgtaggtacca

SEQ ID NO: 828331 - DNA, 25 bp, Homo sapien
aaatgagatcttgtaactacagtgt

SEQ ID NO: 828332 - DNA, 25 bp, Homo sapien
gcagttatttactagtgcaaaggac

SEQ ID NO: 828333 - DNA, 25 bp, Homo sapien
gcaaggttgttaggcggattaaatg

SEQ ID NO: 828334 - DNA, 25 bp, Homo sapien
tgtgatcatttatcaaatagcagtt

SEQ ID NO: 828335 - DNA, 25 bp, Homo sapien
gagctgaggcgctgtaggtcagtgt

SEQ ID NO: 828336 - DNA, 25 bp, Homo sapien
cgctggagctgaggcgctgtaggtc

SEQ ID NO: 828337 - DNA, 25 bp, Homo sapien
tgaggcgctgtaggtcagtgtcagc

SEQ ID NO: 828338 - DNA, 25 bp, Homo sapien
gcgctggagctgaggcgctgtaggt

SEQ ID NO: 828339 - DNA, 25 bp, Homo sapien
ccagacatttcttccgcccgttcat

SEQ ID NO: 828340 - DNA, 25 bp, Homo sapien
caggcacagtggccgcgttctgagt

SEQ ID NO: 828341 - DNA, 25 bp, Homo sapien
gcaggcacagtggccgcgttctgag

SEQ ID NO: 828342 - DNA, 25 bp, Homo sapien
cgttatacgcagtggcgagagcaca

SEQ ID NO: 828343 - DNA, 25 bp, Homo sapien
ctgccgggccaactcgttatacgca

SEQ ID NO: 828344 - DNA, 25 bp, Homo sapien
tacgcagtggcgagagcacaaatca

SEQ ID NO: 828345 - DNA, 25 bp, Homo sapien
ggccaactcgttatacgcagtggcg

SEQ ID NO: 828346 - DNA, 25 bp, Homo sapien
gactcctaagtctttgaccatgcca

SEQ ID NO: 828347 - DNA, 25 bp, Homo sapien
ctcctaagtctttgaccatgccagg

SEQ ID NO: 828348 - DNA, 25 bp, Homo sapien
cctaagtctttgaccatgccagggc

SEQ ID NO: 828349 - DNA, 25 bp, Homo sapien
gtgactcctaagtctttgaccatgc

SEQ ID NO: 828350 - DNA, 25 bp, Homo sapien
ccaaagacacgccttctgagtgccc

SEQ ID NO: 828351 - DNA, 25 bp, Homo sapien
gactccccaaagacacgccttctga

SEQ ID NO: 828352 - DNA, 25 bp, Homo sapien
aagacacgccttctgagtgccccag

SEQ ID NO: 828353 - DNA, 25 bp, Homo sapien
ctccccaaagacacgccttctgagt

SEQ ID NO: 828354 - DNA, 25 bp, Homo sapien
caggcgattactccgagtctctctg

SEQ ID NO: 828355 - DNA, 25 bp, Homo sapien
tcatctagcttctccccaatgcagg

SEQ ID NO: 828356 - DNA, 25 bp, Homo sapien
ctccccaatgcaggcgattactccg

SEQ ID NO: 828357 - DNA, 25 bp, Homo sapien
aatgcaggcgattactccgagtctc

SEQ ID NO: 828358 - DNA, 25 bp, Homo sapien
cacgggatcataggccaagatgacc

SEQ ID NO: 828359 - DNA, 25 bp, Homo sapien
cagtggcccacacgggatcataggc

SEQ ID NO: 828360 - DNA, 25 bp, Homo sapien
gtaccagtggcccacacgggatcat

SEQ ID NO: 828361 - DNA, 25 bp, Homo sapien
gcccacacgggatcataggccaaga

SEQ ID NO: 828362 - DNA, 25 bp, Homo sapien
acacaaaggcgttggcaccgtggga

SEQ ID NO: 828363 - DNA, 25 bp, Homo sapien
gccacaatagggtgcagatgacacc

SEQ ID NO: 828364 - DNA, 25 bp, Homo sapien
ggttttggagcaacactgatctgga

SEQ ID NO: 828365 - DNA, 25 bp, Homo sapien
tctggtcccgaccattacacggtga

SEQ ID NO: 828366 - DNA, 25 bp, Homo sapien
aatgccgggattacacagttgtgag

SEQ ID NO: 828367 - DNA, 25 bp, Homo sapien
gtttatccatgcatcaaatgacgga

SEQ ID NO: 828368 - DNA, 25 bp, Homo sapien
gatacaatcccatgaatagtgcatg

SEQ ID NO: 828369 - DNA, 25 bp, Homo sapien
aaactttttcaacatggccgcacca

SEQ ID NO: 828370 - DNA, 25 bp, Homo sapien
tatacctaagtgtagaactgctggt

SEQ ID NO: 828371 - DNA, 25 bp, Homo sapien
catgcttatcagctacaaaagaatc

SEQ ID NO: 828372 - DNA, 25 bp, Homo sapien
agggaggtatatctcacacatgcac

SEQ ID NO: 828373 - DNA, 25 bp, Homo sapien
acacatgcacgtgaaactccagtca

SEQ ID NO: 828374 - DNA, 25 bp, Homo sapien
caggtaatgtgcagatgtggtaaca

SEQ ID NO: 828375 - DNA, 25 bp, Homo sapien
agccgaggcgggacccagagcctga

SEQ ID NO: 828376 - DNA, 25 bp, Homo sapien
gagctgagccgaggcgggacccaga

SEQ ID NO: 828377 - DNA, 25 bp, Homo sapien
gagcagagctgagccgaggcgggac

SEQ ID NO: 828378 - DNA, 25 bp, Homo sapien
acggagcagagctgagccgaggcgg

SEQ ID NO: 828379 - DNA, 25 bp, Homo sapien
tctgcatgtgcgtttcctctcttgt

SEQ ID NO: 828380 - DNA, 25 bp, Homo sapien
tgttgcagacaagctgtcttccact

SEQ ID NO: 828381 - DNA, 25 bp, Homo sapien
ctgctctgcatgtgcgtttcctctc

SEQ ID NO: 828382 - DNA, 25 bp, Homo sapien
cttgttgcagacaagctgtcttcca

SEQ ID NO: 828383 - DNA, 25 bp, Homo sapien
gctttctaccgcaagagggcgatat

SEQ ID NO: 828384 - DNA, 25 bp, Homo sapien
cggagtcccgctttctaccgcaaga

SEQ ID NO: 828385 - DNA, 25 bp, Homo sapien
tagccaggcggagtcccgctttcta

SEQ ID NO: 828386 - DNA, 25 bp, Homo sapien
caagagggcgatatggccacactga

SEQ ID NO: 828387 - DNA, 25 bp, Homo sapien
cccagggctgcgtgatcttgtgtct

SEQ ID NO: 828388 - DNA, 25 bp, Homo sapien
tatgagccttgacattgccaggaaa

SEQ ID NO: 828389 - DNA, 25 bp, Homo sapien
aaatcgcccttgctatgagccttga

SEQ ID NO: 828390 - DNA, 25 bp, Homo sapien
gatcttgtgtcttgcaaaatcgccc

SEQ ID NO: 828391 - DNA, 25 bp, Homo sapien
cctgatatggatttggtaaaagcca

SEQ ID NO: 828392 - DNA, 25 bp, Homo sapien
tccctgatatggatttggtaaaagc

SEQ ID NO: 828393 - DNA, 25 bp, Homo sapien
ttctgctccctgatatggatttggt

SEQ ID NO: 828394 - DNA, 25 bp, Homo sapien
gctccctgatatggatttggtaaaa

SEQ ID NO: 828395 - DNA, 25 bp, Homo sapien
aagacaggtgccattggattctgct

SEQ ID NO: 828396 - DNA, 25 bp, Homo sapien
gaagacaggtgccattggattctgc

SEQ ID NO: 828397 - DNA, 25 bp, Homo sapien
gacaggtgccattggattctgctac

SEQ ID NO: 828398 - DNA, 25 bp, Homo sapien
agacaggtgccattggattctgcta

SEQ ID NO: 828399 - DNA, 25 bp, Homo sapien
cagaactgagtgacgcagcaggagt

SEQ ID NO: 828400 - DNA, 25 bp, Homo sapien
aactgagtgacgcagcaggagtagc

SEQ ID NO: 828401 - DNA, 25 bp, Homo sapien
catgcagaactgagtgacgcagcag

SEQ ID NO: 828402 - DNA, 25 bp, Homo sapien
ctgagtgacgcagcaggagtagcat

SEQ ID NO: 828403 - DNA, 25 bp, Homo sapien
tggtccgagggtagccgaggggcgc

SEQ ID NO: 828404 - DNA, 25 bp, Homo sapien
cgggcctggtccgagggtagccgag

SEQ ID NO: 828405 - DNA, 25 bp, Homo sapien
gggctgaggcgagcgagccgccgcc

SEQ ID NO: 828406 - DNA, 25 bp, Homo sapien
gcgctgcgggcctggtccgagggta

SEQ ID NO: 828407 - DNA, 25 bp, Homo sapien
tagcctgggcccgtagtgggcgggc

SEQ ID NO: 828408 - DNA, 25 bp, Homo sapien
cctctagcctgggcccgtagtgggc

SEQ ID NO: 828409 - DNA, 25 bp, Homo sapien
ggcgcctctagcctgggcccgtagt

SEQ ID NO: 828410 - DNA, 25 bp, Homo sapien
cgcctctagcctgggcccgtagtgg

SEQ ID NO: 828411 - DNA, 25 bp, Homo sapien
ccctcggcgatggtagggttgatgg

SEQ ID NO: 828412 - DNA, 25 bp, Homo sapien
tcggcgatggtagggttgatggtga

SEQ ID NO: 828413 - DNA, 25 bp, Homo sapien
ggccctcggcgatggtagggttgat

SEQ ID NO: 828414 - DNA, 25 bp, Homo sapien
gggccctcggcgatggtagggttga

SEQ ID NO: 828415 - DNA, 25 bp, Homo sapien
cactcgtgcaggacctggtgctcgc

SEQ ID NO: 828416 - DNA, 25 bp, Homo sapien
gcactcgtgcaggacctggtgctcg

SEQ ID NO: 828417 - DNA, 25 bp, Homo sapien
actcgtgcaggacctggtgctcgcg

SEQ ID NO: 828418 - DNA, 25 bp, Homo sapien
gagaaccgcaatgctgactttcccc

SEQ ID NO: 828419 - DNA, 25 bp, Homo sapien
tgagctggccgctcaccccgaagtc

SEQ ID NO: 828420 - DNA, 25 bp, Homo sapien
tgatctcccctctagagttcacgag

SEQ ID NO: 828421 - DNA, 25 bp, Homo sapien
tctagagttcacgaggatgttggag

SEQ ID NO: 828422 - DNA, 25 bp, Homo sapien
tcccctctagagttcacgaggatgt

SEQ ID NO: 828423 - DNA, 25 bp, Homo sapien
caaccgctccggagccatgtaggag

SEQ ID NO: 828424 - DNA, 25 bp, Homo sapien
ccgactgcaccgagtaatgtgtgcc

SEQ ID NO: 828425 - DNA, 25 bp, Homo sapien
ttcttccctgtcgaccacgggctgg

SEQ ID NO: 828426 - DNA, 25 bp, Homo sapien
tgtccatcccgtaaccgctgttggg

SEQ ID NO: 828427 - DNA, 25 bp, Homo sapien
gaccctggccaagaggagatgctgt

SEQ ID NO: 828428 - DNA, 25 bp, Homo sapien
cacgggctggccaaagatggcctcc

SEQ ID NO: 828429 - DNA, 25 bp, Homo sapien
ggcagcttaggaggcggctctttca

SEQ ID NO: 828430 - DNA, 25 bp, Homo sapien
gggcagcttaggaggcggctctttc

SEQ ID NO: 828431 - DNA, 25 bp, Homo sapien
aggaggcggctctttcacaatatag

SEQ ID NO: 828432 - DNA, 25 bp, Homo sapien
aggcggctctttcacaatatagtcc

SEQ ID NO: 828433 - DNA, 25 bp, Homo sapien
accgcttgatgaaggcgtggtttgt

SEQ ID NO: 828434 - DNA, 25 bp, Homo sapien
tggtttgtgagcatctttaggtccg

SEQ ID NO: 828435 - DNA, 25 bp, Homo sapien
atgaaggcgtggtttgtgagcatct

SEQ ID NO: 828436 - DNA, 25 bp, Homo sapien
cgcccgctccgttgggtttttgatg

SEQ ID NO: 828437 - DNA, 25 bp, Homo sapien
agcaggcaaaatccgcttctttcac

SEQ ID NO: 828438 - DNA, 25 bp, Homo sapien
tagcaggcaaaatccgcttctttca

SEQ ID NO: 828439 - DNA, 25 bp, Homo sapien
ctagcaggcaaaatccgcttctttc

SEQ ID NO: 828440 - DNA, 25 bp, Homo sapien
gcccgtccctagaggcacgccggca

SEQ ID NO: 828441 - DNA, 25 bp, Homo sapien
tccctagaggcacgccggcagggac

SEQ ID NO: 828442 - DNA, 25 bp, Homo sapien
tcctgcgtgcgcagttgtcgccccg

SEQ ID NO: 828443 - DNA, 25 bp, Homo sapien
tgcgtgcgcagttgtcgccccgcca

SEQ ID NO: 828444 - DNA, 25 bp, Homo sapien
gagcattaaagttgtaagcgtccac

SEQ ID NO: 828445 - DNA, 25 bp, Homo sapien
gtaagcgtccactttgatgctgaat

SEQ ID NO: 828446 - DNA, 25 bp, Homo sapien
cgtagtgagcattaaagttgtaagc

SEQ ID NO: 828447 - DNA, 25 bp, Homo sapien
ctattttgaggttaattcgtagtga

SEQ ID NO: 828448 - DNA, 25 bp, Homo sapien
ctctgataatcctgctaattttatt

SEQ ID NO: 828449 - DNA, 25 bp, Homo sapien
tctctgataatcctgctaattttat

SEQ ID NO: 828450 - DNA, 25 bp, Homo sapien
ggggcatgagccgagccgcgccgtg

SEQ ID NO: 828451 - DNA, 25 bp, Homo sapien
gcgcccgggggcatgagccgagccg

SEQ ID NO: 828452 - DNA, 25 bp, Homo sapien
ggcatgagccgagccgcgccgtgca

SEQ ID NO: 828453 - DNA, 25 bp, Homo sapien
ccgagccgcgccgtgcaggagcccg

SEQ ID NO: 828454 - DNA, 25 bp, Homo sapien
gccggcgcccggggtctccgcgcca

SEQ ID NO: 828455 - DNA, 25 bp, Homo sapien
ccggcgcccggggtctccgcgccat

SEQ ID NO: 828456 - DNA, 25 bp, Homo sapien
ccagcgggctgacgaaggagaactc

SEQ ID NO: 828457 - DNA, 25 bp, Homo sapien
ttcaccagcgggctgacgaaggaga

SEQ ID NO: 828458 - DNA, 25 bp, Homo sapien
aggtatttcaccagcgggctgacga

SEQ ID NO: 828459 - DNA, 25 bp, Homo sapien
ggtatttcaccagcgggctgacgaa

SEQ ID NO: 828460 - DNA, 25 bp, Homo sapien
agaggagaacacagttgggtacctc

SEQ ID NO: 828461 - DNA, 25 bp, Homo sapien
cagaggagaacacagttgggtacct

SEQ ID NO: 828462 - DNA, 25 bp, Homo sapien
ggcggctgtccatgggaggctggct

SEQ ID NO: 828463 - DNA, 25 bp, Homo sapien
tcttcctcaggccacggctggcttt

SEQ ID NO: 828464 - DNA, 25 bp, Homo sapien
ctcaacaatgtccggggccaagcct

SEQ ID NO: 828465 - DNA, 25 bp, Homo sapien
catggcgctgctgttatgggtgtct

SEQ ID NO: 828466 - DNA, 25 bp, Homo sapien
gaagcagctgcttgtggttcccttg

SEQ ID NO: 828467 - DNA, 25 bp, Homo sapien
ggagcagctgataatctccaaatgg

SEQ ID NO: 828468 - DNA, 25 bp, Homo sapien
tccaaatgggctggttttcaggcag

SEQ ID NO: 828469 - DNA, 25 bp, Homo sapien
gctgcttgtggttcccttgggggag

SEQ ID NO: 828470 - DNA, 25 bp, Homo sapien
attagccgagcgtagacacccacag

SEQ ID NO: 828471 - DNA, 25 bp, Homo sapien
tgcatgcttcattagccgagcgtag

SEQ ID NO: 828472 - DNA, 25 bp, Homo sapien
catgcttcattagccgagcgtagac

SEQ ID NO: 828473 - DNA, 25 bp, Homo sapien
ttcattagccgagcgtagacaccca

SEQ ID NO: 828474 - DNA, 25 bp, Homo sapien
gcaggaacatgaggacacccaccac

SEQ ID NO: 828475 - DNA, 25 bp, Homo sapien
aacatgaggacacccaccacgatca

SEQ ID NO: 828476 - DNA, 25 bp, Homo sapien
atgttctcgcggagggacccaatgc

SEQ ID NO: 828477 - DNA, 25 bp, Homo sapien
gaggcagatgttctcgcggagggac

SEQ ID NO: 828478 - DNA, 25 bp, Homo sapien
cttgtctgagaagacgaagcccagg

SEQ ID NO: 828479 - DNA, 25 bp, Homo sapien
ctgagaagacgaagcccaggatccc

SEQ ID NO: 828480 - DNA, 25 bp, Homo sapien
cccaggatcccagcggccagctgca

SEQ ID NO: 828481 - DNA, 25 bp, Homo sapien
tgtctgagaagacgaagcccaggat

SEQ ID NO: 828482 - DNA, 25 bp, Homo sapien
tgaggttctgcagatccaagtcatc

SEQ ID NO: 828483 - DNA, 25 bp, Homo sapien
gatccaagtcatctcggtagtgcac

SEQ ID NO: 828484 - DNA, 25 bp, Homo sapien
tgcagatccaagtcatctcggtagt

SEQ ID NO: 828485 - DNA, 25 bp, Homo sapien
tctcggtagtgcacaatggcattgt

SEQ ID NO: 828486 - DNA, 25 bp, Homo sapien
cacaggcatagagggtgaggcatct

SEQ ID NO: 828487 - DNA, 25 bp, Homo sapien
agagggtgaggcatctcttgggatg

SEQ ID NO: 828488 - DNA, 25 bp, Homo sapien
catagagggtgaggcatctcttggg

SEQ ID NO: 828489 - DNA, 25 bp, Homo sapien
aggcatagagggtgaggcatctctt

SEQ ID NO: 828490 - DNA, 25 bp, Homo sapien
ccatttataacacagtagattacta

SEQ ID NO: 828491 - DNA, 25 bp, Homo sapien
taggtaaccatttataacacagtag

SEQ ID NO: 828492 - DNA, 25 bp, Homo sapien
ctctgctacgtgtgcttttttgcca

SEQ ID NO: 828493 - DNA, 25 bp, Homo sapien
ttaaagcactctgctacgtgtgctt

SEQ ID NO: 828494 - DNA, 25 bp, Homo sapien
caaggagttggatctgtagctgact

SEQ ID NO: 828495 - DNA, 25 bp, Homo sapien
acaatcaaatgagataactcactcc

SEQ ID NO: 828496 - DNA, 25 bp, Homo sapien
tcaaatgagataactcactcccttt

SEQ ID NO: 828497 - DNA, 25 bp, Homo sapien
gagttggatctgtagctgactgtga

SEQ ID NO: 828498 - DNA, 25 bp, Homo sapien
cactgtgcttgttggtattacagtt

SEQ ID NO: 828499 - DNA, 25 bp, Homo sapien
tgttttacatactcagctataatct

SEQ ID NO: 828500 - DNA, 25 bp, Homo sapien
tggctttgcaggcaaatggaagtga

SEQ ID NO: 828501 - DNA, 25 bp, Homo sapien
cagtatcagtgctgaaaaacttctc

SEQ ID NO: 828502 - DNA, 25 bp, Homo sapien
cttctactgggaactttaggttgtg

SEQ ID NO: 828503 - DNA, 25 bp, Homo sapien
cagaggttaagaatcacccacccct

SEQ ID NO: 828504 - DNA, 25 bp, Homo sapien
tcagagccaccaaaagtctatagca

SEQ ID NO: 828505 - DNA, 25 bp, Homo sapien
ttcccagttgccttcgcctgaagat

SEQ ID NO: 828506 - DNA, 25 bp, Homo sapien
tgaaatacatgttctgagaccagtc

SEQ ID NO: 828507 - DNA, 25 bp, Homo sapien
taggcaagcaacaggagtaaggcac

SEQ ID NO: 828508 - DNA, 25 bp, Homo sapien
catgttctgagaccagtccttgtag

SEQ ID NO: 828509 - DNA, 25 bp, Homo sapien
cagcgctctcgactggggttgtctt

SEQ ID NO: 828510 - DNA, 25 bp, Homo sapien
caagtagtcaaaggcctgcatacct

SEQ ID NO: 828511 - DNA, 25 bp, Homo sapien
caccaccaagtaagaataggttgct

SEQ ID NO: 828512 - DNA, 25 bp, Homo sapien
ggccacacatagtgttgatcactgc

SEQ ID NO: 828513 - DNA, 25 bp, Homo sapien
gctgtgtatccagttgaccaacttg

SEQ ID NO: 828514 - DNA, 25 bp, Homo sapien
agctgtagcttgatctgatctttga

SEQ ID NO: 828515 - DNA, 25 bp, Homo sapien
gctgtagcttgatctgatctttgat

SEQ ID NO: 828516 - DNA, 25 bp, Homo sapien
gcttgatctgatctttgatctgatt

SEQ ID NO: 828517 - DNA, 25 bp, Homo sapien
tgatctgatctttgatctgattcac

SEQ ID NO: 828518 - DNA, 25 bp, Homo sapien
tatcatgccaagtggagtccaggca

SEQ ID NO: 828519 - DNA, 25 bp, Homo sapien
aagtatgtccgccaagctcaggagc

SEQ ID NO: 828520 - DNA, 25 bp, Homo sapien
tatcactctggcacaatgctgaggg

SEQ ID NO: 828521 - DNA, 25 bp, Homo sapien
tctcactggcacgttaggatctaag

SEQ ID NO: 828522 - DNA, 25 bp, Homo sapien
ttcaagggcatgtatggctcagtcc

SEQ ID NO: 828523 - DNA, 25 bp, Homo sapien
taaagaaaaccctgcttgctggaga

SEQ ID NO: 828524 - DNA, 25 bp, Homo sapien
tctgactgcagagtatagggaccag

SEQ ID NO: 828525 - DNA, 25 bp, Homo sapien
taccctgtaggaatactgagctccg

SEQ ID NO: 828526 - DNA, 25 bp, Homo sapien
tgggactctttcgacctaatttaga

SEQ ID NO: 828527 - DNA, 25 bp, Homo sapien
gcaatgcatcggttgaaggagacgc

SEQ ID NO: 828528 - DNA, 25 bp, Homo sapien
tgtgtggcgtttaggagagtctcca

SEQ ID NO: 828529 - DNA, 25 bp, Homo sapien
tatgctgttcctagattggaactgg

SEQ ID NO: 828530 - DNA, 25 bp, Homo sapien
caggcgcgggcctaggccgccgcgg

SEQ ID NO: 828531 - DNA, 25 bp, Homo sapien
gagtcctccctacagccgactcagg

SEQ ID NO: 828532 - DNA, 25 bp, Homo sapien
gttgggggacgcaggcgcgggccta

SEQ ID NO: 828533 - DNA, 25 bp, Homo sapien
gcgcaccgcgccgagcttcctcgga

SEQ ID NO: 828534 - DNA, 25 bp, Homo sapien
tttgtccccgcagcagttcggtcga

SEQ ID NO: 828535 - DNA, 25 bp, Homo sapien
gcagaaggctcgcttaggagacact

SEQ ID NO: 828536 - DNA, 25 bp, Homo sapien
gaaaggcgccttcctaggagcagaa

SEQ ID NO: 828537 - DNA, 25 bp, Homo sapien
tcggtcgaggctatttcccgccagg

SEQ ID NO: 828538 - DNA, 25 bp, Homo sapien
tggtggttgccggaggttagtgacg

SEQ ID NO: 828539 - DNA, 25 bp, Homo sapien
gatggcgctcaaagaaattatgctg

SEQ ID NO: 828540 - DNA, 25 bp, Homo sapien
ttgatacacgcaacaactcggatgg

SEQ ID NO: 828541 - DNA, 25 bp, Homo sapien
tctcaaaaggataactactgcatga

SEQ ID NO: 828542 - DNA, 25 bp, Homo sapien
ggtggcaaatagacccatgaaaaga

SEQ ID NO: 828543 - DNA, 25 bp, Homo sapien
ccacatgctgatcaaaatgactaaa

SEQ ID NO: 828544 - DNA, 25 bp, Homo sapien
gatgttcagtatcattagccattag

SEQ ID NO: 828545 - DNA, 25 bp, Homo sapien
ccataatgagatattaccacatgct

SEQ ID NO: 828546 - DNA, 25 bp, Homo sapien
gaaatatgcccacatatatggccaa

SEQ ID NO: 828547 - DNA, 25 bp, Homo sapien
ggaggaatcgctggctgatattaag

SEQ ID NO: 828548 - DNA, 25 bp, Homo sapien
gactatatagttacagcaatcaaga

SEQ ID NO: 828549 - DNA, 25 bp, Homo sapien
caatgtggtactggtagaaagatag

SEQ ID NO: 828550 - DNA, 25 bp, Homo sapien
catagcatgacagaacagcaacgtt

SEQ ID NO: 828551 - DNA, 25 bp, Homo sapien
gtggatacatggcttgctctcagga

SEQ ID NO: 828552 - DNA, 25 bp, Homo sapien
tcctggaggaacctgtagacttcca

SEQ ID NO: 828553 - DNA, 25 bp, Homo sapien
tgccaaaatgagatgtaccgtgagt

SEQ ID NO: 828554 - DNA, 25 bp, Homo sapien
gtataacccagcataaccacaaggc

SEQ ID NO: 828555 - DNA, 25 bp, Homo sapien
ccaaacaggagagtagacttgcact

SEQ ID NO: 828556 - DNA, 25 bp, Homo sapien
ttccttgttgctgatcgggctgcac

SEQ ID NO: 828557 - DNA, 25 bp, Homo sapien
ttcttacccctggaagacttgctca

SEQ ID NO: 828558 - DNA, 25 bp, Homo sapien
cagccaccttcgccccagcgcgccg

SEQ ID NO: 828559 - DNA, 25 bp, Homo sapien
ggaacgggatgcacgactccccaag

SEQ ID NO: 828560 - DNA, 25 bp, Homo sapien
aagccctagcctcgcaatccaagtt

SEQ ID NO: 828561 - DNA, 25 bp, Homo sapien
tgcggaggcccggaacgggatgcac

SEQ ID NO: 828562 - DNA, 25 bp, Homo sapien
ccaagttgtcttcagccctaggaga

SEQ ID NO: 828563 - DNA, 25 bp, Homo sapien
tgtgcgcccagagaatccgggcccg

SEQ ID NO: 828564 - DNA, 25 bp, Homo sapien
cggaggcggctcaggcgacctgtgc

SEQ ID NO: 828565 - DNA, 25 bp, Homo sapien
gacctgtgcgcccagagaatccggg

SEQ ID NO: 828566 - DNA, 25 bp, Homo sapien
ggctcaggcgacctgtgcgcccaga

SEQ ID NO: 828567 - DNA, 25 bp, Homo sapien
caaccccgccaactcagcaaaagcc

SEQ ID NO: 828568 - DNA, 25 bp, Homo sapien
cccgccaactcagcaaaagccccgg

SEQ ID NO: 828569 - DNA, 25 bp, Homo sapien
ccccgccaactcagcaaaagccccg

SEQ ID NO: 828570 - DNA, 25 bp, Homo sapien
ggccaaccccgccaactcagcaaaa

SEQ ID NO: 828571 - DNA, 25 bp, Homo sapien
aggcccggtcgcgttcccgctcgag

SEQ ID NO: 828572 - DNA, 25 bp, Homo sapien
gtcgcgttcccgctcgaggccgccc

SEQ ID NO: 828573 - DNA, 25 bp, Homo sapien
gcggcggagggccagtcaccgccgc

SEQ ID NO: 828574 - DNA, 25 bp, Homo sapien
gagggccagtcaccgccgcgctcct

SEQ ID NO: 828575 - DNA, 25 bp, Homo sapien
gcagggggcagcccggccgcagtgg

SEQ ID NO: 828576 - DNA, 25 bp, Homo sapien
tcgcagggggcagcccggccgcagt

SEQ ID NO: 828577 - DNA, 25 bp, Homo sapien
ctcgcagggggcagcccggccgcag

SEQ ID NO: 828578 - DNA, 25 bp, Homo sapien
cgcagggggcagcccggccgcagtg

SEQ ID NO: 828579 - DNA, 25 bp, Homo sapien
ccgaccagagcacgagcttgccgtg

SEQ ID NO: 828580 - DNA, 25 bp, Homo sapien
gagcacgagcttgccgtgcgcttcc

SEQ ID NO: 828581 - DNA, 25 bp, Homo sapien
agcccaggcacacgttgtagcgcag

SEQ ID NO: 828582 - DNA, 25 bp, Homo sapien
gagtccgagtctccggccagcagtg

SEQ ID NO: 828583 - DNA, 25 bp, Homo sapien
caggaaccttatggccttgtccaac

SEQ ID NO: 828584 - DNA, 25 bp, Homo sapien
acatctgacaaaggccgagaacttg

SEQ ID NO: 828585 - DNA, 25 bp, Homo sapien
gatgcagctcttcctcatgggtacc

SEQ ID NO: 828586 - DNA, 25 bp, Homo sapien
gaacttgtcaatgacaggcggccta

SEQ ID NO: 828587 - DNA, 25 bp, Homo sapien
gattactgaaaacctcttgagcaag

SEQ ID NO: 828588 - DNA, 25 bp, Homo sapien
gaagacttgagctggcacagaacac

SEQ ID NO: 828589 - DNA, 25 bp, Homo sapien
gcaaaagcctaaagtatgcgtgcct

SEQ ID NO: 828590 - DNA, 25 bp, Homo sapien
tgcgcacaatgagtgagcctctgaa

SEQ ID NO: 828591 - DNA, 25 bp, Homo sapien
tctggacagatgttggatatttcca

SEQ ID NO: 828592 - DNA, 25 bp, Homo sapien
gacagatgttggatatttccaaaag

SEQ ID NO: 828593 - DNA, 25 bp, Homo sapien
ggacagatgttggatatttccaaaa

SEQ ID NO: 828594 - DNA, 25 bp, Homo sapien
ctggacagatgttggatatttccaa

SEQ ID NO: 828595 - DNA, 25 bp, Homo sapien
cgtgcagccttcagggaagcggtca

SEQ ID NO: 828596 - DNA, 25 bp, Homo sapien
gaagcggtcaggagtgcagcgcagg

SEQ ID NO: 828597 - DNA, 25 bp, Homo sapien
ctcacacttgggcatgtatacggca

SEQ ID NO: 828598 - DNA, 25 bp, Homo sapien
acccggtcattctcacacttgggca

SEQ ID NO: 828599 - DNA, 25 bp, Homo sapien
actagctcacgtcccctgtcttggt

SEQ ID NO: 828600 - DNA, 25 bp, Homo sapien
tgtcttggtggctctagctgtttca

SEQ ID NO: 828601 - DNA, 25 bp, Homo sapien
gcatttggcatatagtaaacaggac

SEQ ID NO: 828602 - DNA, 25 bp, Homo sapien
gctgtttcacatgctcgcgccttaa

SEQ ID NO: 828603 - DNA, 25 bp, Homo sapien
cccgaaggccgcgatgtagctgtgc

SEQ ID NO: 828604 - DNA, 25 bp, Homo sapien
ggttctggcactggatgccgcagcc

SEQ ID NO: 828605 - DNA, 25 bp, Homo sapien
tgaacttgatgttctgcacctcatt

SEQ ID NO: 828606 - DNA, 25 bp, Homo sapien
tgtctgtccgaaccaagggcacttc

SEQ ID NO: 828607 - DNA, 25 bp, Homo sapien
tctctcggcgggcaccatccatgaa

SEQ ID NO: 828608 - DNA, 25 bp, Homo sapien
aataacagcagggtagcgattcgag

SEQ ID NO: 828609 - DNA, 25 bp, Homo sapien
atctgcacggcagacgatctctcgg

SEQ ID NO: 828610 - DNA, 25 bp, Homo sapien
gaagcacgcattgacgtagaagaga

SEQ ID NO: 828611 - DNA, 25 bp, Homo sapien
gccatcagggcgtagtacacgatga

SEQ ID NO: 828612 - DNA, 25 bp, Homo sapien
gcgccacagcaaggattgccacagt

SEQ ID NO: 828613 - DNA, 25 bp, Homo sapien
aagtaggaggtcttgcccgagagag

SEQ ID NO: 828614 - DNA, 25 bp, Homo sapien
gacaaagatgatgacgcaggacaga

SEQ ID NO: 828615 - DNA, 25 bp, Homo sapien
aggaagtagcctcccacgatgagca

SEQ ID NO: 828616 - DNA, 25 bp, Homo sapien
cacgaagcccgcacggtatcggtag

SEQ ID NO: 828617 - DNA, 25 bp, Homo sapien
ggtagttcttgtagcccacaaaaca

SEQ ID NO: 828618 - DNA, 25 bp, Homo sapien
cacaaaacaaatcccactcacagag

SEQ ID NO: 828619 - DNA, 25 bp, Homo sapien
tgaggcttactatgggatggcagca

SEQ ID NO: 828620 - DNA, 25 bp, Homo sapien
taattccacgcatgctgtgagagct

SEQ ID NO: 828621 - DNA, 25 bp, Homo sapien
ccaggctggactagttcaacacatg

SEQ ID NO: 828622 - DNA, 25 bp, Homo sapien
tgattaccatactaggacagcatga

SEQ ID NO: 828623 - DNA, 25 bp, Homo sapien
cgcagcatggtctcgttgatcttgc

SEQ ID NO: 828624 - DNA, 25 bp, Homo sapien
catggtctcgttgatcttgctggca

SEQ ID NO: 828625 - DNA, 25 bp, Homo sapien
gggtggttgctcttgatggagaaca

SEQ ID NO: 828626 - DNA, 25 bp, Homo sapien
aggcgcagcatggtctcgttgatct

SEQ ID NO: 828627 - DNA, 25 bp, Homo sapien
cccactcagcctggttgaagaagtc

SEQ ID NO: 828628 - DNA, 25 bp, Homo sapien
ggttgaagaagtcgtagaagtggca

SEQ ID NO: 828629 - DNA, 25 bp, Homo sapien
taatagctactgatgcctgggaccc

SEQ ID NO: 828630 - DNA, 25 bp, Homo sapien
tttagaaagggctaagctccacagc

SEQ ID NO: 828631 - DNA, 25 bp, Homo sapien
gaacctttacggaagagcctgaagc

SEQ ID NO: 828632 - DNA, 25 bp, Homo sapien
cagtcagggcttggactagcatcca

SEQ ID NO: 828633 - DNA, 25 bp, Homo sapien
cttgatctcacagtcagggatgggc

SEQ ID NO: 828634 - DNA, 25 bp, Homo sapien
aaggctcgggcgattcttgatctca

SEQ ID NO: 828635 - DNA, 25 bp, Homo sapien
caggtacgcctccagatgagcagcg

SEQ ID NO: 828636 - DNA, 25 bp, Homo sapien
tgggcagcccgatggtcacattggc

SEQ ID NO: 828637 - DNA, 25 bp, Homo sapien
gctcgtgccgcttagagaaggcctt

SEQ ID NO: 828638 - DNA, 25 bp, Homo sapien
cctgggttctgcaggagctcgtgcc

SEQ ID NO: 828639 - DNA, 25 bp, Homo sapien
gcccgtcgtgggacacagtgtgcat

SEQ ID NO: 828640 - DNA, 25 bp, Homo sapien
gaaggccttggcaatcatcttgctc

SEQ ID NO: 828641 - DNA, 25 bp, Homo sapien
gaaatccagttcttggaaccctgac

SEQ ID NO: 828642 - DNA, 25 bp, Homo sapien
ccaaagggcctaactggaggccaga

SEQ ID NO: 828643 - DNA, 25 bp, Homo sapien
gaagagaagggcctcacgtccccaa

SEQ ID NO: 828644 - DNA, 25 bp, Homo sapien
tgtaaccacggtgatctctacccct

SEQ ID NO: 828645 - DNA, 25 bp, Homo sapien
cagaggagacatcagctgagggctc

SEQ ID NO: 828646 - DNA, 25 bp, Homo sapien
cagaaatatcctggggcagtatggc

SEQ ID NO: 828647 - DNA, 25 bp, Homo sapien
ggctcctctccgagccaccatcttg

SEQ ID NO: 828648 - DNA, 25 bp, Homo sapien
tgagggctcattgaggtcaaaggcc

SEQ ID NO: 828649 - DNA, 25 bp, Homo sapien
ttcctccagaagcttgaactctcat

SEQ ID NO: 828650 - DNA, 25 bp, Homo sapien
cctccagaagcttgaactctcatac

SEQ ID NO: 828651 - DNA, 25 bp, Homo sapien
cttcctccagaagcttgaactctca

SEQ ID NO: 828652 - DNA, 25 bp, Homo sapien
tcctccagaagcttgaactctcata

SEQ ID NO: 828653 - DNA, 25 bp, Homo sapien
tctagactcttagagcctcagcccc

SEQ ID NO: 828654 - DNA, 25 bp, Homo sapien
acaggaggagagacaacacgagcct

SEQ ID NO: 828655 - DNA, 25 bp, Homo sapien
gagcacttaacctgttagttctggg

SEQ ID NO: 828656 - DNA, 25 bp, Homo sapien
actcttagagcctcagccccactct

SEQ ID NO: 828657 - DNA, 25 bp, Homo sapien
caggttggcttgttcctctgggggc

SEQ ID NO: 828658 - DNA, 25 bp, Homo sapien
ccacaggttggcttgttcctctggg

SEQ ID NO: 828659 - DNA, 25 bp, Homo sapien
aggttggcttgttcctctgggggca

SEQ ID NO: 828660 - DNA, 25 bp, Homo sapien
cagccacaggttggcttgttcctct

SEQ ID NO: 828661 - DNA, 25 bp, Homo sapien
ttcttcttccggcccaggcgcttct

SEQ ID NO: 828662 - DNA, 25 bp, Homo sapien
gcgccagcgggcacacctccttctt

SEQ ID NO: 828663 - DNA, 25 bp, Homo sapien
gcggcgccagcgggcacacctcctt

SEQ ID NO: 828664 - DNA, 25 bp, Homo sapien
tcttcttccggcccaggcgcttctg

SEQ ID NO: 828665 - DNA, 25 bp, Homo sapien
ccatcaggttggtgcgggagtgaat

SEQ ID NO: 828666 - DNA, 25 bp, Homo sapien
tgtcggcggccatgagcccatgcca

SEQ ID NO: 828667 - DNA, 25 bp, Homo sapien
tctgggcagaatgggttggagacca

SEQ ID NO: 828668 - DNA, 25 bp, Homo sapien
gaagtccgagtctgcatccatgagt

SEQ ID NO: 828669 - DNA, 25 bp, Homo sapien
gatcctagggaagcatgctcggtga

SEQ ID NO: 828670 - DNA, 25 bp, Homo sapien
cagggtagcccctcaagtctagagg

SEQ ID NO: 828671 - DNA, 25 bp, Homo sapien
cacctgggagaggaatacggtgccc

SEQ ID NO: 828672 - DNA, 25 bp, Homo sapien
ggtgccctggccctacttagacaaa

SEQ ID NO: 828673 - DNA, 25 bp, Homo sapien
ccataacctggaacccagccagcat

SEQ ID NO: 828674 - DNA, 25 bp, Homo sapien
acccagccagcatctatggcttcct

SEQ ID NO: 828675 - DNA, 25 bp, Homo sapien
ggaacatgtttggaggctatggaag

SEQ ID NO: 828676 - DNA, 25 bp, Homo sapien
tccccataacctggaacccagccag

SEQ ID NO: 828677 - DNA, 25 bp, Homo sapien
tgcaaccaccggctcagactccagc

SEQ ID NO: 828678 - DNA, 25 bp, Homo sapien
cagctcctgctcttggtcggccccg

SEQ ID NO: 828679 - DNA, 25 bp, Homo sapien
tccagctcctgctcttggtcggccc

SEQ ID NO: 828680 - DNA, 25 bp, Homo sapien
caccgcctccgctgcaaccaccggc

SEQ ID NO: 828681 - DNA, 25 bp, Homo sapien
ctagttgcgactccgcctcggaggg

SEQ ID NO: 828682 - DNA, 25 bp, Homo sapien
tgctcagtcctagttgcgactccgc

SEQ ID NO: 828683 - DNA, 25 bp, Homo sapien
ggcggccgtgctcagtcctagttgc

SEQ ID NO: 828684 - DNA, 25 bp, Homo sapien
cggctgacacaacctgcaccgacat

SEQ ID NO: 828685 - DNA, 25 bp, Homo sapien
gagcctcagggtctccaccgcccgc

SEQ ID NO: 828686 - DNA, 25 bp, Homo sapien
ggagcctcagggtctccaccgcccg

SEQ ID NO: 828687 - DNA, 25 bp, Homo sapien
gggtcgctccgcttcatggccgacg

SEQ ID NO: 828688 - DNA, 25 bp, Homo sapien
gcttcatggccgacgcctgaggcac

SEQ ID NO: 828689 - DNA, 25 bp, Homo sapien
tcgcggtgccgctggtgctggtgat

SEQ ID NO: 828690 - DNA, 25 bp, Homo sapien
ctggtgatgtgggtcgctccgcttc

SEQ ID NO: 828691 - DNA, 25 bp, Homo sapien
gtggagggtggtgccgccgtgccga

SEQ ID NO: 828692 - DNA, 25 bp, Homo sapien
ggtggtgccgccgtgccgagaggat

SEQ ID NO: 828693 - DNA, 25 bp, Homo sapien
tgccgccgtgccgagaggatctgca

SEQ ID NO: 828694 - DNA, 25 bp, Homo sapien
tgcgatcagaaaggagggcgtggag

SEQ ID NO: 828695 - DNA, 25 bp, Homo sapien
tattcagagcgaagtacggccgtgc

SEQ ID NO: 828696 - DNA, 25 bp, Homo sapien
tcccgctgcctattccaagtagtag

SEQ ID NO: 828697 - DNA, 25 bp, Homo sapien
gccgcgggacgtactattaggtgtc

SEQ ID NO: 828698 - DNA, 25 bp, Homo sapien
ctggaaaatcacacccgggagcgtg

SEQ ID NO: 828699 - DNA, 25 bp, Homo sapien
tatactatcgaggtctcttccccga

SEQ ID NO: 828700 - DNA, 25 bp, Homo sapien
tcagggaagagagaatatcgcagtc

SEQ ID NO: 828701 - DNA, 25 bp, Homo sapien
gctgtgtgaactcccgtgagcggta

SEQ ID NO: 828702 - DNA, 25 bp, Homo sapien
gatttctatgcaaggtgactacacc

SEQ ID NO: 828703 - DNA, 25 bp, Homo sapien
tgaaagaagctgacgcctaagaccg

SEQ ID NO: 828704 - DNA, 25 bp, Homo sapien
ccacaaagatcgtctttcccaaaag

SEQ ID NO: 828705 - DNA, 25 bp, Homo sapien
tgaccaactatacccagcagggagg

SEQ ID NO: 828706 - DNA, 25 bp, Homo sapien
gcctaataatcctggtgaccaacta

SEQ ID NO: 828707 - DNA, 25 bp, Homo sapien
tacgggtaatacagggctatcatcc

SEQ ID NO: 828708 - DNA, 25 bp, Homo sapien
gactcagatctaggtactcccagca

SEQ ID NO: 828709 - DNA, 25 bp, Homo sapien
ggatccaaggttccaattcagctgg

SEQ ID NO: 828710 - DNA, 25 bp, Homo sapien
cctgtgcccatactgtgtctacgaa

SEQ ID NO: 828711 - DNA, 25 bp, Homo sapien
ggttcaacgacaaggaaagtggtca

SEQ ID NO: 828712 - DNA, 25 bp, Homo sapien
cattgtaaggcaagctcagccctgc

SEQ ID NO: 828713 - DNA, 25 bp, Homo sapien
aaagattgggcacctgaaaagcagc

SEQ ID NO: 828714 - DNA, 25 bp, Homo sapien
gaatttcgtcatccagctgtatcct

SEQ ID NO: 828715 - DNA, 25 bp, Homo sapien
cacttcccgcattcaagcattcaag

SEQ ID NO: 828716 - DNA, 25 bp, Homo sapien
cccgcattcaagcattcaagtgatt

SEQ ID NO: 828717 - DNA, 25 bp, Homo sapien
tccacttcccgcattcaagcattca

SEQ ID NO: 828718 - DNA, 25 bp, Homo sapien
cttcccgcattcaagcattcaagtg

SEQ ID NO: 828719 - DNA, 25 bp, Homo sapien
ggtggaacagtttgagggactgaat

SEQ ID NO: 828720 - DNA, 25 bp, Homo sapien
catggtggaacagtttgagggactg

SEQ ID NO: 828721 - DNA, 25 bp, Homo sapien
tgctgatcaaggagggggatattgt

SEQ ID NO: 828722 - DNA, 25 bp, Homo sapien
aggagggggatattgtaaagaacat

SEQ ID NO: 828723 - DNA, 25 bp, Homo sapien
gaaaagaagacaatgtttaggccag

SEQ ID NO: 828724 - DNA, 25 bp, Homo sapien
aagaagacaatgtttaggccaggca

SEQ ID NO: 828725 - DNA, 25 bp, Homo sapien
cagaaaatagaatagaggtttccaa

SEQ ID NO: 828726 - DNA, 25 bp, Homo sapien
tagaatagaggtttccaagggctgg

SEQ ID NO: 828727 - DNA, 25 bp, Homo sapien
gcagcctctgctacatatataaaga

SEQ ID NO: 828728 - DNA, 25 bp, Homo sapien
tgttaacatctagccagagagcctg

SEQ ID NO: 828729 - DNA, 25 bp, Homo sapien
tttaagccaaaggagtattagctgg

SEQ ID NO: 828730 - DNA, 25 bp, Homo sapien
acagaggtgagccatcacgtgcagc

SEQ ID NO: 828731 - DNA, 25 bp, Homo sapien
tgagttcatcaacccaggcctatca

SEQ ID NO: 828732 - DNA, 25 bp, Homo sapien
taagaattgctaaacatgcgcgtgc

SEQ ID NO: 828733 - DNA, 25 bp, Homo sapien
tgtgtctacacaggacggaggtatt

SEQ ID NO: 828734 - DNA, 25 bp, Homo sapien
taagtttagtactggcactgcctcc

SEQ ID NO: 828735 - DNA, 25 bp, Homo sapien
cataggtgttcaacagatataccca

SEQ ID NO: 828736 - DNA, 25 bp, Homo sapien
tacagtattgattgtaagggcaaaa

SEQ ID NO: 828737 - DNA, 25 bp, Homo sapien
ttattccacataattcacataggtg

SEQ ID NO: 828738 - DNA, 25 bp, Homo sapien
tcctaagactcggtttgtagaatca

SEQ ID NO: 828739 - DNA, 25 bp, Homo sapien
gaggccagaggctcaaaaactccac

SEQ ID NO: 828740 - DNA, 25 bp, Homo sapien
cagaggatgcgcagtgaggcttttc

SEQ ID NO: 828741 - DNA, 25 bp, Homo sapien
tggccagcggctcttgctatacagt

SEQ ID NO: 828742 - DNA, 25 bp, Homo sapien
tttggagcccaagaatctaatgcag

SEQ ID NO: 828743 - DNA, 25 bp, Homo sapien
ttacatcccgtgagctcgataccgg

SEQ ID NO: 828744 - DNA, 25 bp, Homo sapien
tcaaatgccttacctggacataact

SEQ ID NO: 828745 - DNA, 25 bp, Homo sapien
taccccttatgttggtgaatggcac

SEQ ID NO: 828746 - DNA, 25 bp, Homo sapien
aaaatatcttctactggccgggcgc

SEQ ID NO: 828747 - DNA, 25 bp, Homo sapien
gggtcaggtccttatcctctcttac

SEQ ID NO: 828748 - DNA, 25 bp, Homo sapien
ttagggtcaggtccttatcctctct

SEQ ID NO: 828749 - DNA, 25 bp, Homo sapien
tagggtcaggtccttatcctctctt

SEQ ID NO: 828750 - DNA, 25 bp, Homo sapien
gtcaggtccttatcctctcttactt

SEQ ID NO: 828751 - DNA, 25 bp, Homo sapien
tagcaagtttgtccaaaaagtcgtc

SEQ ID NO: 828752 - DNA, 25 bp, Homo sapien
gaaactcatctctctgttatcacac

SEQ ID NO: 828753 - DNA, 25 bp, Homo sapien
cacatacagaagtcagtcaccaaat

SEQ ID NO: 828754 - DNA, 25 bp, Homo sapien
taaataggagtatgaccatttaccc

SEQ ID NO: 828755 - DNA, 25 bp, Homo sapien
ggtagaatccctcaaccagtgtgac

SEQ ID NO: 828756 - DNA, 25 bp, Homo sapien
gaagaggacgccaatcaagcaggta

SEQ ID NO: 828757 - DNA, 25 bp, Homo sapien
cacaactgacgttacattaggaagg

SEQ ID NO: 828758 - DNA, 25 bp, Homo sapien
caagcaggtacgtatgtcaaggcag

SEQ ID NO: 828759 - DNA, 25 bp, Homo sapien
ggccatgctataagatgcatactga

SEQ ID NO: 828760 - DNA, 25 bp, Homo sapien
ggctactattaacctgctatgccag

SEQ ID NO: 828761 - DNA, 25 bp, Homo sapien
taaatgctgctttagttgtaaccca

SEQ ID NO: 828762 - DNA, 25 bp, Homo sapien
gaattgagtacgagaatagtttgca

SEQ ID NO: 828763 - DNA, 25 bp, Homo sapien
tgaagaacagcaatccctgagagac

SEQ ID NO: 828764 - DNA, 25 bp, Homo sapien
caggatggagtactggaaaacgcgc

SEQ ID NO: 828765 - DNA, 25 bp, Homo sapien
gcagtgggctcctcttaagtactca

SEQ ID NO: 828766 - DNA, 25 bp, Homo sapien
gagcccagggctatcttcgttgaag

SEQ ID NO: 828767 - DNA, 25 bp, Homo sapien
aagctttttccatcccacctacagg

SEQ ID NO: 828768 - DNA, 25 bp, Homo sapien
cacctacaggtgaaattttcctatt

SEQ ID NO: 828769 - DNA, 25 bp, Homo sapien
tgcccggccaattattccaagcttt

SEQ ID NO: 828770 - DNA, 25 bp, Homo sapien
ttttccatcccacctacaggtgaaa

SEQ ID NO: 828771 - DNA, 25 bp, Homo sapien
aatagaatggtggttccaacttcgg

SEQ ID NO: 828772 - DNA, 25 bp, Homo sapien
tagaatggtggttccaacttcggga

SEQ ID NO: 828773 - DNA, 25 bp, Homo sapien
acttcgggacccgtagtccagagct

SEQ ID NO: 828774 - DNA, 25 bp, Homo sapien
ccagagctacgtagaaatttctagc

SEQ ID NO: 828775 - DNA, 25 bp, Homo sapien
agcctaaaacacttaccatctgagc

SEQ ID NO: 828776 - DNA, 25 bp, Homo sapien
gcgatcttcccatgggatcacagac

SEQ ID NO: 828777 - DNA, 25 bp, Homo sapien
taagtatttttggaactcattcatt

SEQ ID NO: 828778 - DNA, 25 bp, Homo sapien
aagaacaatatatcatggcacatgg

SEQ ID NO: 828779 - DNA, 25 bp, Homo sapien
caaccctatggaaacaaaatctaat

SEQ ID NO: 828780 - DNA, 25 bp, Homo sapien
aaacatgccaaaactatacattggg

SEQ ID NO: 828781 - DNA, 25 bp, Homo sapien
agacctcaaactatgcaactaccaa

SEQ ID NO: 828782 - DNA, 25 bp, Homo sapien
aggagctcaaacaaccctatggaaa

SEQ ID NO: 828783 - DNA, 25 bp, Homo sapien
gccactgtacctgacataaccataa

SEQ ID NO: 828784 - DNA, 25 bp, Homo sapien
cactcagtttttaaggcacaggcag

SEQ ID NO: 828785 - DNA, 25 bp, Homo sapien
ggctggcagcggacaagaaccaaaa

SEQ ID NO: 828786 - DNA, 25 bp, Homo sapien
gattggaatttagagacatgagctt

SEQ ID NO: 828787 - DNA, 25 bp, Homo sapien
tgcagcaatagcattagaaagccaa

SEQ ID NO: 828788 - DNA, 25 bp, Homo sapien
cataagcctttggtaatcactggaa

SEQ ID NO: 828789 - DNA, 25 bp, Homo sapien
gcctagcttttcaaagggtgtccca

SEQ ID NO: 828790 - DNA, 25 bp, Homo sapien
taatagcagttccaggaccagatcc

SEQ ID NO: 828791 - DNA, 25 bp, Homo sapien
tccaagatggtacagaacaacaata

SEQ ID NO: 828792 - DNA, 25 bp, Homo sapien
gagctcaagctcacctatgatcgtg

SEQ ID NO: 828793 - DNA, 25 bp, Homo sapien
ccacacaaagtaggtgtcatcctat

SEQ ID NO: 828794 - DNA, 25 bp, Homo sapien
ccaagcacgctggtgcattcctgta

SEQ ID NO: 828795 - DNA, 25 bp, Homo sapien
aattgctcactgtgtggtactgtgc

SEQ ID NO: 828796 - DNA, 25 bp, Homo sapien
cataaagtcaggcaaaaaagagagc

SEQ ID NO: 828797 - DNA, 25 bp, Homo sapien
gaaaagctcaaagagacgagtctgg

SEQ ID NO: 828798 - DNA, 25 bp, Homo sapien
ttaatgccagtacccaaagcgtaac

SEQ ID NO: 828799 - DNA, 25 bp, Homo sapien
aatgccaaagtacatgctggttccc

SEQ ID NO: 828800 - DNA, 25 bp, Homo sapien
taaattctcaagatcgtggacagat

SEQ ID NO: 828801 - DNA, 25 bp, Homo sapien
gctctcctaccagctgatagggtga

SEQ ID NO: 828802 - DNA, 25 bp, Homo sapien
tggtcacttaggatcaaaactgagt

SEQ ID NO: 828803 - DNA, 25 bp, Homo sapien
caatgactgcctgtggtgaacagag

SEQ ID NO: 828804 - DNA, 25 bp, Homo sapien
gaactcccaaaataggtggcaagtg

SEQ ID NO: 828805 - DNA, 25 bp, Homo sapien
gaataatactgcgtttagaacagtg

SEQ ID NO: 828806 - DNA, 25 bp, Homo sapien
ttttctagaatgaagcacaagatga

SEQ ID NO: 828807 - DNA, 25 bp, Homo sapien
tatcacaacccgaggcaaccactga

SEQ ID NO: 828808 - DNA, 25 bp, Homo sapien
tttgttgctgactcatctcactact

SEQ ID NO: 828809 - DNA, 25 bp, Homo sapien
tctgttactatagatagatttgcct

SEQ ID NO: 828810 - DNA, 25 bp, Homo sapien
ttagggcctttatacatactgccac

SEQ ID NO: 828811 - DNA, 25 bp, Homo sapien
gataactgctaaatctctacttaga

SEQ ID NO: 828812 - DNA, 25 bp, Homo sapien
catgtttcagttatcatctatatgc

SEQ ID NO: 828813 - DNA, 25 bp, Homo sapien
ctatatgctgataactgctaaatct

SEQ ID NO: 828814 - DNA, 25 bp, Homo sapien
taccatgtttcagttatcatctata

SEQ ID NO: 828815 - DNA, 25 bp, Homo sapien
gcagcagtaagctaagccacaagtg

SEQ ID NO: 828816 - DNA, 25 bp, Homo sapien
caggatgatttcacggccctaaaaa

SEQ ID NO: 828817 - DNA, 25 bp, Homo sapien
cataaatacctatacagctgagggt

SEQ ID NO: 828818 - DNA, 25 bp, Homo sapien
taccctctgcccgtcaaagacatag

SEQ ID NO: 828819 - DNA, 25 bp, Homo sapien
tcactatccatatacagagttgcct

SEQ ID NO: 828820 - DNA, 25 bp, Homo sapien
tgccaacggacatttagattgctcc

SEQ ID NO: 828821 - DNA, 25 bp, Homo sapien
catgtgtgagaatatctgtaggata

SEQ ID NO: 828822 - DNA, 25 bp, Homo sapien
gattgctcctaccttgtgctatttg

SEQ ID NO: 828823 - DNA, 25 bp, Homo sapien
atgcccggcctgacataagttctta

SEQ ID NO: 828824 - DNA, 25 bp, Homo sapien
tggaaagtctggaataagcatatgc

SEQ ID NO: 828825 - DNA, 25 bp, Homo sapien
tcctagctgtaaagagaaaacgatc

SEQ ID NO: 828826 - DNA, 25 bp, Homo sapien
taaagcccatacagagtaaacctag

SEQ ID NO: 828827 - DNA, 25 bp, Homo sapien
gaaagtatcccattgcatgaacagc

SEQ ID NO: 828828 - DNA, 25 bp, Homo sapien
gcctttctagataatggtgtcacac

SEQ ID NO: 828829 - DNA, 25 bp, Homo sapien
tatattcctaccagcaagatctcag

SEQ ID NO: 828830 - DNA, 25 bp, Homo sapien
ggagtatgcatatgttcagctagat

SEQ ID NO: 828831 - DNA, 25 bp, Homo sapien
ccttcattacttaagagaatggtcc

SEQ ID NO: 828832 - DNA, 25 bp, Homo sapien
tgtttggggttcacagttcatcacc

SEQ ID NO: 828833 - DNA, 25 bp, Homo sapien
tcctttggatttggaatggaggaga

SEQ ID NO: 828834 - DNA, 25 bp, Homo sapien
gttcatcaccctgtaaggccttcat

SEQ ID NO: 828835 - DNA, 25 bp, Homo sapien
aatcagagctgatgcaaagtgctgc

SEQ ID NO: 828836 - DNA, 25 bp, Homo sapien
ggttatctgagtgccccaaagcaga

SEQ ID NO: 828837 - DNA, 25 bp, Homo sapien
aaagcagacccaaccctagtgagat

SEQ ID NO: 828838 - DNA, 25 bp, Homo sapien
gattcagaagttcacagtggctagc

SEQ ID NO: 828839 - DNA, 25 bp, Homo sapien
agtgcaggcttgggtaagatatgtc

SEQ ID NO: 828840 - DNA, 25 bp, Homo sapien
aggtgccctcattaccgtcccactt

SEQ ID NO: 828841 - DNA, 25 bp, Homo sapien
cctcattaccgtcccacttctccat

SEQ ID NO: 828842 - DNA, 25 bp, Homo sapien
gtgccctcattaccgtcccacttct

SEQ ID NO: 828843 - DNA, 25 bp, Homo sapien
ccactcaggcatgtgaaaagctgag

SEQ ID NO: 828844 - DNA, 25 bp, Homo sapien
gagttggcacactaatgttcagtag

SEQ ID NO: 828845 - DNA, 25 bp, Homo sapien
taagcttgtaagacggtgaggacta

SEQ ID NO: 828846 - DNA, 25 bp, Homo sapien
tggtcacaccaactcctttagggca

SEQ ID NO: 828847 - DNA, 25 bp, Homo sapien
catatcccttatgcagtggtcacac

SEQ ID NO: 828848 - DNA, 25 bp, Homo sapien
taccagaagggactaaagatctctc

SEQ ID NO: 828849 - DNA, 25 bp, Homo sapien
gaaagtctacctcgtcagttcttga

SEQ ID NO: 828850 - DNA, 25 bp, Homo sapien
catgcatgtcagtcgaggttactac

SEQ ID NO: 828851 - DNA, 25 bp, Homo sapien
tattctctgagggatatgaagtccc

SEQ ID NO: 828852 - DNA, 25 bp, Homo sapien
catgaaagtcaatcaaccagatttc

SEQ ID NO: 828853 - DNA, 25 bp, Homo sapien
gcatcaagctggctggatactcatg

SEQ ID NO: 828854 - DNA, 25 bp, Homo sapien
ccaaaagaatatcgggcatcaagct

SEQ ID NO: 828855 - DNA, 25 bp, Homo sapien
tcttgccaaaagaatatcgggcatc

SEQ ID NO: 828856 - DNA, 25 bp, Homo sapien
taacagctctttaaggcaactttgc

SEQ ID NO: 828857 - DNA, 25 bp, Homo sapien
cagaagaccaaaggtcctagtccta

SEQ ID NO: 828858 - DNA, 25 bp, Homo sapien
tagtcctaggtgtactagcctcaaa

SEQ ID NO: 828859 - DNA, 25 bp, Homo sapien
cctgtgtttatgctagagccaaagc

SEQ ID NO: 828860 - DNA, 25 bp, Homo sapien
tgattgtcctacctcagactcccaa

SEQ ID NO: 828861 - DNA, 25 bp, Homo sapien
acaggcatgtgccaccacgcgggct

SEQ ID NO: 828862 - DNA, 25 bp, Homo sapien
ggcatgtgccaccacgcgggctaat

SEQ ID NO: 828863 - DNA, 25 bp, Homo sapien
gtgattgtcctacctcagactccca

SEQ ID NO: 828864 - DNA, 25 bp, Homo sapien
gtgacattaccagccccactgccac

SEQ ID NO: 828865 - DNA, 25 bp, Homo sapien
gacattaccagccccactgccacct

SEQ ID NO: 828866 - DNA, 25 bp, Homo sapien
agtgacattaccagccccactgcca

SEQ ID NO: 828867 - DNA, 25 bp, Homo sapien
tgacattaccagccccactgccacc

SEQ ID NO: 828868 - DNA, 25 bp, Homo sapien
aatcccagagttgccattaacaatg

SEQ ID NO: 828869 - DNA, 25 bp, Homo sapien
gccttaatcccagagttgccattaa

SEQ ID NO: 828870 - DNA, 25 bp, Homo sapien
cccagagttgccattaacaatgtat

SEQ ID NO: 828871 - DNA, 25 bp, Homo sapien
cttaatcccagagttgccattaaca

SEQ ID NO: 828872 - DNA, 25 bp, Homo sapien
tcagcaataggaaaactcatcggat

SEQ ID NO: 828873 - DNA, 25 bp, Homo sapien
aaagtgccctttctatgtactccca

SEQ ID NO: 828874 - DNA, 25 bp, Homo sapien
cccataggacgtacatgaactttca

SEQ ID NO: 828875 - DNA, 25 bp, Homo sapien
taaactataggctcataaagggaga

SEQ ID NO: 828876 - DNA, 25 bp, Homo sapien
ttaatgataaaaagatggttccttg

SEQ ID NO: 828877 - DNA, 25 bp, Homo sapien
gatggttccttgatgggcagaacat

SEQ ID NO: 828878 - DNA, 25 bp, Homo sapien
tacagtacaccagaatgaaagcagg

SEQ ID NO: 828879 - DNA, 25 bp, Homo sapien
aagcaggaactgacggctccacttc

SEQ ID NO: 828880 - DNA, 25 bp, Homo sapien
cacgcctggctagtaagtaaatatt

SEQ ID NO: 828881 - DNA, 25 bp, Homo sapien
acgcctggctagtaagtaaatatta

SEQ ID NO: 828882 - DNA, 25 bp, Homo sapien
gcctggctagtaagtaaatattaat

SEQ ID NO: 828883 - DNA, 25 bp, Homo sapien
ccacgcctggctagtaagtaaatat

SEQ ID NO: 828884 - DNA, 25 bp, Homo sapien
tgagctgtagctgtcagtagatgac

SEQ ID NO: 828885 - DNA, 25 bp, Homo sapien
gatgactgagaaatggaacgagaca

SEQ ID NO: 828886 - DNA, 25 bp, Homo sapien
gagcgacgtccaattttggtgggac

SEQ ID NO: 828887 - DNA, 25 bp, Homo sapien
ggtgggacgtttgttgaattcttgc

SEQ ID NO: 828888 - DNA, 25 bp, Homo sapien
tattagggacctcaacaagggtata

SEQ ID NO: 828889 - DNA, 25 bp, Homo sapien
tgggaatagagcaatgtaaaacaga

SEQ ID NO: 828890 - DNA, 25 bp, Homo sapien
taaaagtataacgtctctgaacacc

SEQ ID NO: 828891 - DNA, 25 bp, Homo sapien
ttgaaatctcataaacctgcttttg

SEQ ID NO: 828892 - DNA, 25 bp, Homo sapien
agaaaacgctttgtatctctcaatg

SEQ ID NO: 828893 - DNA, 25 bp, Homo sapien
agaaacactctctagaaaacgcttt

SEQ ID NO: 828894 - DNA, 25 bp, Homo sapien
aacactctctagaaaacgctttgta

SEQ ID NO: 828895 - DNA, 25 bp, Homo sapien
cactctctagaaaacgctttgtatc

SEQ ID NO: 828896 - DNA, 25 bp, Homo sapien
tcttcctggatagccttaacttgaa

SEQ ID NO: 828897 - DNA, 25 bp, Homo sapien
tgcaggctatacacatgccagaaga

SEQ ID NO: 828898 - DNA, 25 bp, Homo sapien
tagggctaactttatcttcagaaca

SEQ ID NO: 828899 - DNA, 25 bp, Homo sapien
ctctgttaagtacctgcaggctata

SEQ ID NO: 828900 - DNA, 25 bp, Homo sapien
ccaaaccatggagcaaactgaagct

SEQ ID NO: 828901 - DNA, 25 bp, Homo sapien
attccaaaccatggagcaaactgaa

SEQ ID NO: 828902 - DNA, 25 bp, Homo sapien
tgaagcttctctagccacctagcac

SEQ ID NO: 828903 - DNA, 25 bp, Homo sapien
tagccacctagcaccatataaattt

SEQ ID NO: 828904 - DNA, 25 bp, Homo sapien
aatttctcttcgtccaaactctgcc

SEQ ID NO: 828905 - DNA, 25 bp, Homo sapien
ttgtccctgggcgatgtctcatcat

SEQ ID NO: 828906 - DNA, 25 bp, Homo sapien
tgcttcccttagagttcttttgctg

SEQ ID NO: 828907 - DNA, 25 bp, Homo sapien
actctgcctgtttgatgttcttaac

SEQ ID NO: 828908 - DNA, 25 bp, Homo sapien
ttatcacatagaaatttcacaagct

SEQ ID NO: 828909 - DNA, 25 bp, Homo sapien
tggacaaaaagacacaggtaggtta

SEQ ID NO: 828910 - DNA, 25 bp, Homo sapien
atttccccagtgtttcttgaactca

SEQ ID NO: 828911 - DNA, 25 bp, Homo sapien
atttcacaagctaccagaccccaga

SEQ ID NO: 828912 - DNA, 25 bp, Homo sapien
agtgatgtgtgtgcaacccacgatt

SEQ ID NO: 828913 - DNA, 25 bp, Homo sapien
gtgatgtgtgtgcaacccacgattt

SEQ ID NO: 828914 - DNA, 25 bp, Homo sapien
tgatgtgtgtgcaacccacgatttt

SEQ ID NO: 828915 - DNA, 25 bp, Homo sapien
gatgtgtgtgcaacccacgattttg

SEQ ID NO: 828916 - DNA, 25 bp, Homo sapien
gatactgaatctgctggcgccttga

SEQ ID NO: 828917 - DNA, 25 bp, Homo sapien
cagatactgaatctgctggcgcctt

SEQ ID NO: 828918 - DNA, 25 bp, Homo sapien
tgatcttggacttcctagcctccag

SEQ ID NO: 828919 - DNA, 25 bp, Homo sapien
atcttggacttcctagcctccagaa

SEQ ID NO: 828920 - DNA, 25 bp, Homo sapien
tgggctctacagaacctcttcagta

SEQ ID NO: 828921 - DNA, 25 bp, Homo sapien
tacaacgggaatgacttaagccagt

SEQ ID NO: 828922 - DNA, 25 bp, Homo sapien
tgggccaaacaactagtcaaggaga

SEQ ID NO: 828923 - DNA, 25 bp, Homo sapien
cagggtatgagcaagcctgggccaa

SEQ ID NO: 828924 - DNA, 25 bp, Homo sapien
tgcaggcagcccatcggcactgggc

SEQ ID NO: 828925 - DNA, 25 bp, Homo sapien
tggaatagatgttgcaggcagccca

SEQ ID NO: 828926 - DNA, 25 bp, Homo sapien
agcagccacttcattgagagtggaa

SEQ ID NO: 828927 - DNA, 25 bp, Homo sapien
gagcacccagagtttccataagcac

SEQ ID NO: 828928 - DNA, 25 bp, Homo sapien
ttagccaaaggcacagagaataagc

SEQ ID NO: 828929 - DNA, 25 bp, Homo sapien
tttagccaaaggcacagagaataag

SEQ ID NO: 828930 - DNA, 25 bp, Homo sapien
gccaaaggcacagagaataagctct

SEQ ID NO: 828931 - DNA, 25 bp, Homo sapien
caaaggcacagagaataagctctta

SEQ ID NO: 828932 - DNA, 25 bp, Homo sapien
atgctgaaacataaagtaagtctcc

SEQ ID NO: 828933 - DNA, 25 bp, Homo sapien
ctttaaagatttatgctgaaacata

SEQ ID NO: 828934 - DNA, 25 bp, Homo sapien
taaagtaagtctccaaatagactta

SEQ ID NO: 828935 - DNA, 25 bp, Homo sapien
gatagttcttttattgtcaaccttc

SEQ ID NO: 828936 - DNA, 25 bp, Homo sapien
attcacacatctatcgatacaccac

SEQ ID NO: 828937 - DNA, 25 bp, Homo sapien
catctatcgatacaccaccaaaagt

SEQ ID NO: 828938 - DNA, 25 bp, Homo sapien
acacatctatcgatacaccaccaaa

SEQ ID NO: 828939 - DNA, 25 bp, Homo sapien
tatcgatacaccaccaaaagtcatc

SEQ ID NO: 828940 - DNA, 25 bp, Homo sapien
taggtgtgcaagcatgcctctgaac

SEQ ID NO: 828941 - DNA, 25 bp, Homo sapien
taaagataaacacaacgctgtgccc

SEQ ID NO: 828942 - DNA, 25 bp, Homo sapien
tagaacattgttaggcacgaggctg

SEQ ID NO: 828943 - DNA, 25 bp, Homo sapien
cactgtagggttttgcctagcacaa

SEQ ID NO: 828944 - DNA, 25 bp, Homo sapien
ttttataaatccagtgggtaagatc

SEQ ID NO: 828945 - DNA, 25 bp, Homo sapien
taaacatgttgggatactttttata

SEQ ID NO: 828946 - DNA, 25 bp, Homo sapien
taaatccagtgggtaagatcccctc

SEQ ID NO: 828947 - DNA, 25 bp, Homo sapien
tactatgcccttgattttcttaaac

SEQ ID NO: 828948 - DNA, 25 bp, Homo sapien
ttataagattttatgtctagactgc

SEQ ID NO: 828949 - DNA, 25 bp, Homo sapien
tataagattttatgtctagactgca

SEQ ID NO: 828950 - DNA, 25 bp, Homo sapien
atcaagaattgattcacggcaacag

SEQ ID NO: 828951 - DNA, 25 bp, Homo sapien
tgacattcatggctggaacacacag

SEQ ID NO: 828952 - DNA, 25 bp, Homo sapien
caagaattgattcacggcaacagta

SEQ ID NO: 828953 - DNA, 25 bp, Homo sapien
cattcatggctggaacacacagctt

SEQ ID NO: 828954 - DNA, 25 bp, Homo sapien
tagaatctcaactggacatcacaac

SEQ ID NO: 828955 - DNA, 25 bp, Homo sapien
gaggtgctacatgaatcctttccag

SEQ ID NO: 828956 - DNA, 25 bp, Homo sapien
gagacattatccagaggtgctacat

SEQ ID NO: 828957 - DNA, 25 bp, Homo sapien
ggaagaagatgtagataacacagta

SEQ ID NO: 828958 - DNA, 25 bp, Homo sapien
aacatcatgtctgttgtccttttaa

SEQ ID NO: 828959 - DNA, 25 bp, Homo sapien
ccatagccacagactaccacttgct

SEQ ID NO: 828960 - DNA, 25 bp, Homo sapien
tccatagccacagactaccacttgc

SEQ ID NO: 828961 - DNA, 25 bp, Homo sapien
caaacatcatgtctgttgtcctttt

SEQ ID NO: 828962 - DNA, 25 bp, Homo sapien
tacatacacaatggagcccatggct

SEQ ID NO: 828963 - DNA, 25 bp, Homo sapien
agggcacagatggggtcaatttcag

SEQ ID NO: 828964 - DNA, 25 bp, Homo sapien
ttacatacacaatggagcccatggc

SEQ ID NO: 828965 - DNA, 25 bp, Homo sapien
cagatggggtcaatttcagttacat

SEQ ID NO: 828966 - DNA, 25 bp, Homo sapien
gctctgcagggttatgcctttattc

SEQ ID NO: 828967 - DNA, 25 bp, Homo sapien
accccttggactccatgatacatct

SEQ ID NO: 828968 - DNA, 25 bp, Homo sapien
tctactacattaaacattatttgcc

SEQ ID NO: 828969 - DNA, 25 bp, Homo sapien
acttcagccaacctttggatattgg

SEQ ID NO: 828970 - DNA, 25 bp, Homo sapien
taatttcaccagtcgaaatccatcc

SEQ ID NO: 828971 - DNA, 25 bp, Homo sapien
tcatttaatttcaccagtcgaaatc

SEQ ID NO: 828972 - DNA, 25 bp, Homo sapien
tgtacaggtaataacaatgtccact

SEQ ID NO: 828973 - DNA, 25 bp, Homo sapien
caatgtccacttgtcggatgacctc

SEQ ID NO: 828974 - DNA, 25 bp, Homo sapien
taatcgtatacctttggtcggagct

SEQ ID NO: 828975 - DNA, 25 bp, Homo sapien
ctaatcgtatacctttggtcggagc

SEQ ID NO: 828976 - DNA, 25 bp, Homo sapien
gcttagcagtgatcccaagagccgg

SEQ ID NO: 828977 - DNA, 25 bp, Homo sapien
caagagccgggaacaaatgatcaat

SEQ ID NO: 828978 - DNA, 25 bp, Homo sapien
gattatcttgcatgccagagcgctg

SEQ ID NO: 828979 - DNA, 25 bp, Homo sapien
gcagtcaagcagaatgtacctcctg

SEQ ID NO: 828980 - DNA, 25 bp, Homo sapien
catacggtccaagtgctctctggtt

SEQ ID NO: 828981 - DNA, 25 bp, Homo sapien
catgttacaaacgatgcagctattc

SEQ ID NO: 828982 - DNA, 25 bp, Homo sapien
gcagctattcttcatacggtccaag

SEQ ID NO: 828983 - DNA, 25 bp, Homo sapien
ctgtgttggaatgtcccatgttaca

SEQ ID NO: 828984 - DNA, 25 bp, Homo sapien
ggttacttatgtctgggctgcctct

SEQ ID NO: 828985 - DNA, 25 bp, Homo sapien
caacagctggcatatagcaatcata

SEQ ID NO: 828986 - DNA, 25 bp, Homo sapien
tgaagttaatccacaagtcatgagg

SEQ ID NO: 828987 - DNA, 25 bp, Homo sapien
ctggtctttatcctaggaggttact

SEQ ID NO: 828988 - DNA, 25 bp, Homo sapien
tattaaggcctagtcagcagtcaca

SEQ ID NO: 828989 - DNA, 25 bp, Homo sapien
tagtgccatggaggttaataaccac

SEQ ID NO: 828990 - DNA, 25 bp, Homo sapien
ggcagaatcaaggaaaggacacttc

SEQ ID NO: 828991 - DNA, 25 bp, Homo sapien
taccttacggctggcacaacttgac

SEQ ID NO: 828992 - DNA, 25 bp, Homo sapien
tatccccaaggaagtaccaatctag

SEQ ID NO: 828993 - DNA, 25 bp, Homo sapien
ggttaagtaaatcagggcagttcca

SEQ ID NO: 828994 - DNA, 25 bp, Homo sapien
aaaggtactacagcaaggagctcca

SEQ ID NO: 828995 - DNA, 25 bp, Homo sapien
gccacttatggacaaagacagtact

SEQ ID NO: 828996 - DNA, 25 bp, Homo sapien
gggaatttaatctgaggcccagcca

SEQ ID NO: 828997 - DNA, 25 bp, Homo sapien
aaggttctgccctcatatccgaagg

SEQ ID NO: 828998 - DNA, 25 bp, Homo sapien
catgccagatggagaatacctgtcc

SEQ ID NO: 828999 - DNA, 25 bp, Homo sapien
ggtggttcaccctagttacagaagc

SEQ ID NO: 829000 - DNA, 25 bp, Homo sapien
ggaacagaaagatgttgaagggagc

SEQ ID NO: 829001 - DNA, 25 bp, Homo sapien
ctgtgggaacagaaagatgttgaag

SEQ ID NO: 829002 - DNA, 25 bp, Homo sapien
aacagaaagatgttgaagggagcca

SEQ ID NO: 829003 - DNA, 25 bp, Homo sapien
tgggaacagaaagatgttgaaggga

SEQ ID NO: 829004 - DNA, 25 bp, Homo sapien
tacagcattagccatagcaagcccc

SEQ ID NO: 829005 - DNA, 25 bp, Homo sapien
atacagcaagtacagcattagccat

SEQ ID NO: 829006 - DNA, 25 bp, Homo sapien
cagcaagtacagcattagccatagc

SEQ ID NO: 829007 - DNA, 25 bp, Homo sapien
caagtacagcattagccatagcaag

SEQ ID NO: 829008 - DNA, 25 bp, Homo sapien
gccatcaggccatatcacatggtca

SEQ ID NO: 829009 - DNA, 25 bp, Homo sapien
ccaggtcagttctggtgtccgcaga

SEQ ID NO: 829010 - DNA, 25 bp, Homo sapien
gcagtactatcctcttgccatcagg

SEQ ID NO: 829011 - DNA, 25 bp, Homo sapien
ttgagatctcactcgctcccaggtc

SEQ ID NO: 829012 - DNA, 25 bp, Homo sapien
tatgggcccctagataaagacaatg

SEQ ID NO: 829013 - DNA, 25 bp, Homo sapien
tagggcagctagaaacaagtcatca

SEQ ID NO: 829014 - DNA, 25 bp, Homo sapien
tagccaaaaacacccatggtacttg

SEQ ID NO: 829015 - DNA, 25 bp, Homo sapien
cagtagaagaactagaaattgcccc

SEQ ID NO: 829016 - DNA, 25 bp, Homo sapien
agcagctaaggttcagcaggcggcc

SEQ ID NO: 829017 - DNA, 25 bp, Homo sapien
tagcagtgattgagagcacaaatgt

SEQ ID NO: 829018 - DNA, 25 bp, Homo sapien
aatgtaggcactgtggagcagctaa

SEQ ID NO: 829019 - DNA, 25 bp, Homo sapien
cactgtggagcagctaaggttcagc

SEQ ID NO: 829020 - DNA, 25 bp, Homo sapien
ccctcaggagcattgtaaagctcta

SEQ ID NO: 829021 - DNA, 25 bp, Homo sapien
cttcttgggcaacaggtagacatcc

SEQ ID NO: 829022 - DNA, 25 bp, Homo sapien
tgtaaagctctatcaaggcaagagc

SEQ ID NO: 829023 - DNA, 25 bp, Homo sapien
ggtagacatcctgcttatagcgacc

SEQ ID NO: 829024 - DNA, 25 bp, Homo sapien
gctctgtcaagtgggcatcaaaggt

SEQ ID NO: 829025 - DNA, 25 bp, Homo sapien
tgtcaagtgggcatcaaaggtaggc

SEQ ID NO: 829026 - DNA, 25 bp, Homo sapien
agatacttggcctgttcatctgtca

SEQ ID NO: 829027 - DNA, 25 bp, Homo sapien
gcttgaagggcccattcttgttgag

SEQ ID NO: 829028 - DNA, 25 bp, Homo sapien
atgcaaagaccaattccagtgcagg

SEQ ID NO: 829029 - DNA, 25 bp, Homo sapien
tctgagttcatgtaagcatatgtgg

SEQ ID NO: 829030 - DNA, 25 bp, Homo sapien
aattccagtgcaggaagctcatcac

SEQ ID NO: 829031 - DNA, 25 bp, Homo sapien
gttcatgtaagcatatgtggttggg

SEQ ID NO: 829032 - DNA, 25 bp, Homo sapien
ggtgagcacggcaggcagctttgat

SEQ ID NO: 829033 - DNA, 25 bp, Homo sapien
attctttcttgtatagtagtggaga

SEQ ID NO: 829034 - DNA, 25 bp, Homo sapien
gggtgagcacggcaggcagctttga

SEQ ID NO: 829035 - DNA, 25 bp, Homo sapien
tgtatagtagtggagaaaaggcttg

SEQ ID NO: 829036 - DNA, 25 bp, Homo sapien
gacaagaggaaaaacggccactgct

SEQ ID NO: 829037 - DNA, 25 bp, Homo sapien
gcactgggagcagtaaccccatttc

SEQ ID NO: 829038 - DNA, 25 bp, Homo sapien
aaaacggccactgctgaggattcag

SEQ ID NO: 829039 - DNA, 25 bp, Homo sapien
tcagggcagtaaccacactctgggc

SEQ ID NO: 829040 - DNA, 25 bp, Homo sapien
tgggaacccaatcttgtgtgaaaca

SEQ ID NO: 829041 - DNA, 25 bp, Homo sapien
taagaaaggagacccctggtaggca

SEQ ID NO: 829042 - DNA, 25 bp, Homo sapien
tatggaatccctggactaactcgtg

SEQ ID NO: 829043 - DNA, 25 bp, Homo sapien
catgttaattccaaacggcctcacc

SEQ ID NO: 829044 - DNA, 25 bp, Homo sapien
ttgagactttgaggcagaccagcat

SEQ ID NO: 829045 - DNA, 25 bp, Homo sapien
cacttcctgagcagacgttggctgg

SEQ ID NO: 829046 - DNA, 25 bp, Homo sapien
gataacacagtgtccctacagagag

SEQ ID NO: 829047 - DNA, 25 bp, Homo sapien
cagatctcggtttcatccatggcaa

SEQ ID NO: 829048 - DNA, 25 bp, Homo sapien
tcatcaataccattcaccacagagg

SEQ ID NO: 829049 - DNA, 25 bp, Homo sapien
ccatacctgggagctagtcaaggct

SEQ ID NO: 829050 - DNA, 25 bp, Homo sapien
tccactttaatccacagaggtcaga

SEQ ID NO: 829051 - DNA, 25 bp, Homo sapien
cagagatggctccaatgctgttata

SEQ ID NO: 829052 - DNA, 25 bp, Homo sapien
ccgctggcttcggaacgcttcgcgg

SEQ ID NO: 829053 - DNA, 25 bp, Homo sapien
gctggcttcggaacgcttcgcggcc

SEQ ID NO: 829054 - DNA, 25 bp, Homo sapien
cttcgcggcccttgggcgccgcctg

SEQ ID NO: 829055 - DNA, 25 bp, Homo sapien
cttcggaacgcttcgcggcccttgg

SEQ ID NO: 829056 - DNA, 25 bp, Homo sapien
gccccagccgaagctttccgggctc

SEQ ID NO: 829057 - DNA, 25 bp, Homo sapien
agccgaagctttccgggctcctcac

SEQ ID NO: 829058 - DNA, 25 bp, Homo sapien
tctccgggccccagccgaagctttc

SEQ ID NO: 829059 - DNA, 25 bp, Homo sapien
ggcgtctccgggccccagccgaagc

SEQ ID NO: 829060 - DNA, 25 bp, Homo sapien
taaaccgcggtgcaggtggaaagct

SEQ ID NO: 829061 - DNA, 25 bp, Homo sapien
gcctttgcctgaagaagacttgaca

SEQ ID NO: 829062 - DNA, 25 bp, Homo sapien
tgcaactttagaagggagacccagg

SEQ ID NO: 829063 - DNA, 25 bp, Homo sapien
cccagatagagatgatcgcagcagt

SEQ ID NO: 829064 - DNA, 25 bp, Homo sapien
aataggggatgtactggcaggtaaa

SEQ ID NO: 829065 - DNA, 25 bp, Homo sapien
ggtaataggggatgtactggcaggt

SEQ ID NO: 829066 - DNA, 25 bp, Homo sapien
gggatgtactggcaggtaaaaggag

SEQ ID NO: 829067 - DNA, 25 bp, Homo sapien
gatgtactggcaggtaaaaggagtc

SEQ ID NO: 829068 - DNA, 25 bp, Homo sapien
tactcaaactccagagtgggacagt

SEQ ID NO: 829069 - DNA, 25 bp, Homo sapien
atactcaaactccagagtgggacag

SEQ ID NO: 829070 - DNA, 25 bp, Homo sapien
actcaaactccagagtgggacagtc

SEQ ID NO: 829071 - DNA, 25 bp, Homo sapien
cattcctgtgtccaatgaatccaaa

SEQ ID NO: 829072 - DNA, 25 bp, Homo sapien
ttttcagagcaacgttaaaaatagc

SEQ ID NO: 829073 - DNA, 25 bp, Homo sapien
tccaatgaatccaaagctagcttcc

SEQ ID NO: 829074 - DNA, 25 bp, Homo sapien
tagagagggtggcatgaaagagctg

SEQ ID NO: 829075 - DNA, 25 bp, Homo sapien
gtggcaggaaagacagaacagtcac

SEQ ID NO: 829076 - DNA, 25 bp, Homo sapien
acagaacagtcacattcgggagatc

SEQ ID NO: 829077 - DNA, 25 bp, Homo sapien
ctgtggcaggaaagacagaacagtc

SEQ ID NO: 829078 - DNA, 25 bp, Homo sapien
aagacagaacagtcacattcgggag

SEQ ID NO: 829079 - DNA, 25 bp, Homo sapien
gcacctcctgttattggtgaattcc

SEQ ID NO: 829080 - DNA, 25 bp, Homo sapien
cctcctgttattggtgaattccagg

SEQ ID NO: 829081 - DNA, 25 bp, Homo sapien
caaagcacctcctgttattggtgaa

SEQ ID NO: 829082 - DNA, 25 bp, Homo sapien
cttcaaagcacctcctgttattggt

SEQ ID NO: 829083 - DNA, 25 bp, Homo sapien
tctagccggtccaagagtcccatta

SEQ ID NO: 829084 - DNA, 25 bp, Homo sapien
gccaggtagagaacagcccgggcca

SEQ ID NO: 829085 - DNA, 25 bp, Homo sapien
cattatataggccttttgggcatct

SEQ ID NO: 829086 - DNA, 25 bp, Homo sapien
gttccctactgaccacctctagccg

SEQ ID NO: 829087 - DNA, 25 bp, Homo sapien
ccagtgtagcacatcgacctctgaa

SEQ ID NO: 829088 - DNA, 25 bp, Homo sapien
gaaggtccccatctgatacagcagg

SEQ ID NO: 829089 - DNA, 25 bp, Homo sapien
gaagcagttgtacctggaccagtgt

SEQ ID NO: 829090 - DNA, 25 bp, Homo sapien
aatttccatgtggagtagctccagg

SEQ ID NO: 829091 - DNA, 25 bp, Homo sapien
gacagctggtttccgaagggcactg

SEQ ID NO: 829092 - DNA, 25 bp, Homo sapien
agacagctggtttccgaagggcact

SEQ ID NO: 829093 - DNA, 25 bp, Homo sapien
gggcactgctacaggcctggctgtt

SEQ ID NO: 829094 - DNA, 25 bp, Homo sapien
ccattaggtacataacactcagcag

SEQ ID NO: 829095 - DNA, 25 bp, Homo sapien
taattcagtgcggaaggtctcccgg

SEQ ID NO: 829096 - DNA, 25 bp, Homo sapien
cgctccaggcgaatattttccacca

SEQ ID NO: 829097 - DNA, 25 bp, Homo sapien
ggtctcccgggctgttctccaccca

SEQ ID NO: 829098 - DNA, 25 bp, Homo sapien
agccaggccactgcagaacttggta

SEQ ID NO: 829099 - DNA, 25 bp, Homo sapien
gagcaggaccttctttatggggaag

SEQ ID NO: 829100 - DNA, 25 bp, Homo sapien
cactgcagaacttggtaaccatgga

SEQ ID NO: 829101 - DNA, 25 bp, Homo sapien
cttggtaaccatggagaagagtaaa

SEQ ID NO: 829102 - DNA, 25 bp, Homo sapien
tctgcccgcttctgtactttgagag

SEQ ID NO: 829103 - DNA, 25 bp, Homo sapien
tgccagctgagactctcccaggtca

SEQ ID NO: 829104 - DNA, 25 bp, Homo sapien
gatgctcaaatccaccgagggtaaa

SEQ ID NO: 829105 - DNA, 25 bp, Homo sapien
acgcatgctcttcaccacctggata

SEQ ID NO: 829106 - DNA, 25 bp, Homo sapien
tgagcatacaccagctggctgactg

SEQ ID NO: 829107 - DNA, 25 bp, Homo sapien
tgagcactactatctagccctgttg

SEQ ID NO: 829108 - DNA, 25 bp, Homo sapien
catgtgctgcacaacgatgcttcag

SEQ ID NO: 829109 - DNA, 25 bp, Homo sapien
gcatatggtgttcggtatagtaacc

SEQ ID NO: 829110 - DNA, 25 bp, Homo sapien
ggaatctgaacacagcccttgcgaa

SEQ ID NO: 829111 - DNA, 25 bp, Homo sapien
tgaacacagcccttgcgaaaacatc

SEQ ID NO: 829112 - DNA, 25 bp, Homo sapien
agcccttgcgaaaacatccaattcc

SEQ ID NO: 829113 - DNA, 25 bp, Homo sapien
ggcatgcagagatctcactctgggc

SEQ ID NO: 829114 - DNA, 25 bp, Homo sapien
ggtggcaccagagggtcctgctcta

SEQ ID NO: 829115 - DNA, 25 bp, Homo sapien
gaagagatccctttcattgtagatg

SEQ ID NO: 829116 - DNA, 25 bp, Homo sapien
tagctctccatccaaggttcgttct

SEQ ID NO: 829117 - DNA, 25 bp, Homo sapien
tccaaggttcgttctccatcaccag

SEQ ID NO: 829118 - DNA, 25 bp, Homo sapien
gaatttcaaacccaggagttctgac

SEQ ID NO: 829119 - DNA, 25 bp, Homo sapien
aggatggtggaaagaccaatcccag

SEQ ID NO: 829120 - DNA, 25 bp, Homo sapien
gccagaccaacttaacgagccttga

SEQ ID NO: 829121 - DNA, 25 bp, Homo sapien
gaatacatagactaccccatcttgg

SEQ ID NO: 829122 - DNA, 25 bp, Homo sapien
gggtgaatccgatgaacttgttcct

SEQ ID NO: 829123 - DNA, 25 bp, Homo sapien
ccaagaagtgctcaatgtccttctg

SEQ ID NO: 829124 - DNA, 25 bp, Homo sapien
ccccagggtgaatccgatgaacttg

SEQ ID NO: 829125 - DNA, 25 bp, Homo sapien
ctccaagaagtgctcaatgtccttc

SEQ ID NO: 829126 - DNA, 25 bp, Homo sapien
gggtaatccaaccaatgtatctgtg

SEQ ID NO: 829127 - DNA, 25 bp, Homo sapien
cacactctcatggatgggcctgggt

SEQ ID NO: 829128 - DNA, 25 bp, Homo sapien
tcttcacactctcatggatgggcct

SEQ ID NO: 829129 - DNA, 25 bp, Homo sapien
gatgggcctgggtaatccaaccaat

SEQ ID NO: 829130 - DNA, 25 bp, Homo sapien
gatggctccctatccctgaagactg

SEQ ID NO: 829131 - DNA, 25 bp, Homo sapien
agtatccaggagcctggtaatctga

SEQ ID NO: 829132 - DNA, 25 bp, Homo sapien
gctttgatggctccctatccctgaa

SEQ ID NO: 829133 - DNA, 25 bp, Homo sapien
gcctggtaatctgacctgctttgat

SEQ ID NO: 829134 - DNA, 25 bp, Homo sapien
gatctgcacatctgcgatggagata

SEQ ID NO: 829135 - DNA, 25 bp, Homo sapien
cacatctgcgatggagatatacttg

SEQ ID NO: 829136 - DNA, 25 bp, Homo sapien
catctgcgatggagatatacttgtg

SEQ ID NO: 829137 - DNA, 25 bp, Homo sapien
ctgcacatctgcgatggagatatac

SEQ ID NO: 829138 - DNA, 25 bp, Homo sapien
catgcacacatgctctgtgacaaca

SEQ ID NO: 829139 - DNA, 25 bp, Homo sapien
aacacagttacagcctaatatgctg

SEQ ID NO: 829140 - DNA, 25 bp, Homo sapien
atatcatgaaagtagggaccttgtc

SEQ ID NO: 829141 - DNA, 25 bp, Homo sapien
gttacagcctaatatgctgaatgaa

SEQ ID NO: 829142 - DNA, 25 bp, Homo sapien
tgggttatctcagccagttctacgg

SEQ ID NO: 829143 - DNA, 25 bp, Homo sapien
taatctccgtagagtgcgtctatgc

SEQ ID NO: 829144 - DNA, 25 bp, Homo sapien
ggtccaatctttacacagaagctaa

SEQ ID NO: 829145 - DNA, 25 bp, Homo sapien
cacatgggtatctaatgggcatcta

SEQ ID NO: 829146 - DNA, 25 bp, Homo sapien
cagggacccaataagctgctcaggc

SEQ ID NO: 829147 - DNA, 25 bp, Homo sapien
tacctgggatactggaacagatgct

SEQ ID NO: 829148 - DNA, 25 bp, Homo sapien
tctagaacgttctgtaagcctggaa

SEQ ID NO: 829149 - DNA, 25 bp, Homo sapien
tgggtaacctatggactggagaaac

SEQ ID NO: 829150 - DNA, 25 bp, Homo sapien
gcattccctggtagaggatttcaca

SEQ ID NO: 829151 - DNA, 25 bp, Homo sapien
tcacatggcgtctctggtaccacct

SEQ ID NO: 829152 - DNA, 25 bp, Homo sapien
ctggtagaggatttcacatggcgtc

SEQ ID NO: 829153 - DNA, 25 bp, Homo sapien
gaaggctgtacagcattccctggta

SEQ ID NO: 829154 - DNA, 25 bp, Homo sapien
gatagagtctgtcttagccttagag

SEQ ID NO: 829155 - DNA, 25 bp, Homo sapien
tgtcttagccttagaggtgggagct

SEQ ID NO: 829156 - DNA, 25 bp, Homo sapien
tctgccaggatattgatagagtctg

SEQ ID NO: 829157 - DNA, 25 bp, Homo sapien
gatattgatagagtctgtcttagcc

SEQ ID NO: 829158 - DNA, 25 bp, Homo sapien
ggtgtcaccctccagatccagagtt

SEQ ID NO: 829159 - DNA, 25 bp, Homo sapien
ctggtagatatggttgagtttgaag

SEQ ID NO: 829160 - DNA, 25 bp, Homo sapien
tgtgcctgttcacatcgatgcccag

SEQ ID NO: 829161 - DNA, 25 bp, Homo sapien
agcagaagcagggtagagatactct

SEQ ID NO: 829162 - DNA, 25 bp, Homo sapien
tttgaagtgtttgaggagtagcaga

SEQ ID NO: 829163 - DNA, 25 bp, Homo sapien
ccaaagatgtcttcgaatgtatgaa

SEQ ID NO: 829164 - DNA, 25 bp, Homo sapien
aaaataccctggttgatagggccat

SEQ ID NO: 829165 - DNA, 25 bp, Homo sapien
tctctgtactctgaggacctgctct

SEQ ID NO: 829166 - DNA, 25 bp, Homo sapien
ggccatggacatagaccctacagaa

SEQ ID NO: 829167 - DNA, 25 bp, Homo sapien
tttttggcagtgatgtatgacaaga

SEQ ID NO: 829168 - DNA, 25 bp, Homo sapien
gaacttcaggatcaaggggatgcag

SEQ ID NO: 829169 - DNA, 25 bp, Homo sapien
ccaaatgttgcgatacatattcaaa

SEQ ID NO: 829170 - DNA, 25 bp, Homo sapien
caaggggatgcagttggcaaatacc

SEQ ID NO: 829171 - DNA, 25 bp, Homo sapien
gataaggacaggctttaggtaaatg

SEQ ID NO: 829172 - DNA, 25 bp, Homo sapien
cagagataaggacaggctttaggta

SEQ ID NO: 829173 - DNA, 25 bp, Homo sapien
aggacaggctttaggtaaatggcaa

SEQ ID NO: 829174 - DNA, 25 bp, Homo sapien
atgcagagataaggacaggctttag

SEQ ID NO: 829175 - DNA, 25 bp, Homo sapien
cagcaaggataatccaggactgaga

SEQ ID NO: 829176 - DNA, 25 bp, Homo sapien
tttcagtagtaagctccggcaaatc

SEQ ID NO: 829177 - DNA, 25 bp, Homo sapien
ggcaaatcctggatggtacagcaag

SEQ ID NO: 829178 - DNA, 25 bp, Homo sapien
tcagtagtaagctccggcaaatcct

SEQ ID NO: 829179 - DNA, 25 bp, Homo sapien
gactctcaaaccagggcattaaggg

SEQ ID NO: 829180 - DNA, 25 bp, Homo sapien
gaagtgaactccctgtagcacagca

SEQ ID NO: 829181 - DNA, 25 bp, Homo sapien
tatatagacttttgcctccgagaga

SEQ ID NO: 829182 - DNA, 25 bp, Homo sapien
tgtgctagaccagaagagattgtcc

SEQ ID NO: 829183 - DNA, 25 bp, Homo sapien
tagtaaccattggtgcatgccatga

SEQ ID NO: 829184 - DNA, 25 bp, Homo sapien
aaatggctcttaagtcccctccagc

SEQ ID NO: 829185 - DNA, 25 bp, Homo sapien
acttcattcactgggccttcaggtt

SEQ ID NO: 829186 - DNA, 25 bp, Homo sapien
cctgtaccacagagattgtcattct

SEQ ID NO: 829187 - DNA, 25 bp, Homo sapien
ggtgtctcaggacatgggtcttttg

SEQ ID NO: 829188 - DNA, 25 bp, Homo sapien
aaaagggtgctaggttggtgtctca

SEQ ID NO: 829189 - DNA, 25 bp, Homo sapien
gtctcaggacatgggtcttttgact

SEQ ID NO: 829190 - DNA, 25 bp, Homo sapien
aaagggtgctaggttggtgtctcag

SEQ ID NO: 829191 - DNA, 25 bp, Homo sapien
aaaaagcttccaacttctttggctg

SEQ ID NO: 829192 - DNA, 25 bp, Homo sapien
aaaagcttccaacttctttggctgc

SEQ ID NO: 829193 - DNA, 25 bp, Homo sapien
ttgttttaacgatttaatagctaca

SEQ ID NO: 829194 - DNA, 25 bp, Homo sapien
catagagttgttttaacgatttaat

SEQ ID NO: 829195 - DNA, 25 bp, Homo sapien
tgttttaacgatttaatagctacat

SEQ ID NO: 829196 - DNA, 25 bp, Homo sapien
gttttaacgatttaatagctacatc

SEQ ID NO: 829197 - DNA, 25 bp, Homo sapien
aaaaattatgtcctgggctgcgtgc

SEQ ID NO: 829198 - DNA, 25 bp, Homo sapien
ttaaaattatgtcctcagctgggca

SEQ ID NO: 829199 - DNA, 25 bp, Homo sapien
aaatagtggaatattatgtgtaact

SEQ ID NO: 829200 - DNA, 25 bp, Homo sapien
tggctaacacagtacaacactgtct

SEQ ID NO: 829201 - DNA, 25 bp, Homo sapien
taatatgccattagctcacctttat

SEQ ID NO: 829202 - DNA, 25 bp, Homo sapien
gggaaactacttagtatattggtga

SEQ ID NO: 829203 - DNA, 25 bp, Homo sapien
tatgaataccgacatttggagatac

SEQ ID NO: 829204 - DNA, 25 bp, Homo sapien
gaagatggcctatctaagagctaat

SEQ ID NO: 829205 - DNA, 25 bp, Homo sapien
tattcttctgttgcccgctggttgc

SEQ ID NO: 829206 - DNA, 25 bp, Homo sapien
tcttctgttgcccgctggttgccat

SEQ ID NO: 829207 - DNA, 25 bp, Homo sapien
caatattcttctgttgcccgctggt

SEQ ID NO: 829208 - DNA, 25 bp, Homo sapien
cttctgttgcccgctggttgccatc

SEQ ID NO: 829209 - DNA, 25 bp, Homo sapien
acacactgaagtctccaaagcccat

SEQ ID NO: 829210 - DNA, 25 bp, Homo sapien
cttcctgtttcttaacacactgaag

SEQ ID NO: 829211 - DNA, 25 bp, Homo sapien
cctgtttcttaacacactgaagtct

SEQ ID NO: 829212 - DNA, 25 bp, Homo sapien
aacacactgaagtctccaaagccca

SEQ ID NO: 829213 - DNA, 25 bp, Homo sapien
ttggtcagtttattgagcagcctca

SEQ ID NO: 829214 - DNA, 25 bp, Homo sapien
tggtcagtttattgagcagcctcag

SEQ ID NO: 829215 - DNA, 25 bp, Homo sapien
ggtcagtttattgagcagcctcagg

SEQ ID NO: 829216 - DNA, 25 bp, Homo sapien
gtcagtttattgagcagcctcagga

SEQ ID NO: 829217 - DNA, 25 bp, Homo sapien
aagttgcagcatggcctgtttgacc

SEQ ID NO: 829218 - DNA, 25 bp, Homo sapien
taagcccagtcatcgttcatgcggt

SEQ ID NO: 829219 - DNA, 25 bp, Homo sapien
tgtttgaccttgagggcccgcttta

SEQ ID NO: 829220 - DNA, 25 bp, Homo sapien
gcccgctttaagattggtgccgatt

SEQ ID NO: 829221 - DNA, 25 bp, Homo sapien
gatgttaatggtggcaatttctgca

SEQ ID NO: 829222 - DNA, 25 bp, Homo sapien
gggtacatactagaatttgaggcat

SEQ ID NO: 829223 - DNA, 25 bp, Homo sapien
aaagtttggtgtatcagcgcctgac

SEQ ID NO: 829224 - DNA, 25 bp, Homo sapien
catagtttacataggacaagggtac

SEQ ID NO: 829225 - DNA, 25 bp, Homo sapien
tggagtaaaatggataagacttgtc

SEQ ID NO: 829226 - DNA, 25 bp, Homo sapien
taaaatggataagacttgtcctggg

SEQ ID NO: 829227 - DNA, 25 bp, Homo sapien
aaatggataagacttgtcctgggaa

SEQ ID NO: 829228 - DNA, 25 bp, Homo sapien
ttcccacatttaggggaatagcagg

SEQ ID NO: 829229 - DNA, 25 bp, Homo sapien
tacagcatgctgacacttaggttta

SEQ ID NO: 829230 - DNA, 25 bp, Homo sapien
gaatggaatagccagctttcaagga

SEQ ID NO: 829231 - DNA, 25 bp, Homo sapien
taacatggagaatcagaatggacca

SEQ ID NO: 829232 - DNA, 25 bp, Homo sapien
gaccaattaccgaagattttcctga

SEQ ID NO: 829233 - DNA, 25 bp, Homo sapien
ttaaaagcctcaatgttggccctca

SEQ ID NO: 829234 - DNA, 25 bp, Homo sapien
tcatagcgacggctgttaaaagcct

SEQ ID NO: 829235 - DNA, 25 bp, Homo sapien
tgttggccctcaaggtacattcttc

SEQ ID NO: 829236 - DNA, 25 bp, Homo sapien
tgcaagcagttatccacaggtgaaa

SEQ ID NO: 829237 - DNA, 25 bp, Homo sapien
tctctctcgagccagagctcatatg

SEQ ID NO: 829238 - DNA, 25 bp, Homo sapien
ctcgagccagagctcatatgaatag

SEQ ID NO: 829239 - DNA, 25 bp, Homo sapien
gctcatatgaatagtggaaatcttc

SEQ ID NO: 829240 - DNA, 25 bp, Homo sapien
catatgaatagtggaaatcttcagg

SEQ ID NO: 829241 - DNA, 25 bp, Homo sapien
gaagagccctgaactggtaacagcg

SEQ ID NO: 829242 - DNA, 25 bp, Homo sapien
tattgatcacgaccacaagtggaca

SEQ ID NO: 829243 - DNA, 25 bp, Homo sapien
taggcagagcacagtttattggagc

SEQ ID NO: 829244 - DNA, 25 bp, Homo sapien
caaagtctagcctggttgtagccaa

SEQ ID NO: 829245 - DNA, 25 bp, Homo sapien
taattactacaggagcaaacagcct

SEQ ID NO: 829246 - DNA, 25 bp, Homo sapien
tctgagccattatgctgtactgcct

SEQ ID NO: 829247 - DNA, 25 bp, Homo sapien
tgtcctgccagctccattaagcatt

SEQ ID NO: 829248 - DNA, 25 bp, Homo sapien
cttgcggttccctagaaagactttg

SEQ ID NO: 829249 - DNA, 25 bp, Homo sapien
cgcgcgcacaatcaccgggcgtggg

SEQ ID NO: 829250 - DNA, 25 bp, Homo sapien
atggcgattctcagccgagcaggca

SEQ ID NO: 829251 - DNA, 25 bp, Homo sapien
gcctggacgcgaggcacctgcttgc

SEQ ID NO: 829252 - DNA, 25 bp, Homo sapien
gtggtggactctcccgatcccgaag

SEQ ID NO: 829253 - DNA, 25 bp, Homo sapien
tcccatgagacttgccctggccttt

SEQ ID NO: 829254 - DNA, 25 bp, Homo sapien
cttcccatgagacttgccctggcct

SEQ ID NO: 829255 - DNA, 25 bp, Homo sapien
ttcccatgagacttgccctggcctt

SEQ ID NO: 829256 - DNA, 25 bp, Homo sapien
cccatgagacttgccctggcctttt

SEQ ID NO: 829257 - DNA, 25 bp, Homo sapien
gcggggctgagaatgtccacttctg

SEQ ID NO: 829258 - DNA, 25 bp, Homo sapien
gccgcggggctgagaatgtccactt

SEQ ID NO: 829259 - DNA, 25 bp, Homo sapien
cgcggggctgagaatgtccacttct

SEQ ID NO: 829260 - DNA, 25 bp, Homo sapien
ccgcggggctgagaatgtccacttc

SEQ ID NO: 829261 - DNA, 25 bp, Homo sapien
cgttgtgggcgatgtagtagaggtt

SEQ ID NO: 829262 - DNA, 25 bp, Homo sapien
tgggcgatgtagtagaggttcagca

SEQ ID NO: 829263 - DNA, 25 bp, Homo sapien
cagcgacgttgtgggcgatgtagta

SEQ ID NO: 829264 - DNA, 25 bp, Homo sapien
caggcagtcagcgacgttgtgggcg

SEQ ID NO: 829265 - DNA, 25 bp, Homo sapien
tctccctttctttcctttgggagca

SEQ ID NO: 829266 - DNA, 25 bp, Homo sapien
tcacttgcttctccctttctttcct

SEQ ID NO: 829267 - DNA, 25 bp, Homo sapien
cacttgcttctccctttctttcctt

SEQ ID NO: 829268 - DNA, 25 bp, Homo sapien
cttgcttctccctttctttcctttg

SEQ ID NO: 829269 - DNA, 25 bp, Homo sapien
gagtaaagtctatgttgctggcaac

SEQ ID NO: 829270 - DNA, 25 bp, Homo sapien
cagcacactgtgtaggaattactca

SEQ ID NO: 829271 - DNA, 25 bp, Homo sapien
taatttgcatctcaagtcgtctgga

SEQ ID NO: 829272 - DNA, 25 bp, Homo sapien
caaagtggctaaccatatctggcat

SEQ ID NO: 829273 - DNA, 25 bp, Homo sapien
aaaaaggaaatggtgcccaagagag

SEQ ID NO: 829274 - DNA, 25 bp, Homo sapien
gaaatggtgcccaagagaggaatgt

SEQ ID NO: 829275 - DNA, 25 bp, Homo sapien
tctaaatgacaaacgctctttggca

SEQ ID NO: 829276 - DNA, 25 bp, Homo sapien
agaaaacaattaatgcaactagaac

SEQ ID NO: 829277 - DNA, 25 bp, Homo sapien
gtgaccatcttagcatccgtggagc

SEQ ID NO: 829278 - DNA, 25 bp, Homo sapien
tcagagcattcgtgaccatcttagc

SEQ ID NO: 829279 - DNA, 25 bp, Homo sapien
tggcagggtcagagcattcgtgacc

SEQ ID NO: 829280 - DNA, 25 bp, Homo sapien
gcattcgtgaccatcttagcatccg

SEQ ID NO: 829281 - DNA, 25 bp, Homo sapien
tctaggcatgtggtgtgcctgcacc

SEQ ID NO: 829282 - DNA, 25 bp, Homo sapien
tgctctaggcatgtggtgtgcctgc

SEQ ID NO: 829283 - DNA, 25 bp, Homo sapien
taggcatgtggtgtgcctgcaccct

SEQ ID NO: 829284 - DNA, 25 bp, Homo sapien
ggcatgtggtgtgcctgcacccttt

SEQ ID NO: 829285 - DNA, 25 bp, Homo sapien
gccctggcaggaacatcgtcagtcc

SEQ ID NO: 829286 - DNA, 25 bp, Homo sapien
tctcagtcttgttggaccttttcta

SEQ ID NO: 829287 - DNA, 25 bp, Homo sapien
tctggtatctgggacttgcctcctc

SEQ ID NO: 829288 - DNA, 25 bp, Homo sapien
catcagcttgagacatgattcacat

SEQ ID NO: 829289 - DNA, 25 bp, Homo sapien
tcagtcctgagagcctccaatttcc

SEQ ID NO: 829290 - DNA, 25 bp, Homo sapien
attcagtcctgagagcctccaattt

SEQ ID NO: 829291 - DNA, 25 bp, Homo sapien
ttcagtcctgagagcctccaatttc

SEQ ID NO: 829292 - DNA, 25 bp, Homo sapien
ttcctgtccccataaatatggcctc

SEQ ID NO: 829293 - DNA, 25 bp, Homo sapien
cttcctgtccccataaatatggcct

SEQ ID NO: 829294 - DNA, 25 bp, Homo sapien
tcctgtccccataaatatggcctcc

SEQ ID NO: 829295 - DNA, 25 bp, Homo sapien
aaagccggggattcctgaaggtctg

SEQ ID NO: 829296 - DNA, 25 bp, Homo sapien
tgcaaaagtgctcctcatggatgac

SEQ ID NO: 829297 - DNA, 25 bp, Homo sapien
aatgggtgatgctcttaaagccggg

SEQ ID NO: 829298 - DNA, 25 bp, Homo sapien
ggatgacaaggacccattccattgc

SEQ ID NO: 829299 - DNA, 25 bp, Homo sapien
atttgacaccaccttcctgtttgtg

SEQ ID NO: 829300 - DNA, 25 bp, Homo sapien
ccaggttgctgacagggaaatgaat

SEQ ID NO: 829301 - DNA, 25 bp, Homo sapien
ccaaacttgtgactgcgagtaattt

SEQ ID NO: 829302 - DNA, 25 bp, Homo sapien
aatgaatcgtttagcaagggagcgt

SEQ ID NO: 829303 - DNA, 25 bp, Homo sapien
cacataattcaagagttgctggcat

SEQ ID NO: 829304 - DNA, 25 bp, Homo sapien
gcccctccttcacataattcaagag

SEQ ID NO: 829305 - DNA, 25 bp, Homo sapien
ctccttcacataattcaagagttgc

SEQ ID NO: 829306 - DNA, 25 bp, Homo sapien
aggaactcagtcttgtggagcccag

SEQ ID NO: 829307 - DNA, 25 bp, Homo sapien
acttctgggctgaatcctgcacact

SEQ ID NO: 829308 - DNA, 25 bp, Homo sapien
tgcacactccataaacagcctctgc

SEQ ID NO: 829309 - DNA, 25 bp, Homo sapien
ctgggctgaatcctgcacactccat

SEQ ID NO: 829310 - DNA, 25 bp, Homo sapien
ttctgggctgaatcctgcacactcc

SEQ ID NO: 829311 - DNA, 25 bp, Homo sapien
gaagttgcagcagaaatcgagccca

SEQ ID NO: 829312 - DNA, 25 bp, Homo sapien
agcttaatttttagatgatgcaaat

SEQ ID NO: 829313 - DNA, 25 bp, Homo sapien
ggtgatcgtgcagctctgaggcttc

SEQ ID NO: 829314 - DNA, 25 bp, Homo sapien
tccttcccttgatttcaggctctga

SEQ ID NO: 829315 - DNA, 25 bp, Homo sapien
ccacgaagcccacgtcaatgagggc

SEQ ID NO: 829316 - DNA, 25 bp, Homo sapien
cgaagcccacgtcaatgagggccat

SEQ ID NO: 829317 - DNA, 25 bp, Homo sapien
acgaagcccacgtcaatgagggcca

SEQ ID NO: 829318 - DNA, 25 bp, Homo sapien
cacgaagcccacgtcaatgagggcc

SEQ ID NO: 829319 - DNA, 25 bp, Homo sapien
ccctcctccctggaatagtgaacaa

SEQ ID NO: 829320 - DNA, 25 bp, Homo sapien
ctgaaagaggcgacccatcagcccg

SEQ ID NO: 829321 - DNA, 25 bp, Homo sapien
aaagaggcgacccatcagcccgttt

SEQ ID NO: 829322 - DNA, 25 bp, Homo sapien
actgccctgaaagaggcgacccatc

SEQ ID NO: 829323 - DNA, 25 bp, Homo sapien
tgcaggctaggaagagaacaccctt

SEQ ID NO: 829324 - DNA, 25 bp, Homo sapien
gcgttggcacttgcatgaccctgag

SEQ ID NO: 829325 - DNA, 25 bp, Homo sapien
tgagaatgagcaaccccttaaatgt

SEQ ID NO: 829326 - DNA, 25 bp, Homo sapien
gagcagacagtcctaacctaaagag

SEQ ID NO: 829327 - DNA, 25 bp, Homo sapien
taattatcaagtagagcccacaagg

SEQ ID NO: 829328 - DNA, 25 bp, Homo sapien
ttagaccctttgtcatcacacccag

SEQ ID NO: 829329 - DNA, 25 bp, Homo sapien
tattgagcgctcacgatgcgtcagg

SEQ ID NO: 829330 - DNA, 25 bp, Homo sapien
cctagtggaagcctttatgcacatt

SEQ ID NO: 829331 - DNA, 25 bp, Homo sapien
tgtattcagccattcgatcgttcgg

SEQ ID NO: 829332 - DNA, 25 bp, Homo sapien
tctaggtgtctcgtgctgtgccaga

SEQ ID NO: 829333 - DNA, 25 bp, Homo sapien
gctgatcagacgagtggcatctctc

SEQ ID NO: 829334 - DNA, 25 bp, Homo sapien
aagcaactggatgagcacaacgcgg

SEQ ID NO: 829335 - DNA, 25 bp, Homo sapien
agagggcacgcacgcgacgcacggc

SEQ ID NO: 829336 - DNA, 25 bp, Homo sapien
ctcctgccaccagcggcaatggcga

SEQ ID NO: 829337 - DNA, 25 bp, Homo sapien
agggagagggcacgcacgcgacgca

SEQ ID NO: 829338 - DNA, 25 bp, Homo sapien
ccaccagcggcaatggcgagcgctg

SEQ ID NO: 829339 - DNA, 25 bp, Homo sapien
ctaccgtgggcctgcgccgtggaga

SEQ ID NO: 829340 - DNA, 25 bp, Homo sapien
gggcctgcgccgtggagactgcgac

SEQ ID NO: 829341 - DNA, 25 bp, Homo sapien
cgtgggcctgcgccgtggagactgc

SEQ ID NO: 829342 - DNA, 25 bp, Homo sapien
taccgtgggcctgcgccgtggagac

SEQ ID NO: 829343 - DNA, 25 bp, Homo sapien
gcgggcggcgtgttgcggctgcgcc

SEQ ID NO: 829344 - DNA, 25 bp, Homo sapien
ctagtgcggcctgcgcatcctcggg

SEQ ID NO: 829345 - DNA, 25 bp, Homo sapien
cgcccgaggcgggccgaatccggcg

SEQ ID NO: 829346 - DNA, 25 bp, Homo sapien
aaatagctggagattgcgcggtagg

SEQ ID NO: 829347 - DNA, 25 bp, Homo sapien
acacaacaggtgagagaggcagcag

SEQ ID NO: 829348 - DNA, 25 bp, Homo sapien
gaaatcagcacgattgacaccagct

SEQ ID NO: 829349 - DNA, 25 bp, Homo sapien
gaggcagcagacatcattgcacgat

SEQ ID NO: 829350 - DNA, 25 bp, Homo sapien
ggaaattacactcagatgcacggag

SEQ ID NO: 829351 - DNA, 25 bp, Homo sapien
taaaactgcatccaggttgtaagat

SEQ ID NO: 829352 - DNA, 25 bp, Homo sapien
caggtgacatgttgcagtcagaatg

SEQ ID NO: 829353 - DNA, 25 bp, Homo sapien
cagtggccctatcatagcttgctac

SEQ ID NO: 829354 - DNA, 25 bp, Homo sapien
ctttctgagtgttgacatgatgcca

SEQ ID NO: 829355 - DNA, 25 bp, Homo sapien
caccttttctgtgtaaagttctgga

SEQ ID NO: 829356 - DNA, 25 bp, Homo sapien
gagcaccttttctgtgtaaagttct

SEQ ID NO: 829357 - DNA, 25 bp, Homo sapien
gttttgtcctgtttaaatgtcagca

SEQ ID NO: 829358 - DNA, 25 bp, Homo sapien
agttttgtcctgtttaaatgtcagc

SEQ ID NO: 829359 - DNA, 25 bp, Homo sapien
taatatgctatgataaaaccaggct

SEQ ID NO: 829360 - DNA, 25 bp, Homo sapien
aatagaattaatttctgactggtat

SEQ ID NO: 829361 - DNA, 25 bp, Homo sapien
caatatagcgagacctcgtttctag

SEQ ID NO: 829362 - DNA, 25 bp, Homo sapien
taatttctgactggtatttcccagg

SEQ ID NO: 829363 - DNA, 25 bp, Homo sapien
gtagtcatactaaaaacagtaggac

SEQ ID NO: 829364 - DNA, 25 bp, Homo sapien
ggactacgtgcacattacccacgct

SEQ ID NO: 829365 - DNA, 25 bp, Homo sapien
ttgagaataatggtcacagctggga

SEQ ID NO: 829366 - DNA, 25 bp, Homo sapien
cagtaggacttaaccctaatctctt

SEQ ID NO: 829367 - DNA, 25 bp, Homo sapien
tacatctgaacataaagggtgagca

SEQ ID NO: 829368 - DNA, 25 bp, Homo sapien
aatctaaatcaccacagcctgccgt

SEQ ID NO: 829369 - DNA, 25 bp, Homo sapien
gattttcaggcatggtcaggagctc

SEQ ID NO: 829370 - DNA, 25 bp, Homo sapien
tgtttgccaacagtagcctatggtg

SEQ ID NO: 829371 - DNA, 25 bp, Homo sapien
tgattccaaccataggacatttttg

SEQ ID NO: 829372 - DNA, 25 bp, Homo sapien
gaacacaaccaagatgttactcagt

SEQ ID NO: 829373 - DNA, 25 bp, Homo sapien
gaagacaggagcaccaggagacttc

SEQ ID NO: 829374 - DNA, 25 bp, Homo sapien
caagccatgaaaagttatcaagcca

SEQ ID NO: 829375 - DNA, 25 bp, Homo sapien
tggaaatcaagtatatatggaagag

SEQ ID NO: 829376 - DNA, 25 bp, Homo sapien
ctggaaccacgccaattactggaaa

SEQ ID NO: 829377 - DNA, 25 bp, Homo sapien
tgtaaaactggaaccacgccaatta

SEQ ID NO: 829378 - DNA, 25 bp, Homo sapien
ggcacaccatttctatgtttgtatt

SEQ ID NO: 829379 - DNA, 25 bp, Homo sapien
gaacccgggatgtggaagttgcaga

SEQ ID NO: 829380 - DNA, 25 bp, Homo sapien
cccgggatgtggaagttgcagagag

SEQ ID NO: 829381 - DNA, 25 bp, Homo sapien
cgggatgtggaagttgcagagagcc

SEQ ID NO: 829382 - DNA, 25 bp, Homo sapien
aacccgggatgtggaagttgcagag

SEQ ID NO: 829383 - DNA, 25 bp, Homo sapien
gattgtcagcgttttgtccttgccc

SEQ ID NO: 829384 - DNA, 25 bp, Homo sapien
caggccattatctatcagtgtgaag

SEQ ID NO: 829385 - DNA, 25 bp, Homo sapien
gacgttcacagtcaaaagtacgctg

SEQ ID NO: 829386 - DNA, 25 bp, Homo sapien
gtgggttcatacaattattcaggcc

SEQ ID NO: 829387 - DNA, 25 bp, Homo sapien
gtttgggtcactccgtgttcctcca

SEQ ID NO: 829388 - DNA, 25 bp, Homo sapien
atgttcggtttgggtcactccgtgt

SEQ ID NO: 829389 - DNA, 25 bp, Homo sapien
tgagtcatcgtaagaggtgtcctcg

SEQ ID NO: 829390 - DNA, 25 bp, Homo sapien
ggagttgagtatatctgagtcatcg

SEQ ID NO: 829391 - DNA, 25 bp, Homo sapien
tactatgctcggtgtaagtagccac

SEQ ID NO: 829392 - DNA, 25 bp, Homo sapien
tcctcgggagaagaaggcgagtctt

SEQ ID NO: 829393 - DNA, 25 bp, Homo sapien
gccactgagcctagtcaacataagg

SEQ ID NO: 829394 - DNA, 25 bp, Homo sapien
caagtgatcagtcatcccaccacag

SEQ ID NO: 829395 - DNA, 25 bp, Homo sapien
tgttacaatttctacaggtattgat

SEQ ID NO: 829396 - DNA, 25 bp, Homo sapien
taaataaaggatgtatgttacaatt

SEQ ID NO: 829397 - DNA, 25 bp, Homo sapien
gaagcaaactcttgcctgccttgtg

SEQ ID NO: 829398 - DNA, 25 bp, Homo sapien
gaccacccaaactagcagcaatctg

SEQ ID NO: 829399 - DNA, 25 bp, Homo sapien
taagcctttcgcactcctaagaagc

SEQ ID NO: 829400 - DNA, 25 bp, Homo sapien
tcattatgtcaagatgccctctgct

SEQ ID NO: 829401 - DNA, 25 bp, Homo sapien
tatgtgctgagattaggcagctgcc

SEQ ID NO: 829402 - DNA, 25 bp, Homo sapien
ctgagattaggcagctgcctgtaaa

SEQ ID NO: 829403 - DNA, 25 bp, Homo sapien
ctgaaataataacgtatgtgctgag

SEQ ID NO: 829404 - DNA, 25 bp, Homo sapien
gaaataataacgtatgtgctgagat

SEQ ID NO: 829405 - DNA, 25 bp, Homo sapien
cgaagcaaacgtgtttgttgcctct

SEQ ID NO: 829406 - DNA, 25 bp, Homo sapien
ttgttgcctcttccggatagatgga

SEQ ID NO: 829407 - DNA, 25 bp, Homo sapien
tcaaatacatgaggccgtttccgtt

SEQ ID NO: 829408 - DNA, 25 bp, Homo sapien
ccggatagatggattagactcaaat

SEQ ID NO: 829409 - DNA, 25 bp, Homo sapien
tgctgtcccacacgagtagtatatt

SEQ ID NO: 829410 - DNA, 25 bp, Homo sapien
agtatattcatctaacgtggctcga

SEQ ID NO: 829411 - DNA, 25 bp, Homo sapien
tccaaaggtgctgcaccaaacactt

SEQ ID NO: 829412 - DNA, 25 bp, Homo sapien
tgagatacagaggacaatagcttgc

SEQ ID NO: 829413 - DNA, 25 bp, Homo sapien
tctcttgggtataacttaggaatag

SEQ ID NO: 829414 - DNA, 25 bp, Homo sapien
gaatagaactgctaggacacatggc

SEQ ID NO: 829415 - DNA, 25 bp, Homo sapien
gacacatggcaactttacttttacc

SEQ ID NO: 829416 - DNA, 25 bp, Homo sapien
caccatccctgtgggtatgaagagg

SEQ ID NO: 829417 - DNA, 25 bp, Homo sapien
tctgaggtatgtaacaaagagctgc

SEQ ID NO: 829418 - DNA, 25 bp, Homo sapien
tgtttgctataaggtcactgggcct

SEQ ID NO: 829419 - DNA, 25 bp, Homo sapien
gctgtggcccctgaagttatgttga

SEQ ID NO: 829420 - DNA, 25 bp, Homo sapien
cattgcatgcaactcccacggttct

SEQ ID NO: 829421 - DNA, 25 bp, Homo sapien
caaccagggaggattggtgccaagc

SEQ ID NO: 829422 - DNA, 25 bp, Homo sapien
ccaacaaccagggaggattggtgcc

SEQ ID NO: 829423 - DNA, 25 bp, Homo sapien
agtaaacaagatgcccaacaaccag

SEQ ID NO: 829424 - DNA, 25 bp, Homo sapien
gaggattggtgccaagcaacaagag

SEQ ID NO: 829425 - DNA, 25 bp, Homo sapien
gagaggcggcagttctgagttaacc

SEQ ID NO: 829426 - DNA, 25 bp, Homo sapien
tgagttaacctcctgtggcgcaggg

SEQ ID NO: 829427 - DNA, 25 bp, Homo sapien
ggatcatgctcttgtacttacgcac

SEQ ID NO: 829428 - DNA, 25 bp, Homo sapien
cacagagactggaattccgtcgatg

SEQ ID NO: 829429 - DNA, 25 bp, Homo sapien
gaaactgctgtaaattactatcctg

SEQ ID NO: 829430 - DNA, 25 bp, Homo sapien
ctgaaactgctgtaaattactatcc

SEQ ID NO: 829431 - DNA, 25 bp, Homo sapien
ctgtaaattactatcctgttgcatc

SEQ ID NO: 829432 - DNA, 25 bp, Homo sapien
gtaaattactatcctgttgcatcat

SEQ ID NO: 829433 - DNA, 25 bp, Homo sapien
catgacctcaagtcgctgtcaaaac

SEQ ID NO: 829434 - DNA, 25 bp, Homo sapien
taagaaattaccaccaggctatagt

SEQ ID NO: 829435 - DNA, 25 bp, Homo sapien
tttagattgtggtcctatccccaag

SEQ ID NO: 829436 - DNA, 25 bp, Homo sapien
gcaccatagctctttggcaactgat

SEQ ID NO: 829437 - DNA, 25 bp, Homo sapien
cagtgtggtcatcaatactcatgaa

SEQ ID NO: 829438 - DNA, 25 bp, Homo sapien
acagtgtggtcatcaatactcatga

SEQ ID NO: 829439 - DNA, 25 bp, Homo sapien
tttgctcttctgtgcggacatcact

SEQ ID NO: 829440 - DNA, 25 bp, Homo sapien
acatcactccggacatttgcccagg

SEQ ID NO: 829441 - DNA, 25 bp, Homo sapien
cagcctggttttccccgacctgtag

SEQ ID NO: 829442 - DNA, 25 bp, Homo sapien
tgcccaggggatatcttcaggccac

SEQ ID NO: 829443 - DNA, 25 bp, Homo sapien
agctatactatgtgtggctgtggcc

SEQ ID NO: 829444 - DNA, 25 bp, Homo sapien
tactaaaagtctggactacagtctg

SEQ ID NO: 829445 - DNA, 25 bp, Homo sapien
ggcatacaaaaggtcttcccgccca

SEQ ID NO: 829446 - DNA, 25 bp, Homo sapien
taactatggtccgtagtgcctgggt

SEQ ID NO: 829447 - DNA, 25 bp, Homo sapien
ttctgaagcatcagccaatgtggct

SEQ ID NO: 829448 - DNA, 25 bp, Homo sapien
caacggtgaccgtggttggcaattc

SEQ ID NO: 829449 - DNA, 25 bp, Homo sapien
cagaataattcacttgggcaacggt

SEQ ID NO: 829450 - DNA, 25 bp, Homo sapien
caatgtggctactgttgcccccgta

SEQ ID NO: 829451 - DNA, 25 bp, Homo sapien
actcccctgaagtccagatgagagc

SEQ ID NO: 829452 - DNA, 25 bp, Homo sapien
cactgaatgtgttgctctctttgac

SEQ ID NO: 829453 - DNA, 25 bp, Homo sapien
tctctttgacaggatagaactccca

SEQ ID NO: 829454 - DNA, 25 bp, Homo sapien
gggctacacctctgggaagtgtttc

SEQ ID NO: 829455 - DNA, 25 bp, Homo sapien
gcctctgatgcttgcgtcgtctgga

SEQ ID NO: 829456 - DNA, 25 bp, Homo sapien
gccaacgatgccaccgcctgggtgg

SEQ ID NO: 829457 - DNA, 25 bp, Homo sapien
tgagaagctgccactgcggcctctg

SEQ ID NO: 829458 - DNA, 25 bp, Homo sapien
taagcgccatagtgactgtagctcc

SEQ ID NO: 829459 - DNA, 25 bp, Homo sapien
ggtaaggactgacctattataggcc

SEQ ID NO: 829460 - DNA, 25 bp, Homo sapien
cgtatgggccaagagtgttaagttc

SEQ ID NO: 829461 - DNA, 25 bp, Homo sapien
tctgcagggacagatttgcgatcct

SEQ ID NO: 829462 - DNA, 25 bp, Homo sapien
taggccaaactacaatatcgtatgg

SEQ ID NO: 829463 - DNA, 25 bp, Homo sapien
agtgaagaatgatgcggagatgatc

SEQ ID NO: 829464 - DNA, 25 bp, Homo sapien
gaatgatgcggagatgatctttcca

SEQ ID NO: 829465 - DNA, 25 bp, Homo sapien
gctggaagtcagaaaggctacactg

SEQ ID NO: 829466 - DNA, 25 bp, Homo sapien
cagaataggataaacgggaaggctt

SEQ ID NO: 829467 - DNA, 25 bp, Homo sapien
gataacagtgctaatagataaagcc

SEQ ID NO: 829468 - DNA, 25 bp, Homo sapien
gatgatgaatagaggaacagcactg

SEQ ID NO: 829469 - DNA, 25 bp, Homo sapien
tctactgactccatggttgtgatcc

SEQ ID NO: 829470 - DNA, 25 bp, Homo sapien
ctataaagctaatggtgagagtttc

SEQ ID NO: 829471 - DNA, 25 bp, Homo sapien
tgctccgacggctgctgcggtttcc

SEQ ID NO: 829472 - DNA, 25 bp, Homo sapien
ccaccttgtaaggtggcctcagcca

SEQ ID NO: 829473 - DNA, 25 bp, Homo sapien
cattagcatcttggactccagtaag

SEQ ID NO: 829474 - DNA, 25 bp, Homo sapien
tgcggtttccccagacaagacgatc

SEQ ID NO: 829475 - DNA, 25 bp, Homo sapien
aggctttgttgccagtcatgtcagg

SEQ ID NO: 829476 - DNA, 25 bp, Homo sapien
aatattcctaggcatgaaatgtcta

SEQ ID NO: 829477 - DNA, 25 bp, Homo sapien
ttcctaggcatgaaatgtctaccaa

SEQ ID NO: 829478 - DNA, 25 bp, Homo sapien
catgtcaggaaggtttaagtggaaa

SEQ ID NO: 829479 - DNA, 25 bp, Homo sapien
tattcaccaatgtccaggaagtcaa

SEQ ID NO: 829480 - DNA, 25 bp, Homo sapien
caggatattcaccaatgtccaggaa

SEQ ID NO: 829481 - DNA, 25 bp, Homo sapien
gatattcaccaatgtccaggaagtc

SEQ ID NO: 829482 - DNA, 25 bp, Homo sapien
ttcaggatattcaccaatgtccagg

SEQ ID NO: 829483 - DNA, 25 bp, Homo sapien
gcacaccaccatggacagggttttg

SEQ ID NO: 829484 - DNA, 25 bp, Homo sapien
gcctcagcctcgcacaccaccatgg

SEQ ID NO: 829485 - DNA, 25 bp, Homo sapien
acaccaccatggacagggttttgcc

SEQ ID NO: 829486 - DNA, 25 bp, Homo sapien
cagcctcgcacaccaccatggacag

SEQ ID NO: 829487 - DNA, 25 bp, Homo sapien
gagagaggttctccttaattccaac

SEQ ID NO: 829488 - DNA, 25 bp, Homo sapien
ttctacttggccgagagccagaggg

SEQ ID NO: 829489 - DNA, 25 bp, Homo sapien
cctttgctcagggtgccttaggact

SEQ ID NO: 829490 - DNA, 25 bp, Homo sapien
cccagacaggtcaagtcgattagaa

SEQ ID NO: 829491 - DNA, 25 bp, Homo sapien
gcaggtgctaggtgcaatgtcttca

SEQ ID NO: 829492 - DNA, 25 bp, Homo sapien
aaagaagtcttcagggtgcgcaggt

SEQ ID NO: 829493 - DNA, 25 bp, Homo sapien
gatatccaaattgctctcagaagag

SEQ ID NO: 829494 - DNA, 25 bp, Homo sapien
gattctcgtgcctggaactcccgat

SEQ ID NO: 829495 - DNA, 25 bp, Homo sapien
caggagtcctggaacacagggggtt

SEQ ID NO: 829496 - DNA, 25 bp, Homo sapien
tcaggagtcctggaacacagggggt

SEQ ID NO: 829497 - DNA, 25 bp, Homo sapien
agaaagggcttctaatctagtccca

SEQ ID NO: 829498 - DNA, 25 bp, Homo sapien
gaaaggcaagcattcggatccgtct

SEQ ID NO: 829499 - DNA, 25 bp, Homo sapien
tacatcttcatctgcgaaaggcaag

SEQ ID NO: 829500 - DNA, 25 bp, Homo sapien
tctaacatgtggaggattggcatca

SEQ ID NO: 829501 - DNA, 25 bp, Homo sapien
cagaatagcgctcacaatgacaggc

SEQ ID NO: 829502 - DNA, 25 bp, Homo sapien
tacaaagactccgaaagatctgcgg

SEQ ID NO: 829503 - DNA, 25 bp, Homo sapien
tgtccggaagccctgacctgagttg

SEQ ID NO: 829504 - DNA, 25 bp, Homo sapien
tgacatgtcgactagaggtatccag

SEQ ID NO: 829505 - DNA, 25 bp, Homo sapien
tctgaaaatctctaaattggggcct

SEQ ID NO: 829506 - DNA, 25 bp, Homo sapien
caaaaccagtatgtctccttgccag

SEQ ID NO: 829507 - DNA, 25 bp, Homo sapien
ggtgtaattataatgtcacaggcaa

SEQ ID NO: 829508 - DNA, 25 bp, Homo sapien
caggcaattgtgctgacaaagcaaa

SEQ ID NO: 829509 - DNA, 25 bp, Homo sapien
caggatccacttgcgacctgcacga

SEQ ID NO: 829510 - DNA, 25 bp, Homo sapien
aggatccacttgcgacctgcacgat

SEQ ID NO: 829511 - DNA, 25 bp, Homo sapien
tttgctctaggcagtgagacacctg

SEQ ID NO: 829512 - DNA, 25 bp, Homo sapien
taatctgtagagcaccatttaggaa

SEQ ID NO: 829513 - DNA, 25 bp, Homo sapien
tcgaacctgtagtctgggaatagcc

SEQ ID NO: 829514 - DNA, 25 bp, Homo sapien
tatctgagcagggatacgctgaggc

SEQ ID NO: 829515 - DNA, 25 bp, Homo sapien
catggaaatatctttagttgggaga

SEQ ID NO: 829516 - DNA, 25 bp, Homo sapien
ggaagaatgggcctttcatttgccc

SEQ ID NO: 829517 - DNA, 25 bp, Homo sapien
tgaaggccttccaaggtggtcatgg

SEQ ID NO: 829518 - DNA, 25 bp, Homo sapien
ggcctttcatttgccctcacagtct

SEQ ID NO: 829519 - DNA, 25 bp, Homo sapien
gtagtccctttagtcttgccctcca

SEQ ID NO: 829520 - DNA, 25 bp, Homo sapien
tttcagaaacttgatggtagtccct

SEQ ID NO: 829521 - DNA, 25 bp, Homo sapien
tgtatcattgatcatactcttcatg

SEQ ID NO: 829522 - DNA, 25 bp, Homo sapien
ggtgctcaataattgaatatgatat

SEQ ID NO: 829523 - DNA, 25 bp, Homo sapien
ctgttcccaaggagttgctgctttt

SEQ ID NO: 829524 - DNA, 25 bp, Homo sapien
tgcttttctgtctataaatctgcat

SEQ ID NO: 829525 - DNA, 25 bp, Homo sapien
tcccaaggagttgctgcttttctgt

SEQ ID NO: 829526 - DNA, 25 bp, Homo sapien
gctgcttttctgtctataaatctgc

SEQ ID NO: 829527 - DNA, 25 bp, Homo sapien
ttccgtacaaagtgatgcctctcag

SEQ ID NO: 829528 - DNA, 25 bp, Homo sapien
ctactttagcgcctgccagagggat

SEQ ID NO: 829529 - DNA, 25 bp, Homo sapien
ataagcctggccttgcacgctgcaa

SEQ ID NO: 829530 - DNA, 25 bp, Homo sapien
aaggttagggtcacagtcttgcaca

SEQ ID NO: 829531 - DNA, 25 bp, Homo sapien
atgggagtcatttcataacctcgca

SEQ ID NO: 829532 - DNA, 25 bp, Homo sapien
tgggagtcatttcataacctcgcat

SEQ ID NO: 829533 - DNA, 25 bp, Homo sapien
gatgggagtcatttcataacctcgc

SEQ ID NO: 829534 - DNA, 25 bp, Homo sapien
tagaagcacaggagagggaggccat

SEQ ID NO: 829535 - DNA, 25 bp, Homo sapien
ttagaagcacaggagagggaggcca

SEQ ID NO: 829536 - DNA, 25 bp, Homo sapien
cttagaagcacaggagagggaggcc

SEQ ID NO: 829537 - DNA, 25 bp, Homo sapien
tccttggagacagcggcctcattca

SEQ ID NO: 829538 - DNA, 25 bp, Homo sapien
tgtccccaaggagaccgtagattcc

SEQ ID NO: 829539 - DNA, 25 bp, Homo sapien
tgctccctgtacaggctccttggag

SEQ ID NO: 829540 - DNA, 25 bp, Homo sapien
actgctcgtatgtcttgtccccaag

SEQ ID NO: 829541 - DNA, 25 bp, Homo sapien
tgtactgctggcctcaaccaacgtg

SEQ ID NO: 829542 - DNA, 25 bp, Homo sapien
gaagattgtataaccccgtcagtcc

SEQ ID NO: 829543 - DNA, 25 bp, Homo sapien
tatcagcatagcctcaagggccatg

SEQ ID NO: 829544 - DNA, 25 bp, Homo sapien
ggtttcctatgatgtgggcccatgc

SEQ ID NO: 829545 - DNA, 25 bp, Homo sapien
aatggaagacgtggccagtcgcccc

SEQ ID NO: 829546 - DNA, 25 bp, Homo sapien
tcgcccccacacttgcaatgcaggc

SEQ ID NO: 829547 - DNA, 25 bp, Homo sapien
agtcgcccccacacttgcaatgcag

SEQ ID NO: 829548 - DNA, 25 bp, Homo sapien
cgaaatggaagacgtggccagtcgc

SEQ ID NO: 829549 - DNA, 25 bp, Homo sapien
ggtgacgcatcactagaaaccctgg

SEQ ID NO: 829550 - DNA, 25 bp, Homo sapien
catgccttagggtagggccttccca

SEQ ID NO: 829551 - DNA, 25 bp, Homo sapien
gggcaactcctatgctcacacaggg

SEQ ID NO: 829552 - DNA, 25 bp, Homo sapien
tgcctccgcatctaggaagcacagg

SEQ ID NO: 829553 - DNA, 25 bp, Homo sapien
agggtctggctctgtagcctaggct

SEQ ID NO: 829554 - DNA, 25 bp, Homo sapien
ggagtgcagtggcgtgaccacagct

SEQ ID NO: 829555 - DNA, 25 bp, Homo sapien
cactgcaacctcgaactcctggatt

SEQ ID NO: 829556 - DNA, 25 bp, Homo sapien
tgatcctctcacctcggtctcctga

SEQ ID NO: 829557 - DNA, 25 bp, Homo sapien
gagacaaagagaagaccgttggtgg

SEQ ID NO: 829558 - DNA, 25 bp, Homo sapien
tggtggggctcaggctcaagttccc

SEQ ID NO: 829559 - DNA, 25 bp, Homo sapien
ggctcaggctcaagttcccagatgc

SEQ ID NO: 829560 - DNA, 25 bp, Homo sapien
caaagagaagaccgttggtggggct

SEQ ID NO: 829561 - DNA, 25 bp, Homo sapien
tgcactggtccgttgccctgggcga

SEQ ID NO: 829562 - DNA, 25 bp, Homo sapien
cacagcttggccgtccatggtgact

SEQ ID NO: 829563 - DNA, 25 bp, Homo sapien
tggtacatgctcacagggatctgga

SEQ ID NO: 829564 - DNA, 25 bp, Homo sapien
tggtgactgcgctgtctgatatcct

SEQ ID NO: 829565 - DNA, 25 bp, Homo sapien
ggcccgggagctttcaagacattca

SEQ ID NO: 829566 - DNA, 25 bp, Homo sapien
ccgaggagcatctcagctggcagac

SEQ ID NO: 829567 - DNA, 25 bp, Homo sapien
tgaagtagactagaaaacgatgcca

SEQ ID NO: 829568 - DNA, 25 bp, Homo sapien
tgaccctggtatgaacaaaaactgg

SEQ ID NO: 829569 - DNA, 25 bp, Homo sapien
gagaaaattgctcccacgggtgtat

SEQ ID NO: 829570 - DNA, 25 bp, Homo sapien
aatacttcggttaccttcagttcat

SEQ ID NO: 829571 - DNA, 25 bp, Homo sapien
tatcctggtctaggacgatttttct

SEQ ID NO: 829572 - DNA, 25 bp, Homo sapien
tatatacgagcaattcaggactgac

SEQ ID NO: 829573 - DNA, 25 bp, Homo sapien
gatgtctcttcttgttcattccagc

SEQ ID NO: 829574 - DNA, 25 bp, Homo sapien
agatgtctcttcttgttcattccag

SEQ ID NO: 829575 - DNA, 25 bp, Homo sapien
cgcgtactgaccgggcccaaccaag

SEQ ID NO: 829576 - DNA, 25 bp, Homo sapien
actgaccgggcccaaccaagcttag

SEQ ID NO: 829577 - DNA, 25 bp, Homo sapien
cgtactgaccgggcccaaccaagct

SEQ ID NO: 829578 - DNA, 25 bp, Homo sapien
tccgcgtactgaccgggcccaacca

SEQ ID NO: 829579 - DNA, 25 bp, Homo sapien
ctcagctgttttctatggccaggtg

SEQ ID NO: 829580 - DNA, 25 bp, Homo sapien
aacatgggcctccaggagtcccttc

SEQ ID NO: 829581 - DNA, 25 bp, Homo sapien
tgggccacgaggttgcatcaaggaa

SEQ ID NO: 829582 - DNA, 25 bp, Homo sapien
gaggttgcatcaaggaacatgggcc

SEQ ID NO: 829583 - DNA, 25 bp, Homo sapien
gagcaagacgtggagaatcttttaa

SEQ ID NO: 829584 - DNA, 25 bp, Homo sapien
ggagctgtccctgtactcaaggttc

SEQ ID NO: 829585 - DNA, 25 bp, Homo sapien
ggttaccaagaacacccagatagtc

SEQ ID NO: 829586 - DNA, 25 bp, Homo sapien
aacacattaaatacaccatcacaca

SEQ ID NO: 829587 - DNA, 25 bp, Homo sapien
tgaggcagtcaaagacagaatggga

SEQ ID NO: 829588 - DNA, 25 bp, Homo sapien
tcttcgtcttggcaacttctcaaac

SEQ ID NO: 829589 - DNA, 25 bp, Homo sapien
ttcaccacaaaggaacatggacttt

SEQ ID NO: 829590 - DNA, 25 bp, Homo sapien
ccccattacgtacagaaaagaacat

SEQ ID NO: 829591 - DNA, 25 bp, Homo sapien
gctactggggtctatgaagggccta

SEQ ID NO: 829592 - DNA, 25 bp, Homo sapien
aacagctggagcgatggcatatgcc

SEQ ID NO: 829593 - DNA, 25 bp, Homo sapien
ggaacaagtcatggcttgaggcttc

SEQ ID NO: 829594 - DNA, 25 bp, Homo sapien
catgttaagagagtaagctgtgtga

SEQ ID NO: 829595 - DNA, 25 bp, Homo sapien
cagttgtcaatacatgcctgtggca

SEQ ID NO: 829596 - DNA, 25 bp, Homo sapien
aatggaagaggtctccatcggcccc

SEQ ID NO: 829597 - DNA, 25 bp, Homo sapien
caggctgccccgtttagatggatgc

SEQ ID NO: 829598 - DNA, 25 bp, Homo sapien
cagcagctagaagacgcctctggag

SEQ ID NO: 829599 - DNA, 25 bp, Homo sapien
ctgctccaaataattaagctccagt

SEQ ID NO: 829600 - DNA, 25 bp, Homo sapien
ttcctccctgatgagttttggtgct

SEQ ID NO: 829601 - DNA, 25 bp, Homo sapien
tcctccctgatgagttttggtgctg

SEQ ID NO: 829602 - DNA, 25 bp, Homo sapien
ctccaaataattaagctccagtttc

SEQ ID NO: 829603 - DNA, 25 bp, Homo sapien
tattgtaagggctaagtgttcactg

SEQ ID NO: 829604 - DNA, 25 bp, Homo sapien
aagctagcaaagcttgagccctgga

SEQ ID NO: 829605 - DNA, 25 bp, Homo sapien
catagttctcgtaagcaagctagca

SEQ ID NO: 829606 - DNA, 25 bp, Homo sapien
taaggaggctctaggttctcagggc

SEQ ID NO: 829607 - DNA, 25 bp, Homo sapien
agggcccacgaagtcttcatcgtcc

SEQ ID NO: 829608 - DNA, 25 bp, Homo sapien
gcccacgaagtcttcatcgtccttg

SEQ ID NO: 829609 - DNA, 25 bp, Homo sapien
agccccgcacgaatgccctgctccc

SEQ ID NO: 829610 - DNA, 25 bp, Homo sapien
gggcccacgaagtcttcatcgtcct

SEQ ID NO: 829611 - DNA, 25 bp, Homo sapien
ggcgtcggcatggacgggaggcccc

SEQ ID NO: 829612 - DNA, 25 bp, Homo sapien
ggaggagtgggcgtcggcatggacg

SEQ ID NO: 829613 - DNA, 25 bp, Homo sapien
agtgggcgtcggcatggacgggagg

SEQ ID NO: 829614 - DNA, 25 bp, Homo sapien
gaccctcagctcggccgtgccccac

SEQ ID NO: 829615 - DNA, 25 bp, Homo sapien
tcaggcgcttccctgcatcgtggcg

SEQ ID NO: 829616 - DNA, 25 bp, Homo sapien
tagaagacagggcccgcactggctg

SEQ ID NO: 829617 - DNA, 25 bp, Homo sapien
cacagtcgggcaggtgttgagcccc

SEQ ID NO: 829618 - DNA, 25 bp, Homo sapien
tctgggttcgggatgcgctcgggct

SEQ ID NO: 829619 - DNA, 25 bp, Homo sapien
gaatgctccgggtggtgtcagacca

SEQ ID NO: 829620 - DNA, 25 bp, Homo sapien
gttaatagcgctagtggcacccagg

SEQ ID NO: 829621 - DNA, 25 bp, Homo sapien
cagggtcggatttccaagcacgcca

SEQ ID NO: 829622 - DNA, 25 bp, Homo sapien
gagaaggatctaatccgcgtccgcg

SEQ ID NO: 829623 - DNA, 25 bp, Homo sapien
ttgcgggtgcagtttcgcggcccct

SEQ ID NO: 829624 - DNA, 25 bp, Homo sapien
tatgtatgaggcccttgcgggtgca

SEQ ID NO: 829625 - DNA, 25 bp, Homo sapien
cctgctccttaaaatatgtatgagg

SEQ ID NO: 829626 - DNA, 25 bp, Homo sapien
cccttgcgggtgcagtttcgcggcc

SEQ ID NO: 829627 - DNA, 25 bp, Homo sapien
ctaaacctggccaagcgtcgaggaa

SEQ ID NO: 829628 - DNA, 25 bp, Homo sapien
cgacaccattaaaaaggacggagcg

SEQ ID NO: 829629 - DNA, 25 bp, Homo sapien
gcaagccagagggacaagccgcgac

SEQ ID NO: 829630 - DNA, 25 bp, Homo sapien
cgcaaggcgccgagtctcctaggtg

SEQ ID NO: 829631 - DNA, 25 bp, Homo sapien
tgtcatggagctggcgaagggagcc

SEQ ID NO: 829632 - DNA, 25 bp, Homo sapien
gaaccacggccgcatcagtgggtct

SEQ ID NO: 829633 - DNA, 25 bp, Homo sapien
tcctgccgccggaggaatgggaagg

SEQ ID NO: 829634 - DNA, 25 bp, Homo sapien
ccaaggtcttcagcacgagtgggat

SEQ ID NO: 829635 - DNA, 25 bp, Homo sapien
catggggccagggttagcaggagaa

SEQ ID NO: 829636 - DNA, 25 bp, Homo sapien
ttatactagttatgccatggggcca

SEQ ID NO: 829637 - DNA, 25 bp, Homo sapien
gccagggttagcaggagaacctcac

SEQ ID NO: 829638 - DNA, 25 bp, Homo sapien
tgggttcctctcactggggttatac

SEQ ID NO: 829639 - DNA, 25 bp, Homo sapien
cgcggacgagggtgcagggcgtgct

SEQ ID NO: 829640 - DNA, 25 bp, Homo sapien
ggacgagggtgcagggcgtgctgag

SEQ ID NO: 829641 - DNA, 25 bp, Homo sapien
acccggcggcagtcgcgcggacgag

SEQ ID NO: 829642 - DNA, 25 bp, Homo sapien
tcgcgcggacgagggtgcagggcgt

SEQ ID NO: 829643 - DNA, 25 bp, Homo sapien
gatcgaaagactcccgctttggctt

SEQ ID NO: 829644 - DNA, 25 bp, Homo sapien
gcaaaggaccgagggctaagggctg

SEQ ID NO: 829645 - DNA, 25 bp, Homo sapien
ggctgggccaagatcgaaagactcc

SEQ ID NO: 829646 - DNA, 25 bp, Homo sapien
ccgctttggcttccccggcacgtgg

SEQ ID NO: 829647 - DNA, 25 bp, Homo sapien
ttgttgacccacgagaatctagatg

SEQ ID NO: 829648 - DNA, 25 bp, Homo sapien
gaggaaaaacgcacagaagcacacg

SEQ ID NO: 829649 - DNA, 25 bp, Homo sapien
gaagcacacgcatacggttttcgaa

SEQ ID NO: 829650 - DNA, 25 bp, Homo sapien
cagtgactttgttgacccacgagaa

SEQ ID NO: 829651 - DNA, 25 bp, Homo sapien
tgcgctgagacctttcgtgcagaaa

SEQ ID NO: 829652 - DNA, 25 bp, Homo sapien
gtttttcactgaacgcctaggcgac

SEQ ID NO: 829653 - DNA, 25 bp, Homo sapien
aataggaatccacgtgccttttgcg

SEQ ID NO: 829654 - DNA, 25 bp, Homo sapien
aacacacattggcttcgaacagtcc

SEQ ID NO: 829655 - DNA, 25 bp, Homo sapien
tggacgcttatgtttcacctgctcg

SEQ ID NO: 829656 - DNA, 25 bp, Homo sapien
gggtggacgcttatgtttcacctgc

SEQ ID NO: 829657 - DNA, 25 bp, Homo sapien
gacgcttatgtttcacctgctcggg

SEQ ID NO: 829658 - DNA, 25 bp, Homo sapien
cctctggggtggacgcttatgtttc

SEQ ID NO: 829659 - DNA, 25 bp, Homo sapien
taggtcctggacagagcgcatcgcc

SEQ ID NO: 829660 - DNA, 25 bp, Homo sapien
gggagctgcccgctgtgagccgagg

SEQ ID NO: 829661 - DNA, 25 bp, Homo sapien
ctcctaggtcctggacagagcgcat

SEQ ID NO: 829662 - DNA, 25 bp, Homo sapien
tgcccgctgtgagccgagggtggag

SEQ ID NO: 829663 - DNA, 25 bp, Homo sapien
ttctcctccccattagggtagaaga

SEQ ID NO: 829664 - DNA, 25 bp, Homo sapien
attctcctccccattagggtagaag

SEQ ID NO: 829665 - DNA, 25 bp, Homo sapien
gcccactgcaaccttcgcctcccag

SEQ ID NO: 829666 - DNA, 25 bp, Homo sapien
gctgcaacctccaccttccgggttc

SEQ ID NO: 829667 - DNA, 25 bp, Homo sapien
atgcagtggtgcgatgtcgactcgc

SEQ ID NO: 829668 - DNA, 25 bp, Homo sapien
acccagcctggagtgtgcaacagca

SEQ ID NO: 829669 - DNA, 25 bp, Homo sapien
caccaggtgtactagtcatgttgct

SEQ ID NO: 829670 - DNA, 25 bp, Homo sapien
ctagtcatgttgctcagcgtcacct

SEQ ID NO: 829671 - DNA, 25 bp, Homo sapien
cagcaccaggtgtactagtcatgtt

SEQ ID NO: 829672 - DNA, 25 bp, Homo sapien
gtcatgttgctcagcgtcaccttgc

SEQ ID NO: 829673 - DNA, 25 bp, Homo sapien
ggatttctccgaaatcgggatatgt

SEQ ID NO: 829674 - DNA, 25 bp, Homo sapien
atggtgggggatttctccgaaatcg

SEQ ID NO: 829675 - DNA, 25 bp, Homo sapien
ttggtgccctcgatcatggacagga

SEQ ID NO: 829676 - DNA, 25 bp, Homo sapien
ccctcgatcatggacaggatggtgg

SEQ ID NO: 829677 - DNA, 25 bp, Homo sapien
tgggaacagctaacgcccaggacgt

SEQ ID NO: 829678 - DNA, 25 bp, Homo sapien
acatcgctggtttgtgtttctcttc

SEQ ID NO: 829679 - DNA, 25 bp, Homo sapien
cgttgaggagacatcgctggtttgt

SEQ ID NO: 829680 - DNA, 25 bp, Homo sapien
tctctatgaagtgatggtgggaaca

SEQ ID NO: 829681 - DNA, 25 bp, Homo sapien
gaagctcctgtaattgccgcatgga

SEQ ID NO: 829682 - DNA, 25 bp, Homo sapien
taatgataagacattggctcgcctc

SEQ ID NO: 829683 - DNA, 25 bp, Homo sapien
gacgatttttgagcatcccactggg

SEQ ID NO: 829684 - DNA, 25 bp, Homo sapien
tagacttgagaagacgacccacgtg

SEQ ID NO: 829685 - DNA, 25 bp, Homo sapien
gcttagaaaggttgcagatttcatc

SEQ ID NO: 829686 - DNA, 25 bp, Homo sapien
aaaacacatgcagagtcacatcctc

SEQ ID NO: 829687 - DNA, 25 bp, Homo sapien
agaaaagtgactgggacgatgcttc

SEQ ID NO: 829688 - DNA, 25 bp, Homo sapien
gagaccgctaccctgaacttaagag

SEQ ID NO: 829689 - DNA, 25 bp, Homo sapien
cctatgtcttctgtggagttacagt

SEQ ID NO: 829690 - DNA, 25 bp, Homo sapien
aagcagggagctaattaagagtatt

SEQ ID NO: 829691 - DNA, 25 bp, Homo sapien
tgtgaatcctaggtggccctatgtc

SEQ ID NO: 829692 - DNA, 25 bp, Homo sapien
gagccagccatgtaagaatcagagc

SEQ ID NO: 829693 - DNA, 25 bp, Homo sapien
gaactgtcgaaggaaatagccgctc

SEQ ID NO: 829694 - DNA, 25 bp, Homo sapien
gttgtagtagaaaaagcacctgctt

SEQ ID NO: 829695 - DNA, 25 bp, Homo sapien
tcatgagtccatgtggccaagtcag

SEQ ID NO: 829696 - DNA, 25 bp, Homo sapien
tgacttttccgaagatgaggcccag

SEQ ID NO: 829697 - DNA, 25 bp, Homo sapien
ggcctctcctatgccatagctggca

SEQ ID NO: 829698 - DNA, 25 bp, Homo sapien
ggttgtgtttaaacatcccagccac

SEQ ID NO: 829699 - DNA, 25 bp, Homo sapien
aactgcttccctctggtgacactca

SEQ ID NO: 829700 - DNA, 25 bp, Homo sapien
tttcgtccgtaactgcttccctctg

SEQ ID NO: 829701 - DNA, 25 bp, Homo sapien
tctgttgttcaccactgaggagcca

SEQ ID NO: 829702 - DNA, 25 bp, Homo sapien
tacttccctgtaaggaatagcaatg

SEQ ID NO: 829703 - DNA, 25 bp, Homo sapien
cagttcagcctaatggaattttctc

SEQ ID NO: 829704 - DNA, 25 bp, Homo sapien
aaagcctgagattagacttgtggtc

SEQ ID NO: 829705 - DNA, 25 bp, Homo sapien
gtattatgatacagccagtctacca

SEQ ID NO: 829706 - DNA, 25 bp, Homo sapien
aacagacttgcagttacagtgtggg

SEQ ID NO: 829707 - DNA, 25 bp, Homo sapien
gaagcaacctaaatgacccagtcgg

SEQ ID NO: 829708 - DNA, 25 bp, Homo sapien
cagtctaccactatgtattgcttgg

SEQ ID NO: 829709 - DNA, 25 bp, Homo sapien
accatatgaaggcggagtatggaaa

SEQ ID NO: 829710 - DNA, 25 bp, Homo sapien
gcaccatatgaaggcggagtatgga

SEQ ID NO: 829711 - DNA, 25 bp, Homo sapien
tatgaaggcggagtatggaaagtta

SEQ ID NO: 829712 - DNA, 25 bp, Homo sapien
catatgaaggcggagtatggaaagt

SEQ ID NO: 829713 - DNA, 25 bp, Homo sapien
gagtaaacatgaggttacgatcctg

SEQ ID NO: 829714 - DNA, 25 bp, Homo sapien
tgaggttacgatcctgggaggactt

SEQ ID NO: 829715 - DNA, 25 bp, Homo sapien
aaacatgaggttacgatcctgggag

SEQ ID NO: 829716 - DNA, 25 bp, Homo sapien
cgagagtaaacatgaggttacgatc

SEQ ID NO: 829717 - DNA, 25 bp, Homo sapien
gtgactggtcagagtaggcatgcat

SEQ ID NO: 829718 - DNA, 25 bp, Homo sapien
cagggctcttgagcaaggactttac

SEQ ID NO: 829719 - DNA, 25 bp, Homo sapien
tgtgtcatttgaccaagcaagaaat

SEQ ID NO: 829720 - DNA, 25 bp, Homo sapien
tagatcaaattagcctagactgaac

SEQ ID NO: 829721 - DNA, 25 bp, Homo sapien
tagctaggattgcagctgcctgcca

SEQ ID NO: 829722 - DNA, 25 bp, Homo sapien
gagattacagctgtgagccaccgtg

SEQ ID NO: 829723 - DNA, 25 bp, Homo sapien
taggattgcagctgcctgccaccat

SEQ ID NO: 829724 - DNA, 25 bp, Homo sapien
caagtagctaggattgcagctgcct

SEQ ID NO: 829725 - DNA, 25 bp, Homo sapien
aaggtttcttattcatgggcatgct

SEQ ID NO: 829726 - DNA, 25 bp, Homo sapien
taagattaagatatggtgcttcgga

SEQ ID NO: 829727 - DNA, 25 bp, Homo sapien
cttgattgggagacacaaaggtttc

SEQ ID NO: 829728 - DNA, 25 bp, Homo sapien
tgttagtcccaaaccacataatagc

SEQ ID NO: 829729 - DNA, 25 bp, Homo sapien
gaaagaacgatctgtggtactcaac

SEQ ID NO: 829730 - DNA, 25 bp, Homo sapien
tgcttttgctttggccacaggtacg

SEQ ID NO: 829731 - DNA, 25 bp, Homo sapien
caggtacgggcaggctgttttacaa

SEQ ID NO: 829732 - DNA, 25 bp, Homo sapien
ggttaagggtgttgcctgcctgaaa

SEQ ID NO: 829733 - DNA, 25 bp, Homo sapien
tagaggcagagagtcttgataggtt

SEQ ID NO: 829734 - DNA, 25 bp, Homo sapien
ttagaggcagagagtcttgataggt

SEQ ID NO: 829735 - DNA, 25 bp, Homo sapien
cagagagtcttgataggttgtccag

SEQ ID NO: 829736 - DNA, 25 bp, Homo sapien
aggcagagagtcttgataggttgtc

SEQ ID NO: 829737 - DNA, 25 bp, Homo sapien
gagacagtgacacagtctagcagaa

SEQ ID NO: 829738 - DNA, 25 bp, Homo sapien
gaatgatgagtacaattggaccctc

SEQ ID NO: 829739 - DNA, 25 bp, Homo sapien
ccatgcccggcaaaatcagctttta

SEQ ID NO: 829740 - DNA, 25 bp, Homo sapien
gctgcaaagggtcattgttaccaag

SEQ ID NO: 829741 - DNA, 25 bp, Homo sapien
tagttcttcatagccaccatcttga

SEQ ID NO: 829742 - DNA, 25 bp, Homo sapien
ggaggtagacctttgaatgccttga

SEQ ID NO: 829743 - DNA, 25 bp, Homo sapien
gaagaaaggcagctaaagtgctgtc

SEQ ID NO: 829744 - DNA, 25 bp, Homo sapien
gcccatttctctaggcagtgaagaa

SEQ ID NO: 829745 - DNA, 25 bp, Homo sapien
cctgggtgcaaagcaatcccgcctc

SEQ ID NO: 829746 - DNA, 25 bp, Homo sapien
tttgataggttattggacactgcca

SEQ ID NO: 829747 - DNA, 25 bp, Homo sapien
tgataggttattggacactgccata

SEQ ID NO: 829748 - DNA, 25 bp, Homo sapien
gataggttattggacactgccataa

SEQ ID NO: 829749 - DNA, 25 bp, Homo sapien
tatttgataggttattggacactgc

SEQ ID NO: 829750 - DNA, 25 bp, Homo sapien
tatctttgtgaataggtaagcacac

SEQ ID NO: 829751 - DNA, 25 bp, Homo sapien
tacactttaggatcatagtcacaaa

SEQ ID NO: 829752 - DNA, 25 bp, Homo sapien
gaaaggaactaacagcagctcagtg

SEQ ID NO: 829753 - DNA, 25 bp, Homo sapien
tagcatttctagtgaagtttacagc

SEQ ID NO: 829754 - DNA, 25 bp, Homo sapien
tggcacagctttatggtcttcaagc

SEQ ID NO: 829755 - DNA, 25 bp, Homo sapien
tctagtgtcaattgggaacctgtgg

SEQ ID NO: 829756 - DNA, 25 bp, Homo sapien
tcttccctgcctagattttggtgac

SEQ ID NO: 829757 - DNA, 25 bp, Homo sapien
tgatgagatgaaagttggcacagct

SEQ ID NO: 829758 - DNA, 25 bp, Homo sapien
ctgcttgttttggaaaagcgtatgc

SEQ ID NO: 829759 - DNA, 25 bp, Homo sapien
gtatgcaggcaaaaggccgcaggca

SEQ ID NO: 829760 - DNA, 25 bp, Homo sapien
ccctgctgaaggctagagctgcttg

SEQ ID NO: 829761 - DNA, 25 bp, Homo sapien
tcagcgctcattggccgccctgtta

SEQ ID NO: 829762 - DNA, 25 bp, Homo sapien
aatcaaggcagaaattcccgagagg

SEQ ID NO: 829763 - DNA, 25 bp, Homo sapien
cagaaattcccgagagggaagcctt

SEQ ID NO: 829764 - DNA, 25 bp, Homo sapien
gctttggatttagggaatcaaggca

SEQ ID NO: 829765 - DNA, 25 bp, Homo sapien
ctctcctgtttgctcgctttggatt

SEQ ID NO: 829766 - DNA, 25 bp, Homo sapien
tttctttttgcacgaccagtcgcct

SEQ ID NO: 829767 - DNA, 25 bp, Homo sapien
tgtgactttcctccgcgacgtttgg

SEQ ID NO: 829768 - DNA, 25 bp, Homo sapien
gcagcaccccgaaatacgcgttgct

SEQ ID NO: 829769 - DNA, 25 bp, Homo sapien
gttgctgctcgctcttcctgtatcc

SEQ ID NO: 829770 - DNA, 25 bp, Homo sapien
ccccagtgcctacggcggctccttg

SEQ ID NO: 829771 - DNA, 25 bp, Homo sapien
tcccccagtgcctacggcggctcct

SEQ ID NO: 829772 - DNA, 25 bp, Homo sapien
cccagtgcctacggcggctccttgg

SEQ ID NO: 829773 - DNA, 25 bp, Homo sapien
cctcccccagtgcctacggcggctc

SEQ ID NO: 829774 - DNA, 25 bp, Homo sapien
gatgcccagggcacccccggaacca

SEQ ID NO: 829775 - DNA, 25 bp, Homo sapien
tgtatccttcgtggaggggaattcg

SEQ ID NO: 829776 - DNA, 25 bp, Homo sapien
gcacccccggaaccactgcaagggc

SEQ ID NO: 829777 - DNA, 25 bp, Homo sapien
tcaagctgtatccttcgtggagggg

SEQ ID NO: 829778 - DNA, 25 bp, Homo sapien
caagaggcggatggacacggacgtg

SEQ ID NO: 829779 - DNA, 25 bp, Homo sapien
catgtcatctcccagtccgggcaag

SEQ ID NO: 829780 - DNA, 25 bp, Homo sapien
tgtcatctcccagtccgggcaagag

SEQ ID NO: 829781 - DNA, 25 bp, Homo sapien
gtcatctcccagtccgggcaagagg

SEQ ID NO: 829782 - DNA, 25 bp, Homo sapien
gcccgtgacagacgggccgaggaag

SEQ ID NO: 829783 - DNA, 25 bp, Homo sapien
ccgggcccgtgacagacgggccgag

SEQ ID NO: 829784 - DNA, 25 bp, Homo sapien
gggcccgtgacagacgggccgagga

SEQ ID NO: 829785 - DNA, 25 bp, Homo sapien
gtgacagacgggccgaggaagggag

SEQ ID NO: 829786 - DNA, 25 bp, Homo sapien
cataccctggtatgcaagcctgagg

SEQ ID NO: 829787 - DNA, 25 bp, Homo sapien
ttctctccagccaacgaggaagcgg

SEQ ID NO: 829788 - DNA, 25 bp, Homo sapien
tctttgaaatagtggccgtagacac

SEQ ID NO: 829789 - DNA, 25 bp, Homo sapien
cttgctgtggtctacaatccttgga

SEQ ID NO: 829790 - DNA, 25 bp, Homo sapien
gatctgaagtgaagctctagcggca

SEQ ID NO: 829791 - DNA, 25 bp, Homo sapien
ccaggcgatgctgatactatagatc

SEQ ID NO: 829792 - DNA, 25 bp, Homo sapien
taaatataggcgatgcctggaacac

SEQ ID NO: 829793 - DNA, 25 bp, Homo sapien
ccatatcacttcttttggaggacct

SEQ ID NO: 829794 - DNA, 25 bp, Homo sapien
gatcaattagttttaaacaccactg

SEQ ID NO: 829795 - DNA, 25 bp, Homo sapien
caattagttttaaacaccactgcac

SEQ ID NO: 829796 - DNA, 25 bp, Homo sapien
ttagttttaaacaccactgcacctg

SEQ ID NO: 829797 - DNA, 25 bp, Homo sapien
attagttttaaacaccactgcacct

SEQ ID NO: 829798 - DNA, 25 bp, Homo sapien
cagaatacattggtgagcttagcaa

SEQ ID NO: 829799 - DNA, 25 bp, Homo sapien
aaactcacttctgctcaaggagggc

SEQ ID NO: 829800 - DNA, 25 bp, Homo sapien
actcacttctgctcaaggagggctc

SEQ ID NO: 829801 - DNA, 25 bp, Homo sapien
ttggtgagcttagcaaactcacttc

SEQ ID NO: 829802 - DNA, 25 bp, Homo sapien
gacgttccagaggatcctgcagcct

SEQ ID NO: 829803 - DNA, 25 bp, Homo sapien
tttcagcacttagaggccctggttg

SEQ ID NO: 829804 - DNA, 25 bp, Homo sapien
aggatttcttccacggaggctgcca

SEQ ID NO: 829805 - DNA, 25 bp, Homo sapien
cagctccctgctcgtagcttaagga

SEQ ID NO: 829806 - DNA, 25 bp, Homo sapien
gacctgaaaggaggctctagcagct

SEQ ID NO: 829807 - DNA, 25 bp, Homo sapien
agcttttaaatcaggttctccagac

SEQ ID NO: 829808 - DNA, 25 bp, Homo sapien
tgaaaggaggctctagcagctttta

SEQ ID NO: 829809 - DNA, 25 bp, Homo sapien
ctggacctgaaaggaggctctagca

SEQ ID NO: 829810 - DNA, 25 bp, Homo sapien
gctctgtgtcctggtactcgcgtct

SEQ ID NO: 829811 - DNA, 25 bp, Homo sapien
actttcactgtgatcatgtctcccc

SEQ ID NO: 829812 - DNA, 25 bp, Homo sapien
tactcgcgtctgcttagacaccagc

SEQ ID NO: 829813 - DNA, 25 bp, Homo sapien
tggttccccacagtacaagactcag

SEQ ID NO: 829814 - DNA, 25 bp, Homo sapien
ggaattttgcagagtggatatcgaa

SEQ ID NO: 829815 - DNA, 25 bp, Homo sapien
ttgcagagtggatatcgaaggacct

SEQ ID NO: 829816 - DNA, 25 bp, Homo sapien
agagtggatatcgaaggacctgcat

SEQ ID NO: 829817 - DNA, 25 bp, Homo sapien
ttttgcagagtggatatcgaaggac

SEQ ID NO: 829818 - DNA, 25 bp, Homo sapien
cctgtgggcagagataaatgtgcag

SEQ ID NO: 829819 - DNA, 25 bp, Homo sapien
tgggcagagataaatgtgcagccct

SEQ ID NO: 829820 - DNA, 25 bp, Homo sapien
ctgtgggcagagataaatgtgcagc

SEQ ID NO: 829821 - DNA, 25 bp, Homo sapien
gcagagataaatgtgcagccctcac

SEQ ID NO: 829822 - DNA, 25 bp, Homo sapien
tccggaagacatgactggcctcctc

SEQ ID NO: 829823 - DNA, 25 bp, Homo sapien
cctggggacgagggcttccattctg

SEQ ID NO: 829824 - DNA, 25 bp, Homo sapien
tggcctcctcttgataagaagaagg

SEQ ID NO: 829825 - DNA, 25 bp, Homo sapien
gggtccggaagacatgactggcctc

SEQ ID NO: 829826 - DNA, 25 bp, Homo sapien
ctgaggcaacggagacaaggctttg

SEQ ID NO: 829827 - DNA, 25 bp, Homo sapien
agaagcctgatgcttgcccccttga

SEQ ID NO: 829828 - DNA, 25 bp, Homo sapien
gcaacggagacaaggctttgagaaa

SEQ ID NO: 829829 - DNA, 25 bp, Homo sapien
aggcaacggagacaaggctttgaga

SEQ ID NO: 829830 - DNA, 25 bp, Homo sapien
agcaggaggtttaggctccggctgt

SEQ ID NO: 829831 - DNA, 25 bp, Homo sapien
ccatctctgagctggaagtgagcag

SEQ ID NO: 829832 - DNA, 25 bp, Homo sapien
gagggccatcgggtggtgacaggca

SEQ ID NO: 829833 - DNA, 25 bp, Homo sapien
aggctgtgggttggaagcaagaggg

SEQ ID NO: 829834 - DNA, 25 bp, Homo sapien
gacaacagttcagagacgcagagcc

SEQ ID NO: 829835 - DNA, 25 bp, Homo sapien
taggtccggcacttgctgcctgtcc

SEQ ID NO: 829836 - DNA, 25 bp, Homo sapien
tcaaggcagtttggctccgtagatc

SEQ ID NO: 829837 - DNA, 25 bp, Homo sapien
gggcctgacaacagttcagagacgc

SEQ ID NO: 829838 - DNA, 25 bp, Homo sapien
taatgctaattaaccctgactcaca

SEQ ID NO: 829839 - DNA, 25 bp, Homo sapien
taggcaagccactaatgaagcatga

SEQ ID NO: 829840 - DNA, 25 bp, Homo sapien
gccgacctgcaaagttaggcaagcc

SEQ ID NO: 829841 - DNA, 25 bp, Homo sapien
cagaggtcattatctccactggaag

SEQ ID NO: 829842 - DNA, 25 bp, Homo sapien
catctggctgagagagacccgtttc

SEQ ID NO: 829843 - DNA, 25 bp, Homo sapien
tctgtgctcatgctgaagatactcc

SEQ ID NO: 829844 - DNA, 25 bp, Homo sapien
catcttcaatgtggagcagtgttct

SEQ ID NO: 829845 - DNA, 25 bp, Homo sapien
tgttctgggttaatcataaggagcc

SEQ ID NO: 829846 - DNA, 25 bp, Homo sapien
gagatgagactggacgcgttcaggg

SEQ ID NO: 829847 - DNA, 25 bp, Homo sapien
gatgagatgagactggacgcgttca

SEQ ID NO: 829848 - DNA, 25 bp, Homo sapien
atgagatgagactggacgcgttcag

SEQ ID NO: 829849 - DNA, 25 bp, Homo sapien
agatgagatgagactggacgcgttc

SEQ ID NO: 829850 - DNA, 25 bp, Homo sapien
tgtcattttgtctcctatagaccat

SEQ ID NO: 829851 - DNA, 25 bp, Homo sapien
ttgtctcctatagaccatagaggtt

SEQ ID NO: 829852 - DNA, 25 bp, Homo sapien
tagaggttgtgaagctgaggatact

SEQ ID NO: 829853 - DNA, 25 bp, Homo sapien
accatagaggttgtgaagctgagga

SEQ ID NO: 829854 - DNA, 25 bp, Homo sapien
gccaatggtcagtcgttttcttggt

SEQ ID NO: 829855 - DNA, 25 bp, Homo sapien
agaaacgtggtaaccatagctatgg

SEQ ID NO: 829856 - DNA, 25 bp, Homo sapien
tcagtcgttttcttggtaggtggcg

SEQ ID NO: 829857 - DNA, 25 bp, Homo sapien
agagaaacgtggtaaccatagctat

SEQ ID NO: 829858 - DNA, 25 bp, Homo sapien
cggaaccagcggagcctccttcctg

SEQ ID NO: 829859 - DNA, 25 bp, Homo sapien
ctaacgattgccgcagcccggtccc

SEQ ID NO: 829860 - DNA, 25 bp, Homo sapien
ctccgccaccagcgccggcggcgcc

SEQ ID NO: 829861 - DNA, 25 bp, Homo sapien
ccaccagcgccggcggcgcctcctc

SEQ ID NO: 829862 - DNA, 25 bp, Homo sapien
gccaccagcgccggcggcgcctcct

SEQ ID NO: 829863 - DNA, 25 bp, Homo sapien
ccgccaccagcgccggcggcgcctc

SEQ ID NO: 829864 - DNA, 25 bp, Homo sapien
tgcggccgcccggagagttgcacga

SEQ ID NO: 829865 - DNA, 25 bp, Homo sapien
ttgcacgaagcggttgagctggcca

SEQ ID NO: 829866 - DNA, 25 bp, Homo sapien
gcccggagagttgcacgaagcggtt

SEQ ID NO: 829867 - DNA, 25 bp, Homo sapien
gagagttgcacgaagcggttgagct

SEQ ID NO: 829868 - DNA, 25 bp, Homo sapien
cttcccgcccgcaagcggtcaggac

SEQ ID NO: 829869 - DNA, 25 bp, Homo sapien
cgcccgcaagcggtcaggaccctgt

SEQ ID NO: 829870 - DNA, 25 bp, Homo sapien
cgcaagcggtcaggaccctgtccca

SEQ ID NO: 829871 - DNA, 25 bp, Homo sapien
ttcccgcccgcaagcggtcaggacc

SEQ ID NO: 829872 - DNA, 25 bp, Homo sapien
gcgccaatgtctttcatttacaaga

SEQ ID NO: 829873 - DNA, 25 bp, Homo sapien
aataatttcccacagctaggcgcca

SEQ ID NO: 829874 - DNA, 25 bp, Homo sapien
ttggaatgcgtttccttcttctctc

SEQ ID NO: 829875 - DNA, 25 bp, Homo sapien
tcactccttggaatgcgtttccttc

SEQ ID NO: 829876 - DNA, 25 bp, Homo sapien
tatgacacaaaacctagactctgaa

SEQ ID NO: 829877 - DNA, 25 bp, Homo sapien
tcaaactgtaggaactaagtacacc

SEQ ID NO: 829878 - DNA, 25 bp, Homo sapien
aaagtatagttggattcccacctcg

SEQ ID NO: 829879 - DNA, 25 bp, Homo sapien
gctgaactaaatgaaggacactgcc

SEQ ID NO: 829880 - DNA, 25 bp, Homo sapien
cctgtttttgaacctcaaaacgatg

SEQ ID NO: 829881 - DNA, 25 bp, Homo sapien
tgaacctcaaaacgatgtcaattat

SEQ ID NO: 829882 - DNA, 25 bp, Homo sapien
ttttgaacctcaaaacgatgtcaat

SEQ ID NO: 829883 - DNA, 25 bp, Homo sapien
tcaaaacgatgtcaattatctctaa

SEQ ID NO: 829884 - DNA, 25 bp, Homo sapien
agcccccatgcctggccacatatac

SEQ ID NO: 829885 - DNA, 25 bp, Homo sapien
gagcccccatgcctggccacatata

SEQ ID NO: 829886 - DNA, 25 bp, Homo sapien
gtgagcccccatgcctggccacata

SEQ ID NO: 829887 - DNA, 25 bp, Homo sapien
tgagcccccatgcctggccacatat

SEQ ID NO: 829888 - DNA, 25 bp, Homo sapien
ccaagaatttaaggcaactaactga

SEQ ID NO: 829889 - DNA, 25 bp, Homo sapien
ggcaactaactgaaaatacttctgt

SEQ ID NO: 829890 - DNA, 25 bp, Homo sapien
cttctgtatagctgaaatataaaat

SEQ ID NO: 829891 - DNA, 25 bp, Homo sapien
ttgttccaagaatttaaggcaacta

SEQ ID NO: 829892 - DNA, 25 bp, Homo sapien
cattgtgagcctcaccatctccctt

SEQ ID NO: 829893 - DNA, 25 bp, Homo sapien
tgtaaagattacttactctatatcc

SEQ ID NO: 829894 - DNA, 25 bp, Homo sapien
tccaatggcttgctaataattccaa

SEQ ID NO: 829895 - DNA, 25 bp, Homo sapien
cttactctatatccttacttggagg

SEQ ID NO: 829896 - DNA, 25 bp, Homo sapien
tttaccaaacatcttgcctgcattt

SEQ ID NO: 829897 - DNA, 25 bp, Homo sapien
ttatatgtatcgatgtgaatgtgcc

SEQ ID NO: 829898 - DNA, 25 bp, Homo sapien
aatattaactatagccagagattgt

SEQ ID NO: 829899 - DNA, 25 bp, Homo sapien
gcctgcatttgtactttatatgtat

SEQ ID NO: 829900 - DNA, 25 bp, Homo sapien
tatgcttagcacttataaatactct

SEQ ID NO: 829901 - DNA, 25 bp, Homo sapien
tgagtatctactctatgcttagcac

SEQ ID NO: 829902 - DNA, 25 bp, Homo sapien
tcccaatagggagacaacaggcatg

SEQ ID NO: 829903 - DNA, 25 bp, Homo sapien
gccaaacacctttatatactgagta

SEQ ID NO: 829904 - DNA, 25 bp, Homo sapien
gagtaaggtcactggattgtatcaa

SEQ ID NO: 829905 - DNA, 25 bp, Homo sapien
gtaacaggatgttatcattccaaga

SEQ ID NO: 829906 - DNA, 25 bp, Homo sapien
cacacacgagtatgtgtaaaactga

SEQ ID NO: 829907 - DNA, 25 bp, Homo sapien
gaagggtatatggatctctcagtat

SEQ ID NO: 829908 - DNA, 25 bp, Homo sapien
aataagtcagacacatacaacacat

SEQ ID NO: 829909 - DNA, 25 bp, Homo sapien
aagtcagacacatacaacacattgc

SEQ ID NO: 829910 - DNA, 25 bp, Homo sapien
agtcagacacatacaacacattgca

SEQ ID NO: 829911 - DNA, 25 bp, Homo sapien
taagtcagacacatacaacacattg

SEQ ID NO: 829912 - DNA, 25 bp, Homo sapien
actgggtcccatcgtattttcttct

SEQ ID NO: 829913 - DNA, 25 bp, Homo sapien
tgaatgaagcgcctcctaactgggt

SEQ ID NO: 829914 - DNA, 25 bp, Homo sapien
ccttatgatgggacaggactgaatg

SEQ ID NO: 829915 - DNA, 25 bp, Homo sapien
caaaaacctgttagggatccttatg

SEQ ID NO: 829916 - DNA, 25 bp, Homo sapien
tgggccctatgaaactgtctacaat

SEQ ID NO: 829917 - DNA, 25 bp, Homo sapien
caattcattagttcactgtcaccaa

SEQ ID NO: 829918 - DNA, 25 bp, Homo sapien
agtaaatgggtatgttaagtctgcc

SEQ ID NO: 829919 - DNA, 25 bp, Homo sapien
tatgttttagagaagatgtaggacc

SEQ ID NO: 829920 - DNA, 25 bp, Homo sapien
tccaccttcccccaaaactgctcca

SEQ ID NO: 829921 - DNA, 25 bp, Homo sapien
ctgccctgatattccaccttccccc

SEQ ID NO: 829922 - DNA, 25 bp, Homo sapien
gccctgatattccaccttcccccaa

SEQ ID NO: 829923 - DNA, 25 bp, Homo sapien
ccaccttcccccaaaactgctccat

SEQ ID NO: 829924 - DNA, 25 bp, Homo sapien
ctggatcacggggacgaagttctca

SEQ ID NO: 829925 - DNA, 25 bp, Homo sapien
tcccctcaactcctcttggtcctgc

SEQ ID NO: 829926 - DNA, 25 bp, Homo sapien
ggacgaagttctcatgaatgcttta

SEQ ID NO: 829927 - DNA, 25 bp, Homo sapien
aatgctttagcaccatacctccttg

SEQ ID NO: 829928 - DNA, 25 bp, Homo sapien
tacttggtattgccactgtcagtct

SEQ ID NO: 829929 - DNA, 25 bp, Homo sapien
gtattgccactgtcagtctttttaa

SEQ ID NO: 829930 - DNA, 25 bp, Homo sapien
cttggtattgccactgtcagtcttt

SEQ ID NO: 829931 - DNA, 25 bp, Homo sapien
tggtattgccactgtcagtcttttt

SEQ ID NO: 829932 - DNA, 25 bp, Homo sapien
tgaggacactggtaaggttatgccg

SEQ ID NO: 829933 - DNA, 25 bp, Homo sapien
tataggtagacaatcagatcatctg

SEQ ID NO: 829934 - DNA, 25 bp, Homo sapien
cctggtcttctactgtattggctga

SEQ ID NO: 829935 - DNA, 25 bp, Homo sapien
caaggttgaatagtggagatgacag

SEQ ID NO: 829936 - DNA, 25 bp, Homo sapien
gctccttgtcttttgtttacggcat

SEQ ID NO: 829937 - DNA, 25 bp, Homo sapien
tacagaggtgttgagtctctcaatc

SEQ ID NO: 829938 - DNA, 25 bp, Homo sapien
ctgagtgagacctacctgtggtagc

SEQ ID NO: 829939 - DNA, 25 bp, Homo sapien
gaacttctaatctaagctcaaatga

SEQ ID NO: 829940 - DNA, 25 bp, Homo sapien
ccagagctgaaattgtgcacagatt

SEQ ID NO: 829941 - DNA, 25 bp, Homo sapien
gagtcactcacgtccaacctgttag

SEQ ID NO: 829942 - DNA, 25 bp, Homo sapien
tggttcctcaccactcaagtatcaa

SEQ ID NO: 829943 - DNA, 25 bp, Homo sapien
aagtcccctgcccaacatgttagag

SEQ ID NO: 829944 - DNA, 25 bp, Homo sapien
gggaccaggaaggatttataacatg

SEQ ID NO: 829945 - DNA, 25 bp, Homo sapien
gaccaggaaggatttataacatgga

SEQ ID NO: 829946 - DNA, 25 bp, Homo sapien
ggaccaggaaggatttataacatgg

SEQ ID NO: 829947 - DNA, 25 bp, Homo sapien
aacatggatatacttcttatttgtt

SEQ ID NO: 829948 - DNA, 25 bp, Homo sapien
aagaggacagttttccacaggtgtc

SEQ ID NO: 829949 - DNA, 25 bp, Homo sapien
aaatgatacctccagagttccctga

SEQ ID NO: 829950 - DNA, 25 bp, Homo sapien
ggtgccatactcctgtagcaaaatg

SEQ ID NO: 829951 - DNA, 25 bp, Homo sapien
tataggttggtattatctgccacac

SEQ ID NO: 829952 - DNA, 25 bp, Homo sapien
tagtcttcattatcaggccctcccg

SEQ ID NO: 829953 - DNA, 25 bp, Homo sapien
taactgtcatcgtcataagccccat

SEQ ID NO: 829954 - DNA, 25 bp, Homo sapien
catttgttgaccttctactgcgtga

SEQ ID NO: 829955 - DNA, 25 bp, Homo sapien
cataaagtcaggagttacgaactgc

SEQ ID NO: 829956 - DNA, 25 bp, Homo sapien
tatgggacattgaacctggcttctc

SEQ ID NO: 829957 - DNA, 25 bp, Homo sapien
cacttaaacttagttgattaagcag

SEQ ID NO: 829958 - DNA, 25 bp, Homo sapien
gaaaggaagagccaattgatgcagc

SEQ ID NO: 829959 - DNA, 25 bp, Homo sapien
tcagctgccaccaacatcaagacaa

SEQ ID NO: 829960 - DNA, 25 bp, Homo sapien
aaggaagagccaattgatgcagcaa

SEQ ID NO: 829961 - DNA, 25 bp, Homo sapien
tgtgctcagtgaaagtggtttcttg

SEQ ID NO: 829962 - DNA, 25 bp, Homo sapien
gagtcactgtgctcagtgaaagtgg

SEQ ID NO: 829963 - DNA, 25 bp, Homo sapien
cactgtgctcagtgaaagtggtttc

SEQ ID NO: 829964 - DNA, 25 bp, Homo sapien
atgagtcactgtgctcagtgaaagt

SEQ ID NO: 829965 - DNA, 25 bp, Homo sapien
gcaggtaactttggtgttcttcctc

SEQ ID NO: 829966 - DNA, 25 bp, Homo sapien
aatactaacaggttgtttccatgca

SEQ ID NO: 829967 - DNA, 25 bp, Homo sapien
tactaacaggttgtttccatgcagc

SEQ ID NO: 829968 - DNA, 25 bp, Homo sapien
tccaaatactaacaggttgtttcca

SEQ ID NO: 829969 - DNA, 25 bp, Homo sapien
ctaacaggttgtttccatgcagcac

SEQ ID NO: 829970 - DNA, 25 bp, Homo sapien
tggacgtcattgccgttgctctctc

SEQ ID NO: 829971 - DNA, 25 bp, Homo sapien
gacgtcattgccgttgctctctcca

SEQ ID NO: 829972 - DNA, 25 bp, Homo sapien
cattgccgttgctctctccaaatgg

SEQ ID NO: 829973 - DNA, 25 bp, Homo sapien
atggacgtcattgccgttgctctct

SEQ ID NO: 829974 - DNA, 25 bp, Homo sapien
tcttcccccgacagctgagcaaagc

SEQ ID NO: 829975 - DNA, 25 bp, Homo sapien
aaagcccatctcttatacttcacat

SEQ ID NO: 829976 - DNA, 25 bp, Homo sapien
ctgtccatatatacgactgggtttc

SEQ ID NO: 829977 - DNA, 25 bp, Homo sapien
catatatacgactgggtttcttccc

SEQ ID NO: 829978 - DNA, 25 bp, Homo sapien
tatagccggttgtacctccaaagac

SEQ ID NO: 829979 - DNA, 25 bp, Homo sapien
tcttctggtagatcacaggataggt

SEQ ID NO: 829980 - DNA, 25 bp, Homo sapien
tccaaagacataaagggagccattg

SEQ ID NO: 829981 - DNA, 25 bp, Homo sapien
tattgagatctaacttgtgcaggtc

SEQ ID NO: 829982 - DNA, 25 bp, Homo sapien
gaaggccttgttgctgataaaataa

SEQ ID NO: 829983 - DNA, 25 bp, Homo sapien
aaggccttgttgctgataaaataaa

SEQ ID NO: 829984 - DNA, 25 bp, Homo sapien
ctgaaggccttgttgctgataaaat

SEQ ID NO: 829985 - DNA, 25 bp, Homo sapien
tgaaggccttgttgctgataaaata

SEQ ID NO: 829986 - DNA, 25 bp, Homo sapien
tgtaaatcctctgcccgtcatgtgc

SEQ ID NO: 829987 - DNA, 25 bp, Homo sapien
tgtttaaggaatatgctgtccagga

SEQ ID NO: 829988 - DNA, 25 bp, Homo sapien
tatgctgtccaggaagtaccacctc

SEQ ID NO: 829989 - DNA, 25 bp, Homo sapien
cacctcccaagatgtaaatcctctg

SEQ ID NO: 829990 - DNA, 25 bp, Homo sapien
cattcgtttcaaggttgtatgcatg

SEQ ID NO: 829991 - DNA, 25 bp, Homo sapien
cccaggcattcgtttcaaggttgta

SEQ ID NO: 829992 - DNA, 25 bp, Homo sapien
tcgtttcaaggttgtatgcatggat

SEQ ID NO: 829993 - DNA, 25 bp, Homo sapien
caggcattcgtttcaaggttgtatg

SEQ ID NO: 829994 - DNA, 25 bp, Homo sapien
agaagttccattacttacagaaaga

SEQ ID NO: 829995 - DNA, 25 bp, Homo sapien
cagaagttccattacttacagaaag

SEQ ID NO: 829996 - DNA, 25 bp, Homo sapien
acacaactgtgacaccttcgggctg

SEQ ID NO: 829997 - DNA, 25 bp, Homo sapien
ctgtgacaccttcgggctgcaggaa

SEQ ID NO: 829998 - DNA, 25 bp, Homo sapien
ttgaacacaactgtgacaccttcgg

SEQ ID NO: 829999 - DNA, 25 bp, Homo sapien
aactgtgacaccttcgggctgcagg

SEQ ID NO: 830000 - DNA, 25 bp, Homo sapien
ttttaatacacatatgagccaaaca

SEQ ID NO: 830001 - DNA, 25 bp, Homo sapien
gaggaacgttcacttcactgcaatg

SEQ ID NO: 830002 - DNA, 25 bp, Homo sapien
tatctgctcgcagagactaaagtct

SEQ ID NO: 830003 - DNA, 25 bp, Homo sapien
ctatgtagacatttaacctgaggag

SEQ ID NO: 830004 - DNA, 25 bp, Homo sapien
acagaaagtaaatgagcaagggggt

SEQ ID NO: 830005 - DNA, 25 bp, Homo sapien
cacagaaagtaaatgagcaaggggg

SEQ ID NO: 830006 - DNA, 25 bp, Homo sapien
agattccaggcacagaaagtaaatg

SEQ ID NO: 830007 - DNA, 25 bp, Homo sapien
tacagattccaggcacagaaagtaa

SEQ ID NO: 830008 - DNA, 25 bp, Homo sapien
gctgggagcttcacccattggaaag

SEQ ID NO: 830009 - DNA, 25 bp, Homo sapien
tgcagattcaacttccagatatctc

SEQ ID NO: 830010 - DNA, 25 bp, Homo sapien
tcacccattggaaagtctgcagatt

SEQ ID NO: 830011 - DNA, 25 bp, Homo sapien
aggatcacctctccattatagcccc

SEQ ID NO: 830012 - DNA, 25 bp, Homo sapien
tggtgtaacagctgcacagtgaaaa

SEQ ID NO: 830013 - DNA, 25 bp, Homo sapien
gtgtaacagctgcacagtgaaaata

SEQ ID NO: 830014 - DNA, 25 bp, Homo sapien
gctgcacagtgaaaataaactggct

SEQ ID NO: 830015 - DNA, 25 bp, Homo sapien
gtaacagctgcacagtgaaaataaa

SEQ ID NO: 830016 - DNA, 25 bp, Homo sapien
catttcaagcgttcgatgagtccct

SEQ ID NO: 830017 - DNA, 25 bp, Homo sapien
gatcttaaacaatgacccagtccgt

SEQ ID NO: 830018 - DNA, 25 bp, Homo sapien
taggtaccaccagccagatcttaaa

SEQ ID NO: 830019 - DNA, 25 bp, Homo sapien
tttgcaaggttagggaaggccgcaa

SEQ ID NO: 830020 - DNA, 25 bp, Homo sapien
tctacactgcccataaataaaggag

SEQ ID NO: 830021 - DNA, 25 bp, Homo sapien
tgatcagggtaaccaatcctctttg

SEQ ID NO: 830022 - DNA, 25 bp, Homo sapien
tttccagtatcaatgaacagtccag

SEQ ID NO: 830023 - DNA, 25 bp, Homo sapien
taactccatcgagaaggaagaggga

SEQ ID NO: 830024 - DNA, 25 bp, Homo sapien
agatggacttccttgttctccggca

SEQ ID NO: 830025 - DNA, 25 bp, Homo sapien
taatgagctcacttccccaagatgc

SEQ ID NO: 830026 - DNA, 25 bp, Homo sapien
aaaggacccacgttcacaggtgcgt

SEQ ID NO: 830027 - DNA, 25 bp, Homo sapien
tagtaagacggctgggagtacctca

SEQ ID NO: 830028 - DNA, 25 bp, Homo sapien
gaatggagcttatgatcagaggacc

SEQ ID NO: 830029 - DNA, 25 bp, Homo sapien
tagaactctatgaagcctacctcag

SEQ ID NO: 830030 - DNA, 25 bp, Homo sapien
cacagtcttagaggatcattcaacc

SEQ ID NO: 830031 - DNA, 25 bp, Homo sapien
gtggcaacgcacacggaagtcctag

SEQ ID NO: 830032 - DNA, 25 bp, Homo sapien
tcgtaacaccggactagagaagagg

SEQ ID NO: 830033 - DNA, 25 bp, Homo sapien
agaagaggtcgcttttggctgaatc

SEQ ID NO: 830034 - DNA, 25 bp, Homo sapien
tagcacaactcagaacttctgttcg

SEQ ID NO: 830035 - DNA, 25 bp, Homo sapien
ggtcgcttttggctgaatctaatga

SEQ ID NO: 830036 - DNA, 25 bp, Homo sapien
caacaattactaccgcttggtgaaa

SEQ ID NO: 830037 - DNA, 25 bp, Homo sapien
ctgtgcacaaggaagtggctttaga

SEQ ID NO: 830038 - DNA, 25 bp, Homo sapien
gtgttttctgatgcctcctttatat

SEQ ID NO: 830039 - DNA, 25 bp, Homo sapien
tgtacactgactaagcagggccctt

SEQ ID NO: 830040 - DNA, 25 bp, Homo sapien
atgcctgtgctctccctgtgcagac

SEQ ID NO: 830041 - DNA, 25 bp, Homo sapien
tgcctgtgctctccctgtgcagact

SEQ ID NO: 830042 - DNA, 25 bp, Homo sapien
tgcttttccagggagatgcctgtgc

SEQ ID NO: 830043 - DNA, 25 bp, Homo sapien
caggtgcttttccagggagatgcct

SEQ ID NO: 830044 - DNA, 25 bp, Homo sapien
ctctcagagactgtgtctcagaaag

SEQ ID NO: 830045 - DNA, 25 bp, Homo sapien
tctcagagactgtgtctcagaaaga

SEQ ID NO: 830046 - DNA, 25 bp, Homo sapien
gaaagaggcttcctttcttgcctag

SEQ ID NO: 830047 - DNA, 25 bp, Homo sapien
taggttcttccatgaaattcgtcat

SEQ ID NO: 830048 - DNA, 25 bp, Homo sapien
gtaaggcgagcattgtgtatggccc

SEQ ID NO: 830049 - DNA, 25 bp, Homo sapien
tatggcccaagcataccctgtagga

SEQ ID NO: 830050 - DNA, 25 bp, Homo sapien
cctgtaggaagagcaaagctaggct

SEQ ID NO: 830051 - DNA, 25 bp, Homo sapien
caggactgtggcaaaatagctttaa

SEQ ID NO: 830052 - DNA, 25 bp, Homo sapien
gcacaccagactgcaaaaggacgtc

SEQ ID NO: 830053 - DNA, 25 bp, Homo sapien
accagactgcaaaaggacgtccaca

SEQ ID NO: 830054 - DNA, 25 bp, Homo sapien
caccagactgcaaaaggacgtccac

SEQ ID NO: 830055 - DNA, 25 bp, Homo sapien
cacaccagactgcaaaaggacgtcc

SEQ ID NO: 830056 - DNA, 25 bp, Homo sapien
gcaaaacactgacaaggtacataaa

SEQ ID NO: 830057 - DNA, 25 bp, Homo sapien
gaaaagctgtcctgatcatatggca

SEQ ID NO: 830058 - DNA, 25 bp, Homo sapien
gacattttagggtaaattcactgta

SEQ ID NO: 830059 - DNA, 25 bp, Homo sapien
cttgcttgtaggaaaccgagtaaag

SEQ ID NO: 830060 - DNA, 25 bp, Homo sapien
tgtgtactcggtctgccactgagtt

SEQ ID NO: 830061 - DNA, 25 bp, Homo sapien
ctcggtctgccactgagttctaatg

SEQ ID NO: 830062 - DNA, 25 bp, Homo sapien
actgagttctaatgggcaaggattg

SEQ ID NO: 830063 - DNA, 25 bp, Homo sapien
ctgagttctaatgggcaaggattgg

SEQ ID NO: 830064 - DNA, 25 bp, Homo sapien
gctgagctcccctgctgagctgtct

SEQ ID NO: 830065 - DNA, 25 bp, Homo sapien
ctgctgagctcccctgctgagctgt

SEQ ID NO: 830066 - DNA, 25 bp, Homo sapien
tgctgagctcccctgctgagctgtc

SEQ ID NO: 830067 - DNA, 25 bp, Homo sapien
gtttctacgccacacagctcctatt

SEQ ID NO: 830068 - DNA, 25 bp, Homo sapien
acagctcctattccccctccatggg

SEQ ID NO: 830069 - DNA, 25 bp, Homo sapien
tttccttgtttctacgccacacagc

SEQ ID NO: 830070 - DNA, 25 bp, Homo sapien
ttgtttctacgccacacagctccta

SEQ ID NO: 830071 - DNA, 25 bp, Homo sapien
tggtcacactttctagctccccgtg

SEQ ID NO: 830072 - DNA, 25 bp, Homo sapien
aacactctggtcacactttctagct

SEQ ID NO: 830073 - DNA, 25 bp, Homo sapien
tgccccgaacactctggtcacactt

SEQ ID NO: 830074 - DNA, 25 bp, Homo sapien
ccgaacactctggtcacactttcta

SEQ ID NO: 830075 - DNA, 25 bp, Homo sapien
cagggagggagccaacccgctccaa

SEQ ID NO: 830076 - DNA, 25 bp, Homo sapien
cagatcattccggttcagagcggct

SEQ ID NO: 830077 - DNA, 25 bp, Homo sapien
agcctctccgacaaggcgcgctggg

SEQ ID NO: 830078 - DNA, 25 bp, Homo sapien
cctcctgccagtgctggcgcagcgg

SEQ ID NO: 830079 - DNA, 25 bp, Homo sapien
ggactgcggcaaaaaccagcccgtc

SEQ ID NO: 830080 - DNA, 25 bp, Homo sapien
tcagggactgcggcaaaaaccagcc

SEQ ID NO: 830081 - DNA, 25 bp, Homo sapien
tggtcagggactgcggcaaaaacca

SEQ ID NO: 830082 - DNA, 25 bp, Homo sapien
ttggtcagggactgcggcaaaaacc

SEQ ID NO: 830083 - DNA, 25 bp, Homo sapien
cccggagagccacagcgcctatccc

SEQ ID NO: 830084 - DNA, 25 bp, Homo sapien
ccccgcatatcccggagagccacag

SEQ ID NO: 830085 - DNA, 25 bp, Homo sapien
ccgcatatcccggagagccacagcg

SEQ ID NO: 830086 - DNA, 25 bp, Homo sapien
gagccacagcgcctatcccctgggt

SEQ ID NO: 830087 - DNA, 25 bp, Homo sapien
catccccccacttctgaacgcaccc

SEQ ID NO: 830088 - DNA, 25 bp, Homo sapien
cttctgaacgcaccccaccgtgtgc

SEQ ID NO: 830089 - DNA, 25 bp, Homo sapien
cccacttctgaacgcaccccaccgt

SEQ ID NO: 830090 - DNA, 25 bp, Homo sapien
ctgaacgcaccccaccgtgtgcatg

SEQ ID NO: 830091 - DNA, 25 bp, Homo sapien
agagctctggcacctctgttttctg

SEQ ID NO: 830092 - DNA, 25 bp, Homo sapien
tgagagctctggcacctctgttttc

SEQ ID NO: 830093 - DNA, 25 bp, Homo sapien
aggaccagagaggtgtggatttcgg

SEQ ID NO: 830094 - DNA, 25 bp, Homo sapien
cagagaggtgtggatttcggaatct

SEQ ID NO: 830095 - DNA, 25 bp, Homo sapien
caacagtggcctgtttcaggtgaca

SEQ ID NO: 830096 - DNA, 25 bp, Homo sapien
tgtctttgggcccaggtcccacttc

SEQ ID NO: 830097 - DNA, 25 bp, Homo sapien
ctgcaggcggacaacagtggcctgt

SEQ ID NO: 830098 - DNA, 25 bp, Homo sapien
tttcaggtgacacctgtctttgggc

SEQ ID NO: 830099 - DNA, 25 bp, Homo sapien
tttccagcagtcacactcccacgca

SEQ ID NO: 830100 - DNA, 25 bp, Homo sapien
agcagtcacactcccacgcaggggt

SEQ ID NO: 830101 - DNA, 25 bp, Homo sapien
agtcacactcccacgcaggggtcag

SEQ ID NO: 830102 - DNA, 25 bp, Homo sapien
ccagcagtcacactcccacgcaggg

SEQ ID NO: 830103 - DNA, 25 bp, Homo sapien
cagctggagagtgccgtagtgacat

SEQ ID NO: 830104 - DNA, 25 bp, Homo sapien
gaaagacccagagtatggcagggct

SEQ ID NO: 830105 - DNA, 25 bp, Homo sapien
caggagtgactctgctgtcccatca

SEQ ID NO: 830106 - DNA, 25 bp, Homo sapien
gtctcttcaccttgctccagaggaa

SEQ ID NO: 830107 - DNA, 25 bp, Homo sapien
caggtttccacaggcgtccctgctg

SEQ ID NO: 830108 - DNA, 25 bp, Homo sapien
aaaccaaggtcagaaggcacctcca

SEQ ID NO: 830109 - DNA, 25 bp, Homo sapien
gtttccacaggcgtccctgctgctg

SEQ ID NO: 830110 - DNA, 25 bp, Homo sapien
ctggcccagacaaaccaaggtcaga

SEQ ID NO: 830111 - DNA, 25 bp, Homo sapien
caagcacctgagggcccacgtgagg

SEQ ID NO: 830112 - DNA, 25 bp, Homo sapien
aagcacctgagggcccacgtgagga

SEQ ID NO: 830113 - DNA, 25 bp, Homo sapien
gcttcaccaggagtgtgttatgcca

SEQ ID NO: 830114 - DNA, 25 bp, Homo sapien
gaaggactcttaaagcctggctggg

SEQ ID NO: 830115 - DNA, 25 bp, Homo sapien
tgtgctaggctctaaagaatacaga

SEQ ID NO: 830116 - DNA, 25 bp, Homo sapien
tccattccaatggagaaagtctggc

SEQ ID NO: 830117 - DNA, 25 bp, Homo sapien
ctggttacacacagcgaggaacagg

SEQ ID NO: 830118 - DNA, 25 bp, Homo sapien
tggttacacacagcgaggaacagga

SEQ ID NO: 830119 - DNA, 25 bp, Homo sapien
acaggagcatggagcccccggtgca

SEQ ID NO: 830120 - DNA, 25 bp, Homo sapien
ttacacacagcgaggaacaggaagc

SEQ ID NO: 830121 - DNA, 25 bp, Homo sapien
ttaatggcagtttttcgccaaaagc

SEQ ID NO: 830122 - DNA, 25 bp, Homo sapien
tcagctctgtaaatcttaatggcag

SEQ ID NO: 830123 - DNA, 25 bp, Homo sapien
tcaatggatggactttgaaacctgt

SEQ ID NO: 830124 - DNA, 25 bp, Homo sapien
gaaggtgactccctttgcaagtggg

SEQ ID NO: 830125 - DNA, 25 bp, Homo sapien
cactgcgtaaattactctgaagatt

SEQ ID NO: 830126 - DNA, 25 bp, Homo sapien
gaaactcactgcgtaaattactctg

SEQ ID NO: 830127 - DNA, 25 bp, Homo sapien
atcttttgaaactcactgcgtaaat

SEQ ID NO: 830128 - DNA, 25 bp, Homo sapien
ttttatgaaattacctctgaaatgc

SEQ ID NO: 830129 - DNA, 25 bp, Homo sapien
tgagggagaatctgccacgcttctc

SEQ ID NO: 830130 - DNA, 25 bp, Homo sapien
ccttctcatagggataccagtcgta

SEQ ID NO: 830131 - DNA, 25 bp, Homo sapien
cagtcgtactagattaaggcccatt

SEQ ID NO: 830132 - DNA, 25 bp, Homo sapien
tatagacagacgtgtcagccagatc

SEQ ID NO: 830133 - DNA, 25 bp, Homo sapien
cagaaaccattacaagaatcttctg

SEQ ID NO: 830134 - DNA, 25 bp, Homo sapien
cctgtgaagtgcacggtcctacaga

SEQ ID NO: 830135 - DNA, 25 bp, Homo sapien
aagtgcacggtcctacagaaaccat

SEQ ID NO: 830136 - DNA, 25 bp, Homo sapien
taactgaagcctgtgaagtgcacgg

SEQ ID NO: 830137 - DNA, 25 bp, Homo sapien
tgcctgcgtgcgtggcaaacgtgcc

SEQ ID NO: 830138 - DNA, 25 bp, Homo sapien
gtctccaaaggcgaaaacgggctga

SEQ ID NO: 830139 - DNA, 25 bp, Homo sapien
aagagatcaaaaatccccggctctg

SEQ ID NO: 830140 - DNA, 25 bp, Homo sapien
gcatccgtgttctccgtctgcaaaa

SEQ ID NO: 830141 - DNA, 25 bp, Homo sapien
atcagttcccttgaaacctcttact

SEQ ID NO: 830142 - DNA, 25 bp, Homo sapien
ccaagcgcttccttaagtggttcat

SEQ ID NO: 830143 - DNA, 25 bp, Homo sapien
ttgaaacctcttactctcaccaagc

SEQ ID NO: 830144 - DNA, 25 bp, Homo sapien
tcactgctgcggatggaggactcat

SEQ ID NO: 830145 - DNA, 25 bp, Homo sapien
caaaggacaccttttgatccctcca

SEQ ID NO: 830146 - DNA, 25 bp, Homo sapien
cactggctttccttttgtggctaga

SEQ ID NO: 830147 - DNA, 25 bp, Homo sapien
caagtatacttgtcaatggctaaaa

SEQ ID NO: 830148 - DNA, 25 bp, Homo sapien
ttgatccctccaagcacactggctt

SEQ ID NO: 830149 - DNA, 25 bp, Homo sapien
gcatcccgttttgtcattccctcag

SEQ ID NO: 830150 - DNA, 25 bp, Homo sapien
gtatcagtgttagatgtgcatcccg

SEQ ID NO: 830151 - DNA, 25 bp, Homo sapien
taatgtttccccagcattctgcaag

SEQ ID NO: 830152 - DNA, 25 bp, Homo sapien
ttctgcaagttaggccaaagcccac

SEQ ID NO: 830153 - DNA, 25 bp, Homo sapien
aataacacagcagtgtataaactag

SEQ ID NO: 830154 - DNA, 25 bp, Homo sapien
gcatactcagtagataagtatttaa

SEQ ID NO: 830155 - DNA, 25 bp, Homo sapien
ttgcccaggctgtgatctacctgcc

SEQ ID NO: 830156 - DNA, 25 bp, Homo sapien
tattgaggcatctaaactaacaggg

SEQ ID NO: 830157 - DNA, 25 bp, Homo sapien
gtaaaatttatcctaacaatgcaag

SEQ ID NO: 830158 - DNA, 25 bp, Homo sapien
gcaattctaatcagtcccagtctac

SEQ ID NO: 830159 - DNA, 25 bp, Homo sapien
actttggttaagtggctggatacac

SEQ ID NO: 830160 - DNA, 25 bp, Homo sapien
catgctaatgtataaggtgtatgca

SEQ ID NO: 830161 - DNA, 25 bp, Homo sapien
ggtgagccgccctacttaatcagtt

SEQ ID NO: 830162 - DNA, 25 bp, Homo sapien
tggtgtctggccactttatcacgcc

SEQ ID NO: 830163 - DNA, 25 bp, Homo sapien
tttttactgcgggttcagagcctgg

SEQ ID NO: 830164 - DNA, 25 bp, Homo sapien
gagtccataaatgccctagggaagc

SEQ ID NO: 830165 - DNA, 25 bp, Homo sapien
aacaaattttgggtgtgcttgttat

SEQ ID NO: 830166 - DNA, 25 bp, Homo sapien
aaaaatacatacgaaaatgtgttat

SEQ ID NO: 830167 - DNA, 25 bp, Homo sapien
ttttgggtgtgcttgttattgctgc

SEQ ID NO: 830168 - DNA, 25 bp, Homo sapien
caaattttgggtgtgcttgttattg

SEQ ID NO: 830169 - DNA, 25 bp, Homo sapien
aaccatgcttaaagggataaagatg

SEQ ID NO: 830170 - DNA, 25 bp, Homo sapien
catgcttaaagggataaagatgact

SEQ ID NO: 830171 - DNA, 25 bp, Homo sapien
ctccttgctcagaaaataaaccatg

SEQ ID NO: 830172 - DNA, 25 bp, Homo sapien
gatgactccttgctcagaaaataaa

SEQ ID NO: 830173 - DNA, 25 bp, Homo sapien
ccagcattcataatcctgatttgga

SEQ ID NO: 830174 - DNA, 25 bp, Homo sapien
gaagaacatcaggacaaatacgata

SEQ ID NO: 830175 - DNA, 25 bp, Homo sapien
cacaagagtcatccttccagcattc

SEQ ID NO: 830176 - DNA, 25 bp, Homo sapien
aagctccctatggttccacaagagt

SEQ ID NO: 830177 - DNA, 25 bp, Homo sapien
actgaagtacttgtcccactgcctt

SEQ ID NO: 830178 - DNA, 25 bp, Homo sapien
ggcagtgcctttcgctcatttggta

SEQ ID NO: 830179 - DNA, 25 bp, Homo sapien
taggcattgaccaaagccacttctg

SEQ ID NO: 830180 - DNA, 25 bp, Homo sapien
ggctcgtctttgttcaggataggca

SEQ ID NO: 830181 - DNA, 25 bp, Homo sapien
tcattgaactgagactggcgcctgg

SEQ ID NO: 830182 - DNA, 25 bp, Homo sapien
tgaaggcttctgtcgggaatggtgc

SEQ ID NO: 830183 - DNA, 25 bp, Homo sapien
aaggcttctgtcgggaatggtgcgc

SEQ ID NO: 830184 - DNA, 25 bp, Homo sapien
gcttctgtcgggaatggtgcgccaa

SEQ ID NO: 830185 - DNA, 25 bp, Homo sapien
ggcttctgtcgggaatggtgcgcca

SEQ ID NO: 830186 - DNA, 25 bp, Homo sapien
tatggaactttcctcttgactgtct

SEQ ID NO: 830187 - DNA, 25 bp, Homo sapien
ttcttgttaatgtcagatatggaac

SEQ ID NO: 830188 - DNA, 25 bp, Homo sapien
tgtctcttttcattggcggtgttac

SEQ ID NO: 830189 - DNA, 25 bp, Homo sapien
tcttgactgtctcttttcattggcg

SEQ ID NO: 830190 - DNA, 25 bp, Homo sapien
aaagtctcctcacctatagctctgg

SEQ ID NO: 830191 - DNA, 25 bp, Homo sapien
ccaatggtgccataaacacgtgatg

SEQ ID NO: 830192 - DNA, 25 bp, Homo sapien
cccctagctgacatgtgtggcaata

SEQ ID NO: 830193 - DNA, 25 bp, Homo sapien
catgcactttgtggatgacaaccgt

SEQ ID NO: 830194 - DNA, 25 bp, Homo sapien
gtttttcaggattatagagtgggcc

SEQ ID NO: 830195 - DNA, 25 bp, Homo sapien
caggatctagtgactttgggttaca

SEQ ID NO: 830196 - DNA, 25 bp, Homo sapien
gacttcttgttaactctgtgaggac

SEQ ID NO: 830197 - DNA, 25 bp, Homo sapien
ggtttaatcataggtctgccaaatg

SEQ ID NO: 830198 - DNA, 25 bp, Homo sapien
tccccatgcggtctgaacccagatc

SEQ ID NO: 830199 - DNA, 25 bp, Homo sapien
tggccatcaacctcactgttttagt

SEQ ID NO: 830200 - DNA, 25 bp, Homo sapien
cactgttttagttcctactgtccct

SEQ ID NO: 830201 - DNA, 25 bp, Homo sapien
tttcctccactcaaacccttggcca

SEQ ID NO: 830202 - DNA, 25 bp, Homo sapien
gcttggtgtagagcccacaccagac

SEQ ID NO: 830203 - DNA, 25 bp, Homo sapien
cgtagttgctatcaggttttcttga

SEQ ID NO: 830204 - DNA, 25 bp, Homo sapien
cactggggaagagtcgtagttgcta

SEQ ID NO: 830205 - DNA, 25 bp, Homo sapien
tcttgatggtgttcagcttggtgta

SEQ ID NO: 830206 - DNA, 25 bp, Homo sapien
tcacactgtgtcaacattcatgaga

SEQ ID NO: 830207 - DNA, 25 bp, Homo sapien
ctgtgtcaacattcatgagaactgg

SEQ ID NO: 830208 - DNA, 25 bp, Homo sapien
tgtgtcaacattcatgagaactgga

SEQ ID NO: 830209 - DNA, 25 bp, Homo sapien
cactgtgtcaacattcatgagaact

SEQ ID NO: 830210 - DNA, 25 bp, Homo sapien
taaaagatgcatatctttatgatga

SEQ ID NO: 830211 - DNA, 25 bp, Homo sapien
tatctttatgatgagggtttcctga

SEQ ID NO: 830212 - DNA, 25 bp, Homo sapien
gatgcatatctttatgatgagggtt

SEQ ID NO: 830213 - DNA, 25 bp, Homo sapien
catatctttatgatgagggtttcct

SEQ ID NO: 830214 - DNA, 25 bp, Homo sapien
tgatagccttggcacgtgcatcttc

SEQ ID NO: 830215 - DNA, 25 bp, Homo sapien
gcttcttggaaaagcacgtgttcct

SEQ ID NO: 830216 - DNA, 25 bp, Homo sapien
gaaaagcacgtgttcctcaggaaca

SEQ ID NO: 830217 - DNA, 25 bp, Homo sapien
gccttggcacgtgcatcttctttag

SEQ ID NO: 830218 - DNA, 25 bp, Homo sapien
caagtcgattgagctcgcagctgat

SEQ ID NO: 830219 - DNA, 25 bp, Homo sapien
cgattgagctcgcagctgatgccct

SEQ ID NO: 830220 - DNA, 25 bp, Homo sapien
agtcgattgagctcgcagctgatgc

SEQ ID NO: 830221 - DNA, 25 bp, Homo sapien
gtcgattgagctcgcagctgatgcc

SEQ ID NO: 830222 - DNA, 25 bp, Homo sapien
tgttaaaggagggataggtagccac

SEQ ID NO: 830223 - DNA, 25 bp, Homo sapien
tctaagcagggagccaaatatgagc

SEQ ID NO: 830224 - DNA, 25 bp, Homo sapien
tacatctggacttgtggatggcaga

SEQ ID NO: 830225 - DNA, 25 bp, Homo sapien
cagtggaagaaacacaagcctgtgg

SEQ ID NO: 830226 - DNA, 25 bp, Homo sapien
gatctcacaatccaaacagaggagt

SEQ ID NO: 830227 - DNA, 25 bp, Homo sapien
tctcacaatccaaacagaggagtac

SEQ ID NO: 830228 - DNA, 25 bp, Homo sapien
acaatccaaacagaggagtacacac

SEQ ID NO: 830229 - DNA, 25 bp, Homo sapien
aaggatctcacaatccaaacagagg

SEQ ID NO: 830230 - DNA, 25 bp, Homo sapien
aaaattgctagagcataccaagggc

SEQ ID NO: 830231 - DNA, 25 bp, Homo sapien
tatgattgagaccataaaacgccac

SEQ ID NO: 830232 - DNA, 25 bp, Homo sapien
cactagctaccctgtgatagaagcc

SEQ ID NO: 830233 - DNA, 25 bp, Homo sapien
taccaagggcaatatagttatgatt

SEQ ID NO: 830234 - DNA, 25 bp, Homo sapien
gatatcaccaatgtgtacatgttcc

SEQ ID NO: 830235 - DNA, 25 bp, Homo sapien
catgggaaaattcccacctgcatgt

SEQ ID NO: 830236 - DNA, 25 bp, Homo sapien
ttctcaaggttgtagacatccacct

SEQ ID NO: 830237 - DNA, 25 bp, Homo sapien
cacctgcatgtgaaattctcaaggt

SEQ ID NO: 830238 - DNA, 25 bp, Homo sapien
atctgctggccttctgagaactcac

SEQ ID NO: 830239 - DNA, 25 bp, Homo sapien
gggttttcctggagtccagaattca

SEQ ID NO: 830240 - DNA, 25 bp, Homo sapien
tccagaattcagagtccttcctgaa

SEQ ID NO: 830241 - DNA, 25 bp, Homo sapien
tcctgaactttatttgtagggatgg

SEQ ID NO: 830242 - DNA, 25 bp, Homo sapien
gatatgcccaaaaagggcaccaaaa

SEQ ID NO: 830243 - DNA, 25 bp, Homo sapien
ccacaaatgtttctagacagtagat

SEQ ID NO: 830244 - DNA, 25 bp, Homo sapien
gtttctagacagtagatatgcccaa

SEQ ID NO: 830245 - DNA, 25 bp, Homo sapien
gacagtagatatgcccaaaaagggc

SEQ ID NO: 830246 - DNA, 25 bp, Homo sapien
cacccgctgagttgcctggaacaaa

SEQ ID NO: 830247 - DNA, 25 bp, Homo sapien
gtgggagagtagcattgacacccgc

SEQ ID NO: 830248 - DNA, 25 bp, Homo sapien
ctggaacaaatggccacacagctgt

SEQ ID NO: 830249 - DNA, 25 bp, Homo sapien
gctgtattttccctgatgtctatca

SEQ ID NO: 830250 - DNA, 25 bp, Homo sapien
acacacacccccttaatagggaatg

SEQ ID NO: 830251 - DNA, 25 bp, Homo sapien
gaagagttcccttggtgacagagtt

SEQ ID NO: 830252 - DNA, 25 bp, Homo sapien
ccttctagcctttctccacgtaggc

SEQ ID NO: 830253 - DNA, 25 bp, Homo sapien
cacacccccttaatagggaatgaag

SEQ ID NO: 830254 - DNA, 25 bp, Homo sapien
aatgagtcaaataaaacctgctgct

SEQ ID NO: 830255 - DNA, 25 bp, Homo sapien
tcaaataaaacctgctgcttgtgga

SEQ ID NO: 830256 - DNA, 25 bp, Homo sapien
tgagtcaaataaaacctgctgcttg

SEQ ID NO: 830257 - DNA, 25 bp, Homo sapien
ttcccatagctaatgagtcaaataa

SEQ ID NO: 830258 - DNA, 25 bp, Homo sapien
tcctagcaggaagcctgccattaaa

SEQ ID NO: 830259 - DNA, 25 bp, Homo sapien
aaggtgatagaatggcgttatttcc

SEQ ID NO: 830260 - DNA, 25 bp, Homo sapien
ctaaataataatgaataggtgtacc

SEQ ID NO: 830261 - DNA, 25 bp, Homo sapien
aataatgaataggtgtacctgctcc

SEQ ID NO: 830262 - DNA, 25 bp, Homo sapien
tggtacaatctcaagaacttggtct

SEQ ID NO: 830263 - DNA, 25 bp, Homo sapien
gcttggtacaatctcaagaacttgg

SEQ ID NO: 830264 - DNA, 25 bp, Homo sapien
ttcttcattgcttggtacaatctca

SEQ ID NO: 830265 - DNA, 25 bp, Homo sapien
cattgcttggtacaatctcaagaac

SEQ ID NO: 830266 - DNA, 25 bp, Homo sapien
tcttcaatcatgatggaataggcaa

SEQ ID NO: 830267 - DNA, 25 bp, Homo sapien
gaataggcaattccctgggactcca

SEQ ID NO: 830268 - DNA, 25 bp, Homo sapien
cctggacgttgacgaagggaactcg

SEQ ID NO: 830269 - DNA, 25 bp, Homo sapien
ggaactcggacgtgggctgtctccc

SEQ ID NO: 830270 - DNA, 25 bp, Homo sapien
tcttccagggtatggtaggccccaa

SEQ ID NO: 830271 - DNA, 25 bp, Homo sapien
cactccgttctcttctcctattaaa

SEQ ID NO: 830272 - DNA, 25 bp, Homo sapien
aattgaagttaccactccgttctct

SEQ ID NO: 830273 - DNA, 25 bp, Homo sapien
cttcattctctttgtccaacaggac

SEQ ID NO: 830274 - DNA, 25 bp, Homo sapien
tgttgagatgggcaagtggacttca

SEQ ID NO: 830275 - DNA, 25 bp, Homo sapien
tgggtggctgttgagatgggcaagt

SEQ ID NO: 830276 - DNA, 25 bp, Homo sapien
tggctgttgagatgggcaagtggac

SEQ ID NO: 830277 - DNA, 25 bp, Homo sapien
cagtgggtggctgttgagatgggca

SEQ ID NO: 830278 - DNA, 25 bp, Homo sapien
agcctgagggagctgcttgtgggta

SEQ ID NO: 830279 - DNA, 25 bp, Homo sapien
cagcctgagggagctgcttgtgggt

SEQ ID NO: 830280 - DNA, 25 bp, Homo sapien
gcctgagggagctgcttgtgggtac

SEQ ID NO: 830281 - DNA, 25 bp, Homo sapien
cgattgcatcgtcagtggcagccat

SEQ ID NO: 830282 - DNA, 25 bp, Homo sapien
gccccgattgcatcgtcagtggcag

SEQ ID NO: 830283 - DNA, 25 bp, Homo sapien
ctgtgccccgattgcatcgtcagtg

SEQ ID NO: 830284 - DNA, 25 bp, Homo sapien
cccgattgcatcgtcagtggcagcc

SEQ ID NO: 830285 - DNA, 25 bp, Homo sapien
caggctactgcttcatttacgtagg

SEQ ID NO: 830286 - DNA, 25 bp, Homo sapien
tcacactgatcgcaggctactgctt

SEQ ID NO: 830287 - DNA, 25 bp, Homo sapien
atcagattggttgcaagccaagtct

SEQ ID NO: 830288 - DNA, 25 bp, Homo sapien
gcttcatttacgtagggtgtacacc

SEQ ID NO: 830289 - DNA, 25 bp, Homo sapien
ttccatccctcgactcttaagtcag

SEQ ID NO: 830290 - DNA, 25 bp, Homo sapien
gatagattcccgtgggcctggagaa

SEQ ID NO: 830291 - DNA, 25 bp, Homo sapien
tctggctctttcgtactccccatgc

SEQ ID NO: 830292 - DNA, 25 bp, Homo sapien
tcagtgcagatagattcccgtgggc

SEQ ID NO: 830293 - DNA, 25 bp, Homo sapien
ccaaaatggatgtagaggcgatcgc

SEQ ID NO: 830294 - DNA, 25 bp, Homo sapien
gaaattttgtgcatctggagaaccc

SEQ ID NO: 830295 - DNA, 25 bp, Homo sapien
gatcgctacaaaatgtctcccggct

SEQ ID NO: 830296 - DNA, 25 bp, Homo sapien
tattattacacacgggacattgctc

SEQ ID NO: 830297 - DNA, 25 bp, Homo sapien
cacacttccctgaggtacttgtggc

SEQ ID NO: 830298 - DNA, 25 bp, Homo sapien
cccagccggctctttgcagttttgt

SEQ ID NO: 830299 - DNA, 25 bp, Homo sapien
tggcttttggcgaccccagccctga

SEQ ID NO: 830300 - DNA, 25 bp, Homo sapien
gctgctgagtccgacggtgtctgca

SEQ ID NO: 830301 - DNA, 25 bp, Homo sapien
tagacatttgcgagtgaaccatctg

SEQ ID NO: 830302 - DNA, 25 bp, Homo sapien
tgcgagtgaaccatctgttgcatga

SEQ ID NO: 830303 - DNA, 25 bp, Homo sapien
tgttgcatgagatctgatcccctgg

SEQ ID NO: 830304 - DNA, 25 bp, Homo sapien
catgagatctgatcccctggtgatt

SEQ ID NO: 830305 - DNA, 25 bp, Homo sapien
cttgagcacgttcataggccggttc

SEQ ID NO: 830306 - DNA, 25 bp, Homo sapien
ccggttctcaaaagaagagccaata

SEQ ID NO: 830307 - DNA, 25 bp, Homo sapien
tttgctcactagaccagggtgctca

SEQ ID NO: 830308 - DNA, 25 bp, Homo sapien
gccacgaggttatccatttcttggg

SEQ ID NO: 830309 - DNA, 25 bp, Homo sapien
catccttctgcatacgaccagaact

SEQ ID NO: 830310 - DNA, 25 bp, Homo sapien
gtttagggtttagttgtccatcatc

SEQ ID NO: 830311 - DNA, 25 bp, Homo sapien
ccttctgcatacgaccagaactctt

SEQ ID NO: 830312 - DNA, 25 bp, Homo sapien
gtttagttgtccatcatccttctgc

SEQ ID NO: 830313 - DNA, 25 bp, Homo sapien
tttgctgtccaaagtgccgtagctt

SEQ ID NO: 830314 - DNA, 25 bp, Homo sapien
agccagatagctggcttgtctcctc

SEQ ID NO: 830315 - DNA, 25 bp, Homo sapien
caaagtgccgtagcttgtgtaaccc

SEQ ID NO: 830316 - DNA, 25 bp, Homo sapien
tgtgtaacccactctcgagcatgga

SEQ ID NO: 830317 - DNA, 25 bp, Homo sapien
agcaaggaatattaggcaaaatgac

SEQ ID NO: 830318 - DNA, 25 bp, Homo sapien
taagcaaggaatattaggcaaaatg

SEQ ID NO: 830319 - DNA, 25 bp, Homo sapien
aataagcaaggaatattaggcaaaa

SEQ ID NO: 830320 - DNA, 25 bp, Homo sapien
aaaataagcaaggaatattaggcaa

SEQ ID NO: 830321 - DNA, 25 bp, Homo sapien
tttggtttgagagaacacgtatcca

SEQ ID NO: 830322 - DNA, 25 bp, Homo sapien
gaacacgtatccatcagggtttgtg

SEQ ID NO: 830323 - DNA, 25 bp, Homo sapien
ccagaatggaagtgatggatgggtc

SEQ ID NO: 830324 - DNA, 25 bp, Homo sapien
tggcaggaggaagatatccagggca

SEQ ID NO: 830325 - DNA, 25 bp, Homo sapien
ctgcatcccagttccggttaggatc

SEQ ID NO: 830326 - DNA, 25 bp, Homo sapien
cagttccggttaggatccacaccaa

SEQ ID NO: 830327 - DNA, 25 bp, Homo sapien
aggatccacaccaacacagaggctt

SEQ ID NO: 830328 - DNA, 25 bp, Homo sapien
ggttaggatccacaccaacacagag

SEQ ID NO: 830329 - DNA, 25 bp, Homo sapien
cctgggggcaagtccctgcgctcac

SEQ ID NO: 830330 - DNA, 25 bp, Homo sapien
tccctgggggcaagtccctgcgctc

SEQ ID NO: 830331 - DNA, 25 bp, Homo sapien
atccctgggggcaagtccctgcgct

SEQ ID NO: 830332 - DNA, 25 bp, Homo sapien
catccctgggggcaagtccctgcgc

SEQ ID NO: 830333 - DNA, 25 bp, Homo sapien
agatgcagaagtagcccagtgagga

SEQ ID NO: 830334 - DNA, 25 bp, Homo sapien
gatgcagaagtagcccagtgaggac

SEQ ID NO: 830335 - DNA, 25 bp, Homo sapien
ggagatgcagaagtagcccagtgag

SEQ ID NO: 830336 - DNA, 25 bp, Homo sapien
ggggagatgcagaagtagcccagtg

SEQ ID NO: 830337 - DNA, 25 bp, Homo sapien
cactgggtccgtggtatgaatcaga

SEQ ID NO: 830338 - DNA, 25 bp, Homo sapien
gactcttgatgaagtccactatgga

SEQ ID NO: 830339 - DNA, 25 bp, Homo sapien
tgaatcagagcaagggttgctgctg

SEQ ID NO: 830340 - DNA, 25 bp, Homo sapien
tggagggtaatgaaggccttgactt

SEQ ID NO: 830341 - DNA, 25 bp, Homo sapien
gaggctgctgacaataatctacttg

SEQ ID NO: 830342 - DNA, 25 bp, Homo sapien
cagttgtgaacagcctcctgagatg

SEQ ID NO: 830343 - DNA, 25 bp, Homo sapien
caacacagaataggctcccctgaag

SEQ ID NO: 830344 - DNA, 25 bp, Homo sapien
tgacaaaaaggtcccaactctgggc

SEQ ID NO: 830345 - DNA, 25 bp, Homo sapien
gacagagcagattggtcccactttg

SEQ ID NO: 830346 - DNA, 25 bp, Homo sapien
atgacagagcagattggtcccactt

SEQ ID NO: 830347 - DNA, 25 bp, Homo sapien
ctttgtacttggtgccatgcaggct

SEQ ID NO: 830348 - DNA, 25 bp, Homo sapien
ccactttgtacttggtgccatgcag

SEQ ID NO: 830349 - DNA, 25 bp, Homo sapien
cttcaagagtcacacccattctgcc

SEQ ID NO: 830350 - DNA, 25 bp, Homo sapien
tctgcatcaacacatggctgcagca

SEQ ID NO: 830351 - DNA, 25 bp, Homo sapien
ttctgcccccgcagtccatggaatt

SEQ ID NO: 830352 - DNA, 25 bp, Homo sapien
tgcagcagagtctatccacggaacc

SEQ ID NO: 830353 - DNA, 25 bp, Homo sapien
gccatcatgtctcaagctaggtcca

SEQ ID NO: 830354 - DNA, 25 bp, Homo sapien
gggatacacaatgctattcggctga

SEQ ID NO: 830355 - DNA, 25 bp, Homo sapien
ttcacagtcgggctccaaaagatca

SEQ ID NO: 830356 - DNA, 25 bp, Homo sapien
gaatgaggccaggataagagtcagc

SEQ ID NO: 830357 - DNA, 25 bp, Homo sapien
cactacaaccatacagccatctctt

SEQ ID NO: 830358 - DNA, 25 bp, Homo sapien
ccactacaaccatacagccatctct

SEQ ID NO: 830359 - DNA, 25 bp, Homo sapien
actacaaccatacagccatctcttg

SEQ ID NO: 830360 - DNA, 25 bp, Homo sapien
atctgacgggctggcaagaggaagc

SEQ ID NO: 830361 - DNA, 25 bp, Homo sapien
gatgccataatcataggaccagtca

SEQ ID NO: 830362 - DNA, 25 bp, Homo sapien
cagttcaaaggcaaatgagtacttg

SEQ ID NO: 830363 - DNA, 25 bp, Homo sapien
tagcgccctgtgtctctcagttcaa

SEQ ID NO: 830364 - DNA, 25 bp, Homo sapien
tttaatggctcttgtttcttcccca

SEQ ID NO: 830365 - DNA, 25 bp, Homo sapien
gatgtcagctttgaagtcagcaaca

SEQ ID NO: 830366 - DNA, 25 bp, Homo sapien
gcgtcactgagatcgatgtcagctt

SEQ ID NO: 830367 - DNA, 25 bp, Homo sapien
acaaagcgtgggctcagcgtcactg

SEQ ID NO: 830368 - DNA, 25 bp, Homo sapien
tgtccaccacaaagcgtgggctcag

SEQ ID NO: 830369 - DNA, 25 bp, Homo sapien
ggtccttttgtcctctcaacacttc

SEQ ID NO: 830370 - DNA, 25 bp, Homo sapien
acacttcaactgaattcctacaccc

SEQ ID NO: 830371 - DNA, 25 bp, Homo sapien
gtccttttgtcctctcaacacttca

SEQ ID NO: 830372 - DNA, 25 bp, Homo sapien
ccttttgtcctctcaacacttcaac

SEQ ID NO: 830373 - DNA, 25 bp, Homo sapien
gtccccggggagtcagtcatacagt

SEQ ID NO: 830374 - DNA, 25 bp, Homo sapien
cccggggagtcagtcatacagtggc

SEQ ID NO: 830375 - DNA, 25 bp, Homo sapien
ccccggggagtcagtcatacagtgg

SEQ ID NO: 830376 - DNA, 25 bp, Homo sapien
tccccggggagtcagtcatacagtg

SEQ ID NO: 830377 - DNA, 25 bp, Homo sapien
aataagggccccaatgaacagtatc

SEQ ID NO: 830378 - DNA, 25 bp, Homo sapien
gggccccaatgaacagtatccacct

SEQ ID NO: 830379 - DNA, 25 bp, Homo sapien
tggacccaataagggccccaatgaa

SEQ ID NO: 830380 - DNA, 25 bp, Homo sapien
acagatgctggacccaataagggcc

SEQ ID NO: 830381 - DNA, 25 bp, Homo sapien
taattcagtcttctaacagggcacc

SEQ ID NO: 830382 - DNA, 25 bp, Homo sapien
caacaagcttgagacccagggtttc

SEQ ID NO: 830383 - DNA, 25 bp, Homo sapien
cagggtttccctttatgcatggcgg

SEQ ID NO: 830384 - DNA, 25 bp, Homo sapien
gctaagtggccttgagcgcgttcct

SEQ ID NO: 830385 - DNA, 25 bp, Homo sapien
cacacggcagcaagtctagtcacta

SEQ ID NO: 830386 - DNA, 25 bp, Homo sapien
cacattgcaagagaggtctgtatct

SEQ ID NO: 830387 - DNA, 25 bp, Homo sapien
tgcagtgggagcctgacagttccat

SEQ ID NO: 830388 - DNA, 25 bp, Homo sapien
ggtctgtatcttgcgaaatagagat

SEQ ID NO: 830389 - DNA, 25 bp, Homo sapien
gtgcaatgcgaagggcagccttttt

SEQ ID NO: 830390 - DNA, 25 bp, Homo sapien
gcggggtgcaatgcgaagggcagcc

SEQ ID NO: 830391 - DNA, 25 bp, Homo sapien
cattgcggggtgcaatgcgaagggc

SEQ ID NO: 830392 - DNA, 25 bp, Homo sapien
aggagggaggacattgcggggtgca

SEQ ID NO: 830393 - DNA, 25 bp, Homo sapien
tcctggaggtcagcgggtaactgca

SEQ ID NO: 830394 - DNA, 25 bp, Homo sapien
ctggaggtcagcgggtaactgcacc

SEQ ID NO: 830395 - DNA, 25 bp, Homo sapien
gaggtcagcgggtaactgcaccctg

SEQ ID NO: 830396 - DNA, 25 bp, Homo sapien
gtcagcgggtaactgcaccctgtgg

SEQ ID NO: 830397 - DNA, 25 bp, Homo sapien
ttgtcgtttgtcctgagcttgcttc

SEQ ID NO: 830398 - DNA, 25 bp, Homo sapien
gatttagcttctgcagcggcggcag

SEQ ID NO: 830399 - DNA, 25 bp, Homo sapien
agtctcagtcccctttgtcgtttgt

SEQ ID NO: 830400 - DNA, 25 bp, Homo sapien
tgctgaggctggatgtaggatccac

SEQ ID NO: 830401 - DNA, 25 bp, Homo sapien
tcaatttgctgatctcgtctccatt

SEQ ID NO: 830402 - DNA, 25 bp, Homo sapien
tgactcaatttgctgatctcgtctc

SEQ ID NO: 830403 - DNA, 25 bp, Homo sapien
gacattaatcctcaaaacttggtcc

SEQ ID NO: 830404 - DNA, 25 bp, Homo sapien
gctgatctcgtctccatttctgaca

SEQ ID NO: 830405 - DNA, 25 bp, Homo sapien
ggaaggatttaaatgcctgcagact

SEQ ID NO: 830406 - DNA, 25 bp, Homo sapien
cctcaattgtcactgcgtactctaa

SEQ ID NO: 830407 - DNA, 25 bp, Homo sapien
cactgcgtactctaagccctgggat

SEQ ID NO: 830408 - DNA, 25 bp, Homo sapien
catccacaggccgattgaaggagga

SEQ ID NO: 830409 - DNA, 25 bp, Homo sapien
tgaaatacacagcttgggaaaccat

SEQ ID NO: 830410 - DNA, 25 bp, Homo sapien
tcccaggccagatcaccaattagtc

SEQ ID NO: 830411 - DNA, 25 bp, Homo sapien
tgctaacgccatcaggaaactccca

SEQ ID NO: 830412 - DNA, 25 bp, Homo sapien
tatgaactctgtagacatcagcccg

SEQ ID NO: 830413 - DNA, 25 bp, Homo sapien
cattgtgttgcatttcatcatcttc

SEQ ID NO: 830414 - DNA, 25 bp, Homo sapien
tactgctccgttcttgcccttcatt

SEQ ID NO: 830415 - DNA, 25 bp, Homo sapien
cagggaatggtaagccccgtagttg

SEQ ID NO: 830416 - DNA, 25 bp, Homo sapien
gccccgtagttgaagttattactgc

SEQ ID NO: 830417 - DNA, 25 bp, Homo sapien
tggaaacgctgattatgagacctgc

SEQ ID NO: 830418 - DNA, 25 bp, Homo sapien
gggaccctaatcttggaattgacca

SEQ ID NO: 830419 - DNA, 25 bp, Homo sapien
gttgatcttaactatctcttccggg

SEQ ID NO: 830420 - DNA, 25 bp, Homo sapien
tgaccatattatcggcatggaaacg

SEQ ID NO: 830421 - DNA, 25 bp, Homo sapien
caaacgaatgtccaatcttcaccct

SEQ ID NO: 830422 - DNA, 25 bp, Homo sapien
cttcagtacatacatcggccggttt

SEQ ID NO: 830423 - DNA, 25 bp, Homo sapien
gtctgcggcaatgttgtccatctcg

SEQ ID NO: 830424 - DNA, 25 bp, Homo sapien
accctcctcgccaggtcaggaaagt

SEQ ID NO: 830425 - DNA, 25 bp, Homo sapien
ggcctgggagatccactctcgggaa

SEQ ID NO: 830426 - DNA, 25 bp, Homo sapien
ttgccgtccagattgcagtggcctg

SEQ ID NO: 830427 - DNA, 25 bp, Homo sapien
ctcgggaatggatgcctgcattcag

SEQ ID NO: 830428 - DNA, 25 bp, Homo sapien
cgcctcacgcctttcccagtgctga

SEQ ID NO: 830429 - DNA, 25 bp, Homo sapien
ggatccctctggtaatcagatacaa

SEQ ID NO: 830430 - DNA, 25 bp, Homo sapien
ttgagtttgagtatacacatatcca

SEQ ID NO: 830431 - DNA, 25 bp, Homo sapien
tctccaagatggaggtgatagctgg

SEQ ID NO: 830432 - DNA, 25 bp, Homo sapien
ggtgatagctggatccctctggtaa

SEQ ID NO: 830433 - DNA, 25 bp, Homo sapien
ctgcaaaactagcgttccagtttct

SEQ ID NO: 830434 - DNA, 25 bp, Homo sapien
tccaggatttcgggaccgcgtcttc

SEQ ID NO: 830435 - DNA, 25 bp, Homo sapien
gcaaaactagcgttccagtttctat

SEQ ID NO: 830436 - DNA, 25 bp, Homo sapien
accgcgtcttcctccataatcggtt

SEQ ID NO: 830437 - DNA, 25 bp, Homo sapien
gaacaaacattaactcatagtccaa

SEQ ID NO: 830438 - DNA, 25 bp, Homo sapien
tagcccaagaacaaacattaactca

SEQ ID NO: 830439 - DNA, 25 bp, Homo sapien
aaacattaactcatagtccaagaac

SEQ ID NO: 830440 - DNA, 25 bp, Homo sapien
caagaacaaacattaactcatagtc

SEQ ID NO: 830441 - DNA, 25 bp, Homo sapien
tccatggtacacttcggagcaaggg

SEQ ID NO: 830442 - DNA, 25 bp, Homo sapien
gagcaagggttgtcgctggctccct

SEQ ID NO: 830443 - DNA, 25 bp, Homo sapien
caggtcgatgaagcccttgaaattc

SEQ ID NO: 830444 - DNA, 25 bp, Homo sapien
catatggatacatcagcagctgcga

SEQ ID NO: 830445 - DNA, 25 bp, Homo sapien
ctcagtgcccgacacagaagccaga

SEQ ID NO: 830446 - DNA, 25 bp, Homo sapien
ggtactcagtgcccgacacagaagc

SEQ ID NO: 830447 - DNA, 25 bp, Homo sapien
ccagagctttggccgcaagcctcgc

SEQ ID NO: 830448 - DNA, 25 bp, Homo sapien
agagctttggccgcaagcctcgcca

SEQ ID NO: 830449 - DNA, 25 bp, Homo sapien
agacagtggtgcaggtgggacccac

SEQ ID NO: 830450 - DNA, 25 bp, Homo sapien
taactcataaataagcgagtactta

SEQ ID NO: 830451 - DNA, 25 bp, Homo sapien
aactcataaataagcgagtacttac

SEQ ID NO: 830452 - DNA, 25 bp, Homo sapien
aataactcataaataagcgagtact

SEQ ID NO: 830453 - DNA, 25 bp, Homo sapien
ataactcataaataagcgagtactt

SEQ ID NO: 830454 - DNA, 25 bp, Homo sapien
acaaaattggaggaaggcatatgtc

SEQ ID NO: 830455 - DNA, 25 bp, Homo sapien
tctgatgggtaacgcaccaacattg

SEQ ID NO: 830456 - DNA, 25 bp, Homo sapien
caaaattggaggaaggcatatgtca

SEQ ID NO: 830457 - DNA, 25 bp, Homo sapien
tgggtaacgcaccaacattgtaaca

SEQ ID NO: 830458 - DNA, 25 bp, Homo sapien
ctgtaagtcggaggacaaaacactc

SEQ ID NO: 830459 - DNA, 25 bp, Homo sapien
agtcggaggacaaaacactcttgaa

SEQ ID NO: 830460 - DNA, 25 bp, Homo sapien
taagtcggaggacaaaacactcttg

SEQ ID NO: 830461 - DNA, 25 bp, Homo sapien
tgtaagtcggaggacaaaacactct

SEQ ID NO: 830462 - DNA, 25 bp, Homo sapien
ggaggaagccataggtcccggtatc

SEQ ID NO: 830463 - DNA, 25 bp, Homo sapien
gtcgatgctgctcccgctagctgga

SEQ ID NO: 830464 - DNA, 25 bp, Homo sapien
aatttgatgccgttgtcatatgccc

SEQ ID NO: 830465 - DNA, 25 bp, Homo sapien
tagtagaggttgtcccgcacatgct

SEQ ID NO: 830466 - DNA, 25 bp, Homo sapien
gcagaaccagttcttgcagggacac

SEQ ID NO: 830467 - DNA, 25 bp, Homo sapien
cagtgcgtgcacgtgtgggtacaaa

SEQ ID NO: 830468 - DNA, 25 bp, Homo sapien
tttgagacccacctaaagacaagtg

SEQ ID NO: 830469 - DNA, 25 bp, Homo sapien
gatgctgtacaaatcctaggcagga

SEQ ID NO: 830470 - DNA, 25 bp, Homo sapien
tttattggcttataagcacacacca

SEQ ID NO: 830471 - DNA, 25 bp, Homo sapien
tgaatatttattggcttataagcac

SEQ ID NO: 830472 - DNA, 25 bp, Homo sapien
atatttattggcttataagcacaca

SEQ ID NO: 830473 - DNA, 25 bp, Homo sapien
cacattgaatatttattggcttata

SEQ ID NO: 830474 - DNA, 25 bp, Homo sapien
atctcacacacgcatgcgtgagcac

SEQ ID NO: 830475 - DNA, 25 bp, Homo sapien
gagcacccaattatcatacttatga

SEQ ID NO: 830476 - DNA, 25 bp, Homo sapien
gcatgcgtgagcacccaattatcat

SEQ ID NO: 830477 - DNA, 25 bp, Homo sapien
cacacgcatgcgtgagcacccaatt

SEQ ID NO: 830478 - DNA, 25 bp, Homo sapien
tcattttaagccaccaatgatgaga

SEQ ID NO: 830479 - DNA, 25 bp, Homo sapien
tatccctgtacttggcttaagggtg

SEQ ID NO: 830480 - DNA, 25 bp, Homo sapien
cccatggggcgtcttcttgttcaaa

SEQ ID NO: 830481 - DNA, 25 bp, Homo sapien
atgatgagacaactatccctgtact

SEQ ID NO: 830482 - DNA, 25 bp, Homo sapien
gcttcagggactctcaaacagtaac

SEQ ID NO: 830483 - DNA, 25 bp, Homo sapien
tatttcgtagttcagctgttcagac

SEQ ID NO: 830484 - DNA, 25 bp, Homo sapien
tcagcttcagtagcaatggagataa

SEQ ID NO: 830485 - DNA, 25 bp, Homo sapien
gactcttctagtatcctggcttcag

SEQ ID NO: 830486 - DNA, 25 bp, Homo sapien
tagagttctcaacagacagcagagt

SEQ ID NO: 830487 - DNA, 25 bp, Homo sapien
gaatccaaccaagtcgttcagcaga

SEQ ID NO: 830488 - DNA, 25 bp, Homo sapien
gaaggtcaccgcagtcattattaga

SEQ ID NO: 830489 - DNA, 25 bp, Homo sapien
gaagggagctcgtttatcgacagaa

SEQ ID NO: 830490 - DNA, 25 bp, Homo sapien
gacaacttgagtgaattggcttggt

SEQ ID NO: 830491 - DNA, 25 bp, Homo sapien
agacaacttgagtgaattggcttgg

SEQ ID NO: 830492 - DNA, 25 bp, Homo sapien
cttgagtgaattggcttggtaaagc

SEQ ID NO: 830493 - DNA, 25 bp, Homo sapien
caacttgagtgaattggcttggtaa

SEQ ID NO: 830494 - DNA, 25 bp, Homo sapien
cttgtgagcatcaaagcttccatct

SEQ ID NO: 830495 - DNA, 25 bp, Homo sapien
cagccccttgtgagcatcaaagctt

SEQ ID NO: 830496 - DNA, 25 bp, Homo sapien
ccccttgtgagcatcaaagcttcca

SEQ ID NO: 830497 - DNA, 25 bp, Homo sapien
gccccttgtgagcatcaaagcttcc

SEQ ID NO: 830498 - DNA, 25 bp, Homo sapien
caggggctttccttgggcaccatgg

SEQ ID NO: 830499 - DNA, 25 bp, Homo sapien
gcttcaggggctttccttgggcacc

SEQ ID NO: 830500 - DNA, 25 bp, Homo sapien
gctttccttgggcaccatggcccag

SEQ ID NO: 830501 - DNA, 25 bp, Homo sapien
ctggtgagcttcaggggctttcctt

SEQ ID NO: 830502 - DNA, 25 bp, Homo sapien
aagctgaagaccaggagtgtccgcc

SEQ ID NO: 830503 - DNA, 25 bp, Homo sapien
aagaccaggagtgtccgcctgtcca

SEQ ID NO: 830504 - DNA, 25 bp, Homo sapien
tgaagaccaggagtgtccgcctgtc

SEQ ID NO: 830505 - DNA, 25 bp, Homo sapien
ataaagctgaagaccaggagtgtcc

SEQ ID NO: 830506 - DNA, 25 bp, Homo sapien
tggccaggactcgaagaacctggtc

SEQ ID NO: 830507 - DNA, 25 bp, Homo sapien
tctttggccaggactcgaagaacct

SEQ ID NO: 830508 - DNA, 25 bp, Homo sapien
ctcatctttggccaggactcgaaga

SEQ ID NO: 830509 - DNA, 25 bp, Homo sapien
ggccctccagatccccgagaagtga

SEQ ID NO: 830510 - DNA, 25 bp, Homo sapien
tggctgggccacgccagaagtccac

SEQ ID NO: 830511 - DNA, 25 bp, Homo sapien
gcctggctgggccacgccagaagtc

SEQ ID NO: 830512 - DNA, 25 bp, Homo sapien
cctggctgggccacgccagaagtcc

SEQ ID NO: 830513 - DNA, 25 bp, Homo sapien
ctggctgggccacgccagaagtcca

SEQ ID NO: 830514 - DNA, 25 bp, Homo sapien
ggatgtcctttatcatgatgctgta

SEQ ID NO: 830515 - DNA, 25 bp, Homo sapien
gtaagcaagtccatgagactccaga

SEQ ID NO: 830516 - DNA, 25 bp, Homo sapien
tatcatgatgctgtaagcaagtcca

SEQ ID NO: 830517 - DNA, 25 bp, Homo sapien
agtccatgagactccagataagctt

SEQ ID NO: 830518 - DNA, 25 bp, Homo sapien
cggaaggcagggtcccagctggggc

SEQ ID NO: 830519 - DNA, 25 bp, Homo sapien
aggaaggcggaaggcagggtcccag

SEQ ID NO: 830520 - DNA, 25 bp, Homo sapien
gaaggcggaaggcagggtcccagct

SEQ ID NO: 830521 - DNA, 25 bp, Homo sapien
accagaaaggaaggcggaaggcagg

SEQ ID NO: 830522 - DNA, 25 bp, Homo sapien
acaaacacgctgatggagacccaga

SEQ ID NO: 830523 - DNA, 25 bp, Homo sapien
gacccagaaaccacatgtccacttt

SEQ ID NO: 830524 - DNA, 25 bp, Homo sapien
gcatgttcacaaacacgctgatgga

SEQ ID NO: 830525 - DNA, 25 bp, Homo sapien
tgtccacttttagccccgagaacat

SEQ ID NO: 830526 - DNA, 25 bp, Homo sapien
aatgaatctttatggatacagttcc

SEQ ID NO: 830527 - DNA, 25 bp, Homo sapien
ggagattagcgccatacaacaaggt

SEQ ID NO: 830528 - DNA, 25 bp, Homo sapien
cgccatacaacaaggttgggaatga

SEQ ID NO: 830529 - DNA, 25 bp, Homo sapien
agttccacaggtacacggccagcag

SEQ ID NO: 830530 - DNA, 25 bp, Homo sapien
agtgtgtgcgctccgggaggctctg

SEQ ID NO: 830531 - DNA, 25 bp, Homo sapien
caagtgtgtgcgctccgggaggctc

SEQ ID NO: 830532 - DNA, 25 bp, Homo sapien
ggtgtcaagtgtgtgcgctccggga

SEQ ID NO: 830533 - DNA, 25 bp, Homo sapien
tgtcaagtgtgtgcgctccgggagg

SEQ ID NO: 830534 - DNA, 25 bp, Homo sapien
gtgcctgatgagggataaaggtctt

SEQ ID NO: 830535 - DNA, 25 bp, Homo sapien
ccctgtgctcgcatgggaacggaat

SEQ ID NO: 830536 - DNA, 25 bp, Homo sapien
gaatgctgcctgatgcgttgatccc

SEQ ID NO: 830537 - DNA, 25 bp, Homo sapien
ttgagcgggaaacagatgtgcctga

SEQ ID NO: 830538 - DNA, 25 bp, Homo sapien
gggatttcattagagaaatatccca

SEQ ID NO: 830539 - DNA, 25 bp, Homo sapien
gcctcttttgtctgcgggagtttcc

SEQ ID NO: 830540 - DNA, 25 bp, Homo sapien
catttttgtttgtgggggatttcat

SEQ ID NO: 830541 - DNA, 25 bp, Homo sapien
acagaggcctggctaaaaatgagaa

SEQ ID NO: 830542 - DNA, 25 bp, Homo sapien
caagtatggcagcgagtgcttgatc

SEQ ID NO: 830543 - DNA, 25 bp, Homo sapien
tcaagtatggcagcgagtgcttgat

SEQ ID NO: 830544 - DNA, 25 bp, Homo sapien
aagtatggcagcgagtgcttgatcc

SEQ ID NO: 830545 - DNA, 25 bp, Homo sapien
ttatcaagcctcaacgaagcagcag

SEQ ID NO: 830546 - DNA, 25 bp, Homo sapien
catgtgaataaggttgtgcctgtcc

SEQ ID NO: 830547 - DNA, 25 bp, Homo sapien
gacacggagcgtggagctgaacctt

SEQ ID NO: 830548 - DNA, 25 bp, Homo sapien
ccaaccgagcaagtcattcagcaga

SEQ ID NO: 830549 - DNA, 25 bp, Homo sapien
tgaagtttttccatggtgactcatc

SEQ ID NO: 830550 - DNA, 25 bp, Homo sapien
caagtgaagtttttccatggtgact

SEQ ID NO: 830551 - DNA, 25 bp, Homo sapien
tcaagtgaagtttttccatggtgac

SEQ ID NO: 830552 - DNA, 25 bp, Homo sapien
agtgaagtttttccatggtgactca

SEQ ID NO: 830553 - DNA, 25 bp, Homo sapien
aaacactgagtaggcggttggatcc

SEQ ID NO: 830554 - DNA, 25 bp, Homo sapien
tgacattgtcgagggaagctttggt

SEQ ID NO: 830555 - DNA, 25 bp, Homo sapien
tgctgttggaagaggaacattgaga

SEQ ID NO: 830556 - DNA, 25 bp, Homo sapien
gaacattgagagtcggccatcgggt

SEQ ID NO: 830557 - DNA, 25 bp, Homo sapien
ctgactttcatggggcccaacagag

SEQ ID NO: 830558 - DNA, 25 bp, Homo sapien
tgactttcatggggcccaacagagg

SEQ ID NO: 830559 - DNA, 25 bp, Homo sapien
tttcatggggcccaacagaggggcc

SEQ ID NO: 830560 - DNA, 25 bp, Homo sapien
actttcatggggcccaacagagggg

SEQ ID NO: 830561 - DNA, 25 bp, Homo sapien
gatgcaaaatggacgcagctcatgg

SEQ ID NO: 830562 - DNA, 25 bp, Homo sapien
gcagtagcagctatgtggccagtag

SEQ ID NO: 830563 - DNA, 25 bp, Homo sapien
tctcttccaggtctaacatctgcag

SEQ ID NO: 830564 - DNA, 25 bp, Homo sapien
tggccagtagcaactccagtcctgt

SEQ ID NO: 830565 - DNA, 25 bp, Homo sapien
tggaaaatgcaccagcgtttgctcc

SEQ ID NO: 830566 - DNA, 25 bp, Homo sapien
gaaaatgcaccagcgtttgctccat

SEQ ID NO: 830567 - DNA, 25 bp, Homo sapien
cctggaaaatgcaccagcgtttgct

SEQ ID NO: 830568 - DNA, 25 bp, Homo sapien
tggcctggaaaatgcaccagcgttt

SEQ ID NO: 830569 - DNA, 25 bp, Homo sapien
cctgccagctgtgaggacaaggcaa

SEQ ID NO: 830570 - DNA, 25 bp, Homo sapien
aaggcaaagggtctccaaggatctg

SEQ ID NO: 830571 - DNA, 25 bp, Homo sapien
ggacaaggcaaagggtctccaagga

SEQ ID NO: 830572 - DNA, 25 bp, Homo sapien
tgaggacaaggcaaagggtctccaa

SEQ ID NO: 830573 - DNA, 25 bp, Homo sapien
ctggtgccatcagctgtgacgagca

SEQ ID NO: 830574 - DNA, 25 bp, Homo sapien
catgaccaatgtgtgccagccactg

SEQ ID NO: 830575 - DNA, 25 bp, Homo sapien
tggtgccatcagctgtgacgagcag

SEQ ID NO: 830576 - DNA, 25 bp, Homo sapien
gcctggtgccatcagctgtgacgag

SEQ ID NO: 830577 - DNA, 25 bp, Homo sapien
actgtccagtgtgggaagtactcag

SEQ ID NO: 830578 - DNA, 25 bp, Homo sapien
cgcgagttgccctttgtttgcagca

SEQ ID NO: 830579 - DNA, 25 bp, Homo sapien
gaggatgctgagaaagcatcctcat

SEQ ID NO: 830580 - DNA, 25 bp, Homo sapien
acagactgtccagtgtgggaagtac

SEQ ID NO: 830581 - DNA, 25 bp, Homo sapien
ctgtgcataaagacagcagcaacac

SEQ ID NO: 830582 - DNA, 25 bp, Homo sapien
cagcaacacaggagaatgagccacc

SEQ ID NO: 830583 - DNA, 25 bp, Homo sapien
acaggagaatgagccaccatgagtg

SEQ ID NO: 830584 - DNA, 25 bp, Homo sapien
gtgcataaagacagcagcaacacag

SEQ ID NO: 830585 - DNA, 25 bp, Homo sapien
gagctgggctggctatgcctcttct

SEQ ID NO: 830586 - DNA, 25 bp, Homo sapien
gaacacatattggaaaggaagggga

SEQ ID NO: 830587 - DNA, 25 bp, Homo sapien
ctgggtgatggggaacacatattgg

SEQ ID NO: 830588 - DNA, 25 bp, Homo sapien
tggctatgcctcttctgagccctgc

SEQ ID NO: 830589 - DNA, 25 bp, Homo sapien
ctccagggtgtggtatgatgagtaa

SEQ ID NO: 830590 - DNA, 25 bp, Homo sapien
ccagggtgtggtatgatgagtaact

SEQ ID NO: 830591 - DNA, 25 bp, Homo sapien
cgggatttcgccatggcctgtcttt

SEQ ID NO: 830592 - DNA, 25 bp, Homo sapien
tgcgctccagccggcgggatttcgc

SEQ ID NO: 830593 - DNA, 25 bp, Homo sapien
ctgctctgtcaagatgaaggtagct

SEQ ID NO: 830594 - DNA, 25 bp, Homo sapien
taatgggtccctgcgttagtgttct

SEQ ID NO: 830595 - DNA, 25 bp, Homo sapien
tagtagacccattactctgctctgt

SEQ ID NO: 830596 - DNA, 25 bp, Homo sapien
gtttgttcaagatggcgacgctcct

SEQ ID NO: 830597 - DNA, 25 bp, Homo sapien
tatcggaatgctccattacaaagtt

SEQ ID NO: 830598 - DNA, 25 bp, Homo sapien
tgttgccaatctgaatttttgagac

SEQ ID NO: 830599 - DNA, 25 bp, Homo sapien
ttttgagacaatatcggaatgctcc

SEQ ID NO: 830600 - DNA, 25 bp, Homo sapien
tgctccattacaaagttgtcaatcc

SEQ ID NO: 830601 - DNA, 25 bp, Homo sapien
ctcccgggagtgaattccagtgtca

SEQ ID NO: 830602 - DNA, 25 bp, Homo sapien
tattggcagtccagatgccggtggc

SEQ ID NO: 830603 - DNA, 25 bp, Homo sapien
tccactcccgggagtgaattccagt

SEQ ID NO: 830604 - DNA, 25 bp, Homo sapien
tgccggtggcatgggtgatccactc

SEQ ID NO: 830605 - DNA, 25 bp, Homo sapien
atcagggtttgtgacgagctctatg

SEQ ID NO: 830606 - DNA, 25 bp, Homo sapien
cagggtttgtgacgagctctatgaa

SEQ ID NO: 830607 - DNA, 25 bp, Homo sapien
tcagggtttgtgacgagctctatga

SEQ ID NO: 830608 - DNA, 25 bp, Homo sapien
cttccatccttcccaggttccctca

SEQ ID NO: 830609 - DNA, 25 bp, Homo sapien
ttccatccttcccaggttccctcac

SEQ ID NO: 830610 - DNA, 25 bp, Homo sapien
aggctctgaaggggctggttcccaa

SEQ ID NO: 830611 - DNA, 25 bp, Homo sapien
gttcccaaagcacagtgaccttttc

SEQ ID NO: 830612 - DNA, 25 bp, Homo sapien
gcaaagaggctctgaaggggctggt

SEQ ID NO: 830613 - DNA, 25 bp, Homo sapien
ttttctccatccccctagagctgac

SEQ ID NO: 830614 - DNA, 25 bp, Homo sapien
caggtgacctcattcactgggccca

SEQ ID NO: 830615 - DNA, 25 bp, Homo sapien
cccaggacaggtgacctcattcact

SEQ ID NO: 830616 - DNA, 25 bp, Homo sapien
tcactgggcccattcccagggatgg

SEQ ID NO: 830617 - DNA, 25 bp, Homo sapien
ggacaggtgacctcattcactgggc

SEQ ID NO: 830618 - DNA, 25 bp, Homo sapien
gcagaagattccaggtctgatggac

SEQ ID NO: 830619 - DNA, 25 bp, Homo sapien
agttcctgttgagatccacgccgat

SEQ ID NO: 830620 - DNA, 25 bp, Homo sapien
ggacttgttcttccgccataagcgg

SEQ ID NO: 830621 - DNA, 25 bp, Homo sapien
tccacgccgatgcagaagattccag

SEQ ID NO: 830622 - DNA, 25 bp, Homo sapien
cctgccccaggacagcaggttgcca

SEQ ID NO: 830623 - DNA, 25 bp, Homo sapien
gccccaggacagcaggttgccatac

SEQ ID NO: 830624 - DNA, 25 bp, Homo sapien
tcttctccaaccctgccccaggaca

SEQ ID NO: 830625 - DNA, 25 bp, Homo sapien
ctcttctccaaccctgccccaggac

SEQ ID NO: 830626 - DNA, 25 bp, Homo sapien
tctctgacgttcacagtcaaggtcc

SEQ ID NO: 830627 - DNA, 25 bp, Homo sapien
cccctggccaaatgggaattggctg

SEQ ID NO: 830628 - DNA, 25 bp, Homo sapien
tgccaacgaccaggtggctttgccc

SEQ ID NO: 830629 - DNA, 25 bp, Homo sapien
ttaggccattagttctggtttgagc

SEQ ID NO: 830630 - DNA, 25 bp, Homo sapien
gcctttgcggcccacgcacagaaag

SEQ ID NO: 830631 - DNA, 25 bp, Homo sapien
ggctttgtctgcctttgcggcccac

SEQ ID NO: 830632 - DNA, 25 bp, Homo sapien
tgcggcccacgcacagaaagcggtt

SEQ ID NO: 830633 - DNA, 25 bp, Homo sapien
aacagcaacagatgcgcagagcggg

SEQ ID NO: 830634 - DNA, 25 bp, Homo sapien
gaatcagcccatctaacagtggcct

SEQ ID NO: 830635 - DNA, 25 bp, Homo sapien
ctggaatcagcccatctaacagtgg

SEQ ID NO: 830636 - DNA, 25 bp, Homo sapien
agcccatctaacagtggccttgttt

SEQ ID NO: 830637 - DNA, 25 bp, Homo sapien
ttagaaggggatgtgccggcagagc

SEQ ID NO: 830638 - DNA, 25 bp, Homo sapien
gtgctgagctggtcaagactttgta

SEQ ID NO: 830639 - DNA, 25 bp, Homo sapien
gctgagctggtcaagactttgtagg

SEQ ID NO: 830640 - DNA, 25 bp, Homo sapien
tgtgctgagctggtcaagactttgt

SEQ ID NO: 830641 - DNA, 25 bp, Homo sapien
tgctgagctggtcaagactttgtag

SEQ ID NO: 830642 - DNA, 25 bp, Homo sapien
cgggagaatagttccccatagttgc

SEQ ID NO: 830643 - DNA, 25 bp, Homo sapien
tcagactcggtgtcagctgaagctt

SEQ ID NO: 830644 - DNA, 25 bp, Homo sapien
tgtgccatcagttgagggctcagac

SEQ ID NO: 830645 - DNA, 25 bp, Homo sapien
tatgggaaaccaatacgggagaata

SEQ ID NO: 830646 - DNA, 25 bp, Homo sapien
agggagccccctcggcttgtcctgt

SEQ ID NO: 830647 - DNA, 25 bp, Homo sapien
gagccccctcggcttgtcctgtggt

SEQ ID NO: 830648 - DNA, 25 bp, Homo sapien
tggcttcccctagtgagcagcaaat

SEQ ID NO: 830649 - DNA, 25 bp, Homo sapien
tgagcagcaaatgcctttaggctga

SEQ ID NO: 830650 - DNA, 25 bp, Homo sapien
tttgaaacgggctccagcaatcggc

SEQ ID NO: 830651 - DNA, 25 bp, Homo sapien
gatgaagttcactatggcagccacc

SEQ ID NO: 830652 - DNA, 25 bp, Homo sapien
gagggcccgtgataagtttctgagc

SEQ ID NO: 830653 - DNA, 25 bp, Homo sapien
tcggccgtaagggtacataagcatc

SEQ ID NO: 830654 - DNA, 25 bp, Homo sapien
gaagcatggatttagcagtcctgga

SEQ ID NO: 830655 - DNA, 25 bp, Homo sapien
tgatcacacgtgagaacagcaagct

SEQ ID NO: 830656 - DNA, 25 bp, Homo sapien
tgagaagggagcacagcatttccag

SEQ ID NO: 830657 - DNA, 25 bp, Homo sapien
agagtaacaacctgagccctctggg

SEQ ID NO: 830658 - DNA, 25 bp, Homo sapien
caaaaatgtactcgatcccatggac

SEQ ID NO: 830659 - DNA, 25 bp, Homo sapien
aaaatgtactcgatcccatggacct

SEQ ID NO: 830660 - DNA, 25 bp, Homo sapien
gctgccaaaaatgtactcgatccca

SEQ ID NO: 830661 - DNA, 25 bp, Homo sapien
tactcgatcccatggaccttataca

SEQ ID NO: 830662 - DNA, 25 bp, Homo sapien
caaaatgtgccccacaaaaggaaga

SEQ ID NO: 830663 - DNA, 25 bp, Homo sapien
ccaaaatgtgccccacaaaaggaag

SEQ ID NO: 830664 - DNA, 25 bp, Homo sapien
tcccggagctcaaagctgaaggcgt

SEQ ID NO: 830665 - DNA, 25 bp, Homo sapien
cgaagcgccatccacgtctcctggg

SEQ ID NO: 830666 - DNA, 25 bp, Homo sapien
tgtcataggcccagtcgacggtgat

SEQ ID NO: 830667 - DNA, 25 bp, Homo sapien
gaaggcgtacttgatgccactgtca

SEQ ID NO: 830668 - DNA, 25 bp, Homo sapien
gcataacttgggtttcgggaggagc

SEQ ID NO: 830669 - DNA, 25 bp, Homo sapien
gatgcataacttgggtttcgggagg

SEQ ID NO: 830670 - DNA, 25 bp, Homo sapien
tgcataacttgggtttcgggaggag

SEQ ID NO: 830671 - DNA, 25 bp, Homo sapien
gggatgcataacttgggtttcggga

SEQ ID NO: 830672 - DNA, 25 bp, Homo sapien
atttattttctaagaggtcgggatg

SEQ ID NO: 830673 - DNA, 25 bp, Homo sapien
cttgtatttattttctaagaggtcg

SEQ ID NO: 830674 - DNA, 25 bp, Homo sapien
ggtcctgtgggagtccagcccgggc

SEQ ID NO: 830675 - DNA, 25 bp, Homo sapien
agcagggtcaggagcccaacccttg

SEQ ID NO: 830676 - DNA, 25 bp, Homo sapien
tcctgctggccttagggtcctgtgg

SEQ ID NO: 830677 - DNA, 25 bp, Homo sapien
gcagtccctctgtgggacttcccag

SEQ ID NO: 830678 - DNA, 25 bp, Homo sapien
gcgtcggtttggcctgtcaccacac

SEQ ID NO: 830679 - DNA, 25 bp, Homo sapien
cttttgcgtcggtttggcctgtcac

SEQ ID NO: 830680 - DNA, 25 bp, Homo sapien
tttgcgtcggtttggcctgtcacca

SEQ ID NO: 830681 - DNA, 25 bp, Homo sapien
ttgcgtcggtttggcctgtcaccac

SEQ ID NO: 830682 - DNA, 25 bp, Homo sapien
ctggggccagcggggcctgagggtc

SEQ ID NO: 830683 - DNA, 25 bp, Homo sapien
tgataaagtggcagggaactgggca

SEQ ID NO: 830684 - DNA, 25 bp, Homo sapien
catgataaagtggcagggaactggg

SEQ ID NO: 830685 - DNA, 25 bp, Homo sapien
gagagataagccagagctccacccc

SEQ ID NO: 830686 - DNA, 25 bp, Homo sapien
ggagagataagccagagctccaccc

SEQ ID NO: 830687 - DNA, 25 bp, Homo sapien
gtcagactgaggtcgagacggcccc

SEQ ID NO: 830688 - DNA, 25 bp, Homo sapien
ggagggaaggtcagactgaggtcga

SEQ ID NO: 830689 - DNA, 25 bp, Homo sapien
tgctcccgaggtctgttctccccca

SEQ ID NO: 830690 - DNA, 25 bp, Homo sapien
tgggagttctgagctctgacaccct

SEQ ID NO: 830691 - DNA, 25 bp, Homo sapien
acactcaacaccagcaacccccgca

SEQ ID NO: 830692 - DNA, 25 bp, Homo sapien
cactcaacaccagcaacccccgcat

SEQ ID NO: 830693 - DNA, 25 bp, Homo sapien
cttgccaaagacagcccccaacagg

SEQ ID NO: 830694 - DNA, 25 bp, Homo sapien
ttgccaaagacagcccccaacagga

SEQ ID NO: 830695 - DNA, 25 bp, Homo sapien
ccccatctttagaaacttctagacg

SEQ ID NO: 830696 - DNA, 25 bp, Homo sapien
cccatctttagaaacttctagacgc

SEQ ID NO: 830697 - DNA, 25 bp, Homo sapien
agtggggagtgagcacccaagctgc

SEQ ID NO: 830698 - DNA, 25 bp, Homo sapien
ctgtacctgggcctcatcggctaca

SEQ ID NO: 830699 - DNA, 25 bp, Homo sapien
gggcctcatcggctacagagattcg

SEQ ID NO: 830700 - DNA, 25 bp, Homo sapien
tacctgggcctcatcggctacagag

SEQ ID NO: 830701 - DNA, 25 bp, Homo sapien
catcggctacagagattcggagcac

SEQ ID NO: 830702 - DNA, 25 bp, Homo sapien
tggggcctcagagagcccttctccc

SEQ ID NO: 830703 - DNA, 25 bp, Homo sapien
cctcagagagcccttctcccctctt

SEQ ID NO: 830704 - DNA, 25 bp, Homo sapien
gggcctcagagagcccttctcccct

SEQ ID NO: 830705 - DNA, 25 bp, Homo sapien
cctggggcctcagagagcccttctc

SEQ ID NO: 830706 - DNA, 25 bp, Homo sapien
gacaagagccggcacggtcacagcg

SEQ ID NO: 830707 - DNA, 25 bp, Homo sapien
acaagagccggcacggtcacagcgg

SEQ ID NO: 830708 - DNA, 25 bp, Homo sapien
caagagccggcacggtcacagcggg

SEQ ID NO: 830709 - DNA, 25 bp, Homo sapien
gaaagatcttgaccgcctggatgct

SEQ ID NO: 830710 - DNA, 25 bp, Homo sapien
agcgactgcacgtcctcgatcatgg

SEQ ID NO: 830711 - DNA, 25 bp, Homo sapien
ttaaaagtgtcggtggagcgcgccc

SEQ ID NO: 830712 - DNA, 25 bp, Homo sapien
gggaagggcactcggacgtcgatgg

SEQ ID NO: 830713 - DNA, 25 bp, Homo sapien
ttcagcacgtaaatgggacgccctt

SEQ ID NO: 830714 - DNA, 25 bp, Homo sapien
tctggatcttgctgacaaggtgcgg

SEQ ID NO: 830715 - DNA, 25 bp, Homo sapien
cccttcataggtgttgccaatctgg

SEQ ID NO: 830716 - DNA, 25 bp, Homo sapien
gacaaggtgcgggttctccgccacc

SEQ ID NO: 830717 - DNA, 25 bp, Homo sapien
cacgtgtgggtccattctcccctgt

SEQ ID NO: 830718 - DNA, 25 bp, Homo sapien
gatgccacgtgtgggtccattctcc

SEQ ID NO: 830719 - DNA, 25 bp, Homo sapien
cacggatgccacgtgtgggtccatt

SEQ ID NO: 830720 - DNA, 25 bp, Homo sapien
cggatgccacgtgtgggtccattct

SEQ ID NO: 830721 - DNA, 25 bp, Homo sapien
cagatggctggacgcttactgcccc

SEQ ID NO: 830722 - DNA, 25 bp, Homo sapien
tgggtgacccactcccgggaatgga

SEQ ID NO: 830723 - DNA, 25 bp, Homo sapien
cactcccgggaatggatgcccgtgt

SEQ ID NO: 830724 - DNA, 25 bp, Homo sapien
gcccgtgtcgatccagatggctgga

SEQ ID NO: 830725 - DNA, 25 bp, Homo sapien
tgctgtgcgtgaaggcaaagccatc

SEQ ID NO: 830726 - DNA, 25 bp, Homo sapien
ccaggaagatgtccaaggtgtcgag

SEQ ID NO: 830727 - DNA, 25 bp, Homo sapien
catcagggttggtgacgatctccag

SEQ ID NO: 830728 - DNA, 25 bp, Homo sapien
tcgagaatggcggtgaaagctgcat

SEQ ID NO: 830729 - DNA, 25 bp, Homo sapien
agaggcccatcctgcttcccccaag

SEQ ID NO: 830730 - DNA, 25 bp, Homo sapien
ttgtgcagcttagaagccagaggcc

SEQ ID NO: 830731 - DNA, 25 bp, Homo sapien
tgtgcagcttagaagccagaggccc

SEQ ID NO: 830732 - DNA, 25 bp, Homo sapien
tctatatggcgaagaagctgcgagg

SEQ ID NO: 830733 - DNA, 25 bp, Homo sapien
tcggctaggagcacaggtctgattg

SEQ ID NO: 830734 - DNA, 25 bp, Homo sapien
actgttgagacaccctcggctagga

SEQ ID NO: 830735 - DNA, 25 bp, Homo sapien
tagaaacaccgtggatgcacaggac

SEQ ID NO: 830736 - DNA, 25 bp, Homo sapien
cgccaatacagagggagcctgctgt

SEQ ID NO: 830737 - DNA, 25 bp, Homo sapien
gttcctgttggggtccacgccaata

SEQ ID NO: 830738 - DNA, 25 bp, Homo sapien
ggaccgagtcttgcgccacatgcga

SEQ ID NO: 830739 - DNA, 25 bp, Homo sapien
gggtccacgccaatacagagggagc

SEQ ID NO: 830740 - DNA, 25 bp, Homo sapien
tgaggagccattcgaggccatccca

SEQ ID NO: 830741 - DNA, 25 bp, Homo sapien
gtggtgaggagccattcgaggccat

SEQ ID NO: 830742 - DNA, 25 bp, Homo sapien
ggtgaggagccattcgaggccatcc

SEQ ID NO: 830743 - DNA, 25 bp, Homo sapien
aggagccattcgaggccatcccatc

SEQ ID NO: 830744 - DNA, 25 bp, Homo sapien
tgcaggcgagtaacaaccaactctc

SEQ ID NO: 830745 - DNA, 25 bp, Homo sapien
ccttttgcaggcgagtaacaaccaa

SEQ ID NO: 830746 - DNA, 25 bp, Homo sapien
caagcaacttgccttttgcaggcga

SEQ ID NO: 830747 - DNA, 25 bp, Homo sapien
ttagcccatttgcaagcaacttgcc

SEQ ID NO: 830748 - DNA, 25 bp, Homo sapien
gacttgaggttaagctagaagcccc

SEQ ID NO: 830749 - DNA, 25 bp, Homo sapien
ggtggtatggaagggctcactccca

SEQ ID NO: 830750 - DNA, 25 bp, Homo sapien
ttctcacagagacgtggccaaggcg

SEQ ID NO: 830751 - DNA, 25 bp, Homo sapien
caggaaagcccaaaggccttctata

SEQ ID NO: 830752 - DNA, 25 bp, Homo sapien
acagagggcatggcggtgtggctcc

SEQ ID NO: 830753 - DNA, 25 bp, Homo sapien
gagggcatggcggtgtggctcctcc

SEQ ID NO: 830754 - DNA, 25 bp, Homo sapien
cagagggcatggcggtgtggctcct

SEQ ID NO: 830755 - DNA, 25 bp, Homo sapien
gacagagggcatggcggtgtggctc

SEQ ID NO: 830756 - DNA, 25 bp, Homo sapien
tagccatagggatacatgaggagct

SEQ ID NO: 830757 - DNA, 25 bp, Homo sapien
gcaaacttgccgtggtaagtctccg

SEQ ID NO: 830758 - DNA, 25 bp, Homo sapien
aaggccttgatgttcccatggtcct

SEQ ID NO: 830759 - DNA, 25 bp, Homo sapien
tccacttcggaattggcaaacttgc

SEQ ID NO: 830760 - DNA, 25 bp, Homo sapien
aacagcatgtccagggtagtctggg

SEQ ID NO: 830761 - DNA, 25 bp, Homo sapien
ctggacaaaacaccaagcaaagcca

SEQ ID NO: 830762 - DNA, 25 bp, Homo sapien
ggctcctggaacagcatgtccaggg

SEQ ID NO: 830763 - DNA, 25 bp, Homo sapien
aaagccacctgtcatggccaggctc

SEQ ID NO: 830764 - DNA, 25 bp, Homo sapien
tagttgaacttggtcccgtagagag

SEQ ID NO: 830765 - DNA, 25 bp, Homo sapien
gctgccatagttgaacttggtcccg

SEQ ID NO: 830766 - DNA, 25 bp, Homo sapien
gaacttggtcccgtagagagaggcc

SEQ ID NO: 830767 - DNA, 25 bp, Homo sapien
acttggtcccgtagagagaggccag

SEQ ID NO: 830768 - DNA, 25 bp, Homo sapien
catcaagagagaccctacggccact

SEQ ID NO: 830769 - DNA, 25 bp, Homo sapien
cgcaggcccatcaagagagacccta

SEQ ID NO: 830770 - DNA, 25 bp, Homo sapien
tcaagagagaccctacggccactta

SEQ ID NO: 830771 - DNA, 25 bp, Homo sapien
ggcccatcaagagagaccctacggc

SEQ ID NO: 830772 - DNA, 25 bp, Homo sapien
tatcccaagtacatgaaacagggcc

SEQ ID NO: 830773 - DNA, 25 bp, Homo sapien
gtctccctggctagaaagttccctg

SEQ ID NO: 830774 - DNA, 25 bp, Homo sapien
tgattcagtaatgctcctctcaggg

SEQ ID NO: 830775 - DNA, 25 bp, Homo sapien
gcttatttcattcatggctatatcc

SEQ ID NO: 830776 - DNA, 25 bp, Homo sapien
caaggaagtctctgcaattgcacaa

SEQ ID NO: 830777 - DNA, 25 bp, Homo sapien
taaaaggtctaagccaagaggtcca

SEQ ID NO: 830778 - DNA, 25 bp, Homo sapien
tgtccaacagccctttcggtgaagc

SEQ ID NO: 830779 - DNA, 25 bp, Homo sapien
gtccaaagaggagaccagcaatggt

SEQ ID NO: 830780 - DNA, 25 bp, Homo sapien
tgaaggagtacttgatgccctggct

SEQ ID NO: 830781 - DNA, 25 bp, Homo sapien
cccggagctcgaaggtgaaggagta

SEQ ID NO: 830782 - DNA, 25 bp, Homo sapien
gccctggctgtaggtccagtcaata

SEQ ID NO: 830783 - DNA, 25 bp, Homo sapien
tccagtcaatagtgcttccactggc

SEQ ID NO: 830784 - DNA, 25 bp, Homo sapien
attcagggtgtgctccatgatggtc

SEQ ID NO: 830785 - DNA, 25 bp, Homo sapien
agtaggggtgattcagggtgtgctc

SEQ ID NO: 830786 - DNA, 25 bp, Homo sapien
taggggtgattcagggtgtgctcca

SEQ ID NO: 830787 - DNA, 25 bp, Homo sapien
ggtgattcagggtgtgctccatgat

SEQ ID NO: 830788 - DNA, 25 bp, Homo sapien
ggacaagaagggtgtcaaagggtca

SEQ ID NO: 830789 - DNA, 25 bp, Homo sapien
ttatttggttgcctggatggggcca

SEQ ID NO: 830790 - DNA, 25 bp, Homo sapien
gtacactcaaactttatttggttgc

SEQ ID NO: 830791 - DNA, 25 bp, Homo sapien
acaagaagggtgtcaaagggtcagc

SEQ ID NO: 830792 - DNA, 25 bp, Homo sapien
tactgtggttaagcagaagactttc

SEQ ID NO: 830793 - DNA, 25 bp, Homo sapien
aatgtagccaataccactactgtgg

SEQ ID NO: 830794 - DNA, 25 bp, Homo sapien
taagttgcatgaattggcgatggcc

SEQ ID NO: 830795 - DNA, 25 bp, Homo sapien
taatgcagatcctgaaagctttggg

SEQ ID NO: 830796 - DNA, 25 bp, Homo sapien
tctgaccaagggtttgaaaagccag

SEQ ID NO: 830797 - DNA, 25 bp, Homo sapien
tggagacccagaaagctcgttatct

SEQ ID NO: 830798 - DNA, 25 bp, Homo sapien
ttgtgggcgaggcattcaaaaccct

SEQ ID NO: 830799 - DNA, 25 bp, Homo sapien
cacaacagtctgatgaggcaggcac

SEQ ID NO: 830800 - DNA, 25 bp, Homo sapien
tcaaaagagctgttctaatctgcgt

SEQ ID NO: 830801 - DNA, 25 bp, Homo sapien
ctgcgttttgcatgttaagtgttaa

SEQ ID NO: 830802 - DNA, 25 bp, Homo sapien
tcaaacattctttacgtgctcgagg

SEQ ID NO: 830803 - DNA, 25 bp, Homo sapien
tatatgtggaaagccaggtcagcca

SEQ ID NO: 830804 - DNA, 25 bp, Homo sapien
gagttgagacttccctgccggattc

SEQ ID NO: 830805 - DNA, 25 bp, Homo sapien
gacaactttggagtattagaaacca

SEQ ID NO: 830806 - DNA, 25 bp, Homo sapien
cgttcccatcgtcagacaactttgg

SEQ ID NO: 830807 - DNA, 25 bp, Homo sapien
ttccctccttgttccgattctgcgt

SEQ ID NO: 830808 - DNA, 25 bp, Homo sapien
gttatgctgttttaaaggtgacttg

SEQ ID NO: 830809 - DNA, 25 bp, Homo sapien
gcccagcatattgcaggccctgttt

SEQ ID NO: 830810 - DNA, 25 bp, Homo sapien
tagctgtacactcactgaatgctcc

SEQ ID NO: 830811 - DNA, 25 bp, Homo sapien
agatgagccttaggttccagccgcc

SEQ ID NO: 830812 - DNA, 25 bp, Homo sapien
ttcatgaaggcttctccgggcagtc

SEQ ID NO: 830813 - DNA, 25 bp, Homo sapien
tgcccagcagctcatggattttgaa

SEQ ID NO: 830814 - DNA, 25 bp, Homo sapien
gttacccaattgcaactctgtctag

SEQ ID NO: 830815 - DNA, 25 bp, Homo sapien
gaattgaggccaagttgtattaaga

SEQ ID NO: 830816 - DNA, 25 bp, Homo sapien
tctctttgcagcttacagttaccca

SEQ ID NO: 830817 - DNA, 25 bp, Homo sapien
tccagtgcacctgaccatcattcag

SEQ ID NO: 830818 - DNA, 25 bp, Homo sapien
gcacctgaccatcattcagcaagta

SEQ ID NO: 830819 - DNA, 25 bp, Homo sapien
tatgctagacaatggaagggataaa

SEQ ID NO: 830820 - DNA, 25 bp, Homo sapien
gcaagtatttttgagtgtctcctat

SEQ ID NO: 830821 - DNA, 25 bp, Homo sapien
gtatgtcagtcccataaaatctatg

SEQ ID NO: 830822 - DNA, 25 bp, Homo sapien
aaaatctatggtgctcggcttgcag

SEQ ID NO: 830823 - DNA, 25 bp, Homo sapien
tacattgcggttggtactagaaagt

SEQ ID NO: 830824 - DNA, 25 bp, Homo sapien
tgcagtggagcacaaatagttttac

SEQ ID NO: 830825 - DNA, 25 bp, Homo sapien
caagataatgtccttgagtcgcata

SEQ ID NO: 830826 - DNA, 25 bp, Homo sapien
cattctttctggtacctgatcagta

SEQ ID NO: 830827 - DNA, 25 bp, Homo sapien
cactagaaatatctccaagctactc

SEQ ID NO: 830828 - DNA, 25 bp, Homo sapien
taggccattttatcacttgtataga

SEQ ID NO: 830829 - DNA, 25 bp, Homo sapien
acctccaaagcagtttcagccaaga

SEQ ID NO: 830830 - DNA, 25 bp, Homo sapien
aatccttgaagttgatgagtctttt

SEQ ID NO: 830831 - DNA, 25 bp, Homo sapien
ctaaatccttgaagttgatgagtct

SEQ ID NO: 830832 - DNA, 25 bp, Homo sapien
tgcagacacctggaagactatcaca

SEQ ID NO: 830833 - DNA, 25 bp, Homo sapien
agacattttcaggatgggtgcagtg

SEQ ID NO: 830834 - DNA, 25 bp, Homo sapien
gagaattctgttatctttgcaactt

SEQ ID NO: 830835 - DNA, 25 bp, Homo sapien
gaagacattttcaggatgggtgcag

SEQ ID NO: 830836 - DNA, 25 bp, Homo sapien
ggtatgcgcttatagtcccagttgc

SEQ ID NO: 830837 - DNA, 25 bp, Homo sapien
cgtaaattgctctgggagagctgcc

SEQ ID NO: 830838 - DNA, 25 bp, Homo sapien
agcactctccgctctcaagatgaag

SEQ ID NO: 830839 - DNA, 25 bp, Homo sapien
tgcagaactgtgaagccgtaaattg

SEQ ID NO: 830840 - DNA, 25 bp, Homo sapien
gagctgcctgctatgagtacagcac

SEQ ID NO: 830841 - DNA, 25 bp, Homo sapien
tttccactatctccatcgtacaaca

SEQ ID NO: 830842 - DNA, 25 bp, Homo sapien
tctccatcgtacaacactctgcttg

SEQ ID NO: 830843 - DNA, 25 bp, Homo sapien
actatctccatcgtacaacactctg

SEQ ID NO: 830844 - DNA, 25 bp, Homo sapien
catcgtacaacactctgcttgtcat

SEQ ID NO: 830845 - DNA, 25 bp, Homo sapien
tcccggagccaaggtctaccagaga

SEQ ID NO: 830846 - DNA, 25 bp, Homo sapien
ggtctaccagagagtactgtcctgg

SEQ ID NO: 830847 - DNA, 25 bp, Homo sapien
atcaaacccgaatgtcccggagcca

SEQ ID NO: 830848 - DNA, 25 bp, Homo sapien
agcaccaaaggtactagggaaatca

SEQ ID NO: 830849 - DNA, 25 bp, Homo sapien
aggacccggccacgaatacgcggct

SEQ ID NO: 830850 - DNA, 25 bp, Homo sapien
gaggttctcggccttcaccctgttc

SEQ ID NO: 830851 - DNA, 25 bp, Homo sapien
catgtttcggagaaccggttgcgca

SEQ ID NO: 830852 - DNA, 25 bp, Homo sapien
gtaagaccttgcctacaggactcca

SEQ ID NO: 830853 - DNA, 25 bp, Homo sapien
ccaaggagggctagtcccactcctg

SEQ ID NO: 830854 - DNA, 25 bp, Homo sapien
gctgcgagggtgcacggggaggctc

SEQ ID NO: 830855 - DNA, 25 bp, Homo sapien
ctgcccctaggactggtgtggccca

SEQ ID NO: 830856 - DNA, 25 bp, Homo sapien
gtgtggcccacgcacacgagccaca

SEQ ID NO: 830857 - DNA, 25 bp, Homo sapien
aacaaacgtggggtgcgagcgggtg

SEQ ID NO: 830858 - DNA, 25 bp, Homo sapien
gcaactctgcaccccgaaaggttcg

SEQ ID NO: 830859 - DNA, 25 bp, Homo sapien
tgcaggcctcccttcggctgcgcac

SEQ ID NO: 830860 - DNA, 25 bp, Homo sapien
gcaccccgaaaggttcggtgctgga

SEQ ID NO: 830861 - DNA, 25 bp, Homo sapien
cactatggccaaagttgcacaaagt

SEQ ID NO: 830862 - DNA, 25 bp, Homo sapien
caagctagtaaacagattcatggga

SEQ ID NO: 830863 - DNA, 25 bp, Homo sapien
tggtcagcatgccagacgcctggcc

SEQ ID NO: 830864 - DNA, 25 bp, Homo sapien
ttacagcagcgcgacgtggtcagca

SEQ ID NO: 830865 - DNA, 25 bp, Homo sapien
tgcgctgcggcactgcgcttgcgag

SEQ ID NO: 830866 - DNA, 25 bp, Homo sapien
gccgcagcgttgcagagcaccgggc

SEQ ID NO: 830867 - DNA, 25 bp, Homo sapien
gccgcgttatcccatgccgcccgcc

SEQ ID NO: 830868 - DNA, 25 bp, Homo sapien
gctacagccactccggcgtgcgctg

SEQ ID NO: 830869 - DNA, 25 bp, Homo sapien
tgcggaggcgatctcggcgcaccat

SEQ ID NO: 830870 - DNA, 25 bp, Homo sapien
ctgcggaggcgatctcggcgcacca

SEQ ID NO: 830871 - DNA, 25 bp, Homo sapien
cttgaaatcctaagctgcaccgcgg

SEQ ID NO: 830872 - DNA, 25 bp, Homo sapien
taaaaatcctacatcgcaccagggc

SEQ ID NO: 830873 - DNA, 25 bp, Homo sapien
ggcactgcgattatcccgttcttga

SEQ ID NO: 830874 - DNA, 25 bp, Homo sapien
aaatcctaaggtgcgccacggagac

SEQ ID NO: 830875 - DNA, 25 bp, Homo sapien
gttttcacccaacaatagcaggctg

SEQ ID NO: 830876 - DNA, 25 bp, Homo sapien
tctgcagtgactcagcagagagccc

SEQ ID NO: 830877 - DNA, 25 bp, Homo sapien
ggttttgacgatcatttgcccagcc

SEQ ID NO: 830878 - DNA, 25 bp, Homo sapien
taagacggatagaaccatttggtcc

SEQ ID NO: 830879 - DNA, 25 bp, Homo sapien
gatacgcagtcccttgtaagtgaaa

SEQ ID NO: 830880 - DNA, 25 bp, Homo sapien
tggtagaagatacgcagtcccttgt

SEQ ID NO: 830881 - DNA, 25 bp, Homo sapien
cttggtagaagatacgcagtccctt

SEQ ID NO: 830882 - DNA, 25 bp, Homo sapien
gaagatacgcagtcccttgtaagtg

SEQ ID NO: 830883 - DNA, 25 bp, Homo sapien
gacaatatggaagcattcagcatca

SEQ ID NO: 830884 - DNA, 25 bp, Homo sapien
gcaggagacccaatctaacatcaaa

SEQ ID NO: 830885 - DNA, 25 bp, Homo sapien
taagatacagcaactattcccaagg

SEQ ID NO: 830886 - DNA, 25 bp, Homo sapien
tattcatatactgccagtgacatga

SEQ ID NO: 830887 - DNA, 25 bp, Homo sapien
tgtaaaagcacaactatctctggac

SEQ ID NO: 830888 - DNA, 25 bp, Homo sapien
cagtcgtagctggatgttggaaaac

SEQ ID NO: 830889 - DNA, 25 bp, Homo sapien
aagcacaactatctctggacttcca

SEQ ID NO: 830890 - DNA, 25 bp, Homo sapien
gatgttggaaaaccgtgtaaaagca

SEQ ID NO: 830891 - DNA, 25 bp, Homo sapien
accagacctacagttgcacaggagc

SEQ ID NO: 830892 - DNA, 25 bp, Homo sapien
ggcttaacagacttccataaagaga

SEQ ID NO: 830893 - DNA, 25 bp, Homo sapien
gagaaaacgccatgaaactaccaca

SEQ ID NO: 830894 - DNA, 25 bp, Homo sapien
caggtcccacagatgatcctcttgg

SEQ ID NO: 830895 - DNA, 25 bp, Homo sapien
gcaatcacccgatgaaacctcaagg

SEQ ID NO: 830896 - DNA, 25 bp, Homo sapien
atcaagggcaatcacccgatgaaac

SEQ ID NO: 830897 - DNA, 25 bp, Homo sapien
agggcaatcacccgatgaaacctca

SEQ ID NO: 830898 - DNA, 25 bp, Homo sapien
caagggcaatcacccgatgaaacct

SEQ ID NO: 830899 - DNA, 25 bp, Homo sapien
gctcaaatatggaatagtgatgtgg

SEQ ID NO: 830900 - DNA, 25 bp, Homo sapien
caaatatggaatagtgatgtggtct

SEQ ID NO: 830901 - DNA, 25 bp, Homo sapien
ctgctcaaatatggaatagtgatgt

SEQ ID NO: 830902 - DNA, 25 bp, Homo sapien
tcaaatatggaatagtgatgtggtc

SEQ ID NO: 830903 - DNA, 25 bp, Homo sapien
gccgcaaaagcgcttccacgatgct

SEQ ID NO: 830904 - DNA, 25 bp, Homo sapien
agatgccgcaaaagcgcttccacga

SEQ ID NO: 830905 - DNA, 25 bp, Homo sapien
ccagatgccgcaaaagcgcttccac

SEQ ID NO: 830906 - DNA, 25 bp, Homo sapien
gatgccgcaaaagcgcttccacgat

SEQ ID NO: 830907 - DNA, 25 bp, Homo sapien
cctagcatcataagctgaagtctga

SEQ ID NO: 830908 - DNA, 25 bp, Homo sapien
tagcatcataagctgaagtctgaag

SEQ ID NO: 830909 - DNA, 25 bp, Homo sapien
ttcctagcatcataagctgaagtct

SEQ ID NO: 830910 - DNA, 25 bp, Homo sapien
agcatcataagctgaagtctgaagc

SEQ ID NO: 830911 - DNA, 25 bp, Homo sapien
gtaagccgaccagatcgattctgct

SEQ ID NO: 830912 - DNA, 25 bp, Homo sapien
tccatttgacagacagagactcttt

SEQ ID NO: 830913 - DNA, 25 bp, Homo sapien
cagagactctttatggtaagccgac

SEQ ID NO: 830914 - DNA, 25 bp, Homo sapien
agacagagactctttatggtaagcc

SEQ ID NO: 830915 - DNA, 25 bp, Homo sapien
gaccaccaaaggagttgatggcaca

SEQ ID NO: 830916 - DNA, 25 bp, Homo sapien
agatggcccttctagattacaccca

SEQ ID NO: 830917 - DNA, 25 bp, Homo sapien
agattaccatttaggtgccgctgta

SEQ ID NO: 830918 - DNA, 25 bp, Homo sapien
tgccgctgtatctaaagatggccct

SEQ ID NO: 830919 - DNA, 25 bp, Homo sapien
cccatcttaaagatagtgaaacggg

SEQ ID NO: 830920 - DNA, 25 bp, Homo sapien
aaaatgctgataaccaggctctgac

SEQ ID NO: 830921 - DNA, 25 bp, Homo sapien
tgcagcctttactaccaaaacagaa

SEQ ID NO: 830922 - DNA, 25 bp, Homo sapien
catttaggtcaaaggcaagcccatt

SEQ ID NO: 830923 - DNA, 25 bp, Homo sapien
ggagaaggagtggacggtgagtctc

SEQ ID NO: 830924 - DNA, 25 bp, Homo sapien
gagaaggagtggacggtgagtctca

SEQ ID NO: 830925 - DNA, 25 bp, Homo sapien
tggagaaggagtggacggtgagtct

SEQ ID NO: 830926 - DNA, 25 bp, Homo sapien
caaggaagaggatttaactactgcc

SEQ ID NO: 830927 - DNA, 25 bp, Homo sapien
tatggcccttaaaaggtcccagcat

SEQ ID NO: 830928 - DNA, 25 bp, Homo sapien
tgcctctgctttagttgcctaagaa

SEQ ID NO: 830929 - DNA, 25 bp, Homo sapien
cccagcattatttacgtcagtacaa

SEQ ID NO: 830930 - DNA, 25 bp, Homo sapien
cctcgagagaatacaaagaagttca

SEQ ID NO: 830931 - DNA, 25 bp, Homo sapien
gtgtgaggatgggtgacagcacacc

SEQ ID NO: 830932 - DNA, 25 bp, Homo sapien
tcgtgtgaggatgggtgacagcaca

SEQ ID NO: 830933 - DNA, 25 bp, Homo sapien
aagaagttcatcagtcgtgtgagga

SEQ ID NO: 830934 - DNA, 25 bp, Homo sapien
tgctctaggccacaatctttgacag

SEQ ID NO: 830935 - DNA, 25 bp, Homo sapien
gatttggcccagaattgtaatggca

SEQ ID NO: 830936 - DNA, 25 bp, Homo sapien
tgaaagagtccaaaacgcaggaaga

SEQ ID NO: 830937 - DNA, 25 bp, Homo sapien
tggcaagcggccaacacctttgctt

SEQ ID NO: 830938 - DNA, 25 bp, Homo sapien
gagggccgagtatacggcccaaaga

SEQ ID NO: 830939 - DNA, 25 bp, Homo sapien
attgttgcggatccctgcccacatg

SEQ ID NO: 830940 - DNA, 25 bp, Homo sapien
cacagctcactctcagagggccgag

SEQ ID NO: 830941 - DNA, 25 bp, Homo sapien
actaagttcccgtcattgttgcgga

SEQ ID NO: 830942 - DNA, 25 bp, Homo sapien
gagggaggcactaggctactttcac

SEQ ID NO: 830943 - DNA, 25 bp, Homo sapien
tccccgttgctgcagaaagataggc

SEQ ID NO: 830944 - DNA, 25 bp, Homo sapien
tcctgtgatagggaataagccagca

SEQ ID NO: 830945 - DNA, 25 bp, Homo sapien
ggtttgccccataggtcatcatcag

SEQ ID NO: 830946 - DNA, 25 bp, Homo sapien
tagctctagtagtgattatgcctac

SEQ ID NO: 830947 - DNA, 25 bp, Homo sapien
gattatgcctactatcaatataaga

SEQ ID NO: 830948 - DNA, 25 bp, Homo sapien
taacctctagagttaaccaccatgt

SEQ ID NO: 830949 - DNA, 25 bp, Homo sapien
taagcagggaatgagatctaggaag

SEQ ID NO: 830950 - DNA, 25 bp, Homo sapien
taggacaggtaagtcagcatgtgca

SEQ ID NO: 830951 - DNA, 25 bp, Homo sapien
agcgccttctgaacttcttcctctg

SEQ ID NO: 830952 - DNA, 25 bp, Homo sapien
gggatagttacagaggcaagagctc

SEQ ID NO: 830953 - DNA, 25 bp, Homo sapien
ccacccagcgccttctgaacttctt

SEQ ID NO: 830954 - DNA, 25 bp, Homo sapien
tagttacagaggcaagagctcccac

SEQ ID NO: 830955 - DNA, 25 bp, Homo sapien
taaaaaactgctaggcacgtaccag

SEQ ID NO: 830956 - DNA, 25 bp, Homo sapien
tgtccgagcaattcagcatgtaatg

SEQ ID NO: 830957 - DNA, 25 bp, Homo sapien
catgtaatgtggcagtcactgacaa

SEQ ID NO: 830958 - DNA, 25 bp, Homo sapien
tctcctcctacagacaaccatttgg

SEQ ID NO: 830959 - DNA, 25 bp, Homo sapien
aaactctggatagggatttacagga

SEQ ID NO: 830960 - DNA, 25 bp, Homo sapien
tctggatagggatttacaggatcca

SEQ ID NO: 830961 - DNA, 25 bp, Homo sapien
aaaaactctggatagggatttacag

SEQ ID NO: 830962 - DNA, 25 bp, Homo sapien
actctggatagggatttacaggatc

SEQ ID NO: 830963 - DNA, 25 bp, Homo sapien
caattctgtttaccactgtcaggat

SEQ ID NO: 830964 - DNA, 25 bp, Homo sapien
ggcaattctgtttaccactgtcagg

SEQ ID NO: 830965 - DNA, 25 bp, Homo sapien
gcaattctgtttaccactgtcagga

SEQ ID NO: 830966 - DNA, 25 bp, Homo sapien
tcttaggcagataaacttgccaatt

SEQ ID NO: 830967 - DNA, 25 bp, Homo sapien
caaagagcttattcaccttctactc

SEQ ID NO: 830968 - DNA, 25 bp, Homo sapien
gatgtaagccagtgggaagccccag

SEQ ID NO: 830969 - DNA, 25 bp, Homo sapien
agtaaatgaccctgtggacacacca

SEQ ID NO: 830970 - DNA, 25 bp, Homo sapien
ggaagagaacagcacgcaggtgaac

SEQ ID NO: 830971 - DNA, 25 bp, Homo sapien
gagaacagcacgcaggtgaacttga

SEQ ID NO: 830972 - DNA, 25 bp, Homo sapien
aagagaacagcacgcaggtgaactt

SEQ ID NO: 830973 - DNA, 25 bp, Homo sapien
agaacagcacgcaggtgaacttgag

SEQ ID NO: 830974 - DNA, 25 bp, Homo sapien
tggtcatccagaatcgacactgtgg

SEQ ID NO: 830975 - DNA, 25 bp, Homo sapien
aggagttgatgaagcccatatatgc

SEQ ID NO: 830976 - DNA, 25 bp, Homo sapien
gaaggagttgatgaagcccatatat

SEQ ID NO: 830977 - DNA, 25 bp, Homo sapien
cgacactgtggaccgcggcagcgtt

SEQ ID NO: 830978 - DNA, 25 bp, Homo sapien
ggtcttcccagctaataacagtaca

SEQ ID NO: 830979 - DNA, 25 bp, Homo sapien
taattagcttcactactctggcaga

SEQ ID NO: 830980 - DNA, 25 bp, Homo sapien
taaccactgaggtatgaggagtctc

SEQ ID NO: 830981 - DNA, 25 bp, Homo sapien
tgtgcccataacgtcattcgaggag

SEQ ID NO: 830982 - DNA, 25 bp, Homo sapien
aatagaaaataaacacttattccag

SEQ ID NO: 830983 - DNA, 25 bp, Homo sapien
aagttgttatacttgaagttgctaa

SEQ ID NO: 830984 - DNA, 25 bp, Homo sapien
tcaaagttgttatacttgaagttgc

SEQ ID NO: 830985 - DNA, 25 bp, Homo sapien
ccagtttcaaagttgttatacttga

SEQ ID NO: 830986 - DNA, 25 bp, Homo sapien
aaatactatcctatactccagctgc

SEQ ID NO: 830987 - DNA, 25 bp, Homo sapien
agctttgggtgatcttgaaaatcaa

SEQ ID NO: 830988 - DNA, 25 bp, Homo sapien
tgtacctgaaagctcctggcaatgc

SEQ ID NO: 830989 - DNA, 25 bp, Homo sapien
ctttgggacgatagtgcagctttgg

SEQ ID NO: 830990 - DNA, 25 bp, Homo sapien
aatgatcagagggtaccgtgtgccc

SEQ ID NO: 830991 - DNA, 25 bp, Homo sapien
tacccactagctggaagatctcgaa

SEQ ID NO: 830992 - DNA, 25 bp, Homo sapien
tcaagtgtgggtgcaacatgactac

SEQ ID NO: 830993 - DNA, 25 bp, Homo sapien
gagttttctctaggctccggaggac

SEQ ID NO: 830994 - DNA, 25 bp, Homo sapien
gtggtgagtcttcccagcatagaga

SEQ ID NO: 830995 - DNA, 25 bp, Homo sapien
cccacagcgtggaatagactttaca

SEQ ID NO: 830996 - DNA, 25 bp, Homo sapien
taccccagacaacagggcatgtgtg

SEQ ID NO: 830997 - DNA, 25 bp, Homo sapien
tccgggactgtgaccctaacactgg

SEQ ID NO: 830998 - DNA, 25 bp, Homo sapien
gaaaacatacaactgcccacttgct

SEQ ID NO: 830999 - DNA, 25 bp, Homo sapien
ggttgacagataaagcaagttctct

SEQ ID NO: 831000 - DNA, 25 bp, Homo sapien
tactgacctactcactttaggctga

SEQ ID NO: 831001 - DNA, 25 bp, Homo sapien
tttccagaccatagacaagatccta

SEQ ID NO: 831002 - DNA, 25 bp, Homo sapien
cattgcttctcagttcagtccagac

SEQ ID NO: 831003 - DNA, 25 bp, Homo sapien
taattcgctgggttcttttcataca

SEQ ID NO: 831004 - DNA, 25 bp, Homo sapien
gctgcagttagcctgtacagatcca

SEQ ID NO: 831005 - DNA, 25 bp, Homo sapien
tctccagcagcttcgacagattact

SEQ ID NO: 831006 - DNA, 25 bp, Homo sapien
gtgtatttcccatgcagccgaccat

SEQ ID NO: 831007 - DNA, 25 bp, Homo sapien
ctttaagagctagtctgctgctgcc

SEQ ID NO: 831008 - DNA, 25 bp, Homo sapien
tctcttatgacttttggcccagcaa

SEQ ID NO: 831009 - DNA, 25 bp, Homo sapien
gccgaccatttagacctagacagga

SEQ ID NO: 831010 - DNA, 25 bp, Homo sapien
tagatcctcttggaaatccggaaaa

SEQ ID NO: 831011 - DNA, 25 bp, Homo sapien
gaaatccggaaaaccaagcttgcat

SEQ ID NO: 831012 - DNA, 25 bp, Homo sapien
tggaaatccggaaaaccaagcttgc

SEQ ID NO: 831013 - DNA, 25 bp, Homo sapien
gaatctagttcatagatcctcttgg

SEQ ID NO: 831014 - DNA, 25 bp, Homo sapien
gactataccaactgcatgaaagtga

SEQ ID NO: 831015 - DNA, 25 bp, Homo sapien
ggcctgttcagtatggaagacacta

SEQ ID NO: 831016 - DNA, 25 bp, Homo sapien
gcaccaacaaggcaatgagttcctg

SEQ ID NO: 831017 - DNA, 25 bp, Homo sapien
taactctcgccaaaggactatacca

SEQ ID NO: 831018 - DNA, 25 bp, Homo sapien
caagccgggagggtcgagccgaagt

SEQ ID NO: 831019 - DNA, 25 bp, Homo sapien
gtcgcaagccgggagggtcgagccg

SEQ ID NO: 831020 - DNA, 25 bp, Homo sapien
cgggagggtcgagccgaagtctccg

SEQ ID NO: 831021 - DNA, 25 bp, Homo sapien
gagggtcgagccgaagtctccggcg

SEQ ID NO: 831022 - DNA, 25 bp, Homo sapien
cttctataagtgcactaattgcccc

SEQ ID NO: 831023 - DNA, 25 bp, Homo sapien
tcagtatctggtgaggaccggcttt

SEQ ID NO: 831024 - DNA, 25 bp, Homo sapien
tagggactcagtatcaacatatgaa

SEQ ID NO: 831025 - DNA, 25 bp, Homo sapien
ctaataccctcataattagggactc

SEQ ID NO: 831026 - DNA, 25 bp, Homo sapien
tactttgccggagacacaaggtaca

SEQ ID NO: 831027 - DNA, 25 bp, Homo sapien
aagacacttactgacttgggagcag

SEQ ID NO: 831028 - DNA, 25 bp, Homo sapien
tgcccagaatactggactcacagtc

SEQ ID NO: 831029 - DNA, 25 bp, Homo sapien
gagcagtacgtcaactctcctgata

SEQ ID NO: 831030 - DNA, 25 bp, Homo sapien
cacaagggcatagtgataatctcaa

SEQ ID NO: 831031 - DNA, 25 bp, Homo sapien
gatcattgacacaagggcatagtga

SEQ ID NO: 831032 - DNA, 25 bp, Homo sapien
taatgggttttagatcattgacaca

SEQ ID NO: 831033 - DNA, 25 bp, Homo sapien
cacagattatagttagcttaatggg

SEQ ID NO: 831034 - DNA, 25 bp, Homo sapien
tgtgtgttacagtggcccctaagtc

SEQ ID NO: 831035 - DNA, 25 bp, Homo sapien
gacgtgtattcaaccctggtcacag

SEQ ID NO: 831036 - DNA, 25 bp, Homo sapien
ttgactcgttgctcaggatgcccag

SEQ ID NO: 831037 - DNA, 25 bp, Homo sapien
tctagtctcaaacccttgatgggcc

SEQ ID NO: 831038 - DNA, 25 bp, Homo sapien
gtgaaaaaggatgcctctggttgag

SEQ ID NO: 831039 - DNA, 25 bp, Homo sapien
ttcctgctgtaacaaccataatgct

SEQ ID NO: 831040 - DNA, 25 bp, Homo sapien
gctgtaacaaccataatgctctctg

SEQ ID NO: 831041 - DNA, 25 bp, Homo sapien
ccataatgctctctggtgaaaaagg

SEQ ID NO: 831042 - DNA, 25 bp, Homo sapien
catggagtacaagtgaaggacaggc

SEQ ID NO: 831043 - DNA, 25 bp, Homo sapien
tactttctccctcggtagacggcaa

SEQ ID NO: 831044 - DNA, 25 bp, Homo sapien
tgggccaaggcccaaagactgaagg

SEQ ID NO: 831045 - DNA, 25 bp, Homo sapien
tcccagggatccaagcatcagttag

SEQ ID NO: 831046 - DNA, 25 bp, Homo sapien
gcatcaggtatggagaggtttcttt

SEQ ID NO: 831047 - DNA, 25 bp, Homo sapien
tgcatcaggtatggagaggtttctt

SEQ ID NO: 831048 - DNA, 25 bp, Homo sapien
ctttatgcatcaggtatggagaggt

SEQ ID NO: 831049 - DNA, 25 bp, Homo sapien
tatgcatcaggtatggagaggtttc

SEQ ID NO: 831050 - DNA, 25 bp, Homo sapien
caggctctctcattaggatgtaagc

SEQ ID NO: 831051 - DNA, 25 bp, Homo sapien
ggctctctcattaggatgtaagctc

SEQ ID NO: 831052 - DNA, 25 bp, Homo sapien
ttgcttgttatcaggctctctcatt

SEQ ID NO: 831053 - DNA, 25 bp, Homo sapien
gctctctcattaggatgtaagctcc

SEQ ID NO: 831054 - DNA, 25 bp, Homo sapien
tcttcatggccaggtttaaggccca

SEQ ID NO: 831055 - DNA, 25 bp, Homo sapien
ttaaggcccaggtcttgacagaaga

SEQ ID NO: 831056 - DNA, 25 bp, Homo sapien
tttactgccatgtgagatcctgaat

SEQ ID NO: 831057 - DNA, 25 bp, Homo sapien
tatatgatccctttaatagatgccc

SEQ ID NO: 831058 - DNA, 25 bp, Homo sapien
agaaggaggagttgttgaaggagga

SEQ ID NO: 831059 - DNA, 25 bp, Homo sapien
tgtgctcagccaagaaagaaaggag

SEQ ID NO: 831060 - DNA, 25 bp, Homo sapien
aggagaaggaggagttgttgaagga

SEQ ID NO: 831061 - DNA, 25 bp, Homo sapien
aaggaggagttgttgaaggaggatg

SEQ ID NO: 831062 - DNA, 25 bp, Homo sapien
tctgcttacgcaggtaggagccctc

SEQ ID NO: 831063 - DNA, 25 bp, Homo sapien
taaataaatagtctgtggtgcaccc

SEQ ID NO: 831064 - DNA, 25 bp, Homo sapien
taaaagctcaaagagggcagggccg

SEQ ID NO: 831065 - DNA, 25 bp, Homo sapien
tctttagcaggtaggatcacagcaa

SEQ ID NO: 831066 - DNA, 25 bp, Homo sapien
ttcacagggagccaactgatctggc

SEQ ID NO: 831067 - DNA, 25 bp, Homo sapien
acaaagccacgggaagtttgacagg

SEQ ID NO: 831068 - DNA, 25 bp, Homo sapien
tttgacagggtggagcacaccgcag

SEQ ID NO: 831069 - DNA, 25 bp, Homo sapien
gggcttatggataaaccctcatctc

SEQ ID NO: 831070 - DNA, 25 bp, Homo sapien
tactatgcttccattgcaggaaaaa

SEQ ID NO: 831071 - DNA, 25 bp, Homo sapien
ttactatgcttccattgcaggaaaa

SEQ ID NO: 831072 - DNA, 25 bp, Homo sapien
attactatgcttccattgcaggaaa

SEQ ID NO: 831073 - DNA, 25 bp, Homo sapien
aattactatgcttccattgcaggaa

SEQ ID NO: 831074 - DNA, 25 bp, Homo sapien
cacccggctgtcatgtgtaccactg

SEQ ID NO: 831075 - DNA, 25 bp, Homo sapien
tattaataatacgagacttcaactc

SEQ ID NO: 831076 - DNA, 25 bp, Homo sapien
gacttcaactctcggacttcatttc

SEQ ID NO: 831077 - DNA, 25 bp, Homo sapien
accactgttgtgcttatattaataa

SEQ ID NO: 831078 - DNA, 25 bp, Homo sapien
ctgcaaggcatctatctgcaagcct

SEQ ID NO: 831079 - DNA, 25 bp, Homo sapien
ggatgatgtcacaccaagcatgcca

SEQ ID NO: 831080 - DNA, 25 bp, Homo sapien
ggagaatgtgatccaggatgatgtc

SEQ ID NO: 831081 - DNA, 25 bp, Homo sapien
cttggtgtgatggtgtcaagagcat

SEQ ID NO: 831082 - DNA, 25 bp, Homo sapien
taagacacaggtcaagtggacaaaa

SEQ ID NO: 831083 - DNA, 25 bp, Homo sapien
aatgtctgtgtccccgcaatattca

SEQ ID NO: 831084 - DNA, 25 bp, Homo sapien
attaggagacctacatttcagtcca

SEQ ID NO: 831085 - DNA, 25 bp, Homo sapien
ttcagtccaacataagacacaggtc

SEQ ID NO: 831086 - DNA, 25 bp, Homo sapien
atacgcgtacttgaaaaaaccgcag

SEQ ID NO: 831087 - DNA, 25 bp, Homo sapien
ttcacaaaatgaatacgcgtacttg

SEQ ID NO: 831088 - DNA, 25 bp, Homo sapien
cacaaaatgaatacgcgtacttgaa

SEQ ID NO: 831089 - DNA, 25 bp, Homo sapien
gcgtacttgaaaaaaccgcagagat

SEQ ID NO: 831090 - DNA, 25 bp, Homo sapien
tgtggtgttccttcattgtggctat

SEQ ID NO: 831091 - DNA, 25 bp, Homo sapien
tggtcagcccaaatacagtttaaca

SEQ ID NO: 831092 - DNA, 25 bp, Homo sapien
taactctggttaatttggtcagccc

SEQ ID NO: 831093 - DNA, 25 bp, Homo sapien
tgtcatctgtgtaaggttgtgctgg

SEQ ID NO: 831094 - DNA, 25 bp, Homo sapien
gaggaactgtgatacctgagaccag

SEQ ID NO: 831095 - DNA, 25 bp, Homo sapien
caaaggactttgttgaaggctatac

SEQ ID NO: 831096 - DNA, 25 bp, Homo sapien
tagcaaggacatgggacacaagact

SEQ ID NO: 831097 - DNA, 25 bp, Homo sapien
ttcacagcaaagcaacggaacaggg

SEQ ID NO: 831098 - DNA, 25 bp, Homo sapien
ttttcggtcctgcctgcacatattg

SEQ ID NO: 831099 - DNA, 25 bp, Homo sapien
tttcggtcctgcctgcacatattgt

SEQ ID NO: 831100 - DNA, 25 bp, Homo sapien
ttcggtcctgcctgcacatattgtt

SEQ ID NO: 831101 - DNA, 25 bp, Homo sapien
tcggtcctgcctgcacatattgtta

SEQ ID NO: 831102 - DNA, 25 bp, Homo sapien
gcacttcttacacggcagtgacaag

SEQ ID NO: 831103 - DNA, 25 bp, Homo sapien
aggcacttcttacacggcagtgaca

SEQ ID NO: 831104 - DNA, 25 bp, Homo sapien
cttacacggcagtgacaagagaaaa

SEQ ID NO: 831105 - DNA, 25 bp, Homo sapien
cttcttacacggcagtgacaagaga

SEQ ID NO: 831106 - DNA, 25 bp, Homo sapien
gaaaatgagttggctctaagtacaa

SEQ ID NO: 831107 - DNA, 25 bp, Homo sapien
gttctagcagattcatagttttagg

SEQ ID NO: 831108 - DNA, 25 bp, Homo sapien
ccagtatgtgttcttagtgcctttg

SEQ ID NO: 831109 - DNA, 25 bp, Homo sapien
tatttttctgcaaacagatatacag

SEQ ID NO: 831110 - DNA, 25 bp, Homo sapien
agaacagctttccttggtcagtgag

SEQ ID NO: 831111 - DNA, 25 bp, Homo sapien
aagaggcgttttccactcaggtggc

SEQ ID NO: 831112 - DNA, 25 bp, Homo sapien
taagctgacggaaggatttttggca

SEQ ID NO: 831113 - DNA, 25 bp, Homo sapien
gaagccaccctgttttgaagaggcg

SEQ ID NO: 831114 - DNA, 25 bp, Homo sapien
ttcttttggtgttcagagtcaatat

SEQ ID NO: 831115 - DNA, 25 bp, Homo sapien
gttataatgattggggaagagcacc

SEQ ID NO: 831116 - DNA, 25 bp, Homo sapien
tcttttggtgttcagagtcaatata

SEQ ID NO: 831117 - DNA, 25 bp, Homo sapien
caccatctgaaatcggttataatga

SEQ ID NO: 831118 - DNA, 25 bp, Homo sapien
tgattagcactgaacccacttggaa

SEQ ID NO: 831119 - DNA, 25 bp, Homo sapien
cagactaagtgaatggtacagccag

SEQ ID NO: 831120 - DNA, 25 bp, Homo sapien
gacccaaggtaaacagcctgcagtg

SEQ ID NO: 831121 - DNA, 25 bp, Homo sapien
gaatgttatgctaatcagacccaag

SEQ ID NO: 831122 - DNA, 25 bp, Homo sapien
attgcaggcatcccatacccggcta

SEQ ID NO: 831123 - DNA, 25 bp, Homo sapien
ttgcaggcatcccatacccggctaa

SEQ ID NO: 831124 - DNA, 25 bp, Homo sapien
ttctcagtagagttgcccttgcagc

SEQ ID NO: 831125 - DNA, 25 bp, Homo sapien
tctgttctcctatgcatgccctgga

SEQ ID NO: 831126 - DNA, 25 bp, Homo sapien
gaaattcagccctagtgtatcctgg

SEQ ID NO: 831127 - DNA, 25 bp, Homo sapien
tattttcaggaaactagcctcttgc

SEQ ID NO: 831128 - DNA, 25 bp, Homo sapien
catttaccagctgtggtggatctct

SEQ ID NO: 831129 - DNA, 25 bp, Homo sapien
tattacgtttattatcatagctacc

SEQ ID NO: 831130 - DNA, 25 bp, Homo sapien
cagtcagttactccagaatgtgtca

SEQ ID NO: 831131 - DNA, 25 bp, Homo sapien
gaatgtgtcaatgtatggcaaagca

SEQ ID NO: 831132 - DNA, 25 bp, Homo sapien
ctggccagtaagcacggggaatgct

SEQ ID NO: 831133 - DNA, 25 bp, Homo sapien
tgttctggttcctcggtggagctgt

SEQ ID NO: 831134 - DNA, 25 bp, Homo sapien
tggagctgtaatcattaacttagaa

SEQ ID NO: 831135 - DNA, 25 bp, Homo sapien
atctgggcaacatcatccccactgg

SEQ ID NO: 831136 - DNA, 25 bp, Homo sapien
aagggacaaacttccagtgctcact

SEQ ID NO: 831137 - DNA, 25 bp, Homo sapien
tgctcactgaggagccaggggtatc

SEQ ID NO: 831138 - DNA, 25 bp, Homo sapien
agtgctcactgaggagccaggggta

SEQ ID NO: 831139 - DNA, 25 bp, Homo sapien
ctatagaagggacaaacttccagtg

SEQ ID NO: 831140 - DNA, 25 bp, Homo sapien
ggcttctgcccctagactggaactg

SEQ ID NO: 831141 - DNA, 25 bp, Homo sapien
ggaagcccatgagtgcagcgtgctc

SEQ ID NO: 831142 - DNA, 25 bp, Homo sapien
tgcagtggcaggctggcttctgccc

SEQ ID NO: 831143 - DNA, 25 bp, Homo sapien
ttgacccgtgacttcccgccagagc

SEQ ID NO: 831144 - DNA, 25 bp, Homo sapien
ccctgagaattggactccattccac

SEQ ID NO: 831145 - DNA, 25 bp, Homo sapien
cagtgacgattgtgctctccaccag

SEQ ID NO: 831146 - DNA, 25 bp, Homo sapien
ggacacaccggagcactttctctgt

SEQ ID NO: 831147 - DNA, 25 bp, Homo sapien
ctcatccagtctccagtgacgattg

SEQ ID NO: 831148 - DNA, 25 bp, Homo sapien
tgttaagaccactgtgcgtccataa

SEQ ID NO: 831149 - DNA, 25 bp, Homo sapien
gaccactgtgcgtccataatggcct

SEQ ID NO: 831150 - DNA, 25 bp, Homo sapien
tccataatggccttccctcagatct

SEQ ID NO: 831151 - DNA, 25 bp, Homo sapien
gagtttcgctgtgttaagaccactg

SEQ ID NO: 831152 - DNA, 25 bp, Homo sapien
tgcaccaagatctctgcacccaggg

SEQ ID NO: 831153 - DNA, 25 bp, Homo sapien
ctgcaccaagatctctgcacccagg

SEQ ID NO: 831154 - DNA, 25 bp, Homo sapien
ccagaaaccagccatgtgtggcgtc

SEQ ID NO: 831155 - DNA, 25 bp, Homo sapien
cccagaaaaggacatgagcaggtac

SEQ ID NO: 831156 - DNA, 25 bp, Homo sapien
agcaggtactcagccccgccacaca

SEQ ID NO: 831157 - DNA, 25 bp, Homo sapien
aaaccagccatgtgtggcgtcccca

SEQ ID NO: 831158 - DNA, 25 bp, Homo sapien
gatgccataggagagaacccatttc

SEQ ID NO: 831159 - DNA, 25 bp, Homo sapien
ttgggaagagccatcgactcacccc

SEQ ID NO: 831160 - DNA, 25 bp, Homo sapien
gaggactttgggaatcacagatgcc

SEQ ID NO: 831161 - DNA, 25 bp, Homo sapien
ccttcctgcttgattgaggactttg

SEQ ID NO: 831162 - DNA, 25 bp, Homo sapien
gagaaacggcgagagaactcggaca

SEQ ID NO: 831163 - DNA, 25 bp, Homo sapien
agaagatgcccttgaagctcacaag

SEQ ID NO: 831164 - DNA, 25 bp, Homo sapien
caagtgcctcttgggatggagtaaa

SEQ ID NO: 831165 - DNA, 25 bp, Homo sapien
gaaagaattgagcaatgttctaaga

SEQ ID NO: 831166 - DNA, 25 bp, Homo sapien
tatgccacactagttcttaataaaa

SEQ ID NO: 831167 - DNA, 25 bp, Homo sapien
atgccacactagttcttaataaaac

SEQ ID NO: 831168 - DNA, 25 bp, Homo sapien
gagaattaacctgcttttggattag

SEQ ID NO: 831169 - DNA, 25 bp, Homo sapien
tctggtgaccacactaaaaagatta

SEQ ID NO: 831170 - DNA, 25 bp, Homo sapien
gattaatgagcacttagcaccaaat

SEQ ID NO: 831171 - DNA, 25 bp, Homo sapien
gttcatagtacaaatgtgacagcgt

SEQ ID NO: 831172 - DNA, 25 bp, Homo sapien
tgtcaatgtttgtcacggactgaaa

SEQ ID NO: 831173 - DNA, 25 bp, Homo sapien
gtcctttccctttacagtgcttgat

SEQ ID NO: 831174 - DNA, 25 bp, Homo sapien
cacgtcttgtcaatgtttgtcacgg

SEQ ID NO: 831175 - DNA, 25 bp, Homo sapien
tgcttgatgaggtacacgtcttgtc

SEQ ID NO: 831176 - DNA, 25 bp, Homo sapien
aggcatcgggcacatttctgtcatc

SEQ ID NO: 831177 - DNA, 25 bp, Homo sapien
ctgtgtgactgtggacctctgccgc

SEQ ID NO: 831178 - DNA, 25 bp, Homo sapien
gaaggcatcgggcacatttctgtca

SEQ ID NO: 831179 - DNA, 25 bp, Homo sapien
tgtgactgtggacctctgccgcagg

SEQ ID NO: 831180 - DNA, 25 bp, Homo sapien
ttaaggcacgtgctggtcactgtgg

SEQ ID NO: 831181 - DNA, 25 bp, Homo sapien
tgctctgagtttaaggcacgtgctg

SEQ ID NO: 831182 - DNA, 25 bp, Homo sapien
gtggccgccaggaacagatagccca

SEQ ID NO: 831183 - DNA, 25 bp, Homo sapien
ctgtgggagccattaaagaaggtat

SEQ ID NO: 831184 - DNA, 25 bp, Homo sapien
tagcaaacgctctcacctggcttgg

SEQ ID NO: 831185 - DNA, 25 bp, Homo sapien
ctagtgcagatggtagcaaacgctc

SEQ ID NO: 831186 - DNA, 25 bp, Homo sapien
ggcttggcaacacttcttcacctct

SEQ ID NO: 831187 - DNA, 25 bp, Homo sapien
ctgcgtgctagtgcagatggtagca

SEQ ID NO: 831188 - DNA, 25 bp, Homo sapien
acacgtggaatctgtggcccagcct

SEQ ID NO: 831189 - DNA, 25 bp, Homo sapien
cagcattcgccagcgtcaggtcaga

SEQ ID NO: 831190 - DNA, 25 bp, Homo sapien
gatgacccgcattgcctgacagaga

SEQ ID NO: 831191 - DNA, 25 bp, Homo sapien
cacaatgagcccgtcagagaatggg

SEQ ID NO: 831192 - DNA, 25 bp, Homo sapien
ggccaaaggactggtgttgagcaga

SEQ ID NO: 831193 - DNA, 25 bp, Homo sapien
gttaatcctgaaaagtgaagcctgc

SEQ ID NO: 831194 - DNA, 25 bp, Homo sapien
cagtgttggttaatcctgaaaagtg

SEQ ID NO: 831195 - DNA, 25 bp, Homo sapien
cgtgttccacacaggcgagcactgt

SEQ ID NO: 831196 - DNA, 25 bp, Homo sapien
gcagactggggcggtgctctccgca

SEQ ID NO: 831197 - DNA, 25 bp, Homo sapien
atagcagactggggcggtgctctcc

SEQ ID NO: 831198 - DNA, 25 bp, Homo sapien
ttaatagcagactggggcggtgctc

SEQ ID NO: 831199 - DNA, 25 bp, Homo sapien
cagactggggcggtgctctccgcag

SEQ ID NO: 831200 - DNA, 25 bp, Homo sapien
tgtgtcgtcctcgtcctggccaact

SEQ ID NO: 831201 - DNA, 25 bp, Homo sapien
caaggtgttgacagtaaatcttttg

SEQ ID NO: 831202 - DNA, 25 bp, Homo sapien
ccaactagactcagagggaggactg

SEQ ID NO: 831203 - DNA, 25 bp, Homo sapien
gatgctggcatgtaatggacccttt

SEQ ID NO: 831204 - DNA, 25 bp, Homo sapien
aagttggttttattagattacagag

SEQ ID NO: 831205 - DNA, 25 bp, Homo sapien
gagaatactttctctatccaaaatc

SEQ ID NO: 831206 - DNA, 25 bp, Homo sapien
ggttttattagattacagagaatac

SEQ ID NO: 831207 - DNA, 25 bp, Homo sapien
tctagactgggccatgagcgagact

SEQ ID NO: 831208 - DNA, 25 bp, Homo sapien
acgcccagcctgtatagacactttc

SEQ ID NO: 831209 - DNA, 25 bp, Homo sapien
accacgcccagcctgtatagacact

SEQ ID NO: 831210 - DNA, 25 bp, Homo sapien
agccttgctctgtcacccaggctgg

SEQ ID NO: 831211 - DNA, 25 bp, Homo sapien
gccttgctctgtcacccaggctgga

SEQ ID NO: 831212 - DNA, 25 bp, Homo sapien
tactgaactgtcacggcagacctct

SEQ ID NO: 831213 - DNA, 25 bp, Homo sapien
gaaatccctcctttataatggcagg

SEQ ID NO: 831214 - DNA, 25 bp, Homo sapien
gactggccccatcgcagaggattag

SEQ ID NO: 831215 - DNA, 25 bp, Homo sapien
tggtcactgcgtgtcatctcgaggg

SEQ ID NO: 831216 - DNA, 25 bp, Homo sapien
cacgcgcaccgaaggtctaagcatt

SEQ ID NO: 831217 - DNA, 25 bp, Homo sapien
aattacttttctggtcacgcgcacc

SEQ ID NO: 831218 - DNA, 25 bp, Homo sapien
taaaattaggcgtgtctggtcaaca

SEQ ID NO: 831219 - DNA, 25 bp, Homo sapien
ggttaatgctccaaccagcctcaga

SEQ ID NO: 831220 - DNA, 25 bp, Homo sapien
tttggagattacatcacgcaggctg

SEQ ID NO: 831221 - DNA, 25 bp, Homo sapien
attacatcacgcaggctgggcacag

SEQ ID NO: 831222 - DNA, 25 bp, Homo sapien
cctcaatttggagattacatcacgc

SEQ ID NO: 831223 - DNA, 25 bp, Homo sapien
gagattacatcacgcaggctgggca

SEQ ID NO: 831224 - DNA, 25 bp, Homo sapien
taaacgaatggacggatgtgtagct

SEQ ID NO: 831225 - DNA, 25 bp, Homo sapien
ggctggtgcccttccgttgtgagac

SEQ ID NO: 831226 - DNA, 25 bp, Homo sapien
cagaactcaaacacggccttaggac

SEQ ID NO: 831227 - DNA, 25 bp, Homo sapien
tgatgatgaaactggcttagcgagg

SEQ ID NO: 831228 - DNA, 25 bp, Homo sapien
ccttaaagttcactgcacgggccat

SEQ ID NO: 831229 - DNA, 25 bp, Homo sapien
caccttacaagtgagctacattgga

SEQ ID NO: 831230 - DNA, 25 bp, Homo sapien
cattattcaaccaagaaagtgagca

SEQ ID NO: 831231 - DNA, 25 bp, Homo sapien
caagcattcgaatttccccaaaggc

SEQ ID NO: 831232 - DNA, 25 bp, Homo sapien
cagtgaccctatgtgattcatgcag

SEQ ID NO: 831233 - DNA, 25 bp, Homo sapien
gcctccgaggactgtgaagggaaca

SEQ ID NO: 831234 - DNA, 25 bp, Homo sapien
ctgcctccgaggactgtgaagggaa

SEQ ID NO: 831235 - DNA, 25 bp, Homo sapien
tgcctccgaggactgtgaagggaac

SEQ ID NO: 831236 - DNA, 25 bp, Homo sapien
tagctgttgtgacgtcaaggctgcc

SEQ ID NO: 831237 - DNA, 25 bp, Homo sapien
tcagtagcccggacaagctgttgtt

SEQ ID NO: 831238 - DNA, 25 bp, Homo sapien
tccaggttccgtgaaggcaattagc

SEQ ID NO: 831239 - DNA, 25 bp, Homo sapien
ttgatcagcctagagagagaccgcc

SEQ ID NO: 831240 - DNA, 25 bp, Homo sapien
ggtagattctgttgtaggtgtcgta

SEQ ID NO: 831241 - DNA, 25 bp, Homo sapien
gattctgttgtaggtgtcgtaagtg

SEQ ID NO: 831242 - DNA, 25 bp, Homo sapien
tagattctgttgtaggtgtcgtaag

SEQ ID NO: 831243 - DNA, 25 bp, Homo sapien
tctgttgtaggtgtcgtaagtgaca

SEQ ID NO: 831244 - DNA, 25 bp, Homo sapien
caagacagaagactttgttagctac

SEQ ID NO: 831245 - DNA, 25 bp, Homo sapien
gactttgttagctacccaggtaaga

SEQ ID NO: 831246 - DNA, 25 bp, Homo sapien
gaacagaccgcagattcctgttgag

SEQ ID NO: 831247 - DNA, 25 bp, Homo sapien
gtccaaagaccagattccagaacag

SEQ ID NO: 831248 - DNA, 25 bp, Homo sapien
gattttagtccctcagctaataata

SEQ ID NO: 831249 - DNA, 25 bp, Homo sapien
ttgtcatcagaagaacgccaggcag

SEQ ID NO: 831250 - DNA, 25 bp, Homo sapien
tagtccctcagctaataatactatt

SEQ ID NO: 831251 - DNA, 25 bp, Homo sapien
aaattgatggagaaatttaactgga

SEQ ID NO: 831252 - DNA, 25 bp, Homo sapien
atacaggtcgggacccaggcgaagt

SEQ ID NO: 831253 - DNA, 25 bp, Homo sapien
tagctcagccatctgaattggcacc

SEQ ID NO: 831254 - DNA, 25 bp, Homo sapien
tctcgctgaatgacgggtgccttgc

SEQ ID NO: 831255 - DNA, 25 bp, Homo sapien
tgccttgcagttggcttcagatgtt

SEQ ID NO: 831256 - DNA, 25 bp, Homo sapien
tcagccggacctggaaatgttctcg

SEQ ID NO: 831257 - DNA, 25 bp, Homo sapien
catgatgtcctggattcagcgggtc

SEQ ID NO: 831258 - DNA, 25 bp, Homo sapien
taggactaggtcatggatcattggc

SEQ ID NO: 831259 - DNA, 25 bp, Homo sapien
gctgactgccatcaggaggtgtgac

SEQ ID NO: 831260 - DNA, 25 bp, Homo sapien
tcaagcccccgccagggaaaacaca

SEQ ID NO: 831261 - DNA, 25 bp, Homo sapien
ggaaaacacaatctgctctgagggc

SEQ ID NO: 831262 - DNA, 25 bp, Homo sapien
tgctctgagggcctttgacaaactg

SEQ ID NO: 831263 - DNA, 25 bp, Homo sapien
ccagggaaaacacaatctgctctga

SEQ ID NO: 831264 - DNA, 25 bp, Homo sapien
tgatttcacttatttgcctgaagcc

SEQ ID NO: 831265 - DNA, 25 bp, Homo sapien
tagtgggccagagaatagaaaccaa

SEQ ID NO: 831266 - DNA, 25 bp, Homo sapien
tgaagccacccaataagtcagtagt

SEQ ID NO: 831267 - DNA, 25 bp, Homo sapien
gaagatggtgtcttcttgatttcac

SEQ ID NO: 831268 - DNA, 25 bp, Homo sapien
tgtgtgtgctgacctagtttcacca

SEQ ID NO: 831269 - DNA, 25 bp, Homo sapien
gctgtgtgtgctgacctagtttcac

SEQ ID NO: 831270 - DNA, 25 bp, Homo sapien
tgtgctgacctagtttcaccaccga

SEQ ID NO: 831271 - DNA, 25 bp, Homo sapien
tgctgacctagtttcaccaccgaac

SEQ ID NO: 831272 - DNA, 25 bp, Homo sapien
acaaacattttagggtcacatttca

SEQ ID NO: 831273 - DNA, 25 bp, Homo sapien
cattttagggtcacatttcagcatg

SEQ ID NO: 831274 - DNA, 25 bp, Homo sapien
ggccatactgtccttctttaaatga

SEQ ID NO: 831275 - DNA, 25 bp, Homo sapien
tgtccaccttgaacccagctacaaa

SEQ ID NO: 831276 - DNA, 25 bp, Homo sapien
ccttgttgggttctggttaatgcct

SEQ ID NO: 831277 - DNA, 25 bp, Homo sapien
ggccatttagcccatcaactgagat

SEQ ID NO: 831278 - DNA, 25 bp, Homo sapien
gatggcatctaaagcattgtcttcc

SEQ ID NO: 831279 - DNA, 25 bp, Homo sapien
gtacagcttataaatggtagaccca

SEQ ID NO: 831280 - DNA, 25 bp, Homo sapien
gaagacatgcagtcgtcctgcctag

SEQ ID NO: 831281 - DNA, 25 bp, Homo sapien
tcatccccgccacgatggagaagtg

SEQ ID NO: 831282 - DNA, 25 bp, Homo sapien
gttataacatgtggcagcttctccc

SEQ ID NO: 831283 - DNA, 25 bp, Homo sapien
tatttaggaccagctacagagacgt

SEQ ID NO: 831284 - DNA, 25 bp, Homo sapien
accttctgcgagtcagaatttttgc

SEQ ID NO: 831285 - DNA, 25 bp, Homo sapien
cctctcaaccttctgcgagtcagaa

SEQ ID NO: 831286 - DNA, 25 bp, Homo sapien
aaaggcaccctctcaaccttctgcg

SEQ ID NO: 831287 - DNA, 25 bp, Homo sapien
tctgcgagtcagaatttttgctgcc

SEQ ID NO: 831288 - DNA, 25 bp, Homo sapien
gaaatctctgtcctttgagggtagg

SEQ ID NO: 831289 - DNA, 25 bp, Homo sapien
tgtgggcttctgacgacactgatgc

SEQ ID NO: 831290 - DNA, 25 bp, Homo sapien
cacagggctgaataggcagggcttt

SEQ ID NO: 831291 - DNA, 25 bp, Homo sapien
tatccacagcggtgggaaatctctg

SEQ ID NO: 831292 - DNA, 25 bp, Homo sapien
gatgtccaagttactcagtggcctg

SEQ ID NO: 831293 - DNA, 25 bp, Homo sapien
tgggcataatcagaagatggcagca

SEQ ID NO: 831294 - DNA, 25 bp, Homo sapien
aaaaatgtttacactccactgggca

SEQ ID NO: 831295 - DNA, 25 bp, Homo sapien
tgtaagaatacgttgcaggagagtt

SEQ ID NO: 831296 - DNA, 25 bp, Homo sapien
ctgataggactggaggtagctgtat

SEQ ID NO: 831297 - DNA, 25 bp, Homo sapien
ctagtatggaatgttgtgaatttaa

SEQ ID NO: 831298 - DNA, 25 bp, Homo sapien
tattttatctcaaagtggtgctgat

SEQ ID NO: 831299 - DNA, 25 bp, Homo sapien
ggaatatctgtgaatttttaattca

SEQ ID NO: 831300 - DNA, 25 bp, Homo sapien
cagaaaccaggggtgttacttctat

SEQ ID NO: 831301 - DNA, 25 bp, Homo sapien
cttgaaggtaaaaggtgggagcacg

SEQ ID NO: 831302 - DNA, 25 bp, Homo sapien
gtaaaaggtgggagcacgactggag

SEQ ID NO: 831303 - DNA, 25 bp, Homo sapien
aaggtaaaaggtgggagcacgactg

SEQ ID NO: 831304 - DNA, 25 bp, Homo sapien
cctccatagaagatcctgtgacact

SEQ ID NO: 831305 - DNA, 25 bp, Homo sapien
tgatcctctctccagagatgtgatg

SEQ ID NO: 831306 - DNA, 25 bp, Homo sapien
ataatgaagaggcttcgtcacctcc

SEQ ID NO: 831307 - DNA, 25 bp, Homo sapien
tgtgacactagcctaattctgacac

SEQ ID NO: 831308 - DNA, 25 bp, Homo sapien
cagtgggtttccccaggaccgatgt

SEQ ID NO: 831309 - DNA, 25 bp, Homo sapien
agggtccttgtgcaggaattgtgca

SEQ ID NO: 831310 - DNA, 25 bp, Homo sapien
caggaccgatgttaacgcagagggt

SEQ ID NO: 831311 - DNA, 25 bp, Homo sapien
aattgtgcagaaactaggtgggaag

SEQ ID NO: 831312 - DNA, 25 bp, Homo sapien
gtgtctgacatgaactgggaacttg

SEQ ID NO: 831313 - DNA, 25 bp, Homo sapien
acagacatttggagttccacggcaa

SEQ ID NO: 831314 - DNA, 25 bp, Homo sapien
gtctgacatgaactgggaacttggg

SEQ ID NO: 831315 - DNA, 25 bp, Homo sapien
catgaactgggaacttggggcatct

SEQ ID NO: 831316 - DNA, 25 bp, Homo sapien
tgtcccgggcttgtgtgtgtagtca

SEQ ID NO: 831317 - DNA, 25 bp, Homo sapien
gtgggtgtcccgggcttgtgtgtgt

SEQ ID NO: 831318 - DNA, 25 bp, Homo sapien
caacagtggaggtgccacgtggcac

SEQ ID NO: 831319 - DNA, 25 bp, Homo sapien
tgtgtgtagtcacaacagtggaggt

SEQ ID NO: 831320 - DNA, 25 bp, Homo sapien
gcagatatctgctggccgcctggtt

SEQ ID NO: 831321 - DNA, 25 bp, Homo sapien
ccttgaacctgagaatgccagagga

SEQ ID NO: 831322 - DNA, 25 bp, Homo sapien
tatggcaagtgcaagtcacaatccc

SEQ ID NO: 831323 - DNA, 25 bp, Homo sapien
taagtacgagaaagctaatggcgca

SEQ ID NO: 831324 - DNA, 25 bp, Homo sapien
aaggtcaaagtgtcccgtttcgctg

SEQ ID NO: 831325 - DNA, 25 bp, Homo sapien
cagtaaacaaggtcaaagtgtcccg

SEQ ID NO: 831326 - DNA, 25 bp, Homo sapien
caaggtcaaagtgtcccgtttcgct

SEQ ID NO: 831327 - DNA, 25 bp, Homo sapien
ctgcagtaaacaaggtcaaagtgtc

SEQ ID NO: 831328 - DNA, 25 bp, Homo sapien
caacagcagtccaggtgctaatgca

SEQ ID NO: 831329 - DNA, 25 bp, Homo sapien
ccaccggtgatgtcaggagttacga

SEQ ID NO: 831330 - DNA, 25 bp, Homo sapien
tctgtgagtatttgttcagccacgg

SEQ ID NO: 831331 - DNA, 25 bp, Homo sapien
tcagccacgggtgattcaagagagt

SEQ ID NO: 831332 - DNA, 25 bp, Homo sapien
acctgctctcaaccatgttaatttt

SEQ ID NO: 831333 - DNA, 25 bp, Homo sapien
cacctgctctcaaccatgttaattt

SEQ ID NO: 831334 - DNA, 25 bp, Homo sapien
acacctgctctcaaccatgttaatt

SEQ ID NO: 831335 - DNA, 25 bp, Homo sapien
cctgctctcaaccatgttaattttt

SEQ ID NO: 831336 - DNA, 25 bp, Homo sapien
tgtcatgtaatactccatctggaag

SEQ ID NO: 831337 - DNA, 25 bp, Homo sapien
gaagattgtatgcttctcagcttcc

SEQ ID NO: 831338 - DNA, 25 bp, Homo sapien
gaaatacgcagaactgattcctgtc

SEQ ID NO: 831339 - DNA, 25 bp, Homo sapien
gccagctacctcttgtgtttaagaa

SEQ ID NO: 831340 - DNA, 25 bp, Homo sapien
tcaggctggaacttgccctgtctcc

SEQ ID NO: 831341 - DNA, 25 bp, Homo sapien
gggactggaaccatctcagaagcca

SEQ ID NO: 831342 - DNA, 25 bp, Homo sapien
cccacagcagcagtgagggtcagtg

SEQ ID NO: 831343 - DNA, 25 bp, Homo sapien
cctgtctcctcgcagatgaggtagg

SEQ ID NO: 831344 - DNA, 25 bp, Homo sapien
tcccattaggaaaaatgaggaagct

SEQ ID NO: 831345 - DNA, 25 bp, Homo sapien
ttagtgctttgattttcccattagg

SEQ ID NO: 831346 - DNA, 25 bp, Homo sapien
ttgattttcccattaggaaaaatga

SEQ ID NO: 831347 - DNA, 25 bp, Homo sapien
gtgctttgattttcccattaggaaa

SEQ ID NO: 831348 - DNA, 25 bp, Homo sapien
tcacttcatgagctttccttttttt

SEQ ID NO: 831349 - DNA, 25 bp, Homo sapien
cacttcatgagctttcctttttttg

SEQ ID NO: 831350 - DNA, 25 bp, Homo sapien
ttcctgtgggccacgttcgtcagat

SEQ ID NO: 831351 - DNA, 25 bp, Homo sapien
agtggattccgctgtagccaaagcc

SEQ ID NO: 831352 - DNA, 25 bp, Homo sapien
tgtagccaaagccaatagtcgccct

SEQ ID NO: 831353 - DNA, 25 bp, Homo sapien
ctggcttttgcaccggtgaccaagt

SEQ ID NO: 831354 - DNA, 25 bp, Homo sapien
agctgctgatccgtgccatcccagt

SEQ ID NO: 831355 - DNA, 25 bp, Homo sapien
atgtggcgcccatgacttggcaggc

SEQ ID NO: 831356 - DNA, 25 bp, Homo sapien
cttggcaggcgggagaagcacactt

SEQ ID NO: 831357 - DNA, 25 bp, Homo sapien
gcatagaggactgggatgtggcgcc

SEQ ID NO: 831358 - DNA, 25 bp, Homo sapien
tctttgttgtacatatgcgatgaag

SEQ ID NO: 831359 - DNA, 25 bp, Homo sapien
tttgttgtacatatgcgatgaaggc

SEQ ID NO: 831360 - DNA, 25 bp, Homo sapien
ctatagaatgaagacggattgtgct

SEQ ID NO: 831361 - DNA, 25 bp, Homo sapien
cggattgtgctgcacgttgtcatgg

SEQ ID NO: 831362 - DNA, 25 bp, Homo sapien
aatgatgtaatttccgtcaaaatcc

SEQ ID NO: 831363 - DNA, 25 bp, Homo sapien
ctggctcagaccaaacatgaaggtc

SEQ ID NO: 831364 - DNA, 25 bp, Homo sapien
tcacctgcccacatttagtagggtt

SEQ ID NO: 831365 - DNA, 25 bp, Homo sapien
tagtagggttgacagcaccagaaac

SEQ ID NO: 831366 - DNA, 25 bp, Homo sapien
tctccactcatttgaaataccacct

SEQ ID NO: 831367 - DNA, 25 bp, Homo sapien
tgtttggacttgtatctttgtgctc

SEQ ID NO: 831368 - DNA, 25 bp, Homo sapien
tttcctggcaaaagcgggaaggaga

SEQ ID NO: 831369 - DNA, 25 bp, Homo sapien
gtcgtcctctccactcatttgaaat

SEQ ID NO: 831370 - DNA, 25 bp, Homo sapien
gactttgcaaggaaacgcatttcaa

SEQ ID NO: 831371 - DNA, 25 bp, Homo sapien
gcaaggaaacgcatttcaagtttac

SEQ ID NO: 831372 - DNA, 25 bp, Homo sapien
caaaaggactttgcaaggaaacgca

SEQ ID NO: 831373 - DNA, 25 bp, Homo sapien
gtctctacaaaaggactttgcaagg

SEQ ID NO: 831374 - DNA, 25 bp, Homo sapien
gagccatggctagttgtgaactgaa

SEQ ID NO: 831375 - DNA, 25 bp, Homo sapien
tacaggcaccatttgatgggatcta

SEQ ID NO: 831376 - DNA, 25 bp, Homo sapien
tctaagtgtgcgaatcaaattgcat

SEQ ID NO: 831377 - DNA, 25 bp, Homo sapien
tgtatggatggtcccccagagaaga

SEQ ID NO: 831378 - DNA, 25 bp, Homo sapien
tgctcagcttcatcgctcagtgctc

SEQ ID NO: 831379 - DNA, 25 bp, Homo sapien
cccacatccttctggcttcctgaca

SEQ ID NO: 831380 - DNA, 25 bp, Homo sapien
gtttggggtccatctgaataaaatc

SEQ ID NO: 831381 - DNA, 25 bp, Homo sapien
tacccgctcagaactctccgggctg

SEQ ID NO: 831382 - DNA, 25 bp, Homo sapien
aactgctttatcgtattatccactg

SEQ ID NO: 831383 - DNA, 25 bp, Homo sapien
gaattcatgctcatccgggtaagga

SEQ ID NO: 831384 - DNA, 25 bp, Homo sapien
tgggctttggctcagcagtaactcc

SEQ ID NO: 831385 - DNA, 25 bp, Homo sapien
gaaaaattgatcctctctttgagaa

SEQ ID NO: 831386 - DNA, 25 bp, Homo sapien
tgccctcaagtactgcattttccag

SEQ ID NO: 831387 - DNA, 25 bp, Homo sapien
gtaatattcatatttgccctcaagt

SEQ ID NO: 831388 - DNA, 25 bp, Homo sapien
gcagtatatttttcgctttccagct

SEQ ID NO: 831389 - DNA, 25 bp, Homo sapien
gctttccagctgtagcatctgttag

SEQ ID NO: 831390 - DNA, 25 bp, Homo sapien
cacacaaggccttcccagttcatac

SEQ ID NO: 831391 - DNA, 25 bp, Homo sapien
ttcccagttcatacacgctggcttt

SEQ ID NO: 831392 - DNA, 25 bp, Homo sapien
catacacgctggctttgcacacatc

SEQ ID NO: 831393 - DNA, 25 bp, Homo sapien
cattcatgcacatggctggtcacac

SEQ ID NO: 831394 - DNA, 25 bp, Homo sapien
taaggacatagaagcatagcactga

SEQ ID NO: 831395 - DNA, 25 bp, Homo sapien
aatgacttgcatgatatctttagaa

SEQ ID NO: 831396 - DNA, 25 bp, Homo sapien
ccacactgggtgaatgagtgaataa

SEQ ID NO: 831397 - DNA, 25 bp, Homo sapien
caagatccactcacctaatttcaaa

SEQ ID NO: 831398 - DNA, 25 bp, Homo sapien
tccagtgtgagtcttaatctccatt

SEQ ID NO: 831399 - DNA, 25 bp, Homo sapien
cacaagcagtaatgtttccttcatg

SEQ ID NO: 831400 - DNA, 25 bp, Homo sapien
ctccattatggatgattgtggcatt

SEQ ID NO: 831401 - DNA, 25 bp, Homo sapien
gacagacagcaaagcacaagcagta

SEQ ID NO: 831402 - DNA, 25 bp, Homo sapien
cagttctcatggctgtgcagggcag

SEQ ID NO: 831403 - DNA, 25 bp, Homo sapien
ttcagtcttactaggcctttgggcc

SEQ ID NO: 831404 - DNA, 25 bp, Homo sapien
tgaaatactatcgaggccttttccc

SEQ ID NO: 831405 - DNA, 25 bp, Homo sapien
tatggcttacatcctccagagcagt

SEQ ID NO: 831406 - DNA, 25 bp, Homo sapien
tgtgtgccaagcatgcacggcaggc

SEQ ID NO: 831407 - DNA, 25 bp, Homo sapien
acggcaggccctggcgatcagagga

SEQ ID NO: 831408 - DNA, 25 bp, Homo sapien
tccttctaggatcttcacactgcct

SEQ ID NO: 831409 - DNA, 25 bp, Homo sapien
ccttgctgttgaccccctggttgtg

SEQ ID NO: 831410 - DNA, 25 bp, Homo sapien
gttcctggcttgttcggcatttttc

SEQ ID NO: 831411 - DNA, 25 bp, Homo sapien
tcttgttagcctggtaaacattgaa

SEQ ID NO: 831412 - DNA, 25 bp, Homo sapien
tcttttgtctgtggaacgggtgagt

SEQ ID NO: 831413 - DNA, 25 bp, Homo sapien
taaacattgaatcctgttgtcctag

SEQ ID NO: 831414 - DNA, 25 bp, Homo sapien
aagcttaggtaggtcattttccaga

SEQ ID NO: 831415 - DNA, 25 bp, Homo sapien
tctgacagactagattgctggtcct

SEQ ID NO: 831416 - DNA, 25 bp, Homo sapien
cctggcgttcatagatggtcttcct

SEQ ID NO: 831417 - DNA, 25 bp, Homo sapien
tactaggctagtaagacctgtttcc

SEQ ID NO: 831418 - DNA, 25 bp, Homo sapien
tatctttactcctacccctctctac

SEQ ID NO: 831419 - DNA, 25 bp, Homo sapien
tccagcggagcgatggcagccagct

SEQ ID NO: 831420 - DNA, 25 bp, Homo sapien
gccagctgcccgtggagagcccagc

SEQ ID NO: 831421 - DNA, 25 bp, Homo sapien
cgccctccagcggagcgatggcagc

SEQ ID NO: 831422 - DNA, 25 bp, Homo sapien
cccagcagcaagcccagaaataagg

SEQ ID NO: 831423 - DNA, 25 bp, Homo sapien
tttagtgtgatccacatgcaacgtc

SEQ ID NO: 831424 - DNA, 25 bp, Homo sapien
atttagtgtgatccacatgcaacgt

SEQ ID NO: 831425 - DNA, 25 bp, Homo sapien
tagtgtgatccacatgcaacgtcat

SEQ ID NO: 831426 - DNA, 25 bp, Homo sapien
ttagtgtgatccacatgcaacgtca

SEQ ID NO: 831427 - DNA, 25 bp, Homo sapien
tttagatttgactcccagtggcctg

SEQ ID NO: 831428 - DNA, 25 bp, Homo sapien
tgtaaagggttactggatgctatgg

SEQ ID NO: 831429 - DNA, 25 bp, Homo sapien
gcagtttagatttgactcccagtgg

SEQ ID NO: 831430 - DNA, 25 bp, Homo sapien
taattgtaaagggttactggatgct

SEQ ID NO: 831431 - DNA, 25 bp, Homo sapien
gcagatcatagtcccctgaagcctt

SEQ ID NO: 831432 - DNA, 25 bp, Homo sapien
cctcagatctgttctatttaatgcc

SEQ ID NO: 831433 - DNA, 25 bp, Homo sapien
ggtgcagatcatagtcccctgaagc

SEQ ID NO: 831434 - DNA, 25 bp, Homo sapien
gttctatttaatgcctctgcatcac

SEQ ID NO: 831435 - DNA, 25 bp, Homo sapien
cctgcagtaggtccctccatcccac

SEQ ID NO: 831436 - DNA, 25 bp, Homo sapien
tcccatgcactgcactcctgcagta

SEQ ID NO: 831437 - DNA, 25 bp, Homo sapien
catgcactgcactcctgcagtaggt

SEQ ID NO: 831438 - DNA, 25 bp, Homo sapien
tgcactgcactcctgcagtaggtcc

SEQ ID NO: 831439 - DNA, 25 bp, Homo sapien
tcctttgcatgcagacttggtgaag

SEQ ID NO: 831440 - DNA, 25 bp, Homo sapien
cctttgcatgcagacttggtgaagg

SEQ ID NO: 831441 - DNA, 25 bp, Homo sapien
ctctcctttgcatgcagacttggtg

SEQ ID NO: 831442 - DNA, 25 bp, Homo sapien
tctcctttgcatgcagacttggtga

SEQ ID NO: 831443 - DNA, 25 bp, Homo sapien
acacaggagataccgcacctccttg

SEQ ID NO: 831444 - DNA, 25 bp, Homo sapien
cttgccaccgcacttcaaaacttaa

SEQ ID NO: 831445 - DNA, 25 bp, Homo sapien
tccttgccaccgcacttcaaaactt

SEQ ID NO: 831446 - DNA, 25 bp, Homo sapien
aggagataccgcacctccttgccac

SEQ ID NO: 831447 - DNA, 25 bp, Homo sapien
cctgtacctacattaagacctgtag

SEQ ID NO: 831448 - DNA, 25 bp, Homo sapien
tggtgccttatccatcagtttcttc

SEQ ID NO: 831449 - DNA, 25 bp, Homo sapien
caggcaagagtctatagccttgacc

SEQ ID NO: 831450 - DNA, 25 bp, Homo sapien
tgacctttcaagctaagcgatcctc

SEQ ID NO: 831451 - DNA, 25 bp, Homo sapien
gtttgttcttgtcgcatgcatgcca

SEQ ID NO: 831452 - DNA, 25 bp, Homo sapien
ccatctgtggtctgctggcatcgga

SEQ ID NO: 831453 - DNA, 25 bp, Homo sapien
ccaagtgaagtctgaaggctggttt

SEQ ID NO: 831454 - DNA, 25 bp, Homo sapien
caggttcccaaattggccagtgtgt

SEQ ID NO: 831455 - DNA, 25 bp, Homo sapien
gaaacaggacacagagcctgctggg

SEQ ID NO: 831456 - DNA, 25 bp, Homo sapien
gagaagtctgtataactgtttcaca

SEQ ID NO: 831457 - DNA, 25 bp, Homo sapien
tttgtggcgaggaaacaggacacag

SEQ ID NO: 831458 - DNA, 25 bp, Homo sapien
gctgggtatgcaagagaagtctgta

SEQ ID NO: 831459 - DNA, 25 bp, Homo sapien
tggtgttcgtcattctggtgcatgc

SEQ ID NO: 831460 - DNA, 25 bp, Homo sapien
caagtcaggttccaagggaaatgga

SEQ ID NO: 831461 - DNA, 25 bp, Homo sapien
cattatgtgtgtgcttccacaagcc

SEQ ID NO: 831462 - DNA, 25 bp, Homo sapien
tacattgtatctgttgcaagtcagg

SEQ ID NO: 831463 - DNA, 25 bp, Homo sapien
aaatgtgggaacacccattattctc

SEQ ID NO: 831464 - DNA, 25 bp, Homo sapien
tgtgggaacacccattattctctgt

SEQ ID NO: 831465 - DNA, 25 bp, Homo sapien
acacccattattctctgttggccac

SEQ ID NO: 831466 - DNA, 25 bp, Homo sapien
gggaacacccattattctctgttgg

SEQ ID NO: 831467 - DNA, 25 bp, Homo sapien
taaagtgatcattgctagtgcatgg

SEQ ID NO: 831468 - DNA, 25 bp, Homo sapien
gggaaaaatccagttgtatctcagt

SEQ ID NO: 831469 - DNA, 25 bp, Homo sapien
caaattcagagtcagactgccctgg

SEQ ID NO: 831470 - DNA, 25 bp, Homo sapien
aaaagcaaaaagagctctgtagccc

SEQ ID NO: 831471 - DNA, 25 bp, Homo sapien
gggctttaaagctgatcctctttgc

SEQ ID NO: 831472 - DNA, 25 bp, Homo sapien
caggggaatgcagcctacgtttgat

SEQ ID NO: 831473 - DNA, 25 bp, Homo sapien
ctacgtttgattgggctttaaagct

SEQ ID NO: 831474 - DNA, 25 bp, Homo sapien
gtttgatcaggggaatgcagcctac

SEQ ID NO: 831475 - DNA, 25 bp, Homo sapien
gactgggagttatatgcccttttga

SEQ ID NO: 831476 - DNA, 25 bp, Homo sapien
ccgtggccttctcagcaagtggtgg

SEQ ID NO: 831477 - DNA, 25 bp, Homo sapien
aaaaggagtcaaggattagttcagc

SEQ ID NO: 831478 - DNA, 25 bp, Homo sapien
gaggttgagtcaagagattcagtga

SEQ ID NO: 831479 - DNA, 25 bp, Homo sapien
gaagagccaggttgagagggatgaa

SEQ ID NO: 831480 - DNA, 25 bp, Homo sapien
ggacttggctgttatccaggttgca

SEQ ID NO: 831481 - DNA, 25 bp, Homo sapien
cagtctgcttcaaaacggaggaggg

SEQ ID NO: 831482 - DNA, 25 bp, Homo sapien
ccaggttgcaagatgttggaaggac

SEQ ID NO: 831483 - DNA, 25 bp, Homo sapien
ccgacctcaggtgatttccccacct

SEQ ID NO: 831484 - DNA, 25 bp, Homo sapien
gcccaggtaaagtgcaatggcgcga

SEQ ID NO: 831485 - DNA, 25 bp, Homo sapien
tgttgcccaggtaaagtgcaatggc

SEQ ID NO: 831486 - DNA, 25 bp, Homo sapien
tccccaccttggcctcccaaagtgc

SEQ ID NO: 831487 - DNA, 25 bp, Homo sapien
caccatccagaaatttaacaaggag

SEQ ID NO: 831488 - DNA, 25 bp, Homo sapien
gaagtttgctagtttgaggccacca

SEQ ID NO: 831489 - DNA, 25 bp, Homo sapien
ttgctagtttgaggccaccatccag

SEQ ID NO: 831490 - DNA, 25 bp, Homo sapien
agtttgctagtttgaggccaccatc

SEQ ID NO: 831491 - DNA, 25 bp, Homo sapien
tgtccaaaatggtcgtttctgggca

SEQ ID NO: 831492 - DNA, 25 bp, Homo sapien
taaaacaagcgtaaaactggatgag

SEQ ID NO: 831493 - DNA, 25 bp, Homo sapien
gatgtgaagaggataggtgattctc

SEQ ID NO: 831494 - DNA, 25 bp, Homo sapien
gaggataggtgattctctttctgaa

SEQ ID NO: 831495 - DNA, 25 bp, Homo sapien
cataagaaggattgaggccaccaag

SEQ ID NO: 831496 - DNA, 25 bp, Homo sapien
cgtgatactctagacaccaagggaa

SEQ ID NO: 831497 - DNA, 25 bp, Homo sapien
gcagtagtaacccaccttgtcagat

SEQ ID NO: 831498 - DNA, 25 bp, Homo sapien
ccatggagtcagcagggcagattga

SEQ ID NO: 831499 - DNA, 25 bp, Homo sapien
agctggatgccagagagaatagctc

SEQ ID NO: 831500 - DNA, 25 bp, Homo sapien
cttgcccctgagctgtcagctggat

SEQ ID NO: 831501 - DNA, 25 bp, Homo sapien
ggatgccagagagaatagctcctgg

SEQ ID NO: 831502 - DNA, 25 bp, Homo sapien
cagagagaatagctcctggatggcc

SEQ ID NO: 831503 - DNA, 25 bp, Homo sapien
cattgttgtggtgaaagtgacctct

SEQ ID NO: 831504 - DNA, 25 bp, Homo sapien
gacgccgtgactagcaccgttatat

SEQ ID NO: 831505 - DNA, 25 bp, Homo sapien
tttgtgggaaccttggacgccgtga

SEQ ID NO: 831506 - DNA, 25 bp, Homo sapien
taaacatatctggactgggaggaac

SEQ ID NO: 831507 - DNA, 25 bp, Homo sapien
tggatatagcccacactatgtttga

SEQ ID NO: 831508 - DNA, 25 bp, Homo sapien
atctcctattactgtcatattcctt

SEQ ID NO: 831509 - DNA, 25 bp, Homo sapien
ctgccagttccgacatctcctatta

SEQ ID NO: 831510 - DNA, 25 bp, Homo sapien
tagcccacactatgtttgagccttt

SEQ ID NO: 831511 - DNA, 25 bp, Homo sapien
gacaaaggcgtctggctaactcttc

SEQ ID NO: 831512 - DNA, 25 bp, Homo sapien
ggctttgtcggcttgggattttctc

SEQ ID NO: 831513 - DNA, 25 bp, Homo sapien
tttccctgatctctgacaacatctc

SEQ ID NO: 831514 - DNA, 25 bp, Homo sapien
tcttcaccatcagctctcagtttag

SEQ ID NO: 831515 - DNA, 25 bp, Homo sapien
acatcccatgggtcgctttccctgt

SEQ ID NO: 831516 - DNA, 25 bp, Homo sapien
gcttaagaatccactcttctctgta

SEQ ID NO: 831517 - DNA, 25 bp, Homo sapien
tacagcacatcccatgggtcgcttt

SEQ ID NO: 831518 - DNA, 25 bp, Homo sapien
ccatgggtcgctttccctgtaacct

SEQ ID NO: 831519 - DNA, 25 bp, Homo sapien
gatgttacttttggggtcgtcatta

SEQ ID NO: 831520 - DNA, 25 bp, Homo sapien
catagatttggtctggttgtgaatc

SEQ ID NO: 831521 - DNA, 25 bp, Homo sapien
cgtcattattacatacatgggagaa

SEQ ID NO: 831522 - DNA, 25 bp, Homo sapien
tgtgaatcatgtctaagatgttact

SEQ ID NO: 831523 - DNA, 25 bp, Homo sapien
cccagagggacggtgagacttagag

SEQ ID NO: 831524 - DNA, 25 bp, Homo sapien
tgtcgaaagtgttagggtgctctga

SEQ ID NO: 831525 - DNA, 25 bp, Homo sapien
ccccggtgtaatctacttgtgtcga

SEQ ID NO: 831526 - DNA, 25 bp, Homo sapien
tctcgagttagctggaactctctgc

SEQ ID NO: 831527 - DNA, 25 bp, Homo sapien
ggcccggagcccttgttgaccaata

SEQ ID NO: 831528 - DNA, 25 bp, Homo sapien
ggaggtgcctcactcatgtactgca

SEQ ID NO: 831529 - DNA, 25 bp, Homo sapien
tgtctgtcacctctaaccacgaaga

SEQ ID NO: 831530 - DNA, 25 bp, Homo sapien
tgtctcctgccacgcatctggtggt

SEQ ID NO: 831531 - DNA, 25 bp, Homo sapien
cattgcctagcagtagttcccatgc

SEQ ID NO: 831532 - DNA, 25 bp, Homo sapien
gaagactctgccagtgagctttgag

SEQ ID NO: 831533 - DNA, 25 bp, Homo sapien
tttgagacctttcccccattgccta

SEQ ID NO: 831534 - DNA, 25 bp, Homo sapien
gagaagacagttgtaacaatgtgga

SEQ ID NO: 831535 - DNA, 25 bp, Homo sapien
ccttgggagcacattgagttcaatc

SEQ ID NO: 831536 - DNA, 25 bp, Homo sapien
tgtgacctatgccactctgaaggag

SEQ ID NO: 831537 - DNA, 25 bp, Homo sapien
tacacacctggttcacagcatagcg

SEQ ID NO: 831538 - DNA, 25 bp, Homo sapien
cacagtatattctagctgtaagggc

SEQ ID NO: 831539 - DNA, 25 bp, Homo sapien
acagtggctcccgagaatccattgg

SEQ ID NO: 831540 - DNA, 25 bp, Homo sapien
agtggctcccgagaatccattggca

SEQ ID NO: 831541 - DNA, 25 bp, Homo sapien
gctcccgagaatccattggcaatgg

SEQ ID NO: 831542 - DNA, 25 bp, Homo sapien
aaccacagtggctcccgagaatcca

SEQ ID NO: 831543 - DNA, 25 bp, Homo sapien
tattgaggtagtgttagatactgtg

SEQ ID NO: 831544 - DNA, 25 bp, Homo sapien
cggtggaaaaagtattgaggtagtg

SEQ ID NO: 831545 - DNA, 25 bp, Homo sapien
aaagtattgaggtagtgttagatac

SEQ ID NO: 831546 - DNA, 25 bp, Homo sapien
gaaaaagtattgaggtagtgttaga

SEQ ID NO: 831547 - DNA, 25 bp, Homo sapien
ctgacttgcggttggccaatcccct

SEQ ID NO: 831548 - DNA, 25 bp, Homo sapien
ctcctcgtagatttcctccacattt

SEQ ID NO: 831549 - DNA, 25 bp, Homo sapien
tgtccagcatcccatgctgacttgc

SEQ ID NO: 831550 - DNA, 25 bp, Homo sapien
gtttctgtttctcgcacggccaggt

SEQ ID NO: 831551 - DNA, 25 bp, Homo sapien
aaaaaggctcctgtgctttagagag

SEQ ID NO: 831552 - DNA, 25 bp, Homo sapien
tgaattagtgaatcagggagctgct

SEQ ID NO: 831553 - DNA, 25 bp, Homo sapien
gatgctgggaccacctctgaattag

SEQ ID NO: 831554 - DNA, 25 bp, Homo sapien
tactagactagtgcttaagtggcag

SEQ ID NO: 831555 - DNA, 25 bp, Homo sapien
tcatggttgcgggaaggaaatgtcc

SEQ ID NO: 831556 - DNA, 25 bp, Homo sapien
caaaactccacggatttgggtccat

SEQ ID NO: 831557 - DNA, 25 bp, Homo sapien
gcatggatgagtacgtcagggcaca

SEQ ID NO: 831558 - DNA, 25 bp, Homo sapien
tgacagcgttaacttggacatcccc

SEQ ID NO: 831559 - DNA, 25 bp, Homo sapien
ccgttgggatagacagtatcttcta

SEQ ID NO: 831560 - DNA, 25 bp, Homo sapien
aaggtctagggtgggcccactaatg

SEQ ID NO: 831561 - DNA, 25 bp, Homo sapien
ggccaaactttgagagccgttggga

SEQ ID NO: 831562 - DNA, 25 bp, Homo sapien
taaaaattgctgtatggcagactga

SEQ ID NO: 831563 - DNA, 25 bp, Homo sapien
tgccaaaccacttgggattcctgcg

SEQ ID NO: 831564 - DNA, 25 bp, Homo sapien
gcattgccaaaccacttgggattcc

SEQ ID NO: 831565 - DNA, 25 bp, Homo sapien
caaaccacttgggattcctgcgcat

SEQ ID NO: 831566 - DNA, 25 bp, Homo sapien
attgccaaaccacttgggattcctg

SEQ ID NO: 831567 - DNA, 25 bp, Homo sapien
tcagtcctccctcggtgttaacgtc

SEQ ID NO: 831568 - DNA, 25 bp, Homo sapien
tgttaacgtctgctccagctcgcag

SEQ ID NO: 831569 - DNA, 25 bp, Homo sapien
cgacatcagggcgagggtgagcttc

SEQ ID NO: 831570 - DNA, 25 bp, Homo sapien
gctggaggctcctgacagctcgtag

SEQ ID NO: 831571 - DNA, 25 bp, Homo sapien
gcggtgtctcggttctccactggaa

SEQ ID NO: 831572 - DNA, 25 bp, Homo sapien
tattaattagaaaggacgcggtgtc

SEQ ID NO: 831573 - DNA, 25 bp, Homo sapien
ttttctccggcagggacgcaggatg

SEQ ID NO: 831574 - DNA, 25 bp, Homo sapien
tgccttggtgcactctagagacggg

SEQ ID NO: 831575 - DNA, 25 bp, Homo sapien
tcctttgcgatctcagggcgtgaag

SEQ ID NO: 831576 - DNA, 25 bp, Homo sapien
caccgcgcggaggacaacttttagc

SEQ ID NO: 831577 - DNA, 25 bp, Homo sapien
ggagctaaagcagcgtgcgttcagc

SEQ ID NO: 831578 - DNA, 25 bp, Homo sapien
gagcccacggctacaaaaacaagtg

SEQ ID NO: 831579 - DNA, 25 bp, Homo sapien
tgcaagcatcatcaacagttactgg

SEQ ID NO: 831580 - DNA, 25 bp, Homo sapien
tctgactgaactcgcagagggacaa

SEQ ID NO: 831581 - DNA, 25 bp, Homo sapien
taattccagaaagcttgaaagccgt

SEQ ID NO: 831582 - DNA, 25 bp, Homo sapien
caaagccctaatatagctgcggaag

SEQ ID NO: 831583 - DNA, 25 bp, Homo sapien
gcctccttcttgcatgacacagcag

SEQ ID NO: 831584 - DNA, 25 bp, Homo sapien
gccgcctccttcttgcatgacacag

SEQ ID NO: 831585 - DNA, 25 bp, Homo sapien
cttgcatgacacagcagaaccgcag

SEQ ID NO: 831586 - DNA, 25 bp, Homo sapien
ccttcttgcatgacacagcagaacc

SEQ ID NO: 831587 - DNA, 25 bp, Homo sapien
tccctgctcccgggcggctctggag

SEQ ID NO: 831588 - DNA, 25 bp, Homo sapien
tctggaggagctcggtgtttgcctc

SEQ ID NO: 831589 - DNA, 25 bp, Homo sapien
aggagctcggtgtttgcctctagcc

SEQ ID NO: 831590 - DNA, 25 bp, Homo sapien
ctcccgggcggctctggaggagctc

SEQ ID NO: 831591 - DNA, 25 bp, Homo sapien
ttcccaaggcgaccacctgcaccgc

SEQ ID NO: 831592 - DNA, 25 bp, Homo sapien
gcgaccacctgcaccgccccactta

SEQ ID NO: 831593 - DNA, 25 bp, Homo sapien
ccttcccaaggcgaccacctgcacc

SEQ ID NO: 831594 - DNA, 25 bp, Homo sapien
aaggcgaccacctgcaccgccccac

SEQ ID NO: 831595 - DNA, 25 bp, Homo sapien
cctattgattgttttgttgcaccag

SEQ ID NO: 831596 - DNA, 25 bp, Homo sapien
tactcagctgcaccttaaagcgcca

SEQ ID NO: 831597 - DNA, 25 bp, Homo sapien
cagaaagcgcagcaaggctctggga

SEQ ID NO: 831598 - DNA, 25 bp, Homo sapien
ggaatatgatgtgggttggcttttc

SEQ ID NO: 831599 - DNA, 25 bp, Homo sapien
aacaaggttgtcttgtccagggaca

SEQ ID NO: 831600 - DNA, 25 bp, Homo sapien
ccctcaaggttcctatggatagata

SEQ ID NO: 831601 - DNA, 25 bp, Homo sapien
tgttctccgaatgccacaatgctaa

SEQ ID NO: 831602 - DNA, 25 bp, Homo sapien
gacataagacctacaatggctcact

SEQ ID NO: 831603 - DNA, 25 bp, Homo sapien
acatactcaaccatgctaatctttc

SEQ ID NO: 831604 - DNA, 25 bp, Homo sapien
acttctgccatgcatttatacaatg

SEQ ID NO: 831605 - DNA, 25 bp, Homo sapien
tgatcagttcactatgccccttaaa

SEQ ID NO: 831606 - DNA, 25 bp, Homo sapien
ccactggccttagaataagttcaaa

SEQ ID NO: 831607 - DNA, 25 bp, Homo sapien
cagccttaagcttgcagaccatgga

SEQ ID NO: 831608 - DNA, 25 bp, Homo sapien
tgatttatgaaactctagctgtgct

SEQ ID NO: 831609 - DNA, 25 bp, Homo sapien
tggactttatcacaggtgccatcag

SEQ ID NO: 831610 - DNA, 25 bp, Homo sapien
gaaataaggctggtgtcactgcggt

SEQ ID NO: 831611 - DNA, 25 bp, Homo sapien
gctggctgtacaaacgtggtgctgc

SEQ ID NO: 831612 - DNA, 25 bp, Homo sapien
ggctgtacaaacgtggtgctgcatc

SEQ ID NO: 831613 - DNA, 25 bp, Homo sapien
tttctgatgagagtctggggaagct

SEQ ID NO: 831614 - DNA, 25 bp, Homo sapien
tgtacaaacgtggtgctgcatctgt

SEQ ID NO: 831615 - DNA, 25 bp, Homo sapien
agtagctgagacagactgtagggcc

SEQ ID NO: 831616 - DNA, 25 bp, Homo sapien
ttgatattctgtacagcggccctga

SEQ ID NO: 831617 - DNA, 25 bp, Homo sapien
atttccagttcaaggacactctctt

SEQ ID NO: 831618 - DNA, 25 bp, Homo sapien
gaagagctccacgttcttagaacag

SEQ ID NO: 831619 - DNA, 25 bp, Homo sapien
ctatttcccaggccatcacattttt

SEQ ID NO: 831620 - DNA, 25 bp, Homo sapien
tatttcccaggccatcacattttta

SEQ ID NO: 831621 - DNA, 25 bp, Homo sapien
ccacctgcctcgtcacaggccacca

SEQ ID NO: 831622 - DNA, 25 bp, Homo sapien
tccacctgcctcgtcacaggccacc

SEQ ID NO: 831623 - DNA, 25 bp, Homo sapien
ccagtctgagccagcgtttaagtac

SEQ ID NO: 831624 - DNA, 25 bp, Homo sapien
ccttagacaacccagcagctggttg

SEQ ID NO: 831625 - DNA, 25 bp, Homo sapien
ggccgatactaatggtgactttctc

SEQ ID NO: 831626 - DNA, 25 bp, Homo sapien
gaagcacaatggtggggccgatact

SEQ ID NO: 831627 - DNA, 25 bp, Homo sapien
catggtttgagagtctggatatgga

SEQ ID NO: 831628 - DNA, 25 bp, Homo sapien
tggatgatcccaaaacatggtttga

SEQ ID NO: 831629 - DNA, 25 bp, Homo sapien
ccaatagtttatggagtcaggagga

SEQ ID NO: 831630 - DNA, 25 bp, Homo sapien
gttttcaagcatggagcaggttatg

SEQ ID NO: 831631 - DNA, 25 bp, Homo sapien
ggacagaaggtctgtcaccactgct

SEQ ID NO: 831632 - DNA, 25 bp, Homo sapien
gcaaaacgcccgtttccaggcacag

SEQ ID NO: 831633 - DNA, 25 bp, Homo sapien
ccactgcagcatggataggcaggtg

SEQ ID NO: 831634 - DNA, 25 bp, Homo sapien
gagcttgcggaggattgttgcccac

SEQ ID NO: 831635 - DNA, 25 bp, Homo sapien
tgtcgccaagctctgtcaatactcc

SEQ ID NO: 831636 - DNA, 25 bp, Homo sapien
agctctgtcaatactccctctggaa

SEQ ID NO: 831637 - DNA, 25 bp, Homo sapien
atcccaaaaccaattgtcgccaagc

SEQ ID NO: 831638 - DNA, 25 bp, Homo sapien
caaaaccaattgtcgccaagctctg

SEQ ID NO: 831639 - DNA, 25 bp, Homo sapien
catgtaagggtgttgctgtactctt

SEQ ID NO: 831640 - DNA, 25 bp, Homo sapien
gtttcttgtacatagaaagtcattt

SEQ ID NO: 831641 - DNA, 25 bp, Homo sapien
tatggtgagtggcagacatgtaagg

SEQ ID NO: 831642 - DNA, 25 bp, Homo sapien
atattgagagagagcacgagggaca

SEQ ID NO: 831643 - DNA, 25 bp, Homo sapien
taccaaggtgccttgtacagggctg

SEQ ID NO: 831644 - DNA, 25 bp, Homo sapien
gggctgacgacagtggaggactcca

SEQ ID NO: 831645 - DNA, 25 bp, Homo sapien
cttgtacagggctgacgacagtgga

SEQ ID NO: 831646 - DNA, 25 bp, Homo sapien
tgtgggtttaccaaggtgccttgta

SEQ ID NO: 831647 - DNA, 25 bp, Homo sapien
ctcttttccgaaggtctgggacaat

SEQ ID NO: 831648 - DNA, 25 bp, Homo sapien
ttctctttgcccaataatatggtag

SEQ ID NO: 831649 - DNA, 25 bp, Homo sapien
gaaggtctgggacaattgaaaagaa

SEQ ID NO: 831650 - DNA, 25 bp, Homo sapien
tctttgcccaataatatggtagcat

SEQ ID NO: 831651 - DNA, 25 bp, Homo sapien
tgaattaaacacttacgccactttc

SEQ ID NO: 831652 - DNA, 25 bp, Homo sapien
catgcccggtctaaacttcgttttg

SEQ ID NO: 831653 - DNA, 25 bp, Homo sapien
ccttgtgggcattagctgattgtgg

SEQ ID NO: 831654 - DNA, 25 bp, Homo sapien
gcattagctgattgtggttataaac

SEQ ID NO: 831655 - DNA, 25 bp, Homo sapien
gaatagcatccagccagaacaagca

SEQ ID NO: 831656 - DNA, 25 bp, Homo sapien
tggctttgcatccagaatagcatcc

SEQ ID NO: 831657 - DNA, 25 bp, Homo sapien
tgtgtttaagagtagggtctctgaa

SEQ ID NO: 831658 - DNA, 25 bp, Homo sapien
tgtttaagagtagggtctctgaaga

SEQ ID NO: 831659 - DNA, 25 bp, Homo sapien
ctctcatcgggccttgtgtttaaga

SEQ ID NO: 831660 - DNA, 25 bp, Homo sapien
ctcatcgggccttgtgtttaagagt

SEQ ID NO: 831661 - DNA, 25 bp, Homo sapien
ccgcttgttcttgcctgtcttgtat

SEQ ID NO: 831662 - DNA, 25 bp, Homo sapien
aaaccgcagcttctggaagaaccgc

SEQ ID NO: 831663 - DNA, 25 bp, Homo sapien
tatctctcttcaaacttgaccttgg

SEQ ID NO: 831664 - DNA, 25 bp, Homo sapien
gaagaaccgcttgttcttgcctgtc

SEQ ID NO: 831665 - DNA, 25 bp, Homo sapien
atttttaatgaccaaaacgaagcat

SEQ ID NO: 831666 - DNA, 25 bp, Homo sapien
catggaaacagcttgtcaggccctg

SEQ ID NO: 831667 - DNA, 25 bp, Homo sapien
ttggctgcaggtactagagacctct

SEQ ID NO: 831668 - DNA, 25 bp, Homo sapien
ctcctgcgtacaccacatctccatg

SEQ ID NO: 831669 - DNA, 25 bp, Homo sapien
gattcagtcttaacaagccaggcca

SEQ ID NO: 831670 - DNA, 25 bp, Homo sapien
agaagtttaagctgcttaatcacac

SEQ ID NO: 831671 - DNA, 25 bp, Homo sapien
tagaagtttaagctgcttaatcaca

SEQ ID NO: 831672 - DNA, 25 bp, Homo sapien
ctagaagtttaagctgcttaatcac

SEQ ID NO: 831673 - DNA, 25 bp, Homo sapien
atgaggattggtccacgtgtggaaa

SEQ ID NO: 831674 - DNA, 25 bp, Homo sapien
ctgcagtggaatgaagatgaggatt

SEQ ID NO: 831675 - DNA, 25 bp, Homo sapien
catgactatagtcatatccagaaat

SEQ ID NO: 831676 - DNA, 25 bp, Homo sapien
tgagcatcctaaacagagtcagagc

SEQ ID NO: 831677 - DNA, 25 bp, Homo sapien
acagtgacaccacccagcgggctgg

SEQ ID NO: 831678 - DNA, 25 bp, Homo sapien
tggcagacatagctgacaggcacct

SEQ ID NO: 831679 - DNA, 25 bp, Homo sapien
cttgccctaagcgaccgcacgtatg

SEQ ID NO: 831680 - DNA, 25 bp, Homo sapien
aagccacaaatgctccacacagtga

SEQ ID NO: 831681 - DNA, 25 bp, Homo sapien
cttccaggccctgccaggaagctgg

SEQ ID NO: 831682 - DNA, 25 bp, Homo sapien
caggccctgccaggaagctggcagc

SEQ ID NO: 831683 - DNA, 25 bp, Homo sapien
aggccctgccaggaagctggcagca

SEQ ID NO: 831684 - DNA, 25 bp, Homo sapien
tccaggccctgccaggaagctggca

SEQ ID NO: 831685 - DNA, 25 bp, Homo sapien
taagactgcatcaggcagaggtgaa

SEQ ID NO: 831686 - DNA, 25 bp, Homo sapien
aagctggtctcttaagactgcatca

SEQ ID NO: 831687 - DNA, 25 bp, Homo sapien
tcttaagactgcatcaggcagaggt

SEQ ID NO: 831688 - DNA, 25 bp, Homo sapien
ggtctcttaagactgcatcaggcag

SEQ ID NO: 831689 - DNA, 25 bp, Homo sapien
tacaagagtagagtggaagccaggc

SEQ ID NO: 831690 - DNA, 25 bp, Homo sapien
ggaaattgagtgagcctgcaccagg

SEQ ID NO: 831691 - DNA, 25 bp, Homo sapien
tagagtgggtagtccagcattcacc

SEQ ID NO: 831692 - DNA, 25 bp, Homo sapien
gaagccaggcagataggtcagcaga

SEQ ID NO: 831693 - DNA, 25 bp, Homo sapien
ttggaatttctcccgaaaagccagc

SEQ ID NO: 831694 - DNA, 25 bp, Homo sapien
ttctcccgaaaagccagcatgaaga

SEQ ID NO: 831695 - DNA, 25 bp, Homo sapien
cccgaaaagccagcatgaagaaacc

SEQ ID NO: 831696 - DNA, 25 bp, Homo sapien
tccatcaggtctacaattaaaatga

SEQ ID NO: 831697 - DNA, 25 bp, Homo sapien
cacatctaaacgaagctgacaaaat

SEQ ID NO: 831698 - DNA, 25 bp, Homo sapien
gatgcctagtgtatttggaaccaaa

SEQ ID NO: 831699 - DNA, 25 bp, Homo sapien
atgcctagtgtatttggaaccaaac

SEQ ID NO: 831700 - DNA, 25 bp, Homo sapien
taaacgaagctgacaaaatgatatt

SEQ ID NO: 831701 - DNA, 25 bp, Homo sapien
tgccatctgacaattacagacaatc

SEQ ID NO: 831702 - DNA, 25 bp, Homo sapien
ttgaggactccgctgccatctgaca

SEQ ID NO: 831703 - DNA, 25 bp, Homo sapien
catctgacaattacagacaatccaa

SEQ ID NO: 831704 - DNA, 25 bp, Homo sapien
gaggactccgctgccatctgacaat

SEQ ID NO: 831705 - DNA, 25 bp, Homo sapien
cttgtcagcaccgtagcggccgcca

SEQ ID NO: 831706 - DNA, 25 bp, Homo sapien
agctccacttgtgtagcgcgtaggg

SEQ ID NO: 831707 - DNA, 25 bp, Homo sapien
aaaaggagctccacttgtgtagcgc

SEQ ID NO: 831708 - DNA, 25 bp, Homo sapien
gagaagccggcactcgggcgccgca

SEQ ID NO: 831709 - DNA, 25 bp, Homo sapien
ggcgccgcagcgacagctccgccag

SEQ ID NO: 831710 - DNA, 25 bp, Homo sapien
tccacaagaatgaatggagcgacca

SEQ ID NO: 831711 - DNA, 25 bp, Homo sapien
caaaaagctcaaatagacaagggaa

SEQ ID NO: 831712 - DNA, 25 bp, Homo sapien
gaagggactcccactggcctaagat

SEQ ID NO: 831713 - DNA, 25 bp, Homo sapien
ggtatataacaactcactatgctga

SEQ ID NO: 831714 - DNA, 25 bp, Homo sapien
cacacacatagatagggcccaaagc

SEQ ID NO: 831715 - DNA, 25 bp, Homo sapien
tgggagaacgtatttccgaactaca

SEQ ID NO: 831716 - DNA, 25 bp, Homo sapien
gaactacatacgcaacaaaagacct

SEQ ID NO: 831717 - DNA, 25 bp, Homo sapien
tagagcaactggacaactataagcc

SEQ ID NO: 831718 - DNA, 25 bp, Homo sapien
gacaaaatcttcacggtctaggact

SEQ ID NO: 831719 - DNA, 25 bp, Homo sapien
gaagattggtcatttggtttgtcca

SEQ ID NO: 831720 - DNA, 25 bp, Homo sapien
gttgctctctgaagaccatcttgaa

SEQ ID NO: 831721 - DNA, 25 bp, Homo sapien
ttggtcatttggtttgtccactaaa

SEQ ID NO: 831722 - DNA, 25 bp, Homo sapien
gaagaccatcttgaagattggtcat

SEQ ID NO: 831723 - DNA, 25 bp, Homo sapien
tatatgctatatctatggaatatta

SEQ ID NO: 831724 - DNA, 25 bp, Homo sapien
tgttaaaaaacagctagtcacagaa

SEQ ID NO: 831725 - DNA, 25 bp, Homo sapien
ctacaattacatataacgatattaa

SEQ ID NO: 831726 - DNA, 25 bp, Homo sapien
taaaacatcaattatagttactggg

SEQ ID NO: 831727 - DNA, 25 bp, Homo sapien
tatttgagtaataactacaatgaag

SEQ ID NO: 831728 - DNA, 25 bp, Homo sapien
cagaaaaccccagttatatttgagt

SEQ ID NO: 831729 - DNA, 25 bp, Homo sapien
gaagaaaactagattgcatggtatt

SEQ ID NO: 831730 - DNA, 25 bp, Homo sapien
cattacaaaaacttcagataacttc

SEQ ID NO: 831731 - DNA, 25 bp, Homo sapien
tgctacataactatacatgaaaact

SEQ ID NO: 831732 - DNA, 25 bp, Homo sapien
taactatacatgaaaactataccca

SEQ ID NO: 831733 - DNA, 25 bp, Homo sapien
caagactctttgctacataactata

SEQ ID NO: 831734 - DNA, 25 bp, Homo sapien
aaccactagaagtgcaagactcttt

SEQ ID NO: 831735 - DNA, 25 bp, Homo sapien
tatagcaggcctttcgagctttaga

SEQ ID NO: 831736 - DNA, 25 bp, Homo sapien
caggcctttcgagctttagaatcaa

SEQ ID NO: 831737 - DNA, 25 bp, Homo sapien
gcctttcgagctttagaatcaagta

SEQ ID NO: 831738 - DNA, 25 bp, Homo sapien
attcattccaccaaagactttaaat

SEQ ID NO: 831739 - DNA, 25 bp, Homo sapien
tatgcttcaaggtgaatgtttcttt

SEQ ID NO: 831740 - DNA, 25 bp, Homo sapien
ctattttaatgaatcgacaagggaa

SEQ ID NO: 831741 - DNA, 25 bp, Homo sapien
aatgaatcgacaagggaacatctgt

SEQ ID NO: 831742 - DNA, 25 bp, Homo sapien
tttaatgaatcgacaagggaacatc

SEQ ID NO: 831743 - DNA, 25 bp, Homo sapien
gacaaggttgtactatatcaggatc

SEQ ID NO: 831744 - DNA, 25 bp, Homo sapien
tatcaggatcatcaatgccactaag

SEQ ID NO: 831745 - DNA, 25 bp, Homo sapien
tgctataccagttgagacaaggttg

SEQ ID NO: 831746 - DNA, 25 bp, Homo sapien
aagttcaacataccagatgctaaag

SEQ ID NO: 831747 - DNA, 25 bp, Homo sapien
ttttcaatcaactcttcgcaagcat

SEQ ID NO: 831748 - DNA, 25 bp, Homo sapien
tgtgttgtctgaagtgttttaggca

SEQ ID NO: 831749 - DNA, 25 bp, Homo sapien
gttttaggcaaaggcgaatagcttc

SEQ ID NO: 831750 - DNA, 25 bp, Homo sapien
catgaatatctgttaacatgggatg

SEQ ID NO: 831751 - DNA, 25 bp, Homo sapien
ggaatgatttgactccatcgtggct

SEQ ID NO: 831752 - DNA, 25 bp, Homo sapien
ttcctgttgactgatatactgattg

SEQ ID NO: 831753 - DNA, 25 bp, Homo sapien
catcgtggcttatattcctgttgac

SEQ ID NO: 831754 - DNA, 25 bp, Homo sapien
ctttggtacttttgggaatgatttg

SEQ ID NO: 831755 - DNA, 25 bp, Homo sapien
tagaaagcatattcacccctgagag

SEQ ID NO: 831756 - DNA, 25 bp, Homo sapien
gaaagcatattcacccctgagaggt

SEQ ID NO: 831757 - DNA, 25 bp, Homo sapien
tttagaaagcatattcacccctgag

SEQ ID NO: 831758 - DNA, 25 bp, Homo sapien
agaaagcatattcacccctgagagg

SEQ ID NO: 831759 - DNA, 25 bp, Homo sapien
tttattatcattgaagctttgccct

SEQ ID NO: 831760 - DNA, 25 bp, Homo sapien
tgtgcaatttattatcattgaagct

SEQ ID NO: 831761 - DNA, 25 bp, Homo sapien
tagattgtgcaatttattatcattg

SEQ ID NO: 831762 - DNA, 25 bp, Homo sapien
tctttccttccctcatcagtcagta

SEQ ID NO: 831763 - DNA, 25 bp, Homo sapien
atcaataaccatctgatggcctcct

SEQ ID NO: 831764 - DNA, 25 bp, Homo sapien
taagactctatagctaattcaagcc

SEQ ID NO: 831765 - DNA, 25 bp, Homo sapien
tccttatagtactgatggagaaaaa

SEQ ID NO: 831766 - DNA, 25 bp, Homo sapien
caagcactttgcgaggttgcagcag

SEQ ID NO: 831767 - DNA, 25 bp, Homo sapien
aattcaagcctatttctgcagggca

SEQ ID NO: 831768 - DNA, 25 bp, Homo sapien
ttttgacagggttgcgctttgttgc

SEQ ID NO: 831769 - DNA, 25 bp, Homo sapien
tttttgacagggttgcgctttgttg

SEQ ID NO: 831770 - DNA, 25 bp, Homo sapien
gaacacccctgatttatctctcttt

SEQ ID NO: 831771 - DNA, 25 bp, Homo sapien
aacacccctgatttatctctctttt

SEQ ID NO: 831772 - DNA, 25 bp, Homo sapien
accccaaacctaattgtctcaccag

SEQ ID NO: 831773 - DNA, 25 bp, Homo sapien
ccaaacctaattgtctcaccagtat

SEQ ID NO: 831774 - DNA, 25 bp, Homo sapien
ttgaaccccaaacctaattgtctca

SEQ ID NO: 831775 - DNA, 25 bp, Homo sapien
tgaaccccaaacctaattgtctcac

SEQ ID NO: 831776 - DNA, 25 bp, Homo sapien
ttcagagcttttcctattgagttcc

SEQ ID NO: 831777 - DNA, 25 bp, Homo sapien
cagtcttgtgaaagttcagagcttt

SEQ ID NO: 831778 - DNA, 25 bp, Homo sapien
gaaccataatttcagtcttgtgaaa

SEQ ID NO: 831779 - DNA, 25 bp, Homo sapien
ctgaaccataatttcagtcttgtga

SEQ ID NO: 831780 - DNA, 25 bp, Homo sapien
cttctcaggtgagcaataggatcct

SEQ ID NO: 831781 - DNA, 25 bp, Homo sapien
taggatccttaaaggactcgctgcc

SEQ ID NO: 831782 - DNA, 25 bp, Homo sapien
tctgatctagcaacaaaaattctgg

SEQ ID NO: 831783 - DNA, 25 bp, Homo sapien
tgaatatcacctgtatgaagacact

SEQ ID NO: 831784 - DNA, 25 bp, Homo sapien
gcctcattgatagctgagcaaaata

SEQ ID NO: 831785 - DNA, 25 bp, Homo sapien
aataaaatctggcacgcagtaagca

SEQ ID NO: 831786 - DNA, 25 bp, Homo sapien
caggtctctttgtacgcataaattc

SEQ ID NO: 831787 - DNA, 25 bp, Homo sapien
ggcacgcagtaagcatcctaatgga

SEQ ID NO: 831788 - DNA, 25 bp, Homo sapien
aatagcaatagcaattgaccttttg

SEQ ID NO: 831789 - DNA, 25 bp, Homo sapien
tgttttatagtgtttctgggcaccc

SEQ ID NO: 831790 - DNA, 25 bp, Homo sapien
tggataaggttaccctggttcatta

SEQ ID NO: 831791 - DNA, 25 bp, Homo sapien
gcaccctctggataaggttaccctg

SEQ ID NO: 831792 - DNA, 25 bp, Homo sapien
aatttaacgtgcagctggtttggag

SEQ ID NO: 831793 - DNA, 25 bp, Homo sapien
cacagctttgatattcctataaaaa

SEQ ID NO: 831794 - DNA, 25 bp, Homo sapien
gactttaccgctgacaaaactgatt

SEQ ID NO: 831795 - DNA, 25 bp, Homo sapien
tattgtggtacatttaactcatcag

SEQ ID NO: 831796 - DNA, 25 bp, Homo sapien
caagatcttgtgttccatcccagcc

SEQ ID NO: 831797 - DNA, 25 bp, Homo sapien
tctagagatacatgtccactggttc

SEQ ID NO: 831798 - DNA, 25 bp, Homo sapien
tcagtgtctctagagatacatgtcc

SEQ ID NO: 831799 - DNA, 25 bp, Homo sapien
cactgtacgcccagaagtcagcaag

SEQ ID NO: 831800 - DNA, 25 bp, Homo sapien
ctacgccccttctgtaatatagatg

SEQ ID NO: 831801 - DNA, 25 bp, Homo sapien
gaaaaacaagtgcacatctacgccc

SEQ ID NO: 831802 - DNA, 25 bp, Homo sapien
gaatataatcatgccgaaaaacaag

SEQ ID NO: 831803 - DNA, 25 bp, Homo sapien
aatatagatgtatgaaaagtctgag

SEQ ID NO: 831804 - DNA, 25 bp, Homo sapien
cacagttacatttctaggctaaagc

SEQ ID NO: 831805 - DNA, 25 bp, Homo sapien
tagaggtagtggagacataagcaaa

SEQ ID NO: 831806 - DNA, 25 bp, Homo sapien
tagctgaacagccagttatagaagc

SEQ ID NO: 831807 - DNA, 25 bp, Homo sapien
ccaaaatagggagatagtgagtgtc

SEQ ID NO: 831808 - DNA, 25 bp, Homo sapien
cagcactagatctttggaaatggcc

SEQ ID NO: 831809 - DNA, 25 bp, Homo sapien
aaaactgtccagtgattaatccctg

SEQ ID NO: 831810 - DNA, 25 bp, Homo sapien
cataatttcagagtaagcaagaacc

SEQ ID NO: 831811 - DNA, 25 bp, Homo sapien
gttccccaggattaacgacacagca

SEQ ID NO: 831812 - DNA, 25 bp, Homo sapien
gacacgatctggcactaggaccatt

SEQ ID NO: 831813 - DNA, 25 bp, Homo sapien
tttatgacacgatctggcactagga

SEQ ID NO: 831814 - DNA, 25 bp, Homo sapien
atgacacgatctggcactaggacca

SEQ ID NO: 831815 - DNA, 25 bp, Homo sapien
tatgacacgatctggcactaggacc

SEQ ID NO: 831816 - DNA, 25 bp, Homo sapien
tcaatgtcataacgatagaagtcac

SEQ ID NO: 831817 - DNA, 25 bp, Homo sapien
taacgccccaatgtgtagatttgcc

SEQ ID NO: 831818 - DNA, 25 bp, Homo sapien
gatttgcctccgttgaatatcaatg

SEQ ID NO: 831819 - DNA, 25 bp, Homo sapien
acagaggaatccaagtaacgcccca

SEQ ID NO: 831820 - DNA, 25 bp, Homo sapien
gaactctctatgtgctactcctaag

SEQ ID NO: 831821 - DNA, 25 bp, Homo sapien
catctaaccagttgaaaaccatgca

SEQ ID NO: 831822 - DNA, 25 bp, Homo sapien
gattacttgctcactattacaggga

SEQ ID NO: 831823 - DNA, 25 bp, Homo sapien
catgcattatttaacagcacccagc

SEQ ID NO: 831824 - DNA, 25 bp, Homo sapien
cttactggccattgcaaaaggagcc

SEQ ID NO: 831825 - DNA, 25 bp, Homo sapien
gaaggtggatgttctcgctcaagaa

SEQ ID NO: 831826 - DNA, 25 bp, Homo sapien
tggaccagataacttcacagaggat

SEQ ID NO: 831827 - DNA, 25 bp, Homo sapien
tcactgtgacatacaactgctaggc

SEQ ID NO: 831828 - DNA, 25 bp, Homo sapien
gagtcctctcgaagaagtttccagg

SEQ ID NO: 831829 - DNA, 25 bp, Homo sapien
gaattgtggttcactggctctgctg

SEQ ID NO: 831830 - DNA, 25 bp, Homo sapien
tcaggcccagcattacaggagtcct

SEQ ID NO: 831831 - DNA, 25 bp, Homo sapien
tattcgagactggatgtcctcaggc

SEQ ID NO: 831832 - DNA, 25 bp, Homo sapien
cacgcaagcgagagcgagaatagag

SEQ ID NO: 831833 - DNA, 25 bp, Homo sapien
tacctatagtggcaggaacagagca

SEQ ID NO: 831834 - DNA, 25 bp, Homo sapien
gaggaagctctctacatattgctaa

SEQ ID NO: 831835 - DNA, 25 bp, Homo sapien
gcaacgttaaacagcactcagtgat

SEQ ID NO: 831836 - DNA, 25 bp, Homo sapien
gtgccatctgatattatgtctacat

SEQ ID NO: 831837 - DNA, 25 bp, Homo sapien
tcaaataggtctttgatcgctggcc

SEQ ID NO: 831838 - DNA, 25 bp, Homo sapien
cagagtccacatcataactaaagaa

SEQ ID NO: 831839 - DNA, 25 bp, Homo sapien
ggtctttgatcgctggccaccaaat

SEQ ID NO: 831840 - DNA, 25 bp, Homo sapien
cagggcaatatgcataatctaagca

SEQ ID NO: 831841 - DNA, 25 bp, Homo sapien
ctatgtagggtaactataaatgatc

SEQ ID NO: 831842 - DNA, 25 bp, Homo sapien
caggcaaagcaactactatgtaggg

SEQ ID NO: 831843 - DNA, 25 bp, Homo sapien
taacctcctagatgctgagctttta

SEQ ID NO: 831844 - DNA, 25 bp, Homo sapien
tgattagggaaatactgcttactgt

SEQ ID NO: 831845 - DNA, 25 bp, Homo sapien
ttcctgttgtgtccctatccttcgt

SEQ ID NO: 831846 - DNA, 25 bp, Homo sapien
gcttactgtaaagccaagaaattta

SEQ ID NO: 831847 - DNA, 25 bp, Homo sapien
gtccgtctctggactagctggaatt

SEQ ID NO: 831848 - DNA, 25 bp, Homo sapien
taatcttgggcagtagtttagcatg

SEQ ID NO: 831849 - DNA, 25 bp, Homo sapien
gggcagtagtttagcatggcagaaa

SEQ ID NO: 831850 - DNA, 25 bp, Homo sapien
ctcacgtggccgccacttttttctt

SEQ ID NO: 831851 - DNA, 25 bp, Homo sapien
tttagcatggcagaaacaccttcct

SEQ ID NO: 831852 - DNA, 25 bp, Homo sapien
tcacggtccaatgcacatattcatt

SEQ ID NO: 831853 - DNA, 25 bp, Homo sapien
cgaagtcctttgaattcctgaggaa

SEQ ID NO: 831854 - DNA, 25 bp, Homo sapien
ccttggtttatcctctaagcaaatg

SEQ ID NO: 831855 - DNA, 25 bp, Homo sapien
tcctgaggaagatatgttattgcat

SEQ ID NO: 831856 - DNA, 25 bp, Homo sapien
acaggcactagccatcacccctggc

SEQ ID NO: 831857 - DNA, 25 bp, Homo sapien
tttaataattctgctttacatcatg

SEQ ID NO: 831858 - DNA, 25 bp, Homo sapien
tggcacagtttcagctgactgcaat

SEQ ID NO: 831859 - DNA, 25 bp, Homo sapien
cctggccgttcatctgttttaataa

SEQ ID NO: 831860 - DNA, 25 bp, Homo sapien
aacttccaaataagtcatcggatac

SEQ ID NO: 831861 - DNA, 25 bp, Homo sapien
gaagtagattgtgaggaaggcttct

SEQ ID NO: 831862 - DNA, 25 bp, Homo sapien
aagaagtagattgtgaggaaggctt

SEQ ID NO: 831863 - DNA, 25 bp, Homo sapien
taagtcatcggatacaaagagaaga

SEQ ID NO: 831864 - DNA, 25 bp, Homo sapien
cattcagttctggatcaatagttgc

SEQ ID NO: 831865 - DNA, 25 bp, Homo sapien
ggatcaatagttgctctctgtgtaa

SEQ ID NO: 831866 - DNA, 25 bp, Homo sapien
atgtcataaatccagaatgaatttc

SEQ ID NO: 831867 - DNA, 25 bp, Homo sapien
tttgctgagtccagataagacgtgt

SEQ ID NO: 831868 - DNA, 25 bp, Homo sapien
gcttgatcattcttatagacacaag

SEQ ID NO: 831869 - DNA, 25 bp, Homo sapien
ggcaaaccttggacatggttcttct

SEQ ID NO: 831870 - DNA, 25 bp, Homo sapien
ttttagttggattatcctttgcagc

SEQ ID NO: 831871 - DNA, 25 bp, Homo sapien
tgtgtagctcatcgtatacaagctg

SEQ ID NO: 831872 - DNA, 25 bp, Homo sapien
tcttatgaggtacttgcaatgcctc

SEQ ID NO: 831873 - DNA, 25 bp, Homo sapien
cttgcaatgcctcagtaaataatct

SEQ ID NO: 831874 - DNA, 25 bp, Homo sapien
tttgaaggtctacacaacttcagtg

SEQ ID NO: 831875 - DNA, 25 bp, Homo sapien
tcttttgaaggtctacacaacttca

SEQ ID NO: 831876 - DNA, 25 bp, Homo sapien
ctgggtctgaatgatccacagttat

SEQ ID NO: 831877 - DNA, 25 bp, Homo sapien
tgaatgatccacagttatataaaga

SEQ ID NO: 831878 - DNA, 25 bp, Homo sapien
gcactaaggggatccacttgggcct

SEQ ID NO: 831879 - DNA, 25 bp, Homo sapien
tatttcagagcactaaggggatcca

SEQ ID NO: 831880 - DNA, 25 bp, Homo sapien
tcacacgaaaacatgcctattcaat

SEQ ID NO: 831881 - DNA, 25 bp, Homo sapien
tggtgacttgaatcttatcacacga

SEQ ID NO: 831882 - DNA, 25 bp, Homo sapien
tgaatcttatcacacgaaaacatgc

SEQ ID NO: 831883 - DNA, 25 bp, Homo sapien
tcttatcacacgaaaacatgcctat

SEQ ID NO: 831884 - DNA, 25 bp, Homo sapien
taaggcaccaaggattctaactccc

SEQ ID NO: 831885 - DNA, 25 bp, Homo sapien
gcaggcattttcacacaccatggat

SEQ ID NO: 831886 - DNA, 25 bp, Homo sapien
caccatggataagcaaacatgtcct

SEQ ID NO: 831887 - DNA, 25 bp, Homo sapien
gtagcctatagacaaacaatactgc

SEQ ID NO: 831888 - DNA, 25 bp, Homo sapien
ttctgtgagtggaaggcaaatgcac

SEQ ID NO: 831889 - DNA, 25 bp, Homo sapien
cagaactacatataatcagcacgaa

SEQ ID NO: 831890 - DNA, 25 bp, Homo sapien
ctaagggtcagaactacatataatc

SEQ ID NO: 831891 - DNA, 25 bp, Homo sapien
tcagcacgaattctgtgagtggaag

SEQ ID NO: 831892 - DNA, 25 bp, Homo sapien
caaggcaggagctaacacggaaaga

SEQ ID NO: 831893 - DNA, 25 bp, Homo sapien
gacacctgtgtcaatgctcaagcat

SEQ ID NO: 831894 - DNA, 25 bp, Homo sapien
gaaagtacaatgaacctggagcctg

SEQ ID NO: 831895 - DNA, 25 bp, Homo sapien
agattctctacctactgaagggcca

SEQ ID NO: 831896 - DNA, 25 bp, Homo sapien
gacaacaggcacaatgatgatgatc

SEQ ID NO: 831897 - DNA, 25 bp, Homo sapien
taaaaagtgtccaaggtgattctga

SEQ ID NO: 831898 - DNA, 25 bp, Homo sapien
gaagctggtggcacacaaaatccta

SEQ ID NO: 831899 - DNA, 25 bp, Homo sapien
gaactgttaccagaggatttcttcc

SEQ ID NO: 831900 - DNA, 25 bp, Homo sapien
tgggctgagctacagtaactccttg

SEQ ID NO: 831901 - DNA, 25 bp, Homo sapien
gtgcccggcccagtacttattcaat

SEQ ID NO: 831902 - DNA, 25 bp, Homo sapien
aaatgaatgacaccagcactctgga

SEQ ID NO: 831903 - DNA, 25 bp, Homo sapien
taaaatgtaagtacctcctgggcag

SEQ ID NO: 831904 - DNA, 25 bp, Homo sapien
tatatgtagggtctaaactgatgcc

SEQ ID NO: 831905 - DNA, 25 bp, Homo sapien
tctctgtagtagatatggagttcct

SEQ ID NO: 831906 - DNA, 25 bp, Homo sapien
tgtcaatttcatcaagttgcggctt

SEQ ID NO: 831907 - DNA, 25 bp, Homo sapien
tgaactgtatgtactggcctaagga

SEQ ID NO: 831908 - DNA, 25 bp, Homo sapien
taaatgtttaagaatagccctagct

SEQ ID NO: 831909 - DNA, 25 bp, Homo sapien
tattctgagataggatcccactctg

SEQ ID NO: 831910 - DNA, 25 bp, Homo sapien
gcttgtaacgtctctcttgggattt

SEQ ID NO: 831911 - DNA, 25 bp, Homo sapien
tcaccaaggttcagcgtgcagtggt

SEQ ID NO: 831912 - DNA, 25 bp, Homo sapien
gaaatctttacctatcccaatgttg

SEQ ID NO: 831913 - DNA, 25 bp, Homo sapien
aaacaactgaccacatacgtatggg

SEQ ID NO: 831914 - DNA, 25 bp, Homo sapien
gactctattctgttgtactgatcca

SEQ ID NO: 831915 - DNA, 25 bp, Homo sapien
cagtgagaaaggtttgagatatcca

SEQ ID NO: 831916 - DNA, 25 bp, Homo sapien
gctgtaaaatctgaaccagatttga

SEQ ID NO: 831917 - DNA, 25 bp, Homo sapien
agctgtaaaatctgaaccagatttg

SEQ ID NO: 831918 - DNA, 25 bp, Homo sapien
cacttcaacctcctaggtagctagg

SEQ ID NO: 831919 - DNA, 25 bp, Homo sapien
tttaaagacagtctttctctctgtc

SEQ ID NO: 831920 - DNA, 25 bp, Homo sapien
aggactatgggcgcacaccactaca

SEQ ID NO: 831921 - DNA, 25 bp, Homo sapien
cccacttcaacctcctaggtagcta

SEQ ID NO: 831922 - DNA, 25 bp, Homo sapien
taataactgcaccagcatcaatggg

SEQ ID NO: 831923 - DNA, 25 bp, Homo sapien
tcctgatgaaaatgcccttgaaaat

SEQ ID NO: 831924 - DNA, 25 bp, Homo sapien
gaatttccatacttcaagacgatta

SEQ ID NO: 831925 - DNA, 25 bp, Homo sapien
aggtctgggttctagagaccaccca

SEQ ID NO: 831926 - DNA, 25 bp, Homo sapien
catgagttatcgcacctggctagaa

SEQ ID NO: 831927 - DNA, 25 bp, Homo sapien
tagcctaaggtcttcaactcgagtg

SEQ ID NO: 831928 - DNA, 25 bp, Homo sapien
taattggcacaaagatagaacagtc

SEQ ID NO: 831929 - DNA, 25 bp, Homo sapien
taaggcagtcaatagtaatggtacc

SEQ ID NO: 831930 - DNA, 25 bp, Homo sapien
cattcactagcactatgcctgggca

SEQ ID NO: 831931 - DNA, 25 bp, Homo sapien
gctctgaagccatactgacagggtt

SEQ ID NO: 831932 - DNA, 25 bp, Homo sapien
tggtttagaaaaggcgctctgaagc

SEQ ID NO: 831933 - DNA, 25 bp, Homo sapien
caactacttaaatggcactgctagg

SEQ ID NO: 831934 - DNA, 25 bp, Homo sapien
ccccaaatgtagtgccaaagtgctg

SEQ ID NO: 831935 - DNA, 25 bp, Homo sapien
tctagtgtagcttcataaaaacgtc

SEQ ID NO: 831936 - DNA, 25 bp, Homo sapien
gcattcctaagtgcaaaaaggcctt

SEQ ID NO: 831937 - DNA, 25 bp, Homo sapien
tgagttaccatatgcacacgtcccc

SEQ ID NO: 831938 - DNA, 25 bp, Homo sapien
ctaattgccagggtgtcattgtttc

SEQ ID NO: 831939 - DNA, 25 bp, Homo sapien
cttatttgttcgcatcactgtgtac

SEQ ID NO: 831940 - DNA, 25 bp, Homo sapien
cctagatttgaccagtgagagcctt

SEQ ID NO: 831941 - DNA, 25 bp, Homo sapien
tgtgtactcagggattcttctcttg

SEQ ID NO: 831942 - DNA, 25 bp, Homo sapien
tgggagttttagacagctttgcccc

SEQ ID NO: 831943 - DNA, 25 bp, Homo sapien
gcatttagtttccaagtctcctgag

SEQ ID NO: 831944 - DNA, 25 bp, Homo sapien
tctccatgtgtgtaccccactgaaa

SEQ ID NO: 831945 - DNA, 25 bp, Homo sapien
tgtgcaatgaacaccccatatagcc

SEQ ID NO: 831946 - DNA, 25 bp, Homo sapien
tgtaacagaaaaactagttgagacc

SEQ ID NO: 831947 - DNA, 25 bp, Homo sapien
aactagttgagaccagcagcaatgt

SEQ ID NO: 831948 - DNA, 25 bp, Homo sapien
caaagaaacatccattgtgtttaaa

SEQ ID NO: 831949 - DNA, 25 bp, Homo sapien
caaaaccaggcagacactactgatc

SEQ ID NO: 831950 - DNA, 25 bp, Homo sapien
agaaatttactaaggtgtcaaagag

SEQ ID NO: 831951 - DNA, 25 bp, Homo sapien
ctttgagcataggtgtgatccacat

SEQ ID NO: 831952 - DNA, 25 bp, Homo sapien
agcataggtgtgatccacatcagaa

SEQ ID NO: 831953 - DNA, 25 bp, Homo sapien
aaagagctgagttctttgagcatag

SEQ ID NO: 831954 - DNA, 25 bp, Homo sapien
gtctaccaggttgcctttaggagga

SEQ ID NO: 831955 - DNA, 25 bp, Homo sapien
taccaggttgcctttaggaggagtc

SEQ ID NO: 831956 - DNA, 25 bp, Homo sapien
caggttgcctttaggaggagtcatg

SEQ ID NO: 831957 - DNA, 25 bp, Homo sapien
aggtctaccaggttgcctttaggag

SEQ ID NO: 831958 - DNA, 25 bp, Homo sapien
tcaggcatgaaggaagagggtaaaa

SEQ ID NO: 831959 - DNA, 25 bp, Homo sapien
tcagaactctggtgcagtcctcaat

SEQ ID NO: 831960 - DNA, 25 bp, Homo sapien
ggagctgcaatccaaaagacggaaa

SEQ ID NO: 831961 - DNA, 25 bp, Homo sapien
tgatggttaagatcccttcagaact

SEQ ID NO: 831962 - DNA, 25 bp, Homo sapien
taggtgcttgggtcaatctcaggtt

SEQ ID NO: 831963 - DNA, 25 bp, Homo sapien
ggaaaagtccatctgccataccttg

SEQ ID NO: 831964 - DNA, 25 bp, Homo sapien
gaaatgcctgtcagttgtataccac

SEQ ID NO: 831965 - DNA, 25 bp, Homo sapien
tagcacaagataaacgggagccctg

SEQ ID NO: 831966 - DNA, 25 bp, Homo sapien
gatcgaccgacacttcttaatatga

SEQ ID NO: 831967 - DNA, 25 bp, Homo sapien
gctattcactcttaagagccactgg

SEQ ID NO: 831968 - DNA, 25 bp, Homo sapien
cagtcagcttcatacaacatgcttt

SEQ ID NO: 831969 - DNA, 25 bp, Homo sapien
ttaatatgaatctgctttagcatgg

SEQ ID NO: 831970 - DNA, 25 bp, Homo sapien
caaactggccacatgaggtctctgc

SEQ ID NO: 831971 - DNA, 25 bp, Homo sapien
gattaaagccccacagtacagagtc

SEQ ID NO: 831972 - DNA, 25 bp, Homo sapien
gaggcctaatcttgctactcaggga

SEQ ID NO: 831973 - DNA, 25 bp, Homo sapien
cactgttgactgctttgggatgcta

SEQ ID NO: 831974 - DNA, 25 bp, Homo sapien
gatactttaggatacggccctgacc

SEQ ID NO: 831975 - DNA, 25 bp, Homo sapien
agattgcagaacacgacagagccca

SEQ ID NO: 831976 - DNA, 25 bp, Homo sapien
caaacagaaggagcgattcacagca

SEQ ID NO: 831977 - DNA, 25 bp, Homo sapien
gacagtgataatttccccgatggca

SEQ ID NO: 831978 - DNA, 25 bp, Homo sapien
gatccttttgagttaattctctgga

SEQ ID NO: 831979 - DNA, 25 bp, Homo sapien
tcttcccaccagaaggtagtgacaa

SEQ ID NO: 831980 - DNA, 25 bp, Homo sapien
ttcccaccagaaggtagtgacaaat

SEQ ID NO: 831981 - DNA, 25 bp, Homo sapien
aatatatcaagggtagtgtcctgca

SEQ ID NO: 831982 - DNA, 25 bp, Homo sapien
tgtcttcccaccagaaggtagtgac

SEQ ID NO: 831983 - DNA, 25 bp, Homo sapien
catctgtgtttagggccaagccttc

SEQ ID NO: 831984 - DNA, 25 bp, Homo sapien
tctgtgtttagggccaagccttctt

SEQ ID NO: 831985 - DNA, 25 bp, Homo sapien
atctgtgtttagggccaagccttct

SEQ ID NO: 831986 - DNA, 25 bp, Homo sapien
tgtgtttagggccaagccttcttta

SEQ ID NO: 831987 - DNA, 25 bp, Homo sapien
caggattttgacttacgccagaact

SEQ ID NO: 831988 - DNA, 25 bp, Homo sapien
tacaagcctcagatggtctttccag

SEQ ID NO: 831989 - DNA, 25 bp, Homo sapien
gtctttccagtcatattaatacctt

SEQ ID NO: 831990 - DNA, 25 bp, Homo sapien
ggcaaaggaagatgtagcatacgtg

SEQ ID NO: 831991 - DNA, 25 bp, Homo sapien
aaggatatgattgacggctgctgct

SEQ ID NO: 831992 - DNA, 25 bp, Homo sapien
tacagtttctcctatattaagaatc

SEQ ID NO: 831993 - DNA, 25 bp, Homo sapien
gaacgtagtgctaggcaggctactt

SEQ ID NO: 831994 - DNA, 25 bp, Homo sapien
aagtccccgtaagacaatagtgaag

SEQ ID NO: 831995 - DNA, 25 bp, Homo sapien
ccacctctcggggtttgccaaccat

SEQ ID NO: 831996 - DNA, 25 bp, Homo sapien
tacatcgccaagggtcctaaccacc

SEQ ID NO: 831997 - DNA, 25 bp, Homo sapien
cacctctcggggtttgccaaccatt

SEQ ID NO: 831998 - DNA, 25 bp, Homo sapien
atcgccaagggtcctaaccacctct

SEQ ID NO: 831999 - DNA, 25 bp, Homo sapien
gttcaacagtttgcccaggaactgg

SEQ ID NO: 832000 - DNA, 25 bp, Homo sapien
tgttcaacagtttgcccaggaactg

SEQ ID NO: 832001 - DNA, 25 bp, Homo sapien
tgggggatcatatatgtcttagtgg

SEQ ID NO: 832002 - DNA, 25 bp, Homo sapien
caggaactgggggatcatatatgtc

SEQ ID NO: 832003 - DNA, 25 bp, Homo sapien
tgtagcatagcttttgtcacggtca

SEQ ID NO: 832004 - DNA, 25 bp, Homo sapien
tttgtcacggtcactagctgatccc

SEQ ID NO: 832005 - DNA, 25 bp, Homo sapien
gcatagcttttgtcacggtcactag

SEQ ID NO: 832006 - DNA, 25 bp, Homo sapien
gtcactagctgatccctcaggtctg

SEQ ID NO: 832007 - DNA, 25 bp, Homo sapien
taagaattgctactcgaaggtgcca

SEQ ID NO: 832008 - DNA, 25 bp, Homo sapien
ccagttgttaccctagcaaggctag

SEQ ID NO: 832009 - DNA, 25 bp, Homo sapien
tgtgcgcctcagaaggaataatcgg

SEQ ID NO: 832010 - DNA, 25 bp, Homo sapien
cattatgttagctgagtgatggcca

SEQ ID NO: 832011 - DNA, 25 bp, Homo sapien
tcacagtctgtagccatctgatatc

SEQ ID NO: 832012 - DNA, 25 bp, Homo sapien
tccagggtcttaagagtcaggctcc

SEQ ID NO: 832013 - DNA, 25 bp, Homo sapien
gtagctctgatgaaataggctatcc

SEQ ID NO: 832014 - DNA, 25 bp, Homo sapien
caggctccggctgtagtagctctga

SEQ ID NO: 832015 - DNA, 25 bp, Homo sapien
tccactcgggatggcttacttttta

SEQ ID NO: 832016 - DNA, 25 bp, Homo sapien
gccatttttcgggtgaaacgccaca

SEQ ID NO: 832017 - DNA, 25 bp, Homo sapien
ttgccatttttcgggtgaaacgcca

SEQ ID NO: 832018 - DNA, 25 bp, Homo sapien
tgccatttttcgggtgaaacgccac

SEQ ID NO: 832019 - DNA, 25 bp, Homo sapien
cgtgcgtgaaccaggtctgcttagg

SEQ ID NO: 832020 - DNA, 25 bp, Homo sapien
cacatttgcttcgtgagatgggggc

SEQ ID NO: 832021 - DNA, 25 bp, Homo sapien
caggctggtatctcagggcagctga

SEQ ID NO: 832022 - DNA, 25 bp, Homo sapien
acccacacaggtctccgtgcgtgaa

SEQ ID NO: 832023 - DNA, 25 bp, Homo sapien
cctccgtgtagtaagcagatttgac

SEQ ID NO: 832024 - DNA, 25 bp, Homo sapien
gggcttagcttaaccatcatcgcag

SEQ ID NO: 832025 - DNA, 25 bp, Homo sapien
tcttgagggtacgactctctgtgtc

SEQ ID NO: 832026 - DNA, 25 bp, Homo sapien
ggtttggacgctcagttgctatcac

SEQ ID NO: 832027 - DNA, 25 bp, Homo sapien
cgttgatggtagaacggcctttctt

SEQ ID NO: 832028 - DNA, 25 bp, Homo sapien
gatggtagaacggcctttcttctca

SEQ ID NO: 832029 - DNA, 25 bp, Homo sapien
ctcgttgatggtagaacggcctttc

SEQ ID NO: 832030 - DNA, 25 bp, Homo sapien
tggtagaacggcctttcttctcacc

SEQ ID NO: 832031 - DNA, 25 bp, Homo sapien
gataggtatgggacattctttattc

SEQ ID NO: 832032 - DNA, 25 bp, Homo sapien
tctggatctctgtgagtgcctgagg

SEQ ID NO: 832033 - DNA, 25 bp, Homo sapien
ttgaagcccactccaggaagctctt

SEQ ID NO: 832034 - DNA, 25 bp, Homo sapien
ctccaggaagctcttgggattgttg

SEQ ID NO: 832035 - DNA, 25 bp, Homo sapien
tttgaaagtgataacaggcacgtgg

SEQ ID NO: 832036 - DNA, 25 bp, Homo sapien
agtgataacaggcacgtgggtaacc

SEQ ID NO: 832037 - DNA, 25 bp, Homo sapien
gaaagtgataacaggcacgtgggta

SEQ ID NO: 832038 - DNA, 25 bp, Homo sapien
ataacaggcacgtgggtaaccaaag

SEQ ID NO: 832039 - DNA, 25 bp, Homo sapien
ccaggtttggccattatgagctctt

SEQ ID NO: 832040 - DNA, 25 bp, Homo sapien
tgcttccagatgctctgagtggaca

SEQ ID NO: 832041 - DNA, 25 bp, Homo sapien
ggagccttggttcatttcattgtag

SEQ ID NO: 832042 - DNA, 25 bp, Homo sapien
caaacatggacctgggtgtacccta

SEQ ID NO: 832043 - DNA, 25 bp, Homo sapien
taagcggctggatatagcattaata

SEQ ID NO: 832044 - DNA, 25 bp, Homo sapien
agagcagaagaccagagccaacagc

SEQ ID NO: 832045 - DNA, 25 bp, Homo sapien
aagccacagaggtcaattgtttata

SEQ ID NO: 832046 - DNA, 25 bp, Homo sapien
tagcattaataagattccagagcag

SEQ ID NO: 832047 - DNA, 25 bp, Homo sapien
cttgcagggtagagagggggagata

SEQ ID NO: 832048 - DNA, 25 bp, Homo sapien
agggtagagagggggagatactggt

SEQ ID NO: 832049 - DNA, 25 bp, Homo sapien
gcagggtagagagggggagatactg

SEQ ID NO: 832050 - DNA, 25 bp, Homo sapien
tgcagggtagagagggggagatact

SEQ ID NO: 832051 - DNA, 25 bp, Homo sapien
tgctcttatcccaggtcaggttcct

SEQ ID NO: 832052 - DNA, 25 bp, Homo sapien
cgagagtgaggcgagtcagttcctc

SEQ ID NO: 832053 - DNA, 25 bp, Homo sapien
gaagagagccgacactggttggcga

SEQ ID NO: 832054 - DNA, 25 bp, Homo sapien
gccttcccatgctgtcctctgcaga

SEQ ID NO: 832055 - DNA, 25 bp, Homo sapien
acttgaggcgcagagatgggccaag

SEQ ID NO: 832056 - DNA, 25 bp, Homo sapien
aggcgcagagatgggccaaggttca

SEQ ID NO: 832057 - DNA, 25 bp, Homo sapien
ctaggacttgaggcgcagagatggg

SEQ ID NO: 832058 - DNA, 25 bp, Homo sapien
ggacttgaggcgcagagatgggcca

SEQ ID NO: 832059 - DNA, 25 bp, Homo sapien
tacagataataactgaggacctcaa

SEQ ID NO: 832060 - DNA, 25 bp, Homo sapien
ttatggcggtcgtaggtaaactgat

SEQ ID NO: 832061 - DNA, 25 bp, Homo sapien
tattaacttatgtggacaaagggtc

SEQ ID NO: 832062 - DNA, 25 bp, Homo sapien
ggacctcaagatgagagcatgctgg

SEQ ID NO: 832063 - DNA, 25 bp, Homo sapien
acacccatcgtgatggacaagggaa

SEQ ID NO: 832064 - DNA, 25 bp, Homo sapien
cacccatcgtgatggacaagggaag

SEQ ID NO: 832065 - DNA, 25 bp, Homo sapien
acccatcgtgatggacaagggaagg

SEQ ID NO: 832066 - DNA, 25 bp, Homo sapien
agctgctgtgccagggcatgatgga

SEQ ID NO: 832067 - DNA, 25 bp, Homo sapien
tagaggtcattgaaccctgtgctcc

SEQ ID NO: 832068 - DNA, 25 bp, Homo sapien
cctgtgctccctgcattatgaggaa

SEQ ID NO: 832069 - DNA, 25 bp, Homo sapien
gattttcatcaggtgagactgtaga

SEQ ID NO: 832070 - DNA, 25 bp, Homo sapien
tccgaggagcgggattagagacgcc

SEQ ID NO: 832071 - DNA, 25 bp, Homo sapien
agcgggattagagacgcccaccacc

SEQ ID NO: 832072 - DNA, 25 bp, Homo sapien
aggagcgggattagagacgcccacc

SEQ ID NO: 832073 - DNA, 25 bp, Homo sapien
cgaggagcgggattagagacgccca

SEQ ID NO: 832074 - DNA, 25 bp, Homo sapien
ctgaaattcatggagctctgcctga

SEQ ID NO: 832075 - DNA, 25 bp, Homo sapien
tgcctgaggactgagtccctttggt

SEQ ID NO: 832076 - DNA, 25 bp, Homo sapien
tcatggagctctgcctgaggactga

SEQ ID NO: 832077 - DNA, 25 bp, Homo sapien
tgaggactgagtccctttggtctcc

SEQ ID NO: 832078 - DNA, 25 bp, Homo sapien
cagcctctagccaaataggtggtta

SEQ ID NO: 832079 - DNA, 25 bp, Homo sapien
tgcagattcatcagtggcccttgcc

SEQ ID NO: 832080 - DNA, 25 bp, Homo sapien
tgcacaaaatgcagcgttcagctgc

SEQ ID NO: 832081 - DNA, 25 bp, Homo sapien
aaatgtttgcgggataattggctgc

SEQ ID NO: 832082 - DNA, 25 bp, Homo sapien
ccttctcttttggttgactttctat

SEQ ID NO: 832083 - DNA, 25 bp, Homo sapien
tcttttggttgactttctattcagc

SEQ ID NO: 832084 - DNA, 25 bp, Homo sapien
attctcctccctccgtttctatggg

SEQ ID NO: 832085 - DNA, 25 bp, Homo sapien
atatcctcttcctatgcccattcct

SEQ ID NO: 832086 - DNA, 25 bp, Homo sapien
gacttcttgatctgctataactata

SEQ ID NO: 832087 - DNA, 25 bp, Homo sapien
gtacttgaggcataattctgactaa

SEQ ID NO: 832088 - DNA, 25 bp, Homo sapien
caaatcaagtatgaacagctaagag

SEQ ID NO: 832089 - DNA, 25 bp, Homo sapien
tttagaccattgtttatggatccat

SEQ ID NO: 832090 - DNA, 25 bp, Homo sapien
gaagcaaatgagtcccagacacaga

SEQ ID NO: 832091 - DNA, 25 bp, Homo sapien
tgcttcccactcttgggcagtgaag

SEQ ID NO: 832092 - DNA, 25 bp, Homo sapien
catctggagtggtgaacaggagccg

SEQ ID NO: 832093 - DNA, 25 bp, Homo sapien
acaggagccggaagcaaatgagtcc

SEQ ID NO: 832094 - DNA, 25 bp, Homo sapien
aagctcgagggcaacaaccttgtct

SEQ ID NO: 832095 - DNA, 25 bp, Homo sapien
catgtcacaagctcgagggcaacaa

SEQ ID NO: 832096 - DNA, 25 bp, Homo sapien
gagggcaacaaccttgtctcctacg

SEQ ID NO: 832097 - DNA, 25 bp, Homo sapien
cttgtctcctacgtcttctgtgtcc

SEQ ID NO: 832098 - DNA, 25 bp, Homo sapien
aggccctcggtccttccaggccaca

SEQ ID NO: 832099 - DNA, 25 bp, Homo sapien
ggccctcggtccttccaggccacag

SEQ ID NO: 832100 - DNA, 25 bp, Homo sapien
caggccctcggtccttccaggccac

SEQ ID NO: 832101 - DNA, 25 bp, Homo sapien
catgtccaggacagtacctgatggc

SEQ ID NO: 832102 - DNA, 25 bp, Homo sapien
gcatgtccaggacagtacctgatgg

SEQ ID NO: 832103 - DNA, 25 bp, Homo sapien
gtccaggacagtacctgatggcttc

SEQ ID NO: 832104 - DNA, 25 bp, Homo sapien
tgtccaggacagtacctgatggctt

SEQ ID NO: 832105 - DNA, 25 bp, Homo sapien
tgaattccacagttactagaccaag

SEQ ID NO: 832106 - DNA, 25 bp, Homo sapien
acagttactagaccaagctggagcc

SEQ ID NO: 832107 - DNA, 25 bp, Homo sapien
ttccacagttactagaccaagctgg

SEQ ID NO: 832108 - DNA, 25 bp, Homo sapien
ctccatcaggttccgcaactgccat

SEQ ID NO: 832109 - DNA, 25 bp, Homo sapien
ggtccacgtagtcagtccacaggaa

SEQ ID NO: 832110 - DNA, 25 bp, Homo sapien
agaaggagttgggtccacgtagtca

SEQ ID NO: 832111 - DNA, 25 bp, Homo sapien
catttgcatgtactgaaatgttaag

SEQ ID NO: 832112 - DNA, 25 bp, Homo sapien
aatataatggcatttgcatgtactg

SEQ ID NO: 832113 - DNA, 25 bp, Homo sapien
cccagacctgagaccaccaaggaca

SEQ ID NO: 832114 - DNA, 25 bp, Homo sapien
tggctggcctatgcatctgaccctc

SEQ ID NO: 832115 - DNA, 25 bp, Homo sapien
ctatgcatctgaccctcggcagctg

SEQ ID NO: 832116 - DNA, 25 bp, Homo sapien
ctgctggctggcctatgcatctgac

SEQ ID NO: 832117 - DNA, 25 bp, Homo sapien
gtgtagttgacaccgcaagacctgg

SEQ ID NO: 832118 - DNA, 25 bp, Homo sapien
caagagctggtgattacctgagcca

SEQ ID NO: 832119 - DNA, 25 bp, Homo sapien
ccgggtagacgacatggctctctca

SEQ ID NO: 832120 - DNA, 25 bp, Homo sapien
ctgattggaccaagggtgggcacct

SEQ ID NO: 832121 - DNA, 25 bp, Homo sapien
gcctcctgggaaatcttgacatgag

SEQ ID NO: 832122 - DNA, 25 bp, Homo sapien
gctcaatgccgcctctgttgtaagg

SEQ ID NO: 832123 - DNA, 25 bp, Homo sapien
ggctccagcgaggtctttggcacaa

SEQ ID NO: 832124 - DNA, 25 bp, Homo sapien
aaaagcccctgtgttgcggctcccg

SEQ ID NO: 832125 - DNA, 25 bp, Homo sapien
tcaggaggagcagcaatgttgttct

SEQ ID NO: 832126 - DNA, 25 bp, Homo sapien
aggaggagcagcaatgttgttctac

SEQ ID NO: 832127 - DNA, 25 bp, Homo sapien
caggaggagcagcaatgttgttcta

SEQ ID NO: 832128 - DNA, 25 bp, Homo sapien
tcctccggaccacctcacctccagt

SEQ ID NO: 832129 - DNA, 25 bp, Homo sapien
ctccagtctcctgtgtgtagcagcc

SEQ ID NO: 832130 - DNA, 25 bp, Homo sapien
tgtgtagcagcctctcaaacttctc

SEQ ID NO: 832131 - DNA, 25 bp, Homo sapien
attaggaccaggggggctcccgcat

SEQ ID NO: 832132 - DNA, 25 bp, Homo sapien
ctgggaggaagatctgggaatggcc

SEQ ID NO: 832133 - DNA, 25 bp, Homo sapien
agagcagaggggtttttaagtctga

SEQ ID NO: 832134 - DNA, 25 bp, Homo sapien
aatggccacattgcctgggagagca

SEQ ID NO: 832135 - DNA, 25 bp, Homo sapien
gagcagaggggtttttaagtctgaa

SEQ ID NO: 832136 - DNA, 25 bp, Homo sapien
ggtgtaagaacccacaggccatcac

SEQ ID NO: 832137 - DNA, 25 bp, Homo sapien
tccgcaagctgagggaaattccaag

SEQ ID NO: 832138 - DNA, 25 bp, Homo sapien
gctgagtgagaactgcaatccgcaa

SEQ ID NO: 832139 - DNA, 25 bp, Homo sapien
tttctttaggtgtgatgggatgaag

SEQ ID NO: 832140 - DNA, 25 bp, Homo sapien
ggcccaagccctgagctttggaaat

SEQ ID NO: 832141 - DNA, 25 bp, Homo sapien
ctgagaatggacaaaggcccaagcc

SEQ ID NO: 832142 - DNA, 25 bp, Homo sapien
agactgcccagctgggacccatgca

SEQ ID NO: 832143 - DNA, 25 bp, Homo sapien
gacattttggcactcatgtaagggc

SEQ ID NO: 832144 - DNA, 25 bp, Homo sapien
atctgtcggagcctcatcctgccgg

SEQ ID NO: 832145 - DNA, 25 bp, Homo sapien
gggtcttatctgtcggagcctcatc

SEQ ID NO: 832146 - DNA, 25 bp, Homo sapien
taacaagcacgggtcttatctgtcg

SEQ ID NO: 832147 - DNA, 25 bp, Homo sapien
gtcccgtagagccagggcagtgact

SEQ ID NO: 832148 - DNA, 25 bp, Homo sapien
tgactgacgccaaaataattacttc

SEQ ID NO: 832149 - DNA, 25 bp, Homo sapien
gcttgactgacgccaaaataattac

SEQ ID NO: 832150 - DNA, 25 bp, Homo sapien
acaaaacttagcttgactgacgcca

SEQ ID NO: 832151 - DNA, 25 bp, Homo sapien
caaaacttagcttgactgacgccaa

SEQ ID NO: 832152 - DNA, 25 bp, Homo sapien
tcacgctcccctggactggaaccat

SEQ ID NO: 832153 - DNA, 25 bp, Homo sapien
ctcacgctcccctggactggaacca

SEQ ID NO: 832154 - DNA, 25 bp, Homo sapien
gaaacactctgaactgtcacggaag

SEQ ID NO: 832155 - DNA, 25 bp, Homo sapien
ggctgggggctagacctgcctttcc

SEQ ID NO: 832156 - DNA, 25 bp, Homo sapien
acactctgaactgtcacggaagggc

SEQ ID NO: 832157 - DNA, 25 bp, Homo sapien
caccatatccgggagtagctgagaa

SEQ ID NO: 832158 - DNA, 25 bp, Homo sapien
accctcctgaatctactgtactcaa

SEQ ID NO: 832159 - DNA, 25 bp, Homo sapien
actgtactcaaacgtggcctcgtca

SEQ ID NO: 832160 - DNA, 25 bp, Homo sapien
cggtagcatctacccagggagcagc

SEQ ID NO: 832161 - DNA, 25 bp, Homo sapien
cccggcaggattccagttccagagt

SEQ ID NO: 832162 - DNA, 25 bp, Homo sapien
caccccacgcaggcctaaagcacac

SEQ ID NO: 832163 - DNA, 25 bp, Homo sapien
tcgccgaatgattttgtctgagcct

SEQ ID NO: 832164 - DNA, 25 bp, Homo sapien
cctcgccgaatgattttgtctgagc

SEQ ID NO: 832165 - DNA, 25 bp, Homo sapien
atgattttgtctgagccttggcccc

SEQ ID NO: 832166 - DNA, 25 bp, Homo sapien
cgaatgattttgtctgagccttggc

SEQ ID NO: 832167 - DNA, 25 bp, Homo sapien
ccccaaactgcaggcacccgctcag

SEQ ID NO: 832168 - DNA, 25 bp, Homo sapien
aaactgcaggcacccgctcagtgct

SEQ ID NO: 832169 - DNA, 25 bp, Homo sapien
gcaggcacccgctcagtgctgggca

SEQ ID NO: 832170 - DNA, 25 bp, Homo sapien
ctgcaggcacccgctcagtgctggg

SEQ ID NO: 832171 - DNA, 25 bp, Homo sapien
ctctagggctgaattctcagtcttc

SEQ ID NO: 832172 - DNA, 25 bp, Homo sapien
tctagggctgaattctcagtcttct

SEQ ID NO: 832173 - DNA, 25 bp, Homo sapien
tctctagggctgaattctcagtctt

SEQ ID NO: 832174 - DNA, 25 bp, Homo sapien
tggaaaagaggcactcacaaccaga

SEQ ID NO: 832175 - DNA, 25 bp, Homo sapien
atgaggcagagagccccattccaca

SEQ ID NO: 832176 - DNA, 25 bp, Homo sapien
cccagatgaggcagagagccccatt

SEQ ID NO: 832177 - DNA, 25 bp, Homo sapien
actccccagatgaggcagagagccc

SEQ ID NO: 832178 - DNA, 25 bp, Homo sapien
gagagccccattccacaaggctcca

SEQ ID NO: 832179 - DNA, 25 bp, Homo sapien
caaagaagcccaggtgtgatgggag

SEQ ID NO: 832180 - DNA, 25 bp, Homo sapien
cgcaaagaagcccaggtgtgatggg

SEQ ID NO: 832181 - DNA, 25 bp, Homo sapien
aaagaagcccaggtgtgatgggagg

SEQ ID NO: 832182 - DNA, 25 bp, Homo sapien
gaagcccaggtgtgatgggagggac

SEQ ID NO: 832183 - DNA, 25 bp, Homo sapien
tgagagaaggaggtagaggcaagac

SEQ ID NO: 832184 - DNA, 25 bp, Homo sapien
gagagaaggaggtagaggcaagacg

SEQ ID NO: 832185 - DNA, 25 bp, Homo sapien
ctgagagaaggaggtagaggcaaga

SEQ ID NO: 832186 - DNA, 25 bp, Homo sapien
gccttggagacttcactcccattca

SEQ ID NO: 832187 - DNA, 25 bp, Homo sapien
gctgagacgtttagggaaacctgaa

SEQ ID NO: 832188 - DNA, 25 bp, Homo sapien
tcccattcacgctgagacgtttagg

SEQ ID NO: 832189 - DNA, 25 bp, Homo sapien
gacttcactcccattcacgctgaga

SEQ ID NO: 832190 - DNA, 25 bp, Homo sapien
gcagtacatggggaggattcatctt

SEQ ID NO: 832191 - DNA, 25 bp, Homo sapien
gaggattcatcttggtcagcctgct

SEQ ID NO: 832192 - DNA, 25 bp, Homo sapien
tacatggggaggattcatcttggtc

SEQ ID NO: 832193 - DNA, 25 bp, Homo sapien
ggcaggtggttccctgccagaaaga

SEQ ID NO: 832194 - DNA, 25 bp, Homo sapien
cctcctgtggccaggagcttgatgt

SEQ ID NO: 832195 - DNA, 25 bp, Homo sapien
agcaggcaagggctcgggggaccaa

SEQ ID NO: 832196 - DNA, 25 bp, Homo sapien
ggaccacatcctgagcagtcaacat

SEQ ID NO: 832197 - DNA, 25 bp, Homo sapien
ggctcttcatacctgagcaggcaag

SEQ ID NO: 832198 - DNA, 25 bp, Homo sapien
tccaacatcaggatggttgctatgc

SEQ ID NO: 832199 - DNA, 25 bp, Homo sapien
cacagccctgagaatcgggaatgtc

SEQ ID NO: 832200 - DNA, 25 bp, Homo sapien
tgcacttcaggcacaactgatctca

SEQ ID NO: 832201 - DNA, 25 bp, Homo sapien
gaatgtccccagcttctatctgcag

SEQ ID NO: 832202 - DNA, 25 bp, Homo sapien
tctctgtgggctctagaagatccta

SEQ ID NO: 832203 - DNA, 25 bp, Homo sapien
tggtgtccccagacaactctcttta

SEQ ID NO: 832204 - DNA, 25 bp, Homo sapien
gaccttcacctacccgtctgcagag

SEQ ID NO: 832205 - DNA, 25 bp, Homo sapien
ggcactgaaagccagacagcccagc

SEQ ID NO: 832206 - DNA, 25 bp, Homo sapien
gaaacttctcatatggaaccagtgg

SEQ ID NO: 832207 - DNA, 25 bp, Homo sapien
tcaaccgacttcaatttaactggca

SEQ ID NO: 832208 - DNA, 25 bp, Homo sapien
gatttgcttgctggccttggttcaa

SEQ ID NO: 832209 - DNA, 25 bp, Homo sapien
ggccaccagcttcaaggctctgggc

SEQ ID NO: 832210 - DNA, 25 bp, Homo sapien
ctggcattaaccaagcagctctgct

SEQ ID NO: 832211 - DNA, 25 bp, Homo sapien
ctctgatcgtaggtaagaggctgac

SEQ ID NO: 832212 - DNA, 25 bp, Homo sapien
ccactgaaggctctgatcgtaggta

SEQ ID NO: 832213 - DNA, 25 bp, Homo sapien
aaggctctgatcgtaggtaagaggc

SEQ ID NO: 832214 - DNA, 25 bp, Homo sapien
ctgaaggctctgatcgtaggtaaga

SEQ ID NO: 832215 - DNA, 25 bp, Homo sapien
caagatgtgcccctcgtctgtttct

SEQ ID NO: 832216 - DNA, 25 bp, Homo sapien
cttcccccaatctgtcccgccctct

SEQ ID NO: 832217 - DNA, 25 bp, Homo sapien
tgccacatgccccactcggccccca

SEQ ID NO: 832218 - DNA, 25 bp, Homo sapien
aaagatttagggaatagaaattgca

SEQ ID NO: 832219 - DNA, 25 bp, Homo sapien
tgtccagtttaaggtttcacttgag

SEQ ID NO: 832220 - DNA, 25 bp, Homo sapien
attccattaaagtcacaagctctta

SEQ ID NO: 832221 - DNA, 25 bp, Homo sapien
caagctcttaatgtgtccagtttaa

SEQ ID NO: 832222 - DNA, 25 bp, Homo sapien
tgtgaaagtatcaccttcacgggct

SEQ ID NO: 832223 - DNA, 25 bp, Homo sapien
ctcatgagcagggacaactcttgcg

SEQ ID NO: 832224 - DNA, 25 bp, Homo sapien
ctcacttttgctctcatgagcaggg

SEQ ID NO: 832225 - DNA, 25 bp, Homo sapien
gagcagggacaactcttgcgctgaa

SEQ ID NO: 832226 - DNA, 25 bp, Homo sapien
ggtagtaaagtctggccttcttgtg

SEQ ID NO: 832227 - DNA, 25 bp, Homo sapien
taggattggaagaaggaaatccttc

SEQ ID NO: 832228 - DNA, 25 bp, Homo sapien
ctggcgtcccactcctctggctggg

SEQ ID NO: 832229 - DNA, 25 bp, Homo sapien
tccctggactgctgtagatgctggc

SEQ ID NO: 832230 - DNA, 25 bp, Homo sapien
tctggcaagagggttggtctctcca

SEQ ID NO: 832231 - DNA, 25 bp, Homo sapien
ttgcacccggaaggatctgtggact

SEQ ID NO: 832232 - DNA, 25 bp, Homo sapien
atgcttctggcatttgcacccggaa

SEQ ID NO: 832233 - DNA, 25 bp, Homo sapien
gagcgtcttctactgaggtggcccc

SEQ ID NO: 832234 - DNA, 25 bp, Homo sapien
ctgagaaatacgaacaggccagggg

SEQ ID NO: 832235 - DNA, 25 bp, Homo sapien
tgagaaatacgaacaggccaggggg

SEQ ID NO: 832236 - DNA, 25 bp, Homo sapien
tcttcccgctgaataacaacatggg

SEQ ID NO: 832237 - DNA, 25 bp, Homo sapien
gagtgttttccgtgcacatccgagc

SEQ ID NO: 832238 - DNA, 25 bp, Homo sapien
ccttattgttttcctgcatggcgca

SEQ ID NO: 832239 - DNA, 25 bp, Homo sapien
aaagggcgtctttttggcactcaga

SEQ ID NO: 832240 - DNA, 25 bp, Homo sapien
ctccccaggtttgcactttcgacat

SEQ ID NO: 832241 - DNA, 25 bp, Homo sapien
tgtcctccccaggtttgcactttcg

SEQ ID NO: 832242 - DNA, 25 bp, Homo sapien
ttgtgtgtgatcttttctgtcctcc

SEQ ID NO: 832243 - DNA, 25 bp, Homo sapien
gtgtgtgatcttttctgtcctcccc

SEQ ID NO: 832244 - DNA, 25 bp, Homo sapien
cttgagcatggaacccgcggtactc

SEQ ID NO: 832245 - DNA, 25 bp, Homo sapien
caatctccatagaggcttccctgtc

SEQ ID NO: 832246 - DNA, 25 bp, Homo sapien
tctgtagttgggagcctcaatctcc

SEQ ID NO: 832247 - DNA, 25 bp, Homo sapien
gatgagattcttgagcatggaaccc

SEQ ID NO: 832248 - DNA, 25 bp, Homo sapien
gaaagaccccttgtctggttcaaca

SEQ ID NO: 832249 - DNA, 25 bp, Homo sapien
agaatccctctagcatgcggctggg

SEQ ID NO: 832250 - DNA, 25 bp, Homo sapien
gacagagagtgccttgaaagacccc

SEQ ID NO: 832251 - DNA, 25 bp, Homo sapien
gttcaacaaggcacccaggcaagaa

SEQ ID NO: 832252 - DNA, 25 bp, Homo sapien
tctcatccctttttggaggcccaga

SEQ ID NO: 832253 - DNA, 25 bp, Homo sapien
agtgtgtgcaggaagcttgttctca

SEQ ID NO: 832254 - DNA, 25 bp, Homo sapien
ggaagcttgttctcattagaattca

SEQ ID NO: 832255 - DNA, 25 bp, Homo sapien
tgtggccgttggagctctcatccct

SEQ ID NO: 832256 - DNA, 25 bp, Homo sapien
tggatttgccacctcctgcaactca

SEQ ID NO: 832257 - DNA, 25 bp, Homo sapien
ctggatttgccacctcctgcaactc

SEQ ID NO: 832258 - DNA, 25 bp, Homo sapien
ccaaacccatcaaagaacgtctcat

SEQ ID NO: 832259 - DNA, 25 bp, Homo sapien
tagctaacacggtgcttggagagcg

SEQ ID NO: 832260 - DNA, 25 bp, Homo sapien
tctaaaagctttagctaacacggtg

SEQ ID NO: 832261 - DNA, 25 bp, Homo sapien
tggagagcgcacacatctgcatgtc

SEQ ID NO: 832262 - DNA, 25 bp, Homo sapien
cgctgaccagattccttctatcctt

SEQ ID NO: 832263 - DNA, 25 bp, Homo sapien
tatcatgcggattggcaagaagaga

SEQ ID NO: 832264 - DNA, 25 bp, Homo sapien
tacatgtctgtatcatgcggattgg

SEQ ID NO: 832265 - DNA, 25 bp, Homo sapien
gcagtagtcagccatcaccattagg

SEQ ID NO: 832266 - DNA, 25 bp, Homo sapien
tgtactgagactaccaccttgtcct

SEQ ID NO: 832267 - DNA, 25 bp, Homo sapien
catgtactgagactaccaccttgtc

SEQ ID NO: 832268 - DNA, 25 bp, Homo sapien
tcatgtactgagactaccaccttgt

SEQ ID NO: 832269 - DNA, 25 bp, Homo sapien
atgtactgagactaccaccttgtcc

SEQ ID NO: 832270 - DNA, 25 bp, Homo sapien
acttccatggctgttaaactcattg

SEQ ID NO: 832271 - DNA, 25 bp, Homo sapien
tacaacgctgattatccaacaccag

SEQ ID NO: 832272 - DNA, 25 bp, Homo sapien
tgaaaggttgcacagggtacaacgc

SEQ ID NO: 832273 - DNA, 25 bp, Homo sapien
tgttaaactcattgcaagaaaggga

SEQ ID NO: 832274 - DNA, 25 bp, Homo sapien
caaggagcaaagagatatcagcagc

SEQ ID NO: 832275 - DNA, 25 bp, Homo sapien
ttcacaccatttccacgagatggaa

SEQ ID NO: 832276 - DNA, 25 bp, Homo sapien
catttccacgagatggaagcaagga

SEQ ID NO: 832277 - DNA, 25 bp, Homo sapien
gcaaggagcaaagagatatcagcag

SEQ ID NO: 832278 - DNA, 25 bp, Homo sapien
gacatcggtatgtgaagagttcatt

SEQ ID NO: 832279 - DNA, 25 bp, Homo sapien
cttcctcgggaagcagcatattaaa

SEQ ID NO: 832280 - DNA, 25 bp, Homo sapien
taattaacgctaaatcaccaggccc

SEQ ID NO: 832281 - DNA, 25 bp, Homo sapien
tcagtaagtcagtaacataatctgc

SEQ ID NO: 832282 - DNA, 25 bp, Homo sapien
cattctgaccctttctaaggctgac

SEQ ID NO: 832283 - DNA, 25 bp, Homo sapien
aagtccaggcattctgaccctttct

SEQ ID NO: 832284 - DNA, 25 bp, Homo sapien
tctcccctaggatggctgtagccaa

SEQ ID NO: 832285 - DNA, 25 bp, Homo sapien
gacatgcagaaccagaccagaagga

SEQ ID NO: 832286 - DNA, 25 bp, Homo sapien
tatccctatttttgatctgctcccc

SEQ ID NO: 832287 - DNA, 25 bp, Homo sapien
cagaggaatggggttcaagctgtcc

SEQ ID NO: 832288 - DNA, 25 bp, Homo sapien
ggagatggatgtccccacagaatga

SEQ ID NO: 832289 - DNA, 25 bp, Homo sapien
aaaccacgtggttgggctggagagg

SEQ ID NO: 832290 - DNA, 25 bp, Homo sapien
tcaggaaacacatccacgccaagga

SEQ ID NO: 832291 - DNA, 25 bp, Homo sapien
ggaccacggccacagaagagagtct

SEQ ID NO: 832292 - DNA, 25 bp, Homo sapien
tcacagctggaggtatctgagcaag

SEQ ID NO: 832293 - DNA, 25 bp, Homo sapien
gacaactctgatgggaacaatctgg

SEQ ID NO: 832294 - DNA, 25 bp, Homo sapien
taggtggaaaggcatagggttggga

SEQ ID NO: 832295 - DNA, 25 bp, Homo sapien
gggcccaagttagacataggaatga

SEQ ID NO: 832296 - DNA, 25 bp, Homo sapien
ccaagttagacataggaatgatgtc

SEQ ID NO: 832297 - DNA, 25 bp, Homo sapien
tggggtctcaggatccagaaatggc

SEQ ID NO: 832298 - DNA, 25 bp, Homo sapien
ctgacttggagcgaggtttgccaga

SEQ ID NO: 832299 - DNA, 25 bp, Homo sapien
ctggaattccccgaaaagctatggg

SEQ ID NO: 832300 - DNA, 25 bp, Homo sapien
tggtgtgaacggcaatcttcctctg

SEQ ID NO: 832301 - DNA, 25 bp, Homo sapien
ttccccactgatggccaagccaggg

SEQ ID NO: 832302 - DNA, 25 bp, Homo sapien
tcttccaaaaggtccatttcccatc

SEQ ID NO: 832303 - DNA, 25 bp, Homo sapien
tcccatcccattatcaacttcacaa

SEQ ID NO: 832304 - DNA, 25 bp, Homo sapien
cagctttcttccaaaaggtccattt

SEQ ID NO: 832305 - DNA, 25 bp, Homo sapien
taactgtttcacatgagcatgtcaa

SEQ ID NO: 832306 - DNA, 25 bp, Homo sapien
cacagatactgtaactggtggcctc

SEQ ID NO: 832307 - DNA, 25 bp, Homo sapien
tccacatagaaagacaggctagctg

SEQ ID NO: 832308 - DNA, 25 bp, Homo sapien
caagagtggaacctaatgcaagcct

SEQ ID NO: 832309 - DNA, 25 bp, Homo sapien
cagtttgtaacacccaagaaggagg

SEQ ID NO: 832310 - DNA, 25 bp, Homo sapien
ccagggaccagagggggctctacca

SEQ ID NO: 832311 - DNA, 25 bp, Homo sapien
ctctaccatataagctgatgaatct

SEQ ID NO: 832312 - DNA, 25 bp, Homo sapien
cagagggggctctaccatataagct

SEQ ID NO: 832313 - DNA, 25 bp, Homo sapien
gggctctaccatataagctgatgaa

SEQ ID NO: 832314 - DNA, 25 bp, Homo sapien
cttttctgaaaagtatgcctggcag

SEQ ID NO: 832315 - DNA, 25 bp, Homo sapien
gcctggcagcttcttccatgatgac

SEQ ID NO: 832316 - DNA, 25 bp, Homo sapien
tttctgaaaagtatgcctggcagct

SEQ ID NO: 832317 - DNA, 25 bp, Homo sapien
atgcctggcagcttcttccatgatg

SEQ ID NO: 832318 - DNA, 25 bp, Homo sapien
ctagagatggagaacatctggattc

SEQ ID NO: 832319 - DNA, 25 bp, Homo sapien
tgctgttaaatctaccacaaattgt

SEQ ID NO: 832320 - DNA, 25 bp, Homo sapien
atgatttaagtcctctctggtggca

SEQ ID NO: 832321 - DNA, 25 bp, Homo sapien
atagaacaggatgatttaagtcctc

SEQ ID NO: 832322 - DNA, 25 bp, Homo sapien
aagatgctgttaaatctaccacaaa

SEQ ID NO: 832323 - DNA, 25 bp, Homo sapien
gaaaacagactgctgctagattcta

SEQ ID NO: 832324 - DNA, 25 bp, Homo sapien
cagactgctgctagattctagactc

SEQ ID NO: 832325 - DNA, 25 bp, Homo sapien
aacagactgctgctagattctagac

SEQ ID NO: 832326 - DNA, 25 bp, Homo sapien
tattcacagctgttgaaaacagact

SEQ ID NO: 832327 - DNA, 25 bp, Homo sapien
caagcaggagcccaacatgggctgt

SEQ ID NO: 832328 - DNA, 25 bp, Homo sapien
agcaggagcccaacatgggctgtat

SEQ ID NO: 832329 - DNA, 25 bp, Homo sapien
tgcaagcaggagcccaacatgggct

SEQ ID NO: 832330 - DNA, 25 bp, Homo sapien
ctgcaagcaggagcccaacatgggc

SEQ ID NO: 832331 - DNA, 25 bp, Homo sapien
tacaaacacgctctagaaacaggct

SEQ ID NO: 832332 - DNA, 25 bp, Homo sapien
gctggtatatcattgccactgtcag

SEQ ID NO: 832333 - DNA, 25 bp, Homo sapien
taaaccaggtgagtgagtacaaaca

SEQ ID NO: 832334 - DNA, 25 bp, Homo sapien
cacaatgggatgtgcaggcatttcc

SEQ ID NO: 832335 - DNA, 25 bp, Homo sapien
ggctgaaggcagtgtggcccaccac

SEQ ID NO: 832336 - DNA, 25 bp, Homo sapien
gcactaacagtcactgaggcagggc

SEQ ID NO: 832337 - DNA, 25 bp, Homo sapien
gctgaaggcagtgtggcccaccact

SEQ ID NO: 832338 - DNA, 25 bp, Homo sapien
ctggggtagcactaacagtcactga

SEQ ID NO: 832339 - DNA, 25 bp, Homo sapien
cacatgttgaagtgttccacgcagg

SEQ ID NO: 832340 - DNA, 25 bp, Homo sapien
gatatgcgcatgttaaagtggtcca

SEQ ID NO: 832341 - DNA, 25 bp, Homo sapien
cacgcaggttaaagtggtctgtgca

SEQ ID NO: 832342 - DNA, 25 bp, Homo sapien
cacatgttgatgtggcccatgcatg

SEQ ID NO: 832343 - DNA, 25 bp, Homo sapien
ttggagtggtatgcacacgttgaca

SEQ ID NO: 832344 - DNA, 25 bp, Homo sapien
catgcatgttgaagtggtccatccg

SEQ ID NO: 832345 - DNA, 25 bp, Homo sapien
ggcatcctccacgaccagagtggta

SEQ ID NO: 832346 - DNA, 25 bp, Homo sapien
ggtacgtgcatgttgacttggtcca

SEQ ID NO: 832347 - DNA, 25 bp, Homo sapien
atttgctggcgtgagcactatccat

SEQ ID NO: 832348 - DNA, 25 bp, Homo sapien
aatttgctggcgtgagcactatcca

SEQ ID NO: 832349 - DNA, 25 bp, Homo sapien
atgggacaagggcacagccaccctt

SEQ ID NO: 832350 - DNA, 25 bp, Homo sapien
ttcagggatcaaccaggtggtgcca

SEQ ID NO: 832351 - DNA, 25 bp, Homo sapien
tggtcagcatcacaccagcctgcag

SEQ ID NO: 832352 - DNA, 25 bp, Homo sapien
ggtgccaaacttgccctgagtcttg

SEQ ID NO: 832353 - DNA, 25 bp, Homo sapien
ctgcagagggacaaccaaaggggta

SEQ ID NO: 832354 - DNA, 25 bp, Homo sapien
ccagcattttaggcagacagcaaga

SEQ ID NO: 832355 - DNA, 25 bp, Homo sapien
caaccaaaggggtagttagaagctg

SEQ ID NO: 832356 - DNA, 25 bp, Homo sapien
ggggtagttagaagctgatgggtcc

SEQ ID NO: 832357 - DNA, 25 bp, Homo sapien
atcaggaaagttggacatcctgaga

SEQ ID NO: 832358 - DNA, 25 bp, Homo sapien
aatcaggaaagttggacatcctgag

SEQ ID NO: 832359 - DNA, 25 bp, Homo sapien
ctctattctgaattcgaaaggactg

SEQ ID NO: 832360 - DNA, 25 bp, Homo sapien
ctattctgaattcgaaaggactgca

SEQ ID NO: 832361 - DNA, 25 bp, Homo sapien
cagcatcttcaactaacatgatcat

SEQ ID NO: 832362 - DNA, 25 bp, Homo sapien
agcatcttcaactaacatgatcatt

SEQ ID NO: 832363 - DNA, 25 bp, Homo sapien
tgagctgtccatcctagccactggc

SEQ ID NO: 832364 - DNA, 25 bp, Homo sapien
tggccatgcaccttgtgggccacag

SEQ ID NO: 832365 - DNA, 25 bp, Homo sapien
gctctgagtatccagggtcacttga

SEQ ID NO: 832366 - DNA, 25 bp, Homo sapien
cagaaagatgctctgagtatccagg

SEQ ID NO: 832367 - DNA, 25 bp, Homo sapien
ttccctctcagcagattggggtggg

SEQ ID NO: 832368 - DNA, 25 bp, Homo sapien
catgtacatgagtcacctgggaatc

SEQ ID NO: 832369 - DNA, 25 bp, Homo sapien
ctcagcccctcatgtacatgagtca

SEQ ID NO: 832370 - DNA, 25 bp, Homo sapien
gcccctcatgtacatgagtcacctg

SEQ ID NO: 832371 - DNA, 25 bp, Homo sapien
ttccctgcaaacagaaatgtctgct

SEQ ID NO: 832372 - DNA, 25 bp, Homo sapien
cttccctgcaaacagaaatgtctgc

SEQ ID NO: 832373 - DNA, 25 bp, Homo sapien
taaagacactgtggacccaaacaac

SEQ ID NO: 832374 - DNA, 25 bp, Homo sapien
gacgtattcgaagtttcttctggtg

SEQ ID NO: 832375 - DNA, 25 bp, Homo sapien
acactgtggacccaaacaacgagca

SEQ ID NO: 832376 - DNA, 25 bp, Homo sapien
tctgacgttcggacgtattcgaagt

SEQ ID NO: 832377 - DNA, 25 bp, Homo sapien
ccccaggaagacaacaggataactg

SEQ ID NO: 832378 - DNA, 25 bp, Homo sapien
gagtcacagctcttctatggatgcc

SEQ ID NO: 832379 - DNA, 25 bp, Homo sapien
tcccagcagtacactataatagatg

SEQ ID NO: 832380 - DNA, 25 bp, Homo sapien
gcagataaggacataattaatgccc

SEQ ID NO: 832381 - DNA, 25 bp, Homo sapien
gggatgccgaacagagccctgtatt

SEQ ID NO: 832382 - DNA, 25 bp, Homo sapien
ttatcaaggtaggaacagatgcagt

SEQ ID NO: 832383 - DNA, 25 bp, Homo sapien
tggaaggaacctagttatcaaggta

SEQ ID NO: 832384 - DNA, 25 bp, Homo sapien
ggccaaatgacctgagcctaatcag

SEQ ID NO: 832385 - DNA, 25 bp, Homo sapien
tagctatggccactgggaagaatga

SEQ ID NO: 832386 - DNA, 25 bp, Homo sapien
cccttttacgggagccatctggtgt

SEQ ID NO: 832387 - DNA, 25 bp, Homo sapien
gcttgcaacctcttccgacacatat

SEQ ID NO: 832388 - DNA, 25 bp, Homo sapien
gcattagacagtagattcctctgca

SEQ ID NO: 832389 - DNA, 25 bp, Homo sapien
gcctaattccaattctatcaaagag

SEQ ID NO: 832390 - DNA, 25 bp, Homo sapien
tgctggtcaccaaacgttgcctcct

SEQ ID NO: 832391 - DNA, 25 bp, Homo sapien
tgcactcctgaagaattatgcctaa

SEQ ID NO: 832392 - DNA, 25 bp, Homo sapien
caaagagtctatcaatctctgtttc

SEQ ID NO: 832393 - DNA, 25 bp, Homo sapien
gaactcacctgtcaccttccttttg

SEQ ID NO: 832394 - DNA, 25 bp, Homo sapien
aggcctggacaaggagaactccacc

SEQ ID NO: 832395 - DNA, 25 bp, Homo sapien
attccacagtaagcctgggtgtcag

SEQ ID NO: 832396 - DNA, 25 bp, Homo sapien
tctttggctgttgacaatctggatg

SEQ ID NO: 832397 - DNA, 25 bp, Homo sapien
ctgcactgcatgttgcatggtactg

SEQ ID NO: 832398 - DNA, 25 bp, Homo sapien
ggtactgctcactgataacccctct

SEQ ID NO: 832399 - DNA, 25 bp, Homo sapien
tgcatgttgcatggtactgctcact

SEQ ID NO: 832400 - DNA, 25 bp, Homo sapien
tggtactgctcactgataacccctc

SEQ ID NO: 832401 - DNA, 25 bp, Homo sapien
acagaatcgtgtgccgcctgataag

SEQ ID NO: 832402 - DNA, 25 bp, Homo sapien
gcctgataagatgcgatgagaagtt

SEQ ID NO: 832403 - DNA, 25 bp, Homo sapien
cactacggcaagcaagtgatcaaag

SEQ ID NO: 832404 - DNA, 25 bp, Homo sapien
tcttgccaaagatgtatggtctgaa

SEQ ID NO: 832405 - DNA, 25 bp, Homo sapien
ctcgaggcattggatattccctgta

SEQ ID NO: 832406 - DNA, 25 bp, Homo sapien
gaaaatttatgaagggctcgaggca

SEQ ID NO: 832407 - DNA, 25 bp, Homo sapien
cagtgaacagctcggctgcctctgc

SEQ ID NO: 832408 - DNA, 25 bp, Homo sapien
agtttttgcaatctccagtgaacag

SEQ ID NO: 832409 - DNA, 25 bp, Homo sapien
tgctatagcaggcatctcctcagag

SEQ ID NO: 832410 - DNA, 25 bp, Homo sapien
aagtctctttcctagcacagccaca

SEQ ID NO: 832411 - DNA, 25 bp, Homo sapien
ctgggatgggtcatctcagggtcct

SEQ ID NO: 832412 - DNA, 25 bp, Homo sapien
acacagaggtcctcacccagcgtct

SEQ ID NO: 832413 - DNA, 25 bp, Homo sapien
taagtaaaaatcatacaccagtatc

SEQ ID NO: 832414 - DNA, 25 bp, Homo sapien
ccgccaggctccaggtgtctctgtg

SEQ ID NO: 832415 - DNA, 25 bp, Homo sapien
caacagccactgatgccaaggcccg

SEQ ID NO: 832416 - DNA, 25 bp, Homo sapien
agctctccccgccatgacaacagcc

SEQ ID NO: 832417 - DNA, 25 bp, Homo sapien
caagcacctgacagtcatctttgaa

SEQ ID NO: 832418 - DNA, 25 bp, Homo sapien
tcggaggtaatgaaggccacagcct

SEQ ID NO: 832419 - DNA, 25 bp, Homo sapien
tgagtcacagagtctgtggagagat

SEQ ID NO: 832420 - DNA, 25 bp, Homo sapien
accagtctgccaccttactcggagg

SEQ ID NO: 832421 - DNA, 25 bp, Homo sapien
taattctcttacagtgagatgctgt

SEQ ID NO: 832422 - DNA, 25 bp, Homo sapien
gctggctgctaattctcttacagtg

SEQ ID NO: 832423 - DNA, 25 bp, Homo sapien
ggtttgtttctcaagagactgcctt

SEQ ID NO: 832424 - DNA, 25 bp, Homo sapien
actgcctttgcttgcacacgggctg

SEQ ID NO: 832425 - DNA, 25 bp, Homo sapien
gctctaaattaatgcaaggctgtgc

SEQ ID NO: 832426 - DNA, 25 bp, Homo sapien
ctctaaattaatgcaaggctgtgcc

SEQ ID NO: 832427 - DNA, 25 bp, Homo sapien
agctctaaattaatgcaaggctgtg

SEQ ID NO: 832428 - DNA, 25 bp, Homo sapien
tctaaattaatgcaaggctgtgccg

SEQ ID NO: 832429 - DNA, 25 bp, Homo sapien
ggcaggaagggtctgaacaacagct

SEQ ID NO: 832430 - DNA, 25 bp, Homo sapien
ttgggcaagctgagcatccagcaaa

SEQ ID NO: 832431 - DNA, 25 bp, Homo sapien
ctgagcatccagcaaagagaagatt

SEQ ID NO: 832432 - DNA, 25 bp, Homo sapien
aaagagaagatttgtgatgcaaatg

SEQ ID NO: 832433 - DNA, 25 bp, Homo sapien
tagcaggactatgggatgattaagc

SEQ ID NO: 832434 - DNA, 25 bp, Homo sapien
taagctggataaagcatgtcctaca

SEQ ID NO: 832435 - DNA, 25 bp, Homo sapien
taatgggatgatgaactgctagcag

SEQ ID NO: 832436 - DNA, 25 bp, Homo sapien
tctgaccacagaccttaagtttggg

SEQ ID NO: 832437 - DNA, 25 bp, Homo sapien
aggtggtcctgagcatcttactctg

SEQ ID NO: 832438 - DNA, 25 bp, Homo sapien
ttactctgtgccttcgactctttcc

SEQ ID NO: 832439 - DNA, 25 bp, Homo sapien
tgctggtagccagtgaccgagccca

SEQ ID NO: 832440 - DNA, 25 bp, Homo sapien
tggtagccagtgaccgagcccaggt

SEQ ID NO: 832441 - DNA, 25 bp, Homo sapien
ctggctcctgtgcataggaggcgtt

SEQ ID NO: 832442 - DNA, 25 bp, Homo sapien
gccattgtccactgcaagatcttgt

SEQ ID NO: 832443 - DNA, 25 bp, Homo sapien
cagagcaagggaactcaagacagcc

SEQ ID NO: 832444 - DNA, 25 bp, Homo sapien
tctgccacatccaataagcatgatg

SEQ ID NO: 832445 - DNA, 25 bp, Homo sapien
aggttccagccagtttgacaggtag

SEQ ID NO: 832446 - DNA, 25 bp, Homo sapien
ccaggttccagccagtttgacaggt

SEQ ID NO: 832447 - DNA, 25 bp, Homo sapien
caggttccagccagtttgacaggta

SEQ ID NO: 832448 - DNA, 25 bp, Homo sapien
gaaagcctgcgaaacatcataatct

SEQ ID NO: 832449 - DNA, 25 bp, Homo sapien
taaccatgacaagggtttggaaagc

SEQ ID NO: 832450 - DNA, 25 bp, Homo sapien
accaagagcttgctgagccatcaca

SEQ ID NO: 832451 - DNA, 25 bp, Homo sapien
gttcctgccagacctttattaacca

SEQ ID NO: 832452 - DNA, 25 bp, Homo sapien
actgcatccacaccaacatctattt

SEQ ID NO: 832453 - DNA, 25 bp, Homo sapien
gaaatgttcccttttcactgcatcc

SEQ ID NO: 832454 - DNA, 25 bp, Homo sapien
gtagaaatgttcccttttcactgca

SEQ ID NO: 832455 - DNA, 25 bp, Homo sapien
aatgttcccttttcactgcatccac

SEQ ID NO: 832456 - DNA, 25 bp, Homo sapien
aacacctggcatcagtcttttatgc

SEQ ID NO: 832457 - DNA, 25 bp, Homo sapien
acctggcatcagtcttttatgctaa

SEQ ID NO: 832458 - DNA, 25 bp, Homo sapien
caacacctggcatcagtcttttatg

SEQ ID NO: 832459 - DNA, 25 bp, Homo sapien
cacaacacctggcatcagtctttta

SEQ ID NO: 832460 - DNA, 25 bp, Homo sapien
gggactgctttcactctccagctgg

SEQ ID NO: 832461 - DNA, 25 bp, Homo sapien
cctactagcctctgcctgatcaggg

SEQ ID NO: 832462 - DNA, 25 bp, Homo sapien
gctttcactctccagctggccagag

SEQ ID NO: 832463 - DNA, 25 bp, Homo sapien
tgcctgatcagggactgctttcact

SEQ ID NO: 832464 - DNA, 25 bp, Homo sapien
gacattagtcatagctgcagtttta

SEQ ID NO: 832465 - DNA, 25 bp, Homo sapien
tccatcagatcgcagagaaacctgc

SEQ ID NO: 832466 - DNA, 25 bp, Homo sapien
cacccatatagtggcccatggctgg

SEQ ID NO: 832467 - DNA, 25 bp, Homo sapien
tcttcttgactagggcaaggctgtc

SEQ ID NO: 832468 - DNA, 25 bp, Homo sapien
gatctccccgggcagagcaaagaga

SEQ ID NO: 832469 - DNA, 25 bp, Homo sapien
tctcttgactattggatctccccgg

SEQ ID NO: 832470 - DNA, 25 bp, Homo sapien
cagagcaaagagactagaattcccc

SEQ ID NO: 832471 - DNA, 25 bp, Homo sapien
gtgtgtctcttgactattggatctc

SEQ ID NO: 832472 - DNA, 25 bp, Homo sapien
ctgttttttgtccaacttgcccagg

SEQ ID NO: 832473 - DNA, 25 bp, Homo sapien
tttgtccaacttgcccagggtccac

SEQ ID NO: 832474 - DNA, 25 bp, Homo sapien
gctgctgttttttgtccaacttgcc

SEQ ID NO: 832475 - DNA, 25 bp, Homo sapien
ttttgtccaacttgcccagggtcca

SEQ ID NO: 832476 - DNA, 25 bp, Homo sapien
attttccctcatcgtaaacaatctg

SEQ ID NO: 832477 - DNA, 25 bp, Homo sapien
tgttctctggagaatggtgcctgac

SEQ ID NO: 832478 - DNA, 25 bp, Homo sapien
ccaggagtcttcttgaatccatgga

SEQ ID NO: 832479 - DNA, 25 bp, Homo sapien
atgacaccagacagcccaccaggag

SEQ ID NO: 832480 - DNA, 25 bp, Homo sapien
cagacctactgcagggagaaaaaac

SEQ ID NO: 832481 - DNA, 25 bp, Homo sapien
cctgagaatgagctatgtcagaggg

SEQ ID NO: 832482 - DNA, 25 bp, Homo sapien
tctgatgttgccaggtaggcctgag

SEQ ID NO: 832483 - DNA, 25 bp, Homo sapien
aacatgttggttcccctcaacttgc

SEQ ID NO: 832484 - DNA, 25 bp, Homo sapien
caggtcatgcaccaggctaagtcac

SEQ ID NO: 832485 - DNA, 25 bp, Homo sapien
ggaccaggaagggcatccttatcct

SEQ ID NO: 832486 - DNA, 25 bp, Homo sapien
gcaccaggacaattgccaccgtctg

SEQ ID NO: 832487 - DNA, 25 bp, Homo sapien
gacagccctccagcacaggggagtg

SEQ ID NO: 832488 - DNA, 25 bp, Homo sapien
aaagctttcgtgaaccctggtattg

SEQ ID NO: 832489 - DNA, 25 bp, Homo sapien
acagcctcctgccacttatactatg

SEQ ID NO: 832490 - DNA, 25 bp, Homo sapien
ttcgtgaaccctggtattgagttct

SEQ ID NO: 832491 - DNA, 25 bp, Homo sapien
tgccacttatactatgccatctgac

SEQ ID NO: 832492 - DNA, 25 bp, Homo sapien
agccaggagcctgttgcacccgctt

SEQ ID NO: 832493 - DNA, 25 bp, Homo sapien
cctggagcctggtcacagtctcaca

SEQ ID NO: 832494 - DNA, 25 bp, Homo sapien
tgctctcttatgcagcccactggct

SEQ ID NO: 832495 - DNA, 25 bp, Homo sapien
aggagcctgttgcacccgcttggca

SEQ ID NO: 832496 - DNA, 25 bp, Homo sapien
ccccaactcttgtgaagtcagggag

SEQ ID NO: 832497 - DNA, 25 bp, Homo sapien
gaggatgcttgtcagcatatgggcc

SEQ ID NO: 832498 - DNA, 25 bp, Homo sapien
tagaaggccctggagcccttttgtc

SEQ ID NO: 832499 - DNA, 25 bp, Homo sapien
catatgggccaagggaacacatggc

SEQ ID NO: 832500 - DNA, 25 bp, Homo sapien
cccacttctcttcgtattccaagaa

SEQ ID NO: 832501 - DNA, 25 bp, Homo sapien
ttcgtattccaagaatgctcttcag

SEQ ID NO: 832502 - DNA, 25 bp, Homo sapien
ccttgtcatggtgcctgcttgatcc

SEQ ID NO: 832503 - DNA, 25 bp, Homo sapien
cactatctcaaaggaacatccattt

SEQ ID NO: 832504 - DNA, 25 bp, Homo sapien
tgccttaaggtctagaattggggga

SEQ ID NO: 832505 - DNA, 25 bp, Homo sapien
cttgtttaagatggcgcacacctcg

SEQ ID NO: 832506 - DNA, 25 bp, Homo sapien
ctctctgagttggacgggcaagggc

SEQ ID NO: 832507 - DNA, 25 bp, Homo sapien
caagggcgggatctttgccttaagg

SEQ ID NO: 832508 - DNA, 25 bp, Homo sapien
gacgttcaggccacttagtagggct

SEQ ID NO: 832509 - DNA, 25 bp, Homo sapien
gagacagatggtgctagcatcaagg

SEQ ID NO: 832510 - DNA, 25 bp, Homo sapien
tatgataagacttctggagacagat

SEQ ID NO: 832511 - DNA, 25 bp, Homo sapien
gagtggaaacccaggatgctatgat

SEQ ID NO: 832512 - DNA, 25 bp, Homo sapien
cagagagccgctgtcttcttcattc

SEQ ID NO: 832513 - DNA, 25 bp, Homo sapien
tccaatagcctatcctcctgaggac

SEQ ID NO: 832514 - DNA, 25 bp, Homo sapien
cctgaggacttgcaagtaggtgtcc

SEQ ID NO: 832515 - DNA, 25 bp, Homo sapien
aaaccccagaaagctcatcagagag

SEQ ID NO: 832516 - DNA, 25 bp, Homo sapien
aggatgttagtgagcacattggcac

SEQ ID NO: 832517 - DNA, 25 bp, Homo sapien
tggggcttggagcacatcagcatct

SEQ ID NO: 832518 - DNA, 25 bp, Homo sapien
gtaggatgttagtgagcacattggc

SEQ ID NO: 832519 - DNA, 25 bp, Homo sapien
gggcttggagcacatcagcatctct

SEQ ID NO: 832520 - DNA, 25 bp, Homo sapien
acggacaggcccaactgcagagagt

SEQ ID NO: 832521 - DNA, 25 bp, Homo sapien
atgtttcagacggacaggcccaact

SEQ ID NO: 832522 - DNA, 25 bp, Homo sapien
tggagatcaggagggctgtgtttgt

SEQ ID NO: 832523 - DNA, 25 bp, Homo sapien
tgtttcctaagggatgtttcagacg

SEQ ID NO: 832524 - DNA, 25 bp, Homo sapien
taacaggtatgaccagctgcagatc

SEQ ID NO: 832525 - DNA, 25 bp, Homo sapien
caggtatgaccagctgcagatcctc

SEQ ID NO: 832526 - DNA, 25 bp, Homo sapien
gctaacaggtatgaccagctgcaga

SEQ ID NO: 832527 - DNA, 25 bp, Homo sapien
ttgaagctaacaggtatgaccagct

SEQ ID NO: 832528 - DNA, 25 bp, Homo sapien
agtggcggggtagggactgtgcagc

SEQ ID NO: 832529 - DNA, 25 bp, Homo sapien
ctagcatggccttcctccaggtgca

SEQ ID NO: 832530 - DNA, 25 bp, Homo sapien
ggaaggggtccctagcatggccttc

SEQ ID NO: 832531 - DNA, 25 bp, Homo sapien
gggtccctagcatggccttcctcca

SEQ ID NO: 832532 - DNA, 25 bp, Homo sapien
tcttcataacttcattgtgccaccg

SEQ ID NO: 832533 - DNA, 25 bp, Homo sapien
cacatcaacgtcatctttctcatag

SEQ ID NO: 832534 - DNA, 25 bp, Homo sapien
tgagacattcacaagaccactgccc

SEQ ID NO: 832535 - DNA, 25 bp, Homo sapien
tgtgccaccgggtctccattgcact

SEQ ID NO: 832536 - DNA, 25 bp, Homo sapien
tcatcgtgctccatctacctgttca

SEQ ID NO: 832537 - DNA, 25 bp, Homo sapien
tcgtgctccatctacctgttcattt

SEQ ID NO: 832538 - DNA, 25 bp, Homo sapien
gtgctccatctacctgttcatttct

SEQ ID NO: 832539 - DNA, 25 bp, Homo sapien
catcgtgctccatctacctgttcat

SEQ ID NO: 832540 - DNA, 25 bp, Homo sapien
cttagtcgtgtgttggctgctttga

SEQ ID NO: 832541 - DNA, 25 bp, Homo sapien
ggcctggtgtccttgagacatacgg

SEQ ID NO: 832542 - DNA, 25 bp, Homo sapien
tgagcaggaacaaggcctccaggcc

SEQ ID NO: 832543 - DNA, 25 bp, Homo sapien
gacatacggtctttgcttagtcgtg

SEQ ID NO: 832544 - DNA, 25 bp, Homo sapien
catactcattaggatcccgattaaa

SEQ ID NO: 832545 - DNA, 25 bp, Homo sapien
gagtagactggtgcctaccagaaag

SEQ ID NO: 832546 - DNA, 25 bp, Homo sapien
cccgattaaattccttgagtagact

SEQ ID NO: 832547 - DNA, 25 bp, Homo sapien
aaaatcctgggttgcgggagcctca

SEQ ID NO: 832548 - DNA, 25 bp, Homo sapien
cctggtaccgtgtctcccgttgcat

SEQ ID NO: 832549 - DNA, 25 bp, Homo sapien
agcagtgaaggttgatgtactggcc

SEQ ID NO: 832550 - DNA, 25 bp, Homo sapien
gaaggttgatgtactggcccagcat

SEQ ID NO: 832551 - DNA, 25 bp, Homo sapien
gtgtctcccgttgcatgtctggctt

SEQ ID NO: 832552 - DNA, 25 bp, Homo sapien
agagcaaacatccaggggctgtcca

SEQ ID NO: 832553 - DNA, 25 bp, Homo sapien
gagcaaacatccaggggctgtccat

SEQ ID NO: 832554 - DNA, 25 bp, Homo sapien
cactggcagagcaaacatccagggg

SEQ ID NO: 832555 - DNA, 25 bp, Homo sapien
cccactggcagagcaaacatccagg

SEQ ID NO: 832556 - DNA, 25 bp, Homo sapien
tgtttctgccgctctgtttgctgca

SEQ ID NO: 832557 - DNA, 25 bp, Homo sapien
tttgagccaggtatccagagccaca

SEQ ID NO: 832558 - DNA, 25 bp, Homo sapien
gacaaggacagacaaattttctggc

SEQ ID NO: 832559 - DNA, 25 bp, Homo sapien
tattgttactttggcggtacaggac

SEQ ID NO: 832560 - DNA, 25 bp, Homo sapien
gcctgccgaggcctggaccttggaa

SEQ ID NO: 832561 - DNA, 25 bp, Homo sapien
gaccttggaacagggcatcatgtga

SEQ ID NO: 832562 - DNA, 25 bp, Homo sapien
taggaaatcagggtggtcgcctgcc

SEQ ID NO: 832563 - DNA, 25 bp, Homo sapien
ggagagggcgcttgtccataggaaa

SEQ ID NO: 832564 - DNA, 25 bp, Homo sapien
acggagacagcccaaaatgccagcc

SEQ ID NO: 832565 - DNA, 25 bp, Homo sapien
cagcccaaaatgccagccaacctca

SEQ ID NO: 832566 - DNA, 25 bp, Homo sapien
tcacggagacagcccaaaatgccag

SEQ ID NO: 832567 - DNA, 25 bp, Homo sapien
gacagcccaaaatgccagccaacct

SEQ ID NO: 832568 - DNA, 25 bp, Homo sapien
tgtgctgctacttcaccttccactt

SEQ ID NO: 832569 - DNA, 25 bp, Homo sapien
ggtgcaaataacgaatgaggagcca

SEQ ID NO: 832570 - DNA, 25 bp, Homo sapien
cagcagggtgcaaataacgaatgag

SEQ ID NO: 832571 - DNA, 25 bp, Homo sapien
gcaaataacgaatgaggagccaggg

SEQ ID NO: 832572 - DNA, 25 bp, Homo sapien
ccagggacagatagcagagagaaac

SEQ ID NO: 832573 - DNA, 25 bp, Homo sapien
ggaggaataagatccccacaccagg

SEQ ID NO: 832574 - DNA, 25 bp, Homo sapien
tccaggcacccaaacaaacagagag

SEQ ID NO: 832575 - DNA, 25 bp, Homo sapien
catgaatgttcaagctccaggcacc

SEQ ID NO: 832576 - DNA, 25 bp, Homo sapien
gccagagaaaggctacccgcttccc

SEQ ID NO: 832577 - DNA, 25 bp, Homo sapien
cagagaaaggctacccgcttcccag

SEQ ID NO: 832578 - DNA, 25 bp, Homo sapien
gagaaaggctacccgcttcccagag

SEQ ID NO: 832579 - DNA, 25 bp, Homo sapien
agagaaaggctacccgcttcccaga

SEQ ID NO: 832580 - DNA, 25 bp, Homo sapien
cacccgccatgatgaaaggaagccc

SEQ ID NO: 832581 - DNA, 25 bp, Homo sapien
ttttatgggatgcaaagcctcctga

SEQ ID NO: 832582 - DNA, 25 bp, Homo sapien
caagcccagcaaggcaagtctttta

SEQ ID NO: 832583 - DNA, 25 bp, Homo sapien
tagactatctggagtggaaacagca

SEQ ID NO: 832584 - DNA, 25 bp, Homo sapien
tgtcctgagagtcccttaaatcact

SEQ ID NO: 832585 - DNA, 25 bp, Homo sapien
ttggtagtggaaccagctagcaccc

SEQ ID NO: 832586 - DNA, 25 bp, Homo sapien
tgcagggtccttaatgcaattcagg

SEQ ID NO: 832587 - DNA, 25 bp, Homo sapien
gattgcaaagttgtgccagaacaca

SEQ ID NO: 832588 - DNA, 25 bp, Homo sapien
cattctgaatggtgcaactagtggg

SEQ ID NO: 832589 - DNA, 25 bp, Homo sapien
gaaagagggcttcaacagaaaagtc

SEQ ID NO: 832590 - DNA, 25 bp, Homo sapien
tgacaagcgtggagaaaatcattgc

SEQ ID NO: 832591 - DNA, 25 bp, Homo sapien
ggcatctaccccatggtcttatgga

SEQ ID NO: 832592 - DNA, 25 bp, Homo sapien
ctgggaatttcacatctggaagcct

SEQ ID NO: 832593 - DNA, 25 bp, Homo sapien
caagaagagaacctgatgttgaagc

SEQ ID NO: 832594 - DNA, 25 bp, Homo sapien
cagtctgtctgtcgggtgttgaatc

SEQ ID NO: 832595 - DNA, 25 bp, Homo sapien
tccttggacctcaagaaatcagcaa

SEQ ID NO: 832596 - DNA, 25 bp, Homo sapien
aatcggaaaatctggtccctccctg

SEQ ID NO: 832597 - DNA, 25 bp, Homo sapien
tggcataattcaaaggcaatcggaa

SEQ ID NO: 832598 - DNA, 25 bp, Homo sapien
ctgacactccatgcccagtggcaat

SEQ ID NO: 832599 - DNA, 25 bp, Homo sapien
actccatgcccagtggcaatttcca

SEQ ID NO: 832600 - DNA, 25 bp, Homo sapien
accacccagattcccagaaaggtga

SEQ ID NO: 832601 - DNA, 25 bp, Homo sapien
gataaaaccacccagattcccagaa

SEQ ID NO: 832602 - DNA, 25 bp, Homo sapien
aggataaaaccacccagattcccag

SEQ ID NO: 832603 - DNA, 25 bp, Homo sapien
tggcaaaaggataaaaccacccaga

SEQ ID NO: 832604 - DNA, 25 bp, Homo sapien
gcttgtctgtcataggcaatggcat

SEQ ID NO: 832605 - DNA, 25 bp, Homo sapien
ctactgagcttgtctgtcataggca

SEQ ID NO: 832606 - DNA, 25 bp, Homo sapien
tgagcttgtctgtcataggcaatgg

SEQ ID NO: 832607 - DNA, 25 bp, Homo sapien
ttgggggttgtctgttgctgtagca

SEQ ID NO: 832608 - DNA, 25 bp, Homo sapien
tgtgagcagtacttcgataaacata

SEQ ID NO: 832609 - DNA, 25 bp, Homo sapien
agcagtacttcgataaacatacgag

SEQ ID NO: 832610 - DNA, 25 bp, Homo sapien
tattgtgagcagtacttcgataaac

SEQ ID NO: 832611 - DNA, 25 bp, Homo sapien
gctattgtgagcagtacttcgataa

SEQ ID NO: 832612 - DNA, 25 bp, Homo sapien
cacatctggattgcgctggtgcttc

SEQ ID NO: 832613 - DNA, 25 bp, Homo sapien
cagcagcagacactaattgataaat

SEQ ID NO: 832614 - DNA, 25 bp, Homo sapien
ggcttgtccagcctagcatcattca

SEQ ID NO: 832615 - DNA, 25 bp, Homo sapien
gcattttcacgcacagatgggcctg

SEQ ID NO: 832616 - DNA, 25 bp, Homo sapien
gagaaagtagagggagcaaactcca

SEQ ID NO: 832617 - DNA, 25 bp, Homo sapien
tagcaattaccacaagcaccagagc

SEQ ID NO: 832618 - DNA, 25 bp, Homo sapien
gggttctgatgggatatggattcct

SEQ ID NO: 832619 - DNA, 25 bp, Homo sapien
cagtcttgtatctgagtgcagcggg

SEQ ID NO: 832620 - DNA, 25 bp, Homo sapien
ctctttttccctagagctggattca

SEQ ID NO: 832621 - DNA, 25 bp, Homo sapien
ccagtgaacatagggaaacaaggct

SEQ ID NO: 832622 - DNA, 25 bp, Homo sapien
aacaaggctttatcatgggatttga

SEQ ID NO: 832623 - DNA, 25 bp, Homo sapien
tggattcagtttgggttccagccca

SEQ ID NO: 832624 - DNA, 25 bp, Homo sapien
aaggttggagatttcaaatgcacac

SEQ ID NO: 832625 - DNA, 25 bp, Homo sapien
cacgatgtttaatcaaaagacacca

SEQ ID NO: 832626 - DNA, 25 bp, Homo sapien
aagacaccaggaactttcaacttca

SEQ ID NO: 832627 - DNA, 25 bp, Homo sapien
tcaaatgcacacagtctttgactct

SEQ ID NO: 832628 - DNA, 25 bp, Homo sapien
gcagagctgccacaagtactggggc

SEQ ID NO: 832629 - DNA, 25 bp, Homo sapien
tgacatgtcccacggacacggaaga

SEQ ID NO: 832630 - DNA, 25 bp, Homo sapien
ccaaatctgacatgtcccacggaca

SEQ ID NO: 832631 - DNA, 25 bp, Homo sapien
atgtcccacggacacggaagaaggg

SEQ ID NO: 832632 - DNA, 25 bp, Homo sapien
atttaggctaattccctcttgtggc

SEQ ID NO: 832633 - DNA, 25 bp, Homo sapien
tcttctgtctcaaacgtggtcaata

SEQ ID NO: 832634 - DNA, 25 bp, Homo sapien
caaagtttactatggatctgacaga

SEQ ID NO: 832635 - DNA, 25 bp, Homo sapien
gatcctttccaggtgggcgcttagg

SEQ ID NO: 832636 - DNA, 25 bp, Homo sapien
agacccaggtgctggcgactcattt

SEQ ID NO: 832637 - DNA, 25 bp, Homo sapien
tagagctagaggagtgctagaccca

SEQ ID NO: 832638 - DNA, 25 bp, Homo sapien
tcatttccatcgaatccatccacaa

SEQ ID NO: 832639 - DNA, 25 bp, Homo sapien
cacaatagcagcaatcagggaggca

SEQ ID NO: 832640 - DNA, 25 bp, Homo sapien
aatggactctgtaggtctagaaatc

SEQ ID NO: 832641 - DNA, 25 bp, Homo sapien
agatgaccacaatggactctgtagg

SEQ ID NO: 832642 - DNA, 25 bp, Homo sapien
tccctgtaactttgtgcatatgtct

SEQ ID NO: 832643 - DNA, 25 bp, Homo sapien
ttccctgtaactttgtgcatatgtc

SEQ ID NO: 832644 - DNA, 25 bp, Homo sapien
tagtctgagtccacaggttccaagg

SEQ ID NO: 832645 - DNA, 25 bp, Homo sapien
tagggccactactcacacctgagat

SEQ ID NO: 832646 - DNA, 25 bp, Homo sapien
catgtatcctctggagcgtattagg

SEQ ID NO: 832647 - DNA, 25 bp, Homo sapien
ccccttgggtgttctagtggacaga

SEQ ID NO: 832648 - DNA, 25 bp, Homo sapien
caagggacacacaggattgggatgt

SEQ ID NO: 832649 - DNA, 25 bp, Homo sapien
ttggtgtcatcctcagagattaaca

SEQ ID NO: 832650 - DNA, 25 bp, Homo sapien
tgggtgtgggatgtgtcgctccgtc

SEQ ID NO: 832651 - DNA, 25 bp, Homo sapien
ggatgtgtcgctccgtcaagggaca

SEQ ID NO: 832652 - DNA, 25 bp, Homo sapien
ggaacagtgggcattcaacagacac

SEQ ID NO: 832653 - DNA, 25 bp, Homo sapien
agaggctctggaacagtgggcattc

SEQ ID NO: 832654 - DNA, 25 bp, Homo sapien
tcttctctctaggagaggctctgga

SEQ ID NO: 832655 - DNA, 25 bp, Homo sapien
gctctggaacagtgggcattcaaca

SEQ ID NO: 832656 - DNA, 25 bp, Homo sapien
gctggatcatacagcccaagaatgc

SEQ ID NO: 832657 - DNA, 25 bp, Homo sapien
tctggctgactggttggtcccctcc

SEQ ID NO: 832658 - DNA, 25 bp, Homo sapien
ctgctgcgcaggaggtttgcccaga

SEQ ID NO: 832659 - DNA, 25 bp, Homo sapien
gcatgggtgcatcaaatgagcctgg

SEQ ID NO: 832660 - DNA, 25 bp, Homo sapien
tgccttggaagatcccgggccaggg

SEQ ID NO: 832661 - DNA, 25 bp, Homo sapien
ggtgcccactggtggatcggcaggg

SEQ ID NO: 832662 - DNA, 25 bp, Homo sapien
atggagataggtggcggtgcccact

SEQ ID NO: 832663 - DNA, 25 bp, Homo sapien
cccactggtggatcggcagggggcc

SEQ ID NO: 832664 - DNA, 25 bp, Homo sapien
gacacggttgtatcacctgtcctct

SEQ ID NO: 832665 - DNA, 25 bp, Homo sapien
cttgctgccaacctgctgcaccctt

SEQ ID NO: 832666 - DNA, 25 bp, Homo sapien
cgtattcgcatctgtcttgctgcca

SEQ ID NO: 832667 - DNA, 25 bp, Homo sapien
cttcccagctcttctttgccccaga

SEQ ID NO: 832668 - DNA, 25 bp, Homo sapien
ctattctggggcagcttaagcagca

SEQ ID NO: 832669 - DNA, 25 bp, Homo sapien
ggagctattctggggcagcttaagc

SEQ ID NO: 832670 - DNA, 25 bp, Homo sapien
ctcatggagctattctggggcagct

SEQ ID NO: 832671 - DNA, 25 bp, Homo sapien
catggagctattctggggcagctta

SEQ ID NO: 832672 - DNA, 25 bp, Homo sapien
tctggtgtaacagcatgaagcacct

SEQ ID NO: 832673 - DNA, 25 bp, Homo sapien
ctggattcccgggtttctctctact

SEQ ID NO: 832674 - DNA, 25 bp, Homo sapien
ctcctggttctggtgtaacagcatg

SEQ ID NO: 832675 - DNA, 25 bp, Homo sapien
tgggcctccagctagacaggagttt

SEQ ID NO: 832676 - DNA, 25 bp, Homo sapien
gatgatgggagccatatagggctgg

SEQ ID NO: 832677 - DNA, 25 bp, Homo sapien
cccttagtgctagaaagaggtttgg

SEQ ID NO: 832678 - DNA, 25 bp, Homo sapien
tgcgggtgcccttagtgctagaaag

SEQ ID NO: 832679 - DNA, 25 bp, Homo sapien
tgggagccatatagggctggctgct

SEQ ID NO: 832680 - DNA, 25 bp, Homo sapien
cccttgaaagtgctggtgccccagt

SEQ ID NO: 832681 - DNA, 25 bp, Homo sapien
ctggtgccccagtagcttgatgagg

SEQ ID NO: 832682 - DNA, 25 bp, Homo sapien
tggcagcctcagtgccccttgaaag

SEQ ID NO: 832683 - DNA, 25 bp, Homo sapien
cacagctgtccttggatggcagcct

SEQ ID NO: 832684 - DNA, 25 bp, Homo sapien
actcacaggagggtaagccttccct

SEQ ID NO: 832685 - DNA, 25 bp, Homo sapien
caaatctcagtgcagcgactcacag

SEQ ID NO: 832686 - DNA, 25 bp, Homo sapien
cagcgactcacaggagggtaagcct

SEQ ID NO: 832687 - DNA, 25 bp, Homo sapien
cagtgcagcgactcacaggagggta

SEQ ID NO: 832688 - DNA, 25 bp, Homo sapien
agcacccccggtcatgggcattggc

SEQ ID NO: 832689 - DNA, 25 bp, Homo sapien
tggcatgaggccgactaaacgctct

SEQ ID NO: 832690 - DNA, 25 bp, Homo sapien
tgaggccgactaaacgctctgaccc

SEQ ID NO: 832691 - DNA, 25 bp, Homo sapien
catgggcattggcatgaggccgact

SEQ ID NO: 832692 - DNA, 25 bp, Homo sapien
aagtctttccatcatgacttttcct

SEQ ID NO: 832693 - DNA, 25 bp, Homo sapien
gtctttccatcatgacttttcctgg

SEQ ID NO: 832694 - DNA, 25 bp, Homo sapien
agaagtctttccatcatgacttttc

SEQ ID NO: 832695 - DNA, 25 bp, Homo sapien
aaagaagtctttccatcatgacttt

SEQ ID NO: 832696 - DNA, 25 bp, Homo sapien
aggaagttaagtgacgcaagacaat

SEQ ID NO: 832697 - DNA, 25 bp, Homo sapien
tcttttcgtgtcttgcaacacaaca

SEQ ID NO: 832698 - DNA, 25 bp, Homo sapien
cgcaagacaattttgttgctggctt

SEQ ID NO: 832699 - DNA, 25 bp, Homo sapien
taagtgacgcaagacaattttgttg

SEQ ID NO: 832700 - DNA, 25 bp, Homo sapien
gtcctgcagctgaggcatcccttgg

SEQ ID NO: 832701 - DNA, 25 bp, Homo sapien
tgcagctgaggcatcccttggctcc

SEQ ID NO: 832702 - DNA, 25 bp, Homo sapien
ttgtggaaacgctcattctgcaggg

SEQ ID NO: 832703 - DNA, 25 bp, Homo sapien
tgtgcaagttgtggaaacgctcatt

SEQ ID NO: 832704 - DNA, 25 bp, Homo sapien
aggttgtcactggtatctccctggg

SEQ ID NO: 832705 - DNA, 25 bp, Homo sapien
actgtcacagccagcgcaatgagca

SEQ ID NO: 832706 - DNA, 25 bp, Homo sapien
cgtctgctgtttatgggagttgctc

SEQ ID NO: 832707 - DNA, 25 bp, Homo sapien
agttgctcattccctgggtcaggga

SEQ ID NO: 832708 - DNA, 25 bp, Homo sapien
ccatgtctctcaatccttcggtttc

SEQ ID NO: 832709 - DNA, 25 bp, Homo sapien
ctgttgagtttcatgaatcatctgc

SEQ ID NO: 832710 - DNA, 25 bp, Homo sapien
ctctcaatccttcggtttcctgtgc

SEQ ID NO: 832711 - DNA, 25 bp, Homo sapien
tgtctctcaatccttcggtttcctg

SEQ ID NO: 832712 - DNA, 25 bp, Homo sapien
tccctgttctcagggaccagtggga

SEQ ID NO: 832713 - DNA, 25 bp, Homo sapien
gggaaggactggaaccttctcctca

SEQ ID NO: 832714 - DNA, 25 bp, Homo sapien
gctctccctgttctcagggaccagt

SEQ ID NO: 832715 - DNA, 25 bp, Homo sapien
ccagtgggaaggactggaaccttct

SEQ ID NO: 832716 - DNA, 25 bp, Homo sapien
catggccctggtcataattgctccc

SEQ ID NO: 832717 - DNA, 25 bp, Homo sapien
ccaggccctctgattcttacatctg

SEQ ID NO: 832718 - DNA, 25 bp, Homo sapien
cctctgattcttacatctgattcca

SEQ ID NO: 832719 - DNA, 25 bp, Homo sapien
ccaaggcgaggaatctgttgaacct

SEQ ID NO: 832720 - DNA, 25 bp, Homo sapien
ctgcattccagtttcgccaccatga

SEQ ID NO: 832721 - DNA, 25 bp, Homo sapien
gacgtcctctctaaggagtgattac

SEQ ID NO: 832722 - DNA, 25 bp, Homo sapien
gccaccatgacgtcctctctaagga

SEQ ID NO: 832723 - DNA, 25 bp, Homo sapien
gcattccagtttcgccaccatgacg

SEQ ID NO: 832724 - DNA, 25 bp, Homo sapien
acagccagatgcagacacagttggg

SEQ ID NO: 832725 - DNA, 25 bp, Homo sapien
caggatccccagtgcaatgccctgg

SEQ ID NO: 832726 - DNA, 25 bp, Homo sapien
gtgtgcggtaaagaagtactcagga

SEQ ID NO: 832727 - DNA, 25 bp, Homo sapien
catttccctaagagttcccatttgg

SEQ ID NO: 832728 - DNA, 25 bp, Homo sapien
gaaatgatgtccattccgtggccta

SEQ ID NO: 832729 - DNA, 25 bp, Homo sapien
caaacatagccatgaagaccagtag

SEQ ID NO: 832730 - DNA, 25 bp, Homo sapien
tgaccctggtagtgcattgcccaaa

SEQ ID NO: 832731 - DNA, 25 bp, Homo sapien
cactataggaaaaggctgtgaccct

SEQ ID NO: 832732 - DNA, 25 bp, Homo sapien
tgtggagaccccttcccacaaattc

SEQ ID NO: 832733 - DNA, 25 bp, Homo sapien
tcaacaagccccagttgtggagacc

SEQ ID NO: 832734 - DNA, 25 bp, Homo sapien
aattccccactagccacacacaggg

SEQ ID NO: 832735 - DNA, 25 bp, Homo sapien
caaattgtcattgggtgggagtccc

SEQ ID NO: 832736 - DNA, 25 bp, Homo sapien
gctgaagatgcacgggagctccagc

SEQ ID NO: 832737 - DNA, 25 bp, Homo sapien
ctggctgaagatgcacgggagctcc

SEQ ID NO: 832738 - DNA, 25 bp, Homo sapien
agatgcacgggagctccagctcaga

SEQ ID NO: 832739 - DNA, 25 bp, Homo sapien
ttcctggctgaagatgcacgggagc

SEQ ID NO: 832740 - DNA, 25 bp, Homo sapien
taagagcaccattgcagctcccagt

SEQ ID NO: 832741 - DNA, 25 bp, Homo sapien
ctggattgcaccccacagtggccgt

SEQ ID NO: 832742 - DNA, 25 bp, Homo sapien
agccctgccctctggtagaagcacc

SEQ ID NO: 832743 - DNA, 25 bp, Homo sapien
agcaggcacaattaagagcaccatt

SEQ ID NO: 832744 - DNA, 25 bp, Homo sapien
gatcatcttatgattagaccctggg

SEQ ID NO: 832745 - DNA, 25 bp, Homo sapien
ttctgggcactaggtggtgtggtgc

SEQ ID NO: 832746 - DNA, 25 bp, Homo sapien
gggagagtcttttgttatggcgcca

SEQ ID NO: 832747 - DNA, 25 bp, Homo sapien
cattcaatgccgatgttctgggcac

SEQ ID NO: 832748 - DNA, 25 bp, Homo sapien
cagaagagaccttgtggggaccttc

SEQ ID NO: 832749 - DNA, 25 bp, Homo sapien
tactagcggaataatcacttgagcc

SEQ ID NO: 832750 - DNA, 25 bp, Homo sapien
tgtaatttactagcggaataatcac

SEQ ID NO: 832751 - DNA, 25 bp, Homo sapien
catcttggatgggtccatgggcttc

SEQ ID NO: 832752 - DNA, 25 bp, Homo sapien
gccacagactccctcagggactggt

SEQ ID NO: 832753 - DNA, 25 bp, Homo sapien
gtctctgtctcaactgccacagact

SEQ ID NO: 832754 - DNA, 25 bp, Homo sapien
cctcagggactggtcaaaagcaaag

SEQ ID NO: 832755 - DNA, 25 bp, Homo sapien
caaaagcaaagattgtgaatgagac

SEQ ID NO: 832756 - DNA, 25 bp, Homo sapien
gcttcccgcctcatatgggcccttg

SEQ ID NO: 832757 - DNA, 25 bp, Homo sapien
atatgggcccttgagctcttcccag

SEQ ID NO: 832758 - DNA, 25 bp, Homo sapien
ggagacgcattgctgcttcccgcct

SEQ ID NO: 832759 - DNA, 25 bp, Homo sapien
ggttgtcatggagacgcattgctgc

SEQ ID NO: 832760 - DNA, 25 bp, Homo sapien
gggcagccaatactattctccaata

SEQ ID NO: 832761 - DNA, 25 bp, Homo sapien
cattgagctggcgttgatttggtca

SEQ ID NO: 832762 - DNA, 25 bp, Homo sapien
tactattctccaatacctcttcatt

SEQ ID NO: 832763 - DNA, 25 bp, Homo sapien
gattttggacggctttttgggcagc

SEQ ID NO: 832764 - DNA, 25 bp, Homo sapien
gcctcggcaggcacgcacagctctg

SEQ ID NO: 832765 - DNA, 25 bp, Homo sapien
tgcacctcctacagccaccgagtac

SEQ ID NO: 832766 - DNA, 25 bp, Homo sapien
ccgagtaccggaagctggccagtca

SEQ ID NO: 832767 - DNA, 25 bp, Homo sapien
cagggatgggcacacgtaggcgaga

SEQ ID NO: 832768 - DNA, 25 bp, Homo sapien
ttatgatgccttttggtagaaagat

SEQ ID NO: 832769 - DNA, 25 bp, Homo sapien
tgaggtctgttacttttatgatgcc

SEQ ID NO: 832770 - DNA, 25 bp, Homo sapien
caagatatttcccctcccaagatta

SEQ ID NO: 832771 - DNA, 25 bp, Homo sapien
gattattttgcaacgtacttgactg

SEQ ID NO: 832772 - DNA, 25 bp, Homo sapien
actcttactgatgtggaactctctg

SEQ ID NO: 832773 - DNA, 25 bp, Homo sapien
ttattgccaggctatgaggaccttc

SEQ ID NO: 832774 - DNA, 25 bp, Homo sapien
gatgccattaatccaaacccgccag

SEQ ID NO: 832775 - DNA, 25 bp, Homo sapien
gctttcaagaagcacaacagacttc

SEQ ID NO: 832776 - DNA, 25 bp, Homo sapien
cgttagagctaaatagcgctgatga

SEQ ID NO: 832777 - DNA, 25 bp, Homo sapien
ctgcgttagagctaaatagcgctga

SEQ ID NO: 832778 - DNA, 25 bp, Homo sapien
gctaaatagcgctgatgataatgat

SEQ ID NO: 832779 - DNA, 25 bp, Homo sapien
tagagctaaatagcgctgatgataa

SEQ ID NO: 832780 - DNA, 25 bp, Homo sapien
cacatctgtacgtgctggttgctaa

SEQ ID NO: 832781 - DNA, 25 bp, Homo sapien
ttgccacatctgtacgtgctggttg

SEQ ID NO: 832782 - DNA, 25 bp, Homo sapien
ctgtacgtgctggttgctaagtgga

SEQ ID NO: 832783 - DNA, 25 bp, Homo sapien
catctgtacgtgctggttgctaagt

SEQ ID NO: 832784 - DNA, 25 bp, Homo sapien
gcttgggagcaaggcttcatgaacc

SEQ ID NO: 832785 - DNA, 25 bp, Homo sapien
ggcatctggctctttgaacttccaa

SEQ ID NO: 832786 - DNA, 25 bp, Homo sapien
cacctaaggaaggagtacttggatc

SEQ ID NO: 832787 - DNA, 25 bp, Homo sapien
catcgtggagagtttcacctaagga

SEQ ID NO: 832788 - DNA, 25 bp, Homo sapien
aacagctgtatctgagcttcaggct

SEQ ID NO: 832789 - DNA, 25 bp, Homo sapien
cacaaacagctgtatctgagcttca

SEQ ID NO: 832790 - DNA, 25 bp, Homo sapien
tttacacaaacagctgtatctgagc

SEQ ID NO: 832791 - DNA, 25 bp, Homo sapien
atttacacaaacagctgtatctgag

SEQ ID NO: 832792 - DNA, 25 bp, Homo sapien
tggttaggtccataatactcctgcc

SEQ ID NO: 832793 - DNA, 25 bp, Homo sapien
taatagagggaaccaatattgcctg

SEQ ID NO: 832794 - DNA, 25 bp, Homo sapien
gaataattatccaactgtgtccttg

SEQ ID NO: 832795 - DNA, 25 bp, Homo sapien
cctgccgtagccttactctgttttg

SEQ ID NO: 832796 - DNA, 25 bp, Homo sapien
agatgggatgtcagaggctccagcg

SEQ ID NO: 832797 - DNA, 25 bp, Homo sapien
cacgctgccatgcaggtattttggc

SEQ ID NO: 832798 - DNA, 25 bp, Homo sapien
gatcctatcttcatggcaaccaggg

SEQ ID NO: 832799 - DNA, 25 bp, Homo sapien
ccatgcaggtattttggcatcttgg

SEQ ID NO: 832800 - DNA, 25 bp, Homo sapien
tcctttttgagggtggtacgctgcc

SEQ ID NO: 832801 - DNA, 25 bp, Homo sapien
tgctaggccaccatccttagcaggc

SEQ ID NO: 832802 - DNA, 25 bp, Homo sapien
gctgtcatgcctgaagagttcagtg

SEQ ID NO: 832803 - DNA, 25 bp, Homo sapien
caggctctggatctaggcaagggat

SEQ ID NO: 832804 - DNA, 25 bp, Homo sapien
tcatggatgttccccagagatgcac

SEQ ID NO: 832805 - DNA, 25 bp, Homo sapien
ttcctctggaccgtggcatctctaa

SEQ ID NO: 832806 - DNA, 25 bp, Homo sapien
tgtatcagccgatgtgtccttcctc

SEQ ID NO: 832807 - DNA, 25 bp, Homo sapien
gagatgcactgctccaacctgtggt

SEQ ID NO: 832808 - DNA, 25 bp, Homo sapien
ttcctgccagctgggcttaggctca

SEQ ID NO: 832809 - DNA, 25 bp, Homo sapien
gctgggcttaggctcagacagctgc

SEQ ID NO: 832810 - DNA, 25 bp, Homo sapien
tcctctggtccccaggtcagtgggg

SEQ ID NO: 832811 - DNA, 25 bp, Homo sapien
aggtcagtgggggttcctgccagct

SEQ ID NO: 832812 - DNA, 25 bp, Homo sapien
gctggcggctggtgactgcaaattt

SEQ ID NO: 832813 - DNA, 25 bp, Homo sapien
tgggttcccaaggtcattgcctgaa

SEQ ID NO: 832814 - DNA, 25 bp, Homo sapien
ggcggctggtgactgcaaatttcac

SEQ ID NO: 832815 - DNA, 25 bp, Homo sapien
ctgctgcagatgcaatgtgggttcc

SEQ ID NO: 832816 - DNA, 25 bp, Homo sapien
cacagatggtcggtgccctctcttt

SEQ ID NO: 832817 - DNA, 25 bp, Homo sapien
caagccagtgcaagcattagtctgc

SEQ ID NO: 832818 - DNA, 25 bp, Homo sapien
tttggtgtatgttatgcccactggg

SEQ ID NO: 832819 - DNA, 25 bp, Homo sapien
ctctgtcaacacagatggtcggtgc

SEQ ID NO: 832820 - DNA, 25 bp, Homo sapien
tgtccaaatgggaatgaacgggagc

SEQ ID NO: 832821 - DNA, 25 bp, Homo sapien
taaagaccaggatgagcttctctgt

SEQ ID NO: 832822 - DNA, 25 bp, Homo sapien
ttaataaagaccaggatgagcttct

SEQ ID NO: 832823 - DNA, 25 bp, Homo sapien
aatgggaatgaacgggagccaagct

SEQ ID NO: 832824 - DNA, 25 bp, Homo sapien
tatccaggatgagaatgcagagggc

SEQ ID NO: 832825 - DNA, 25 bp, Homo sapien
tgtgcacattgtccatcagacctct

SEQ ID NO: 832826 - DNA, 25 bp, Homo sapien
ggcggggacagcctcgcctttcttg

SEQ ID NO: 832827 - DNA, 25 bp, Homo sapien
gcttgggttatccaggatgagaatg

SEQ ID NO: 832828 - DNA, 25 bp, Homo sapien
ctttggataaaaagtgatacttggt

SEQ ID NO: 832829 - DNA, 25 bp, Homo sapien
taggtgaggcatcctgtcctgatca

SEQ ID NO: 832830 - DNA, 25 bp, Homo sapien
tttcagggacataggtgaggcatcc

SEQ ID NO: 832831 - DNA, 25 bp, Homo sapien
gctttgaggttgttctttcagggac

SEQ ID NO: 832832 - DNA, 25 bp, Homo sapien
gaaaggctgactaacgagagaggca

SEQ ID NO: 832833 - DNA, 25 bp, Homo sapien
caggaaaggctgactaacgagagag

SEQ ID NO: 832834 - DNA, 25 bp, Homo sapien
gactaacgagagaggcagccagaga

SEQ ID NO: 832835 - DNA, 25 bp, Homo sapien
gctgactaacgagagaggcagccag

SEQ ID NO: 832836 - DNA, 25 bp, Homo sapien
ttctttccacggcagaatgctgggt

SEQ ID NO: 832837 - DNA, 25 bp, Homo sapien
gcagaatgctgggtatttcagacga

SEQ ID NO: 832838 - DNA, 25 bp, Homo sapien
ccacggcagaatgctgggtatttca

SEQ ID NO: 832839 - DNA, 25 bp, Homo sapien
gctgggtatttcagacgacggttta

SEQ ID NO: 832840 - DNA, 25 bp, Homo sapien
ctgactggtggatcagagccacaga

SEQ ID NO: 832841 - DNA, 25 bp, Homo sapien
gactggtggatcagagccacagatg

SEQ ID NO: 832842 - DNA, 25 bp, Homo sapien
tgactggtggatcagagccacagat

SEQ ID NO: 832843 - DNA, 25 bp, Homo sapien
tcagattagctcgagtgacggtggt

SEQ ID NO: 832844 - DNA, 25 bp, Homo sapien
ggtttcagattagctcgagtgacgg

SEQ ID NO: 832845 - DNA, 25 bp, Homo sapien
tttcagattagctcgagtgacggtg

SEQ ID NO: 832846 - DNA, 25 bp, Homo sapien
gcaggtttcagattagctcgagtga

SEQ ID NO: 832847 - DNA, 25 bp, Homo sapien
cactatcatcaaagacgcatctcag

SEQ ID NO: 832848 - DNA, 25 bp, Homo sapien
tctccacttgcccttgtgtctgttt

SEQ ID NO: 832849 - DNA, 25 bp, Homo sapien
atccaaactgtgaacccaactgtct

SEQ ID NO: 832850 - DNA, 25 bp, Homo sapien
aaactgtgaacccaactgtcttcat

SEQ ID NO: 832851 - DNA, 25 bp, Homo sapien
tcagaccgggcatggacggcatctc

SEQ ID NO: 832852 - DNA, 25 bp, Homo sapien
gggcatggacggcatctccacagag

SEQ ID NO: 832853 - DNA, 25 bp, Homo sapien
accgggcatggacggcatctccaca

SEQ ID NO: 832854 - DNA, 25 bp, Homo sapien
ggcatggacggcatctccacagagc

SEQ ID NO: 832855 - DNA, 25 bp, Homo sapien
gcttcatgaaaaggagaaacgcaga

SEQ ID NO: 832856 - DNA, 25 bp, Homo sapien
tcatgaaaaggagaaacgcagagct

SEQ ID NO: 832857 - DNA, 25 bp, Homo sapien
tggcttcatgaaaaggagaaacgca

SEQ ID NO: 832858 - DNA, 25 bp, Homo sapien
ttcatgaaaaggagaaacgcagagc

SEQ ID NO: 832859 - DNA, 25 bp, Homo sapien
tcattaggtcggcatctgtccccac

SEQ ID NO: 832860 - DNA, 25 bp, Homo sapien
ttaggtcggcatctgtccccaccag

SEQ ID NO: 832861 - DNA, 25 bp, Homo sapien
gggccactgtgctcattaggtcggc

SEQ ID NO: 832862 - DNA, 25 bp, Homo sapien
tgtgctcattaggtcggcatctgtc

SEQ ID NO: 832863 - DNA, 25 bp, Homo sapien
tgaaaatagaccaaacaatgtgaca

SEQ ID NO: 832864 - DNA, 25 bp, Homo sapien
ttttcttccacgaacagaatgttca

SEQ ID NO: 832865 - DNA, 25 bp, Homo sapien
cagggctcgggaatgaaattgaaaa

SEQ ID NO: 832866 - DNA, 25 bp, Homo sapien
gaccaaacaatgtgacagttttctc

SEQ ID NO: 832867 - DNA, 25 bp, Homo sapien
ggtgagaaagcaggctttgagaggg

SEQ ID NO: 832868 - DNA, 25 bp, Homo sapien
ctacaaggtgagaaagcaggctttg

SEQ ID NO: 832869 - DNA, 25 bp, Homo sapien
caggctttgagaggggagctgtgtt

SEQ ID NO: 832870 - DNA, 25 bp, Homo sapien
agctgtgtttttggcagggggtatt

SEQ ID NO: 832871 - DNA, 25 bp, Homo sapien
taaacctgattgatccgatggactg

SEQ ID NO: 832872 - DNA, 25 bp, Homo sapien
ggtaataatgtaggaggtgtttctc

SEQ ID NO: 832873 - DNA, 25 bp, Homo sapien
tgatcctcggatgcctccttgttaa

SEQ ID NO: 832874 - DNA, 25 bp, Homo sapien
gcggctcgggagcagcctgtccttt

SEQ ID NO: 832875 - DNA, 25 bp, Homo sapien
gaaacaactgggtcaaggacacgca

SEQ ID NO: 832876 - DNA, 25 bp, Homo sapien
actgggtcaaggacacgcagtttct

SEQ ID NO: 832877 - DNA, 25 bp, Homo sapien
aatgaaacaactgggtcaaggacac

SEQ ID NO: 832878 - DNA, 25 bp, Homo sapien
caaggacacgcagtttctgtccatg

SEQ ID NO: 832879 - DNA, 25 bp, Homo sapien
agagagccaaggcaatgcagctggc

SEQ ID NO: 832880 - DNA, 25 bp, Homo sapien
ccaaggcaatgcagctggccaagaa

SEQ ID NO: 832881 - DNA, 25 bp, Homo sapien
aatgcagctggccaagaagagatgc

SEQ ID NO: 832882 - DNA, 25 bp, Homo sapien
ggcaatgcagctggccaagaagaga

SEQ ID NO: 832883 - DNA, 25 bp, Homo sapien
agcttcttaatgaacttggactcat

SEQ ID NO: 832884 - DNA, 25 bp, Homo sapien
cagcttcttaatgaacttggactca

SEQ ID NO: 832885 - DNA, 25 bp, Homo sapien
cctccagctgactgtctattatgat

SEQ ID NO: 832886 - DNA, 25 bp, Homo sapien
tagccaccctcataatcagtggagt

SEQ ID NO: 832887 - DNA, 25 bp, Homo sapien
ttagccaccctcataatcagtggag

SEQ ID NO: 832888 - DNA, 25 bp, Homo sapien
ccttgaacctgttgggctataggaa

SEQ ID NO: 832889 - DNA, 25 bp, Homo sapien
gccaccttgaacctgttgggctata

SEQ ID NO: 832890 - DNA, 25 bp, Homo sapien
aacctgttgggctataggaatccac

SEQ ID NO: 832891 - DNA, 25 bp, Homo sapien
cttcttgccaccttgaacctgttgg

SEQ ID NO: 832892 - DNA, 25 bp, Homo sapien
tcccaagggacatctctcaatcctg

SEQ ID NO: 832893 - DNA, 25 bp, Homo sapien
tcctcctcctttgggcgatggggag

SEQ ID NO: 832894 - DNA, 25 bp, Homo sapien
caagggacatctctcaatcctgccc

SEQ ID NO: 832895 - DNA, 25 bp, Homo sapien
gggacatctctcaatcctgccccag

SEQ ID NO: 832896 - DNA, 25 bp, Homo sapien
ctggcgaggaggaggcgtgggctca

SEQ ID NO: 832897 - DNA, 25 bp, Homo sapien
tggcgaggaggaggcgtgggctcat

SEQ ID NO: 832898 - DNA, 25 bp, Homo sapien
cctgcgtttccaagacatgggcctg

SEQ ID NO: 832899 - DNA, 25 bp, Homo sapien
tttccaagacatgggcctgatgttg

SEQ ID NO: 832900 - DNA, 25 bp, Homo sapien
agcatgtgaatccacaacccctgcg

SEQ ID NO: 832901 - DNA, 25 bp, Homo sapien
tgtgaatccacaacccctgcgtttc

SEQ ID NO: 832902 - DNA, 25 bp, Homo sapien
acatcagcctggttggacgtccaca

SEQ ID NO: 832903 - DNA, 25 bp, Homo sapien
cctctactgtcttgtgggcctgggc

SEQ ID NO: 832904 - DNA, 25 bp, Homo sapien
tggtccctacagaaggatgaagacg

SEQ ID NO: 832905 - DNA, 25 bp, Homo sapien
gccccttcagccatagagtatattg

SEQ ID NO: 832906 - DNA, 25 bp, Homo sapien
ggccattgaagggctgatgagccat

SEQ ID NO: 832907 - DNA, 25 bp, Homo sapien
agccgctctactgggtcatcaccgg

SEQ ID NO: 832908 - DNA, 25 bp, Homo sapien
ttgtacactgatctccccctgggag

SEQ ID NO: 832909 - DNA, 25 bp, Homo sapien
tgcttggccgcacttcttgacactc

SEQ ID NO: 832910 - DNA, 25 bp, Homo sapien
tatgcacacgttctccctgcatgtc

SEQ ID NO: 832911 - DNA, 25 bp, Homo sapien
gggatgcccaccttgcctgttatgc

SEQ ID NO: 832912 - DNA, 25 bp, Homo sapien
ccaccttgcctgttatgcacacgtt

SEQ ID NO: 832913 - DNA, 25 bp, Homo sapien
gcctgttatgcacacgttctccctg

SEQ ID NO: 832914 - DNA, 25 bp, Homo sapien
tgagtagcaggggtagcaagaagga

SEQ ID NO: 832915 - DNA, 25 bp, Homo sapien
ctgagtagcaggggtagcaagaagg

SEQ ID NO: 832916 - DNA, 25 bp, Homo sapien
gagtagcaggggtagcaagaaggaa

SEQ ID NO: 832917 - DNA, 25 bp, Homo sapien
caggctgccccatacggttcctgtg

SEQ ID NO: 832918 - DNA, 25 bp, Homo sapien
agtgtcttggcagtggtctcaagga

SEQ ID NO: 832919 - DNA, 25 bp, Homo sapien
cagtggtctcaaggaccgggacaga

SEQ ID NO: 832920 - DNA, 25 bp, Homo sapien
agagcttggccgtctgatggaggca

SEQ ID NO: 832921 - DNA, 25 bp, Homo sapien
ttggaaacaattgcagacagggaat

SEQ ID NO: 832922 - DNA, 25 bp, Homo sapien
tggaaacaattgcagacagggaatg

SEQ ID NO: 832923 - DNA, 25 bp, Homo sapien
gattggaaacaattgcagacaggga

SEQ ID NO: 832924 - DNA, 25 bp, Homo sapien
tgattggaaacaattgcagacaggg

SEQ ID NO: 832925 - DNA, 25 bp, Homo sapien
gccctatcttagaacagttctgctg

SEQ ID NO: 832926 - DNA, 25 bp, Homo sapien
cagaaagacgccctatcttagaaca

SEQ ID NO: 832927 - DNA, 25 bp, Homo sapien
gaaagacgccctatcttagaacagt

SEQ ID NO: 832928 - DNA, 25 bp, Homo sapien
gacgccctatcttagaacagttctg

SEQ ID NO: 832929 - DNA, 25 bp, Homo sapien
tgccaaccaagatggataaggtgag

SEQ ID NO: 832930 - DNA, 25 bp, Homo sapien
ccaaccaagatggataaggtgagct

SEQ ID NO: 832931 - DNA, 25 bp, Homo sapien
gatggataaggtgagctgggcccca

SEQ ID NO: 832932 - DNA, 25 bp, Homo sapien
aaccaagatggataaggtgagctgg

SEQ ID NO: 832933 - DNA, 25 bp, Homo sapien
tctgttctctttgtaggagattggg

SEQ ID NO: 832934 - DNA, 25 bp, Homo sapien
tccacggggccgattagaacaggct

SEQ ID NO: 832935 - DNA, 25 bp, Homo sapien
tgcttgggagccccgtggctggagg

SEQ ID NO: 832936 - DNA, 25 bp, Homo sapien
ccgattagaacaggctgcagtctga

SEQ ID NO: 832937 - DNA, 25 bp, Homo sapien
gagcttcacatagtcacatgcacaa

SEQ ID NO: 832938 - DNA, 25 bp, Homo sapien
tccttccatttgtgatcccgagctt

SEQ ID NO: 832939 - DNA, 25 bp, Homo sapien
tgcacgtgcttgcatgcaaacatgc

SEQ ID NO: 832940 - DNA, 25 bp, Homo sapien
tacacccacacatcaccagtgattg

SEQ ID NO: 832941 - DNA, 25 bp, Homo sapien
agtgtgtgtactcatgttgctgtgg

SEQ ID NO: 832942 - DNA, 25 bp, Homo sapien
tgttgctgtggtcaccacttctggg

SEQ ID NO: 832943 - DNA, 25 bp, Homo sapien
catgttgctgtggtcaccacttctg

SEQ ID NO: 832944 - DNA, 25 bp, Homo sapien
gacagtctgcagtgtgtgtactcat

SEQ ID NO: 832945 - DNA, 25 bp, Homo sapien
gcagctggatctgcctgagattatt

SEQ ID NO: 832946 - DNA, 25 bp, Homo sapien
gctggatctgcctgagattattttc

SEQ ID NO: 832947 - DNA, 25 bp, Homo sapien
agctggatctgcctgagattatttt

SEQ ID NO: 832948 - DNA, 25 bp, Homo sapien
ctggatctgcctgagattattttct

SEQ ID NO: 832949 - DNA, 25 bp, Homo sapien
caggatggttagtttgaagacagca

SEQ ID NO: 832950 - DNA, 25 bp, Homo sapien
cagtttcaggatggttagtttgaag

SEQ ID NO: 832951 - DNA, 25 bp, Homo sapien
tttcaggatggttagtttgaagaca

SEQ ID NO: 832952 - DNA, 25 bp, Homo sapien
aagcagtttcaggatggttagtttg

SEQ ID NO: 832953 - DNA, 25 bp, Homo sapien
tgtattgactgagcacgtgccagga

SEQ ID NO: 832954 - DNA, 25 bp, Homo sapien
gccaggaaatggacaacaggcccgg

SEQ ID NO: 832955 - DNA, 25 bp, Homo sapien
ccggtggcagctggaattgactcta

SEQ ID NO: 832956 - DNA, 25 bp, Homo sapien
ggaagaccaagtccagggcaatcca

SEQ ID NO: 832957 - DNA, 25 bp, Homo sapien
tgggaatattaacctacacatggaa

SEQ ID NO: 832958 - DNA, 25 bp, Homo sapien
taacctacacatggaagggtggatg

SEQ ID NO: 832959 - DNA, 25 bp, Homo sapien
cagattgggaatattaacctacaca

SEQ ID NO: 832960 - DNA, 25 bp, Homo sapien
agggtggatgtggttggctaagcca

SEQ ID NO: 832961 - DNA, 25 bp, Homo sapien
ccatgagttccacccttttcaaatt

SEQ ID NO: 832962 - DNA, 25 bp, Homo sapien
ctcctccagtggaatccatgagttc

SEQ ID NO: 832963 - DNA, 25 bp, Homo sapien
tcctcttttagcagtgagacttggg

SEQ ID NO: 832964 - DNA, 25 bp, Homo sapien
ggcagatagttaatggcacacgggc

SEQ ID NO: 832965 - DNA, 25 bp, Homo sapien
agatttcatgcattgtctgggcagc

SEQ ID NO: 832966 - DNA, 25 bp, Homo sapien
agagttcagatttcatgcattgtct

SEQ ID NO: 832967 - DNA, 25 bp, Homo sapien
tcagatttcatgcattgtctgggca

SEQ ID NO: 832968 - DNA, 25 bp, Homo sapien
gggcagctgggccatttgaaaacct

SEQ ID NO: 832969 - DNA, 25 bp, Homo sapien
tcctccacaagaggtccaattaccc

SEQ ID NO: 832970 - DNA, 25 bp, Homo sapien
cttcctcataatcccctttctcctc

SEQ ID NO: 832971 - DNA, 25 bp, Homo sapien
ttcctcataatcccctttctcctcc

SEQ ID NO: 832972 - DNA, 25 bp, Homo sapien
tccacaagaggtccaattaccccag

SEQ ID NO: 832973 - DNA, 25 bp, Homo sapien
gaactgggctatgtataaatgtgca

SEQ ID NO: 832974 - DNA, 25 bp, Homo sapien
gaattcagtctatagttcagagccc

SEQ ID NO: 832975 - DNA, 25 bp, Homo sapien
tctccactttaggtctgagaacaag

SEQ ID NO: 832976 - DNA, 25 bp, Homo sapien
tctctagagacaactagaactgggc

SEQ ID NO: 832977 - DNA, 25 bp, Homo sapien
catctctttgggcatggtttccctg

SEQ ID NO: 832978 - DNA, 25 bp, Homo sapien
tgccatgtgaccaggatctgtccgt

SEQ ID NO: 832979 - DNA, 25 bp, Homo sapien
cctttatgggagtagagctggtgcc

SEQ ID NO: 832980 - DNA, 25 bp, Homo sapien
cactgattgagttgggggtttggag

SEQ ID NO: 832981 - DNA, 25 bp, Homo sapien
cccattgccagattagggtggaagt

SEQ ID NO: 832982 - DNA, 25 bp, Homo sapien
ctgggcttttgtacagggcactgaa

SEQ ID NO: 832983 - DNA, 25 bp, Homo sapien
gggactgtcacagccgctgagctct

SEQ ID NO: 832984 - DNA, 25 bp, Homo sapien
gtctggacttctgccactaggttgg

SEQ ID NO: 832985 - DNA, 25 bp, Homo sapien
aatggggtacattgtcgttttcaga

SEQ ID NO: 832986 - DNA, 25 bp, Homo sapien
aatagcaggaatggggtacattgtc

SEQ ID NO: 832987 - DNA, 25 bp, Homo sapien
gtacattgtcgttttcagactgcat

SEQ ID NO: 832988 - DNA, 25 bp, Homo sapien
cagaaaatagcaggaatggggtaca

SEQ ID NO: 832989 - DNA, 25 bp, Homo sapien
agcgcgggctctggttcggtcgtgc

SEQ ID NO: 832990 - DNA, 25 bp, Homo sapien
ttagatcagacagcagcccaaaggg

SEQ ID NO: 832991 - DNA, 25 bp, Homo sapien
tcagagctgccgtcttagatcagac

SEQ ID NO: 832992 - DNA, 25 bp, Homo sapien
aagggtccaaatgctccacggctgg

SEQ ID NO: 832993 - DNA, 25 bp, Homo sapien
caggctctgagtgacagccattgaa

SEQ ID NO: 832994 - DNA, 25 bp, Homo sapien
tcaggctctgagtgacagccattga

SEQ ID NO: 832995 - DNA, 25 bp, Homo sapien
caaagtgagccagcaaaaggatccc

SEQ ID NO: 832996 - DNA, 25 bp, Homo sapien
ctatgggaatattctcttgggccat

SEQ ID NO: 832997 - DNA, 25 bp, Homo sapien
ttgaagtattagaaagaccgaaaca

SEQ ID NO: 832998 - DNA, 25 bp, Homo sapien
tgttcctcggtagtgctgccatcca

SEQ ID NO: 832999 - DNA, 25 bp, Homo sapien
tcgagcattccacaggccatgttct

SEQ ID NO: 833000 - DNA, 25 bp, Homo sapien
tacttataagattgagctccatttc

SEQ ID NO: 833001 - DNA, 25 bp, Homo sapien
catgttctgtgcttcagagtgggca

SEQ ID NO: 833002 - DNA, 25 bp, Homo sapien
gttgaaattcctagacgctcacccc

SEQ ID NO: 833003 - DNA, 25 bp, Homo sapien
gaaaaagcggaaatgacttccaatc

SEQ ID NO: 833004 - DNA, 25 bp, Homo sapien
ttccagcaaccaggtgaatcatcag

SEQ ID NO: 833005 - DNA, 25 bp, Homo sapien
ggaaatgacttccaatcagtcaggg

SEQ ID NO: 833006 - DNA, 25 bp, Homo sapien
agcaaccaggtgaatcatcagctga

SEQ ID NO: 833007 - DNA, 25 bp, Homo sapien
acaaaggttcatgggatgctgtcca

SEQ ID NO: 833008 - DNA, 25 bp, Homo sapien
tccttcttcacaaaggttcatggga

SEQ ID NO: 833009 - DNA, 25 bp, Homo sapien
ttcttcacaaaggttcatgggatgc

SEQ ID NO: 833010 - DNA, 25 bp, Homo sapien
tcacaaaggttcatgggatgctgtc

SEQ ID NO: 833011 - DNA, 25 bp, Homo sapien
gtccctgtaacatgtgcggtgttgt

SEQ ID NO: 833012 - DNA, 25 bp, Homo sapien
taacatgtgcggtgttgtaattggg

SEQ ID NO: 833013 - DNA, 25 bp, Homo sapien
ccctgtaacatgtgcggtgttgtaa

SEQ ID NO: 833014 - DNA, 25 bp, Homo sapien
tgagtccctgtaacatgtgcggtgt

SEQ ID NO: 833015 - DNA, 25 bp, Homo sapien
gaagttcatctctatctctaacatt

SEQ ID NO: 833016 - DNA, 25 bp, Homo sapien
agtgacagagcggttcctggcatca

SEQ ID NO: 833017 - DNA, 25 bp, Homo sapien
gctgaaatgaagttcatctctatct

SEQ ID NO: 833018 - DNA, 25 bp, Homo sapien
catcaagggtagataccgggcagga

SEQ ID NO: 833019 - DNA, 25 bp, Homo sapien
tcttggtttctcaccggaattgtcc

SEQ ID NO: 833020 - DNA, 25 bp, Homo sapien
ctttgtcttggtttctcaccggaat

SEQ ID NO: 833021 - DNA, 25 bp, Homo sapien
tttctcaccggaattgtccctccta

SEQ ID NO: 833022 - DNA, 25 bp, Homo sapien
tcaccggaattgtccctcctagagc

SEQ ID NO: 833023 - DNA, 25 bp, Homo sapien
atttttcctgtgacagactgggccc

SEQ ID NO: 833024 - DNA, 25 bp, Homo sapien
tttttcctgtgacagactgggccca

SEQ ID NO: 833025 - DNA, 25 bp, Homo sapien
gcccatctttgtcttggtttctcac

SEQ ID NO: 833026 - DNA, 25 bp, Homo sapien
gactgggcccatctttgtcttggtt

SEQ ID NO: 833027 - DNA, 25 bp, Homo sapien
gggcccatctttgtcttggtttctc

SEQ ID NO: 833028 - DNA, 25 bp, Homo sapien
acagactgggcccatctttgtcttg

SEQ ID NO: 833029 - DNA, 25 bp, Homo sapien
gccctgatgtccatgctagggcggt

SEQ ID NO: 833030 - DNA, 25 bp, Homo sapien
gctagggcggttgaaactgattttc

SEQ ID NO: 833031 - DNA, 25 bp, Homo sapien
catgctagggcggttgaaactgatt

SEQ ID NO: 833032 - DNA, 25 bp, Homo sapien
atgtccatgctagggcggttgaaac

SEQ ID NO: 833033 - DNA, 25 bp, Homo sapien
caggtgctccgttcatctggagaga

SEQ ID NO: 833034 - DNA, 25 bp, Homo sapien
gaaacttcctcaacaaggaggcctg

SEQ ID NO: 833035 - DNA, 25 bp, Homo sapien
tgctcgatgatggacaagagatgct

SEQ ID NO: 833036 - DNA, 25 bp, Homo sapien
tagctgccgagaactctgtgtggcc

SEQ ID NO: 833037 - DNA, 25 bp, Homo sapien
gcttgtggctttgattgtgcaaaca

SEQ ID NO: 833038 - DNA, 25 bp, Homo sapien
gtggaaaaggacacggccttcctca

SEQ ID NO: 833039 - DNA, 25 bp, Homo sapien
ttggcttgtggctttgattgtgcaa

SEQ ID NO: 833040 - DNA, 25 bp, Homo sapien
tagtagtgtggaaaaggacacggcc

SEQ ID NO: 833041 - DNA, 25 bp, Homo sapien
cattgaggggacttgaacccatact

SEQ ID NO: 833042 - DNA, 25 bp, Homo sapien
gccattgaggggacttgaacccata

SEQ ID NO: 833043 - DNA, 25 bp, Homo sapien
tcagccattgaggggacttgaaccc

SEQ ID NO: 833044 - DNA, 25 bp, Homo sapien
agccattgaggggacttgaacccat

SEQ ID NO: 833045 - DNA, 25 bp, Homo sapien
gaaactccacgaaagtgagcatccg

SEQ ID NO: 833046 - DNA, 25 bp, Homo sapien
tggcgcctgagatcctgaaactcca

SEQ ID NO: 833047 - DNA, 25 bp, Homo sapien
acgtgccgttcctttgactcactgg

SEQ ID NO: 833048 - DNA, 25 bp, Homo sapien
actcaggttggtctggcgcctgaga

SEQ ID NO: 833049 - DNA, 25 bp, Homo sapien
cgtgtttcgtgcgacatcggccagg

SEQ ID NO: 833050 - DNA, 25 bp, Homo sapien
tttggagtcggctcagaccacacgt

SEQ ID NO: 833051 - DNA, 25 bp, Homo sapien
tacaggcaagttcagggccgagagt

SEQ ID NO: 833052 - DNA, 25 bp, Homo sapien
tgatttggcagatacccgagttcct

SEQ ID NO: 833053 - DNA, 25 bp, Homo sapien
gatctgagtgtatggactctcggct

SEQ ID NO: 833054 - DNA, 25 bp, Homo sapien
tctagctagagatttcacaccagtc

SEQ ID NO: 833055 - DNA, 25 bp, Homo sapien
tcatgctggcagagtcaacctgtcg

SEQ ID NO: 833056 - DNA, 25 bp, Homo sapien
tctaggcccactgactgtttttaca

SEQ ID NO: 833057 - DNA, 25 bp, Homo sapien
tagggagaacaatgtaacacagtca

SEQ ID NO: 833058 - DNA, 25 bp, Homo sapien
agggagaacaatgtaacacagtcat

SEQ ID NO: 833059 - DNA, 25 bp, Homo sapien
gagtgtctccgcttcgggagcacca

SEQ ID NO: 833060 - DNA, 25 bp, Homo sapien
tgcaagcctggtacacatttctcct

SEQ ID NO: 833061 - DNA, 25 bp, Homo sapien
tcatataacttcatggggcccgagt

SEQ ID NO: 833062 - DNA, 25 bp, Homo sapien
tgcaggtgctcgtggaagcaggcaa

SEQ ID NO: 833063 - DNA, 25 bp, Homo sapien
tgcctctgcctaagaccttgccggt

SEQ ID NO: 833064 - DNA, 25 bp, Homo sapien
aggtattcccttcctgtgaagctgg

SEQ ID NO: 833065 - DNA, 25 bp, Homo sapien
tctgcctaagaccttgccggtgcat

SEQ ID NO: 833066 - DNA, 25 bp, Homo sapien
cccttcctgtgaagctggtgatgct

SEQ ID NO: 833067 - DNA, 25 bp, Homo sapien
cctgacggtggggacacttcagttc

SEQ ID NO: 833068 - DNA, 25 bp, Homo sapien
acggtggggacacttcagttccatt

SEQ ID NO: 833069 - DNA, 25 bp, Homo sapien
tgacggtggggacacttcagttcca

SEQ ID NO: 833070 - DNA, 25 bp, Homo sapien
gacggtggggacacttcagttccat

SEQ ID NO: 833071 - DNA, 25 bp, Homo sapien
tgtcaatctcttgagactccctgtg

SEQ ID NO: 833072 - DNA, 25 bp, Homo sapien
tcacttgggttgtactccactgtca

SEQ ID NO: 833073 - DNA, 25 bp, Homo sapien
gatgccttaaatgcctgcggatctg

SEQ ID NO: 833074 - DNA, 25 bp, Homo sapien
ctggcttgtccctgagatgccttaa

SEQ ID NO: 833075 - DNA, 25 bp, Homo sapien
gagcagatgcaccaatggaaactga

SEQ ID NO: 833076 - DNA, 25 bp, Homo sapien
tctgttagaatctgagcagatgcac

SEQ ID NO: 833077 - DNA, 25 bp, Homo sapien
catgggtaggttctctattctcata

SEQ ID NO: 833078 - DNA, 25 bp, Homo sapien
ctgcctgattgtagtgacaccatgg

SEQ ID NO: 833079 - DNA, 25 bp, Homo sapien
gagagtggccactgtcacttacttg

SEQ ID NO: 833080 - DNA, 25 bp, Homo sapien
catatgaaatcatctctcctctggg

SEQ ID NO: 833081 - DNA, 25 bp, Homo sapien
tgttactaacaagtggctctgggag

SEQ ID NO: 833082 - DNA, 25 bp, Homo sapien
ggcttgtaatccaatgctccaggac

SEQ ID NO: 833083 - DNA, 25 bp, Homo sapien
ttttctatggaacttcctggcttgt

SEQ ID NO: 833084 - DNA, 25 bp, Homo sapien
cctctgcacacttaagtctatttct

SEQ ID NO: 833085 - DNA, 25 bp, Homo sapien
gaagtaactgcaggaggtaaggtcc

SEQ ID NO: 833086 - DNA, 25 bp, Homo sapien
ccactgggataaattaaagctgccc

SEQ ID NO: 833087 - DNA, 25 bp, Homo sapien
gagaattagtaggagctttcttggg

SEQ ID NO: 833088 - DNA, 25 bp, Homo sapien
gggtggtcatcctgttaaattccag

SEQ ID NO: 833089 - DNA, 25 bp, Homo sapien
atgcctgcatgcattcaggagcacc

SEQ ID NO: 833090 - DNA, 25 bp, Homo sapien
catgcctgcatgcattcaggagcac

SEQ ID NO: 833091 - DNA, 25 bp, Homo sapien
ccatgcctgcatgcattcaggagca

SEQ ID NO: 833092 - DNA, 25 bp, Homo sapien
ctcttttgcaagctgctgcgtgaag

SEQ ID NO: 833093 - DNA, 25 bp, Homo sapien
tttggtcatagtggtcttgggatct

SEQ ID NO: 833094 - DNA, 25 bp, Homo sapien
tagttgtggctacaaagagaggtgc

SEQ ID NO: 833095 - DNA, 25 bp, Homo sapien
gctttcttgccatccccagggctct

SEQ ID NO: 833096 - DNA, 25 bp, Homo sapien
agactccccagggcctgtgtgtgcg

SEQ ID NO: 833097 - DNA, 25 bp, Homo sapien
gttcagactccccagggcctgtgtg

SEQ ID NO: 833098 - DNA, 25 bp, Homo sapien
tcagactccccagggcctgtgtgtg

SEQ ID NO: 833099 - DNA, 25 bp, Homo sapien
tcgtgttcagactccccagggcctg

SEQ ID NO: 833100 - DNA, 25 bp, Homo sapien
ggtctgcactgcaataagtcccaaa

SEQ ID NO: 833101 - DNA, 25 bp, Homo sapien
ggagagaccaggattaaggtctgca

SEQ ID NO: 833102 - DNA, 25 bp, Homo sapien
gcagatgtggtcattgcagcccagt

SEQ ID NO: 833103 - DNA, 25 bp, Homo sapien
aattggatgagggactataggtgca

SEQ ID NO: 833104 - DNA, 25 bp, Homo sapien
ctcagggtgagcaggttgcaggcca

SEQ ID NO: 833105 - DNA, 25 bp, Homo sapien
tcagggtgagcaggttgcaggccat

SEQ ID NO: 833106 - DNA, 25 bp, Homo sapien
tcctggaaagatagccttaaactgg

SEQ ID NO: 833107 - DNA, 25 bp, Homo sapien
gcaacactcgggctgagagaggaaa

SEQ ID NO: 833108 - DNA, 25 bp, Homo sapien
gcatgatgacaaacgattaagctgg

SEQ ID NO: 833109 - DNA, 25 bp, Homo sapien
taggtgatatttatgaacactgccc

SEQ ID NO: 833110 - DNA, 25 bp, Homo sapien
tcggtgcgtgcctccaacttcaatg

SEQ ID NO: 833111 - DNA, 25 bp, Homo sapien
tccaacttcaatgagcgcatgctca

SEQ ID NO: 833112 - DNA, 25 bp, Homo sapien
tgagcgcatgctcaaaacagtgtgg

SEQ ID NO: 833113 - DNA, 25 bp, Homo sapien
ctcggtgcgtgcctccaacttcaat

SEQ ID NO: 833114 - DNA, 25 bp, Homo sapien
ggaggactccaaggcagtcaacttg

SEQ ID NO: 833115 - DNA, 25 bp, Homo sapien
cactgcccaccggagaaggcaaggc

SEQ ID NO: 833116 - DNA, 25 bp, Homo sapien
aggcattcgtgggtctgccagcgtc

SEQ ID NO: 833117 - DNA, 25 bp, Homo sapien
gctccgattgtagaatcactcccca

SEQ ID NO: 833118 - DNA, 25 bp, Homo sapien
cagacgcccgtgctttaaggtccta

SEQ ID NO: 833119 - DNA, 25 bp, Homo sapien
cctgtcacatgcctttcgtggtgtg

SEQ ID NO: 833120 - DNA, 25 bp, Homo sapien
cacctgtcacatgcctttcgtggtg

SEQ ID NO: 833121 - DNA, 25 bp, Homo sapien
gtcacatgcctttcgtggtgtgtgt

SEQ ID NO: 833122 - DNA, 25 bp, Homo sapien
aacacctgtcacatgcctttcgtgg

SEQ ID NO: 833123 - DNA, 25 bp, Homo sapien
cacacgcacacgttcagaggagggc

SEQ ID NO: 833124 - DNA, 25 bp, Homo sapien
agaggcagcggcataggctccatct

SEQ ID NO: 833125 - DNA, 25 bp, Homo sapien
ccctgtgcctcggtggagtatttgc

SEQ ID NO: 833126 - DNA, 25 bp, Homo sapien
cttggacgccgcaagagaagctgtc

SEQ ID NO: 833127 - DNA, 25 bp, Homo sapien
tgttcggaatcgatccccattttcc

SEQ ID NO: 833128 - DNA, 25 bp, Homo sapien
tcggaatcgatccccattttccgac

SEQ ID NO: 833129 - DNA, 25 bp, Homo sapien
aggggtgttcggaatcgatccccat

SEQ ID NO: 833130 - DNA, 25 bp, Homo sapien
gtgttcggaatcgatccccattttc

SEQ ID NO: 833131 - DNA, 25 bp, Homo sapien
gccgccgccgctgctcgggctccgg

SEQ ID NO: 833132 - DNA, 25 bp, Homo sapien
cagcccccgagagccgccgccgctg

SEQ ID NO: 833133 - DNA, 25 bp, Homo sapien
cgccgccgctgctcgggctccgggg

SEQ ID NO: 833134 - DNA, 25 bp, Homo sapien
cgcagcccccgagagccgccgccgc

SEQ ID NO: 833135 - DNA, 25 bp, Homo sapien
ggcatcaaggacattcagcccgcgg

SEQ ID NO: 833136 - DNA, 25 bp, Homo sapien
cgctgtgcccgcttggcatcaagga

SEQ ID NO: 833137 - DNA, 25 bp, Homo sapien
gcccgaccgggcgagcatgggcggc

SEQ ID NO: 833138 - DNA, 25 bp, Homo sapien
cggcgcggagtgacgccgctgtgcc

SEQ ID NO: 833139 - DNA, 25 bp, Homo sapien
cccatcttcactgcctaaaccagag

SEQ ID NO: 833140 - DNA, 25 bp, Homo sapien
tcttcactgcctaaaccagagctac

SEQ ID NO: 833141 - DNA, 25 bp, Homo sapien
cttcactgcctaaaccagagctaca

SEQ ID NO: 833142 - DNA, 25 bp, Homo sapien
catcttcactgcctaaaccagagct

SEQ ID NO: 833143 - DNA, 25 bp, Homo sapien
agttgagttaacaggtgtgggaatc

SEQ ID NO: 833144 - DNA, 25 bp, Homo sapien
gatgagggtggcatgcacagagttg

SEQ ID NO: 833145 - DNA, 25 bp, Homo sapien
tggtgggagcgggtatgaggatgag

SEQ ID NO: 833146 - DNA, 25 bp, Homo sapien
ggtgccacttccctcagactatggt

SEQ ID NO: 833147 - DNA, 25 bp, Homo sapien
ctttagagggtcgtccttgctggtt

SEQ ID NO: 833148 - DNA, 25 bp, Homo sapien
ttagagggtcgtccttgctggttgc

SEQ ID NO: 833149 - DNA, 25 bp, Homo sapien
tccttgctggttgcctatcccaggg

SEQ ID NO: 833150 - DNA, 25 bp, Homo sapien
ggttgcctatcccagggaatgctta

SEQ ID NO: 833151 - DNA, 25 bp, Homo sapien
tgggccgtgatggacccatgcagca

SEQ ID NO: 833152 - DNA, 25 bp, Homo sapien
tggaaatgggccgtgatggacccat

SEQ ID NO: 833153 - DNA, 25 bp, Homo sapien
tcatggggctatccgggctgtcact

SEQ ID NO: 833154 - DNA, 25 bp, Homo sapien
ggctatccgggctgtcacttctgga

SEQ ID NO: 833155 - DNA, 25 bp, Homo sapien
cacaatttaggtttttaagctgctg

SEQ ID NO: 833156 - DNA, 25 bp, Homo sapien
tgtcctgcaggtggcgccacaattt

SEQ ID NO: 833157 - DNA, 25 bp, Homo sapien
ggtttttctatccagtgcaaggtac

SEQ ID NO: 833158 - DNA, 25 bp, Homo sapien
gctgagctgtgggatactgatgata

SEQ ID NO: 833159 - DNA, 25 bp, Homo sapien
ccatggtccagtcttgaagacagaa

SEQ ID NO: 833160 - DNA, 25 bp, Homo sapien
cttggcttagaggtccacttagtcc

SEQ ID NO: 833161 - DNA, 25 bp, Homo sapien
cccttggcttagaggtccacttagt

SEQ ID NO: 833162 - DNA, 25 bp, Homo sapien
tttctgttttactgttccatggtcc

SEQ ID NO: 833163 - DNA, 25 bp, Homo sapien
ttgtggatgctttcaagcctcttca

SEQ ID NO: 833164 - DNA, 25 bp, Homo sapien
tgtggatgctttcaagcctcttcat

SEQ ID NO: 833165 - DNA, 25 bp, Homo sapien
tggaactgaactgacgatggcccat

SEQ ID NO: 833166 - DNA, 25 bp, Homo sapien
tgcttggtgggtgcaaggactcacc

SEQ ID NO: 833167 - DNA, 25 bp, Homo sapien
tgccagacagctcgtgaaagtgaac

SEQ ID NO: 833168 - DNA, 25 bp, Homo sapien
gaaagtgaacaggactcggcacaac

SEQ ID NO: 833169 - DNA, 25 bp, Homo sapien
ctcagaatccctaaggcaactgtct

SEQ ID NO: 833170 - DNA, 25 bp, Homo sapien
aatccttgtatatgccttggccctg

SEQ ID NO: 833171 - DNA, 25 bp, Homo sapien
ctaaggcaactgtctgcggctcttt

SEQ ID NO: 833172 - DNA, 25 bp, Homo sapien
ttcttctctcgtcctaatccttgta

SEQ ID NO: 833173 - DNA, 25 bp, Homo sapien
ttccctccatcccctgttccacggc

SEQ ID NO: 833174 - DNA, 25 bp, Homo sapien
ccctccatcccctgttccacggctc

SEQ ID NO: 833175 - DNA, 25 bp, Homo sapien
cttccctccatcccctgttccacgg

SEQ ID NO: 833176 - DNA, 25 bp, Homo sapien
tccctccatcccctgttccacggct

SEQ ID NO: 833177 - DNA, 25 bp, Homo sapien
gctgggatagtaacccgtgtcttct

SEQ ID NO: 833178 - DNA, 25 bp, Homo sapien
gtcacttccgtcgtatggatgaaga

SEQ ID NO: 833179 - DNA, 25 bp, Homo sapien
gataagataggtgttgtcacttccg

SEQ ID NO: 833180 - DNA, 25 bp, Homo sapien
tcacagcctgcttgagagataagat

SEQ ID NO: 833181 - DNA, 25 bp, Homo sapien
acttttgcgagtccctgatgtcctt

SEQ ID NO: 833182 - DNA, 25 bp, Homo sapien
tcatggggccttctcctgagccatc

SEQ ID NO: 833183 - DNA, 25 bp, Homo sapien
tctcacttttgcgagtccctgatgt

SEQ ID NO: 833184 - DNA, 25 bp, Homo sapien
ccttctcacttttgcgagtccctga

SEQ ID NO: 833185 - DNA, 25 bp, Homo sapien
catctcaaagtggtgtttattgttc

SEQ ID NO: 833186 - DNA, 25 bp, Homo sapien
tctgtgaggcattggacatcactgc

SEQ ID NO: 833187 - DNA, 25 bp, Homo sapien
caacaagggcatcatatacatctca

SEQ ID NO: 833188 - DNA, 25 bp, Homo sapien
atcgagtctgccatgatgcctggtg

SEQ ID NO: 833189 - DNA, 25 bp, Homo sapien
agccagtctccatgaggcatcatcc

SEQ ID NO: 833190 - DNA, 25 bp, Homo sapien
ggcatcatcccatgcagaggcttct

SEQ ID NO: 833191 - DNA, 25 bp, Homo sapien
ctccatgaggcatcatcccatgcag

SEQ ID NO: 833192 - DNA, 25 bp, Homo sapien
gaggcatcatcccatgcagaggctt

SEQ ID NO: 833193 - DNA, 25 bp, Homo sapien
ttagcagactatgcatggaagccca

SEQ ID NO: 833194 - DNA, 25 bp, Homo sapien
tgagcaaagcccatagcaccgggct

SEQ ID NO: 833195 - DNA, 25 bp, Homo sapien
catctaggtccagaagtggctgctg

SEQ ID NO: 833196 - DNA, 25 bp, Homo sapien
accgggctggtgactcaggcaatca

SEQ ID NO: 833197 - DNA, 25 bp, Homo sapien
ttggaaacagtttgtcgctgaccac

SEQ ID NO: 833198 - DNA, 25 bp, Homo sapien
acagtttgtcgctgaccactctttc

SEQ ID NO: 833199 - DNA, 25 bp, Homo sapien
gaaacagtttgtcgctgaccactct

SEQ ID NO: 833200 - DNA, 25 bp, Homo sapien
ggaaacagtttgtcgctgaccactc

SEQ ID NO: 833201 - DNA, 25 bp, Homo sapien
agttcgcaaacaccacacatttaga

SEQ ID NO: 833202 - DNA, 25 bp, Homo sapien
aggtccagaggcgacatatttaagt

SEQ ID NO: 833203 - DNA, 25 bp, Homo sapien
cttaaggaatggcaggtccagaggc

SEQ ID NO: 833204 - DNA, 25 bp, Homo sapien
aagataagtaatgcaactttgcagt

SEQ ID NO: 833205 - DNA, 25 bp, Homo sapien
tggagaaagagctgttactttgagg

SEQ ID NO: 833206 - DNA, 25 bp, Homo sapien
agttttgatgtggagtggagaaaga

SEQ ID NO: 833207 - DNA, 25 bp, Homo sapien
gagctgttactttgagggggagaaa

SEQ ID NO: 833208 - DNA, 25 bp, Homo sapien
ctggagttttgatgtggagtggaga

SEQ ID NO: 833209 - DNA, 25 bp, Homo sapien
tgatctttcttggagacgttcagaa

SEQ ID NO: 833210 - DNA, 25 bp, Homo sapien
gaagcgttaagatatgtttgccaaa

SEQ ID NO: 833211 - DNA, 25 bp, Homo sapien
gaagtctgaagttctgtgtcggagc

SEQ ID NO: 833212 - DNA, 25 bp, Homo sapien
tgcacgttatgacgtgggcacagca

SEQ ID NO: 833213 - DNA, 25 bp, Homo sapien
gcagcttgcttttctccgcggctca

SEQ ID NO: 833214 - DNA, 25 bp, Homo sapien
aagaggctccggaaggctctggaac

SEQ ID NO: 833215 - DNA, 25 bp, Homo sapien
ctcctccattcaagagacctgaata

SEQ ID NO: 833216 - DNA, 25 bp, Homo sapien
ggtgtctccggcatttcccaagtat

SEQ ID NO: 833217 - DNA, 25 bp, Homo sapien
acaccagaagtgactcttcgttgcg

SEQ ID NO: 833218 - DNA, 25 bp, Homo sapien
cagacagatcccgaagtggacacca

SEQ ID NO: 833219 - DNA, 25 bp, Homo sapien
tgactcttcgttgcgtccagagccc

SEQ ID NO: 833220 - DNA, 25 bp, Homo sapien
tcccgaagtggacaccagaagtgac

SEQ ID NO: 833221 - DNA, 25 bp, Homo sapien
tgatgcgctgaccaacaactggagt

SEQ ID NO: 833222 - DNA, 25 bp, Homo sapien
ggcagcttcctaatagcaaatggca

SEQ ID NO: 833223 - DNA, 25 bp, Homo sapien
gaaacaattctgcagcatctagact

SEQ ID NO: 833224 - DNA, 25 bp, Homo sapien
ggcattttaaatagtcgttgacctc

SEQ ID NO: 833225 - DNA, 25 bp, Homo sapien
ggttggtttcctttcgcagctatgg

SEQ ID NO: 833226 - DNA, 25 bp, Homo sapien
tagcctgcacaaatagctttgacag

SEQ ID NO: 833227 - DNA, 25 bp, Homo sapien
gcagctatggaacaatagcctgcac

SEQ ID NO: 833228 - DNA, 25 bp, Homo sapien
aaatgctgggcatgactctacctcg

SEQ ID NO: 833229 - DNA, 25 bp, Homo sapien
gaaggattgtgcatacaaattgtgg

SEQ ID NO: 833230 - DNA, 25 bp, Homo sapien
ttggacagggccatcacgttgagat

SEQ ID NO: 833231 - DNA, 25 bp, Homo sapien
aggattgtgcatacaaattgtggtc

SEQ ID NO: 833232 - DNA, 25 bp, Homo sapien
gggccatcacgttgagatcaagaag

SEQ ID NO: 833233 - DNA, 25 bp, Homo sapien
ctgaggttttgggatgtcctgtcct

SEQ ID NO: 833234 - DNA, 25 bp, Homo sapien
ttcagttatttgcttgttgatggat

SEQ ID NO: 833235 - DNA, 25 bp, Homo sapien
tgttgatggattttctgctggagta

SEQ ID NO: 833236 - DNA, 25 bp, Homo sapien
atgtcctgtcctcattttcagttat

SEQ ID NO: 833237 - DNA, 25 bp, Homo sapien
agtgcgggtcgtgtattttgtagaa

SEQ ID NO: 833238 - DNA, 25 bp, Homo sapien
ccttagaagagtgcgggtcgtgtat

SEQ ID NO: 833239 - DNA, 25 bp, Homo sapien
atgaccttgacaccttagaagagtg

SEQ ID NO: 833240 - DNA, 25 bp, Homo sapien
tgacaccttagaagagtgcgggtcg

SEQ ID NO: 833241 - DNA, 25 bp, Homo sapien
ctcatcgcattggcagagcagggaa

SEQ ID NO: 833242 - DNA, 25 bp, Homo sapien
cctcatcgcattggcagagcaggga

SEQ ID NO: 833243 - DNA, 25 bp, Homo sapien
ccctcatcgcattggcagagcaggg

SEQ ID NO: 833244 - DNA, 25 bp, Homo sapien
actgtggtggcctccttagagagct

SEQ ID NO: 833245 - DNA, 25 bp, Homo sapien
ccaatccctcctgcggactgtggtg

SEQ ID NO: 833246 - DNA, 25 bp, Homo sapien
cctatctgcatgagctatgggaccg

SEQ ID NO: 833247 - DNA, 25 bp, Homo sapien
gacactcgctcttcagagttgccat

SEQ ID NO: 833248 - DNA, 25 bp, Homo sapien
ggcttgtaaaccagatgcggtggat

SEQ ID NO: 833249 - DNA, 25 bp, Homo sapien
taagacagtgaaaccatctgacagg

SEQ ID NO: 833250 - DNA, 25 bp, Homo sapien
tgtaaaccagatgcggtggatgtga

SEQ ID NO: 833251 - DNA, 25 bp, Homo sapien
caaggacaggatatcagtgtttggc

SEQ ID NO: 833252 - DNA, 25 bp, Homo sapien
tcctcccaagacaggttcttatccc

SEQ ID NO: 833253 - DNA, 25 bp, Homo sapien
ggttcttatcccttgtccactgctt

SEQ ID NO: 833254 - DNA, 25 bp, Homo sapien
aggttcttatcccttgtccactgct

SEQ ID NO: 833255 - DNA, 25 bp, Homo sapien
caggttcttatcccttgtccactgc

SEQ ID NO: 833256 - DNA, 25 bp, Homo sapien
tcccctttatataggactggccagg

SEQ ID NO: 833257 - DNA, 25 bp, Homo sapien
agagcaaggccatcagtcaccactt

SEQ ID NO: 833258 - DNA, 25 bp, Homo sapien
tataggactggccaggtgtcatcag

SEQ ID NO: 833259 - DNA, 25 bp, Homo sapien
accacttcccctttatataggactg

SEQ ID NO: 833260 - DNA, 25 bp, Homo sapien
gaccccagagatagcaggttctctc

SEQ ID NO: 833261 - DNA, 25 bp, Homo sapien
ctcgagctgagcttatcagtctctt

SEQ ID NO: 833262 - DNA, 25 bp, Homo sapien
gcctcgagctgagcttatcagtctc

SEQ ID NO: 833263 - DNA, 25 bp, Homo sapien
ctggaccccagagatagcaggttct

SEQ ID NO: 833264 - DNA, 25 bp, Homo sapien
ggctaaatgcatatgggcttttaca

SEQ ID NO: 833265 - DNA, 25 bp, Homo sapien
caacaacttcgggtgttgacaccat

SEQ ID NO: 833266 - DNA, 25 bp, Homo sapien
ctctgagtgctaacaccatggctaa

SEQ ID NO: 833267 - DNA, 25 bp, Homo sapien
tttacaacaacttcgggtgttgaca

SEQ ID NO: 833268 - DNA, 25 bp, Homo sapien
cacctgcaaggtgcattgccatcat

SEQ ID NO: 833269 - DNA, 25 bp, Homo sapien
tgcacctgcaaggtgcattgccatc

SEQ ID NO: 833270 - DNA, 25 bp, Homo sapien
cctgcaaggtgcattgccatcatct

SEQ ID NO: 833271 - DNA, 25 bp, Homo sapien
ctgcaaggtgcattgccatcatctc

SEQ ID NO: 833272 - DNA, 25 bp, Homo sapien
tactcttctataggagacttcaaca

SEQ ID NO: 833273 - DNA, 25 bp, Homo sapien
ctactcttctataggagacttcaac

SEQ ID NO: 833274 - DNA, 25 bp, Homo sapien
ttctataggagacttcaacagatga

SEQ ID NO: 833275 - DNA, 25 bp, Homo sapien
cccacaaggtgggaatgaagatggc

SEQ ID NO: 833276 - DNA, 25 bp, Homo sapien
gcaaaagcagtagccaagttgtcag

SEQ ID NO: 833277 - DNA, 25 bp, Homo sapien
caagttgtcagcttatttgtgttgg

SEQ ID NO: 833278 - DNA, 25 bp, Homo sapien
tgtgttggttccctggacccagttc

SEQ ID NO: 833279 - DNA, 25 bp, Homo sapien
ggagattggcaccatctagtcccta

SEQ ID NO: 833280 - DNA, 25 bp, Homo sapien
tgtcagaccatagtgctcagagctc

SEQ ID NO: 833281 - DNA, 25 bp, Homo sapien
ggtgatcttccgaatccatcagcag

SEQ ID NO: 833282 - DNA, 25 bp, Homo sapien
gggcaggagcccaagcttctaggtc

SEQ ID NO: 833283 - DNA, 25 bp, Homo sapien
aagcaaggcatcagccacatggctt

SEQ ID NO: 833284 - DNA, 25 bp, Homo sapien
ccaggtccctccgagttgctcatgt

SEQ ID NO: 833285 - DNA, 25 bp, Homo sapien
tccctccgagttgctcatgtgctct

SEQ ID NO: 833286 - DNA, 25 bp, Homo sapien
agcaaggcatcagccacatggcttc

SEQ ID NO: 833287 - DNA, 25 bp, Homo sapien
tttgccactggctgcgcatgctgtc

SEQ ID NO: 833288 - DNA, 25 bp, Homo sapien
gagggctctgcgaccattatcccaa

SEQ ID NO: 833289 - DNA, 25 bp, Homo sapien
tgtggctgtggtatcgcatcggtac

SEQ ID NO: 833290 - DNA, 25 bp, Homo sapien
caactctttggaacttcagagggct

SEQ ID NO: 833291 - DNA, 25 bp, Homo sapien
ggctcacaccgggataggagctgta

SEQ ID NO: 833292 - DNA, 25 bp, Homo sapien
tggtcatcctgtcccggctcacacc

SEQ ID NO: 833293 - DNA, 25 bp, Homo sapien
ctgtcccggctcacaccgggatagg

SEQ ID NO: 833294 - DNA, 25 bp, Homo sapien
tcccggctcacaccgggataggagc

SEQ ID NO: 833295 - DNA, 25 bp, Homo sapien
gtgctggacattggataatgcttta

SEQ ID NO: 833296 - DNA, 25 bp, Homo sapien
tagtgccagtgatagtgctggacat

SEQ ID NO: 833297 - DNA, 25 bp, Homo sapien
tgctgaggtctgtaccagctgggat

SEQ ID NO: 833298 - DNA, 25 bp, Homo sapien
actgctgaggtctgtaccagctggg

SEQ ID NO: 833299 - DNA, 25 bp, Homo sapien
gagatgactaagagctaagaatgga

SEQ ID NO: 833300 - DNA, 25 bp, Homo sapien
aacatcagctgcgtgcaagtcgctg

SEQ ID NO: 833301 - DNA, 25 bp, Homo sapien
tgaaaggctcctaacgatggcgttc

SEQ ID NO: 833302 - DNA, 25 bp, Homo sapien
gatggcgttcatcgctataaagaga

SEQ ID NO: 833303 - DNA, 25 bp, Homo sapien
ctactccgaggacttgacgctccat

SEQ ID NO: 833304 - DNA, 25 bp, Homo sapien
tctactccgaggacttgacgctcca

SEQ ID NO: 833305 - DNA, 25 bp, Homo sapien
ctctactccgaggacttgacgctcc

SEQ ID NO: 833306 - DNA, 25 bp, Homo sapien
caggcagtaagtgacatatttcaag

SEQ ID NO: 833307 - DNA, 25 bp, Homo sapien
caagtgacaggcagtaagtgacata

SEQ ID NO: 833308 - DNA, 25 bp, Homo sapien
gtaagtgacatatttcaaggctgcc

SEQ ID NO: 833309 - DNA, 25 bp, Homo sapien
ctgcaagtgacaggcagtaagtgac

SEQ ID NO: 833310 - DNA, 25 bp, Homo sapien
gcaaaatctattgaagccatcaaga

SEQ ID NO: 833311 - DNA, 25 bp, Homo sapien
tcattttggcctggacagtgcaaaa

SEQ ID NO: 833312 - DNA, 25 bp, Homo sapien
cttgctgcatagattcccaattatc

SEQ ID NO: 833313 - DNA, 25 bp, Homo sapien
gccagcatcttgctgcatagattcc

SEQ ID NO: 833314 - DNA, 25 bp, Homo sapien
ggagatggagacctctcccaaacag

SEQ ID NO: 833315 - DNA, 25 bp, Homo sapien
ggtagtgcaccacaagcagatgtga

SEQ ID NO: 833316 - DNA, 25 bp, Homo sapien
ccgggctgatggcaaagtgagctcc

SEQ ID NO: 833317 - DNA, 25 bp, Homo sapien
tgtcctccgtctgcctctacagagg

SEQ ID NO: 833318 - DNA, 25 bp, Homo sapien
gacaggtgaagaagaggtttattgc

SEQ ID NO: 833319 - DNA, 25 bp, Homo sapien
cagcggggacaggtgaagaagaggt

SEQ ID NO: 833320 - DNA, 25 bp, Homo sapien
tgaagaagaggtttattgcctttcc

SEQ ID NO: 833321 - DNA, 25 bp, Homo sapien
ggcacagcggggacaggtgaagaag

SEQ ID NO: 833322 - DNA, 25 bp, Homo sapien
agagttctgatcaagctcggctttg

SEQ ID NO: 833323 - DNA, 25 bp, Homo sapien
caagctcggctttggcgaagagaaa

SEQ ID NO: 833324 - DNA, 25 bp, Homo sapien
tctgatcaagctcggctttggcgaa

SEQ ID NO: 833325 - DNA, 25 bp, Homo sapien
cggctttggcgaagagaaatgtcat

SEQ ID NO: 833326 - DNA, 25 bp, Homo sapien
ccattcctggcatttataatcttga

SEQ ID NO: 833327 - DNA, 25 bp, Homo sapien
catttataatcttgaccaatgggac

SEQ ID NO: 833328 - DNA, 25 bp, Homo sapien
agcgatgagcacttctctgcccctg

SEQ ID NO: 833329 - DNA, 25 bp, Homo sapien
ctggaaatcttcagcgatgagcact

SEQ ID NO: 833330 - DNA, 25 bp, Homo sapien
tcagggcgaatcctggtgaagtcta

SEQ ID NO: 833331 - DNA, 25 bp, Homo sapien
acaggatggtcctgtcagggcgaat

SEQ ID NO: 833332 - DNA, 25 bp, Homo sapien
tcttagcaactatggtcaggctagt

SEQ ID NO: 833333 - DNA, 25 bp, Homo sapien
caggctagttttagactctgcaaac

SEQ ID NO: 833334 - DNA, 25 bp, Homo sapien
tcttctgatctctttgtgccacatc

SEQ ID NO: 833335 - DNA, 25 bp, Homo sapien
tgatctctttgtgccacatcagctt

SEQ ID NO: 833336 - DNA, 25 bp, Homo sapien
tcatagctccaataactgaatgtca

SEQ ID NO: 833337 - DNA, 25 bp, Homo sapien
actggaggaattccctcttctgatc

SEQ ID NO: 833338 - DNA, 25 bp, Homo sapien
atgattgatatgcccttgagtttag

SEQ ID NO: 833339 - DNA, 25 bp, Homo sapien
ggatggtaaagctgatgattgatat

SEQ ID NO: 833340 - DNA, 25 bp, Homo sapien
tggatggtaaagctgatgattgata

SEQ ID NO: 833341 - DNA, 25 bp, Homo sapien
tatctggtatatgccgtggcaggag

SEQ ID NO: 833342 - DNA, 25 bp, Homo sapien
ccagccgtgaaatttcaggtatctg

SEQ ID NO: 833343 - DNA, 25 bp, Homo sapien
gtacatctttgaccagccgtgaaat

SEQ ID NO: 833344 - DNA, 25 bp, Homo sapien
gcaaggggcttctgagataaccaaa

SEQ ID NO: 833345 - DNA, 25 bp, Homo sapien
tgcttgttgcctggcacttgtttgc

SEQ ID NO: 833346 - DNA, 25 bp, Homo sapien
ggcacttgtttgcattacagacaga

SEQ ID NO: 833347 - DNA, 25 bp, Homo sapien
tcccccaagggttctgtgtggtcca

SEQ ID NO: 833348 - DNA, 25 bp, Homo sapien
ttctcagctgatgtatggtctgtgc

SEQ ID NO: 833349 - DNA, 25 bp, Homo sapien
agaggggtagccacattctgccacg

SEQ ID NO: 833350 - DNA, 25 bp, Homo sapien
gccaaaccagtgtatgtgaaccccc

SEQ ID NO: 833351 - DNA, 25 bp, Homo sapien
ccagtgtatgtgaacccccagtcag

SEQ ID NO: 833352 - DNA, 25 bp, Homo sapien
tctgccacgtagacagaagagaaga

SEQ ID NO: 833353 - DNA, 25 bp, Homo sapien
tatacgtggtcagtcctggatgtcc

SEQ ID NO: 833354 - DNA, 25 bp, Homo sapien
tagttatggtgtctcaaacctgtga

SEQ ID NO: 833355 - DNA, 25 bp, Homo sapien
ggaagttcatcttaaatccctccat

SEQ ID NO: 833356 - DNA, 25 bp, Homo sapien
ctgtgaagccgttccctgaacccgt

SEQ ID NO: 833357 - DNA, 25 bp, Homo sapien
ggagatagagatgacctcctggagc

SEQ ID NO: 833358 - DNA, 25 bp, Homo sapien
agggagatagagatgacctcctgga

SEQ ID NO: 833359 - DNA, 25 bp, Homo sapien
catttccagggagatagagatgacc

SEQ ID NO: 833360 - DNA, 25 bp, Homo sapien
ccatgggcatttccagggagataga

SEQ ID NO: 833361 - DNA, 25 bp, Homo sapien
tgagcgtagccattggctcaggtcc

SEQ ID NO: 833362 - DNA, 25 bp, Homo sapien
caggccttgaactagcgatgatgca

SEQ ID NO: 833363 - DNA, 25 bp, Homo sapien
aagtgccggtcgtaactcaaggtga

SEQ ID NO: 833364 - DNA, 25 bp, Homo sapien
gctgaaactttgagcgtagccattg

SEQ ID NO: 833365 - DNA, 25 bp, Homo sapien
gagtttgaacaatcccaaggcagcg

SEQ ID NO: 833366 - DNA, 25 bp, Homo sapien
cagtgatagacggaggtcctcggca

SEQ ID NO: 833367 - DNA, 25 bp, Homo sapien
cagaatgaagataaagcaccgtggg

SEQ ID NO: 833368 - DNA, 25 bp, Homo sapien
gctttgatggacaacaggcccagct

SEQ ID NO: 833369 - DNA, 25 bp, Homo sapien
ggaaccttctagcataaacctagtg

SEQ ID NO: 833370 - DNA, 25 bp, Homo sapien
caaagactgcttagaagtgggcaca

SEQ ID NO: 833371 - DNA, 25 bp, Homo sapien
gccccggccagtacagatggattta

SEQ ID NO: 833372 - DNA, 25 bp, Homo sapien
gatggatttatgtccagcgaccccg

SEQ ID NO: 833373 - DNA, 25 bp, Homo sapien
tggacctttgcacattcaagacagg

SEQ ID NO: 833374 - DNA, 25 bp, Homo sapien
gacctttgcacattcaagacaggag

SEQ ID NO: 833375 - DNA, 25 bp, Homo sapien
cctcttgacaccagaaggtggcatt

SEQ ID NO: 833376 - DNA, 25 bp, Homo sapien
gaaaaatccataagactctgctgtc

SEQ ID NO: 833377 - DNA, 25 bp, Homo sapien
gatcctccgggatgaggttccctgg

SEQ ID NO: 833378 - DNA, 25 bp, Homo sapien
caagcccaagtgaccatgcctaaag

SEQ ID NO: 833379 - DNA, 25 bp, Homo sapien
tccattagtaggagacctcaggctt

SEQ ID NO: 833380 - DNA, 25 bp, Homo sapien
cccctctgggtgagccagtcacagt

SEQ ID NO: 833381 - DNA, 25 bp, Homo sapien
gtaagtcctctttgattaactccat

SEQ ID NO: 833382 - DNA, 25 bp, Homo sapien
tctcgtggcacaaagctcatacctc

SEQ ID NO: 833383 - DNA, 25 bp, Homo sapien
gctcatacctcttcagtaagtcctc

SEQ ID NO: 833384 - DNA, 25 bp, Homo sapien
cttccaaatctcgtggcacaaagct

SEQ ID NO: 833385 - DNA, 25 bp, Homo sapien
ctctgcctggaactgaagctttgtg

SEQ ID NO: 833386 - DNA, 25 bp, Homo sapien
ggtcctggctgtgcccggactggtg

SEQ ID NO: 833387 - DNA, 25 bp, Homo sapien
tccccagtgccgcttagattgctca

SEQ ID NO: 833388 - DNA, 25 bp, Homo sapien
cccagttgatttcatgagctctgcc

SEQ ID NO: 833389 - DNA, 25 bp, Homo sapien
tcagtgtaactatgacaagtccttg

SEQ ID NO: 833390 - DNA, 25 bp, Homo sapien
cagtgtaactatgacaagtccttgc

SEQ ID NO: 833391 - DNA, 25 bp, Homo sapien
gacactgtgtgtggggctgacctaa

SEQ ID NO: 833392 - DNA, 25 bp, Homo sapien
ctggaagacactgtgtgtggggctg

SEQ ID NO: 833393 - DNA, 25 bp, Homo sapien
ggaagacactgtgtgtggggctgac

SEQ ID NO: 833394 - DNA, 25 bp, Homo sapien
aagacactgtgtgtggggctgacct

SEQ ID NO: 833395 - DNA, 25 bp, Homo sapien
ggctttacactgaatctctggcggt

SEQ ID NO: 833396 - DNA, 25 bp, Homo sapien
atctctggcggtctgcacctggcct

SEQ ID NO: 833397 - DNA, 25 bp, Homo sapien
tgagattttcatcttgaacatctgg

SEQ ID NO: 833398 - DNA, 25 bp, Homo sapien
aacatctggtattggccgattggca

SEQ ID NO: 833399 - DNA, 25 bp, Homo sapien
aaataagtcccttggctggcagtgc

SEQ ID NO: 833400 - DNA, 25 bp, Homo sapien
aatctttgctggcttggtccctcta

SEQ ID NO: 833401 - DNA, 25 bp, Homo sapien
tgtagcagctttagtgacggcaaaa

SEQ ID NO: 833402 - DNA, 25 bp, Homo sapien
cttcatgcgtctagaaagttccccg

SEQ ID NO: 833403 - DNA, 25 bp, Homo sapien
atttcagtggaaagcgatctctctc

SEQ ID NO: 833404 - DNA, 25 bp, Homo sapien
tcatgacgggtttgcagacaagtca

SEQ ID NO: 833405 - DNA, 25 bp, Homo sapien
aagagcctccctggtcattgtgtga

SEQ ID NO: 833406 - DNA, 25 bp, Homo sapien
gccttgatgggcttgtatctgagtc

SEQ ID NO: 833407 - DNA, 25 bp, Homo sapien
gaacaagtgctcaccatactctcag

SEQ ID NO: 833408 - DNA, 25 bp, Homo sapien
tgcctaagaaggaaagactgtacgt

SEQ ID NO: 833409 - DNA, 25 bp, Homo sapien
tatttctggcgtagtgaacaagtgc

SEQ ID NO: 833410 - DNA, 25 bp, Homo sapien
gactgtacgtggcattacccaaaca

SEQ ID NO: 833411 - DNA, 25 bp, Homo sapien
gtgttaccgtgagaacacccaccag

SEQ ID NO: 833412 - DNA, 25 bp, Homo sapien
ttttcaggcgatatgagtctcatcc

SEQ ID NO: 833413 - DNA, 25 bp, Homo sapien
tgatctgcaggccaaaattcttcag

SEQ ID NO: 833414 - DNA, 25 bp, Homo sapien
tctggccacccagtatatgcactgt

SEQ ID NO: 833415 - DNA, 25 bp, Homo sapien
tcttctctgtcgtgaaactctggtc

SEQ ID NO: 833416 - DNA, 25 bp, Homo sapien
ttttgacactgcagctgtagccctg

SEQ ID NO: 833417 - DNA, 25 bp, Homo sapien
tgtgttacaccagttctctccacgg

SEQ ID NO: 833418 - DNA, 25 bp, Homo sapien
ccaggtatggactgttccccaagct

SEQ ID NO: 833419 - DNA, 25 bp, Homo sapien
ttactgttgccagatgtgtcccttt

SEQ ID NO: 833420 - DNA, 25 bp, Homo sapien
ttttactgttgccagatgtgtccct

SEQ ID NO: 833421 - DNA, 25 bp, Homo sapien
gcctagtatctcacaggcactctaa

SEQ ID NO: 833422 - DNA, 25 bp, Homo sapien
agtgcctagtatctcacaggcactc

SEQ ID NO: 833423 - DNA, 25 bp, Homo sapien
ttccactcctccccatctcaccagc

SEQ ID NO: 833424 - DNA, 25 bp, Homo sapien
caaaacgtgtggaaatggcatcacc

SEQ ID NO: 833425 - DNA, 25 bp, Homo sapien
tgcatgtgggatttcatatctgtcg

SEQ ID NO: 833426 - DNA, 25 bp, Homo sapien
tttggtctttgtgtagagtttgcat

SEQ ID NO: 833427 - DNA, 25 bp, Homo sapien
cattaggaattgtggtgcccaggca

SEQ ID NO: 833428 - DNA, 25 bp, Homo sapien
agttatcatcctgagcagtacttaa

SEQ ID NO: 833429 - DNA, 25 bp, Homo sapien
cctagctcatattggagttgctggc

SEQ ID NO: 833430 - DNA, 25 bp, Homo sapien
tcatcctgagcagtacttaagtctt

SEQ ID NO: 833431 - DNA, 25 bp, Homo sapien
ttcagggtcttcagtcctagctcat

SEQ ID NO: 833432 - DNA, 25 bp, Homo sapien
catttggcccacaatggcagtaaga

SEQ ID NO: 833433 - DNA, 25 bp, Homo sapien
aatggcttggagtgatcaggcaagc

SEQ ID NO: 833434 - DNA, 25 bp, Homo sapien
aggcaagccgctgccataaaggagg

SEQ ID NO: 833435 - DNA, 25 bp, Homo sapien
gcagtaagatggtgcctgggaagcc

SEQ ID NO: 833436 - DNA, 25 bp, Homo sapien
tcatgtcccctctggaatttgcaaa

SEQ ID NO: 833437 - DNA, 25 bp, Homo sapien
caacttccatagtatatcatgtccc

SEQ ID NO: 833438 - DNA, 25 bp, Homo sapien
gtcccctctggaatttgcaaatgtg

SEQ ID NO: 833439 - DNA, 25 bp, Homo sapien
ctatgtcaacttccatagtatatca

SEQ ID NO: 833440 - DNA, 25 bp, Homo sapien
aactaagggattcgaagataatttg

SEQ ID NO: 833441 - DNA, 25 bp, Homo sapien
tgggaactaagggattcgaagataa

SEQ ID NO: 833442 - DNA, 25 bp, Homo sapien
gattcgaagataatttggactgttt

SEQ ID NO: 833443 - DNA, 25 bp, Homo sapien
taagggattcgaagataatttggac

SEQ ID NO: 833444 - DNA, 25 bp, Homo sapien
tcagcagggccctgtaagttaggct

SEQ ID NO: 833445 - DNA, 25 bp, Homo sapien
catgatggctgacctcctgcaagtc

SEQ ID NO: 833446 - DNA, 25 bp, Homo sapien
tttaaacagaacctcaacagcatca

SEQ ID NO: 833447 - DNA, 25 bp, Homo sapien
gcacaacgttgacatcatgatggct

SEQ ID NO: 833448 - DNA, 25 bp, Homo sapien
tactgctaacaatcgcccacctaag

SEQ ID NO: 833449 - DNA, 25 bp, Homo sapien
caccatgctgtactgctaacaatcg

SEQ ID NO: 833450 - DNA, 25 bp, Homo sapien
caatcgcccacctaagtgcggagtt

SEQ ID NO: 833451 - DNA, 25 bp, Homo sapien
catgttcttaaccaccatgctgtac

SEQ ID NO: 833452 - DNA, 25 bp, Homo sapien
aaatcagtttgagaatcatgaacag

SEQ ID NO: 833453 - DNA, 25 bp, Homo sapien
ttgagaatcatgaacagtagttctc

SEQ ID NO: 833454 - DNA, 25 bp, Homo sapien
gtttgagaatcatgaacagtagttc

SEQ ID NO: 833455 - DNA, 25 bp, Homo sapien
tcagtttgagaatcatgaacagtag

SEQ ID NO: 833456 - DNA, 25 bp, Homo sapien
caggattgacatgtggttggacttt

SEQ ID NO: 833457 - DNA, 25 bp, Homo sapien
gaaaagttgcatgccggaaagtaca

SEQ ID NO: 833458 - DNA, 25 bp, Homo sapien
tttaatctggcgtttctcatggacc

SEQ ID NO: 833459 - DNA, 25 bp, Homo sapien
agaaaatgccgctttgagaaaagaa

SEQ ID NO: 833460 - DNA, 25 bp, Homo sapien
caaccactttgttttgtacttgatt

SEQ ID NO: 833461 - DNA, 25 bp, Homo sapien
aatcaaccactttgttttgtacttg

SEQ ID NO: 833462 - DNA, 25 bp, Homo sapien
ggtacaataaatttgctcagtaaac

SEQ ID NO: 833463 - DNA, 25 bp, Homo sapien
aataaatttgctcagtaaacaccca

SEQ ID NO: 833464 - DNA, 25 bp, Homo sapien
tattgtaccttgaaggtacaggacc

SEQ ID NO: 833465 - DNA, 25 bp, Homo sapien
tacaggaccagacttgtttctgcca

SEQ ID NO: 833466 - DNA, 25 bp, Homo sapien
tgaacggacaggcaatcgtcttgtt

SEQ ID NO: 833467 - DNA, 25 bp, Homo sapien
ggagttgccaccatccttgaacgga

SEQ ID NO: 833468 - DNA, 25 bp, Homo sapien
catggagatgcagtttgaatccatc

SEQ ID NO: 833469 - DNA, 25 bp, Homo sapien
ttcttcaggttcatgcagagttgca

SEQ ID NO: 833470 - DNA, 25 bp, Homo sapien
gtactgaacttacatagtcccactg

SEQ ID NO: 833471 - DNA, 25 bp, Homo sapien
ccaggctctttggattacctaggga

SEQ ID NO: 833472 - DNA, 25 bp, Homo sapien
taaaaaatggacattgacccactta

SEQ ID NO: 833473 - DNA, 25 bp, Homo sapien
aaaatggacattgacccacttaaca

SEQ ID NO: 833474 - DNA, 25 bp, Homo sapien
taagcctagcacaaggccatttaca

SEQ ID NO: 833475 - DNA, 25 bp, Homo sapien
ggtcacactgagcaataaggcgacg

SEQ ID NO: 833476 - DNA, 25 bp, Homo sapien
gaatgcctgttgaaactaagcctag

SEQ ID NO: 833477 - DNA, 25 bp, Homo sapien
taaggcgacgttcagacacagcgtg

SEQ ID NO: 833478 - DNA, 25 bp, Homo sapien
tagataaatgagtgaacccccagga

SEQ ID NO: 833479 - DNA, 25 bp, Homo sapien
gaggcgtgtaatgagtaaatgatga

SEQ ID NO: 833480 - DNA, 25 bp, Homo sapien
tacttctatcaggaggaggcgtgta

SEQ ID NO: 833481 - DNA, 25 bp, Homo sapien
taaatgagtgaacccccaggaaatg

SEQ ID NO: 833482 - DNA, 25 bp, Homo sapien
tcatctttgcactgagtccccagtt

SEQ ID NO: 833483 - DNA, 25 bp, Homo sapien
caccttggggtgaattctccttcct

SEQ ID NO: 833484 - DNA, 25 bp, Homo sapien
aggaaaagcctttgttatctgaagg

SEQ ID NO: 833485 - DNA, 25 bp, Homo sapien
cctcttccccatgattaaaacagga

SEQ ID NO: 833486 - DNA, 25 bp, Homo sapien
ctcccacaacttcccgtcagctttg

SEQ ID NO: 833487 - DNA, 25 bp, Homo sapien
gatctgtataaacatctaataattt

SEQ ID NO: 833488 - DNA, 25 bp, Homo sapien
tcaaaaagatctgtataaacatcta

SEQ ID NO: 833489 - DNA, 25 bp, Homo sapien
cacaacttcccgtcagctttgctgc

SEQ ID NO: 833490 - DNA, 25 bp, Homo sapien
gaattgatttgctctatggcatcca

SEQ ID NO: 833491 - DNA, 25 bp, Homo sapien
ttgatttgctctatggcatccactt

SEQ ID NO: 833492 - DNA, 25 bp, Homo sapien
ggctcagcatgaagccctcttggct

SEQ ID NO: 833493 - DNA, 25 bp, Homo sapien
ttttggctcagcatgaagccctctt

SEQ ID NO: 833494 - DNA, 25 bp, Homo sapien
ttcagtagttgataacgccaatctg

SEQ ID NO: 833495 - DNA, 25 bp, Homo sapien
gttgataacgccaatctgtgctgca

SEQ ID NO: 833496 - DNA, 25 bp, Homo sapien
agtagttgataacgccaatctgtgc

SEQ ID NO: 833497 - DNA, 25 bp, Homo sapien
agttgataacgccaatctgtgctgc

SEQ ID NO: 833498 - DNA, 25 bp, Homo sapien
attctgtttgaagtggaagttgatg

SEQ ID NO: 833499 - DNA, 25 bp, Homo sapien
aaacacatgtaaacctcattctctg

SEQ ID NO: 833500 - DNA, 25 bp, Homo sapien
acacatgtaaacctcattctctgct

SEQ ID NO: 833501 - DNA, 25 bp, Homo sapien
aacacatgtaaacctcattctctgc

SEQ ID NO: 833502 - DNA, 25 bp, Homo sapien
cctgggtactactgaaattatctct

SEQ ID NO: 833503 - DNA, 25 bp, Homo sapien
tccgtatgatgtaattgtaccagct

SEQ ID NO: 833504 - DNA, 25 bp, Homo sapien
gagagctgatgtatgcctccggtct

SEQ ID NO: 833505 - DNA, 25 bp, Homo sapien
ctttcttgtggagtaagtggagccc

SEQ ID NO: 833506 - DNA, 25 bp, Homo sapien
gatcatgtcatcattactgccgtat

SEQ ID NO: 833507 - DNA, 25 bp, Homo sapien
tcatgtcatcattactgccgtattc

SEQ ID NO: 833508 - DNA, 25 bp, Homo sapien
tgatcatgtcatcattactgccgta

SEQ ID NO: 833509 - DNA, 25 bp, Homo sapien
atgtcatcattactgccgtattcat

SEQ ID NO: 833510 - DNA, 25 bp, Homo sapien
cctcctgcctaccaagctgggaaca

SEQ ID NO: 833511 - DNA, 25 bp, Homo sapien
tcctacctcctgcctaccaagctgg

SEQ ID NO: 833512 - DNA, 25 bp, Homo sapien
ctccttttccacgtcctacctcctg

SEQ ID NO: 833513 - DNA, 25 bp, Homo sapien
tacctcctgcctaccaagctgggaa

SEQ ID NO: 833514 - DNA, 25 bp, Homo sapien
tggccaagggttgtgatttagaaaa

SEQ ID NO: 833515 - DNA, 25 bp, Homo sapien
tgaagtttcctcattattggccaag

SEQ ID NO: 833516 - DNA, 25 bp, Homo sapien
gttttaatgctcagcacaatcatgg

SEQ ID NO: 833517 - DNA, 25 bp, Homo sapien
gaatgagtaggtttttcacatgatg

SEQ ID NO: 833518 - DNA, 25 bp, Homo sapien
caatttcttagaagagtaagtgtca

SEQ ID NO: 833519 - DNA, 25 bp, Homo sapien
catatagatagaagcacaaagtgca

SEQ ID NO: 833520 - DNA, 25 bp, Homo sapien
aacctggtacaatttcttagaagag

SEQ ID NO: 833521 - DNA, 25 bp, Homo sapien
ggcatagggatttgaaatgtgtctg

SEQ ID NO: 833522 - DNA, 25 bp, Homo sapien
cctgtttgcttgttgccggtgtcgg

SEQ ID NO: 833523 - DNA, 25 bp, Homo sapien
gagctgtcagtttggactgtggctt

SEQ ID NO: 833524 - DNA, 25 bp, Homo sapien
gtcagtgggttgtgtagacctcgca

SEQ ID NO: 833525 - DNA, 25 bp, Homo sapien
agagatctaaacgtcctgggaacct

SEQ ID NO: 833526 - DNA, 25 bp, Homo sapien
tgctcccaaacatgcactcaacttc

SEQ ID NO: 833527 - DNA, 25 bp, Homo sapien
cccctgctcccaaacatgcactcaa

SEQ ID NO: 833528 - DNA, 25 bp, Homo sapien
ctaccaagtgtcccctgctcccaaa

SEQ ID NO: 833529 - DNA, 25 bp, Homo sapien
cctgctcccaaacatgcactcaact

SEQ ID NO: 833530 - DNA, 25 bp, Homo sapien
ctaaggacggccatggtttattcct

SEQ ID NO: 833531 - DNA, 25 bp, Homo sapien
aggacggccatggtttattcctaca

SEQ ID NO: 833532 - DNA, 25 bp, Homo sapien
gaaccgctccaccactttcaatcca

SEQ ID NO: 833533 - DNA, 25 bp, Homo sapien
gacggccatggtttattcctacaac

SEQ ID NO: 833534 - DNA, 25 bp, Homo sapien
agtccgtcttttgttgagatgctga

SEQ ID NO: 833535 - DNA, 25 bp, Homo sapien
gaacattgtagagtccgtcttttgt

SEQ ID NO: 833536 - DNA, 25 bp, Homo sapien
tctctgaacattgtagagtccgtct

SEQ ID NO: 833537 - DNA, 25 bp, Homo sapien
ttgtagagtccgtcttttgttgaga

SEQ ID NO: 833538 - DNA, 25 bp, Homo sapien
ttctgggcaggattttgtggaatgt

SEQ ID NO: 833539 - DNA, 25 bp, Homo sapien
tctgggcaggattttgtggaatgtt

SEQ ID NO: 833540 - DNA, 25 bp, Homo sapien
tttctgggcaggattttgtggaatg

SEQ ID NO: 833541 - DNA, 25 bp, Homo sapien
atggcgagggacgtcgagtgcatac

SEQ ID NO: 833542 - DNA, 25 bp, Homo sapien
agatggcgagggacgtcgagtgcat

SEQ ID NO: 833543 - DNA, 25 bp, Homo sapien
cagatggcgagggacgtcgagtgca

SEQ ID NO: 833544 - DNA, 25 bp, Homo sapien
gatggcgagggacgtcgagtgcata

SEQ ID NO: 833545 - DNA, 25 bp, Homo sapien
tgtttgctttgttcacgaccatggt

SEQ ID NO: 833546 - DNA, 25 bp, Homo sapien
tcatgttcgtaatatgcacaccaat

SEQ ID NO: 833547 - DNA, 25 bp, Homo sapien
tttgttcacgaccatggttgtgggt

SEQ ID NO: 833548 - DNA, 25 bp, Homo sapien
caccaatggctgtagagtgtagagg

SEQ ID NO: 833549 - DNA, 25 bp, Homo sapien
ccctgcattgcaaatgatgtagaaa

SEQ ID NO: 833550 - DNA, 25 bp, Homo sapien
gcattgcaaatgatgtagaaagcta

SEQ ID NO: 833551 - DNA, 25 bp, Homo sapien
gcaaatgatgtagaaagctaggcaa

SEQ ID NO: 833552 - DNA, 25 bp, Homo sapien
tttttgccctgcattgcaaatgatg

SEQ ID NO: 833553 - DNA, 25 bp, Homo sapien
tgggagccccctgtgcatttggatt

SEQ ID NO: 833554 - DNA, 25 bp, Homo sapien
gaagcatccctcacgacaggtggga

SEQ ID NO: 833555 - DNA, 25 bp, Homo sapien
tttagcagggtattagggcttctgg

SEQ ID NO: 833556 - DNA, 25 bp, Homo sapien
gggcttctgggacaaagtatccaga

SEQ ID NO: 833557 - DNA, 25 bp, Homo sapien
ggaagtccatgcgtaatgaatcagt

SEQ ID NO: 833558 - DNA, 25 bp, Homo sapien
tctgaaagaccaacccatgaccagc

SEQ ID NO: 833559 - DNA, 25 bp, Homo sapien
ggtcccggttgcatgggcaaatagt

SEQ ID NO: 833560 - DNA, 25 bp, Homo sapien
ccagaatagaggtggtagaccaaga

SEQ ID NO: 833561 - DNA, 25 bp, Homo sapien
atttcttgattgtctaagacctgtc

SEQ ID NO: 833562 - DNA, 25 bp, Homo sapien
ctgaaatataggcaatccatttatt

SEQ ID NO: 833563 - DNA, 25 bp, Homo sapien
tttatttcttgattgtctaagacct

SEQ ID NO: 833564 - DNA, 25 bp, Homo sapien
gctctgaaatataggcaatccattt

SEQ ID NO: 833565 - DNA, 25 bp, Homo sapien
cttacttctgtgtaatgtttactca

SEQ ID NO: 833566 - DNA, 25 bp, Homo sapien
aacttacttctgtgtaatgtttact

SEQ ID NO: 833567 - DNA, 25 bp, Homo sapien
tgaacttacttctgtgtaatgttta

SEQ ID NO: 833568 - DNA, 25 bp, Homo sapien
acttctgtgtaatgtttactcaaag

SEQ ID NO: 833569 - DNA, 25 bp, Homo sapien
caattggcggtgtctttctctaaca

SEQ ID NO: 833570 - DNA, 25 bp, Homo sapien
cagcaattggcggtgtctttctcta

SEQ ID NO: 833571 - DNA, 25 bp, Homo sapien
acatcatagaataggtgctggccat

SEQ ID NO: 833572 - DNA, 25 bp, Homo sapien
ctttacagcaattggcggtgtcttt

SEQ ID NO: 833573 - DNA, 25 bp, Homo sapien
aggtccacagaagggtgggcttcat

SEQ ID NO: 833574 - DNA, 25 bp, Homo sapien
ctgcataaaggtccacagaagggtg

SEQ ID NO: 833575 - DNA, 25 bp, Homo sapien
ataaaggtccacagaagggtgggct

SEQ ID NO: 833576 - DNA, 25 bp, Homo sapien
aaggtccacagaagggtgggcttca

SEQ ID NO: 833577 - DNA, 25 bp, Homo sapien
cagttgttgccttgtgatgtcaata

SEQ ID NO: 833578 - DNA, 25 bp, Homo sapien
tgtgatgtcaataactgcgtgtgct

SEQ ID NO: 833579 - DNA, 25 bp, Homo sapien
ttgctttagggccagttggattgca

SEQ ID NO: 833580 - DNA, 25 bp, Homo sapien
ttggattgcagagcacgtaacagtg

SEQ ID NO: 833581 - DNA, 25 bp, Homo sapien
tctgtagtaaatggtccgtttcgaa

SEQ ID NO: 833582 - DNA, 25 bp, Homo sapien
tggtgagcacactccctcagcatcg

SEQ ID NO: 833583 - DNA, 25 bp, Homo sapien
tttcgaaagcctggtgagcacactc

SEQ ID NO: 833584 - DNA, 25 bp, Homo sapien
ttcttgaaaggctgctctgtagtaa

SEQ ID NO: 833585 - DNA, 25 bp, Homo sapien
taacgatagttaatcttgcagtccc

SEQ ID NO: 833586 - DNA, 25 bp, Homo sapien
tttgtgtagcatgtaggcagtatgc

SEQ ID NO: 833587 - DNA, 25 bp, Homo sapien
tagttaatcttgcagtcccttcccc

SEQ ID NO: 833588 - DNA, 25 bp, Homo sapien
tgccgaagatgtttttaacgatagt

SEQ ID NO: 833589 - DNA, 25 bp, Homo sapien
tttctcaggtcccttgataagtgca

SEQ ID NO: 833590 - DNA, 25 bp, Homo sapien
taaaggtttgcctggcgtccgcagt

SEQ ID NO: 833591 - DNA, 25 bp, Homo sapien
caggtcccttgataagtgcagtcat

SEQ ID NO: 833592 - DNA, 25 bp, Homo sapien
ttaaaggtttgcctggcgtccgcag

SEQ ID NO: 833593 - DNA, 25 bp, Homo sapien
tcaattctttattagcctggtctgc

SEQ ID NO: 833594 - DNA, 25 bp, Homo sapien
ccattgtcaattctttattagcctg

SEQ ID NO: 833595 - DNA, 25 bp, Homo sapien
gtgccattgtcaattctttattagc

SEQ ID NO: 833596 - DNA, 25 bp, Homo sapien
cttgtgccattgtcaattctttatt

SEQ ID NO: 833597 - DNA, 25 bp, Homo sapien
tggtgcggggccagccattccgtta

SEQ ID NO: 833598 - DNA, 25 bp, Homo sapien
gagtgagcagccgtagtgatgatac

SEQ ID NO: 833599 - DNA, 25 bp, Homo sapien
tagtgatgatactgctgccattctg

SEQ ID NO: 833600 - DNA, 25 bp, Homo sapien
cattccgttaggattggtttctgga

SEQ ID NO: 833601 - DNA, 25 bp, Homo sapien
ttcttggttggagcaaactgttaaa

SEQ ID NO: 833602 - DNA, 25 bp, Homo sapien
gcaaactgttaaacaggagtagccc

SEQ ID NO: 833603 - DNA, 25 bp, Homo sapien
tggagaatattcagagagagtccct

SEQ ID NO: 833604 - DNA, 25 bp, Homo sapien
ctggagaatattcagagagagtccc

SEQ ID NO: 833605 - DNA, 25 bp, Homo sapien
ccatagctttgccaatatagcctcg

SEQ ID NO: 833606 - DNA, 25 bp, Homo sapien
atagctttgccaatatagcctcgag

SEQ ID NO: 833607 - DNA, 25 bp, Homo sapien
gctgtgttaggaacactggagaaga

SEQ ID NO: 833608 - DNA, 25 bp, Homo sapien
cctgttggtaatgctgtgttaggaa

SEQ ID NO: 833609 - DNA, 25 bp, Homo sapien
ggaagccatctgttgatcctgttgg

SEQ ID NO: 833610 - DNA, 25 bp, Homo sapien
tgatcctgttggtaatgctgtgtta

SEQ ID NO: 833611 - DNA, 25 bp, Homo sapien
aattggaaagaccagatgtttcaaa

SEQ ID NO: 833612 - DNA, 25 bp, Homo sapien
gaatttgaatgacatgtattccaaa

SEQ ID NO: 833613 - DNA, 25 bp, Homo sapien
cttgaatttgaatgacatgtattcc

SEQ ID NO: 833614 - DNA, 25 bp, Homo sapien
ctaattggaaagaccagatgtttca

SEQ ID NO: 833615 - DNA, 25 bp, Homo sapien
gaagaatgccttcgccagtgtcatc

SEQ ID NO: 833616 - DNA, 25 bp, Homo sapien
taagcgcaagtactccaatgaggac

SEQ ID NO: 833617 - DNA, 25 bp, Homo sapien
ggtactcagagtatcgcttccctga

SEQ ID NO: 833618 - DNA, 25 bp, Homo sapien
cactttgataaggacggctggtccc

SEQ ID NO: 833619 - DNA, 25 bp, Homo sapien
cacaccacggaaagagaagggttca

SEQ ID NO: 833620 - DNA, 25 bp, Homo sapien
gaagatggcccagtttgatgctaaa

SEQ ID NO: 833621 - DNA, 25 bp, Homo sapien
ttctagagccttctttccgccgggc

SEQ ID NO: 833622 - DNA, 25 bp, Homo sapien
cgaacgagtgacattggctgacatc

SEQ ID NO: 833623 - DNA, 25 bp, Homo sapien
tcgcaaatttcctgccggcaaggtc

SEQ ID NO: 833624 - DNA, 25 bp, Homo sapien
aacgccattgcctactatgtgagca

SEQ ID NO: 833625 - DNA, 25 bp, Homo sapien
gattctgtgtgtttgagagcaacgc

SEQ ID NO: 833626 - DNA, 25 bp, Homo sapien
cggcaaggtcccagcatttgagggt

SEQ ID NO: 833627 - DNA, 25 bp, Homo sapien
ctctgttactcagcttaggtacagt

SEQ ID NO: 833628 - DNA, 25 bp, Homo sapien
tcctctgttactcagcttaggtaca

SEQ ID NO: 833629 - DNA, 25 bp, Homo sapien
tgttactcagcttaggtacagtggc

SEQ ID NO: 833630 - DNA, 25 bp, Homo sapien
ctgttactcagcttaggtacagtgg

SEQ ID NO: 833631 - DNA, 25 bp, Homo sapien
gactcttgccaagtgaactactttc

SEQ ID NO: 833632 - DNA, 25 bp, Homo sapien
attgactcttgccaagtgaactact

SEQ ID NO: 833633 - DNA, 25 bp, Homo sapien
tgactcttgccaagtgaactacttt

SEQ ID NO: 833634 - DNA, 25 bp, Homo sapien
acattgactcttgccaagtgaacta

SEQ ID NO: 833635 - DNA, 25 bp, Homo sapien
tcaatcgtagcagacccaaggaagc

SEQ ID NO: 833636 - DNA, 25 bp, Homo sapien
aatcgtagcagacccaaggaagccc

SEQ ID NO: 833637 - DNA, 25 bp, Homo sapien
atcgtagcagacccaaggaagccct

SEQ ID NO: 833638 - DNA, 25 bp, Homo sapien
gaagaggcactttcttgagtaccat

SEQ ID NO: 833639 - DNA, 25 bp, Homo sapien
acgtctctcgtagcacacgtcacgt

SEQ ID NO: 833640 - DNA, 25 bp, Homo sapien
ctgtgcacgtctctcgtagcacacg

SEQ ID NO: 833641 - DNA, 25 bp, Homo sapien
tgcacgtctctcgtagcacacgtca

SEQ ID NO: 833642 - DNA, 25 bp, Homo sapien
tctctcgtagcacacgtcacgtggt

SEQ ID NO: 833643 - DNA, 25 bp, Homo sapien
ctcttacatagccagcaaggtcctg

SEQ ID NO: 833644 - DNA, 25 bp, Homo sapien
taggatgcagcccaaatctcttaca

SEQ ID NO: 833645 - DNA, 25 bp, Homo sapien
tctgttagaaacttgagccctccac

SEQ ID NO: 833646 - DNA, 25 bp, Homo sapien
tgtacaagaccttgctggcagacag

SEQ ID NO: 833647 - DNA, 25 bp, Homo sapien
aaagcctggctacatgtgctgccca

SEQ ID NO: 833648 - DNA, 25 bp, Homo sapien
ttcaaagcctggctacatgtgctgc

SEQ ID NO: 833649 - DNA, 25 bp, Homo sapien
aaatcttccctaatcctctgttcca

SEQ ID NO: 833650 - DNA, 25 bp, Homo sapien
cttgtaaatcttccctaatcctctg

SEQ ID NO: 833651 - DNA, 25 bp, Homo sapien
catccgggtgagtgcccgtggacgg

SEQ ID NO: 833652 - DNA, 25 bp, Homo sapien
tcagcctgggtttctcccgtcctgg

SEQ ID NO: 833653 - DNA, 25 bp, Homo sapien
gccagtggttggactcggaccccaa

SEQ ID NO: 833654 - DNA, 25 bp, Homo sapien
cgtcctggaccctagcgtattaagg

SEQ ID NO: 833655 - DNA, 25 bp, Homo sapien
ttcagaaattcatgtgtcaaccttg

SEQ ID NO: 833656 - DNA, 25 bp, Homo sapien
cagaaattcatgtgtcaaccttgct

SEQ ID NO: 833657 - DNA, 25 bp, Homo sapien
tgttcaaatggtcctagatgtgttg

SEQ ID NO: 833658 - DNA, 25 bp, Homo sapien
caaatggtcctagatgtgttgccaa

SEQ ID NO: 833659 - DNA, 25 bp, Homo sapien
tctgtctgccttgtcctcccaaggt

SEQ ID NO: 833660 - DNA, 25 bp, Homo sapien
atctgtctgccttgtcctcccaagg

SEQ ID NO: 833661 - DNA, 25 bp, Homo sapien
gatctgtctgccttgtcctcccaag

SEQ ID NO: 833662 - DNA, 25 bp, Homo sapien
agaggtcatagaacaggcagttgcc

SEQ ID NO: 833663 - DNA, 25 bp, Homo sapien
aggtcatagaacaggcagttgcctc

SEQ ID NO: 833664 - DNA, 25 bp, Homo sapien
gaggtcatagaacaggcagttgcct

SEQ ID NO: 833665 - DNA, 25 bp, Homo sapien
tgaggagcctgtgtaactagcttac

SEQ ID NO: 833666 - DNA, 25 bp, Homo sapien
tgtggattgaggagcctgtgtaact

SEQ ID NO: 833667 - DNA, 25 bp, Homo sapien
gattgaggagcctgtgtaactagct

SEQ ID NO: 833668 - DNA, 25 bp, Homo sapien
ctaggtgtggattgaggagcctgtg

SEQ ID NO: 833669 - DNA, 25 bp, Homo sapien
cacagtgcagtagaaacttgaatcc

SEQ ID NO: 833670 - DNA, 25 bp, Homo sapien
acacagtgcagtagaaacttgaatc

SEQ ID NO: 833671 - DNA, 25 bp, Homo sapien
ctttgagctcccaggacggacaact

SEQ ID NO: 833672 - DNA, 25 bp, Homo sapien
gaggctgaaaatggaacccaaagat

SEQ ID NO: 833673 - DNA, 25 bp, Homo sapien
caggaagggtttgctttgagctccc

SEQ ID NO: 833674 - DNA, 25 bp, Homo sapien
ggacaactcggatccatcaacacca

SEQ ID NO: 833675 - DNA, 25 bp, Homo sapien
gaactggtgatttagaaggcctata

SEQ ID NO: 833676 - DNA, 25 bp, Homo sapien
cttccaactgtttgctgatagccat

SEQ ID NO: 833677 - DNA, 25 bp, Homo sapien
aagcagctccggatctcaattgtca

SEQ ID NO: 833678 - DNA, 25 bp, Homo sapien
gatagccatgattaacaattcaaag

SEQ ID NO: 833679 - DNA, 25 bp, Homo sapien
gcggggagagccgctaggctccaag

SEQ ID NO: 833680 - DNA, 25 bp, Homo sapien
ggggagagccgctaggctccaagga

SEQ ID NO: 833681 - DNA, 25 bp, Homo sapien
gggagagccgctaggctccaaggaa

SEQ ID NO: 833682 - DNA, 25 bp, Homo sapien
ggagagccgctaggctccaaggaag

SEQ ID NO: 833683 - DNA, 25 bp, Homo sapien
gactgtgcttctgtatttcccacca

SEQ ID NO: 833684 - DNA, 25 bp, Homo sapien
tgcttctgtatttcccaccagctgc

SEQ ID NO: 833685 - DNA, 25 bp, Homo sapien
cagccccgaggggtctttgcttttg

SEQ ID NO: 833686 - DNA, 25 bp, Homo sapien
acagagatgagcagccccgaggggt

SEQ ID NO: 833687 - DNA, 25 bp, Homo sapien
caataaacacacctttacacctggt

SEQ ID NO: 833688 - DNA, 25 bp, Homo sapien
tcaataaacacacctttacacctgg

SEQ ID NO: 833689 - DNA, 25 bp, Homo sapien
atcaataaacacacctttacacctg

SEQ ID NO: 833690 - DNA, 25 bp, Homo sapien
gaatcaataaacacacctttacacc

SEQ ID NO: 833691 - DNA, 25 bp, Homo sapien
cacaaatctgcaactcgtgacagga

SEQ ID NO: 833692 - DNA, 25 bp, Homo sapien
tgacaggaatctccggactccaagg

SEQ ID NO: 833693 - DNA, 25 bp, Homo sapien
cacgcacaggtggttgaaagtatcc

SEQ ID NO: 833694 - DNA, 25 bp, Homo sapien
gaaacaagacgcctttctcagtgag

SEQ ID NO: 833695 - DNA, 25 bp, Homo sapien
aaatgagattgctggacaatgttcc

SEQ ID NO: 833696 - DNA, 25 bp, Homo sapien
tggacaatgttcctatgactcgtct

SEQ ID NO: 833697 - DNA, 25 bp, Homo sapien
gatccatacgaaaacctgaaaaaca

SEQ ID NO: 833698 - DNA, 25 bp, Homo sapien
gactcgtctttacaaatttgtacaa

SEQ ID NO: 833699 - DNA, 25 bp, Homo sapien
aggtcacggtcacatttctcgtagg

SEQ ID NO: 833700 - DNA, 25 bp, Homo sapien
gtacaatcaattcatccaggtcacg

SEQ ID NO: 833701 - DNA, 25 bp, Homo sapien
tcgtaggcttcttcaaggcgaccct

SEQ ID NO: 833702 - DNA, 25 bp, Homo sapien
tatttcgggagttagtgatgcgctc

SEQ ID NO: 833703 - DNA, 25 bp, Homo sapien
gcactgttccagcttttgaggcact

SEQ ID NO: 833704 - DNA, 25 bp, Homo sapien
cagtttccgaagctcatcccgtttg

SEQ ID NO: 833705 - DNA, 25 bp, Homo sapien
aattccttcaatccacagtttccga

SEQ ID NO: 833706 - DNA, 25 bp, Homo sapien
caacaagttcaggacatgcttatgc

SEQ ID NO: 833707 - DNA, 25 bp, Homo sapien
tagctaatgatttgtgaactctgac

SEQ ID NO: 833708 - DNA, 25 bp, Homo sapien
ctctgactgtatgagctacactatg

SEQ ID NO: 833709 - DNA, 25 bp, Homo sapien
ggtattacagtcttccacatagtca

SEQ ID NO: 833710 - DNA, 25 bp, Homo sapien
cacatagtcacccatttagctaatg

SEQ ID NO: 833711 - DNA, 25 bp, Homo sapien
tatcacaaagctacaggctacaata

SEQ ID NO: 833712 - DNA, 25 bp, Homo sapien
caatgtgacggatacaggcttcttg

SEQ ID NO: 833713 - DNA, 25 bp, Homo sapien
ctctgatttcaatgtgacggataca

SEQ ID NO: 833714 - DNA, 25 bp, Homo sapien
ggctacaatattaatcaagtctctg

SEQ ID NO: 833715 - DNA, 25 bp, Homo sapien
cctccagcggttttagggcctgctc

SEQ ID NO: 833716 - DNA, 25 bp, Homo sapien
gcactgctggaaggcaacctccagc

SEQ ID NO: 833717 - DNA, 25 bp, Homo sapien
tccagcggttttagggcctgctccc

SEQ ID NO: 833718 - DNA, 25 bp, Homo sapien
tggaaggcaacctccagcggtttta

SEQ ID NO: 833719 - DNA, 25 bp, Homo sapien
ttgcaactgcccctgctatgagagc

SEQ ID NO: 833720 - DNA, 25 bp, Homo sapien
cattttcacgctgacttgcaactgc

SEQ ID NO: 833721 - DNA, 25 bp, Homo sapien
ttcattttcacgctgacttgcaact

SEQ ID NO: 833722 - DNA, 25 bp, Homo sapien
ttttcacgctgacttgcaactgccc

SEQ ID NO: 833723 - DNA, 25 bp, Homo sapien
ggccctccaaagactcaactgctga

SEQ ID NO: 833724 - DNA, 25 bp, Homo sapien
tgctgtgaagctctagtcgaaggtc

SEQ ID NO: 833725 - DNA, 25 bp, Homo sapien
tgcacaactcggctagtcgatttga

SEQ ID NO: 833726 - DNA, 25 bp, Homo sapien
tacaggtgccggtgtagttcatcta

SEQ ID NO: 833727 - DNA, 25 bp, Homo sapien
actgccacaagacacttatagcaaa

SEQ ID NO: 833728 - DNA, 25 bp, Homo sapien
tgccacaagacacttatagcaaaga

SEQ ID NO: 833729 - DNA, 25 bp, Homo sapien
gccacaagacacttatagcaaagag

SEQ ID NO: 833730 - DNA, 25 bp, Homo sapien
ccacaagacacttatagcaaagagc

SEQ ID NO: 833731 - DNA, 25 bp, Homo sapien
gaagcatcacaagcaaatttggcgt

SEQ ID NO: 833732 - DNA, 25 bp, Homo sapien
tgacagataccctattcagagctag

SEQ ID NO: 833733 - DNA, 25 bp, Homo sapien
cactctctgctgaggtactgacaga

SEQ ID NO: 833734 - DNA, 25 bp, Homo sapien
tatcagcaggcattgtcgaaagaat

SEQ ID NO: 833735 - DNA, 25 bp, Homo sapien
tggcaaaagccaaggccccaacaaa

SEQ ID NO: 833736 - DNA, 25 bp, Homo sapien
atgatggcaaaagccaaggccccaa

SEQ ID NO: 833737 - DNA, 25 bp, Homo sapien
ctaatgatggcaaaagccaaggccc

SEQ ID NO: 833738 - DNA, 25 bp, Homo sapien
gatggcaaaagccaaggccccaaca

SEQ ID NO: 833739 - DNA, 25 bp, Homo sapien
gaaaggccacactcaacagcataag

SEQ ID NO: 833740 - DNA, 25 bp, Homo sapien
gaagcccctgcttgtgtcatgtacc

SEQ ID NO: 833741 - DNA, 25 bp, Homo sapien
caatggcagtggcacgaaaggccac

SEQ ID NO: 833742 - DNA, 25 bp, Homo sapien
tgggaccgccagcaaggcaatggca

SEQ ID NO: 833743 - DNA, 25 bp, Homo sapien
tagtacacacttctatgaacacaga

SEQ ID NO: 833744 - DNA, 25 bp, Homo sapien
tactgcctgccacacctaatgatga

SEQ ID NO: 833745 - DNA, 25 bp, Homo sapien
aaaaagacacaggtttatggtactg

SEQ ID NO: 833746 - DNA, 25 bp, Homo sapien
acagttgttactatgtgtgtgcaca

SEQ ID NO: 833747 - DNA, 25 bp, Homo sapien
gaccttgctccaaagtcactgtcta

SEQ ID NO: 833748 - DNA, 25 bp, Homo sapien
gctttccagagcatcgacaataccg

SEQ ID NO: 833749 - DNA, 25 bp, Homo sapien
ggcaaacacctggttcttattagac

SEQ ID NO: 833750 - DNA, 25 bp, Homo sapien
cagagcatcgacaataccgaaaaga

SEQ ID NO: 833751 - DNA, 25 bp, Homo sapien
tttgtaacatcaatcagaggaacag

SEQ ID NO: 833752 - DNA, 25 bp, Homo sapien
gaggagtagggaggtttgtaacatc

SEQ ID NO: 833753 - DNA, 25 bp, Homo sapien
gaggtatcaaggaattttcgaggag

SEQ ID NO: 833754 - DNA, 25 bp, Homo sapien
tcaaggaattttcgaggagtaggga

SEQ ID NO: 833755 - DNA, 25 bp, Homo sapien
cagtttcgccaagcccttaatgagg

SEQ ID NO: 833756 - DNA, 25 bp, Homo sapien
tggttggttctccacagtaacgttc

SEQ ID NO: 833757 - DNA, 25 bp, Homo sapien
tgctccaagcgctctatgattgcct

SEQ ID NO: 833758 - DNA, 25 bp, Homo sapien
ctgatagccactgtctgccacctgg

SEQ ID NO: 833759 - DNA, 25 bp, Homo sapien
ttccatattcttgacaagataccac

SEQ ID NO: 833760 - DNA, 25 bp, Homo sapien
gacaagataccacatctttgagaag

SEQ ID NO: 833761 - DNA, 25 bp, Homo sapien
cttccatattcttgacaagatacca

SEQ ID NO: 833762 - DNA, 25 bp, Homo sapien
actgctaggataaaggttttcacca

SEQ ID NO: 833763 - DNA, 25 bp, Homo sapien
atactgctaggataaaggttttcac

SEQ ID NO: 833764 - DNA, 25 bp, Homo sapien
ctgctaggataaaggttttcaccac

SEQ ID NO: 833765 - DNA, 25 bp, Homo sapien
tactgctaggataaaggttttcacc

SEQ ID NO: 833766 - DNA, 25 bp, Homo sapien
ttaaacttgtcaaacagtaactcca

SEQ ID NO: 833767 - DNA, 25 bp, Homo sapien
tgtgcagcggctacagcattaaact

SEQ ID NO: 833768 - DNA, 25 bp, Homo sapien
cacagagtgtgcagcggctacagca

SEQ ID NO: 833769 - DNA, 25 bp, Homo sapien
caaacagtaactccagcagttctag

SEQ ID NO: 833770 - DNA, 25 bp, Homo sapien
tcatacagtttgatatcttcctgct

SEQ ID NO: 833771 - DNA, 25 bp, Homo sapien
ttcctgctgagtcagtggagtcact

SEQ ID NO: 833772 - DNA, 25 bp, Homo sapien
cctgctgagtcagtggagtcactac

SEQ ID NO: 833773 - DNA, 25 bp, Homo sapien
atcatacagtttgatatcttcctgc

SEQ ID NO: 833774 - DNA, 25 bp, Homo sapien
ggatcttcacccatacatctgccat

SEQ ID NO: 833775 - DNA, 25 bp, Homo sapien
tggatcttcacccatacatctgcca

SEQ ID NO: 833776 - DNA, 25 bp, Homo sapien
tcttggatcttcacccatacatctg

SEQ ID NO: 833777 - DNA, 25 bp, Homo sapien
cttggatcttcacccatacatctgc

SEQ ID NO: 833778 - DNA, 25 bp, Homo sapien
ctctgaatcaagatgacaccctttg

SEQ ID NO: 833779 - DNA, 25 bp, Homo sapien
tcatctctcaaaataagctcttgtt

SEQ ID NO: 833780 - DNA, 25 bp, Homo sapien
gctcttgttctgtcatataacccaa

SEQ ID NO: 833781 - DNA, 25 bp, Homo sapien
caaaataagctcttgttctgtcata

SEQ ID NO: 833782 - DNA, 25 bp, Homo sapien
taagctcttgttctgtcatataacc

SEQ ID NO: 833783 - DNA, 25 bp, Homo sapien
catcgcgcatggctgaaaaactttc

SEQ ID NO: 833784 - DNA, 25 bp, Homo sapien
gcttcatatctgaccaaagggctaa

SEQ ID NO: 833785 - DNA, 25 bp, Homo sapien
tgtactacaggcatggcaattgaca

SEQ ID NO: 833786 - DNA, 25 bp, Homo sapien
tgccaagccttgtggtgtacacagc

SEQ ID NO: 833787 - DNA, 25 bp, Homo sapien
cctccaaggatcaactcatcatcat

SEQ ID NO: 833788 - DNA, 25 bp, Homo sapien
aatcctccaaggatcaactcatcat

SEQ ID NO: 833789 - DNA, 25 bp, Homo sapien
aaatcctccaaggatcaactcatca

SEQ ID NO: 833790 - DNA, 25 bp, Homo sapien
tagcagcatgagtctgacggacact

SEQ ID NO: 833791 - DNA, 25 bp, Homo sapien
tctctaggccaagacgtaatgaggc

SEQ ID NO: 833792 - DNA, 25 bp, Homo sapien
cacacttaaaggagcggtagcagca

SEQ ID NO: 833793 - DNA, 25 bp, Homo sapien
tatggcctcttggatcctagcaaca

SEQ ID NO: 833794 - DNA, 25 bp, Homo sapien
aggaacagcaactgccagagagctc

SEQ ID NO: 833795 - DNA, 25 bp, Homo sapien
gaagcatgctctcgaaggaacagca

SEQ ID NO: 833796 - DNA, 25 bp, Homo sapien
ctcagtggagtgacaaacaggcaaa

SEQ ID NO: 833797 - DNA, 25 bp, Homo sapien
agagagctctttgtgctccctgctg

SEQ ID NO: 833798 - DNA, 25 bp, Homo sapien
tctagtacttgtgttcagactgaac

SEQ ID NO: 833799 - DNA, 25 bp, Homo sapien
agccttccaaggtcttctctagtac

SEQ ID NO: 833800 - DNA, 25 bp, Homo sapien
gactgaacatttgtccatgggacca

SEQ ID NO: 833801 - DNA, 25 bp, Homo sapien
ccccaggtctttatagtgctgttca

SEQ ID NO: 833802 - DNA, 25 bp, Homo sapien
ggagcaggaacttatagattaaaag

SEQ ID NO: 833803 - DNA, 25 bp, Homo sapien
ttgagacaactggaaatgtgaacac

SEQ ID NO: 833804 - DNA, 25 bp, Homo sapien
gagcaggaacttatagattaaaaga

SEQ ID NO: 833805 - DNA, 25 bp, Homo sapien
atttgagacaactggaaatgtgaac

SEQ ID NO: 833806 - DNA, 25 bp, Homo sapien
ccagccgactctccatttcttatag

SEQ ID NO: 833807 - DNA, 25 bp, Homo sapien
gccgactctccatttcttatagtta

SEQ ID NO: 833808 - DNA, 25 bp, Homo sapien
agccgactctccatttcttatagtt

SEQ ID NO: 833809 - DNA, 25 bp, Homo sapien
cagccgactctccatttcttatagt

SEQ ID NO: 833810 - DNA, 25 bp, Homo sapien
cagcataaggagtcaagctcttctc

SEQ ID NO: 833811 - DNA, 25 bp, Homo sapien
gaagagacaggcaccataaataagc

SEQ ID NO: 833812 - DNA, 25 bp, Homo sapien
taagtgcatactgccaaactctgtg

SEQ ID NO: 833813 - DNA, 25 bp, Homo sapien
gtaagaaatggtcctcaagagagcc

SEQ ID NO: 833814 - DNA, 25 bp, Homo sapien
tctccaaaggcttaaagactagttg

SEQ ID NO: 833815 - DNA, 25 bp, Homo sapien
tctcagtactttcataacaatcaca

SEQ ID NO: 833816 - DNA, 25 bp, Homo sapien
tgtgaacttcttgtgccgtatttgc

SEQ ID NO: 833817 - DNA, 25 bp, Homo sapien
cacttgctcctttgatactgtgaac

SEQ ID NO: 833818 - DNA, 25 bp, Homo sapien
cctccagaatcacatagggcctaaa

SEQ ID NO: 833819 - DNA, 25 bp, Homo sapien
taaactagattcagtgatgcgacac

SEQ ID NO: 833820 - DNA, 25 bp, Homo sapien
ggacagagtgagcagcccatcaaat

SEQ ID NO: 833821 - DNA, 25 bp, Homo sapien
ttaactaacatcaggtgggcagagg

SEQ ID NO: 833822 - DNA, 25 bp, Homo sapien
cacagtctttggtcaatcaggtgac

SEQ ID NO: 833823 - DNA, 25 bp, Homo sapien
ctggtattacgggaatgaacccagt

SEQ ID NO: 833824 - DNA, 25 bp, Homo sapien
aaactgtccttgctaagaaagacca

SEQ ID NO: 833825 - DNA, 25 bp, Homo sapien
caggacaactaaaatcactgagagg

SEQ ID NO: 833826 - DNA, 25 bp, Homo sapien
tagcacaaaaaccactacaaagagg

SEQ ID NO: 833827 - DNA, 25 bp, Homo sapien
tatggcctttcaaagtatcagacag

SEQ ID NO: 833828 - DNA, 25 bp, Homo sapien
tcttgttatgaatgctagcctcagc

SEQ ID NO: 833829 - DNA, 25 bp, Homo sapien
ggacaaggtgcctaaacttcaggga

SEQ ID NO: 833830 - DNA, 25 bp, Homo sapien
tcagcaatggaccatgaagttcagg

SEQ ID NO: 833831 - DNA, 25 bp, Homo sapien
tcaacttcattacgggtccggtcta

SEQ ID NO: 833832 - DNA, 25 bp, Homo sapien
gtccggtctataaacctatccctca

SEQ ID NO: 833833 - DNA, 25 bp, Homo sapien
gcttttgcacaatgattctcaactt

SEQ ID NO: 833834 - DNA, 25 bp, Homo sapien
cagcttttgcacaatgattctcaac

SEQ ID NO: 833835 - DNA, 25 bp, Homo sapien
gcaaccaaagcatcgattaaccagg

SEQ ID NO: 833836 - DNA, 25 bp, Homo sapien
tacagacaggtttgtggagatagcc

SEQ ID NO: 833837 - DNA, 25 bp, Homo sapien
taaaaggcacctcatttcagtccgg

SEQ ID NO: 833838 - DNA, 25 bp, Homo sapien
tttagggaggtctcatgcacacagc

SEQ ID NO: 833839 - DNA, 25 bp, Homo sapien
gcctggaccactaagaatagcagaa

SEQ ID NO: 833840 - DNA, 25 bp, Homo sapien
cctggaccactaagaatagcagaaa

SEQ ID NO: 833841 - DNA, 25 bp, Homo sapien
cagcctggaccactaagaatagcag

SEQ ID NO: 833842 - DNA, 25 bp, Homo sapien
gcagcctggaccactaagaatagca

SEQ ID NO: 833843 - DNA, 25 bp, Homo sapien
tctttcaaaaacaagccggctgatg

SEQ ID NO: 833844 - DNA, 25 bp, Homo sapien
tatcgttagtttgcatggatgccaa

SEQ ID NO: 833845 - DNA, 25 bp, Homo sapien
aaggcagtacaaggaaggcccacgc

SEQ ID NO: 833846 - DNA, 25 bp, Homo sapien
tctagatcttctcagtcagagggca

SEQ ID NO: 833847 - DNA, 25 bp, Homo sapien
cacttcatgcctcgagggtgtttca

SEQ ID NO: 833848 - DNA, 25 bp, Homo sapien
ataggctcaaataccaccccacaag

SEQ ID NO: 833849 - DNA, 25 bp, Homo sapien
tgtggtcaaaatccatctactccca

SEQ ID NO: 833850 - DNA, 25 bp, Homo sapien
ttaagcacagcataccatcactact

SEQ ID NO: 833851 - DNA, 25 bp, Homo sapien
gcagagaggcactttgtattgtaga

SEQ ID NO: 833852 - DNA, 25 bp, Homo sapien
ttcacaaacacccaagtcctgcaga

SEQ ID NO: 833853 - DNA, 25 bp, Homo sapien
tcagtacaagcctcctattggactc

SEQ ID NO: 833854 - DNA, 25 bp, Homo sapien
ctctttattacaaatgggaccacca

SEQ ID NO: 833855 - DNA, 25 bp, Homo sapien
tctgtactgcgcaagagactttacc

SEQ ID NO: 833856 - DNA, 25 bp, Homo sapien
tgtgcctgagatcctggacaaatgc

SEQ ID NO: 833857 - DNA, 25 bp, Homo sapien
taccaagaggcaggtgtgtcaactg

SEQ ID NO: 833858 - DNA, 25 bp, Homo sapien
catccaaggctatccagttgctctc

SEQ ID NO: 833859 - DNA, 25 bp, Homo sapien
tgaagtgacaatagactcagggaca

SEQ ID NO: 833860 - DNA, 25 bp, Homo sapien
tgacaatagactcagggacaactat

SEQ ID NO: 833861 - DNA, 25 bp, Homo sapien
aatagactcagggacaactattagg

SEQ ID NO: 833862 - DNA, 25 bp, Homo sapien
gactcagggacaactattaggcatt

SEQ ID NO: 833863 - DNA, 25 bp, Homo sapien
taacgcagctcctggtaaggcaatg

SEQ ID NO: 833864 - DNA, 25 bp, Homo sapien
taacaacacaccagataacgcagct

SEQ ID NO: 833865 - DNA, 25 bp, Homo sapien
cacattagaattaccaggagaggtt

SEQ ID NO: 833866 - DNA, 25 bp, Homo sapien
ttgtagtaactgtccaggcctctga

SEQ ID NO: 833867 - DNA, 25 bp, Homo sapien
tgagcaaccgttcacgaccacatag

SEQ ID NO: 833868 - DNA, 25 bp, Homo sapien
ctccaaaccaaagtgagcaaccgtt

SEQ ID NO: 833869 - DNA, 25 bp, Homo sapien
caaagtgagcaaccgttcacgacca

SEQ ID NO: 833870 - DNA, 25 bp, Homo sapien
tcacgaccacatagttgctggcctg

SEQ ID NO: 833871 - DNA, 25 bp, Homo sapien
cagtgctggcatagcttagttgagc

SEQ ID NO: 833872 - DNA, 25 bp, Homo sapien
ggcaaaaaaggctgcaaactctcgt

SEQ ID NO: 833873 - DNA, 25 bp, Homo sapien
tcagaggccgtacgagtatttttca

SEQ ID NO: 833874 - DNA, 25 bp, Homo sapien
tgatggttcagaggccgtacgagta

SEQ ID NO: 833875 - DNA, 25 bp, Homo sapien
ctctgttctcgcagataggcgctca

SEQ ID NO: 833876 - DNA, 25 bp, Homo sapien
tactgatggcatgggaggacgattc

SEQ ID NO: 833877 - DNA, 25 bp, Homo sapien
tccgactatagagctcccttctctg

SEQ ID NO: 833878 - DNA, 25 bp, Homo sapien
gcagttctccactccgactatagag

SEQ ID NO: 833879 - DNA, 25 bp, Homo sapien
cactaagtgtttgttaccttgaaag

SEQ ID NO: 833880 - DNA, 25 bp, Homo sapien
ccttgaaaggatcgtgtgaatgcag

SEQ ID NO: 833881 - DNA, 25 bp, Homo sapien
caggacacaaactcatgtgtaataa

SEQ ID NO: 833882 - DNA, 25 bp, Homo sapien
gacacaaactcatgtgtaataaagg

SEQ ID NO: 833883 - DNA, 25 bp, Homo sapien
tagcaggtctacaagtcctatggcc

SEQ ID NO: 833884 - DNA, 25 bp, Homo sapien
tctgtttaagcaagacgagcctggc

SEQ ID NO: 833885 - DNA, 25 bp, Homo sapien
aattagaagtaacagtggcagtcgc

SEQ ID NO: 833886 - DNA, 25 bp, Homo sapien
ggcagtcgcagaagaccaacattct

SEQ ID NO: 833887 - DNA, 25 bp, Homo sapien
caataatgtatgttctgttatcatc

SEQ ID NO: 833888 - DNA, 25 bp, Homo sapien
cctgcaataatgtatgttctgttat

SEQ ID NO: 833889 - DNA, 25 bp, Homo sapien
tgcaataatgtatgttctgttatca

SEQ ID NO: 833890 - DNA, 25 bp, Homo sapien
ctcctgcaataatgtatgttctgtt

SEQ ID NO: 833891 - DNA, 25 bp, Homo sapien
ttaatgttactttgattgtctttct

SEQ ID NO: 833892 - DNA, 25 bp, Homo sapien
tctggtggatttcttcgccgctacc

SEQ ID NO: 833893 - DNA, 25 bp, Homo sapien
tttctggtggatttcttcgccgcta

SEQ ID NO: 833894 - DNA, 25 bp, Homo sapien
actttgattgtctttctggtggatt

SEQ ID NO: 833895 - DNA, 25 bp, Homo sapien
gggtgttgttagactgagtcacatt

SEQ ID NO: 833896 - DNA, 25 bp, Homo sapien
tcttgggtgttgttagactgagtca

SEQ ID NO: 833897 - DNA, 25 bp, Homo sapien
catttctaattgtatgataaattga

SEQ ID NO: 833898 - DNA, 25 bp, Homo sapien
ttgggtgttgttagactgagtcaca

SEQ ID NO: 833899 - DNA, 25 bp, Homo sapien
caaaagtattaagtagccccgagat

SEQ ID NO: 833900 - DNA, 25 bp, Homo sapien
tcaggttaggccagtataagagctt

SEQ ID NO: 833901 - DNA, 25 bp, Homo sapien
aagtattcacaatcccagtcaccga

SEQ ID NO: 833902 - DNA, 25 bp, Homo sapien
cagtcaccgacaacccattagagag

SEQ ID NO: 833903 - DNA, 25 bp, Homo sapien
ccactatactcaactaattttatat

SEQ ID NO: 833904 - DNA, 25 bp, Homo sapien
gccactatactcaactaattttata

SEQ ID NO: 833905 - DNA, 25 bp, Homo sapien
caagattcgtttttgtcatcagaga

SEQ ID NO: 833906 - DNA, 25 bp, Homo sapien
tattatcacacatatctctaagagg

SEQ ID NO: 833907 - DNA, 25 bp, Homo sapien
ttcaaatggaacaagtcacctatac

SEQ ID NO: 833908 - DNA, 25 bp, Homo sapien
cctagactaggccttacattctgaa

SEQ ID NO: 833909 - DNA, 25 bp, Homo sapien
agtgcagctaatccgctaaaccaga

SEQ ID NO: 833910 - DNA, 25 bp, Homo sapien
gacagtgcagctaatccgctaaacc

SEQ ID NO: 833911 - DNA, 25 bp, Homo sapien
gcagctaatccgctaaaccagaaaa

SEQ ID NO: 833912 - DNA, 25 bp, Homo sapien
agacagtgcagctaatccgctaaac

SEQ ID NO: 833913 - DNA, 25 bp, Homo sapien
agtgtctgaccctggtttgataatc

SEQ ID NO: 833914 - DNA, 25 bp, Homo sapien
cgagtgttaattgcggccctgctcc

SEQ ID NO: 833915 - DNA, 25 bp, Homo sapien
aattctcagtcataaatcgccctgg

SEQ ID NO: 833916 - DNA, 25 bp, Homo sapien
gaaatttaagcttcctcgagtgtta

SEQ ID NO: 833917 - DNA, 25 bp, Homo sapien
gcccggcccctctgcttatatttca

SEQ ID NO: 833918 - DNA, 25 bp, Homo sapien
ggcccctctgcttatatttcaatgg

SEQ ID NO: 833919 - DNA, 25 bp, Homo sapien
aatggttgcacccaactgcagaaaa

SEQ ID NO: 833920 - DNA, 25 bp, Homo sapien
atggttgcacccaactgcagaaaac

SEQ ID NO: 833921 - DNA, 25 bp, Homo sapien
tacatagtcgagtcccagaccaatg

SEQ ID NO: 833922 - DNA, 25 bp, Homo sapien
tcccatgtgaataagccccagctga

SEQ ID NO: 833923 - DNA, 25 bp, Homo sapien
tatgcatatgcccagtgaaagacta

SEQ ID NO: 833924 - DNA, 25 bp, Homo sapien
tgatgcaagcccaaacgtgaagact

SEQ ID NO: 833925 - DNA, 25 bp, Homo sapien
cacaaacatttaaatgagtaactaa

SEQ ID NO: 833926 - DNA, 25 bp, Homo sapien
acaaacatttaaatgagtaactaat

SEQ ID NO: 833927 - DNA, 25 bp, Homo sapien
ttgaaaggcagtacatacctgtttt

SEQ ID NO: 833928 - DNA, 25 bp, Homo sapien
gggcccagggacatgaaatgccttt

SEQ ID NO: 833929 - DNA, 25 bp, Homo sapien
taagtgaaagatactggagcctcag

SEQ ID NO: 833930 - DNA, 25 bp, Homo sapien
tctctcttgagcaacagaatgtagg

SEQ ID NO: 833931 - DNA, 25 bp, Homo sapien
tcagcagcactataggccttgtcac

SEQ ID NO: 833932 - DNA, 25 bp, Homo sapien
gacagtgatgaacaggaatgacaac

SEQ ID NO: 833933 - DNA, 25 bp, Homo sapien
caaacgaagttcttacgtgagctga

SEQ ID NO: 833934 - DNA, 25 bp, Homo sapien
tacatagaaccaaagtgctgaccaa

SEQ ID NO: 833935 - DNA, 25 bp, Homo sapien
tggaaacaactacaaccaaacaggc

SEQ ID NO: 833936 - DNA, 25 bp, Homo sapien
taggttgccctatcaaatcctcaca

SEQ ID NO: 833937 - DNA, 25 bp, Homo sapien
caaagtggatgtacgtgatctcaag

SEQ ID NO: 833938 - DNA, 25 bp, Homo sapien
aagggaccatggcaggcatttctct

SEQ ID NO: 833939 - DNA, 25 bp, Homo sapien
tctcaagaattactaggacttcggg

SEQ ID NO: 833940 - DNA, 25 bp, Homo sapien
tatggcctcagatacctgtcagtca

SEQ ID NO: 833941 - DNA, 25 bp, Homo sapien
tacagtcactgaccatggtgggtag

SEQ ID NO: 833942 - DNA, 25 bp, Homo sapien
tatatagtatgaaattaggccgggc

SEQ ID NO: 833943 - DNA, 25 bp, Homo sapien
cacgatgacacttgagcactgatat

SEQ ID NO: 833944 - DNA, 25 bp, Homo sapien
taacagcaaatgactgcagtggcga

SEQ ID NO: 833945 - DNA, 25 bp, Homo sapien
gaaacagccagaagggactatttgt

SEQ ID NO: 833946 - DNA, 25 bp, Homo sapien
tctgtcaggtcccaataaagagcct

SEQ ID NO: 833947 - DNA, 25 bp, Homo sapien
tagagagctaggacgtctgaaggct

SEQ ID NO: 833948 - DNA, 25 bp, Homo sapien
aagggtgaagacacgtttcttcatt

SEQ ID NO: 833949 - DNA, 25 bp, Homo sapien
agggtgaagacacgtttcttcattt

SEQ ID NO: 833950 - DNA, 25 bp, Homo sapien
tattttgagaaattggcacaaaagg

SEQ ID NO: 833951 - DNA, 25 bp, Homo sapien
gtgaagacacgtttcttcattttta

SEQ ID NO: 833952 - DNA, 25 bp, Homo sapien
cttgctgttactaaattggccatgt

SEQ ID NO: 833953 - DNA, 25 bp, Homo sapien
ttttgcttgctgttactaaattggc

SEQ ID NO: 833954 - DNA, 25 bp, Homo sapien
gcttgctgttactaaattggccatg

SEQ ID NO: 833955 - DNA, 25 bp, Homo sapien
ttgcttgctgttactaaattggcca

SEQ ID NO: 833956 - DNA, 25 bp, Homo sapien
caatagctaggtggttatctctacc

SEQ ID NO: 833957 - DNA, 25 bp, Homo sapien
tagatctgggattattgggatcctc

SEQ ID NO: 833958 - DNA, 25 bp, Homo sapien
gagtgagatcacatttagcaatagc

SEQ ID NO: 833959 - DNA, 25 bp, Homo sapien
gagaaatccgctttatagatctggg

SEQ ID NO: 833960 - DNA, 25 bp, Homo sapien
tctccaatagtaccctgtagaccaa

SEQ ID NO: 833961 - DNA, 25 bp, Homo sapien
tggtttcacggctcccattgctcac

SEQ ID NO: 833962 - DNA, 25 bp, Homo sapien
gcaacaagtcttcattgagatggtt

SEQ ID NO: 833963 - DNA, 25 bp, Homo sapien
cctctatctccatgttggcaacaag

SEQ ID NO: 833964 - DNA, 25 bp, Homo sapien
tgattttaacaaccccgcaaagcag

SEQ ID NO: 833965 - DNA, 25 bp, Homo sapien
tactaaaatggcaaggtatctaatc

SEQ ID NO: 833966 - DNA, 25 bp, Homo sapien
tcattttgcacatgtaaacaacatt

SEQ ID NO: 833967 - DNA, 25 bp, Homo sapien
tgtgaccccataaggactactgaaa

SEQ ID NO: 833968 - DNA, 25 bp, Homo sapien
tttgactctgagcactggagcttca

SEQ ID NO: 833969 - DNA, 25 bp, Homo sapien
taatgcctggtagaggcaggtagtc

SEQ ID NO: 833970 - DNA, 25 bp, Homo sapien
gcaatttctccccatagttccagtt

SEQ ID NO: 833971 - DNA, 25 bp, Homo sapien
taaaattggctgctaactccccacc

SEQ ID NO: 833972 - DNA, 25 bp, Homo sapien
actgttagtctcaacaaattcatat

SEQ ID NO: 833973 - DNA, 25 bp, Homo sapien
attcatatcggccacttagatccaa

SEQ ID NO: 833974 - DNA, 25 bp, Homo sapien
ttctgcagaaaaactgttagtctca

SEQ ID NO: 833975 - DNA, 25 bp, Homo sapien
cggccacttagatccaaagatgtat

SEQ ID NO: 833976 - DNA, 25 bp, Homo sapien
ttacagagcggtcccttctgaccag

SEQ ID NO: 833977 - DNA, 25 bp, Homo sapien
cccttctgaccagcagtgcacagac

SEQ ID NO: 833978 - DNA, 25 bp, Homo sapien
gcggtcccttctgaccagcagtgca

SEQ ID NO: 833979 - DNA, 25 bp, Homo sapien
gtcccttctgaccagcagtgcacag

SEQ ID NO: 833980 - DNA, 25 bp, Homo sapien
gattgtattcttctggatagctgga

SEQ ID NO: 833981 - DNA, 25 bp, Homo sapien
cttgatctggacaatctggctggct

SEQ ID NO: 833982 - DNA, 25 bp, Homo sapien
gctggctgaggggatattccacata

SEQ ID NO: 833983 - DNA, 25 bp, Homo sapien
gaggggatattccacatatactgaa

SEQ ID NO: 833984 - DNA, 25 bp, Homo sapien
ctactatttcgctgctctctttcat

SEQ ID NO: 833985 - DNA, 25 bp, Homo sapien
aggcagatctgactttataaaagca

SEQ ID NO: 833986 - DNA, 25 bp, Homo sapien
caggttggaactttcaagaaggcag

SEQ ID NO: 833987 - DNA, 25 bp, Homo sapien
taagaatcaattccaacagtgagat

SEQ ID NO: 833988 - DNA, 25 bp, Homo sapien
gaaaagctgaaagtccacttgttgt

SEQ ID NO: 833989 - DNA, 25 bp, Homo sapien
tgaattcagtaaattcaatgtcgac

SEQ ID NO: 833990 - DNA, 25 bp, Homo sapien
actgaattcagtaaattcaatgtcg

SEQ ID NO: 833991 - DNA, 25 bp, Homo sapien
ctgaattcagtaaattcaatgtcga

SEQ ID NO: 833992 - DNA, 25 bp, Homo sapien
tcactgaattcagtaaattcaatgt

SEQ ID NO: 833993 - DNA, 25 bp, Homo sapien
gaagcatctggattactgaggcaca

SEQ ID NO: 833994 - DNA, 25 bp, Homo sapien
tatgagccatgacgagatcaatact

SEQ ID NO: 833995 - DNA, 25 bp, Homo sapien
tgactaagagaagccggagagatcg

SEQ ID NO: 833996 - DNA, 25 bp, Homo sapien
tgaggcacaggtggctttaaataac

SEQ ID NO: 833997 - DNA, 25 bp, Homo sapien
tcgtaccatttctttaggtcccaca

SEQ ID NO: 833998 - DNA, 25 bp, Homo sapien
cacatctatccccaaactgtcaaat

SEQ ID NO: 833999 - DNA, 25 bp, Homo sapien
cacactgcgctaccatctggaggtc

SEQ ID NO: 834000 - DNA, 25 bp, Homo sapien
gtctcaaagtccacaatttcattaa

SEQ ID NO: 834001 - DNA, 25 bp, Homo sapien
ggtggaatatgacggtaatgtttct

SEQ ID NO: 834002 - DNA, 25 bp, Homo sapien
tagtaatgggtggaatatgacggta

SEQ ID NO: 834003 - DNA, 25 bp, Homo sapien
taatgggtggaatatgacggtaatg

SEQ ID NO: 834004 - DNA, 25 bp, Homo sapien
ggaatatgacggtaatgtttctggc

SEQ ID NO: 834005 - DNA, 25 bp, Homo sapien
gactaactttaatagtgaggcccta

SEQ ID NO: 834006 - DNA, 25 bp, Homo sapien
caacaactggcattcagtagaccag

SEQ ID NO: 834007 - DNA, 25 bp, Homo sapien
gaaaataagtagctactcagtggga

SEQ ID NO: 834008 - DNA, 25 bp, Homo sapien
gtttcagtgctgactcaacaactgg

SEQ ID NO: 834009 - DNA, 25 bp, Homo sapien
tacagtagtgttaactatgcgcaca

SEQ ID NO: 834010 - DNA, 25 bp, Homo sapien
tggaggcaccatggattcttacttt

SEQ ID NO: 834011 - DNA, 25 bp, Homo sapien
gagtcctgttgcaattaaaagtctg

SEQ ID NO: 834012 - DNA, 25 bp, Homo sapien
tcagagacctgccaattctcaaagg

SEQ ID NO: 834013 - DNA, 25 bp, Homo sapien
gttaatagcataatcacctttggag

SEQ ID NO: 834014 - DNA, 25 bp, Homo sapien
ttcctgtcctcctaactttaagcat

SEQ ID NO: 834015 - DNA, 25 bp, Homo sapien
tgtcctcctaactttaagcatctct

SEQ ID NO: 834016 - DNA, 25 bp, Homo sapien
catctcttaatcataggcatttcaa

SEQ ID NO: 834017 - DNA, 25 bp, Homo sapien
gctgtcaatcatttacatcaaatgc

SEQ ID NO: 834018 - DNA, 25 bp, Homo sapien
cactgaggtcttatttcgacagaaa

SEQ ID NO: 834019 - DNA, 25 bp, Homo sapien
cagaaggcgctacacatgctgtcaa

SEQ ID NO: 834020 - DNA, 25 bp, Homo sapien
tcttccttgacctagaccctaaaga

SEQ ID NO: 834021 - DNA, 25 bp, Homo sapien
ttctgaaggcggcagtacatcccac

SEQ ID NO: 834022 - DNA, 25 bp, Homo sapien
cagagcctcggcacatatacagtgg

SEQ ID NO: 834023 - DNA, 25 bp, Homo sapien
tcaatgacctcgcacagtaagatgt

SEQ ID NO: 834024 - DNA, 25 bp, Homo sapien
tatacagcccctaacgataagcagt

SEQ ID NO: 834025 - DNA, 25 bp, Homo sapien
aataatacccttgcatggtttcccg

SEQ ID NO: 834026 - DNA, 25 bp, Homo sapien
gaagtaaaggaagtgtcacatgcgc

SEQ ID NO: 834027 - DNA, 25 bp, Homo sapien
aacgctcttaaactagccatacgtg

SEQ ID NO: 834028 - DNA, 25 bp, Homo sapien
ccatacgtgataggtgaggataatc

SEQ ID NO: 834029 - DNA, 25 bp, Homo sapien
gatgttgacagcttagaccagggca

SEQ ID NO: 834030 - DNA, 25 bp, Homo sapien
tatttagggccctgtaaaacactga

SEQ ID NO: 834031 - DNA, 25 bp, Homo sapien
taaagtataagaccattaggaagcc

SEQ ID NO: 834032 - DNA, 25 bp, Homo sapien
gaaaagccaacaggacatgctgatg

SEQ ID NO: 834033 - DNA, 25 bp, Homo sapien
tacagcacattcttcatacggcagc

SEQ ID NO: 834034 - DNA, 25 bp, Homo sapien
tacggcagccaaatccatcctattt

SEQ ID NO: 834035 - DNA, 25 bp, Homo sapien
aaacctttgcgatatgcttgactcc

SEQ ID NO: 834036 - DNA, 25 bp, Homo sapien
taattattacaatggctttctgctc

SEQ ID NO: 834037 - DNA, 25 bp, Homo sapien
tggcctgtactaggtacattttaag

SEQ ID NO: 834038 - DNA, 25 bp, Homo sapien
ctgtactaggtacattttaagtgct

SEQ ID NO: 834039 - DNA, 25 bp, Homo sapien
cctggcctgtactaggtacatttta

SEQ ID NO: 834040 - DNA, 25 bp, Homo sapien
cgcctggcctgtactaggtacattt

SEQ ID NO: 834041 - DNA, 25 bp, Homo sapien
gctagtagtgagcacaatgttaagc

SEQ ID NO: 834042 - DNA, 25 bp, Homo sapien
tatataaatgacatcccagtgagca

SEQ ID NO: 834043 - DNA, 25 bp, Homo sapien
caatgttaagcactgtaattctgtc

SEQ ID NO: 834044 - DNA, 25 bp, Homo sapien
gagcatggtgaactttgatggttac

SEQ ID NO: 834045 - DNA, 25 bp, Homo sapien
gacacaagcttgtaattgcaaactg

SEQ ID NO: 834046 - DNA, 25 bp, Homo sapien
gccttgacaaagatggaagtgtcta

SEQ ID NO: 834047 - DNA, 25 bp, Homo sapien
actatgtgatgtaaggtctctcaaa

SEQ ID NO: 834048 - DNA, 25 bp, Homo sapien
ggtgagattagcatggccttgacaa

SEQ ID NO: 834049 - DNA, 25 bp, Homo sapien
tcaattaggccatgagactgctcag

SEQ ID NO: 834050 - DNA, 25 bp, Homo sapien
ggttattctacctaagagaccacag

SEQ ID NO: 834051 - DNA, 25 bp, Homo sapien
cacaatgttgtgaatgcctgactag

SEQ ID NO: 834052 - DNA, 25 bp, Homo sapien
taggcctagacgacagggctatgcc

SEQ ID NO: 834053 - DNA, 25 bp, Homo sapien
gaatgatacaagaccctgagactac

SEQ ID NO: 834054 - DNA, 25 bp, Homo sapien
tcacaagatgaggagtcggcacctg

SEQ ID NO: 834055 - DNA, 25 bp, Homo sapien
ttatgaccccttgaagcccaatccg

SEQ ID NO: 834056 - DNA, 25 bp, Homo sapien
tgatcctgtatccaaggaggcactg

SEQ ID NO: 834057 - DNA, 25 bp, Homo sapien
gtgagactccctggtaagcattatc

SEQ ID NO: 834058 - DNA, 25 bp, Homo sapien
taagagatgttcatccaggggttac

SEQ ID NO: 834059 - DNA, 25 bp, Homo sapien
tccaggggttactctgtgagactcc

SEQ ID NO: 834060 - DNA, 25 bp, Homo sapien
agactccctggtaagcattatctct

SEQ ID NO: 834061 - DNA, 25 bp, Homo sapien
tcagttagccacaggaagtccgctt

SEQ ID NO: 834062 - DNA, 25 bp, Homo sapien
gactggatgacctttaagccctaaa

SEQ ID NO: 834063 - DNA, 25 bp, Homo sapien
cacggccacctgatctgtttaatga

SEQ ID NO: 834064 - DNA, 25 bp, Homo sapien
aaactggtttggcatgatcgtagaa

SEQ ID NO: 834065 - DNA, 25 bp, Homo sapien
gaaaataagctactcaagtctccca

SEQ ID NO: 834066 - DNA, 25 bp, Homo sapien
cttgaagcatgacagaacactagta

SEQ ID NO: 834067 - DNA, 25 bp, Homo sapien
gagctctggagttacacacctctgg

SEQ ID NO: 834068 - DNA, 25 bp, Homo sapien
tccagtctagtgaaaggacaatctc

SEQ ID NO: 834069 - DNA, 25 bp, Homo sapien
tgtgcacactgaatataggttgctg

SEQ ID NO: 834070 - DNA, 25 bp, Homo sapien
caatagccaacatacttgccataag

SEQ ID NO: 834071 - DNA, 25 bp, Homo sapien
aatcacagtacatggcctcaaagcc

SEQ ID NO: 834072 - DNA, 25 bp, Homo sapien
gcacagagtgtgttaatgtgcacac

SEQ ID NO: 834073 - DNA, 25 bp, Homo sapien
tacaacagacactactaaactaagt

SEQ ID NO: 834074 - DNA, 25 bp, Homo sapien
taatactgactatcagagaaggcct

SEQ ID NO: 834075 - DNA, 25 bp, Homo sapien
ggtccctgtaatgttccttagacta

SEQ ID NO: 834076 - DNA, 25 bp, Homo sapien
aactcctgagctcattctaagccta

SEQ ID NO: 834077 - DNA, 25 bp, Homo sapien
aatccattagaaggtggtgtcccag

SEQ ID NO: 834078 - DNA, 25 bp, Homo sapien
ctggttttggctgtgcaaaggcaag

SEQ ID NO: 834079 - DNA, 25 bp, Homo sapien
tgtgcaaaggcaagacccagcaatg

SEQ ID NO: 834080 - DNA, 25 bp, Homo sapien
caacaagcaaatagggggctgtgtc

SEQ ID NO: 834081 - DNA, 25 bp, Homo sapien
gaagtcaaatgagatctaatagagg

SEQ ID NO: 834082 - DNA, 25 bp, Homo sapien
tgtaactattatcaagtgaatcttg

SEQ ID NO: 834083 - DNA, 25 bp, Homo sapien
cttccacagcattcaccaaaaaatt

SEQ ID NO: 834084 - DNA, 25 bp, Homo sapien
aaattaccaaagtgcaccatacttg

SEQ ID NO: 834085 - DNA, 25 bp, Homo sapien
aactgaggtctcatgccaaattcca

SEQ ID NO: 834086 - DNA, 25 bp, Homo sapien
tatagctgaggcaactaagagaggt

SEQ ID NO: 834087 - DNA, 25 bp, Homo sapien
taagagaggttagcaacttgcctag

SEQ ID NO: 834088 - DNA, 25 bp, Homo sapien
aatggagagtcttcagttagtacct

SEQ ID NO: 834089 - DNA, 25 bp, Homo sapien
gaaatgtggtagttacaaacactga

SEQ ID NO: 834090 - DNA, 25 bp, Homo sapien
tagaaatgaagggtgaagaatctca

SEQ ID NO: 834091 - DNA, 25 bp, Homo sapien
cactgaagagaaagttaccatagac

SEQ ID NO: 834092 - DNA, 25 bp, Homo sapien
ttaaagagtgacacctagacgtgtc

SEQ ID NO: 834093 - DNA, 25 bp, Homo sapien
ctttaacatttacgatatacagaca

SEQ ID NO: 834094 - DNA, 25 bp, Homo sapien
taccagttcagcatatctaatccag

SEQ ID NO: 834095 - DNA, 25 bp, Homo sapien
tcaaaaagttgcatgaaaccgatac

SEQ ID NO: 834096 - DNA, 25 bp, Homo sapien
cagacaatgaagtgagtcatgactt

SEQ ID NO: 834097 - DNA, 25 bp, Homo sapien
caggagaaacactatggggtctaag

SEQ ID NO: 834098 - DNA, 25 bp, Homo sapien
cttagaccccatagtgtttctcctg

SEQ ID NO: 834099 - DNA, 25 bp, Homo sapien
gtgtagtcgtgcgatgcaggctcac

SEQ ID NO: 834100 - DNA, 25 bp, Homo sapien
tatcttatggtaatagagggctgga

SEQ ID NO: 834101 - DNA, 25 bp, Homo sapien
gggagcttcgcttgatatagcagaa

SEQ ID NO: 834102 - DNA, 25 bp, Homo sapien
cagggataatccaccatgccgggga

SEQ ID NO: 834103 - DNA, 25 bp, Homo sapien
gcaaagccccttttactgctctaaa

SEQ ID NO: 834104 - DNA, 25 bp, Homo sapien
atgaaacaggtaccaacaatggcac

SEQ ID NO: 834105 - DNA, 25 bp, Homo sapien
aacaggtaccaacaatggcacagct

SEQ ID NO: 834106 - DNA, 25 bp, Homo sapien
tgctaaggggtacatttaaatcaac

SEQ ID NO: 834107 - DNA, 25 bp, Homo sapien
caaacaacgtctgtccaagtggtgt

SEQ ID NO: 834108 - DNA, 25 bp, Homo sapien
aaacaacgtctgtccaagtggtgtg

SEQ ID NO: 834109 - DNA, 25 bp, Homo sapien
tccaagtggtgtgattcttgtattt

SEQ ID NO: 834110 - DNA, 25 bp, Homo sapien
atacaaacaacgtctgtccaagtgg

SEQ ID NO: 834111 - DNA, 25 bp, Homo sapien
gcttagaaatgtgactagactctca

SEQ ID NO: 834112 - DNA, 25 bp, Homo sapien
gaccatgaaataagctggccttcca

SEQ ID NO: 834113 - DNA, 25 bp, Homo sapien
taaagctgcctttgtgaccatgaaa

SEQ ID NO: 834114 - DNA, 25 bp, Homo sapien
tataatagagtagccgttccaagtg

SEQ ID NO: 834115 - DNA, 25 bp, Homo sapien
ggactctgcacccatgcttttttcg

SEQ ID NO: 834116 - DNA, 25 bp, Homo sapien
caaaggcagttgcaagtccaaaaac

SEQ ID NO: 834117 - DNA, 25 bp, Homo sapien
gaaacataaatgagtcctccagaaa

SEQ ID NO: 834118 - DNA, 25 bp, Homo sapien
attaaattcttaagtgctgagaaac

SEQ ID NO: 834119 - DNA, 25 bp, Homo sapien
tcatcccagaaaggtgggtaccatt

SEQ ID NO: 834120 - DNA, 25 bp, Homo sapien
gaccacagtaaggtagcagattcag

SEQ ID NO: 834121 - DNA, 25 bp, Homo sapien
gcaaacgagaaaacatcatcccaga

SEQ ID NO: 834122 - DNA, 25 bp, Homo sapien
tgagactggtgaaacacctgcaagc

SEQ ID NO: 834123 - DNA, 25 bp, Homo sapien
gacaacagcgattctcctaaactaa

SEQ ID NO: 834124 - DNA, 25 bp, Homo sapien
cagcatgtaagcatctgaacagcca

SEQ ID NO: 834125 - DNA, 25 bp, Homo sapien
tgaacagccacttacgcacagaaaa

SEQ ID NO: 834126 - DNA, 25 bp, Homo sapien
taaaaagcagctagaccatcgtgac

SEQ ID NO: 834127 - DNA, 25 bp, Homo sapien
cacactgttccttctcagttctttt

SEQ ID NO: 834128 - DNA, 25 bp, Homo sapien
tctcagttcttttctgtagcccttt

SEQ ID NO: 834129 - DNA, 25 bp, Homo sapien
ctgcacactgttccttctcagttct

SEQ ID NO: 834130 - DNA, 25 bp, Homo sapien
cagttcttttctgtagccctttcat

SEQ ID NO: 834131 - DNA, 25 bp, Homo sapien
tatcttccaggcaacatagtctagc

SEQ ID NO: 834132 - DNA, 25 bp, Homo sapien
tacaggtaaaaatcattgggcccag

SEQ ID NO: 834133 - DNA, 25 bp, Homo sapien
tctagccctaggtctgttgccaaag

SEQ ID NO: 834134 - DNA, 25 bp, Homo sapien
tattgttcgtaaactgcacagggac

SEQ ID NO: 834135 - DNA, 25 bp, Homo sapien
catcagggtaagtttatggagccaa

SEQ ID NO: 834136 - DNA, 25 bp, Homo sapien
aaaccaaccaacacaactgaacatt

SEQ ID NO: 834137 - DNA, 25 bp, Homo sapien
tcctaagtcatggactgtgctaggt

SEQ ID NO: 834138 - DNA, 25 bp, Homo sapien
caagcaatcctatatgacagtaaca

SEQ ID NO: 834139 - DNA, 25 bp, Homo sapien
cacttctgtacgtttgaaaatgacg

SEQ ID NO: 834140 - DNA, 25 bp, Homo sapien
catgaagccttctcgtcctggaaga

SEQ ID NO: 834141 - DNA, 25 bp, Homo sapien
tgacgatttggattaactcttagag

SEQ ID NO: 834142 - DNA, 25 bp, Homo sapien
tgccaatcctagtgacaacacagtt

SEQ ID NO: 834143 - DNA, 25 bp, Homo sapien
ttggcaaccgatttcagttacggga

SEQ ID NO: 834144 - DNA, 25 bp, Homo sapien
gacagcctatgattgctgcagacag

SEQ ID NO: 834145 - DNA, 25 bp, Homo sapien
tgccgtgctggtgcacatgtgagaa

SEQ ID NO: 834146 - DNA, 25 bp, Homo sapien
gcataagttgcaatgacaagtggca

SEQ ID NO: 834147 - DNA, 25 bp, Homo sapien
tggcagaccctttttccacataaag

SEQ ID NO: 834148 - DNA, 25 bp, Homo sapien
cataaaggaattgggcttggggcaa

SEQ ID NO: 834149 - DNA, 25 bp, Homo sapien
ggtaaattagccttctttggcagac

SEQ ID NO: 834150 - DNA, 25 bp, Homo sapien
cattctggagtccttcattcacaag

SEQ ID NO: 834151 - DNA, 25 bp, Homo sapien
tccagcagggtggactctgaaacca

SEQ ID NO: 834152 - DNA, 25 bp, Homo sapien
tctaagttacgttctgggctgtgct

SEQ ID NO: 834153 - DNA, 25 bp, Homo sapien
gacacctgtttcgtaatattctaag

SEQ ID NO: 834154 - DNA, 25 bp, Homo sapien
tttaaccctggatccaccaacatgg

SEQ ID NO: 834155 - DNA, 25 bp, Homo sapien
gggtctgtgaactgcccgacgccat

SEQ ID NO: 834156 - DNA, 25 bp, Homo sapien
tctgggcacacaagttttagtccac

SEQ ID NO: 834157 - DNA, 25 bp, Homo sapien
cacacaagttttagtccacagtcca

SEQ ID NO: 834158 - DNA, 25 bp, Homo sapien
agtaaactgcctgggtctgggcaca

SEQ ID NO: 834159 - DNA, 25 bp, Homo sapien
aaacagtgtgagctgtttaatctga

SEQ ID NO: 834160 - DNA, 25 bp, Homo sapien
cagtgtgagctgtttaatctgagtt

SEQ ID NO: 834161 - DNA, 25 bp, Homo sapien
aacagtgtgagctgtttaatctgag

SEQ ID NO: 834162 - DNA, 25 bp, Homo sapien
agtgtgagctgtttaatctgagttg

SEQ ID NO: 834163 - DNA, 25 bp, Homo sapien
ttctctggccctatttccaccagag

SEQ ID NO: 834164 - DNA, 25 bp, Homo sapien
ggagtggttctctggccctatttcc

SEQ ID NO: 834165 - DNA, 25 bp, Homo sapien
gagtggttctctggccctatttcca

SEQ ID NO: 834166 - DNA, 25 bp, Homo sapien
tggttctctggccctatttccacca

SEQ ID NO: 834167 - DNA, 25 bp, Homo sapien
gacactccattaagtcggcagacag

SEQ ID NO: 834168 - DNA, 25 bp, Homo sapien
tgggatatgctgacactccattaag

SEQ ID NO: 834169 - DNA, 25 bp, Homo sapien
cgactgaataattagcttcccaggc

SEQ ID NO: 834170 - DNA, 25 bp, Homo sapien
cagatggcagcgtctttcattaccc

SEQ ID NO: 834171 - DNA, 25 bp, Homo sapien
tgaaggtcacactattctcaagctt

SEQ ID NO: 834172 - DNA, 25 bp, Homo sapien
tactgaccatatgtaagctgtgccc

SEQ ID NO: 834173 - DNA, 25 bp, Homo sapien
cagatctggttcctaattagtccac

SEQ ID NO: 834174 - DNA, 25 bp, Homo sapien
caagtcttataagtcaagtggatgc

SEQ ID NO: 834175 - DNA, 25 bp, Homo sapien
ccatacccgtaggagacaatttgct

SEQ ID NO: 834176 - DNA, 25 bp, Homo sapien
gctgtaattgttcatgctgagtgta

SEQ ID NO: 834177 - DNA, 25 bp, Homo sapien
gaagaggttctctcccaacaagctg

SEQ ID NO: 834178 - DNA, 25 bp, Homo sapien
tgcagagcccaatcatgtcctcagc

SEQ ID NO: 834179 - DNA, 25 bp, Homo sapien
aatctgctttcagagcggcaaggga

SEQ ID NO: 834180 - DNA, 25 bp, Homo sapien
gccctaactggaggggactcattca

SEQ ID NO: 834181 - DNA, 25 bp, Homo sapien
aggttgacgttgtcagccctaactg

SEQ ID NO: 834182 - DNA, 25 bp, Homo sapien
tctgctttcagagcggcaagggacc

SEQ ID NO: 834183 - DNA, 25 bp, Homo sapien
gccagaatcttcaaagggtcagatg

SEQ ID NO: 834184 - DNA, 25 bp, Homo sapien
actctcgaagaggacactgtttggc

SEQ ID NO: 834185 - DNA, 25 bp, Homo sapien
gatgtacacggtgagaaactctcga

SEQ ID NO: 834186 - DNA, 25 bp, Homo sapien
catggtgtctgcgttggccagaatc

SEQ ID NO: 834187 - DNA, 25 bp, Homo sapien
gtaggagaggccgctgcactcccag

SEQ ID NO: 834188 - DNA, 25 bp, Homo sapien
tgataaaaatagtaagttcaaagtg

SEQ ID NO: 834189 - DNA, 25 bp, Homo sapien
gctgataaaaatagtaagttcaaag

SEQ ID NO: 834190 - DNA, 25 bp, Homo sapien
gagaatccggctgggctgatgctgt

SEQ ID NO: 834191 - DNA, 25 bp, Homo sapien
caactggaagcatcactgagacagc

SEQ ID NO: 834192 - DNA, 25 bp, Homo sapien
ccgtgtctgtccgttatcaaacaac

SEQ ID NO: 834193 - DNA, 25 bp, Homo sapien
ctgtgtgacactgggtgttgccaca

SEQ ID NO: 834194 - DNA, 25 bp, Homo sapien
gatcgtcctggattaagacaaaccc

SEQ ID NO: 834195 - DNA, 25 bp, Homo sapien
tagtggactgaatagtgtctccctc

SEQ ID NO: 834196 - DNA, 25 bp, Homo sapien
ccagagagtcgtcaaggaaaacata

SEQ ID NO: 834197 - DNA, 25 bp, Homo sapien
gtgtaccacccagactagccaatgg

SEQ ID NO: 834198 - DNA, 25 bp, Homo sapien
ctgtcactacaggattccggtcttg

SEQ ID NO: 834199 - DNA, 25 bp, Homo sapien
acaggattccggtcttggtacaagt

SEQ ID NO: 834200 - DNA, 25 bp, Homo sapien
cactacaggattccggtcttggtac

SEQ ID NO: 834201 - DNA, 25 bp, Homo sapien
tacaggattccggtcttggtacaag

SEQ ID NO: 834202 - DNA, 25 bp, Homo sapien
tgcactagctgagagtgagatgccc

SEQ ID NO: 834203 - DNA, 25 bp, Homo sapien
aaaaaggagagtgtgctatcagtgc

SEQ ID NO: 834204 - DNA, 25 bp, Homo sapien
tgtttataccaagttctgagcaggt

SEQ ID NO: 834205 - DNA, 25 bp, Homo sapien
tactctgacttgtgttcatggcatg

SEQ ID NO: 834206 - DNA, 25 bp, Homo sapien
ctagggactataaactgctgaaacc

SEQ ID NO: 834207 - DNA, 25 bp, Homo sapien
gggactataaactgctgaaaccttg

SEQ ID NO: 834208 - DNA, 25 bp, Homo sapien
gctgaaaccttgttcgtgaatactc

SEQ ID NO: 834209 - DNA, 25 bp, Homo sapien
tgaatactctgtgcccacaaatatg

SEQ ID NO: 834210 - DNA, 25 bp, Homo sapien
acactgatgccctgatgaggcaggt

SEQ ID NO: 834211 - DNA, 25 bp, Homo sapien
tgatgaggcaggtgcctgccagttc

SEQ ID NO: 834212 - DNA, 25 bp, Homo sapien
ctgatgccctgatgaggcaggtgcc

SEQ ID NO: 834213 - DNA, 25 bp, Homo sapien
ctgatgaggcaggtgcctgccagtt

SEQ ID NO: 834214 - DNA, 25 bp, Homo sapien
cccacagccaaatgggctggacctt

SEQ ID NO: 834215 - DNA, 25 bp, Homo sapien
cacagccaaatgggctggacctttt

SEQ ID NO: 834216 - DNA, 25 bp, Homo sapien
ccacagccaaatgggctggaccttt

SEQ ID NO: 834217 - DNA, 25 bp, Homo sapien
aggtggcaagcatgtgcaagagaac

SEQ ID NO: 834218 - DNA, 25 bp, Homo sapien
gagctggacagctcgtgtctgcaga

SEQ ID NO: 834219 - DNA, 25 bp, Homo sapien
tcggaggaccaataagaggtggcaa

SEQ ID NO: 834220 - DNA, 25 bp, Homo sapien
tggtctcgaaggtatggccctccat

SEQ ID NO: 834221 - DNA, 25 bp, Homo sapien
tgaggaggatacacccaagcagatg

SEQ ID NO: 834222 - DNA, 25 bp, Homo sapien
gtgaattgaattcccgaggctccga

SEQ ID NO: 834223 - DNA, 25 bp, Homo sapien
tcagatctgatgtaagctgccttcc

SEQ ID NO: 834224 - DNA, 25 bp, Homo sapien
taatccaataatcagctagagggca

SEQ ID NO: 834225 - DNA, 25 bp, Homo sapien
gaagaaatctgacagggtacctgct

SEQ ID NO: 834226 - DNA, 25 bp, Homo sapien
cagacatgggcgtgtgtacatcttt

SEQ ID NO: 834227 - DNA, 25 bp, Homo sapien
attctccctgcctgataaatggaag

SEQ ID NO: 834228 - DNA, 25 bp, Homo sapien
tcccagggtcctagaataaaagcca

SEQ ID NO: 834229 - DNA, 25 bp, Homo sapien
gaagacaatctctccatactcaagg

SEQ ID NO: 834230 - DNA, 25 bp, Homo sapien
ccaaagcaggcttaaaatcagcgcc

SEQ ID NO: 834231 - DNA, 25 bp, Homo sapien
tacatcactacacaggcacttaggg

SEQ ID NO: 834232 - DNA, 25 bp, Homo sapien
tatgggtgacaacctacgtacatgg

SEQ ID NO: 834233 - DNA, 25 bp, Homo sapien
atttccgaatcaacatttgatgagc

SEQ ID NO: 834234 - DNA, 25 bp, Homo sapien
catttccgaatcaacatttgatgag

SEQ ID NO: 834235 - DNA, 25 bp, Homo sapien
ttgatgagcacctgcgcataccagg

SEQ ID NO: 834236 - DNA, 25 bp, Homo sapien
tgagcacctgcgcataccaggtctc

SEQ ID NO: 834237 - DNA, 25 bp, Homo sapien
tacccagaggatgctacaaaagatg

SEQ ID NO: 834238 - DNA, 25 bp, Homo sapien
gcaacaaagagacctgccagggtgg

SEQ ID NO: 834239 - DNA, 25 bp, Homo sapien
gaaggctgtcacagaacaggcgcct

SEQ ID NO: 834240 - DNA, 25 bp, Homo sapien
tcttgggactggatagcaagctgca

SEQ ID NO: 834241 - DNA, 25 bp, Homo sapien
gcagtactttcaagcccagcgggaa

SEQ ID NO: 834242 - DNA, 25 bp, Homo sapien
gccacctctgggacataagcttgaa

SEQ ID NO: 834243 - DNA, 25 bp, Homo sapien
ggtaccaggatccaagagacactca

SEQ ID NO: 834244 - DNA, 25 bp, Homo sapien
taggtctcctaacaccagctgcaag

SEQ ID NO: 834245 - DNA, 25 bp, Homo sapien
ccttctggccttgaacattagcaca

SEQ ID NO: 834246 - DNA, 25 bp, Homo sapien
tctccttctggccttgaacattagc

SEQ ID NO: 834247 - DNA, 25 bp, Homo sapien
tctggccttgaacattagcacataa

SEQ ID NO: 834248 - DNA, 25 bp, Homo sapien
tggccttgaacattagcacataagg

SEQ ID NO: 834249 - DNA, 25 bp, Homo sapien
cattgctgtgatacaaccccaggcc

SEQ ID NO: 834250 - DNA, 25 bp, Homo sapien
gatacaaccccaggccattttgcct

SEQ ID NO: 834251 - DNA, 25 bp, Homo sapien
tcccgagaactgtcacaccattgct

SEQ ID NO: 834252 - DNA, 25 bp, Homo sapien
gctgtgatacaaccccaggccattt

SEQ ID NO: 834253 - DNA, 25 bp, Homo sapien
caggttcaggaggtcttgaactgtc

SEQ ID NO: 834254 - DNA, 25 bp, Homo sapien
actcaagtcatgcatcaggttcagg

SEQ ID NO: 834255 - DNA, 25 bp, Homo sapien
gaggaattgatctgaatatgcactc

SEQ ID NO: 834256 - DNA, 25 bp, Homo sapien
tgaatatgcactcaagtcatgcatc

SEQ ID NO: 834257 - DNA, 25 bp, Homo sapien
tgtaagctgcagtgcaggtgtcctt

SEQ ID NO: 834258 - DNA, 25 bp, Homo sapien
ctgtaagctgcagtgcaggtgtcct

SEQ ID NO: 834259 - DNA, 25 bp, Homo sapien
tactcctggagcttcacgcacacca

SEQ ID NO: 834260 - DNA, 25 bp, Homo sapien
cttgtactcctggagcttcacgcac

SEQ ID NO: 834261 - DNA, 25 bp, Homo sapien
caagatagactaaccaagatctgga

SEQ ID NO: 834262 - DNA, 25 bp, Homo sapien
ttctaggttttcatgaacatcaagg

SEQ ID NO: 834263 - DNA, 25 bp, Homo sapien
aaattgctctactttaaggatcttt

SEQ ID NO: 834264 - DNA, 25 bp, Homo sapien
ttccttgaggaacatgatcttatca

SEQ ID NO: 834265 - DNA, 25 bp, Homo sapien
tccgtaaatttcatgagtccagcac

SEQ ID NO: 834266 - DNA, 25 bp, Homo sapien
actgtacaagtagcacctgattatg

SEQ ID NO: 834267 - DNA, 25 bp, Homo sapien
gccctcacagtctatactgtacaag

SEQ ID NO: 834268 - DNA, 25 bp, Homo sapien
cctgattatgtactgcactttacct

SEQ ID NO: 834269 - DNA, 25 bp, Homo sapien
cctactagattctaataggaactct

SEQ ID NO: 834270 - DNA, 25 bp, Homo sapien
tctaataggaactctgttccagtca

SEQ ID NO: 834271 - DNA, 25 bp, Homo sapien
cttcctattcaacattatctcctac

SEQ ID NO: 834272 - DNA, 25 bp, Homo sapien
agtcaaactatctcctcattgtccc

SEQ ID NO: 834273 - DNA, 25 bp, Homo sapien
cgtaaacactgcttccttgctcact

SEQ ID NO: 834274 - DNA, 25 bp, Homo sapien
gccaaattcatcttccgtaaacact

SEQ ID NO: 834275 - DNA, 25 bp, Homo sapien
taaaaggttattgggactgcatctc

SEQ ID NO: 834276 - DNA, 25 bp, Homo sapien
caatagaatctcaatgccataggga

SEQ ID NO: 834277 - DNA, 25 bp, Homo sapien
ggcataccctaaagactgacactgt

SEQ ID NO: 834278 - DNA, 25 bp, Homo sapien
ttggtactaccactttggaatctgg

SEQ ID NO: 834279 - DNA, 25 bp, Homo sapien
caggcaattaacctagaatagtggc

SEQ ID NO: 834280 - DNA, 25 bp, Homo sapien
aaatgtatccaatggccaggcacag

SEQ ID NO: 834281 - DNA, 25 bp, Homo sapien
cataccgagggtcaacaagctgcct

SEQ ID NO: 834282 - DNA, 25 bp, Homo sapien
aatttcctcaatgagcataccgagg

SEQ ID NO: 834283 - DNA, 25 bp, Homo sapien
tctggtagaaatttcctcaatgagc

SEQ ID NO: 834284 - DNA, 25 bp, Homo sapien
gctgctccactgcttgctcgtcctg

SEQ ID NO: 834285 - DNA, 25 bp, Homo sapien
ttcattaggtaaacaaccaggtgca

SEQ ID NO: 834286 - DNA, 25 bp, Homo sapien
tgatgtgtaccgcttcctctctgga

SEQ ID NO: 834287 - DNA, 25 bp, Homo sapien
tcagaaaacatctgctggtgtcgcc

SEQ ID NO: 834288 - DNA, 25 bp, Homo sapien
gaagtgcgagtgtgcatggtccctg

SEQ ID NO: 834289 - DNA, 25 bp, Homo sapien
tctctggaacagttgggaagtgcga

SEQ ID NO: 834290 - DNA, 25 bp, Homo sapien
ttttggtacaggtgatgaggctgcc

SEQ ID NO: 834291 - DNA, 25 bp, Homo sapien
cttttggtacaggtgatgaggctgc

SEQ ID NO: 834292 - DNA, 25 bp, Homo sapien
atgaggctgccaagagaaaggtcca

SEQ ID NO: 834293 - DNA, 25 bp, Homo sapien
gtgatgaggctgccaagagaaaggt

SEQ ID NO: 834294 - DNA, 25 bp, Homo sapien
cataatgtactcattaattcacagc

SEQ ID NO: 834295 - DNA, 25 bp, Homo sapien
tcattaattcacagctcaatgagcc

SEQ ID NO: 834296 - DNA, 25 bp, Homo sapien
gaaccataatgtactcattaattca

SEQ ID NO: 834297 - DNA, 25 bp, Homo sapien
gtactcattaattcacagctcaatg

SEQ ID NO: 834298 - DNA, 25 bp, Homo sapien
ccatatctgccctcaggttcaggaa

SEQ ID NO: 834299 - DNA, 25 bp, Homo sapien
tttgagcgcatccatgctggcccat

SEQ ID NO: 834300 - DNA, 25 bp, Homo sapien
ctgtaggtgtgagatggtaccgtac

SEQ ID NO: 834301 - DNA, 25 bp, Homo sapien
caggaaatagttggatctgtaggtg

SEQ ID NO: 834302 - DNA, 25 bp, Homo sapien
catgatgcctggtattcagttagca

SEQ ID NO: 834303 - DNA, 25 bp, Homo sapien
ctaaacacagccaatagaaaagaga

SEQ ID NO: 834304 - DNA, 25 bp, Homo sapien
gccaatagaaaagagacactgtagc

SEQ ID NO: 834305 - DNA, 25 bp, Homo sapien
aagagacactgtagcatgatgcctg

SEQ ID NO: 834306 - DNA, 25 bp, Homo sapien
gatgcactgatgacaagtttttctt

SEQ ID NO: 834307 - DNA, 25 bp, Homo sapien
cttttgcccaggatgcactgatgac

SEQ ID NO: 834308 - DNA, 25 bp, Homo sapien
tgagccatattcatccagtttggta

SEQ ID NO: 834309 - DNA, 25 bp, Homo sapien
ttgggttgagccatattcatccagt

SEQ ID NO: 834310 - DNA, 25 bp, Homo sapien
gcatctttcaagactaatctgtagg

SEQ ID NO: 834311 - DNA, 25 bp, Homo sapien
tctaatacacatggcctccctagct

SEQ ID NO: 834312 - DNA, 25 bp, Homo sapien
attctgctccaggtcctaccaatca

SEQ ID NO: 834313 - DNA, 25 bp, Homo sapien
gaaagcaggaatgccttttatcagc

SEQ ID NO: 834314 - DNA, 25 bp, Homo sapien
ggacctatggtacgaggacctctta

SEQ ID NO: 834315 - DNA, 25 bp, Homo sapien
taggccagtggctttccaaagggaa

SEQ ID NO: 834316 - DNA, 25 bp, Homo sapien
cgtactgctgctatactgtgccagg

SEQ ID NO: 834317 - DNA, 25 bp, Homo sapien
gatcaaccatcttgcttgctggaaa

SEQ ID NO: 834318 - DNA, 25 bp, Homo sapien
cactttgttcaagatagctaaagtc

SEQ ID NO: 834319 - DNA, 25 bp, Homo sapien
tattaagcatccagagataatgaaa

SEQ ID NO: 834320 - DNA, 25 bp, Homo sapien
ttcaaacttatctgaagattcttca

SEQ ID NO: 834321 - DNA, 25 bp, Homo sapien
agattcttcaatagctatagttagc

SEQ ID NO: 834322 - DNA, 25 bp, Homo sapien
tcttctgtgtaggtttatccatatt

SEQ ID NO: 834323 - DNA, 25 bp, Homo sapien
ttaagggtctgcttactggtttgac

SEQ ID NO: 834324 - DNA, 25 bp, Homo sapien
tgcttactggtttgactcacccaca

SEQ ID NO: 834325 - DNA, 25 bp, Homo sapien
agcactcaccacactattaagggtc

SEQ ID NO: 834326 - DNA, 25 bp, Homo sapien
aaagcaaatcagaaacacacttcat

SEQ ID NO: 834327 - DNA, 25 bp, Homo sapien
tgaaaagcaaatcagaaacacactt

SEQ ID NO: 834328 - DNA, 25 bp, Homo sapien
ctgaaaagcaaatcagaaacacact

SEQ ID NO: 834329 - DNA, 25 bp, Homo sapien
gaaaagcaaatcagaaacacacttc

SEQ ID NO: 834330 - DNA, 25 bp, Homo sapien
ggatgtcttgtggagggattaattt

SEQ ID NO: 834331 - DNA, 25 bp, Homo sapien
cactgacgtcacgaaggatgtcttg

SEQ ID NO: 834332 - DNA, 25 bp, Homo sapien
caggttcccaataagaacttcagac

SEQ ID NO: 834333 - DNA, 25 bp, Homo sapien
caaggctttgaggtcactgacgtca

SEQ ID NO: 834334 - DNA, 25 bp, Homo sapien
gtagaaagattggagaaagctgact

SEQ ID NO: 834335 - DNA, 25 bp, Homo sapien
tgactttgttcgacttgccaaccat

SEQ ID NO: 834336 - DNA, 25 bp, Homo sapien
cgacttgccaaccattccaggcttt

SEQ ID NO: 834337 - DNA, 25 bp, Homo sapien
tctgggatgtagaaagattggagaa

SEQ ID NO: 834338 - DNA, 25 bp, Homo sapien
aaaataagcccttgagcctccttca

SEQ ID NO: 834339 - DNA, 25 bp, Homo sapien
ctccttcaaattctgtgtagtctat

SEQ ID NO: 834340 - DNA, 25 bp, Homo sapien
ctctaatcccagagatttttacaga

SEQ ID NO: 834341 - DNA, 25 bp, Homo sapien
aaagacttcctagatggtatggagt

SEQ ID NO: 834342 - DNA, 25 bp, Homo sapien
tatgcaaaatgactgagttagacca

SEQ ID NO: 834343 - DNA, 25 bp, Homo sapien
taggaatacggcatgaacggtccaa

SEQ ID NO: 834344 - DNA, 25 bp, Homo sapien
aacaaaatatgccaaccctgctgga

SEQ ID NO: 834345 - DNA, 25 bp, Homo sapien
caattagtggctctaactgacgtag

SEQ ID NO: 834346 - DNA, 25 bp, Homo sapien
taacgaccagctgattgacagaggg

SEQ ID NO: 834347 - DNA, 25 bp, Homo sapien
tcaaattcaaccctggcttctcaga

SEQ ID NO: 834348 - DNA, 25 bp, Homo sapien
gacaatgaactctactaacgaccag

SEQ ID NO: 834349 - DNA, 25 bp, Homo sapien
tctcagatgagcacctgtaggccct

SEQ ID NO: 834350 - DNA, 25 bp, Homo sapien
atataaaggctggtctgtcaactac

SEQ ID NO: 834351 - DNA, 25 bp, Homo sapien
ataaaggctggtctgtcaactacgg

SEQ ID NO: 834352 - DNA, 25 bp, Homo sapien
agaatataaaggctggtctgtcaac

SEQ ID NO: 834353 - DNA, 25 bp, Homo sapien
ctgagaatataaaggctggtctgtc

SEQ ID NO: 834354 - DNA, 25 bp, Homo sapien
tgaacaacagcattgcctccgtggg

SEQ ID NO: 834355 - DNA, 25 bp, Homo sapien
cattgcattcgccttgctgctgtag

SEQ ID NO: 834356 - DNA, 25 bp, Homo sapien
cacgctggtttggtgtgcttgtaac

SEQ ID NO: 834357 - DNA, 25 bp, Homo sapien
tgcttgtaactctgtcactcgtaac

SEQ ID NO: 834358 - DNA, 25 bp, Homo sapien
gactgtccggcatgataaaatactc

SEQ ID NO: 834359 - DNA, 25 bp, Homo sapien
gtcatatctggctggtttggaaata

SEQ ID NO: 834360 - DNA, 25 bp, Homo sapien
taagaaaagttggtggaagtgccat

SEQ ID NO: 834361 - DNA, 25 bp, Homo sapien
aatgaacaatgcagagactgtccgg

SEQ ID NO: 834362 - DNA, 25 bp, Homo sapien
caattctgatagaagcagtggcaca

SEQ ID NO: 834363 - DNA, 25 bp, Homo sapien
cagtggcacaggtatatgaagtaag

SEQ ID NO: 834364 - DNA, 25 bp, Homo sapien
gatttcagaataacagccctcacac

SEQ ID NO: 834365 - DNA, 25 bp, Homo sapien
tctttcaatgtcagtagctatgcca

SEQ ID NO: 834366 - DNA, 25 bp, Homo sapien
tcagttatggaatatcctgctgctt

SEQ ID NO: 834367 - DNA, 25 bp, Homo sapien
tgctgcttcctagggtcctttttct

SEQ ID NO: 834368 - DNA, 25 bp, Homo sapien
cttgagggttctgcaattttgagat

SEQ ID NO: 834369 - DNA, 25 bp, Homo sapien
attttgagatgactgccttggtgag

SEQ ID NO: 834370 - DNA, 25 bp, Homo sapien
taggcaggacaactacttggaagtt

SEQ ID NO: 834371 - DNA, 25 bp, Homo sapien
gacaaggccctagatgagacaagag

SEQ ID NO: 834372 - DNA, 25 bp, Homo sapien
ttaacctgggttctagatctggctg

SEQ ID NO: 834373 - DNA, 25 bp, Homo sapien
ctaacaagaaggagagagcaaatgc

SEQ ID NO: 834374 - DNA, 25 bp, Homo sapien
tcccttcctttgctcgggatcaact

SEQ ID NO: 834375 - DNA, 25 bp, Homo sapien
tcctttgctcgggatcaactcctgt

SEQ ID NO: 834376 - DNA, 25 bp, Homo sapien
ccacaggctgcggtactcccttcct

SEQ ID NO: 834377 - DNA, 25 bp, Homo sapien
aggctgcggtactcccttcctttgc

SEQ ID NO: 834378 - DNA, 25 bp, Homo sapien
gagggttcaaaatgtgtgtgttgca

SEQ ID NO: 834379 - DNA, 25 bp, Homo sapien
ctgagggttcaaaatgtgtgtgttg

SEQ ID NO: 834380 - DNA, 25 bp, Homo sapien
tgagggttcaaaatgtgtgtgttgc

SEQ ID NO: 834381 - DNA, 25 bp, Homo sapien
tggcgtttcttttgcctccgggctg

SEQ ID NO: 834382 - DNA, 25 bp, Homo sapien
ttgccttgtcagaaacaccctcagg

SEQ ID NO: 834383 - DNA, 25 bp, Homo sapien
ttgtcagaaacaccctcaggtgttg

SEQ ID NO: 834384 - DNA, 25 bp, Homo sapien
gccttgtcagaaacaccctcaggtg

SEQ ID NO: 834385 - DNA, 25 bp, Homo sapien
ggttctgaggcccacaacatctatt

SEQ ID NO: 834386 - DNA, 25 bp, Homo sapien
gttctgaggcccacaacatctattt

SEQ ID NO: 834387 - DNA, 25 bp, Homo sapien
ttctgaggcccacaacatctatttg

SEQ ID NO: 834388 - DNA, 25 bp, Homo sapien
aatatataagacaagtccctatttc

SEQ ID NO: 834389 - DNA, 25 bp, Homo sapien
taagacaagtccctatttctgtact

SEQ ID NO: 834390 - DNA, 25 bp, Homo sapien
cctttcaagatgaactactcctttc

SEQ ID NO: 834391 - DNA, 25 bp, Homo sapien
ttcacaggggcatacatacataata

SEQ ID NO: 834392 - DNA, 25 bp, Homo sapien
gtgtcacctctagccactttcctgg

SEQ ID NO: 834393 - DNA, 25 bp, Homo sapien
ctggaagcataggaacatctacaac

SEQ ID NO: 834394 - DNA, 25 bp, Homo sapien
catctacaacttcttgccagtaggg

SEQ ID NO: 834395 - DNA, 25 bp, Homo sapien
tgccattgagatgtactcccaaaag

SEQ ID NO: 834396 - DNA, 25 bp, Homo sapien
atttgattgaggtatctgaagttgc

SEQ ID NO: 834397 - DNA, 25 bp, Homo sapien
tttgattgaggtatctgaagttgca

SEQ ID NO: 834398 - DNA, 25 bp, Homo sapien
ttgattgaggtatctgaagttgcat

SEQ ID NO: 834399 - DNA, 25 bp, Homo sapien
tgattgaggtatctgaagttgcatc

SEQ ID NO: 834400 - DNA, 25 bp, Homo sapien
tattcaggcgccattgtggtttgct

SEQ ID NO: 834401 - DNA, 25 bp, Homo sapien
tttgtttcacagttattcaggcgcc

SEQ ID NO: 834402 - DNA, 25 bp, Homo sapien
ttaagcctcgcacgcattaggtact

SEQ ID NO: 834403 - DNA, 25 bp, Homo sapien
ccccgataggcatggtgcatatatg

SEQ ID NO: 834404 - DNA, 25 bp, Homo sapien
ggatagacaatccaggcttctaaca

SEQ ID NO: 834405 - DNA, 25 bp, Homo sapien
tctaacatgtaaggctaagttctcc

SEQ ID NO: 834406 - DNA, 25 bp, Homo sapien
caggcttctaacatgtaaggctaag

SEQ ID NO: 834407 - DNA, 25 bp, Homo sapien
gaaaagggcctggatagacaatcca

SEQ ID NO: 834408 - DNA, 25 bp, Homo sapien
gaaggtcattcaccttatagggtag

SEQ ID NO: 834409 - DNA, 25 bp, Homo sapien
catcttgctgtagtgtgtagtgtct

SEQ ID NO: 834410 - DNA, 25 bp, Homo sapien
ccttatagggtagagagccaacatc

SEQ ID NO: 834411 - DNA, 25 bp, Homo sapien
tatgacctttcagcactatatccat

SEQ ID NO: 834412 - DNA, 25 bp, Homo sapien
tattctttagcaagtgatttgtcca

SEQ ID NO: 834413 - DNA, 25 bp, Homo sapien
ggctctctggacttagggaacatgg

SEQ ID NO: 834414 - DNA, 25 bp, Homo sapien
ccaggttaggtcttaagcttaatgg

SEQ ID NO: 834415 - DNA, 25 bp, Homo sapien
gctgtagcaaccatatacttacaaa

SEQ ID NO: 834416 - DNA, 25 bp, Homo sapien
atccgtgttcgtgtggctgtcttga

SEQ ID NO: 834417 - DNA, 25 bp, Homo sapien
gggagatccgtgttcgtgtggctgt

SEQ ID NO: 834418 - DNA, 25 bp, Homo sapien
ctgctctgacactggggggagatcc

SEQ ID NO: 834419 - DNA, 25 bp, Homo sapien
gagatccgtgttcgtgtggctgtct

SEQ ID NO: 834420 - DNA, 25 bp, Homo sapien
aagcagcggtcagccatatcctgga

SEQ ID NO: 834421 - DNA, 25 bp, Homo sapien
aagacaagcaagcagcggtcagcca

SEQ ID NO: 834422 - DNA, 25 bp, Homo sapien
ccatatcctggaacgatttggcaag

SEQ ID NO: 834423 - DNA, 25 bp, Homo sapien
aacgatttggcaagttcactgagag

SEQ ID NO: 834424 - DNA, 25 bp, Homo sapien
caatggcatagttcccctcctttgc

SEQ ID NO: 834425 - DNA, 25 bp, Homo sapien
gaagatatactggaacttgtgctgc

SEQ ID NO: 834426 - DNA, 25 bp, Homo sapien
ggcctcttcaatggcgctgatatct

SEQ ID NO: 834427 - DNA, 25 bp, Homo sapien
aaggctggcgctcatggcctcttca

SEQ ID NO: 834428 - DNA, 25 bp, Homo sapien
cctcccgcgacatggtgatgttggt

SEQ ID NO: 834429 - DNA, 25 bp, Homo sapien
caccattaatgaggatgcaggagat

SEQ ID NO: 834430 - DNA, 25 bp, Homo sapien
tgatgttggtcaaattctgctgaag

SEQ ID NO: 834431 - DNA, 25 bp, Homo sapien
gatgcgcctgaagtactgggcacca

SEQ ID NO: 834432 - DNA, 25 bp, Homo sapien
tcttagctttggcataagaaactaa

SEQ ID NO: 834433 - DNA, 25 bp, Homo sapien
aaatgacttcacaggcaacgaggtc

SEQ ID NO: 834434 - DNA, 25 bp, Homo sapien
ctttggcataagaaactaaacccag

SEQ ID NO: 834435 - DNA, 25 bp, Homo sapien
tcacaggcaacgaggtcttagcttt

SEQ ID NO: 834436 - DNA, 25 bp, Homo sapien
acacttactttggtagaggcactga

SEQ ID NO: 834437 - DNA, 25 bp, Homo sapien
gagaaaagagtctcggcctcttgga

SEQ ID NO: 834438 - DNA, 25 bp, Homo sapien
tacatacaattaacacttactttgg

SEQ ID NO: 834439 - DNA, 25 bp, Homo sapien
ccaaaattagccttgatttgatatc

SEQ ID NO: 834440 - DNA, 25 bp, Homo sapien
ggacctacagagaacatacgctgaa

SEQ ID NO: 834441 - DNA, 25 bp, Homo sapien
cgaggaatctgtcttgggtgttaca

SEQ ID NO: 834442 - DNA, 25 bp, Homo sapien
aatgcaagtttcatgaggccaggac

SEQ ID NO: 834443 - DNA, 25 bp, Homo sapien
gaacaatggcgtcactcaagctaga

SEQ ID NO: 834444 - DNA, 25 bp, Homo sapien
gttagtttcaacatcgcggccagac

SEQ ID NO: 834445 - DNA, 25 bp, Homo sapien
tgatgacatcaaaccctaccgtaga

SEQ ID NO: 834446 - DNA, 25 bp, Homo sapien
aactccaggttgtattgccggctcc

SEQ ID NO: 834447 - DNA, 25 bp, Homo sapien
tgtctattctggtgcctaacaggca

SEQ ID NO: 834448 - DNA, 25 bp, Homo sapien
ttccagttgattggcaaggcctcca

SEQ ID NO: 834449 - DNA, 25 bp, Homo sapien
cactttcttagcaatcaccttccag

SEQ ID NO: 834450 - DNA, 25 bp, Homo sapien
aatcaccttccagttgattggcaag

SEQ ID NO: 834451 - DNA, 25 bp, Homo sapien
tcttagcaatcaccttccagttgat

SEQ ID NO: 834452 - DNA, 25 bp, Homo sapien
caagtcacctttgaagtccgcttca

SEQ ID NO: 834453 - DNA, 25 bp, Homo sapien
gtcacctttgaagtccgcttcaggg

SEQ ID NO: 834454 - DNA, 25 bp, Homo sapien
ccaagtcacctttgaagtccgcttc

SEQ ID NO: 834455 - DNA, 25 bp, Homo sapien
tgaagtccgcttcaggggcaatacc

SEQ ID NO: 834456 - DNA, 25 bp, Homo sapien
cagaaaaatagcctccctgggtggg

SEQ ID NO: 834457 - DNA, 25 bp, Homo sapien
tataaacagcaggattcgatgacag

SEQ ID NO: 834458 - DNA, 25 bp, Homo sapien
tacgacagcgattgtgccagtttcc

SEQ ID NO: 834459 - DNA, 25 bp, Homo sapien
tcttttcagtacaatgcaacccttc

SEQ ID NO: 834460 - DNA, 25 bp, Homo sapien
gtccttgagcggagtgctggccaca

SEQ ID NO: 834461 - DNA, 25 bp, Homo sapien
ggccatgtgaccttccttcagtact

SEQ ID NO: 834462 - DNA, 25 bp, Homo sapien
ccatgtgaccttccttcagtactct

SEQ ID NO: 834463 - DNA, 25 bp, Homo sapien
aacaaaaggtccttgagcggagtgc

SEQ ID NO: 834464 - DNA, 25 bp, Homo sapien
catggtaactagtcacaagaacttt

SEQ ID NO: 834465 - DNA, 25 bp, Homo sapien
gcacataatgaggtattaattttag

SEQ ID NO: 834466 - DNA, 25 bp, Homo sapien
caaatgaagaacaatatagcacata

SEQ ID NO: 834467 - DNA, 25 bp, Homo sapien
taaaaagagcaagtgatatgggcca

SEQ ID NO: 834468 - DNA, 25 bp, Homo sapien
taggcaagtccaatctgcaagagac

SEQ ID NO: 834469 - DNA, 25 bp, Homo sapien
tatgtcatggaactctaggcaagtc

SEQ ID NO: 834470 - DNA, 25 bp, Homo sapien
actgagagtaataatggtgaccacc

SEQ ID NO: 834471 - DNA, 25 bp, Homo sapien
ggcagggctctagatctctcaaacc

SEQ ID NO: 834472 - DNA, 25 bp, Homo sapien
gaaatggggaactgggctgtaatta

SEQ ID NO: 834473 - DNA, 25 bp, Homo sapien
ttaatttctggtcaaatatatcatg

SEQ ID NO: 834474 - DNA, 25 bp, Homo sapien
tcaacagaagactgtcacctaaggg

SEQ ID NO: 834475 - DNA, 25 bp, Homo sapien
aagactgtcacctaagggagaaatg

SEQ ID NO: 834476 - DNA, 25 bp, Homo sapien
tgtgcttcccttgttcaaatgctgg

SEQ ID NO: 834477 - DNA, 25 bp, Homo sapien
gaaaactggcaaatagctgatagcc

SEQ ID NO: 834478 - DNA, 25 bp, Homo sapien
tatatccctggagaactatgcacca

SEQ ID NO: 834479 - DNA, 25 bp, Homo sapien
acaagtgctattggtggaaggagcc

SEQ ID NO: 834480 - DNA, 25 bp, Homo sapien
tggtcattcctagacaggccttagg

SEQ ID NO: 834481 - DNA, 25 bp, Homo sapien
atgactgtggtcattcctagacagg

SEQ ID NO: 834482 - DNA, 25 bp, Homo sapien
tagacaggccttagggactgtgcta

SEQ ID NO: 834483 - DNA, 25 bp, Homo sapien
gccttagggactgtgctaaaatcct

SEQ ID NO: 834484 - DNA, 25 bp, Homo sapien
cccagatctgggtagccttgcttca

SEQ ID NO: 834485 - DNA, 25 bp, Homo sapien
tactgggcaactccaagatgagcca

SEQ ID NO: 834486 - DNA, 25 bp, Homo sapien
ttagctccccgatcagagttcagag

SEQ ID NO: 834487 - DNA, 25 bp, Homo sapien
cagagtgcatgcatctgatgggcga

SEQ ID NO: 834488 - DNA, 25 bp, Homo sapien
tgcccagccagccaattcagttttt

SEQ ID NO: 834489 - DNA, 25 bp, Homo sapien
cccagccagccaattcagtttttgc

SEQ ID NO: 834490 - DNA, 25 bp, Homo sapien
acggtgcccagccagccaattcagt

SEQ ID NO: 834491 - DNA, 25 bp, Homo sapien
ggtgcccagccagccaattcagttt

SEQ ID NO: 834492 - DNA, 25 bp, Homo sapien
gacttcactttacgcatctcagcag

SEQ ID NO: 834493 - DNA, 25 bp, Homo sapien
caaagacttcactttacgcatctca

SEQ ID NO: 834494 - DNA, 25 bp, Homo sapien
ttcactttacgcatctcagcagcag

SEQ ID NO: 834495 - DNA, 25 bp, Homo sapien
tttacgcatctcagcagcaggaaca

SEQ ID NO: 834496 - DNA, 25 bp, Homo sapien
gcttgcagctgttcagacatgagag

SEQ ID NO: 834497 - DNA, 25 bp, Homo sapien
gcaacagtttgtgtgtgatggtgat

SEQ ID NO: 834498 - DNA, 25 bp, Homo sapien
agcagcaacagtaagaacaggcttg

SEQ ID NO: 834499 - DNA, 25 bp, Homo sapien
cagccactggacagtgacatcagcg

SEQ ID NO: 834500 - DNA, 25 bp, Homo sapien
tgaggattttggtatgatacataag

SEQ ID NO: 834501 - DNA, 25 bp, Homo sapien
tctctttctatatctcaagggaaaa

SEQ ID NO: 834502 - DNA, 25 bp, Homo sapien
atacataagctggagagaaggatgc

SEQ ID NO: 834503 - DNA, 25 bp, Homo sapien
ggatgctctctttctatatctcaag

SEQ ID NO: 834504 - DNA, 25 bp, Homo sapien
gagaaaacttcgtcaaaaccactga

SEQ ID NO: 834505 - DNA, 25 bp, Homo sapien
aaccactgatatcttgtaccttcgg

SEQ ID NO: 834506 - DNA, 25 bp, Homo sapien
tgtaggatccggatctgggcaacgt

SEQ ID NO: 834507 - DNA, 25 bp, Homo sapien
cactgaaatccccttcaatggagct

SEQ ID NO: 834508 - DNA, 25 bp, Homo sapien
catcagctgtgggactgtcgcttta

SEQ ID NO: 834509 - DNA, 25 bp, Homo sapien
tgctaggaccagatacagatgagga

SEQ ID NO: 834510 - DNA, 25 bp, Homo sapien
cagatttggcagatcttgaggctac

SEQ ID NO: 834511 - DNA, 25 bp, Homo sapien
cctgggtatcctgagactgtattcc

SEQ ID NO: 834512 - DNA, 25 bp, Homo sapien
cagagatgcagatacaagggaatcc

SEQ ID NO: 834513 - DNA, 25 bp, Homo sapien
tgatcgcaatcagggtacacaaacc

SEQ ID NO: 834514 - DNA, 25 bp, Homo sapien
taagacatttgtggcaggcgctcgc

SEQ ID NO: 834515 - DNA, 25 bp, Homo sapien
tgcttgggaggactagatagacttc

SEQ ID NO: 834516 - DNA, 25 bp, Homo sapien
ggatgtcagtgagcgggatgtggcc

SEQ ID NO: 834517 - DNA, 25 bp, Homo sapien
tattgattacttccctgtggctcag

SEQ ID NO: 834518 - DNA, 25 bp, Homo sapien
gtcagtgagcgggatgtggccttat

SEQ ID NO: 834519 - DNA, 25 bp, Homo sapien
gatgtggccttattgattacttccc

SEQ ID NO: 834520 - DNA, 25 bp, Homo sapien
ttcacagagtggaccttcagatctt

SEQ ID NO: 834521 - DNA, 25 bp, Homo sapien
aagcgaaggaggagatgccttgcat

SEQ ID NO: 834522 - DNA, 25 bp, Homo sapien
gaaggaggagatgccttgcattgtc

SEQ ID NO: 834523 - DNA, 25 bp, Homo sapien
ttcagatctttatgcgtggtaatgg

SEQ ID NO: 834524 - DNA, 25 bp, Homo sapien
catctgtccgcagccaatactgttg

SEQ ID NO: 834525 - DNA, 25 bp, Homo sapien
attgatccattaattgagatgtttg

SEQ ID NO: 834526 - DNA, 25 bp, Homo sapien
tatacagaagacatctgtccgcagc

SEQ ID NO: 834527 - DNA, 25 bp, Homo sapien
tcttaactatacagaagacatctgt

SEQ ID NO: 834528 - DNA, 25 bp, Homo sapien
gaccacgccaatcttctagaaggtt

SEQ ID NO: 834529 - DNA, 25 bp, Homo sapien
ttttttctagtaccagaccacgcca

SEQ ID NO: 834530 - DNA, 25 bp, Homo sapien
ccttcagactgttgggcaacttggc

SEQ ID NO: 834531 - DNA, 25 bp, Homo sapien
tggaaccaatgacagggaggaatct

SEQ ID NO: 834532 - DNA, 25 bp, Homo sapien
tgtttgcatcctcctctgtagtctg

SEQ ID NO: 834533 - DNA, 25 bp, Homo sapien
tacctaagatgcatgactggaaatt

SEQ ID NO: 834534 - DNA, 25 bp, Homo sapien
caaatgatatgatagaacacctgct

SEQ ID NO: 834535 - DNA, 25 bp, Homo sapien
cacaattgtatgaggtatcacatcc

SEQ ID NO: 834536 - DNA, 25 bp, Homo sapien
attctctgacactgggaaaagagga

SEQ ID NO: 834537 - DNA, 25 bp, Homo sapien
gccattctctagagcagggctgaat

SEQ ID NO: 834538 - DNA, 25 bp, Homo sapien
cttggcctaagaagacggtaactag

SEQ ID NO: 834539 - DNA, 25 bp, Homo sapien
tgagacagctgatagtctatacatg

SEQ ID NO: 834540 - DNA, 25 bp, Homo sapien
acagtcagtgggaacaggaatggac

SEQ ID NO: 834541 - DNA, 25 bp, Homo sapien
gaatggacttcatggctttgatggg

SEQ ID NO: 834542 - DNA, 25 bp, Homo sapien
catatgctcccatcaacgaaagcgt

SEQ ID NO: 834543 - DNA, 25 bp, Homo sapien
tggctttgatgggaacatatgctcc

SEQ ID NO: 834544 - DNA, 25 bp, Homo sapien
tcaccgttgagatgatgacacactc

SEQ ID NO: 834545 - DNA, 25 bp, Homo sapien
caatggcactatccttaaatggcag

SEQ ID NO: 834546 - DNA, 25 bp, Homo sapien
catcacgcctcagcagtactgcggg

SEQ ID NO: 834547 - DNA, 25 bp, Homo sapien
tctgatcaggacacgctagaagtga

SEQ ID NO: 834548 - DNA, 25 bp, Homo sapien
gaaagggtgctaccaggtgtcctaa

SEQ ID NO: 834549 - DNA, 25 bp, Homo sapien
tgatgagtgataaagggcatgccac

SEQ ID NO: 834550 - DNA, 25 bp, Homo sapien
tcaagagcttcgtatgaacagtgcc

SEQ ID NO: 834551 - DNA, 25 bp, Homo sapien
taaatcccggaatgacagtctgaag

SEQ ID NO: 834552 - DNA, 25 bp, Homo sapien
gttttctacagaggccattgttcca

SEQ ID NO: 834553 - DNA, 25 bp, Homo sapien
gacctaaacgcatcagagaaggcta

SEQ ID NO: 834554 - DNA, 25 bp, Homo sapien
gatgcttttcactgagattaaacca

SEQ ID NO: 834555 - DNA, 25 bp, Homo sapien
tgagcccatcatgccagatgaaatt

SEQ ID NO: 834556 - DNA, 25 bp, Homo sapien
taactttgccaagatcgaggggaca

SEQ ID NO: 834557 - DNA, 25 bp, Homo sapien
tctgacgtgaaaggtaactttgcca

SEQ ID NO: 834558 - DNA, 25 bp, Homo sapien
ttctctctgacgtgaaaggtaactt

SEQ ID NO: 834559 - DNA, 25 bp, Homo sapien
tgccaagatcgaggggacagaacca

SEQ ID NO: 834560 - DNA, 25 bp, Homo sapien
agctgtgttgtaaagcatctcgtag

SEQ ID NO: 834561 - DNA, 25 bp, Homo sapien
cagggtcagagcgtggatgtactcc

SEQ ID NO: 834562 - DNA, 25 bp, Homo sapien
caggttcaggagctcgtcagctgtg

SEQ ID NO: 834563 - DNA, 25 bp, Homo sapien
tgcttgatggcagcctgctcgcaga

SEQ ID NO: 834564 - DNA, 25 bp, Homo sapien
aaaagtgagtgtgactgaggggacc

SEQ ID NO: 834565 - DNA, 25 bp, Homo sapien
ccgtcaccaaccgcagtacgccctg

SEQ ID NO: 834566 - DNA, 25 bp, Homo sapien
aagtgagtgtgactgaggggacccc

SEQ ID NO: 834567 - DNA, 25 bp, Homo sapien
aaaaaagtgagtgtgactgagggga

SEQ ID NO: 834568 - DNA, 25 bp, Homo sapien
tactttcctactttccaaggctgga

SEQ ID NO: 834569 - DNA, 25 bp, Homo sapien
caatagagacagacagcaatgcaca

SEQ ID NO: 834570 - DNA, 25 bp, Homo sapien
ccagggactgggatcaaaagacttc

SEQ ID NO: 834571 - DNA, 25 bp, Homo sapien
cattgaactgtaaacggataaggtc

SEQ ID NO: 834572 - DNA, 25 bp, Homo sapien
tggcccagtcagtgcattgctgcct

SEQ ID NO: 834573 - DNA, 25 bp, Homo sapien
tgagctcagaccaagtgagcaccta

SEQ ID NO: 834574 - DNA, 25 bp, Homo sapien
ttccctgcattcagctgagctcaga

SEQ ID NO: 834575 - DNA, 25 bp, Homo sapien
tatgacctatgaaccatgggcagca

SEQ ID NO: 834576 - DNA, 25 bp, Homo sapien
gaccaaagttgtacaaacaggtaca

SEQ ID NO: 834577 - DNA, 25 bp, Homo sapien
ctgtgtgtggtcaaagtcccatctc

SEQ ID NO: 834578 - DNA, 25 bp, Homo sapien
cccatcaagaccaaagttgtacaaa

SEQ ID NO: 834579 - DNA, 25 bp, Homo sapien
caccttcagggtgtgaggcatcact

SEQ ID NO: 834580 - DNA, 25 bp, Homo sapien
ctgttgggatttttggctccagtcc

SEQ ID NO: 834581 - DNA, 25 bp, Homo sapien
gtccagttcccacactcttagataa

SEQ ID NO: 834582 - DNA, 25 bp, Homo sapien
tagcatggagcacatattaggcttc

SEQ ID NO: 834583 - DNA, 25 bp, Homo sapien
gataataagggtgtcctcttcatct

SEQ ID NO: 834584 - DNA, 25 bp, Homo sapien
caagaaaattagtctgagcactctc

SEQ ID NO: 834585 - DNA, 25 bp, Homo sapien
tagcggagctttccactacttccaa

SEQ ID NO: 834586 - DNA, 25 bp, Homo sapien
attttcagtcccgtcattgtaagca

SEQ ID NO: 834587 - DNA, 25 bp, Homo sapien
acttggatgtcctaaatgtcttgga

SEQ ID NO: 834588 - DNA, 25 bp, Homo sapien
ggattataagcacccgccactatgc

SEQ ID NO: 834589 - DNA, 25 bp, Homo sapien
tgggattataagcacccgccactat

SEQ ID NO: 834590 - DNA, 25 bp, Homo sapien
ggattacaggcatgagctaccatgc

SEQ ID NO: 834591 - DNA, 25 bp, Homo sapien
caggattacaggcatgagctaccat

SEQ ID NO: 834592 - DNA, 25 bp, Homo sapien
aatatgctggcaggcaacgagatgc

SEQ ID NO: 834593 - DNA, 25 bp, Homo sapien
gatgcaaaaccctcgctaatagcta

SEQ ID NO: 834594 - DNA, 25 bp, Homo sapien
ggcagaaggccattacgtctgtgaa

SEQ ID NO: 834595 - DNA, 25 bp, Homo sapien
caggatgccctgatgacgtagtgct

SEQ ID NO: 834596 - DNA, 25 bp, Homo sapien
tgagaaagtaattgatgccaacccc

SEQ ID NO: 834597 - DNA, 25 bp, Homo sapien
atggttgggacggaagctctctcag

SEQ ID NO: 834598 - DNA, 25 bp, Homo sapien
gaaatgctccgtgagccttcagtgg

SEQ ID NO: 834599 - DNA, 25 bp, Homo sapien
cacttggcagtctaacagcatgatt

SEQ ID NO: 834600 - DNA, 25 bp, Homo sapien
gacaaactgcataccttcatctcag

SEQ ID NO: 834601 - DNA, 25 bp, Homo sapien
gttgacaaactgcataccttcatct

SEQ ID NO: 834602 - DNA, 25 bp, Homo sapien
ctgcataccttcatctcagccctca

SEQ ID NO: 834603 - DNA, 25 bp, Homo sapien
tgcataccttcatctcagccctcac

SEQ ID NO: 834604 - DNA, 25 bp, Homo sapien
atctgtgtattgaacatgcttggtg

SEQ ID NO: 834605 - DNA, 25 bp, Homo sapien
agtttactcatctgtgtattgaaca

SEQ ID NO: 834606 - DNA, 25 bp, Homo sapien
ctgtgtattgaacatgcttggtgta

SEQ ID NO: 834607 - DNA, 25 bp, Homo sapien
tactcatctgtgtattgaacatgct

SEQ ID NO: 834608 - DNA, 25 bp, Homo sapien
cctgagtcaccatttaagaagtccg

SEQ ID NO: 834609 - DNA, 25 bp, Homo sapien
agaagtccgactaccctgctgaaga

SEQ ID NO: 834610 - DNA, 25 bp, Homo sapien
tggatgtatgcatcagaccttgccc

SEQ ID NO: 834611 - DNA, 25 bp, Homo sapien
tgagaggtaggatctatgactggcc

SEQ ID NO: 834612 - DNA, 25 bp, Homo sapien
ccttgcaaggtagaaaggcatctac

SEQ ID NO: 834613 - DNA, 25 bp, Homo sapien
ttctcagcgaggtttctcagtgcca

SEQ ID NO: 834614 - DNA, 25 bp, Homo sapien
tgagcacttggaaagcctgtgccct

SEQ ID NO: 834615 - DNA, 25 bp, Homo sapien
tgaggccctcctgatacaaagataa

SEQ ID NO: 834616 - DNA, 25 bp, Homo sapien
tcaaaaaaggcaaacgcccagctgt

SEQ ID NO: 834617 - DNA, 25 bp, Homo sapien
gacctagagctgcaattaccagtta

SEQ ID NO: 834618 - DNA, 25 bp, Homo sapien
tgttctgaccactaggcatcactgt

SEQ ID NO: 834619 - DNA, 25 bp, Homo sapien
ttcaaccactcatatacagctgagt

SEQ ID NO: 834620 - DNA, 25 bp, Homo sapien
attttctagtctgtgtatgtagagg

SEQ ID NO: 834621 - DNA, 25 bp, Homo sapien
aaaatagtgtcagcagaattggtac

SEQ ID NO: 834622 - DNA, 25 bp, Homo sapien
cctatgaatccacccggtctgggat

SEQ ID NO: 834623 - DNA, 25 bp, Homo sapien
aattcacctatgaatccacccggtc

SEQ ID NO: 834624 - DNA, 25 bp, Homo sapien
ttcaaggtatagaatcctatcatcc

SEQ ID NO: 834625 - DNA, 25 bp, Homo sapien
tgacttttcctattgggatgccttt

SEQ ID NO: 834626 - DNA, 25 bp, Homo sapien
agaatcctatcatccacaaagagag

SEQ ID NO: 834627 - DNA, 25 bp, Homo sapien
gaatattgttggtgtgtagaaatta

SEQ ID NO: 834628 - DNA, 25 bp, Homo sapien
cacacttgtcactttttttattgga

SEQ ID NO: 834629 - DNA, 25 bp, Homo sapien
gtcacacttgtcactttttttattg

SEQ ID NO: 834630 - DNA, 25 bp, Homo sapien
tcacacttgtcactttttttattgg

SEQ ID NO: 834631 - DNA, 25 bp, Homo sapien
aggtcacacttgtcactttttttat

SEQ ID NO: 834632 - DNA, 25 bp, Homo sapien
cagcaaacccactggcggttcttca

SEQ ID NO: 834633 - DNA, 25 bp, Homo sapien
tgatcacccttcagctgcccgacat

SEQ ID NO: 834634 - DNA, 25 bp, Homo sapien
agactgatcacccttcagctgcccg

SEQ ID NO: 834635 - DNA, 25 bp, Homo sapien
ccactggcggttcttcattaacatc

SEQ ID NO: 834636 - DNA, 25 bp, Homo sapien
cctgccatgacagttgtccccagaa

SEQ ID NO: 834637 - DNA, 25 bp, Homo sapien
aactgctacccctgaagtactgatg

SEQ ID NO: 834638 - DNA, 25 bp, Homo sapien
tgctagagaggcagtacctccaact

SEQ ID NO: 834639 - DNA, 25 bp, Homo sapien
ggaactggctgaatgtgatgtgtcc

SEQ ID NO: 834640 - DNA, 25 bp, Homo sapien
atacttgatggcacaaaacactggc

SEQ ID NO: 834641 - DNA, 25 bp, Homo sapien
ttggacgtggctccaagctattttc

SEQ ID NO: 834642 - DNA, 25 bp, Homo sapien
tacttgatggcacaaaacactggct

SEQ ID NO: 834643 - DNA, 25 bp, Homo sapien
aggcactgtgttggacgtggctcca

SEQ ID NO: 834644 - DNA, 25 bp, Homo sapien
caataaccttcccatacatggctcc

SEQ ID NO: 834645 - DNA, 25 bp, Homo sapien
aataaccttcccatacatggctcct

SEQ ID NO: 834646 - DNA, 25 bp, Homo sapien
ctgggctgctgcttgactctgtttc

SEQ ID NO: 834647 - DNA, 25 bp, Homo sapien
ccaaggagttgcatccgagatcatc

SEQ ID NO: 834648 - DNA, 25 bp, Homo sapien
tctccaaggagttgcatccgagatc

SEQ ID NO: 834649 - DNA, 25 bp, Homo sapien
ggctgctgcttgactctgtttctcc

SEQ ID NO: 834650 - DNA, 25 bp, Homo sapien
gaccctcaaacacttaaaactgaga

SEQ ID NO: 834651 - DNA, 25 bp, Homo sapien
aaatgaggtgtgaggccataactag

SEQ ID NO: 834652 - DNA, 25 bp, Homo sapien
taaatagcaaggattgaagtcttct

SEQ ID NO: 834653 - DNA, 25 bp, Homo sapien
tgcttcccaataagtgggccaccag

SEQ ID NO: 834654 - DNA, 25 bp, Homo sapien
ccaataaacctgcaactaagatctt

SEQ ID NO: 834655 - DNA, 25 bp, Homo sapien
tgatgtaaacgataaaacgaaactg

SEQ ID NO: 834656 - DNA, 25 bp, Homo sapien
aattaattggtcacacattttgaag

SEQ ID NO: 834657 - DNA, 25 bp, Homo sapien
tctacgtaagcagaccaacgcctga

SEQ ID NO: 834658 - DNA, 25 bp, Homo sapien
gagtgaggtcttcatggtactgctg

SEQ ID NO: 834659 - DNA, 25 bp, Homo sapien
tgcatccaatgagccacataccttg

SEQ ID NO: 834660 - DNA, 25 bp, Homo sapien
tgtgagacagtcttggataccacat

SEQ ID NO: 834661 - DNA, 25 bp, Homo sapien
tatcagtaggtgtacgtggcttcag

SEQ ID NO: 834662 - DNA, 25 bp, Homo sapien
tccaggatgttgagtaaagtctcat

SEQ ID NO: 834663 - DNA, 25 bp, Homo sapien
caggatgttgagtaaagtctcatcc

SEQ ID NO: 834664 - DNA, 25 bp, Homo sapien
tttccatgggatcttcaaaggctgt

SEQ ID NO: 834665 - DNA, 25 bp, Homo sapien
ccaggatgttgagtaaagtctcatc

SEQ ID NO: 834666 - DNA, 25 bp, Homo sapien
cagtcattcaggctcgagctcttta

SEQ ID NO: 834667 - DNA, 25 bp, Homo sapien
ggcttttcaagggtctgcagactgt

SEQ ID NO: 834668 - DNA, 25 bp, Homo sapien
gattgcctacttgtgcaaagcactg

SEQ ID NO: 834669 - DNA, 25 bp, Homo sapien
tcttaaattcacagggcaccccaga

SEQ ID NO: 834670 - DNA, 25 bp, Homo sapien
cctggccaagttttaatccattttg

SEQ ID NO: 834671 - DNA, 25 bp, Homo sapien
catgcctggccaagttttaatccat

SEQ ID NO: 834672 - DNA, 25 bp, Homo sapien
cagtttgaagtcttatgtttaagtt

SEQ ID NO: 834673 - DNA, 25 bp, Homo sapien
ctggtagttttacagtttgaagtct

SEQ ID NO: 834674 - DNA, 25 bp, Homo sapien
aaagtgcaggcttcaaggtcataag

SEQ ID NO: 834675 - DNA, 25 bp, Homo sapien
tacatgtaagatgcgcattgcttcg

SEQ ID NO: 834676 - DNA, 25 bp, Homo sapien
caagaaacagtttgcagcgccattt

SEQ ID NO: 834677 - DNA, 25 bp, Homo sapien
ccaggagggtctgagaacacgtacc

SEQ ID NO: 834678 - DNA, 25 bp, Homo sapien
gcaaatcaagctactaaagagtcca

SEQ ID NO: 834679 - DNA, 25 bp, Homo sapien
gaggcgtcctcaagaagttctcact

SEQ ID NO: 834680 - DNA, 25 bp, Homo sapien
tatgtctaagtatatagtccactgg

SEQ ID NO: 834681 - DNA, 25 bp, Homo sapien
ttgagttgctcttaatactacagcc

SEQ ID NO: 834682 - DNA, 25 bp, Homo sapien
aacatcctccgccatttcatgcacc

SEQ ID NO: 834683 - DNA, 25 bp, Homo sapien
gatgcaaaccattaagaatactaca

SEQ ID NO: 834684 - DNA, 25 bp, Homo sapien
tgatgatgcaaaccattaagaatac

SEQ ID NO: 834685 - DNA, 25 bp, Homo sapien
atttcatgcaccactgtctggaaag

SEQ ID NO: 834686 - DNA, 25 bp, Homo sapien
cctgtacatacttacaccccttttg

SEQ ID NO: 834687 - DNA, 25 bp, Homo sapien
tttgtgcaaggacaaacagtgcttc

SEQ ID NO: 834688 - DNA, 25 bp, Homo sapien
gtgcaaggacaaacagtgcttctca

SEQ ID NO: 834689 - DNA, 25 bp, Homo sapien
cttacaccccttttgtgcaaggaca

SEQ ID NO: 834690 - DNA, 25 bp, Homo sapien
gagtttcgcctatgtcagtctatcg

SEQ ID NO: 834691 - DNA, 25 bp, Homo sapien
ggtggtactgaaatccaaacctaga

SEQ ID NO: 834692 - DNA, 25 bp, Homo sapien
gaaatcaggaagatagtaatcaggc

SEQ ID NO: 834693 - DNA, 25 bp, Homo sapien
taaataactggccaaaagccaagtg

SEQ ID NO: 834694 - DNA, 25 bp, Homo sapien
tgtaaaggccacaagcaaaatatct

SEQ ID NO: 834695 - DNA, 25 bp, Homo sapien
tggacaccatccattgacgattatc

SEQ ID NO: 834696 - DNA, 25 bp, Homo sapien
tgacataaagctttcagaattacct

SEQ ID NO: 834697 - DNA, 25 bp, Homo sapien
gcttgagggaccgttaaaactgaca

SEQ ID NO: 834698 - DNA, 25 bp, Homo sapien
tctgccccatgggaaaagaccagca

SEQ ID NO: 834699 - DNA, 25 bp, Homo sapien
tttctgcgcgaaactgtaacgatcg

SEQ ID NO: 834700 - DNA, 25 bp, Homo sapien
taacgatcgggctccagttcgggat

SEQ ID NO: 834701 - DNA, 25 bp, Homo sapien
tcaggagagccctctcggaggtcgc

SEQ ID NO: 834702 - DNA, 25 bp, Homo sapien
cagcatttcggactctgaggactcc

SEQ ID NO: 834703 - DNA, 25 bp, Homo sapien
cctgatagcggtgcatgagctgctg

SEQ ID NO: 834704 - DNA, 25 bp, Homo sapien
tggtcctcatctccgtccgagtcca

SEQ ID NO: 834705 - DNA, 25 bp, Homo sapien
ccgagtccagctcctgatagcggtg

SEQ ID NO: 834706 - DNA, 25 bp, Homo sapien
ctgaagtaacagggctggacgaggg

SEQ ID NO: 834707 - DNA, 25 bp, Homo sapien
tgaagtaacagggctggacgaggga

SEQ ID NO: 834708 - DNA, 25 bp, Homo sapien
gaagtaacagggctggacgagggag

SEQ ID NO: 834709 - DNA, 25 bp, Homo sapien
ggcgttcctggaggcgagagagcct

SEQ ID NO: 834710 - DNA, 25 bp, Homo sapien
aagaggcgttcctggaggcgagaga

SEQ ID NO: 834711 - DNA, 25 bp, Homo sapien
ctggtgggggtgcatcggggagctg

SEQ ID NO: 834712 - DNA, 25 bp, Homo sapien
gttcctggaggcgagagagcctgag

SEQ ID NO: 834713 - DNA, 25 bp, Homo sapien
tacaaagtgacgctgtgttaactcg

SEQ ID NO: 834714 - DNA, 25 bp, Homo sapien
caatgtcagagatgaactctgccta

SEQ ID NO: 834715 - DNA, 25 bp, Homo sapien
tggaagtatgtcatagccatgggca

SEQ ID NO: 834716 - DNA, 25 bp, Homo sapien
ggcaacaggtgctggcaatgtcaga

SEQ ID NO: 834717 - DNA, 25 bp, Homo sapien
ttaacaatggtgctaatgaacccca

SEQ ID NO: 834718 - DNA, 25 bp, Homo sapien
caaaactaatgggaactagctcatg

SEQ ID NO: 834719 - DNA, 25 bp, Homo sapien
aagacaccgcaggttagagaaggga

SEQ ID NO: 834720 - DNA, 25 bp, Homo sapien
gaatcagagtaacagaagacaccgc

SEQ ID NO: 834721 - DNA, 25 bp, Homo sapien
caaacagtgcctcgcatgtggtgag

SEQ ID NO: 834722 - DNA, 25 bp, Homo sapien
tcttctacttctgaggcaaaacgga

SEQ ID NO: 834723 - DNA, 25 bp, Homo sapien
tgctgagtgggctagagaagacccc

SEQ ID NO: 834724 - DNA, 25 bp, Homo sapien
taactctcaagctgtgcagtgcctc

SEQ ID NO: 834725 - DNA, 25 bp, Homo sapien
gtctctccttccgatctttggtcat

SEQ ID NO: 834726 - DNA, 25 bp, Homo sapien
ggcagtatcatgtctctccttccga

SEQ ID NO: 834727 - DNA, 25 bp, Homo sapien
tcctgatgttcctgacatttggcag

SEQ ID NO: 834728 - DNA, 25 bp, Homo sapien
gacatttggcagtatcatgtctctc

SEQ ID NO: 834729 - DNA, 25 bp, Homo sapien
tcttgccagattggtagagaaaaca

SEQ ID NO: 834730 - DNA, 25 bp, Homo sapien
cactgcatttgactgcttgcccaca

SEQ ID NO: 834731 - DNA, 25 bp, Homo sapien
gaatgaaaatcccaatctgtccagt

SEQ ID NO: 834732 - DNA, 25 bp, Homo sapien
caaacagatagtatgtgacagagct

SEQ ID NO: 834733 - DNA, 25 bp, Homo sapien
aagttagattgaggtagacttgctc

SEQ ID NO: 834734 - DNA, 25 bp, Homo sapien
gaggtagacttgctcagtcccagag

SEQ ID NO: 834735 - DNA, 25 bp, Homo sapien
agcctgagcgccccaagtgatggag

SEQ ID NO: 834736 - DNA, 25 bp, Homo sapien
gattgaggtagacttgctcagtccc

SEQ ID NO: 834737 - DNA, 25 bp, Homo sapien
gaatatggtctagccagtgtcaagc

SEQ ID NO: 834738 - DNA, 25 bp, Homo sapien
tcaccagtctccatcaaatgcgagg

SEQ ID NO: 834739 - DNA, 25 bp, Homo sapien
caagatttgctgtcaccacaaaagc

SEQ ID NO: 834740 - DNA, 25 bp, Homo sapien
tgtcaagctgtagccagccaatgga

SEQ ID NO: 834741 - DNA, 25 bp, Homo sapien
tctgtagatgaacatatccacagag

SEQ ID NO: 834742 - DNA, 25 bp, Homo sapien
tcgctgaaagatccaacttctgtag

SEQ ID NO: 834743 - DNA, 25 bp, Homo sapien
caattttattcgctgaaagatccaa

SEQ ID NO: 834744 - DNA, 25 bp, Homo sapien
tgctaacatcaattaaattacaacc

SEQ ID NO: 834745 - DNA, 25 bp, Homo sapien
agaaaggcttggagcgtaactgtgg

SEQ ID NO: 834746 - DNA, 25 bp, Homo sapien
cttggagcgtaactgtgggctccct

SEQ ID NO: 834747 - DNA, 25 bp, Homo sapien
gtgaggactgatcgggctgaagaga

SEQ ID NO: 834748 - DNA, 25 bp, Homo sapien
ttagtgaggactgatcgggctgaag

SEQ ID NO: 834749 - DNA, 25 bp, Homo sapien
gaagaacgtagtcaaattattttga

SEQ ID NO: 834750 - DNA, 25 bp, Homo sapien
gagaagcattaagttctaggagata

SEQ ID NO: 834751 - DNA, 25 bp, Homo sapien
cttgaaattgaagaacgtagtcaaa

SEQ ID NO: 834752 - DNA, 25 bp, Homo sapien
tctaggagataaggcatacaactca

SEQ ID NO: 834753 - DNA, 25 bp, Homo sapien
gtgtaattaaggtattcataaagtc

SEQ ID NO: 834754 - DNA, 25 bp, Homo sapien
taattaaggtattcataaagtctac

SEQ ID NO: 834755 - DNA, 25 bp, Homo sapien
tgtaattaaggtattcataaagtct

SEQ ID NO: 834756 - DNA, 25 bp, Homo sapien
tgtgtaattaaggtattcataaagt

SEQ ID NO: 834757 - DNA, 25 bp, Homo sapien
tctctggttggtggtacaaggctca

SEQ ID NO: 834758 - DNA, 25 bp, Homo sapien
tacaagtccccgctctaggaaatgc

SEQ ID NO: 834759 - DNA, 25 bp, Homo sapien
gatggcggagcatagtacatgagcc

SEQ ID NO: 834760 - DNA, 25 bp, Homo sapien
tacatgagcctgacttactggaaag

SEQ ID NO: 834761 - DNA, 25 bp, Homo sapien
atttccaggcaatgcctcttcaact

SEQ ID NO: 834762 - DNA, 25 bp, Homo sapien
gcatgatacgctgacaaatcacaaa

SEQ ID NO: 834763 - DNA, 25 bp, Homo sapien
ttagtttagtgagagcatgatacgc

SEQ ID NO: 834764 - DNA, 25 bp, Homo sapien
catccaaaattagtttagtgagagc

SEQ ID NO: 834765 - DNA, 25 bp, Homo sapien
tttagtgagagcatgatacgctgac

SEQ ID NO: 834766 - DNA, 25 bp, Homo sapien
aaatgctcttcactataggagaaaa

SEQ ID NO: 834767 - DNA, 25 bp, Homo sapien
aaaatgctcttcactataggagaaa

SEQ ID NO: 834768 - DNA, 25 bp, Homo sapien
ctataggagaaaatctctccaagaa

SEQ ID NO: 834769 - DNA, 25 bp, Homo sapien
actataggagaaaatctctccaaga

SEQ ID NO: 834770 - DNA, 25 bp, Homo sapien
acatcaatagttacacaaatatcca

SEQ ID NO: 834771 - DNA, 25 bp, Homo sapien
atccattactttctgccctaaagtc

SEQ ID NO: 834772 - DNA, 25 bp, Homo sapien
tccattactttctgccctaaagtca

SEQ ID NO: 834773 - DNA, 25 bp, Homo sapien
taacatcaatagttacacaaatatc

SEQ ID NO: 834774 - DNA, 25 bp, Homo sapien
gttccatcttgtagtcacctaacac

SEQ ID NO: 834775 - DNA, 25 bp, Homo sapien
gtcacctaacactacaatttcaaag

SEQ ID NO: 834776 - DNA, 25 bp, Homo sapien
ctgtgttccatcttgtagtcaccta

SEQ ID NO: 834777 - DNA, 25 bp, Homo sapien
caaagtcataattctgttcagctct

SEQ ID NO: 834778 - DNA, 25 bp, Homo sapien
tctagtccactgatttcttctatct

SEQ ID NO: 834779 - DNA, 25 bp, Homo sapien
ctagtccactgatttcttctatctc

SEQ ID NO: 834780 - DNA, 25 bp, Homo sapien
ctctagtccactgatttcttctatc

SEQ ID NO: 834781 - DNA, 25 bp, Homo sapien
tagtccactgatttcttctatctca

SEQ ID NO: 834782 - DNA, 25 bp, Homo sapien
taaggtgaattaggttgttgcacat

SEQ ID NO: 834783 - DNA, 25 bp, Homo sapien
ctaaggtgaattaggttgttgcaca

SEQ ID NO: 834784 - DNA, 25 bp, Homo sapien
tttgattggtaacttgtttaagcca

SEQ ID NO: 834785 - DNA, 25 bp, Homo sapien
ttaattgtcgtgatcttattgttgg

SEQ ID NO: 834786 - DNA, 25 bp, Homo sapien
cttgtttaagccattaattgtcgtg

SEQ ID NO: 834787 - DNA, 25 bp, Homo sapien
tttaagccattaattgtcgtgatct

SEQ ID NO: 834788 - DNA, 25 bp, Homo sapien
tgtgatcatctcaatctggttattg

SEQ ID NO: 834789 - DNA, 25 bp, Homo sapien
gctgcttatctgattgtgggacaga

SEQ ID NO: 834790 - DNA, 25 bp, Homo sapien
ccaggttgatcacttccaggaggtc

SEQ ID NO: 834791 - DNA, 25 bp, Homo sapien
gatcctccaaacctgtgatcatctc

SEQ ID NO: 834792 - DNA, 25 bp, Homo sapien
tagaagattgagaactcgaaggatg

SEQ ID NO: 834793 - DNA, 25 bp, Homo sapien
tgagaactcgaaggatgggtaaatt

SEQ ID NO: 834794 - DNA, 25 bp, Homo sapien
gattgagaactcgaaggatgggtaa

SEQ ID NO: 834795 - DNA, 25 bp, Homo sapien
agaagattgagaactcgaaggatgg

SEQ ID NO: 834796 - DNA, 25 bp, Homo sapien
ctaattctgttaatcgcagaagcat

SEQ ID NO: 834797 - DNA, 25 bp, Homo sapien
tctgttaatcgcagaagcataaaaa

SEQ ID NO: 834798 - DNA, 25 bp, Homo sapien
cgaagaaccaatattcagacttttc

SEQ ID NO: 834799 - DNA, 25 bp, Homo sapien
gaagcataaaaattacgaagaacca

SEQ ID NO: 834800 - DNA, 25 bp, Homo sapien
atttcaccaagaatgattcccacaa

SEQ ID NO: 834801 - DNA, 25 bp, Homo sapien
tttcaccaagaatgattcccacaat

SEQ ID NO: 834802 - DNA, 25 bp, Homo sapien
ttcaccaagaatgattcccacaatc

SEQ ID NO: 834803 - DNA, 25 bp, Homo sapien
tcttgagctgcaaccacttcagggg

SEQ ID NO: 834804 - DNA, 25 bp, Homo sapien
cgctgttgacaacatgggtcaggtg

SEQ ID NO: 834805 - DNA, 25 bp, Homo sapien
tcagggggaggatcatatttattca

SEQ ID NO: 834806 - DNA, 25 bp, Homo sapien
ctgcggctgcatcacgctgttgaca

SEQ ID NO: 834807 - DNA, 25 bp, Homo sapien
ctgaattccggcctttggatttcta

SEQ ID NO: 834808 - DNA, 25 bp, Homo sapien
tgaattccggcctttggatttctaa

SEQ ID NO: 834809 - DNA, 25 bp, Homo sapien
cctgaattccggcctttggatttct

SEQ ID NO: 834810 - DNA, 25 bp, Homo sapien
tgctgacagagagttgtgtactggc

SEQ ID NO: 834811 - DNA, 25 bp, Homo sapien
acagtgattccccagtaatggcagc

SEQ ID NO: 834812 - DNA, 25 bp, Homo sapien
tcctggatcctgacttctggtgctg

SEQ ID NO: 834813 - DNA, 25 bp, Homo sapien
gcagcatacaagtcccaaagccaag

SEQ ID NO: 834814 - DNA, 25 bp, Homo sapien
tagtatcagcatgggataaggggca

SEQ ID NO: 834815 - DNA, 25 bp, Homo sapien
tatcagcatgggataaggggcatcc

SEQ ID NO: 834816 - DNA, 25 bp, Homo sapien
ctagtatcagcatgggataaggggc

SEQ ID NO: 834817 - DNA, 25 bp, Homo sapien
tcagcatgggataaggggcatccag

SEQ ID NO: 834818 - DNA, 25 bp, Homo sapien
tctcgtttcccacaagcttcaggac

SEQ ID NO: 834819 - DNA, 25 bp, Homo sapien
agaggcgatgggcaagctctcgttt

SEQ ID NO: 834820 - DNA, 25 bp, Homo sapien
gatgggcaagctctcgtttcccaca

SEQ ID NO: 834821 - DNA, 25 bp, Homo sapien
ggcgatgggcaagctctcgtttccc

SEQ ID NO: 834822 - DNA, 25 bp, Homo sapien
tccaataattcggatgaatttccaa

SEQ ID NO: 834823 - DNA, 25 bp, Homo sapien
gatgaatttccaagtcttaacaagc

SEQ ID NO: 834824 - DNA, 25 bp, Homo sapien
aattcggatgaatttccaagtctta

SEQ ID NO: 834825 - DNA, 25 bp, Homo sapien
cggatgaatttccaagtcttaacaa

SEQ ID NO: 834826 - DNA, 25 bp, Homo sapien
aacagatcacctagtccatttctaa

SEQ ID NO: 834827 - DNA, 25 bp, Homo sapien
aaacagatcacctagtccatttcta

SEQ ID NO: 834828 - DNA, 25 bp, Homo sapien
cgtcttgagagataaaatgataatc

SEQ ID NO: 834829 - DNA, 25 bp, Homo sapien
aatgataatcaactcgatccccttc

SEQ ID NO: 834830 - DNA, 25 bp, Homo sapien
agtaaggtggtcttgtggtatgaca

SEQ ID NO: 834831 - DNA, 25 bp, Homo sapien
cttctccaaagtaaggtggtcttgt

SEQ ID NO: 834832 - DNA, 25 bp, Homo sapien
tattgctaccctgtgtcttggcccc

SEQ ID NO: 834833 - DNA, 25 bp, Homo sapien
agcagcagttgggtctattgctacc

SEQ ID NO: 834834 - DNA, 25 bp, Homo sapien
cagttgggtctattgctaccctgtg

SEQ ID NO: 834835 - DNA, 25 bp, Homo sapien
tgttctggagatgtgagggtacggg

SEQ ID NO: 834836 - DNA, 25 bp, Homo sapien
tgtctgtattctggaagctcagttc

SEQ ID NO: 834837 - DNA, 25 bp, Homo sapien
agaattggtgtctgccctatagcca

SEQ ID NO: 834838 - DNA, 25 bp, Homo sapien
aaatgatgcctctgtctgtattctg

SEQ ID NO: 834839 - DNA, 25 bp, Homo sapien
tcatccaacagaattggtgtctgcc

SEQ ID NO: 834840 - DNA, 25 bp, Homo sapien
aatacagcttgccaaaccatctctt

SEQ ID NO: 834841 - DNA, 25 bp, Homo sapien
tgcgataccttctacggtgtcccta

SEQ ID NO: 834842 - DNA, 25 bp, Homo sapien
ggtgtccctatttaatccatacttg

SEQ ID NO: 834843 - DNA, 25 bp, Homo sapien
ccatacttgtgattaccataactaa

SEQ ID NO: 834844 - DNA, 25 bp, Homo sapien
gctcttctgtgacccctttgtcatc

SEQ ID NO: 834845 - DNA, 25 bp, Homo sapien
ggctcttctgtgacccctttgtcat

SEQ ID NO: 834846 - DNA, 25 bp, Homo sapien
ggagaaaaggctcttctgtgacccc

SEQ ID NO: 834847 - DNA, 25 bp, Homo sapien
aaaaggctcttctgtgacccctttg

SEQ ID NO: 834848 - DNA, 25 bp, Homo sapien
taacgaggctcaaaataggaatatt

SEQ ID NO: 834849 - DNA, 25 bp, Homo sapien
gactgaataatccttttctccgcaa

SEQ ID NO: 834850 - DNA, 25 bp, Homo sapien
tgggcaccaccaggatataacgagg

SEQ ID NO: 834851 - DNA, 25 bp, Homo sapien
tttaatataaaggtccactctggag

SEQ ID NO: 834852 - DNA, 25 bp, Homo sapien
ggtattctctaatgagctgactcag

SEQ ID NO: 834853 - DNA, 25 bp, Homo sapien
tcaatccaaggtattctctaatgag

SEQ ID NO: 834854 - DNA, 25 bp, Homo sapien
tattctctaatgagctgactcagtt

SEQ ID NO: 834855 - DNA, 25 bp, Homo sapien
tccaaggtattctctaatgagctga

SEQ ID NO: 834856 - DNA, 25 bp, Homo sapien
accgacgcccagtgcagagattctg

SEQ ID NO: 834857 - DNA, 25 bp, Homo sapien
acactgacatgctcccaatctaatg

SEQ ID NO: 834858 - DNA, 25 bp, Homo sapien
caggaacattccagtcagcaggtca

SEQ ID NO: 834859 - DNA, 25 bp, Homo sapien
tccccactttgtagactgagcacag

SEQ ID NO: 834860 - DNA, 25 bp, Homo sapien
agcccttctccatagagatggcttt

SEQ ID NO: 834861 - DNA, 25 bp, Homo sapien
gaagaacactggctctacttcttgt

SEQ ID NO: 834862 - DNA, 25 bp, Homo sapien
ggttggctccactcttgtgcactga

SEQ ID NO: 834863 - DNA, 25 bp, Homo sapien
ctgtaaacatctggtccccattcct

SEQ ID NO: 834864 - DNA, 25 bp, Homo sapien
taaggtaactatggttggctccact

SEQ ID NO: 834865 - DNA, 25 bp, Homo sapien
agagacagtcttcttgctagcggga

SEQ ID NO: 834866 - DNA, 25 bp, Homo sapien
agacagtcttcttgctagcgggagc

SEQ ID NO: 834867 - DNA, 25 bp, Homo sapien
acagtcttcttgctagcgggagctc

SEQ ID NO: 834868 - DNA, 25 bp, Homo sapien
ccagagacagtcttcttgctagcgg

SEQ ID NO: 834869 - DNA, 25 bp, Homo sapien
cagcaagtttctgcaccaagtcagt

SEQ ID NO: 834870 - DNA, 25 bp, Homo sapien
gttctgggcaggagttacgctctga

SEQ ID NO: 834871 - DNA, 25 bp, Homo sapien
cagagcttgctgagaatcgccagca

SEQ ID NO: 834872 - DNA, 25 bp, Homo sapien
ggaagacccagtgctgatgaactga

SEQ ID NO: 834873 - DNA, 25 bp, Homo sapien
gatactgactcggatggcttccggt

SEQ ID NO: 834874 - DNA, 25 bp, Homo sapien
agcctgggagagaccgtcatggttt

SEQ ID NO: 834875 - DNA, 25 bp, Homo sapien
ggagccagccggcttctaggaagca

SEQ ID NO: 834876 - DNA, 25 bp, Homo sapien
tcctggacttgctgaagactgtggg

SEQ ID NO: 834877 - DNA, 25 bp, Homo sapien
ggggactgataagagggagtttcac

SEQ ID NO: 834878 - DNA, 25 bp, Homo sapien
ctgaggatgcgaggttctgcttgct

SEQ ID NO: 834879 - DNA, 25 bp, Homo sapien
cgggactgaggatgcgaggttctgc

SEQ ID NO: 834880 - DNA, 25 bp, Homo sapien
gggcgggactgaggatgcgaggttc

SEQ ID NO: 834881 - DNA, 25 bp, Homo sapien
tagcccctgtctgctgaagtggccc

SEQ ID NO: 834882 - DNA, 25 bp, Homo sapien
cagaggtgccagtcctctagccgtc

SEQ ID NO: 834883 - DNA, 25 bp, Homo sapien
ccttggatcaggctgagtccccgag

SEQ ID NO: 834884 - DNA, 25 bp, Homo sapien
ggtgaggcccgcatgtctggaatct

SEQ ID NO: 834885 - DNA, 25 bp, Homo sapien
gaggagggctggggttgggatcgtc

SEQ ID NO: 834886 - DNA, 25 bp, Homo sapien
ctagcttagacaagaaacaagagga

SEQ ID NO: 834887 - DNA, 25 bp, Homo sapien
ggctggggttgggatcgtcgggcac

SEQ ID NO: 834888 - DNA, 25 bp, Homo sapien
tagcttagacaagaaacaagaggag

SEQ ID NO: 834889 - DNA, 25 bp, Homo sapien
tggccctcctgagctggctgatcac

SEQ ID NO: 834890 - DNA, 25 bp, Homo sapien
gctggccctcctgagctggctgatc

SEQ ID NO: 834891 - DNA, 25 bp, Homo sapien
ctggagaggtctcccgggtgagggc

SEQ ID NO: 834892 - DNA, 25 bp, Homo sapien
gaggtctcccgggtgagggctggcc

SEQ ID NO: 834893 - DNA, 25 bp, Homo sapien
ccctggatgctccacaggagccgag

SEQ ID NO: 834894 - DNA, 25 bp, Homo sapien
caggagccgagctatcctgtagcga

SEQ ID NO: 834895 - DNA, 25 bp, Homo sapien
tgctccacaggagccgagctatcct

SEQ ID NO: 834896 - DNA, 25 bp, Homo sapien
gagctatcctgtagcgactccgcag

SEQ ID NO: 834897 - DNA, 25 bp, Homo sapien
gctctggggattgcgaagcaatctc

SEQ ID NO: 834898 - DNA, 25 bp, Homo sapien
ctgctctggggattgcgaagcaatc

SEQ ID NO: 834899 - DNA, 25 bp, Homo sapien
tggggattgcgaagcaatctctctc

SEQ ID NO: 834900 - DNA, 25 bp, Homo sapien
gattgcgaagcaatctctctcctct

SEQ ID NO: 834901 - DNA, 25 bp, Homo sapien
ctctcccctgatgggctggtgtgtc

SEQ ID NO: 834902 - DNA, 25 bp, Homo sapien
ctggtgtgtctttgacaggctgctg

SEQ ID NO: 834903 - DNA, 25 bp, Homo sapien
tggtgtgtctttgacaggctgctgg

SEQ ID NO: 834904 - DNA, 25 bp, Homo sapien
ctcccctgatgggctggtgtgtctt

SEQ ID NO: 834905 - DNA, 25 bp, Homo sapien
catgttttcaggttcgcttctcttt

SEQ ID NO: 834906 - DNA, 25 bp, Homo sapien
cccatgttttcaggttcgcttctct

SEQ ID NO: 834907 - DNA, 25 bp, Homo sapien
tgttttcaggttcgcttctctttgg

SEQ ID NO: 834908 - DNA, 25 bp, Homo sapien
ccccatgttttcaggttcgcttctc

SEQ ID NO: 834909 - DNA, 25 bp, Homo sapien
ccctgctccacagtagacacctggt

SEQ ID NO: 834910 - DNA, 25 bp, Homo sapien
cctgctccacagtagacacctggtt

SEQ ID NO: 834911 - DNA, 25 bp, Homo sapien
tggggcgcagtcttcccttccagct

SEQ ID NO: 834912 - DNA, 25 bp, Homo sapien
gactgctcctggggcgcagtcttcc

SEQ ID NO: 834913 - DNA, 25 bp, Homo sapien
cacaaaggctacttgctgacaccag

SEQ ID NO: 834914 - DNA, 25 bp, Homo sapien
cgttctgtgacagtgctgcctcggg

SEQ ID NO: 834915 - DNA, 25 bp, Homo sapien
cagtgtggagactcacaggacccag

SEQ ID NO: 834916 - DNA, 25 bp, Homo sapien
caggttggattcgtgtctggacaca

SEQ ID NO: 834917 - DNA, 25 bp, Homo sapien
catttacacaggcatttagtcatca

SEQ ID NO: 834918 - DNA, 25 bp, Homo sapien
catcttgagttgtccgtttcagtca

SEQ ID NO: 834919 - DNA, 25 bp, Homo sapien
cacaattatcctctttttgggtgga

SEQ ID NO: 834920 - DNA, 25 bp, Homo sapien
taaatcagagggcaattactggcat

SEQ ID NO: 834921 - DNA, 25 bp, Homo sapien
gcgtacgtggttccttcttctaaga

SEQ ID NO: 834922 - DNA, 25 bp, Homo sapien
cgatgactaagctgaaggctgacct

SEQ ID NO: 834923 - DNA, 25 bp, Homo sapien
gactattctgcaaccgcgatgacta

SEQ ID NO: 834924 - DNA, 25 bp, Homo sapien
cctggcattcgggtccttagaagat

SEQ ID NO: 834925 - DNA, 25 bp, Homo sapien
atgaggtagtttctgtctgtagaat

SEQ ID NO: 834926 - DNA, 25 bp, Homo sapien
gaatgcaggaaatcacccatattcg

SEQ ID NO: 834927 - DNA, 25 bp, Homo sapien
taggatgcgcttcaggtttcaggtg

SEQ ID NO: 834928 - DNA, 25 bp, Homo sapien
caggaaatcacccatattcgaagaa

SEQ ID NO: 834929 - DNA, 25 bp, Homo sapien
atctggaaagagctggatttcccag

SEQ ID NO: 834930 - DNA, 25 bp, Homo sapien
aggctggaataccaagggcaggaga

SEQ ID NO: 834931 - DNA, 25 bp, Homo sapien
atccaagaaggctggaataccaagg

SEQ ID NO: 834932 - DNA, 25 bp, Homo sapien
gctgatctggaaagagctggatttc

SEQ ID NO: 834933 - DNA, 25 bp, Homo sapien
actgggttctagatgctgtggatta

SEQ ID NO: 834934 - DNA, 25 bp, Homo sapien
actactagcactgagaggcaaaggc

SEQ ID NO: 834935 - DNA, 25 bp, Homo sapien
ggacacaacacatgctccacactgg

SEQ ID NO: 834936 - DNA, 25 bp, Homo sapien
tgcaaattactaccatcagggatca

SEQ ID NO: 834937 - DNA, 25 bp, Homo sapien
tccttcagatggatcatcaagttgg

SEQ ID NO: 834938 - DNA, 25 bp, Homo sapien
cttcagatggatcatcaagttggac

SEQ ID NO: 834939 - DNA, 25 bp, Homo sapien
aaatccttcagatggatcatcaagt

SEQ ID NO: 834940 - DNA, 25 bp, Homo sapien
cagatggatcatcaagttggactct

SEQ ID NO: 834941 - DNA, 25 bp, Homo sapien
tggagaattggctctcagtgacttg

SEQ ID NO: 834942 - DNA, 25 bp, Homo sapien
agaattggctctcagtgacttggct

SEQ ID NO: 834943 - DNA, 25 bp, Homo sapien
ttctggagaattggctctcagtgac

SEQ ID NO: 834944 - DNA, 25 bp, Homo sapien
cttggcttgcttcaggggtaaaggt

SEQ ID NO: 834945 - DNA, 25 bp, Homo sapien
tcccattagagcttgccgggctgcc

SEQ ID NO: 834946 - DNA, 25 bp, Homo sapien
gagtgtgtgatcagggcgtatcctt

SEQ ID NO: 834947 - DNA, 25 bp, Homo sapien
gatcagggcgtatccttcccattag

SEQ ID NO: 834948 - DNA, 25 bp, Homo sapien
gggctgcctcgtgctgtctgtgtat

SEQ ID NO: 834949 - DNA, 25 bp, Homo sapien
agttgtataatagtgtagaccactg

SEQ ID NO: 834950 - DNA, 25 bp, Homo sapien
ctaaagttgtataatagtgtagacc

SEQ ID NO: 834951 - DNA, 25 bp, Homo sapien
aggatatggtccaaatggaggttta

SEQ ID NO: 834952 - DNA, 25 bp, Homo sapien
atggaggtttaaaatagtcttcaca

SEQ ID NO: 834953 - DNA, 25 bp, Homo sapien
tgtcattacgggtctgcttttcact

SEQ ID NO: 834954 - DNA, 25 bp, Homo sapien
tcaactttgtcattacgggtctgct

SEQ ID NO: 834955 - DNA, 25 bp, Homo sapien
actttgtcattacgggtctgctttt

SEQ ID NO: 834956 - DNA, 25 bp, Homo sapien
gcttttcactgtcaaagttgattat

SEQ ID NO: 834957 - DNA, 25 bp, Homo sapien
ccagatggtggctgattgaagtatt

SEQ ID NO: 834958 - DNA, 25 bp, Homo sapien
tgtctcatcactggatgccctcaga

SEQ ID NO: 834959 - DNA, 25 bp, Homo sapien
ttggtaggacctcggcaaggaatca

SEQ ID NO: 834960 - DNA, 25 bp, Homo sapien
ttatagaccgtgctcttgacctccc

SEQ ID NO: 834961 - DNA, 25 bp, Homo sapien
tgcagctctcatggcagatttcagg

SEQ ID NO: 834962 - DNA, 25 bp, Homo sapien
taagccattacgttttggataaatc

SEQ ID NO: 834963 - DNA, 25 bp, Homo sapien
gaaattgatcacacgaaaatggctg

SEQ ID NO: 834964 - DNA, 25 bp, Homo sapien
taatgagggccaacgtcttaaaaga

SEQ ID NO: 834965 - DNA, 25 bp, Homo sapien
aaggcaattcttttgaccacggaca

SEQ ID NO: 834966 - DNA, 25 bp, Homo sapien
aaatgctcccctccggaggctggaa

SEQ ID NO: 834967 - DNA, 25 bp, Homo sapien
gatcctaggtgtgaagaaatgctcc

SEQ ID NO: 834968 - DNA, 25 bp, Homo sapien
gaaccgaaacaatgaacatttcatg

SEQ ID NO: 834969 - DNA, 25 bp, Homo sapien
tccaaagagcatgtggtcgttgtcc

SEQ ID NO: 834970 - DNA, 25 bp, Homo sapien
cctcttccaaagagcatgtggtcgt

SEQ ID NO: 834971 - DNA, 25 bp, Homo sapien
caaagcctcttccaaagagcatgtg

SEQ ID NO: 834972 - DNA, 25 bp, Homo sapien
tcttccaaagagcatgtggtcgttg

SEQ ID NO: 834973 - DNA, 25 bp, Homo sapien
cctattgacacccagattattctct

SEQ ID NO: 834974 - DNA, 25 bp, Homo sapien
gaaaagtgcaatggccattctgcct

SEQ ID NO: 834975 - DNA, 25 bp, Homo sapien
ctctttctggacatgcatgttcaca

SEQ ID NO: 834976 - DNA, 25 bp, Homo sapien
tatttgtgaacactgccgcggagcc

SEQ ID NO: 834977 - DNA, 25 bp, Homo sapien
gcaggaagacatctggatgtcagtt

SEQ ID NO: 834978 - DNA, 25 bp, Homo sapien
gcatgatataagcaccagaacaatt

SEQ ID NO: 834979 - DNA, 25 bp, Homo sapien
gaattcgttcatgacaaactataag

SEQ ID NO: 834980 - DNA, 25 bp, Homo sapien
ccagaacaatttctagaattcgttc

SEQ ID NO: 834981 - DNA, 25 bp, Homo sapien
tgttgcatgatataagcaccagaac

SEQ ID NO: 834982 - DNA, 25 bp, Homo sapien
ctacctgcggccctgagggattgga

SEQ ID NO: 834983 - DNA, 25 bp, Homo sapien
tttgacgttggaacctgggcgactg

SEQ ID NO: 834984 - DNA, 25 bp, Homo sapien
tctgtgttggtgagactctttttca

SEQ ID NO: 834985 - DNA, 25 bp, Homo sapien
actgggaccgagtgttgtctgtgtt

SEQ ID NO: 834986 - DNA, 25 bp, Homo sapien
gacaccagccaaagaatcacaagag

SEQ ID NO: 834987 - DNA, 25 bp, Homo sapien
caaggaattcgacatcagcagagca

SEQ ID NO: 834988 - DNA, 25 bp, Homo sapien
catggccaggtaaggcaaggaattc

SEQ ID NO: 834989 - DNA, 25 bp, Homo sapien
ttaaggcaggtagaacattcttccg

SEQ ID NO: 834990 - DNA, 25 bp, Homo sapien
aattccttttgagagatgcagtcga

SEQ ID NO: 834991 - DNA, 25 bp, Homo sapien
catatcacggtgcagagatcttggg

SEQ ID NO: 834992 - DNA, 25 bp, Homo sapien
catctgatatttccgagcagggagc

SEQ ID NO: 834993 - DNA, 25 bp, Homo sapien
tcccagttggatatatcagaaagcc

SEQ ID NO: 834994 - DNA, 25 bp, Homo sapien
aggaactttaatcagctcctgtttg

SEQ ID NO: 834995 - DNA, 25 bp, Homo sapien
tcttgaagattcttggaatacagag

SEQ ID NO: 834996 - DNA, 25 bp, Homo sapien
aaaggaactttaatcagctcctgtt

SEQ ID NO: 834997 - DNA, 25 bp, Homo sapien
gaagattcttggaatacagagacat

SEQ ID NO: 834998 - DNA, 25 bp, Homo sapien
tggattgccagaactttagccggat

SEQ ID NO: 834999 - DNA, 25 bp, Homo sapien
acagacatggtcctcttggattgcc

SEQ ID NO: 835000 - DNA, 25 bp, Homo sapien
tcctcttggattgccagaactttag

SEQ ID NO: 835001 - DNA, 25 bp, Homo sapien
ttgccagaactttagccggatccat

SEQ ID NO: 835002 - DNA, 25 bp, Homo sapien
tggtctctgatatccttcccgttgg

SEQ ID NO: 835003 - DNA, 25 bp, Homo sapien
ggcgatgatctctccgcagtcctgg

SEQ ID NO: 835004 - DNA, 25 bp, Homo sapien
ccccaaactcggtggtctctgatat

SEQ ID NO: 835005 - DNA, 25 bp, Homo sapien
aaaggtcagagaaagcatccactgg

SEQ ID NO: 835006 - DNA, 25 bp, Homo sapien
cataaacttcccttgaatgtagatg

SEQ ID NO: 835007 - DNA, 25 bp, Homo sapien
agcctcttccaaaacgggtatggtg

SEQ ID NO: 835008 - DNA, 25 bp, Homo sapien
gggcataaacttcccttgaatgtag

SEQ ID NO: 835009 - DNA, 25 bp, Homo sapien
ggaatggggcataaacttcccttga

SEQ ID NO: 835010 - DNA, 25 bp, Homo sapien
agcacagtccgcaggcattcgaagg

SEQ ID NO: 835011 - DNA, 25 bp, Homo sapien
cattcgaaggagataatgaaaactc

SEQ ID NO: 835012 - DNA, 25 bp, Homo sapien
cgcaggcattcgaaggagataatga

SEQ ID NO: 835013 - DNA, 25 bp, Homo sapien
gcacagtccgcaggcattcgaagga

SEQ ID NO: 835014 - DNA, 25 bp, Homo sapien
tgctgctgcgtccatgcccattcct

SEQ ID NO: 835015 - DNA, 25 bp, Homo sapien
caactctttcaaggagatggtgtgg

SEQ ID NO: 835016 - DNA, 25 bp, Homo sapien
acttgcgatgctgaaggagaatctc

SEQ ID NO: 835017 - DNA, 25 bp, Homo sapien
gtgtggcttgtgccctctgtggtct

SEQ ID NO: 835018 - DNA, 25 bp, Homo sapien
tagattatccttgtccgactgccag

SEQ ID NO: 835019 - DNA, 25 bp, Homo sapien
tggaacacactcacatttacagtat

SEQ ID NO: 835020 - DNA, 25 bp, Homo sapien
cataaagagatttagctgagcttca

SEQ ID NO: 835021 - DNA, 25 bp, Homo sapien
gactgccagacaagcaacgaggtct

SEQ ID NO: 835022 - DNA, 25 bp, Homo sapien
atggcacatctgcaaaagcccactt

SEQ ID NO: 835023 - DNA, 25 bp, Homo sapien
gggctgggtcagtcactcaaggaag

SEQ ID NO: 835024 - DNA, 25 bp, Homo sapien
aatggcacatctgcaaaagcccact

SEQ ID NO: 835025 - DNA, 25 bp, Homo sapien
taaaatggcacatctgcaaaagccc

SEQ ID NO: 835026 - DNA, 25 bp, Homo sapien
tgcattatgccacctcaaaaatctc

SEQ ID NO: 835027 - DNA, 25 bp, Homo sapien
cattatgccacctcaaaaatctcag

SEQ ID NO: 835028 - DNA, 25 bp, Homo sapien
gccacctcaaaaatctcagtaatga

SEQ ID NO: 835029 - DNA, 25 bp, Homo sapien
tatgccacctcaaaaatctcagtaa

SEQ ID NO: 835030 - DNA, 25 bp, Homo sapien
ccagtacatgctcctctgtaagcag

SEQ ID NO: 835031 - DNA, 25 bp, Homo sapien
gacaatcttgaataggaggaacgct

SEQ ID NO: 835032 - DNA, 25 bp, Homo sapien
gaggaacgctgttgctgtaatatgc

SEQ ID NO: 835033 - DNA, 25 bp, Homo sapien
tctttacttagctggaaccttacat

SEQ ID NO: 835034 - DNA, 25 bp, Homo sapien
tgttaagagtcacgacccatcaagg

SEQ ID NO: 835035 - DNA, 25 bp, Homo sapien
tcaagtgggaggataaggcttcacc

SEQ ID NO: 835036 - DNA, 25 bp, Homo sapien
gatgtgtaaatcaggtcaaacctca

SEQ ID NO: 835037 - DNA, 25 bp, Homo sapien
gctcagcaccgcaagagccatggct

SEQ ID NO: 835038 - DNA, 25 bp, Homo sapien
tttgttaatgccgagctacccgcag

SEQ ID NO: 835039 - DNA, 25 bp, Homo sapien
gatgttcccctgagctgattcccag

SEQ ID NO: 835040 - DNA, 25 bp, Homo sapien
tgagccagccgtgcaaaaggaaatc

SEQ ID NO: 835041 - DNA, 25 bp, Homo sapien
caggagtggccaagtaaaccgagac

SEQ ID NO: 835042 - DNA, 25 bp, Homo sapien
cttggaggtgcctgtcattgtaacc

SEQ ID NO: 835043 - DNA, 25 bp, Homo sapien
tggcggtttcaaattggtacccata

SEQ ID NO: 835044 - DNA, 25 bp, Homo sapien
tcagagctgccgtagcggaccttca

SEQ ID NO: 835045 - DNA, 25 bp, Homo sapien
attgtaaccataggaagactccaac

SEQ ID NO: 835046 - DNA, 25 bp, Homo sapien
ctcctagatttgccagagtcccttt

SEQ ID NO: 835047 - DNA, 25 bp, Homo sapien
cagctcctagatttgccagagtccc

SEQ ID NO: 835048 - DNA, 25 bp, Homo sapien
gctcctagatttgccagagtccctt

SEQ ID NO: 835049 - DNA, 25 bp, Homo sapien
tcagctcctagatttgccagagtcc

SEQ ID NO: 835050 - DNA, 25 bp, Homo sapien
tcgctggatttattctgcggtaagc

SEQ ID NO: 835051 - DNA, 25 bp, Homo sapien
cagaagagatgctagtggtgtagta

SEQ ID NO: 835052 - DNA, 25 bp, Homo sapien
tcttttggcacaggaatggtcattc

SEQ ID NO: 835053 - DNA, 25 bp, Homo sapien
tgcggtaagctggagacagagacca

SEQ ID NO: 835054 - DNA, 25 bp, Homo sapien
aaagtgtgtgtctacttgcacatca

SEQ ID NO: 835055 - DNA, 25 bp, Homo sapien
acatcctttgaatgtcatccgtctc

SEQ ID NO: 835056 - DNA, 25 bp, Homo sapien
tttgaatgtcatccgtctcttcacg

SEQ ID NO: 835057 - DNA, 25 bp, Homo sapien
gtctacttgcacatcacatcctttg

SEQ ID NO: 835058 - DNA, 25 bp, Homo sapien
tgtatgtcggcaccttgcacgtagt

SEQ ID NO: 835059 - DNA, 25 bp, Homo sapien
taataaagctaattgcctctgcagt

SEQ ID NO: 835060 - DNA, 25 bp, Homo sapien
aattatgccatggaagagaggcacc

SEQ ID NO: 835061 - DNA, 25 bp, Homo sapien
tcccagtccagcttgagtgagaatg

SEQ ID NO: 835062 - DNA, 25 bp, Homo sapien
ggactcttgagagcagaatgcaaca

SEQ ID NO: 835063 - DNA, 25 bp, Homo sapien
gaaaagcaacagatcctagtaagga

SEQ ID NO: 835064 - DNA, 25 bp, Homo sapien
ccccagagaatggatgattggatta

SEQ ID NO: 835065 - DNA, 25 bp, Homo sapien
gaatgcaacatcacatctggtctat

SEQ ID NO: 835066 - DNA, 25 bp, Homo sapien
gcagctgatcaggtaagaggccaca

SEQ ID NO: 835067 - DNA, 25 bp, Homo sapien
tctctgtgtcgaactgaatagctct

SEQ ID NO: 835068 - DNA, 25 bp, Homo sapien
tctttaccagtgaggcccaatcatg

SEQ ID NO: 835069 - DNA, 25 bp, Homo sapien
tggattccttgtcccaaaatagtga

SEQ ID NO: 835070 - DNA, 25 bp, Homo sapien
ttgtgaatgcgtgagcaagggtggc

SEQ ID NO: 835071 - DNA, 25 bp, Homo sapien
gtgaatgcgtgagcaagggtggctt

SEQ ID NO: 835072 - DNA, 25 bp, Homo sapien
tgtgaatgcgtgagcaagggtggct

SEQ ID NO: 835073 - DNA, 25 bp, Homo sapien
tgaatgcgtgagcaagggtggcttt

SEQ ID NO: 835074 - DNA, 25 bp, Homo sapien
catgcccctgcatatgatatttaga

SEQ ID NO: 835075 - DNA, 25 bp, Homo sapien
tgagcgtggtgaacaactatgccct

SEQ ID NO: 835076 - DNA, 25 bp, Homo sapien
tatttagatccgtaagtgctgccgg

SEQ ID NO: 835077 - DNA, 25 bp, Homo sapien
gaatctcaacattgccatgcccctg

SEQ ID NO: 835078 - DNA, 25 bp, Homo sapien
tgacatggcataatagtgatgcaat

SEQ ID NO: 835079 - DNA, 25 bp, Homo sapien
gtagttgacatggcataatagtgat

SEQ ID NO: 835080 - DNA, 25 bp, Homo sapien
tagttgacatggcataatagtgatg

SEQ ID NO: 835081 - DNA, 25 bp, Homo sapien
gttgacatggcataatagtgatgca

SEQ ID NO: 835082 - DNA, 25 bp, Homo sapien
tgtgtttcgaaaaggcttcataagt

SEQ ID NO: 835083 - DNA, 25 bp, Homo sapien
cattggtagctatacaacagtgtgt

SEQ ID NO: 835084 - DNA, 25 bp, Homo sapien
aaataaataattccattggtagcta

SEQ ID NO: 835085 - DNA, 25 bp, Homo sapien
tatttgagtacattagggagatttt

SEQ ID NO: 835086 - DNA, 25 bp, Homo sapien
cctgaggtaaaggtgcacggcatcc

SEQ ID NO: 835087 - DNA, 25 bp, Homo sapien
catcctgggacatgtagtctggccg

SEQ ID NO: 835088 - DNA, 25 bp, Homo sapien
gaaacactgacgctttgggacttca

SEQ ID NO: 835089 - DNA, 25 bp, Homo sapien
aatgggaccgaagctgactgcgaac

SEQ ID NO: 835090 - DNA, 25 bp, Homo sapien
ccacgggaaaataccctctagtgct

SEQ ID NO: 835091 - DNA, 25 bp, Homo sapien
ccaaatacttgagggatcgtttctt

SEQ ID NO: 835092 - DNA, 25 bp, Homo sapien
taacaggcataatgagtcggcagcc

SEQ ID NO: 835093 - DNA, 25 bp, Homo sapien
taactcccattaaccataacaggca

SEQ ID NO: 835094 - DNA, 25 bp, Homo sapien
gctgccagtatcctcctatccttct

SEQ ID NO: 835095 - DNA, 25 bp, Homo sapien
ggtctcattctcccatgaagcctct

SEQ ID NO: 835096 - DNA, 25 bp, Homo sapien
gtctcattctcccatgaagcctctt

SEQ ID NO: 835097 - DNA, 25 bp, Homo sapien
tatccttctgtgaccaccaagtttt

SEQ ID NO: 835098 - DNA, 25 bp, Homo sapien
ggacacctggaacggtctgtggtcc

SEQ ID NO: 835099 - DNA, 25 bp, Homo sapien
tgttcattgagttcacatggtccca

SEQ ID NO: 835100 - DNA, 25 bp, Homo sapien
agttcacatggtcccaagtggctct

SEQ ID NO: 835101 - DNA, 25 bp, Homo sapien
tctgtggtccgggtagagggagaag

SEQ ID NO: 835102 - DNA, 25 bp, Homo sapien
cggaagcgcatttggatagtcccat

SEQ ID NO: 835103 - DNA, 25 bp, Homo sapien
ggtaaagagaatacagacttgagtc

SEQ ID NO: 835104 - DNA, 25 bp, Homo sapien
ttttcactgctgagaggtaaagaga

SEQ ID NO: 835105 - DNA, 25 bp, Homo sapien
tagtcccattttggcactgtcccca

SEQ ID NO: 835106 - DNA, 25 bp, Homo sapien
cattttgtacaagtgggtctattcc

SEQ ID NO: 835107 - DNA, 25 bp, Homo sapien
ccgttgagtgtgtgcagtccagatg

SEQ ID NO: 835108 - DNA, 25 bp, Homo sapien
tatgatcgttatgtaattggcatcc

SEQ ID NO: 835109 - DNA, 25 bp, Homo sapien
actggatccattttgtacaagtggg

SEQ ID NO: 835110 - DNA, 25 bp, Homo sapien
tttccgtcaatcaaaccctcaagcg

SEQ ID NO: 835111 - DNA, 25 bp, Homo sapien
gaatcaggaaccatccggttggtcc

SEQ ID NO: 835112 - DNA, 25 bp, Homo sapien
ctgtttgaagttacgggatatccac

SEQ ID NO: 835113 - DNA, 25 bp, Homo sapien
caggattttcccaatgacccctttg

SEQ ID NO: 835114 - DNA, 25 bp, Homo sapien
ttgggctcttttgctgctcttgtaa

SEQ ID NO: 835115 - DNA, 25 bp, Homo sapien
gatagtttgggctcttttgctgctc

SEQ ID NO: 835116 - DNA, 25 bp, Homo sapien
cttgatggtttctgtgatagtttgg

SEQ ID NO: 835117 - DNA, 25 bp, Homo sapien
tctgtgatagtttgggctcttttgc

SEQ ID NO: 835118 - DNA, 25 bp, Homo sapien
agcggttctcttgccctgccttcag

SEQ ID NO: 835119 - DNA, 25 bp, Homo sapien
caactgtcttaagggtggtgaagcg

SEQ ID NO: 835120 - DNA, 25 bp, Homo sapien
actgtcttaagggtggtgaagcggt

SEQ ID NO: 835121 - DNA, 25 bp, Homo sapien
cccaactgtcttaagggtggtgaag

SEQ ID NO: 835122 - DNA, 25 bp, Homo sapien
tgatggatgaaacactgtaactcag

SEQ ID NO: 835123 - DNA, 25 bp, Homo sapien
tgtaccagaaacagtgcaataaatc

SEQ ID NO: 835124 - DNA, 25 bp, Homo sapien
cactgtaactcagaggtgcaaagaa

SEQ ID NO: 835125 - DNA, 25 bp, Homo sapien
tctcaaataagataacctcccatgt

SEQ ID NO: 835126 - DNA, 25 bp, Homo sapien
cctgtagtgaaatcctacttgttaa

SEQ ID NO: 835127 - DNA, 25 bp, Homo sapien
tagtgaaatcctacttgttaaaata

SEQ ID NO: 835128 - DNA, 25 bp, Homo sapien
catcctgtagtgaaatcctacttgt

SEQ ID NO: 835129 - DNA, 25 bp, Homo sapien
ttcatcctgtagtgaaatcctactt

SEQ ID NO: 835130 - DNA, 25 bp, Homo sapien
gtagggtttcccatgtccctgcatc

SEQ ID NO: 835131 - DNA, 25 bp, Homo sapien
tgtgtagggtttcccatgtccctgc

SEQ ID NO: 835132 - DNA, 25 bp, Homo sapien
agtgtgtgtagggtttcccatgtcc

SEQ ID NO: 835133 - DNA, 25 bp, Homo sapien
ggccagtgtgtgtagggtttcccat

SEQ ID NO: 835134 - DNA, 25 bp, Homo sapien
ctgctgcacctgtatgacatcttca

SEQ ID NO: 835135 - DNA, 25 bp, Homo sapien
cactgctgcacctgtatgacatctt

SEQ ID NO: 835136 - DNA, 25 bp, Homo sapien
gctgcacctgtatgacatcttcaga

SEQ ID NO: 835137 - DNA, 25 bp, Homo sapien
gcacctgtatgacatcttcagatcc

SEQ ID NO: 835138 - DNA, 25 bp, Homo sapien
cagttggtcaagttctgtgcattcc

SEQ ID NO: 835139 - DNA, 25 bp, Homo sapien
tcaatccagttggtcaagttctgtg

SEQ ID NO: 835140 - DNA, 25 bp, Homo sapien
gttggtcaagttctgtgcattcctc

SEQ ID NO: 835141 - DNA, 25 bp, Homo sapien
tggtcaagttctgtgcattcctcac

SEQ ID NO: 835142 - DNA, 25 bp, Homo sapien
gtaatccttgctcaagaaactgaag

SEQ ID NO: 835143 - DNA, 25 bp, Homo sapien
gctaagccctcccagaggatgatct

SEQ ID NO: 835144 - DNA, 25 bp, Homo sapien
agctctgaggccacattgttccagc

SEQ ID NO: 835145 - DNA, 25 bp, Homo sapien
tgcagctcctgcatgtggataccag

SEQ ID NO: 835146 - DNA, 25 bp, Homo sapien
gcatcgccctgacggtcatcatgtg

SEQ ID NO: 835147 - DNA, 25 bp, Homo sapien
cgccctgacggtcatcatgtgcttc

SEQ ID NO: 835148 - DNA, 25 bp, Homo sapien
atcgccctgacggtcatcatgtgct

SEQ ID NO: 835149 - DNA, 25 bp, Homo sapien
tggcatcgccctgacggtcatcatg

SEQ ID NO: 835150 - DNA, 25 bp, Homo sapien
tctaccaggtcaaaatagtgccact

SEQ ID NO: 835151 - DNA, 25 bp, Homo sapien
tccttgcaaatgtagtatggcctgt

SEQ ID NO: 835152 - DNA, 25 bp, Homo sapien
tcactcagcagtgggacagcaacct

SEQ ID NO: 835153 - DNA, 25 bp, Homo sapien
tgttggatctcaagagccctgtcag

SEQ ID NO: 835154 - DNA, 25 bp, Homo sapien
tgagcagccaggatatgaccacctt

SEQ ID NO: 835155 - DNA, 25 bp, Homo sapien
caccttactcagctacaacaggaac

SEQ ID NO: 835156 - DNA, 25 bp, Homo sapien
gcagccaggatatgaccaccttact

SEQ ID NO: 835157 - DNA, 25 bp, Homo sapien
ctacaacaggaactggagggtctgt

SEQ ID NO: 835158 - DNA, 25 bp, Homo sapien
tggatcaagcccatcaaggctttct

SEQ ID NO: 835159 - DNA, 25 bp, Homo sapien
ctgagaggcaactgggctcatctct

SEQ ID NO: 835160 - DNA, 25 bp, Homo sapien
gcacaggctactgagaggcaactgg

SEQ ID NO: 835161 - DNA, 25 bp, Homo sapien
ccagctggagcccattgcacaggct

SEQ ID NO: 835162 - DNA, 25 bp, Homo sapien
gctactgagaggcaactgggctcat

SEQ ID NO: 835163 - DNA, 25 bp, Homo sapien
tggcccatcaaggacctgtaactgt

SEQ ID NO: 835164 - DNA, 25 bp, Homo sapien
tcttcttgagtccttcttggcccat

SEQ ID NO: 835165 - DNA, 25 bp, Homo sapien
ttcttccagctcaatacagtttctc

SEQ ID NO: 835166 - DNA, 25 bp, Homo sapien
ctgtaactgtgaaacaccaggccct

SEQ ID NO: 835167 - DNA, 25 bp, Homo sapien
tgcctccttcaggatcggttggtcc

SEQ ID NO: 835168 - DNA, 25 bp, Homo sapien
gtaagacgtttgactagcctgggcc

SEQ ID NO: 835169 - DNA, 25 bp, Homo sapien
ttgggtcacagaggcctttttgtct

SEQ ID NO: 835170 - DNA, 25 bp, Homo sapien
ctttttgtctataaaccaggtgttg

SEQ ID NO: 835171 - DNA, 25 bp, Homo sapien
ggcagtggcacttaggttctacaaa

SEQ ID NO: 835172 - DNA, 25 bp, Homo sapien
ggttagcatccaagcaagaccaatg

SEQ ID NO: 835173 - DNA, 25 bp, Homo sapien
tatagtcaagggttgcttccagcag

SEQ ID NO: 835174 - DNA, 25 bp, Homo sapien
ggcgtagctccaacaaaataaggta

SEQ ID NO: 835175 - DNA, 25 bp, Homo sapien
tctcacgtcctgctctctgttgctg

SEQ ID NO: 835176 - DNA, 25 bp, Homo sapien
tgagcaggtagaagtctcacgtcct

SEQ ID NO: 835177 - DNA, 25 bp, Homo sapien
tagaagtctcacgtcctgctctctg

SEQ ID NO: 835178 - DNA, 25 bp, Homo sapien
agaaatgattctgagtgagcaggta

SEQ ID NO: 835179 - DNA, 25 bp, Homo sapien
aggcccacaatgggcatcttggctt

SEQ ID NO: 835180 - DNA, 25 bp, Homo sapien
ggcccacaatgggcatcttggcttt

SEQ ID NO: 835181 - DNA, 25 bp, Homo sapien
tcatgttcattctgatagacatagg

SEQ ID NO: 835182 - DNA, 25 bp, Homo sapien
cattctgatagacataggcacagtc

SEQ ID NO: 835183 - DNA, 25 bp, Homo sapien
tgttcattctgatagacataggcac

SEQ ID NO: 835184 - DNA, 25 bp, Homo sapien
ttcattctgatagacataggcacag

SEQ ID NO: 835185 - DNA, 25 bp, Homo sapien
cagccacgacatgttcaaatatcaa

SEQ ID NO: 835186 - DNA, 25 bp, Homo sapien
tatgggaaaaccaacctacaggcag

SEQ ID NO: 835187 - DNA, 25 bp, Homo sapien
gaggcttcagatcaagacccgcctg

SEQ ID NO: 835188 - DNA, 25 bp, Homo sapien
gttccatggaaccaagcccactatg

SEQ ID NO: 835189 - DNA, 25 bp, Homo sapien
caaagagtgtagcaatgagctatta

SEQ ID NO: 835190 - DNA, 25 bp, Homo sapien
tgcaaagagtgtagcaatgagctat

SEQ ID NO: 835191 - DNA, 25 bp, Homo sapien
ctgcaaagagtgtagcaatgagcta

SEQ ID NO: 835192 - DNA, 25 bp, Homo sapien
agagtgtagcaatgagctattaata

SEQ ID NO: 835193 - DNA, 25 bp, Homo sapien
cttctcaaaggctttcctcacaagg

SEQ ID NO: 835194 - DNA, 25 bp, Homo sapien
gggtctctcaaagaaagtgggccac

SEQ ID NO: 835195 - DNA, 25 bp, Homo sapien
ggtctctcaaagaaagtgggccaca

SEQ ID NO: 835196 - DNA, 25 bp, Homo sapien
gctttcctcacaaggggtctctcaa

SEQ ID NO: 835197 - DNA, 25 bp, Homo sapien
taaaatctctgtatctactgtagca

SEQ ID NO: 835198 - DNA, 25 bp, Homo sapien
gactttaagatttgctgctagtaca

SEQ ID NO: 835199 - DNA, 25 bp, Homo sapien
ctggagtacatactttaggaatgtg

SEQ ID NO: 835200 - DNA, 25 bp, Homo sapien
ctaatattttagaaacgactggctt

SEQ ID NO: 835201 - DNA, 25 bp, Homo sapien
atcaggacacttggttctgttcaac

SEQ ID NO: 835202 - DNA, 25 bp, Homo sapien
acagaatgaaaagtttactggaatc

SEQ ID NO: 835203 - DNA, 25 bp, Homo sapien
gcatcaggacacttggttctgttca

SEQ ID NO: 835204 - DNA, 25 bp, Homo sapien
tgaaaagtttactggaatctgcatc

SEQ ID NO: 835205 - DNA, 25 bp, Homo sapien
caccgatggcattacctttatcatc

SEQ ID NO: 835206 - DNA, 25 bp, Homo sapien
tgcttttccaccgatggcattacct

SEQ ID NO: 835207 - DNA, 25 bp, Homo sapien
tttccaccgatggcattacctttat

SEQ ID NO: 835208 - DNA, 25 bp, Homo sapien
tccatgcgaatctcatggataactg

SEQ ID NO: 835209 - DNA, 25 bp, Homo sapien
atgcgaatctcatggataactgaag

SEQ ID NO: 835210 - DNA, 25 bp, Homo sapien
tggcctcattcatatccatgcgaat

SEQ ID NO: 835211 - DNA, 25 bp, Homo sapien
attcatatccatgcgaatctcatgg

SEQ ID NO: 835212 - DNA, 25 bp, Homo sapien
tcaggggagtccttcaggtagagta

SEQ ID NO: 835213 - DNA, 25 bp, Homo sapien
gggagtccttcaggtagagtataag

SEQ ID NO: 835214 - DNA, 25 bp, Homo sapien
agcccgcagttgtcaggggagtcct

SEQ ID NO: 835215 - DNA, 25 bp, Homo sapien
ccttcaggtagagtataagctgggc

SEQ ID NO: 835216 - DNA, 25 bp, Homo sapien
atttcagtccaggtttgttcaagag

SEQ ID NO: 835217 - DNA, 25 bp, Homo sapien
tatatttcagtccaggtttgttcaa

SEQ ID NO: 835218 - DNA, 25 bp, Homo sapien
tatttcagtccaggtttgttcaaga

SEQ ID NO: 835219 - DNA, 25 bp, Homo sapien
tttcagtccaggtttgttcaagagc

SEQ ID NO: 835220 - DNA, 25 bp, Homo sapien
cctcatcacggggaaagccggctct

SEQ ID NO: 835221 - DNA, 25 bp, Homo sapien
gcaacagcaaacaatcctcatcacg

SEQ ID NO: 835222 - DNA, 25 bp, Homo sapien
aacagcaaacaatcctcatcacggg

SEQ ID NO: 835223 - DNA, 25 bp, Homo sapien
acaatcctcatcacggggaaagccg

SEQ ID NO: 835224 - DNA, 25 bp, Homo sapien
ggtgatgcccttggagtggcagtac

SEQ ID NO: 835225 - DNA, 25 bp, Homo sapien
gtgatgcccttggagtggcagtact

SEQ ID NO: 835226 - DNA, 25 bp, Homo sapien
aagatgctgatgtgaataatcacca

SEQ ID NO: 835227 - DNA, 25 bp, Homo sapien
gaaagatgctgatgtgaataatcac

SEQ ID NO: 835228 - DNA, 25 bp, Homo sapien
atgctgatgtgaataatcaccatgg

SEQ ID NO: 835229 - DNA, 25 bp, Homo sapien
gggcagaaagatgctgatgtgaata

SEQ ID NO: 835230 - DNA, 25 bp, Homo sapien
tccagcagggaagggtcttctggct

SEQ ID NO: 835231 - DNA, 25 bp, Homo sapien
ttttgtgctttgcagcaatctcctt

SEQ ID NO: 835232 - DNA, 25 bp, Homo sapien
gcagcaatctccttaatcttgggat

SEQ ID NO: 835233 - DNA, 25 bp, Homo sapien
ctgggctgcggtttttttgtgcttt

SEQ ID NO: 835234 - DNA, 25 bp, Homo sapien
atcaggcttccactcagctccaaag

SEQ ID NO: 835235 - DNA, 25 bp, Homo sapien
tcaggcttccactcagctccaaaga

SEQ ID NO: 835236 - DNA, 25 bp, Homo sapien
gacatcaggcttccactcagctcca

SEQ ID NO: 835237 - DNA, 25 bp, Homo sapien
acatcaggcttccactcagctccaa

SEQ ID NO: 835238 - DNA, 25 bp, Homo sapien
tcctctggatatggaaacggatcag

SEQ ID NO: 835239 - DNA, 25 bp, Homo sapien
gggatgacaatcacattcctctgga

SEQ ID NO: 835240 - DNA, 25 bp, Homo sapien
cttggggatgacaatcacattcctc

SEQ ID NO: 835241 - DNA, 25 bp, Homo sapien
gaatgttctcaacaatgcgtgctgg

SEQ ID NO: 835242 - DNA, 25 bp, Homo sapien
tctctaaattaggtcctacacaaag

SEQ ID NO: 835243 - DNA, 25 bp, Homo sapien
tacacaaagaccacagtatttgtag

SEQ ID NO: 835244 - DNA, 25 bp, Homo sapien
tgtccacgggatacaaatttttctc

SEQ ID NO: 835245 - DNA, 25 bp, Homo sapien
ttcccattctgtccacgggatacaa

SEQ ID NO: 835246 - DNA, 25 bp, Homo sapien
tcatcactcaatttaaagtcaaaga

SEQ ID NO: 835247 - DNA, 25 bp, Homo sapien
gccatctcctcatcactcaatttaa

SEQ ID NO: 835248 - DNA, 25 bp, Homo sapien
ttgaagctgagtatggttgccatct

SEQ ID NO: 835249 - DNA, 25 bp, Homo sapien
gctgagtatggttgccatctcctca

SEQ ID NO: 835250 - DNA, 25 bp, Homo sapien
cattgaagggatagtcttccaaatg

SEQ ID NO: 835251 - DNA, 25 bp, Homo sapien
ttctgcattgaagggatagtcttcc

SEQ ID NO: 835252 - DNA, 25 bp, Homo sapien
atattctgcattgaagggatagtct

SEQ ID NO: 835253 - DNA, 25 bp, Homo sapien
tgaagggatagtcttccaaatgaga

SEQ ID NO: 835254 - DNA, 25 bp, Homo sapien
gaaagagaatctcctgtataatctc

SEQ ID NO: 835255 - DNA, 25 bp, Homo sapien
aagaaagagaatctcctgtataatc

SEQ ID NO: 835256 - DNA, 25 bp, Homo sapien
aagagaatctcctgtataatctcac

SEQ ID NO: 835257 - DNA, 25 bp, Homo sapien
tcagcgaagaaagagaatctcctgt

SEQ ID NO: 835258 - DNA, 25 bp, Homo sapien
aggactaagttcactgtgatcttaa

SEQ ID NO: 835259 - DNA, 25 bp, Homo sapien
ggacatgagtggaggtagtcacact

SEQ ID NO: 835260 - DNA, 25 bp, Homo sapien
aaacagcacctcgattctcgtctat

SEQ ID NO: 835261 - DNA, 25 bp, Homo sapien
gattctcgtctataacaggactaag

SEQ ID NO: 835262 - DNA, 25 bp, Homo sapien
taaacatttgttctgatcagataag

SEQ ID NO: 835263 - DNA, 25 bp, Homo sapien
ctcagtgttggcagagtttctgatg

SEQ ID NO: 835264 - DNA, 25 bp, Homo sapien
cagtgttggcagagtttctgatgct

SEQ ID NO: 835265 - DNA, 25 bp, Homo sapien
taataaacatttgttctgatcagat

SEQ ID NO: 835266 - DNA, 25 bp, Homo sapien
ctctttggcacaatggtgttgaagg

SEQ ID NO: 835267 - DNA, 25 bp, Homo sapien
tgaacactagcatctttgtggagtt

SEQ ID NO: 835268 - DNA, 25 bp, Homo sapien
ttggcacaatggtgttgaaggcaag

SEQ ID NO: 835269 - DNA, 25 bp, Homo sapien
tcaatgaacactagcatctttgtgg

SEQ ID NO: 835270 - DNA, 25 bp, Homo sapien
aaggaaatgccacacctctacttcc

SEQ ID NO: 835271 - DNA, 25 bp, Homo sapien
ttcccaaggaaatgccacacctcta

SEQ ID NO: 835272 - DNA, 25 bp, Homo sapien
ccaaggaaatgccacacctctactt

SEQ ID NO: 835273 - DNA, 25 bp, Homo sapien
tcccaaggaaatgccacacctctac

SEQ ID NO: 835274 - DNA, 25 bp, Homo sapien
ctgtggagccctggaacgtcttcag

SEQ ID NO: 835275 - DNA, 25 bp, Homo sapien
agtcgatccgttcccctccagaaga

SEQ ID NO: 835276 - DNA, 25 bp, Homo sapien
tttggctgggcgcaccggcagtcga

SEQ ID NO: 835277 - DNA, 25 bp, Homo sapien
acagtggcctgtggagccctggaac

SEQ ID NO: 835278 - DNA, 25 bp, Homo sapien
tagagacgctggacttgctgcaaca

SEQ ID NO: 835279 - DNA, 25 bp, Homo sapien
gggatcctcagccagtgggacttag

SEQ ID NO: 835280 - DNA, 25 bp, Homo sapien
cacggcctgggaggctatggtatca

SEQ ID NO: 835281 - DNA, 25 bp, Homo sapien
tccacgactcgaaagcaaaatgttc

SEQ ID NO: 835282 - DNA, 25 bp, Homo sapien
caatagctgctgacgtagctatgct

SEQ ID NO: 835283 - DNA, 25 bp, Homo sapien
ctgttgagatagtgatattagtcca

SEQ ID NO: 835284 - DNA, 25 bp, Homo sapien
tgacgtagctatgctaaggccagct

SEQ ID NO: 835285 - DNA, 25 bp, Homo sapien
tcagggcagtcgtgccaatagctgc

SEQ ID NO: 835286 - DNA, 25 bp, Homo sapien
ttagttgagttcacttggggttcca

SEQ ID NO: 835287 - DNA, 25 bp, Homo sapien
ccttggtggaagttgttagttgagt

SEQ ID NO: 835288 - DNA, 25 bp, Homo sapien
ctgcacttgtagtgtccttcagaag

SEQ ID NO: 835289 - DNA, 25 bp, Homo sapien
cctgcacttgtagtgtccttcagaa

SEQ ID NO: 835290 - DNA, 25 bp, Homo sapien
tggaagggtatctgagcggttccct

SEQ ID NO: 835291 - DNA, 25 bp, Homo sapien
gaagtctcacgtcctgctgtgtcca

SEQ ID NO: 835292 - DNA, 25 bp, Homo sapien
cgtggtgatcgttgtagctcttaaa

SEQ ID NO: 835293 - DNA, 25 bp, Homo sapien
gccgtggaccttcacagtgtgtgtt

SEQ ID NO: 835294 - DNA, 25 bp, Homo sapien
cacaatgggcatcttggcttttgta

SEQ ID NO: 835295 - DNA, 25 bp, Homo sapien
gcccacaatgggcatcttggctttt

SEQ ID NO: 835296 - DNA, 25 bp, Homo sapien
aatgggcatcttggcttttgtactg

SEQ ID NO: 835297 - DNA, 25 bp, Homo sapien
tttgtactgagctccacaaacgtgg

SEQ ID NO: 835298 - DNA, 25 bp, Homo sapien
ccctccagagaagaaagttgtgcaa

SEQ ID NO: 835299 - DNA, 25 bp, Homo sapien
ccgacctccaggcttttctggctga

SEQ ID NO: 835300 - DNA, 25 bp, Homo sapien
acagccctccagagaagaaagttgt

SEQ ID NO: 835301 - DNA, 25 bp, Homo sapien
ccaggcttttctggctgaatgtaga

SEQ ID NO: 835302 - DNA, 25 bp, Homo sapien
caaggcttcgctggggtcttctttg

SEQ ID NO: 835303 - DNA, 25 bp, Homo sapien
ttctccaaaccaaggcttcgctggg

SEQ ID NO: 835304 - DNA, 25 bp, Homo sapien
accaaggcttcgctggggtcttctt

SEQ ID NO: 835305 - DNA, 25 bp, Homo sapien
gtttctccaaaccaaggcttcgctg

SEQ ID NO: 835306 - DNA, 25 bp, Homo sapien
tcccacctcatgttgattctcatag

SEQ ID NO: 835307 - DNA, 25 bp, Homo sapien
cctcatgttgattctcatagaaata

SEQ ID NO: 835308 - DNA, 25 bp, Homo sapien
cacctcatgttgattctcatagaaa

SEQ ID NO: 835309 - DNA, 25 bp, Homo sapien
ccacctcatgttgattctcatagaa

SEQ ID NO: 835310 - DNA, 25 bp, Homo sapien
agatacttctgcctgccttgaagtg

SEQ ID NO: 835311 - DNA, 25 bp, Homo sapien
ccagatacttctgcctgccttgaag

SEQ ID NO: 835312 - DNA, 25 bp, Homo sapien
atacttctgcctgccttgaagtgaa

SEQ ID NO: 835313 - DNA, 25 bp, Homo sapien
gatacttctgcctgccttgaagtga

SEQ ID NO: 835314 - DNA, 25 bp, Homo sapien
caaagagtgtagcaatgagctagta

SEQ ID NO: 835315 - DNA, 25 bp, Homo sapien
agagtgtagcaatgagctagtaata

SEQ ID NO: 835316 - DNA, 25 bp, Homo sapien
tgcaaagagtgtagcaatgagctag

SEQ ID NO: 835317 - DNA, 25 bp, Homo sapien
ctgcaaagagtgtagcaatgagcta

SEQ ID NO: 835318 - DNA, 25 bp, Homo sapien
cttctcaaaggctttcctcacaagg

SEQ ID NO: 835319 - DNA, 25 bp, Homo sapien
gggtctctcaaagaaagtgggccac

SEQ ID NO: 835320 - DNA, 25 bp, Homo sapien
ggtctctcaaagaaagtgggccaca

SEQ ID NO: 835321 - DNA, 25 bp, Homo sapien
gctttcctcacaaggggtctctcaa

SEQ ID NO: 835322 - DNA, 25 bp, Homo sapien
tgcaacagctcagaaactagaggct

SEQ ID NO: 835323 - DNA, 25 bp, Homo sapien
aattcctgcaacagctcagaaacta

SEQ ID NO: 835324 - DNA, 25 bp, Homo sapien
acagctcagaaactagaggctgaga

SEQ ID NO: 835325 - DNA, 25 bp, Homo sapien
taatgtggggaattaagaaatgtcc

SEQ ID NO: 835326 - DNA, 25 bp, Homo sapien
agggtgtggatcacagagatgacct

SEQ ID NO: 835327 - DNA, 25 bp, Homo sapien
gagcacaacaggagtccggggctta

SEQ ID NO: 835328 - DNA, 25 bp, Homo sapien
tagggtgtggatcacagagatgacc

SEQ ID NO: 835329 - DNA, 25 bp, Homo sapien
aagcctgggagcacaacaggagtcc

SEQ ID NO: 835330 - DNA, 25 bp, Homo sapien
atcaggacacttggttctgttcaac

SEQ ID NO: 835331 - DNA, 25 bp, Homo sapien
gcatcaggacacttggttctgttca

SEQ ID NO: 835332 - DNA, 25 bp, Homo sapien
tgaaaagtttactggaatctgcatc

SEQ ID NO: 835333 - DNA, 25 bp, Homo sapien
acagaatgaaaagtttactggaatc

SEQ ID NO: 835334 - DNA, 25 bp, Homo sapien
aacgttccttttccactgatcatat

SEQ ID NO: 835335 - DNA, 25 bp, Homo sapien
agaacgttccttttccactgatcat

SEQ ID NO: 835336 - DNA, 25 bp, Homo sapien
cgttccttttccactgatcatatta

SEQ ID NO: 835337 - DNA, 25 bp, Homo sapien
gttccttttccactgatcatattac

SEQ ID NO: 835338 - DNA, 25 bp, Homo sapien
ttcagtccaggtttgttcaagagcc

SEQ ID NO: 835339 - DNA, 25 bp, Homo sapien
agtccaggtttgttcaagagcctct

SEQ ID NO: 835340 - DNA, 25 bp, Homo sapien
tcagtccaggtttgttcaagagcct

SEQ ID NO: 835341 - DNA, 25 bp, Homo sapien
cagtccaggtttgttcaagagcctc

SEQ ID NO: 835342 - DNA, 25 bp, Homo sapien
cctcatcacggggaaagccggctct

SEQ ID NO: 835343 - DNA, 25 bp, Homo sapien
aacagcaaacaatcctcatcacggg

SEQ ID NO: 835344 - DNA, 25 bp, Homo sapien
gcaacagcaaacaatcctcatcacg

SEQ ID NO: 835345 - DNA, 25 bp, Homo sapien
acaatcctcatcacggggaaagccg

SEQ ID NO: 835346 - DNA, 25 bp, Homo sapien
gtgatgcccttggagtggcagtact

SEQ ID NO: 835347 - DNA, 25 bp, Homo sapien
ggtgatgcccttggagtggcagtac

SEQ ID NO: 835348 - DNA, 25 bp, Homo sapien
gaaagatgctgatgtgaataatcac

SEQ ID NO: 835349 - DNA, 25 bp, Homo sapien
atgctgatgtgaataatcaccatgg

SEQ ID NO: 835350 - DNA, 25 bp, Homo sapien
aagatgctgatgtgaataatcacca

SEQ ID NO: 835351 - DNA, 25 bp, Homo sapien
gggcagaaagatgctgatgtgaata

SEQ ID NO: 835352 - DNA, 25 bp, Homo sapien
ttgtgctttgcagcaatctccttaa

SEQ ID NO: 835353 - DNA, 25 bp, Homo sapien
ttttttgtgctttgcagcaatctcc

SEQ ID NO: 835354 - DNA, 25 bp, Homo sapien
gcagcaatctccttaatcttgggat

SEQ ID NO: 835355 - DNA, 25 bp, Homo sapien
ggtttttttgtgctttgcagcaatc

SEQ ID NO: 835356 - DNA, 25 bp, Homo sapien
ggtgtcatagacttggggatcactg

SEQ ID NO: 835357 - DNA, 25 bp, Homo sapien
caatgtgtgctggtgtcatagactt

SEQ ID NO: 835358 - DNA, 25 bp, Homo sapien
catagacttggggatcactgtcaca

SEQ ID NO: 835359 - DNA, 25 bp, Homo sapien
tgttctcaacaatgtgtgctggtgt

SEQ ID NO: 835360 - DNA, 25 bp, Homo sapien
gctgagtatggttgccatctcctca

SEQ ID NO: 835361 - DNA, 25 bp, Homo sapien
ttgaagctgagtatggttgccatct

SEQ ID NO: 835362 - DNA, 25 bp, Homo sapien
tcatcactcaatttaaagtcaaaga

SEQ ID NO: 835363 - DNA, 25 bp, Homo sapien
gccatctcctcatcactcaatttaa

SEQ ID NO: 835364 - DNA, 25 bp, Homo sapien
gggaaagtcctccaaatgagagaat

SEQ ID NO: 835365 - DNA, 25 bp, Homo sapien
atattctgcatcgaagggaaagtcc

SEQ ID NO: 835366 - DNA, 25 bp, Homo sapien
tcaatattctgcatcgaagggaaag

SEQ ID NO: 835367 - DNA, 25 bp, Homo sapien
ttctgcatcgaagggaaagtcctcc

SEQ ID NO: 835368 - DNA, 25 bp, Homo sapien
cacttcagcgaagaaagagaatccc

SEQ ID NO: 835369 - DNA, 25 bp, Homo sapien
ctaaaatagttcttgagtggagaca

SEQ ID NO: 835370 - DNA, 25 bp, Homo sapien
aacagacatttgatcagatcagata

SEQ ID NO: 835371 - DNA, 25 bp, Homo sapien
gcacctccattctggtctacaacag

SEQ ID NO: 835372 - DNA, 25 bp, Homo sapien
gctcactgcttctcaggacttctga

SEQ ID NO: 835373 - DNA, 25 bp, Homo sapien
actgcttctcaggacttctgaatgc

SEQ ID NO: 835374 - DNA, 25 bp, Homo sapien
tctgctcactgcttctcaggacttc

SEQ ID NO: 835375 - DNA, 25 bp, Homo sapien
ttctcaggacttctgaatgctgtgt

SEQ ID NO: 835376 - DNA, 25 bp, Homo sapien
tcttggttcatggatagcagtacca

SEQ ID NO: 835377 - DNA, 25 bp, Homo sapien
cagcatctcttggttcatggatagc

SEQ ID NO: 835378 - DNA, 25 bp, Homo sapien
tgcttttcacttgagctgtcagcat

SEQ ID NO: 835379 - DNA, 25 bp, Homo sapien
tctcttggttcatggatagcagtac

SEQ ID NO: 835380 - DNA, 25 bp, Homo sapien
atactcagagtctgtatatatgttc

SEQ ID NO: 835381 - DNA, 25 bp, Homo sapien
tcagagtctgtatatatgttcaccc

SEQ ID NO: 835382 - DNA, 25 bp, Homo sapien
cagagtctgtatatatgttcaccct

SEQ ID NO: 835383 - DNA, 25 bp, Homo sapien
actcagagtctgtatatatgttcac

SEQ ID NO: 835384 - DNA, 25 bp, Homo sapien
aattggggtgtagcaggggttgtgc

SEQ ID NO: 835385 - DNA, 25 bp, Homo sapien
tagctggccagtccaggggtccacg

SEQ ID NO: 835386 - DNA, 25 bp, Homo sapien
gctgaattggggtgtagcaggggtt

SEQ ID NO: 835387 - DNA, 25 bp, Homo sapien
gctagctggccagtccaggggtcca

SEQ ID NO: 835388 - DNA, 25 bp, Homo sapien
agctgaagcagaaattaaggaagca

SEQ ID NO: 835389 - DNA, 25 bp, Homo sapien
gcctttagggctagctccaaattgt

SEQ ID NO: 835390 - DNA, 25 bp, Homo sapien
aagcagattcaagagttccagtgcc

SEQ ID NO: 835391 - DNA, 25 bp, Homo sapien
tgccaagaaaaagtatagggttcag

SEQ ID NO: 835392 - DNA, 25 bp, Homo sapien
cattgtaaccatccttgctgtagaa

SEQ ID NO: 835393 - DNA, 25 bp, Homo sapien
tagaatcagatgtgactaagagatt

SEQ ID NO: 835394 - DNA, 25 bp, Homo sapien
gagattcggtgttttcagttcacca

SEQ ID NO: 835395 - DNA, 25 bp, Homo sapien
ttcagttcaccactgtctgggaaga

SEQ ID NO: 835396 - DNA, 25 bp, Homo sapien
attcgaagattaagctctgggcttt

SEQ ID NO: 835397 - DNA, 25 bp, Homo sapien
agcactggaattcgaagattaagct

SEQ ID NO: 835398 - DNA, 25 bp, Homo sapien
atgtcagtgccagcactggaattcg

SEQ ID NO: 835399 - DNA, 25 bp, Homo sapien
actggaattcgaagattaagctctg

SEQ ID NO: 835400 - DNA, 25 bp, Homo sapien
tggaacctgaggtatttgctcgttc

SEQ ID NO: 835401 - DNA, 25 bp, Homo sapien
cctgaggtatttgctcgttctggaa

SEQ ID NO: 835402 - DNA, 25 bp, Homo sapien
gctgtggaacctgaggtatttgctc

SEQ ID NO: 835403 - DNA, 25 bp, Homo sapien
tatttgctcgttctggaagggtaat

SEQ ID NO: 835404 - DNA, 25 bp, Homo sapien
caaggacattagatgcagtctttcc

SEQ ID NO: 835405 - DNA, 25 bp, Homo sapien
tgctgcctggggcaacggcatatct

SEQ ID NO: 835406 - DNA, 25 bp, Homo sapien
aacagaagaagaactcaaggacatt

SEQ ID NO: 835407 - DNA, 25 bp, Homo sapien
ttttgaaagaggttgggaatcctga

SEQ ID NO: 835408 - DNA, 25 bp, Homo sapien
aaaaaggtaactatagcatattctc

SEQ ID NO: 835409 - DNA, 25 bp, Homo sapien
tattctcttctcctaaactcatcta

SEQ ID NO: 835410 - DNA, 25 bp, Homo sapien
tcctaaactcatctatttccttatg

SEQ ID NO: 835411 - DNA, 25 bp, Homo sapien
tctatttccttatgctttgctgcat

SEQ ID NO: 835412 - DNA, 25 bp, Homo sapien
cgacgctcttttctagcccctgaac

SEQ ID NO: 835413 - DNA, 25 bp, Homo sapien
tttctagcccctgaaccagacgtgg

SEQ ID NO: 835414 - DNA, 25 bp, Homo sapien
cttttctagcccctgaaccagacgt

SEQ ID NO: 835415 - DNA, 25 bp, Homo sapien
tctagcccctgaaccagacgtgggc

SEQ ID NO: 835416 - DNA, 25 bp, Homo sapien
ccgctcctccgagccgccaaagagc

SEQ ID NO: 835417 - DNA, 25 bp, Homo sapien
ctccgagccgccaaagagccagcgc

SEQ ID NO: 835418 - DNA, 25 bp, Homo sapien
agagccagcgcctcctaggactcat

SEQ ID NO: 835419 - DNA, 25 bp, Homo sapien
taggactcatcactgccgccggcat

SEQ ID NO: 835420 - DNA, 25 bp, Homo sapien
catttggtgcacttgcgatggatcc

SEQ ID NO: 835421 - DNA, 25 bp, Homo sapien
gcttgggcccacttccagagcttga

SEQ ID NO: 835422 - DNA, 25 bp, Homo sapien
tagcatcccgcttaaccacatttgg

SEQ ID NO: 835423 - DNA, 25 bp, Homo sapien
ggctatgtgccctgtaagactgtaa

SEQ ID NO: 835424 - DNA, 25 bp, Homo sapien
tgctgaggattagcttgcaaacata

SEQ ID NO: 835425 - DNA, 25 bp, Homo sapien
gacctgcaaggaccatgcatgcttc

SEQ ID NO: 835426 - DNA, 25 bp, Homo sapien
aagaaacacacaacgctgtagccag

SEQ ID NO: 835427 - DNA, 25 bp, Homo sapien
ggaggcaactcttgtgtaaacagaa

SEQ ID NO: 835428 - DNA, 25 bp, Homo sapien
ttcaaatgggctaatattcaaggac

SEQ ID NO: 835429 - DNA, 25 bp, Homo sapien
atgggctaatattcaaggacagcaa

SEQ ID NO: 835430 - DNA, 25 bp, Homo sapien
gcgttttcaaatgggctaatattca

SEQ ID NO: 835431 - DNA, 25 bp, Homo sapien
ttcccaggcgttttcaaatgggcta

SEQ ID NO: 835432 - DNA, 25 bp, Homo sapien
taacataataagtttgtacttggac

SEQ ID NO: 835433 - DNA, 25 bp, Homo sapien
cttaacataataagtttgtacttgg

SEQ ID NO: 835434 - DNA, 25 bp, Homo sapien
acataataagtttgtacttggacat

SEQ ID NO: 835435 - DNA, 25 bp, Homo sapien
catgtcttaacataataagtttgta

SEQ ID NO: 835436 - DNA, 25 bp, Homo sapien
tgttgagtttctgatccacccagct

SEQ ID NO: 835437 - DNA, 25 bp, Homo sapien
tctgatccacccagctacaaaaacg

SEQ ID NO: 835438 - DNA, 25 bp, Homo sapien
tgatccacccagctacaaaaacggt

SEQ ID NO: 835439 - DNA, 25 bp, Homo sapien
gagtttctgatccacccagctacaa

SEQ ID NO: 835440 - DNA, 25 bp, Homo sapien
tgttgagaccgatcaaggccccata

SEQ ID NO: 835441 - DNA, 25 bp, Homo sapien
tagtgacgctcatttagacgccagg

SEQ ID NO: 835442 - DNA, 25 bp, Homo sapien
tcagccaggctgtgtgaatggaccg

SEQ ID NO: 835443 - DNA, 25 bp, Homo sapien
tttgagttgcttcccacagttccga

SEQ ID NO: 835444 - DNA, 25 bp, Homo sapien
caccagacagggcatatcacgcaaa

SEQ ID NO: 835445 - DNA, 25 bp, Homo sapien
tgatgctcaaaaccggtgaacctga

SEQ ID NO: 835446 - DNA, 25 bp, Homo sapien
gaaaactgctgcttcgggtaacagg

SEQ ID NO: 835447 - DNA, 25 bp, Homo sapien
actgattccgaaactctgagggtgg

SEQ ID NO: 835448 - DNA, 25 bp, Homo sapien
gactaatggatgtcagctatacaag

SEQ ID NO: 835449 - DNA, 25 bp, Homo sapien
tgtagattttaggtctctgcatgac

SEQ ID NO: 835450 - DNA, 25 bp, Homo sapien
tatcaagtgccatgtctagccaata

SEQ ID NO: 835451 - DNA, 25 bp, Homo sapien
ttatttcacatacaaggtcagcctt

SEQ ID NO: 835452 - DNA, 25 bp, Homo sapien
gaatagaaccttttatatagttgag

SEQ ID NO: 835453 - DNA, 25 bp, Homo sapien
atatagttgagtaaataagatacac

SEQ ID NO: 835454 - DNA, 25 bp, Homo sapien
acaagaatagaaccttttatatagt

SEQ ID NO: 835455 - DNA, 25 bp, Homo sapien
tatatagttgagtaaataagataca

SEQ ID NO: 835456 - DNA, 25 bp, Homo sapien
ccattgtatagatagaccccattta

SEQ ID NO: 835457 - DNA, 25 bp, Homo sapien
tgtgatcccctcaaaaagacaggct

SEQ ID NO: 835458 - DNA, 25 bp, Homo sapien
gaagtcccaaactcctcataatgtg

SEQ ID NO: 835459 - DNA, 25 bp, Homo sapien
tcccattaaaatggaggtcactggt

SEQ ID NO: 835460 - DNA, 25 bp, Homo sapien
agattaacatgcctattctggtgag

SEQ ID NO: 835461 - DNA, 25 bp, Homo sapien
caaaccctgtaacttgagctgtgga

SEQ ID NO: 835462 - DNA, 25 bp, Homo sapien
agtcacttatgcttaattcttgcag

SEQ ID NO: 835463 - DNA, 25 bp, Homo sapien
ggaaagttagacatgcaatacaaga

SEQ ID NO: 835464 - DNA, 25 bp, Homo sapien
acacatacacatgaactggcaaagc

SEQ ID NO: 835465 - DNA, 25 bp, Homo sapien
cattcggacaacaggcattaaccac

SEQ ID NO: 835466 - DNA, 25 bp, Homo sapien
tagattcaattcttaacagtagtga

SEQ ID NO: 835467 - DNA, 25 bp, Homo sapien
acagtagtgaaagctaacgtcttca

SEQ ID NO: 835468 - DNA, 25 bp, Homo sapien
catgatcacggccaaggaatctaga

SEQ ID NO: 835469 - DNA, 25 bp, Homo sapien
atgatcacggccaaggaatctagag

SEQ ID NO: 835470 - DNA, 25 bp, Homo sapien
tcccatttaactgtgtgcctgaaac

SEQ ID NO: 835471 - DNA, 25 bp, Homo sapien
taaaacacaactcaggaggaagttc

SEQ ID NO: 835472 - DNA, 25 bp, Homo sapien
ctgttgatcaggacaggaagagacc

SEQ ID NO: 835473 - DNA, 25 bp, Homo sapien
cctgaaacatgcaggtactgaggga

SEQ ID NO: 835474 - DNA, 25 bp, Homo sapien
caggaactgatgaggcccaacagca

SEQ ID NO: 835475 - DNA, 25 bp, Homo sapien
agcacgcaggttttcatccaattcc

SEQ ID NO: 835476 - DNA, 25 bp, Homo sapien
aggaagagtaatgttgatgatgtct

SEQ ID NO: 835477 - DNA, 25 bp, Homo sapien
gcttggatcgcctcttggtcaccca

SEQ ID NO: 835478 - DNA, 25 bp, Homo sapien
gggcctctggccttaattatcaaag

SEQ ID NO: 835479 - DNA, 25 bp, Homo sapien
gtgactttctcaactaatgggcctc

SEQ ID NO: 835480 - DNA, 25 bp, Homo sapien
cactagttactagtttggtgaccga

SEQ ID NO: 835481 - DNA, 25 bp, Homo sapien
tctgggccacaataagttacctagt

SEQ ID NO: 835482 - DNA, 25 bp, Homo sapien
cagtcactttattatcaggaacttt

SEQ ID NO: 835483 - DNA, 25 bp, Homo sapien
gtcactttattatcaggaactttat

SEQ ID NO: 835484 - DNA, 25 bp, Homo sapien
ttcagtcactttattatcaggaact

SEQ ID NO: 835485 - DNA, 25 bp, Homo sapien
attttcagtcactttattatcagga

SEQ ID NO: 835486 - DNA, 25 bp, Homo sapien
tcaaagactagtttagaagcctacc

SEQ ID NO: 835487 - DNA, 25 bp, Homo sapien
gaagttacatgcactgtattctacc

SEQ ID NO: 835488 - DNA, 25 bp, Homo sapien
aatcgtgtccatggcctaccctgac

SEQ ID NO: 835489 - DNA, 25 bp, Homo sapien
gactgctccgtgctacataccataa

SEQ ID NO: 835490 - DNA, 25 bp, Homo sapien
gaaatgatgacttacgtacccacag

SEQ ID NO: 835491 - DNA, 25 bp, Homo sapien
ctgctttgaaacagagtcaacggct

SEQ ID NO: 835492 - DNA, 25 bp, Homo sapien
taacaggtattatagctacaaatgt

SEQ ID NO: 835493 - DNA, 25 bp, Homo sapien
tatcatcgaaatatatgtgacctgc

SEQ ID NO: 835494 - DNA, 25 bp, Homo sapien
caggccaggagacaaataacaactg

SEQ ID NO: 835495 - DNA, 25 bp, Homo sapien
atacaagtcgaaattccaggccagg

SEQ ID NO: 835496 - DNA, 25 bp, Homo sapien
aattatcccacatcatcttgcagaa

SEQ ID NO: 835497 - DNA, 25 bp, Homo sapien
gctaacaggcttctaaatagtaacc

SEQ ID NO: 835498 - DNA, 25 bp, Homo sapien
cctgtccggcagtggtaggatttcc

SEQ ID NO: 835499 - DNA, 25 bp, Homo sapien
ggcagtggtaggatttccacctctg

SEQ ID NO: 835500 - DNA, 25 bp, Homo sapien
cttcctgtccggcagtggtaggatt

SEQ ID NO: 835501 - DNA, 25 bp, Homo sapien
tccggcagtggtaggatttccacct

SEQ ID NO: 835502 - DNA, 25 bp, Homo sapien
aaatgatttgggcacatccggtatg

SEQ ID NO: 835503 - DNA, 25 bp, Homo sapien
tcgtcctgggcgtcagatggaaatg

SEQ ID NO: 835504 - DNA, 25 bp, Homo sapien
cctgaatctgatccttagggtaaga

SEQ ID NO: 835505 - DNA, 25 bp, Homo sapien
cacatccggtatggcctgaatctga

SEQ ID NO: 835506 - DNA, 25 bp, Homo sapien
gcagcactgagatcaaactctgctt

SEQ ID NO: 835507 - DNA, 25 bp, Homo sapien
tctctgaacacggtggcttagaaga

SEQ ID NO: 835508 - DNA, 25 bp, Homo sapien
tctgccttatgcttagctctctgaa

SEQ ID NO: 835509 - DNA, 25 bp, Homo sapien
aagcagcactgagatcaaactctgc

SEQ ID NO: 835510 - DNA, 25 bp, Homo sapien
ctttctggtatcagcagattggctc

SEQ ID NO: 835511 - DNA, 25 bp, Homo sapien
tatttgtacttgcaactctgcgagt

SEQ ID NO: 835512 - DNA, 25 bp, Homo sapien
tcctatgttcttgtttgctgtccgt

SEQ ID NO: 835513 - DNA, 25 bp, Homo sapien
caaaacaggcttgagtatatcacca

SEQ ID NO: 835514 - DNA, 25 bp, Homo sapien
tgaacatttcgggggcatctttggt

SEQ ID NO: 835515 - DNA, 25 bp, Homo sapien
tggcgattgatgtgaacatttcggg

SEQ ID NO: 835516 - DNA, 25 bp, Homo sapien
ctttggcgattgatgtgaacatttc

SEQ ID NO: 835517 - DNA, 25 bp, Homo sapien
tctttggcgattgatgtgaacattt

SEQ ID NO: 835518 - DNA, 25 bp, Homo sapien
gcctcctgttccagcggcctatagc

SEQ ID NO: 835519 - DNA, 25 bp, Homo sapien
ggcctatagcgaatatcaggaacag

SEQ ID NO: 835520 - DNA, 25 bp, Homo sapien
tcttgccacaactgtgggggacaca

SEQ ID NO: 835521 - DNA, 25 bp, Homo sapien
tcttgcacccctaaggggaacattc

SEQ ID NO: 835522 - DNA, 25 bp, Homo sapien
tcttggacttcaaggtagcagaaag

SEQ ID NO: 835523 - DNA, 25 bp, Homo sapien
tcttcagaaggcagtgtcctgtggc

SEQ ID NO: 835524 - DNA, 25 bp, Homo sapien
tctgctggttttattggtgacttct

SEQ ID NO: 835525 - DNA, 25 bp, Homo sapien
aaagctcctcttgatattgcccctg

SEQ ID NO: 835526 - DNA, 25 bp, Homo sapien
tggatttgtcaggagcctttctgtt

SEQ ID NO: 835527 - DNA, 25 bp, Homo sapien
atggatttgtcaggagcctttctgt

SEQ ID NO: 835528 - DNA, 25 bp, Homo sapien
gatttgtcaggagcctttctgtttt

SEQ ID NO: 835529 - DNA, 25 bp, Homo sapien
gatggatttgtcaggagcctttctg

SEQ ID NO: 835530 - DNA, 25 bp, Homo sapien
taaacttaagcagcaggcattgagt

SEQ ID NO: 835531 - DNA, 25 bp, Homo sapien
caggcattgagtgcctgtcgagacc

SEQ ID NO: 835532 - DNA, 25 bp, Homo sapien
tgagtgcctgtcgagaccaggacat

SEQ ID NO: 835533 - DNA, 25 bp, Homo sapien
aaacttaagcagcaggcattgagtg

SEQ ID NO: 835534 - DNA, 25 bp, Homo sapien
gaagtccagtcaccaatgttccctc

SEQ ID NO: 835535 - DNA, 25 bp, Homo sapien
tgaagtccagtcaccaatgttccct

SEQ ID NO: 835536 - DNA, 25 bp, Homo sapien
gcttctatgacttgaagtccagtca

SEQ ID NO: 835537 - DNA, 25 bp, Homo sapien
tatgacttgaagtccagtcaccaat

SEQ ID NO: 835538 - DNA, 25 bp, Homo sapien
tctcctcggtcttcccctcgaccat

SEQ ID NO: 835539 - DNA, 25 bp, Homo sapien
tcggtcttcccctcgaccatggctg

SEQ ID NO: 835540 - DNA, 25 bp, Homo sapien
caagggcttaaccttgaggccctgt

SEQ ID NO: 835541 - DNA, 25 bp, Homo sapien
attggccaagggcttaaccttgagg

SEQ ID NO: 835542 - DNA, 25 bp, Homo sapien
tctctcattactacaagctgctact

SEQ ID NO: 835543 - DNA, 25 bp, Homo sapien
ctctcattactacaagctgctacta

SEQ ID NO: 835544 - DNA, 25 bp, Homo sapien
ttttgttcagcttaactctcagctc

SEQ ID NO: 835545 - DNA, 25 bp, Homo sapien
tgtagttttggcgaaacagaattcc

SEQ ID NO: 835546 - DNA, 25 bp, Homo sapien
ttgaaaaactctgtagttttggcga

SEQ ID NO: 835547 - DNA, 25 bp, Homo sapien
ttttggcgaaacagaattccttcat

SEQ ID NO: 835548 - DNA, 25 bp, Homo sapien
aaactctgtagttttggcgaaacag

SEQ ID NO: 835549 - DNA, 25 bp, Homo sapien
cttgataaacctatgaacatggttc

SEQ ID NO: 835550 - DNA, 25 bp, Homo sapien
cttgtttcttttagctccagtcttc

SEQ ID NO: 835551 - DNA, 25 bp, Homo sapien
gtccatgacctcagctcttgatcca

SEQ ID NO: 835552 - DNA, 25 bp, Homo sapien
gccatgcacgtttcctcttcccgtt

SEQ ID NO: 835553 - DNA, 25 bp, Homo sapien
catgcacgtttcctcttcccgttca

SEQ ID NO: 835554 - DNA, 25 bp, Homo sapien
ccagccatgcacgtttcctcttccc

SEQ ID NO: 835555 - DNA, 25 bp, Homo sapien
atgcacgtttcctcttcccgttcat

SEQ ID NO: 835556 - DNA, 25 bp, Homo sapien
gccagtctcctggagcggcaggtgg

SEQ ID NO: 835557 - DNA, 25 bp, Homo sapien
agatgaaatgagagcctgcactgac

SEQ ID NO: 835558 - DNA, 25 bp, Homo sapien
actgatggtccggaataaggctgag

SEQ ID NO: 835559 - DNA, 25 bp, Homo sapien
gaagggcactgatggtccggaataa

SEQ ID NO: 835560 - DNA, 25 bp, Homo sapien
tcagcacttggtgccacctgtttta

SEQ ID NO: 835561 - DNA, 25 bp, Homo sapien
cctatgtttacagtcgggaggcggt

SEQ ID NO: 835562 - DNA, 25 bp, Homo sapien
tgtcattccctaggcatgctcagga

SEQ ID NO: 835563 - DNA, 25 bp, Homo sapien
taataggcagccaatgacgacaccc

SEQ ID NO: 835564 - DNA, 25 bp, Homo sapien
ccctcccagaagtccatgctaagtg

SEQ ID NO: 835565 - DNA, 25 bp, Homo sapien
gtagtctgaaacttcttcccgagga

SEQ ID NO: 835566 - DNA, 25 bp, Homo sapien
tgtagtctgaaacttcttcccgagg

SEQ ID NO: 835567 - DNA, 25 bp, Homo sapien
gagctggcccctgcaaattgtcaat

SEQ ID NO: 835568 - DNA, 25 bp, Homo sapien
caactagggtcggttacagctggga

SEQ ID NO: 835569 - DNA, 25 bp, Homo sapien
aagaaagctccctatccggtacagg

SEQ ID NO: 835570 - DNA, 25 bp, Homo sapien
gaagcagagtgggtccttaccacaa

SEQ ID NO: 835571 - DNA, 25 bp, Homo sapien
ttatcctttcagttaccagtggtgc

SEQ ID NO: 835572 - DNA, 25 bp, Homo sapien
taggcgcgcctgtgcctttgatgtc

SEQ ID NO: 835573 - DNA, 25 bp, Homo sapien
ctggctcagtgggtcacagtgatca

SEQ ID NO: 835574 - DNA, 25 bp, Homo sapien
tagagtaattcatccttaggcgcgc

SEQ ID NO: 835575 - DNA, 25 bp, Homo sapien
ggtacttgagtagatatggcccttc

SEQ ID NO: 835576 - DNA, 25 bp, Homo sapien
tcttgcaatgactttgtggcctccc

SEQ ID NO: 835577 - DNA, 25 bp, Homo sapien
tatatctgacagaccaataagacag

SEQ ID NO: 835578 - DNA, 25 bp, Homo sapien
gggcagacattaatcgaagaaacct

SEQ ID NO: 835579 - DNA, 25 bp, Homo sapien
gagggtggaggtggaggaagcttct

SEQ ID NO: 835580 - DNA, 25 bp, Homo sapien
gagaagatgtaggggtgagggtgga

SEQ ID NO: 835581 - DNA, 25 bp, Homo sapien
agggtggaggtggaggaagcttctc

SEQ ID NO: 835582 - DNA, 25 bp, Homo sapien
ctagagaagatgtaggggtgagggt

SEQ ID NO: 835583 - DNA, 25 bp, Homo sapien
acccagggaagcatctaaaccaggg

SEQ ID NO: 835584 - DNA, 25 bp, Homo sapien
ggccacccagggaagcatctaaacc

SEQ ID NO: 835585 - DNA, 25 bp, Homo sapien
cacccagggaagcatctaaaccagg

SEQ ID NO: 835586 - DNA, 25 bp, Homo sapien
ggaagcatctaaaccaggggctgtg

SEQ ID NO: 835587 - DNA, 25 bp, Homo sapien
gaggatgtaattcctaactgccgaa

SEQ ID NO: 835588 - DNA, 25 bp, Homo sapien
tactcagtgctctgaatatggtaga

SEQ ID NO: 835589 - DNA, 25 bp, Homo sapien
aaagtctcctgtctcttagggtcca

SEQ ID NO: 835590 - DNA, 25 bp, Homo sapien
tgccgaataaaggaagaacctagag

SEQ ID NO: 835591 - DNA, 25 bp, Homo sapien
tttattaatactatgtgcaggacac

SEQ ID NO: 835592 - DNA, 25 bp, Homo sapien
actaccagcctgacatttatttctt

SEQ ID NO: 835593 - DNA, 25 bp, Homo sapien
tatgttctaggagcatgagaaataa

SEQ ID NO: 835594 - DNA, 25 bp, Homo sapien
acatttttaggttcaaatcacagca

SEQ ID NO: 835595 - DNA, 25 bp, Homo sapien
tctagttgaactgcagtatggctcc

SEQ ID NO: 835596 - DNA, 25 bp, Homo sapien
tggttacggaaacctcctgctctgg

SEQ ID NO: 835597 - DNA, 25 bp, Homo sapien
agctctgtttccttatatggcaggg

SEQ ID NO: 835598 - DNA, 25 bp, Homo sapien
gagcaacctctccagtcaatagtga

SEQ ID NO: 835599 - DNA, 25 bp, Homo sapien
cataaagttggttactgagcctgca

SEQ ID NO: 835600 - DNA, 25 bp, Homo sapien
tagtttcaactgttcatgcctctgt

SEQ ID NO: 835601 - DNA, 25 bp, Homo sapien
tgagcctgcattctaaagtgcctgt

SEQ ID NO: 835602 - DNA, 25 bp, Homo sapien
aaatgtgggcactctgtatggcaag

SEQ ID NO: 835603 - DNA, 25 bp, Homo sapien
gaagctgtacttcagtgcgtcattt

SEQ ID NO: 835604 - DNA, 25 bp, Homo sapien
tgcgtcatttcgaaaacctcttttg

SEQ ID NO: 835605 - DNA, 25 bp, Homo sapien
tagctgtccacagataggccacagt

SEQ ID NO: 835606 - DNA, 25 bp, Homo sapien
gccgccgtggtttcatagctgtcca

SEQ ID NO: 835607 - DNA, 25 bp, Homo sapien
ggaaatccatgtctgtgttttaaga

SEQ ID NO: 835608 - DNA, 25 bp, Homo sapien
gagtcagctctcgtgcatgagatga

SEQ ID NO: 835609 - DNA, 25 bp, Homo sapien
cactttactgcctaacatccttttg

SEQ ID NO: 835610 - DNA, 25 bp, Homo sapien
catgagatgattattggaaactcca

SEQ ID NO: 835611 - DNA, 25 bp, Homo sapien
cccaagccgtgagctcttactttct

SEQ ID NO: 835612 - DNA, 25 bp, Homo sapien
tgaggctttgaggaagttctctgag

SEQ ID NO: 835613 - DNA, 25 bp, Homo sapien
gaccaaagcagatggctaaacttag

SEQ ID NO: 835614 - DNA, 25 bp, Homo sapien
tcctatttgagagttagttcaacca

SEQ ID NO: 835615 - DNA, 25 bp, Homo sapien
tgtagaaatgctaactcacatctgg

SEQ ID NO: 835616 - DNA, 25 bp, Homo sapien
ctgtagaaatgctaactcacatctg

SEQ ID NO: 835617 - DNA, 25 bp, Homo sapien
tagaaatgctaactcacatctggtt

SEQ ID NO: 835618 - DNA, 25 bp, Homo sapien
aaatgctaactcacatctggttcca

SEQ ID NO: 835619 - DNA, 25 bp, Homo sapien
catccctggtacaacatgttctttc

SEQ ID NO: 835620 - DNA, 25 bp, Homo sapien
tatattgattacataataagaaact

SEQ ID NO: 835621 - DNA, 25 bp, Homo sapien
taagttctcacagctaggacagacc

SEQ ID NO: 835622 - DNA, 25 bp, Homo sapien
gaactgagcgcctgtgtaaagccac

SEQ ID NO: 835623 - DNA, 25 bp, Homo sapien
tagcattcattggtaacacggcaga

SEQ ID NO: 835624 - DNA, 25 bp, Homo sapien
aattggagataatcggccgggcacg

SEQ ID NO: 835625 - DNA, 25 bp, Homo sapien
acattttgttctagatggagttctc

SEQ ID NO: 835626 - DNA, 25 bp, Homo sapien
gaatgcacattttgttctagatgga

SEQ ID NO: 835627 - DNA, 25 bp, Homo sapien
tgcacattttgttctagatggagtt

SEQ ID NO: 835628 - DNA, 25 bp, Homo sapien
cttgctgaatgcacattttgttcta

SEQ ID NO: 835629 - DNA, 25 bp, Homo sapien
gaccagttgggttgattaggcagca

SEQ ID NO: 835630 - DNA, 25 bp, Homo sapien
cactcttgtcccagggtgctaggca

SEQ ID NO: 835631 - DNA, 25 bp, Homo sapien
gggcaaatagatcctccatcagctg

SEQ ID NO: 835632 - DNA, 25 bp, Homo sapien
gaagatcttcagctatcatgggaga

SEQ ID NO: 835633 - DNA, 25 bp, Homo sapien
tgtgctgtggcaacccaaaaggaga

SEQ ID NO: 835634 - DNA, 25 bp, Homo sapien
tgtgttcggcactagaattgagggc

SEQ ID NO: 835635 - DNA, 25 bp, Homo sapien
tgaaggtcctcaactagcataagga

SEQ ID NO: 835636 - DNA, 25 bp, Homo sapien
cccaggagttgccaagaggctaact

SEQ ID NO: 835637 - DNA, 25 bp, Homo sapien
tgttgccaagatgccgagtggatat

SEQ ID NO: 835638 - DNA, 25 bp, Homo sapien
cctccaaaccctagggaagatagag

SEQ ID NO: 835639 - DNA, 25 bp, Homo sapien
gttacaagaactcgaaccacattct

SEQ ID NO: 835640 - DNA, 25 bp, Homo sapien
caggagagtaatggtagcatgcagc

SEQ ID NO: 835641 - DNA, 25 bp, Homo sapien
ccgatattgtcgatttctagctata

SEQ ID NO: 835642 - DNA, 25 bp, Homo sapien
tgtgtaaacactcccgatattgtcg

SEQ ID NO: 835643 - DNA, 25 bp, Homo sapien
tagctataagaatgggcccactaag

SEQ ID NO: 835644 - DNA, 25 bp, Homo sapien
gagaaggcctacttccttgtgtaaa

SEQ ID NO: 835645 - DNA, 25 bp, Homo sapien
cagtggtgcgctggtaaatggataa

SEQ ID NO: 835646 - DNA, 25 bp, Homo sapien
tctttccagtggtgcgctggtaaat

SEQ ID NO: 835647 - DNA, 25 bp, Homo sapien
actattctttccagtggtgcgctgg

SEQ ID NO: 835648 - DNA, 25 bp, Homo sapien
ctggtaaatggataatagcagtctc

SEQ ID NO: 835649 - DNA, 25 bp, Homo sapien
aatacattgatcctatgatggcaca

SEQ ID NO: 835650 - DNA, 25 bp, Homo sapien
gagtctcacctattgaagccatggg

SEQ ID NO: 835651 - DNA, 25 bp, Homo sapien
gaaacaggtttcacaagagaagttc

SEQ ID NO: 835652 - DNA, 25 bp, Homo sapien
tccgttggtctgtgctctacaatac

SEQ ID NO: 835653 - DNA, 25 bp, Homo sapien
tctggagcatcccaaacattaaggc

SEQ ID NO: 835654 - DNA, 25 bp, Homo sapien
tatcaggaattgtcagggcacagag

SEQ ID NO: 835655 - DNA, 25 bp, Homo sapien
ctaggagttaggtcagcaagaggcc

SEQ ID NO: 835656 - DNA, 25 bp, Homo sapien
tattaggcttgcagtccagtaggga

SEQ ID NO: 835657 - DNA, 25 bp, Homo sapien
caaggcttctcagctagtgatggga

SEQ ID NO: 835658 - DNA, 25 bp, Homo sapien
caactaagtccatttagcaggagct

SEQ ID NO: 835659 - DNA, 25 bp, Homo sapien
gctgatttccaagtgcctagtgaca

SEQ ID NO: 835660 - DNA, 25 bp, Homo sapien
tcaagaactgatcctttgtggccct

SEQ ID NO: 835661 - DNA, 25 bp, Homo sapien
ctgcccagagatgaaagtgccaaag

SEQ ID NO: 835662 - DNA, 25 bp, Homo sapien
aaaaacgatccccacagggctgcct

SEQ ID NO: 835663 - DNA, 25 bp, Homo sapien
aaacgatccccacagggctgccttt

SEQ ID NO: 835664 - DNA, 25 bp, Homo sapien
tgcctttgctggaaagcatgaggat

SEQ ID NO: 835665 - DNA, 25 bp, Homo sapien
tgctggaaagcatgaggatctgtcc

SEQ ID NO: 835666 - DNA, 25 bp, Homo sapien
cctgtggaatttgatttgatgatct

SEQ ID NO: 835667 - DNA, 25 bp, Homo sapien
ttggtcaccaatccctgtggaattt

SEQ ID NO: 835668 - DNA, 25 bp, Homo sapien
ccctgtggaatttgatttgatgatc

SEQ ID NO: 835669 - DNA, 25 bp, Homo sapien
ggtaccttcgagaaaatgggcatct

SEQ ID NO: 835670 - DNA, 25 bp, Homo sapien
gatcctactataaaaagcttgggcc

SEQ ID NO: 835671 - DNA, 25 bp, Homo sapien
cattcatggattgcaaagggtttcc

SEQ ID NO: 835672 - DNA, 25 bp, Homo sapien
cagtcgggaggcacctatgttggcc

SEQ ID NO: 835673 - DNA, 25 bp, Homo sapien
tgtcgtcttctgcattatatttaaa

SEQ ID NO: 835674 - DNA, 25 bp, Homo sapien
taaattcagatacaatcaagagtgg

SEQ ID NO: 835675 - DNA, 25 bp, Homo sapien
gcattataagtcctgtcgtcttctg

SEQ ID NO: 835676 - DNA, 25 bp, Homo sapien
agtggctgagactctacaaccatca

SEQ ID NO: 835677 - DNA, 25 bp, Homo sapien
tgagcaggtggctaacccagcactc

SEQ ID NO: 835678 - DNA, 25 bp, Homo sapien
ccagcactcaacacttagggacaag

SEQ ID NO: 835679 - DNA, 25 bp, Homo sapien
gtgagcaggtggctaacccagcact

SEQ ID NO: 835680 - DNA, 25 bp, Homo sapien
actcaacacttagggacaaggccat

SEQ ID NO: 835681 - DNA, 25 bp, Homo sapien
tgaggctctgggtgtcacaaataga

SEQ ID NO: 835682 - DNA, 25 bp, Homo sapien
gacagatgatgcgttctcggagagt

SEQ ID NO: 835683 - DNA, 25 bp, Homo sapien
agtcaagacagggtgattccatcag

SEQ ID NO: 835684 - DNA, 25 bp, Homo sapien
caaactctcaaccaatgaagggatg

SEQ ID NO: 835685 - DNA, 25 bp, Homo sapien
gctctttaaatgaggagcccgtttc

SEQ ID NO: 835686 - DNA, 25 bp, Homo sapien
ccgtttcccctgcgtttctgtgcca

SEQ ID NO: 835687 - DNA, 25 bp, Homo sapien
agcccgtttcccctgcgtttctgtg

SEQ ID NO: 835688 - DNA, 25 bp, Homo sapien
tgtgatggttttaattccggaaaga

SEQ ID NO: 835689 - DNA, 25 bp, Homo sapien
gttcagggagaccagatgatgtctg

SEQ ID NO: 835690 - DNA, 25 bp, Homo sapien
tcagggagaccagatgatgtctgga

SEQ ID NO: 835691 - DNA, 25 bp, Homo sapien
ggttcagggagaccagatgatgtct

SEQ ID NO: 835692 - DNA, 25 bp, Homo sapien
ggtgtgatttcaggttcagggagac

SEQ ID NO: 835693 - DNA, 25 bp, Homo sapien
ttgccttctaagttctctgcgacgc

SEQ ID NO: 835694 - DNA, 25 bp, Homo sapien
tctctgcgacgctcaaaatcatcca

SEQ ID NO: 835695 - DNA, 25 bp, Homo sapien
ccttctaagttctctgcgacgctca

SEQ ID NO: 835696 - DNA, 25 bp, Homo sapien
taagttctctgcgacgctcaaaatc

SEQ ID NO: 835697 - DNA, 25 bp, Homo sapien
atacaagtatttttcaccctagatc

SEQ ID NO: 835698 - DNA, 25 bp, Homo sapien
acaagtatttttcaccctagatcct

SEQ ID NO: 835699 - DNA, 25 bp, Homo sapien
caagtatttttcaccctagatcctt

SEQ ID NO: 835700 - DNA, 25 bp, Homo sapien
tacaagtatttttcaccctagatcc

SEQ ID NO: 835701 - DNA, 25 bp, Homo sapien
cgaacagtttggtgtgcgatatgac

SEQ ID NO: 835702 - DNA, 25 bp, Homo sapien
tgtgcgatatgaccacatttggcct

SEQ ID NO: 835703 - DNA, 25 bp, Homo sapien
atgaccacatttggcctctcaaaag

SEQ ID NO: 835704 - DNA, 25 bp, Homo sapien
aactacttttgcgaacagtttggtg

SEQ ID NO: 835705 - DNA, 25 bp, Homo sapien
catgtcctaagtggttccaatattc

SEQ ID NO: 835706 - DNA, 25 bp, Homo sapien
caattatcaatatgcagttatcaat

SEQ ID NO: 835707 - DNA, 25 bp, Homo sapien
aacattccaatgtgaaaggtattga

SEQ ID NO: 835708 - DNA, 25 bp, Homo sapien
tgcagttatcaattgattcctctca

SEQ ID NO: 835709 - DNA, 25 bp, Homo sapien
aataagtagaacataagaacaatac

SEQ ID NO: 835710 - DNA, 25 bp, Homo sapien
ggcccagttcatcataggcagttat

SEQ ID NO: 835711 - DNA, 25 bp, Homo sapien
tgcttttgcattctccatgcaaata

SEQ ID NO: 835712 - DNA, 25 bp, Homo sapien
tttcattataggtgtaagtttccag

SEQ ID NO: 835713 - DNA, 25 bp, Homo sapien
gaacagccaagatataccagtccaa

SEQ ID NO: 835714 - DNA, 25 bp, Homo sapien
caacaggtttcttgcaccaggattc

SEQ ID NO: 835715 - DNA, 25 bp, Homo sapien
cagaatgcaggtaccatccatagtg

SEQ ID NO: 835716 - DNA, 25 bp, Homo sapien
tatgtgctaggtacctgactaggct

SEQ ID NO: 835717 - DNA, 25 bp, Homo sapien
tcaggccctcattaccatactatct

SEQ ID NO: 835718 - DNA, 25 bp, Homo sapien
gtgtcatcgcacataactcccttgt

SEQ ID NO: 835719 - DNA, 25 bp, Homo sapien
ctggtatccccatattctagtccac

SEQ ID NO: 835720 - DNA, 25 bp, Homo sapien
tagtccactgtagataagtttctcc

SEQ ID NO: 835721 - DNA, 25 bp, Homo sapien
tagccgtgcggtcaattcttaagca

SEQ ID NO: 835722 - DNA, 25 bp, Homo sapien
gacagtatggctctaaccacagcac

SEQ ID NO: 835723 - DNA, 25 bp, Homo sapien
caaaggaacgaaccacgtagccgtg

SEQ ID NO: 835724 - DNA, 25 bp, Homo sapien
tcctggcacacttaaacctggttag

SEQ ID NO: 835725 - DNA, 25 bp, Homo sapien
tcagaatagcagaactagaaggctc

SEQ ID NO: 835726 - DNA, 25 bp, Homo sapien
gtggtcatgggcttaccaaatctca

SEQ ID NO: 835727 - DNA, 25 bp, Homo sapien
agattttacaaaatcctgaagggtg

SEQ ID NO: 835728 - DNA, 25 bp, Homo sapien
tttacaaaatcctgaagggtggtca

SEQ ID NO: 835729 - DNA, 25 bp, Homo sapien
gatgcactacgtttgcagtcgaggt

SEQ ID NO: 835730 - DNA, 25 bp, Homo sapien
ccttagaaggagatatgtggacgac

SEQ ID NO: 835731 - DNA, 25 bp, Homo sapien
cagctggaagaacgtttttgatgca

SEQ ID NO: 835732 - DNA, 25 bp, Homo sapien
agtctcaggacagctcggatgcagt

SEQ ID NO: 835733 - DNA, 25 bp, Homo sapien
cagtgaggtggatacttttactacc

SEQ ID NO: 835734 - DNA, 25 bp, Homo sapien
ggatttgacactatagctgcccagt

SEQ ID NO: 835735 - DNA, 25 bp, Homo sapien
ggcggcggtccgtctttactagaca

SEQ ID NO: 835736 - DNA, 25 bp, Homo sapien
tgcccagtgctaaagctcatgccct

SEQ ID NO: 835737 - DNA, 25 bp, Homo sapien
gtagctgccaaaaggctgagtttct

SEQ ID NO: 835738 - DNA, 25 bp, Homo sapien
tgttcagtgataccccagatggtag

SEQ ID NO: 835739 - DNA, 25 bp, Homo sapien
tttctgagagcgcctttcttaccat

SEQ ID NO: 835740 - DNA, 25 bp, Homo sapien
tagctgccaaaaggctgagtttctg

SEQ ID NO: 835741 - DNA, 25 bp, Homo sapien
aagcaactgaagtcatcatttctgt

SEQ ID NO: 835742 - DNA, 25 bp, Homo sapien
tgccagttccacctgaccaaatgac

SEQ ID NO: 835743 - DNA, 25 bp, Homo sapien
gcaactgaagtcatcatttctgtct

SEQ ID NO: 835744 - DNA, 25 bp, Homo sapien
gaccaaatgacagctgcaaatgcag

SEQ ID NO: 835745 - DNA, 25 bp, Homo sapien
tccagaaaaccttccaacagtgtaa

SEQ ID NO: 835746 - DNA, 25 bp, Homo sapien
cagaaaaccttccaacagtgtaaag

SEQ ID NO: 835747 - DNA, 25 bp, Homo sapien
ctccagaaaaccttccaacagtgta

SEQ ID NO: 835748 - DNA, 25 bp, Homo sapien
taaaaatgctcgactttactggaaa

SEQ ID NO: 835749 - DNA, 25 bp, Homo sapien
tacgtactttgagtgttccagttca

SEQ ID NO: 835750 - DNA, 25 bp, Homo sapien
ttcttccaaatagtaccactcaagg

SEQ ID NO: 835751 - DNA, 25 bp, Homo sapien
cagttctgaggctattcgattgtgc

SEQ ID NO: 835752 - DNA, 25 bp, Homo sapien
tggactccacttgttcaaatctggg

SEQ ID NO: 835753 - DNA, 25 bp, Homo sapien
tctttacactcactaatatcgtgga

SEQ ID NO: 835754 - DNA, 25 bp, Homo sapien
tatcgtggattacagttggactcca

SEQ ID NO: 835755 - DNA, 25 bp, Homo sapien
cctaatgcagtttgacccttatgaa

SEQ ID NO: 835756 - DNA, 25 bp, Homo sapien
taggaagctgcgtagtcaatagcga

SEQ ID NO: 835757 - DNA, 25 bp, Homo sapien
ggagaactctcattcccaaccaggg

SEQ ID NO: 835758 - DNA, 25 bp, Homo sapien
ggatattcctagatccccagggcca

SEQ ID NO: 835759 - DNA, 25 bp, Homo sapien
cattccccaagccaggatgttagga

SEQ ID NO: 835760 - DNA, 25 bp, Homo sapien
agttccaggccttacctctatgaag

SEQ ID NO: 835761 - DNA, 25 bp, Homo sapien
tatgttgcaatgtatgagtcagctc

SEQ ID NO: 835762 - DNA, 25 bp, Homo sapien
tgcaccaattacttaggccgactct

SEQ ID NO: 835763 - DNA, 25 bp, Homo sapien
tgagcccactcttgtttgcatgtta

SEQ ID NO: 835764 - DNA, 25 bp, Homo sapien
aagaacagcttctaccttgaaacaa

SEQ ID NO: 835765 - DNA, 25 bp, Homo sapien
caagatctgttccagactttagagt

SEQ ID NO: 835766 - DNA, 25 bp, Homo sapien
tctgcagcagttgtttaagaacagc

SEQ ID NO: 835767 - DNA, 25 bp, Homo sapien
ggtgggagaccggaccacaagatct

SEQ ID NO: 835768 - DNA, 25 bp, Homo sapien
tcctttgtttctggacactttattg

SEQ ID NO: 835769 - DNA, 25 bp, Homo sapien
ttactcatagtatcctttgtttctg

SEQ ID NO: 835770 - DNA, 25 bp, Homo sapien
tgtttctggacactttattgtttaa

SEQ ID NO: 835771 - DNA, 25 bp, Homo sapien
aatttttcatcaaagagattctggg

SEQ ID NO: 835772 - DNA, 25 bp, Homo sapien
tagggtactgacatgggaagagtga

SEQ ID NO: 835773 - DNA, 25 bp, Homo sapien
gagataacaagtgaatcatgagctg

SEQ ID NO: 835774 - DNA, 25 bp, Homo sapien
gcaacgcgggaagacgcatagagat

SEQ ID NO: 835775 - DNA, 25 bp, Homo sapien
gaacacaaaggccaatgaaagacag

SEQ ID NO: 835776 - DNA, 25 bp, Homo sapien
tgagacctgtgccagacatctaacc

SEQ ID NO: 835777 - DNA, 25 bp, Homo sapien
gaataagttgtgtcgtttaaagcca

SEQ ID NO: 835778 - DNA, 25 bp, Homo sapien
aagagcctgggaatgtgacttcctc

SEQ ID NO: 835779 - DNA, 25 bp, Homo sapien
cctatagaactgtacagaataagtt

SEQ ID NO: 835780 - DNA, 25 bp, Homo sapien
gagatctgcggcttcatgtcacacg

SEQ ID NO: 835781 - DNA, 25 bp, Homo sapien
cacacattgagagcgctttcacgga

SEQ ID NO: 835782 - DNA, 25 bp, Homo sapien
tatttgggtaccaagctgctcgtgg

SEQ ID NO: 835783 - DNA, 25 bp, Homo sapien
cagagtcgtagtttataggccaggc

SEQ ID NO: 835784 - DNA, 25 bp, Homo sapien
aaatgcacggtgcaggatgctcccg

SEQ ID NO: 835785 - DNA, 25 bp, Homo sapien
agcactgattgcttcgggagttcca

SEQ ID NO: 835786 - DNA, 25 bp, Homo sapien
tccctgtgacgaaagtctgggcttg

SEQ ID NO: 835787 - DNA, 25 bp, Homo sapien
tcatgtttagcgatcagagagcact

SEQ ID NO: 835788 - DNA, 25 bp, Homo sapien
ggccaggctgcgtcttccatgcgat

SEQ ID NO: 835789 - DNA, 25 bp, Homo sapien
agagcgcggccaggctgcgtcttcc

SEQ ID NO: 835790 - DNA, 25 bp, Homo sapien
aggctgcgtcttccatgcgatccgg

SEQ ID NO: 835791 - DNA, 25 bp, Homo sapien
tgcgtcttccatgcgatccggatcc

SEQ ID NO: 835792 - DNA, 25 bp, Homo sapien
ggcttgtggccaccaggtattgaac

SEQ ID NO: 835793 - DNA, 25 bp, Homo sapien
ggtaagttcgcctccagaggacaga

SEQ ID NO: 835794 - DNA, 25 bp, Homo sapien
gggaaaaacgcagacagcaatgcaa

SEQ ID NO: 835795 - DNA, 25 bp, Homo sapien
cactgttaggcctgtctctataaag

SEQ ID NO: 835796 - DNA, 25 bp, Homo sapien
cttacaaagtgaaaggtagagtgat

SEQ ID NO: 835797 - DNA, 25 bp, Homo sapien
tagaaaaggtgaatgtagacattcc

SEQ ID NO: 835798 - DNA, 25 bp, Homo sapien
ctagaaaaggtgaatgtagacattc

SEQ ID NO: 835799 - DNA, 25 bp, Homo sapien
gatttggagaactgactcctagaaa

SEQ ID NO: 835800 - DNA, 25 bp, Homo sapien
tagtaagccaacgagataactccat

SEQ ID NO: 835801 - DNA, 25 bp, Homo sapien
tggcttaggcccaccaggaaaagta

SEQ ID NO: 835802 - DNA, 25 bp, Homo sapien
cagagttagccaacgtatagtggta

SEQ ID NO: 835803 - DNA, 25 bp, Homo sapien
taattcgctcaagggcacatagttg

SEQ ID NO: 835804 - DNA, 25 bp, Homo sapien
gcggccagaaggattgctcgtgtct

SEQ ID NO: 835805 - DNA, 25 bp, Homo sapien
cccttattaggacactggcagcggc

SEQ ID NO: 835806 - DNA, 25 bp, Homo sapien
caccaataggcgcttgttcattccc

SEQ ID NO: 835807 - DNA, 25 bp, Homo sapien
cctcactgtagggaggagaatccat

SEQ ID NO: 835808 - DNA, 25 bp, Homo sapien
taaaaggcagtgtcgagtcattcag

SEQ ID NO: 835809 - DNA, 25 bp, Homo sapien
gaaaaaacctaggtctggagccagc

SEQ ID NO: 835810 - DNA, 25 bp, Homo sapien
gtgacttaagaacactgtggaccag

SEQ ID NO: 835811 - DNA, 25 bp, Homo sapien
taaaccagaatcctgctcgaggtct

SEQ ID NO: 835812 - DNA, 25 bp, Homo sapien
ctagtgttagttttggccttttgca

SEQ ID NO: 835813 - DNA, 25 bp, Homo sapien
accatcttcccttgcaaatttctta

SEQ ID NO: 835814 - DNA, 25 bp, Homo sapien
catcttcccttgcaaatttcttata

SEQ ID NO: 835815 - DNA, 25 bp, Homo sapien
ttctttctcttttcactatcaagcc

SEQ ID NO: 835816 - DNA, 25 bp, Homo sapien
tgccccactaaccatgcacaatttt

SEQ ID NO: 835817 - DNA, 25 bp, Homo sapien
tgttccagttcaaagtaatcccaag

SEQ ID NO: 835818 - DNA, 25 bp, Homo sapien
gaaacacataattggcttgacaggt

SEQ ID NO: 835819 - DNA, 25 bp, Homo sapien
cttgacaggtggaagcacagtacta

SEQ ID NO: 835820 - DNA, 25 bp, Homo sapien
tctgccagataccaaggtggagtct

SEQ ID NO: 835821 - DNA, 25 bp, Homo sapien
tgaaggcctaggttccgaggaggag

SEQ ID NO: 835822 - DNA, 25 bp, Homo sapien
tctgaacttgcggttgtgggatgct

SEQ ID NO: 835823 - DNA, 25 bp, Homo sapien
gatgctggtaggtaatgcttgctgc

SEQ ID NO: 835824 - DNA, 25 bp, Homo sapien
caggctggtaactgagatactcaat

SEQ ID NO: 835825 - DNA, 25 bp, Homo sapien
acagttgaccggtccccaagatcag

SEQ ID NO: 835826 - DNA, 25 bp, Homo sapien
caagatcagctctaaaatttctgca

SEQ ID NO: 835827 - DNA, 25 bp, Homo sapien
cagtgttggtcgatggagatttcag

SEQ ID NO: 835828 - DNA, 25 bp, Homo sapien
caaccactggattgtaataaaagca

SEQ ID NO: 835829 - DNA, 25 bp, Homo sapien
accaaccactggattgtaataaaag

SEQ ID NO: 835830 - DNA, 25 bp, Homo sapien
ccaaccactggattgtaataaaagc

SEQ ID NO: 835831 - DNA, 25 bp, Homo sapien
accactggattgtaataaaagcata

SEQ ID NO: 835832 - DNA, 25 bp, Homo sapien
aatgtggtgggagctgactggatca

SEQ ID NO: 835833 - DNA, 25 bp, Homo sapien
ggttccctcatgctgtgctcgtgac

SEQ ID NO: 835834 - DNA, 25 bp, Homo sapien
tgtgcaatcctcaaaagccaataca

SEQ ID NO: 835835 - DNA, 25 bp, Homo sapien
atttactaaaatctgctcatgtgca

SEQ ID NO: 835836 - DNA, 25 bp, Homo sapien
gatatagttgataatggatgactag

SEQ ID NO: 835837 - DNA, 25 bp, Homo sapien
tagattaggattcagaaaacttggg

SEQ ID NO: 835838 - DNA, 25 bp, Homo sapien
aatgtgtactgagatacagagtgcc

SEQ ID NO: 835839 - DNA, 25 bp, Homo sapien
tacaaatcaatatcactatgctaga

SEQ ID NO: 835840 - DNA, 25 bp, Homo sapien
gctagatatgtttctcctaatactt

SEQ ID NO: 835841 - DNA, 25 bp, Homo sapien
gacacgtttgacttagctgtttttg

SEQ ID NO: 835842 - DNA, 25 bp, Homo sapien
ttctgccgcagccgttcctgtcggg

SEQ ID NO: 835843 - DNA, 25 bp, Homo sapien
tgccgcagccgttcctgtcgggctc

SEQ ID NO: 835844 - DNA, 25 bp, Homo sapien
agccgttcctgtcgggctcggcggc

SEQ ID NO: 835845 - DNA, 25 bp, Homo sapien
tgcttctgccgcagccgttcctgtc

SEQ ID NO: 835846 - DNA, 25 bp, Homo sapien
attcatacagcctgtgctacccagg

SEQ ID NO: 835847 - DNA, 25 bp, Homo sapien
tgctcattcatcagtcagcagcatt

SEQ ID NO: 835848 - DNA, 25 bp, Homo sapien
acagcttgctcattcatcagtcagc

SEQ ID NO: 835849 - DNA, 25 bp, Homo sapien
cccaggactacagcagatgccagta

SEQ ID NO: 835850 - DNA, 25 bp, Homo sapien
tattgttgggtcgaactccttctgc

SEQ ID NO: 835851 - DNA, 25 bp, Homo sapien
gcattcttctgcttgggagcgacag

SEQ ID NO: 835852 - DNA, 25 bp, Homo sapien
cctcctgaaggcgtttttggcgtct

SEQ ID NO: 835853 - DNA, 25 bp, Homo sapien
cgctccaggaatgcggcctcatcat

SEQ ID NO: 835854 - DNA, 25 bp, Homo sapien
agcatccctccaatcattcttctgg

SEQ ID NO: 835855 - DNA, 25 bp, Homo sapien
tcagcatccctccaatcattcttct

SEQ ID NO: 835856 - DNA, 25 bp, Homo sapien
atccctccaatcattcttctggtag

SEQ ID NO: 835857 - DNA, 25 bp, Homo sapien
cttcagcatccctccaatcattctt

SEQ ID NO: 835858 - DNA, 25 bp, Homo sapien
tttctccaatgctccctcgctttgg

SEQ ID NO: 835859 - DNA, 25 bp, Homo sapien
tgctccctcgctttggcttctcctc

SEQ ID NO: 835860 - DNA, 25 bp, Homo sapien
tctccaatgctccctcgctttggct

SEQ ID NO: 835861 - DNA, 25 bp, Homo sapien
attttctccaatgctccctcgcttt

SEQ ID NO: 835862 - DNA, 25 bp, Homo sapien
ttaggctcttctgaactgatctgcc

SEQ ID NO: 835863 - DNA, 25 bp, Homo sapien
aatctcatctgaaccttgttccctc

SEQ ID NO: 835864 - DNA, 25 bp, Homo sapien
ttgtttaggctcttctgaactgatc

SEQ ID NO: 835865 - DNA, 25 bp, Homo sapien
gtttaggctcttctgaactgatctg

SEQ ID NO: 835866 - DNA, 25 bp, Homo sapien
gcttcaattcttgctcgttcatctg

SEQ ID NO: 835867 - DNA, 25 bp, Homo sapien
tgcttcaattcttgctcgttcatct

SEQ ID NO: 835868 - DNA, 25 bp, Homo sapien
cttgctcggctttaattctttctct

SEQ ID NO: 835869 - DNA, 25 bp, Homo sapien
tttttgtcttgctcggctttaattc

SEQ ID NO: 835870 - DNA, 25 bp, Homo sapien
tctcttcctccctcatcctttccct

SEQ ID NO: 835871 - DNA, 25 bp, Homo sapien
tttctcttcctccctcatcctttcc

SEQ ID NO: 835872 - DNA, 25 bp, Homo sapien
ttcctccctcatcctttccctctct

SEQ ID NO: 835873 - DNA, 25 bp, Homo sapien
ctctgctgcccttttctcttcctcc

SEQ ID NO: 835874 - DNA, 25 bp, Homo sapien
tctcttcctcttttatcctctgcct

SEQ ID NO: 835875 - DNA, 25 bp, Homo sapien
tcctcttttatcctctgcctctcct

SEQ ID NO: 835876 - DNA, 25 bp, Homo sapien
gcctctcctctgctgcccttttctc

SEQ ID NO: 835877 - DNA, 25 bp, Homo sapien
ttcctcctttatcctctgcctctcc

SEQ ID NO: 835878 - DNA, 25 bp, Homo sapien
tagctgcttgttacgtttctgctct

SEQ ID NO: 835879 - DNA, 25 bp, Homo sapien
tttgtctcttgcatggcatgttttt

SEQ ID NO: 835880 - DNA, 25 bp, Homo sapien
ctcttctagctgcttgttacgtttc

SEQ ID NO: 835881 - DNA, 25 bp, Homo sapien
tctcttgcatggcatgttttttctc

SEQ ID NO: 835882 - DNA, 25 bp, Homo sapien
gaacgagtttagatgcaagcacaga

SEQ ID NO: 835883 - DNA, 25 bp, Homo sapien
ttcaacgtcaaacccatgagtgagg

SEQ ID NO: 835884 - DNA, 25 bp, Homo sapien
gcctcagtcccaaatcagatgtgca

SEQ ID NO: 835885 - DNA, 25 bp, Homo sapien
gcttgtgtatcgctatggcctgaaa

SEQ ID NO: 835886 - DNA, 25 bp, Homo sapien
gaaatctagcatgatgtggcactcc

SEQ ID NO: 835887 - DNA, 25 bp, Homo sapien
taaagataccttcagtgcaatgcag

SEQ ID NO: 835888 - DNA, 25 bp, Homo sapien
caagtgctgcgtgggatggcttctc

SEQ ID NO: 835889 - DNA, 25 bp, Homo sapien
cacagcacagtggttctaaacagca

SEQ ID NO: 835890 - DNA, 25 bp, Homo sapien
ttttgaaggtaggcttgtcttcttg

SEQ ID NO: 835891 - DNA, 25 bp, Homo sapien
tgcactttagttcccttctcttctc

SEQ ID NO: 835892 - DNA, 25 bp, Homo sapien
ttagcttgcactttagttcccttct

SEQ ID NO: 835893 - DNA, 25 bp, Homo sapien
tctcttttagcttgcactttagttc

SEQ ID NO: 835894 - DNA, 25 bp, Homo sapien
gttacaattttgagatcatcagacc

SEQ ID NO: 835895 - DNA, 25 bp, Homo sapien
gactgtgagtcatggcttgaaatac

SEQ ID NO: 835896 - DNA, 25 bp, Homo sapien
gacctgagatatcttggaacactga

SEQ ID NO: 835897 - DNA, 25 bp, Homo sapien
ttttctgttgctttacgatcattac

SEQ ID NO: 835898 - DNA, 25 bp, Homo sapien
gaaaacctagtctttcgagcagcag

SEQ ID NO: 835899 - DNA, 25 bp, Homo sapien
tgttaccatggagaacgtccgtgct

SEQ ID NO: 835900 - DNA, 25 bp, Homo sapien
gcaacttgggaaaacggcagggctc

SEQ ID NO: 835901 - DNA, 25 bp, Homo sapien
taatgtttgggcaggattgatccgc

SEQ ID NO: 835902 - DNA, 25 bp, Homo sapien
tatatacctaggatgtccctcggac

SEQ ID NO: 835903 - DNA, 25 bp, Homo sapien
aaatcacttgactgctctgggatgc

SEQ ID NO: 835904 - DNA, 25 bp, Homo sapien
tacgtgaaaaaatgcggttggacca

SEQ ID NO: 835905 - DNA, 25 bp, Homo sapien
gatgctggtcccaagtacgtgaaaa

SEQ ID NO: 835906 - DNA, 25 bp, Homo sapien
tcaagggattctcccgccttagcat

SEQ ID NO: 835907 - DNA, 25 bp, Homo sapien
aagggattctcccgccttagcatcc

SEQ ID NO: 835908 - DNA, 25 bp, Homo sapien
ttcaagggattctcccgccttagca

SEQ ID NO: 835909 - DNA, 25 bp, Homo sapien
ggattctcccgccttagcatcctga

SEQ ID NO: 835910 - DNA, 25 bp, Homo sapien
ctcagaaagaaaccactcagatgtg

SEQ ID NO: 835911 - DNA, 25 bp, Homo sapien
caaaccaactctggcgaagaccagt

SEQ ID NO: 835912 - DNA, 25 bp, Homo sapien
tatggtcctttagcctgtgaacaaa

SEQ ID NO: 835913 - DNA, 25 bp, Homo sapien
gaatgaccacgttgcttagacaggt

SEQ ID NO: 835914 - DNA, 25 bp, Homo sapien
aagtttgtgggtcatgaattctcca

SEQ ID NO: 835915 - DNA, 25 bp, Homo sapien
tctttcgatccatgaagctcttaac

SEQ ID NO: 835916 - DNA, 25 bp, Homo sapien
tatgtttaagtttgtgggtcatgaa

SEQ ID NO: 835917 - DNA, 25 bp, Homo sapien
tctccattctgcgacttaacttctg

SEQ ID NO: 835918 - DNA, 25 bp, Homo sapien
tgtgaacacagtttctattaactag

SEQ ID NO: 835919 - DNA, 25 bp, Homo sapien
gtgaacacagtttctattaactagt

SEQ ID NO: 835920 - DNA, 25 bp, Homo sapien
tctctaagacaatggctaatgacct

SEQ ID NO: 835921 - DNA, 25 bp, Homo sapien
gcatgctgcctgcttagcacgtttc

SEQ ID NO: 835922 - DNA, 25 bp, Homo sapien
caatggctaatgacctcacaacaaa

SEQ ID NO: 835923 - DNA, 25 bp, Homo sapien
ctgctgactgagtatctctaagaca

SEQ ID NO: 835924 - DNA, 25 bp, Homo sapien
cattgaatgacatgaatcccagtta

SEQ ID NO: 835925 - DNA, 25 bp, Homo sapien
tctcttaggaaggtggtcagaccat

SEQ ID NO: 835926 - DNA, 25 bp, Homo sapien
taagccctgtctgagcgatgactgc

SEQ ID NO: 835927 - DNA, 25 bp, Homo sapien
gaaaatggtactgagaaaggtctct

SEQ ID NO: 835928 - DNA, 25 bp, Homo sapien
ggaggtcggtctgcggcttctgcat

SEQ ID NO: 835929 - DNA, 25 bp, Homo sapien
gaggaaggggaggtcggtctgcggc

SEQ ID NO: 835930 - DNA, 25 bp, Homo sapien
aaggggaggtcggtctgcggcttct

SEQ ID NO: 835931 - DNA, 25 bp, Homo sapien
gggcaatggaaaggggtttacatgc

SEQ ID NO: 835932 - DNA, 25 bp, Homo sapien
gcgccctcagcctccttggtgtcca

SEQ ID NO: 835933 - DNA, 25 bp, Homo sapien
tcagcctccttggtgtccacgctgg

SEQ ID NO: 835934 - DNA, 25 bp, Homo sapien
cctcagcctccttggtgtccacgct

SEQ ID NO: 835935 - DNA, 25 bp, Homo sapien
ttggtgtccacgctggccctccctc

SEQ ID NO: 835936 - DNA, 25 bp, Homo sapien
tgagttttcgatcggcttcctcctg

SEQ ID NO: 835937 - DNA, 25 bp, Homo sapien
gagcttctcgaactcttcgctctcg

SEQ ID NO: 835938 - DNA, 25 bp, Homo sapien
acgacgacgaagctcctccagcctt

SEQ ID NO: 835939 - DNA, 25 bp, Homo sapien
cctctctgagttttcgatcggcttc

SEQ ID NO: 835940 - DNA, 25 bp, Homo sapien
catgtcaggcagactcaagggagac

SEQ ID NO: 835941 - DNA, 25 bp, Homo sapien
cagccgcacggcactagggaatttt

SEQ ID NO: 835942 - DNA, 25 bp, Homo sapien
ccgggcaacgttctcagtgggctag

SEQ ID NO: 835943 - DNA, 25 bp, Homo sapien
gattagtacctaggtcagcgagttc

SEQ ID NO: 835944 - DNA, 25 bp, Homo sapien
tggcttagactaacactcattatga

SEQ ID NO: 835945 - DNA, 25 bp, Homo sapien
tactatatttgccagatggtacaag

SEQ ID NO: 835946 - DNA, 25 bp, Homo sapien
aggtgattttatggttgctccccgc

SEQ ID NO: 835947 - DNA, 25 bp, Homo sapien
tacctacatcctaggagagttgtga

SEQ ID NO: 835948 - DNA, 25 bp, Homo sapien
ttctggcatcttctggcgtttctca

SEQ ID NO: 835949 - DNA, 25 bp, Homo sapien
tgaacctttaggagtgaaacacttg

SEQ ID NO: 835950 - DNA, 25 bp, Homo sapien
cttgagagatgaacctttaggagtg

SEQ ID NO: 835951 - DNA, 25 bp, Homo sapien
aaacacttgaatggtttcttgtcat

SEQ ID NO: 835952 - DNA, 25 bp, Homo sapien
tattcaaaaattctgctcgctcttc

SEQ ID NO: 835953 - DNA, 25 bp, Homo sapien
attcaaaaattctgctcgctcttct

SEQ ID NO: 835954 - DNA, 25 bp, Homo sapien
ttcaaaaattctgctcgctcttcta

SEQ ID NO: 835955 - DNA, 25 bp, Homo sapien
tgcttgatgggtcgatttgacacca

SEQ ID NO: 835956 - DNA, 25 bp, Homo sapien
tgctgcttgatgggtcgatttgaca

SEQ ID NO: 835957 - DNA, 25 bp, Homo sapien
ctcaattgcactggtatactgctcc

SEQ ID NO: 835958 - DNA, 25 bp, Homo sapien
ctgcttgatgggtcgatttgacacc

SEQ ID NO: 835959 - DNA, 25 bp, Homo sapien
ctcaaaacaagacggttgggaggct

SEQ ID NO: 835960 - DNA, 25 bp, Homo sapien
gccaggcatagtccctatgttgccc

SEQ ID NO: 835961 - DNA, 25 bp, Homo sapien
tatgaagggcactttgctaggctct

SEQ ID NO: 835962 - DNA, 25 bp, Homo sapien
tacagtcgtgctcaaaacaagacgg

SEQ ID NO: 835963 - DNA, 25 bp, Homo sapien
ttgtgagttatttttaggattggtg

SEQ ID NO: 835964 - DNA, 25 bp, Homo sapien
gagttatttttaggattggtgctgg

SEQ ID NO: 835965 - DNA, 25 bp, Homo sapien
tgtgagttatttttaggattggtgc

SEQ ID NO: 835966 - DNA, 25 bp, Homo sapien
ggaagtttgttctcataaaattata

SEQ ID NO: 835967 - DNA, 25 bp, Homo sapien
ttgcgtacaccttcagcaggaacag

SEQ ID NO: 835968 - DNA, 25 bp, Homo sapien
tactcttgatgttgcgtacaccttc

SEQ ID NO: 835969 - DNA, 25 bp, Homo sapien
tgccggctttgtaggttttgcgctt

SEQ ID NO: 835970 - DNA, 25 bp, Homo sapien
agatccgaggctgccggctttgtag

SEQ ID NO: 835971 - DNA, 25 bp, Homo sapien
gattcctaaatcaaaatcgacatgc

SEQ ID NO: 835972 - DNA, 25 bp, Homo sapien
gatggcccgggcttagtacctcatg

SEQ ID NO: 835973 - DNA, 25 bp, Homo sapien
gtacaaattgcaccttcttcactgc

SEQ ID NO: 835974 - DNA, 25 bp, Homo sapien
aactccaagggtggacatttcagcc

SEQ ID NO: 835975 - DNA, 25 bp, Homo sapien
tcattgatgcggctagaaaccccta

SEQ ID NO: 835976 - DNA, 25 bp, Homo sapien
tgcggctagaaacccctaccttcaa

SEQ ID NO: 835977 - DNA, 25 bp, Homo sapien
agcaggtgacttgtttccatctggg

SEQ ID NO: 835978 - DNA, 25 bp, Homo sapien
tagccattcattgatgcggctagaa

SEQ ID NO: 835979 - DNA, 25 bp, Homo sapien
agctgggagatcaaagaaactcaga

SEQ ID NO: 835980 - DNA, 25 bp, Homo sapien
gcttcttagaactgttgtaaatctg

SEQ ID NO: 835981 - DNA, 25 bp, Homo sapien
tcagtattctagctgattcctcctc

SEQ ID NO: 835982 - DNA, 25 bp, Homo sapien
gcagcttcttagaactgttgtaaat

SEQ ID NO: 835983 - DNA, 25 bp, Homo sapien
tcctctcagttagggtgtagaggtg

SEQ ID NO: 835984 - DNA, 25 bp, Homo sapien
taaacggttcaaggagttgtgccca

SEQ ID NO: 835985 - DNA, 25 bp, Homo sapien
tgtcaataaccccagaacatggtgt

SEQ ID NO: 835986 - DNA, 25 bp, Homo sapien
gcaattaaatgcacagaggcctagg

SEQ ID NO: 835987 - DNA, 25 bp, Homo sapien
gaaaacttgaggcactaaagagcac

SEQ ID NO: 835988 - DNA, 25 bp, Homo sapien
ggtttccaatcaaccagagaccaaa

SEQ ID NO: 835989 - DNA, 25 bp, Homo sapien
gagaaagacccactccggaagaaga

SEQ ID NO: 835990 - DNA, 25 bp, Homo sapien
ccaaagagtgaggaacagaaggtca

SEQ ID NO: 835991 - DNA, 25 bp, Homo sapien
gacccactccggaagaagagggaga

SEQ ID NO: 835992 - DNA, 25 bp, Homo sapien
ttataagttggcattttaaatcaaa

SEQ ID NO: 835993 - DNA, 25 bp, Homo sapien
acatctgagttataagttggcattt

SEQ ID NO: 835994 - DNA, 25 bp, Homo sapien
ataagttggcattttaaatcaaagg

SEQ ID NO: 835995 - DNA, 25 bp, Homo sapien
atcaaaggggaaatataaatggaat

SEQ ID NO: 835996 - DNA, 25 bp, Homo sapien
tacagatgcctgatttgcctgccca

SEQ ID NO: 835997 - DNA, 25 bp, Homo sapien
tataacatccccaggagcagtcctc

SEQ ID NO: 835998 - DNA, 25 bp, Homo sapien
actatcttgggatccgttgccgggc

SEQ ID NO: 835999 - DNA, 25 bp, Homo sapien
cacacagcgcttctctgcctaggga

SEQ ID NO: 836000 - DNA, 25 bp, Homo sapien
tattgatcagtaaaagtgaaacagg

SEQ ID NO: 836001 - DNA, 25 bp, Homo sapien
tcttatgatatgagaatgggctgga

SEQ ID NO: 836002 - DNA, 25 bp, Homo sapien
cctaaggacttactgtttattgatc

SEQ ID NO: 836003 - DNA, 25 bp, Homo sapien
gtttgattttatatagaccgtgaca

SEQ ID NO: 836004 - DNA, 25 bp, Homo sapien
tgctggatacgtctcctggtctcaa

SEQ ID NO: 836005 - DNA, 25 bp, Homo sapien
ccagaggttccgcttgctggatacg

SEQ ID NO: 836006 - DNA, 25 bp, Homo sapien
ttccgcttgctggatacgtctcctg

SEQ ID NO: 836007 - DNA, 25 bp, Homo sapien
ccacagattgcttttcccagaggtt

SEQ ID NO: 836008 - DNA, 25 bp, Homo sapien
ccttgtaaggaaacgtagaccatgg

SEQ ID NO: 836009 - DNA, 25 bp, Homo sapien
tattgagaatgtcctactgagaacc

SEQ ID NO: 836010 - DNA, 25 bp, Homo sapien
tgactgtggcactaagctgggacct

SEQ ID NO: 836011 - DNA, 25 bp, Homo sapien
tggtatcccatacggccttctgctg

SEQ ID NO: 836012 - DNA, 25 bp, Homo sapien
gaatgagctcattgtaccacaaagg

SEQ ID NO: 836013 - DNA, 25 bp, Homo sapien
cagtgtaagcatcatttagatgttc

SEQ ID NO: 836014 - DNA, 25 bp, Homo sapien
gggtcccatttgcagtgtaagcatc

SEQ ID NO: 836015 - DNA, 25 bp, Homo sapien
tacagttgggagttgaatgagctca

SEQ ID NO: 836016 - DNA, 25 bp, Homo sapien
ggaacctatataaacactgggactg

SEQ ID NO: 836017 - DNA, 25 bp, Homo sapien
gaggaatgttatccagagagactcc

SEQ ID NO: 836018 - DNA, 25 bp, Homo sapien
gatgatggtctatggccagctgaca

SEQ ID NO: 836019 - DNA, 25 bp, Homo sapien
ccagagctctggctaggaggaatgt

SEQ ID NO: 836020 - DNA, 25 bp, Homo sapien
gaagagaacttgaaattgacagcct

SEQ ID NO: 836021 - DNA, 25 bp, Homo sapien
aaagggaggattattatcggcattc

SEQ ID NO: 836022 - DNA, 25 bp, Homo sapien
gacagcctgtagtgtgaaactgaca

SEQ ID NO: 836023 - DNA, 25 bp, Homo sapien
ttcaggcagatggtttttatagtca

SEQ ID NO: 836024 - DNA, 25 bp, Homo sapien
aatacaaaacagagcgaattagccc

SEQ ID NO: 836025 - DNA, 25 bp, Homo sapien
gtgataatatacatgggtttactgg

SEQ ID NO: 836026 - DNA, 25 bp, Homo sapien
gtacttttaccatgaacatctctag

SEQ ID NO: 836027 - DNA, 25 bp, Homo sapien
ttagccctctacaactgagctcgtc

SEQ ID NO: 836028 - DNA, 25 bp, Homo sapien
tagatactgcacacattccgcaggc

SEQ ID NO: 836029 - DNA, 25 bp, Homo sapien
tgtggttggtatcactgctcagata

SEQ ID NO: 836030 - DNA, 25 bp, Homo sapien
agtagaaaagtctctatttcacagc

SEQ ID NO: 836031 - DNA, 25 bp, Homo sapien
gatacagagttatgatgatcagtag

SEQ ID NO: 836032 - DNA, 25 bp, Homo sapien
gagttatctaaaatgtggttcaggc

SEQ ID NO: 836033 - DNA, 25 bp, Homo sapien
ggttcaggctactatcactactaaa

SEQ ID NO: 836034 - DNA, 25 bp, Homo sapien
tactttcttcttataggtcatcagg

SEQ ID NO: 836035 - DNA, 25 bp, Homo sapien
gaaaacatattgagacctatctgcc

SEQ ID NO: 836036 - DNA, 25 bp, Homo sapien
gaagatagactttgtaacgcagatg

SEQ ID NO: 836037 - DNA, 25 bp, Homo sapien
gaagagaccttatgacctattgtga

SEQ ID NO: 836038 - DNA, 25 bp, Homo sapien
gggagtcaatgctacctgggacact

SEQ ID NO: 836039 - DNA, 25 bp, Homo sapien
tgtaatagtgatcaggaggagctct

SEQ ID NO: 836040 - DNA, 25 bp, Homo sapien
ttataatagacatacctctcactat

SEQ ID NO: 836041 - DNA, 25 bp, Homo sapien
taatagacatacctctcactatcaa

SEQ ID NO: 836042 - DNA, 25 bp, Homo sapien
tataatagacatacctctcactatc

SEQ ID NO: 836043 - DNA, 25 bp, Homo sapien
tagacatacctctcactatcaatat

SEQ ID NO: 836044 - DNA, 25 bp, Homo sapien
cagggcggtcagagaggctctcaga

SEQ ID NO: 836045 - DNA, 25 bp, Homo sapien
aaaggagcctgcgtaggttttggct

SEQ ID NO: 836046 - DNA, 25 bp, Homo sapien
ttcggagatcacctagcaaccagct

SEQ ID NO: 836047 - DNA, 25 bp, Homo sapien
acctagcaaccagctcggaggaaag

SEQ ID NO: 836048 - DNA, 25 bp, Homo sapien
gcaacgggtccgccctcgcgagact

SEQ ID NO: 836049 - DNA, 25 bp, Homo sapien
aggcaacgggtccgccctcgcgaga

SEQ ID NO: 836050 - DNA, 25 bp, Homo sapien
caacgggtccgccctcgcgagactt

SEQ ID NO: 836051 - DNA, 25 bp, Homo sapien
caggcaacgggtccgccctcgcgag

SEQ ID NO: 836052 - DNA, 25 bp, Homo sapien
gagaacccggtatccagccgctaga

SEQ ID NO: 836053 - DNA, 25 bp, Homo sapien
agaatatctcgggatctcgcggaga

SEQ ID NO: 836054 - DNA, 25 bp, Homo sapien
taacgccactgctggagatccgcag

SEQ ID NO: 836055 - DNA, 25 bp, Homo sapien
caggccagtcgtcgcttccgtgcgg

SEQ ID NO: 836056 - DNA, 25 bp, Homo sapien
tctggtctcaggaaacggcccttat

SEQ ID NO: 836057 - DNA, 25 bp, Homo sapien
cacatttggaaaatccgactggcct

SEQ ID NO: 836058 - DNA, 25 bp, Homo sapien
aagcgtgttttggagcgtggactac

SEQ ID NO: 836059 - DNA, 25 bp, Homo sapien
gaagtgctgacctgctgcggataca

SEQ ID NO: 836060 - DNA, 25 bp, Homo sapien
tagaatacaactaataaaaccttca

SEQ ID NO: 836061 - DNA, 25 bp, Homo sapien
ttcttttcaagctgtaggtgtttac

SEQ ID NO: 836062 - DNA, 25 bp, Homo sapien
tactacattaaatgagtactcaaaa

SEQ ID NO: 836063 - DNA, 25 bp, Homo sapien
gactatacgagacaacaaccacaat

SEQ ID NO: 836064 - DNA, 25 bp, Homo sapien
agatttcttgtaatatacgggtagg

SEQ ID NO: 836065 - DNA, 25 bp, Homo sapien
cactgattgttctgtctgaatagtc

SEQ ID NO: 836066 - DNA, 25 bp, Homo sapien
ttgttctgtctgaatagtcttcctt

SEQ ID NO: 836067 - DNA, 25 bp, Homo sapien
catcttcatcactgattgttctgtc

SEQ ID NO: 836068 - DNA, 25 bp, Homo sapien
tcttccttttctgaatcttctgaca

SEQ ID NO: 836069 - DNA, 25 bp, Homo sapien
catagtgttcccagtgatagcttag

SEQ ID NO: 836070 - DNA, 25 bp, Homo sapien
aacacggtggttctactatgattca

SEQ ID NO: 836071 - DNA, 25 bp, Homo sapien
ggaaatctcgcagcctatgtagtag

SEQ ID NO: 836072 - DNA, 25 bp, Homo sapien
tctttctagacagggcatagtgttc

SEQ ID NO: 836073 - DNA, 25 bp, Homo sapien
ttgggattgagtatatgtctttaac

SEQ ID NO: 836074 - DNA, 25 bp, Homo sapien
ccaacagttttcaaatccagaattt

SEQ ID NO: 836075 - DNA, 25 bp, Homo sapien
caacagttttcaaatccagaatttt

SEQ ID NO: 836076 - DNA, 25 bp, Homo sapien
cagaatttttttacatctattttag

SEQ ID NO: 836077 - DNA, 25 bp, Homo sapien
aaccaacagttttcaaatccagaat

SEQ ID NO: 836078 - DNA, 25 bp, Homo sapien
aaagtgcacaccgatgaagatcttc

SEQ ID NO: 836079 - DNA, 25 bp, Homo sapien
cacttacaaatttcatgaacatatc

SEQ ID NO: 836080 - DNA, 25 bp, Homo sapien
ttacaaatttcatgaacatatcctc

SEQ ID NO: 836081 - DNA, 25 bp, Homo sapien
gcacaccgatgaagatcttcactta

SEQ ID NO: 836082 - DNA, 25 bp, Homo sapien
caaatgacaaggtaaatccttatgt

SEQ ID NO: 836083 - DNA, 25 bp, Homo sapien
gaaaagtttgaactctgcaagtaga

SEQ ID NO: 836084 - DNA, 25 bp, Homo sapien
gagactctttagacaatgtacttcg

SEQ ID NO: 836085 - DNA, 25 bp, Homo sapien
taatctgtccgttataacttgagtc

SEQ ID NO: 836086 - DNA, 25 bp, Homo sapien
tatgatatggcaagggcaaccatgc

SEQ ID NO: 836087 - DNA, 25 bp, Homo sapien
gagcagaataatttagtcacaccac

SEQ ID NO: 836088 - DNA, 25 bp, Homo sapien
tacaaacattgataagacagcctct

SEQ ID NO: 836089 - DNA, 25 bp, Homo sapien
gatcaaggcgttctcagtacagaca

SEQ ID NO: 836090 - DNA, 25 bp, Homo sapien
ggaagaagggatcaccaaaagagtc

SEQ ID NO: 836091 - DNA, 25 bp, Homo sapien
tgtagtccgggggaagaagggatca

SEQ ID NO: 836092 - DNA, 25 bp, Homo sapien
aagaagggatcaccaaaagagtcag

SEQ ID NO: 836093 - DNA, 25 bp, Homo sapien
gaagaagggatcaccaaaagagtca

SEQ ID NO: 836094 - DNA, 25 bp, Homo sapien
tcaatggaccagaagaagagacacc

SEQ ID NO: 836095 - DNA, 25 bp, Homo sapien
aatcccttggttcacgaagacgtgg

SEQ ID NO: 836096 - DNA, 25 bp, Homo sapien
gtggcacccatctccctagctgata

SEQ ID NO: 836097 - DNA, 25 bp, Homo sapien
cgatgacttcacaatggtatggcca

SEQ ID NO: 836098 - DNA, 25 bp, Homo sapien
agaggtggggatgatggtagaagga

SEQ ID NO: 836099 - DNA, 25 bp, Homo sapien
ggagaggtggggatgatggtagaag

SEQ ID NO: 836100 - DNA, 25 bp, Homo sapien
ctggtgctgtaggaaaaatgaggtt

SEQ ID NO: 836101 - DNA, 25 bp, Homo sapien
aatgaggttggagggggtggtagca

SEQ ID NO: 836102 - DNA, 25 bp, Homo sapien
gagcacatgcggctggaagtgacac

SEQ ID NO: 836103 - DNA, 25 bp, Homo sapien
tgtgactgagggcaaaatgacggct

SEQ ID NO: 836104 - DNA, 25 bp, Homo sapien
gaaagaacctcagcagtaacagtgg

SEQ ID NO: 836105 - DNA, 25 bp, Homo sapien
agctgctgatggtgactcctgtgac

SEQ ID NO: 836106 - DNA, 25 bp, Homo sapien
ttgattcttcctacacaaggatgta

SEQ ID NO: 836107 - DNA, 25 bp, Homo sapien
cctacacaaggatgtattgtattgg

SEQ ID NO: 836108 - DNA, 25 bp, Homo sapien
ttggcttgaggaccagcagagcttg

SEQ ID NO: 836109 - DNA, 25 bp, Homo sapien
tattgtattgggtgttccagttggc

SEQ ID NO: 836110 - DNA, 25 bp, Homo sapien
tatttcctggtggtcaagatagccc

SEQ ID NO: 836111 - DNA, 25 bp, Homo sapien
tcggaattgctatgggcctaacggg

SEQ ID NO: 836112 - DNA, 25 bp, Homo sapien
caggaagggctgacatatatacctt

SEQ ID NO: 836113 - DNA, 25 bp, Homo sapien
gagtgggtccccacttgacaaattc

SEQ ID NO: 836114 - DNA, 25 bp, Homo sapien
tcctattgaatagtcttgccatcct

SEQ ID NO: 836115 - DNA, 25 bp, Homo sapien
gaaaagacaatgctcttcctattga

SEQ ID NO: 836116 - DNA, 25 bp, Homo sapien
aatcagttcaccacagacacatggg

SEQ ID NO: 836117 - DNA, 25 bp, Homo sapien
tgtgcttctggcattatacctaaga

SEQ ID NO: 836118 - DNA, 25 bp, Homo sapien
agactcactccagcatgagactcca

SEQ ID NO: 836119 - DNA, 25 bp, Homo sapien
gagactcactccagcatgagactcc

SEQ ID NO: 836120 - DNA, 25 bp, Homo sapien
ttttaagaggtcgttggcatttcca

SEQ ID NO: 836121 - DNA, 25 bp, Homo sapien
catgggacatgtagatcagtttgga

SEQ ID NO: 836122 - DNA, 25 bp, Homo sapien
ggtcagatttccaatgtcagctaag

SEQ ID NO: 836123 - DNA, 25 bp, Homo sapien
gcagggcatgtatcaatttcagtaa

SEQ ID NO: 836124 - DNA, 25 bp, Homo sapien
tatacactggctcaggacaagaagg

SEQ ID NO: 836125 - DNA, 25 bp, Homo sapien
gcttccttggagtctggataaaggg

SEQ ID NO: 836126 - DNA, 25 bp, Homo sapien
tagataaaccacagtagcttccttg

SEQ ID NO: 836127 - DNA, 25 bp, Homo sapien
tctaagcccgttgggatatacactg

SEQ ID NO: 836128 - DNA, 25 bp, Homo sapien
tattttacagcaacatgtgtcatta

SEQ ID NO: 836129 - DNA, 25 bp, Homo sapien
gaaatttccactacaaacagcaaaa

SEQ ID NO: 836130 - DNA, 25 bp, Homo sapien
gcaacatgtgtcattatgtgctcac

SEQ ID NO: 836131 - DNA, 25 bp, Homo sapien
tggtcatctgaaatttccactacaa

SEQ ID NO: 836132 - DNA, 25 bp, Homo sapien
cagttgctcaagtgtccagtttaag

SEQ ID NO: 836133 - DNA, 25 bp, Homo sapien
ggttgctgggtgttctattaggtcc

SEQ ID NO: 836134 - DNA, 25 bp, Homo sapien
tagctttctgtctcaatcatcttaa

SEQ ID NO: 836135 - DNA, 25 bp, Homo sapien
ctttatgacaaagcatgtggttgat

SEQ ID NO: 836136 - DNA, 25 bp, Homo sapien
ccatgtgctcaagtggagagtcaca

SEQ ID NO: 836137 - DNA, 25 bp, Homo sapien
gatatctattatgagtgatctttga

SEQ ID NO: 836138 - DNA, 25 bp, Homo sapien
attatgatatctattatgagtgatc

SEQ ID NO: 836139 - DNA, 25 bp, Homo sapien
tgctcaagtggagagtcacacatct

SEQ ID NO: 836140 - DNA, 25 bp, Homo sapien
aaagtattgtcacggtaatccacag

SEQ ID NO: 836141 - DNA, 25 bp, Homo sapien
aaacatcaaagtattgtcacggtaa

SEQ ID NO: 836142 - DNA, 25 bp, Homo sapien
ttgtcacggtaatccacaggctgct

SEQ ID NO: 836143 - DNA, 25 bp, Homo sapien
gctgcttcaaaggtgttcggttacc

SEQ ID NO: 836144 - DNA, 25 bp, Homo sapien
cttctgtagattaccactctcaaac

SEQ ID NO: 836145 - DNA, 25 bp, Homo sapien
taccttctgtagattaccactctca

SEQ ID NO: 836146 - DNA, 25 bp, Homo sapien
accttctgtagattaccactctcaa

SEQ ID NO: 836147 - DNA, 25 bp, Homo sapien
ctaccttctgtagattaccactctc

SEQ ID NO: 836148 - DNA, 25 bp, Homo sapien
aaataatagttgatggtctagctcc

SEQ ID NO: 836149 - DNA, 25 bp, Homo sapien
tagtatccatacttcaaggaattac

SEQ ID NO: 836150 - DNA, 25 bp, Homo sapien
taatagttgatggtctagctcctta

SEQ ID NO: 836151 - DNA, 25 bp, Homo sapien
gttgatggtctagctccttaaataa

SEQ ID NO: 836152 - DNA, 25 bp, Homo sapien
ataatcacctaggaacaggtaaaat

SEQ ID NO: 836153 - DNA, 25 bp, Homo sapien
ccctttacttagtctttggagatgc

SEQ ID NO: 836154 - DNA, 25 bp, Homo sapien
ggatgagaaactgcttctatgctaa

SEQ ID NO: 836155 - DNA, 25 bp, Homo sapien
actatcactgagagatttaaacaca

SEQ ID NO: 836156 - DNA, 25 bp, Homo sapien
gagaacaagaactgcattcgataac

SEQ ID NO: 836157 - DNA, 25 bp, Homo sapien
tatacaccatgttcctagcaagcgt

SEQ ID NO: 836158 - DNA, 25 bp, Homo sapien
catctggattgagcatgggtaccac

SEQ ID NO: 836159 - DNA, 25 bp, Homo sapien
aaaagtgtcccgaagcaactgtgca

SEQ ID NO: 836160 - DNA, 25 bp, Homo sapien
taaatcccgtccagctaaggaacag

SEQ ID NO: 836161 - DNA, 25 bp, Homo sapien
actcctgccttaaacttcttacaag

SEQ ID NO: 836162 - DNA, 25 bp, Homo sapien
cattcagagactaactgacatttaa

SEQ ID NO: 836163 - DNA, 25 bp, Homo sapien
gattaaccggattaagatatttctc

SEQ ID NO: 836164 - DNA, 25 bp, Homo sapien
gaaacttgctgaatagactcctgcc

SEQ ID NO: 836165 - DNA, 25 bp, Homo sapien
cgttgctgtaagtataatgtcttag

SEQ ID NO: 836166 - DNA, 25 bp, Homo sapien
tagcataagtgggaagattcgttgc

SEQ ID NO: 836167 - DNA, 25 bp, Homo sapien
gtcactaccatcacagccatacatg

SEQ ID NO: 836168 - DNA, 25 bp, Homo sapien
cacagccatacatgaagatgttctc

SEQ ID NO: 836169 - DNA, 25 bp, Homo sapien
gtggcctccatggtaaagctgttcc

SEQ ID NO: 836170 - DNA, 25 bp, Homo sapien
cagagtagatccacagaaggtggcc

SEQ ID NO: 836171 - DNA, 25 bp, Homo sapien
ctggacattaaacttgcaagctgag

SEQ ID NO: 836172 - DNA, 25 bp, Homo sapien
catggtaaagctgttcctgattccc

SEQ ID NO: 836173 - DNA, 25 bp, Homo sapien
atcaataagtttatccacccttgag

SEQ ID NO: 836174 - DNA, 25 bp, Homo sapien
aaacatcaataagtttatccaccct

SEQ ID NO: 836175 - DNA, 25 bp, Homo sapien
ttcttagcaggtacattgcaaaaca

SEQ ID NO: 836176 - DNA, 25 bp, Homo sapien
tttcttagcaggtacattgcaaaac

SEQ ID NO: 836177 - DNA, 25 bp, Homo sapien
tgctgaaatgagtgcctcgtttgtt

SEQ ID NO: 836178 - DNA, 25 bp, Homo sapien
tcgggatcacaataatccaagagag

SEQ ID NO: 836179 - DNA, 25 bp, Homo sapien
tggtccggtcgggatcacaataatc

SEQ ID NO: 836180 - DNA, 25 bp, Homo sapien
caggtctttcgtgctgaaatgagtg

SEQ ID NO: 836181 - DNA, 25 bp, Homo sapien
ccagggttatatgtctttccatttc

SEQ ID NO: 836182 - DNA, 25 bp, Homo sapien
ttttccagggttatatgtctttcca

SEQ ID NO: 836183 - DNA, 25 bp, Homo sapien
ctagactctacatccaatgtaatgt

SEQ ID NO: 836184 - DNA, 25 bp, Homo sapien
tttccagggttatatgtctttccat

SEQ ID NO: 836185 - DNA, 25 bp, Homo sapien
tcatctcaataaaaatgtcagttct

SEQ ID NO: 836186 - DNA, 25 bp, Homo sapien
tattcctgtggcattgaattttcca

SEQ ID NO: 836187 - DNA, 25 bp, Homo sapien
tcttccaactatattcctgtggcat

SEQ ID NO: 836188 - DNA, 25 bp, Homo sapien
tattcattaccttttattatactgc

SEQ ID NO: 836189 - DNA, 25 bp, Homo sapien
ctataagtgggagcttataaaatta

SEQ ID NO: 836190 - DNA, 25 bp, Homo sapien
ggtaagtcagagagtcaatggattc

SEQ ID NO: 836191 - DNA, 25 bp, Homo sapien
caatggattctgaactgtcagagcc

SEQ ID NO: 836192 - DNA, 25 bp, Homo sapien
ttctgaactgtcagagcctcggcta

SEQ ID NO: 836193 - DNA, 25 bp, Homo sapien
tgagaagttaacttgagaaggtaag

SEQ ID NO: 836194 - DNA, 25 bp, Homo sapien
aggtggaatagtctacagaggtagg

SEQ ID NO: 836195 - DNA, 25 bp, Homo sapien
ggtggaatagtctacagaggtaggc

SEQ ID NO: 836196 - DNA, 25 bp, Homo sapien
gtggaatagtctacagaggtaggca

SEQ ID NO: 836197 - DNA, 25 bp, Homo sapien
ggcttgctatggtagaattcctttc

SEQ ID NO: 836198 - DNA, 25 bp, Homo sapien
tggcttgctatggtagaattccttt

SEQ ID NO: 836199 - DNA, 25 bp, Homo sapien
tttgcagcaaatgccctctatcata

SEQ ID NO: 836200 - DNA, 25 bp, Homo sapien
gcagcaaatgccctctatcataaac

SEQ ID NO: 836201 - DNA, 25 bp, Homo sapien
gtctttgcagcaaatgccctctatc

SEQ ID NO: 836202 - DNA, 25 bp, Homo sapien
tctttgcagcaaatgccctctatca

SEQ ID NO: 836203 - DNA, 25 bp, Homo sapien
ccttgattaggtaattgtcttctga

SEQ ID NO: 836204 - DNA, 25 bp, Homo sapien
caaaccttgattaggtaattgtctt

SEQ ID NO: 836205 - DNA, 25 bp, Homo sapien
cttgattaggtaattgtcttctgaa

SEQ ID NO: 836206 - DNA, 25 bp, Homo sapien
aaccttgattaggtaattgtcttct

SEQ ID NO: 836207 - DNA, 25 bp, Homo sapien
tgtcaccaagtgtagtcaaccagag

SEQ ID NO: 836208 - DNA, 25 bp, Homo sapien
cagaaggtgaaactagagcattctc

SEQ ID NO: 836209 - DNA, 25 bp, Homo sapien
tcaaccagaggttggatgagcctgg

SEQ ID NO: 836210 - DNA, 25 bp, Homo sapien
tacagctctttagcaatggaatgaa

SEQ ID NO: 836211 - DNA, 25 bp, Homo sapien
gaaggggctcgttcaggtattttca

SEQ ID NO: 836212 - DNA, 25 bp, Homo sapien
gccaagaaggggctcgttcaggtat

SEQ ID NO: 836213 - DNA, 25 bp, Homo sapien
caagaaggggctcgttcaggtattt

SEQ ID NO: 836214 - DNA, 25 bp, Homo sapien
aagccaagaaggggctcgttcaggt

SEQ ID NO: 836215 - DNA, 25 bp, Homo sapien
gggatgtcactttgaaacagtttcc

SEQ ID NO: 836216 - DNA, 25 bp, Homo sapien
agaagtttgtttgcccataggagac

SEQ ID NO: 836217 - DNA, 25 bp, Homo sapien
tatgactctgagtcatactttggga

SEQ ID NO: 836218 - DNA, 25 bp, Homo sapien
ttttcctagattggcctctcactga

SEQ ID NO: 836219 - DNA, 25 bp, Homo sapien
ttgagtttgaactattcctttatcc

SEQ ID NO: 836220 - DNA, 25 bp, Homo sapien
tttatctgagtggtttgcatgtttt

SEQ ID NO: 836221 - DNA, 25 bp, Homo sapien
gaagttggttcttggattgaatagc

SEQ ID NO: 836222 - DNA, 25 bp, Homo sapien
tgtttttagtgctatgcacgatggg

SEQ ID NO: 836223 - DNA, 25 bp, Homo sapien
aataatcaattaaataaggcctgat

SEQ ID NO: 836224 - DNA, 25 bp, Homo sapien
taaggcctgataacttactccttca

SEQ ID NO: 836225 - DNA, 25 bp, Homo sapien
ctttgccaaatgtgatggagctgac

SEQ ID NO: 836226 - DNA, 25 bp, Homo sapien
aaagatgtgttaaatagataagagt

SEQ ID NO: 836227 - DNA, 25 bp, Homo sapien
ggaacaaaaccaagatgaccatgag

SEQ ID NO: 836228 - DNA, 25 bp, Homo sapien
ccatgagagtgatctctgatcatcc

SEQ ID NO: 836229 - DNA, 25 bp, Homo sapien
aaaccaagatgaccatgagagtgat

SEQ ID NO: 836230 - DNA, 25 bp, Homo sapien
tgcacacagctgtctcatccacagt

SEQ ID NO: 836231 - DNA, 25 bp, Homo sapien
gcagctggcagcatgcgtgggggca

SEQ ID NO: 836232 - DNA, 25 bp, Homo sapien
tgacctgaccagtagtggccactga

SEQ ID NO: 836233 - DNA, 25 bp, Homo sapien
caaaagtcttttattggccttatct

SEQ ID NO: 836234 - DNA, 25 bp, Homo sapien
cttttattggccttatctgcttgca

SEQ ID NO: 836235 - DNA, 25 bp, Homo sapien
ccttctgaatcaccctcttatcata

SEQ ID NO: 836236 - DNA, 25 bp, Homo sapien
agtgccttctgaatcaccctcttat

SEQ ID NO: 836237 - DNA, 25 bp, Homo sapien
tgccttctgaatcaccctcttatca

SEQ ID NO: 836238 - DNA, 25 bp, Homo sapien
cagtgccttctgaatcaccctctta

SEQ ID NO: 836239 - DNA, 25 bp, Homo sapien
cacaacatggtcagttcttgaagtt

SEQ ID NO: 836240 - DNA, 25 bp, Homo sapien
tccacaacatggtcagttcttgaag

SEQ ID NO: 836241 - DNA, 25 bp, Homo sapien
ctatgggagttccacaacatggtca

SEQ ID NO: 836242 - DNA, 25 bp, Homo sapien
ggagttccacaacatggtcagttct

SEQ ID NO: 836243 - DNA, 25 bp, Homo sapien
ttgaagcaggatcagtgaaatgttt

SEQ ID NO: 836244 - DNA, 25 bp, Homo sapien
gcataaaacagctgtttaagacatg

SEQ ID NO: 836245 - DNA, 25 bp, Homo sapien
acagctgtttaagacatgttgaagc

SEQ ID NO: 836246 - DNA, 25 bp, Homo sapien
gttgaagcaggatcagtgaaatgtt

SEQ ID NO: 836247 - DNA, 25 bp, Homo sapien
gagtttgccataacatccccttgga

SEQ ID NO: 836248 - DNA, 25 bp, Homo sapien
gactggacccattctgaagagtttg

SEQ ID NO: 836249 - DNA, 25 bp, Homo sapien
gaaatggttcctagcacactaatga

SEQ ID NO: 836250 - DNA, 25 bp, Homo sapien
gataaactttccaatgacctgtggg

SEQ ID NO: 836251 - DNA, 25 bp, Homo sapien
gcagagaccacaggaacactcatga

SEQ ID NO: 836252 - DNA, 25 bp, Homo sapien
tggctttctaatgtcagactccaga

SEQ ID NO: 836253 - DNA, 25 bp, Homo sapien
caggaaatcagggttggttgtttga

SEQ ID NO: 836254 - DNA, 25 bp, Homo sapien
cttcgcagtcgtgcctagtaaacag

SEQ ID NO: 836255 - DNA, 25 bp, Homo sapien
gaggccagagctacacatgttgatg

SEQ ID NO: 836256 - DNA, 25 bp, Homo sapien
tgtacacactgcgtgcaagactctg

SEQ ID NO: 836257 - DNA, 25 bp, Homo sapien
tagattatacagacatgagcgaggg

SEQ ID NO: 836258 - DNA, 25 bp, Homo sapien
tagacgtctgggtaagctgtgatgc

SEQ ID NO: 836259 - DNA, 25 bp, Homo sapien
ggcattctcacacaatgatggtgga

SEQ ID NO: 836260 - DNA, 25 bp, Homo sapien
aaatatggttaaactggcattctca

SEQ ID NO: 836261 - DNA, 25 bp, Homo sapien
cactgtaggtaaaaacacttgatga

SEQ ID NO: 836262 - DNA, 25 bp, Homo sapien
tcaatgagcatggaaaatatctacc

SEQ ID NO: 836263 - DNA, 25 bp, Homo sapien
tagctctcactagcagataatccaa

SEQ ID NO: 836264 - DNA, 25 bp, Homo sapien
aagcatgagtccaggcacccagatg

SEQ ID NO: 836265 - DNA, 25 bp, Homo sapien
gacaaaataggactataccatgaga

SEQ ID NO: 836266 - DNA, 25 bp, Homo sapien
gacaagccattgagatagctgttta

SEQ ID NO: 836267 - DNA, 25 bp, Homo sapien
gggcctggccctttacgtgcattaa

SEQ ID NO: 836268 - DNA, 25 bp, Homo sapien
tactggttctgagcatggaccttga

SEQ ID NO: 836269 - DNA, 25 bp, Homo sapien
caggcctagtaagggtcagtaactt

SEQ ID NO: 836270 - DNA, 25 bp, Homo sapien
tcccatttgacgtagtgaagacagt

SEQ ID NO: 836271 - DNA, 25 bp, Homo sapien
agcagttgctatcatggccttgagg

SEQ ID NO: 836272 - DNA, 25 bp, Homo sapien
gccttgaggactgccgcatggaact

SEQ ID NO: 836273 - DNA, 25 bp, Homo sapien
ggactgccgcatggaacttacatgt

SEQ ID NO: 836274 - DNA, 25 bp, Homo sapien
agatgcatagtttggcagccccttc

SEQ ID NO: 836275 - DNA, 25 bp, Homo sapien
tactaataagggagaatgggatggc

SEQ ID NO: 836276 - DNA, 25 bp, Homo sapien
gctttgctgcactaggtcctctgga

SEQ ID NO: 836277 - DNA, 25 bp, Homo sapien
gatttagattccaggtcagcatgta

SEQ ID NO: 836278 - DNA, 25 bp, Homo sapien
gcttaaaggcgatacaaattcctag

SEQ ID NO: 836279 - DNA, 25 bp, Homo sapien
gaaaatgctacataggctccctgag

SEQ ID NO: 836280 - DNA, 25 bp, Homo sapien
taatgacacttccaccacaatgagc

SEQ ID NO: 836281 - DNA, 25 bp, Homo sapien
tggttacacatcttaggacagcaga

SEQ ID NO: 836282 - DNA, 25 bp, Homo sapien
catatggatctttggttggaaaccc

SEQ ID NO: 836283 - DNA, 25 bp, Homo sapien
cagctcttatgaggctcgccatcat

SEQ ID NO: 836284 - DNA, 25 bp, Homo sapien
tatattcagtcccagctcttatgag

SEQ ID NO: 836285 - DNA, 25 bp, Homo sapien
tcagtcccagctcttatgaggctcg

SEQ ID NO: 836286 - DNA, 25 bp, Homo sapien
gtcccagctcttatgaggctcgcca

SEQ ID NO: 836287 - DNA, 25 bp, Homo sapien
agtccatggtatgggaaaaattgcc

SEQ ID NO: 836288 - DNA, 25 bp, Homo sapien
tccatggtatgggaaaaattgccga

SEQ ID NO: 836289 - DNA, 25 bp, Homo sapien
ttgagtccatggtatgggaaaaatt

SEQ ID NO: 836290 - DNA, 25 bp, Homo sapien
catggtatgggaaaaattgccgacg

SEQ ID NO: 836291 - DNA, 25 bp, Homo sapien
gcattagtctgggatgataaggagt

SEQ ID NO: 836292 - DNA, 25 bp, Homo sapien
ccaagggtctgaagactcgggtttg

SEQ ID NO: 836293 - DNA, 25 bp, Homo sapien
attattgggaattgaaaaggtggca

SEQ ID NO: 836294 - DNA, 25 bp, Homo sapien
gcaatgatgcttgttacggaaggaa

SEQ ID NO: 836295 - DNA, 25 bp, Homo sapien
tgctcatgaacagcagctggtcgcg

SEQ ID NO: 836296 - DNA, 25 bp, Homo sapien
caatcacgaggactatgatgctcat

SEQ ID NO: 836297 - DNA, 25 bp, Homo sapien
gatgaccacaatcacgaggactatg

SEQ ID NO: 836298 - DNA, 25 bp, Homo sapien
ctggtcgcgccaccgagaccttggg

SEQ ID NO: 836299 - DNA, 25 bp, Homo sapien
tagaagccgattctcaggttgggca

SEQ ID NO: 836300 - DNA, 25 bp, Homo sapien
caggtcagtgaggttgccagcctcc

SEQ ID NO: 836301 - DNA, 25 bp, Homo sapien
tggtgtcctcattccacaggcagaa

SEQ ID NO: 836302 - DNA, 25 bp, Homo sapien
tcatcactgttgcactgggctagga

SEQ ID NO: 836303 - DNA, 25 bp, Homo sapien
gctataagcaagaggatgagtaagg

SEQ ID NO: 836304 - DNA, 25 bp, Homo sapien
gaggatgagtaaggcctgggcgctg

SEQ ID NO: 836305 - DNA, 25 bp, Homo sapien
acagccatggctataagcaagagga

SEQ ID NO: 836306 - DNA, 25 bp, Homo sapien
tagcagctctcaagcttgctctcag

SEQ ID NO: 836307 - DNA, 25 bp, Homo sapien
ggtctccgggcagctagctataaag

SEQ ID NO: 836308 - DNA, 25 bp, Homo sapien
aaatgatgtcatgtggtggtccaac

SEQ ID NO: 836309 - DNA, 25 bp, Homo sapien
tagtccgcatgatctctcctgaagg

SEQ ID NO: 836310 - DNA, 25 bp, Homo sapien
tccagtgatggcttatggcggccca

SEQ ID NO: 836311 - DNA, 25 bp, Homo sapien
gatgtgctgaaatacgtccgggaga

SEQ ID NO: 836312 - DNA, 25 bp, Homo sapien
gatatgggtacattgcctggcctgg

SEQ ID NO: 836313 - DNA, 25 bp, Homo sapien
tatgttgagcctgcgttttcccgta

SEQ ID NO: 836314 - DNA, 25 bp, Homo sapien
gtgtcgcctcacacaagttctggga

SEQ ID NO: 836315 - DNA, 25 bp, Homo sapien
cttctctcccgagtgggttctggtt

SEQ ID NO: 836316 - DNA, 25 bp, Homo sapien
gcttctctcccgagtgggttctggt

SEQ ID NO: 836317 - DNA, 25 bp, Homo sapien
gactccctgcgacaaggactgtgta

SEQ ID NO: 836318 - DNA, 25 bp, Homo sapien
tgtgtccgtgtcagaaagctcctca

SEQ ID NO: 836319 - DNA, 25 bp, Homo sapien
tgtgtgtttcagaggcggccatcct

SEQ ID NO: 836320 - DNA, 25 bp, Homo sapien
tacctcctgcgtggtaggaaggcag

SEQ ID NO: 836321 - DNA, 25 bp, Homo sapien
cttacaatccgagactaaaacgagg

SEQ ID NO: 836322 - DNA, 25 bp, Homo sapien
agactcctgcgaatctggcaagtgg

SEQ ID NO: 836323 - DNA, 25 bp, Homo sapien
caaacatggtaacatcagatgggca

SEQ ID NO: 836324 - DNA, 25 bp, Homo sapien
tgacagcccaggtggctacaaagaa

SEQ ID NO: 836325 - DNA, 25 bp, Homo sapien
cgagagaacgagatttaccttcctg

SEQ ID NO: 836326 - DNA, 25 bp, Homo sapien
caggtcattaagcttgggccctgac

SEQ ID NO: 836327 - DNA, 25 bp, Homo sapien
taattccgggtgtgacgagagaacg

SEQ ID NO: 836328 - DNA, 25 bp, Homo sapien
tcaaagatcaactcccactgaggac

SEQ ID NO: 836329 - DNA, 25 bp, Homo sapien
agtaactgtgcctgatgactggagg

SEQ ID NO: 836330 - DNA, 25 bp, Homo sapien
gagtagagaaatcgagttggccaga

SEQ ID NO: 836331 - DNA, 25 bp, Homo sapien
tgtgaatggccgtctgagtctcttg

SEQ ID NO: 836332 - DNA, 25 bp, Homo sapien
agggagaggccattaagaggtattt

SEQ ID NO: 836333 - DNA, 25 bp, Homo sapien
gactggcacagttaatgcctccggg

SEQ ID NO: 836334 - DNA, 25 bp, Homo sapien
taaatttgtccgcacagactgcagc

SEQ ID NO: 836335 - DNA, 25 bp, Homo sapien
ttttgggcaaacctccgcttcagga

SEQ ID NO: 836336 - DNA, 25 bp, Homo sapien
ccaaactagatcagaggctggcgtg

SEQ ID NO: 836337 - DNA, 25 bp, Homo sapien
tcccacaggtcggcgccgccagcgg

SEQ ID NO: 836338 - DNA, 25 bp, Homo sapien
ggcctcccacaggtcggcgccgcca

SEQ ID NO: 836339 - DNA, 25 bp, Homo sapien
gcctcccacaggtcggcgccgccag

SEQ ID NO: 836340 - DNA, 25 bp, Homo sapien
gggcctcccacaggtcggcgccgcc

SEQ ID NO: 836341 - DNA, 25 bp, Homo sapien
cgttgcagccctgcccggcgtgtgg

SEQ ID NO: 836342 - DNA, 25 bp, Homo sapien
gtcagcgaggcccctgcggtgcttc

SEQ ID NO: 836343 - DNA, 25 bp, Homo sapien
cctgcggtgcttcgcccgcgccttc

SEQ ID NO: 836344 - DNA, 25 bp, Homo sapien
gagccgttgcagccctgcccggcgt

SEQ ID NO: 836345 - DNA, 25 bp, Homo sapien
caagaccggaagtgtcccgaggccg

SEQ ID NO: 836346 - DNA, 25 bp, Homo sapien
ctcctcaagccggtggcgctgcctc

SEQ ID NO: 836347 - DNA, 25 bp, Homo sapien
gcccgcggacctccgactgaggcag

SEQ ID NO: 836348 - DNA, 25 bp, Homo sapien
cggcggcattagcactgccagcatg

SEQ ID NO: 836349 - DNA, 25 bp, Homo sapien
cagcgcgcagccaaccggatgccag

SEQ ID NO: 836350 - DNA, 25 bp, Homo sapien
caggggccaagaattgaactttcac

SEQ ID NO: 836351 - DNA, 25 bp, Homo sapien
tcaggggccaagaattgaactttca

SEQ ID NO: 836352 - DNA, 25 bp, Homo sapien
tcctcaagcacacgaggggggcctg

SEQ ID NO: 836353 - DNA, 25 bp, Homo sapien
ctggtttctgagggaattcccggcg

SEQ ID NO: 836354 - DNA, 25 bp, Homo sapien
ccagcagggagcttcgcctggtttc

SEQ ID NO: 836355 - DNA, 25 bp, Homo sapien
agcagggagcttcgcctggtttctg

SEQ ID NO: 836356 - DNA, 25 bp, Homo sapien
gagggctgaaattctttctagcctt

SEQ ID NO: 836357 - DNA, 25 bp, Homo sapien
ctttcggagggctgaaattctttct

SEQ ID NO: 836358 - DNA, 25 bp, Homo sapien
cctcgctttaactttcggagggctg

SEQ ID NO: 836359 - DNA, 25 bp, Homo sapien
cattccattctagctattgttattt

SEQ ID NO: 836360 - DNA, 25 bp, Homo sapien
tcagccagtgttaatccttctcggg

SEQ ID NO: 836361 - DNA, 25 bp, Homo sapien
agtgttaatccttctcgggagcctg

SEQ ID NO: 836362 - DNA, 25 bp, Homo sapien
aacaagagtgcccatgcaggcatgc

SEQ ID NO: 836363 - DNA, 25 bp, Homo sapien
caaagactagtcttgacaagcttca

SEQ ID NO: 836364 - DNA, 25 bp, Homo sapien
aactcttagaattggtacagatggc

SEQ ID NO: 836365 - DNA, 25 bp, Homo sapien
ttttctcacgactttcccagacaat

SEQ ID NO: 836366 - DNA, 25 bp, Homo sapien
ctttcccagacaattttttaacatg

SEQ ID NO: 836367 - DNA, 25 bp, Homo sapien
tttaaatagtactcaggaggcctca

SEQ ID NO: 836368 - DNA, 25 bp, Homo sapien
cttatacatcttgcacatgaactgg

SEQ ID NO: 836369 - DNA, 25 bp, Homo sapien
catgtgcacaagcatgctaattgct

SEQ ID NO: 836370 - DNA, 25 bp, Homo sapien
tgcacaagcatgctaattgcttttg

SEQ ID NO: 836371 - DNA, 25 bp, Homo sapien
catctaattgttttgagagctaggc

SEQ ID NO: 836372 - DNA, 25 bp, Homo sapien
cccatctaattgttttgagagctag

SEQ ID NO: 836373 - DNA, 25 bp, Homo sapien
atctaattgttttgagagctaggcc

SEQ ID NO: 836374 - DNA, 25 bp, Homo sapien
aaccccatctaattgttttgagagc

SEQ ID NO: 836375 - DNA, 25 bp, Homo sapien
cggtttatgaccaatcctggaggac

SEQ ID NO: 836376 - DNA, 25 bp, Homo sapien
tacgcactggagttgtacctggaac

SEQ ID NO: 836377 - DNA, 25 bp, Homo sapien
tatgatcccatgttctaatagccga

SEQ ID NO: 836378 - DNA, 25 bp, Homo sapien
ggcaacaccgcatgtaaggtaacag

SEQ ID NO: 836379 - DNA, 25 bp, Homo sapien
tagacaagattacagtgtgggccca

SEQ ID NO: 836380 - DNA, 25 bp, Homo sapien
tgtgctccacagatccaatataggc

SEQ ID NO: 836381 - DNA, 25 bp, Homo sapien
ggaaaccggtcttgcaacttcggca

SEQ ID NO: 836382 - DNA, 25 bp, Homo sapien
cacagcagggtggttgactttctca

SEQ ID NO: 836383 - DNA, 25 bp, Homo sapien
tgtgataagcaggaacccacctatt

SEQ ID NO: 836384 - DNA, 25 bp, Homo sapien
gaagaaaacacgagcttacagagcc

SEQ ID NO: 836385 - DNA, 25 bp, Homo sapien
tacatcggctcagtggaattgcatc

SEQ ID NO: 836386 - DNA, 25 bp, Homo sapien
agtaattcccatgacagctcgccta

SEQ ID NO: 836387 - DNA, 25 bp, Homo sapien
gggctctggcgtcctgtgggctgtg

SEQ ID NO: 836388 - DNA, 25 bp, Homo sapien
ttgcgaaggcgtttccagtctgggc

SEQ ID NO: 836389 - DNA, 25 bp, Homo sapien
tttcaactaaaactcggcgctgacg

SEQ ID NO: 836390 - DNA, 25 bp, Homo sapien
gctgtgtgaagccaggagtgtggtt

SEQ ID NO: 836391 - DNA, 25 bp, Homo sapien
gctgcgtgggtgtcgctgctgtgga

SEQ ID NO: 836392 - DNA, 25 bp, Homo sapien
cgcacagggagggagcgtggtgtcc

SEQ ID NO: 836393 - DNA, 25 bp, Homo sapien
cagagatccagctgcgtgggtgtcg

SEQ ID NO: 836394 - DNA, 25 bp, Homo sapien
tggtgtccgagctcgctgcgcccgg

SEQ ID NO: 836395 - DNA, 25 bp, Homo sapien
gccttgctgtctggacactgtccca

SEQ ID NO: 836396 - DNA, 25 bp, Homo sapien
gaccccagtgtggcagttcggtttg

SEQ ID NO: 836397 - DNA, 25 bp, Homo sapien
ccccagtgtggcagttcggtttgtg

SEQ ID NO: 836398 - DNA, 25 bp, Homo sapien
accccagtgtggcagttcggtttgt

SEQ ID NO: 836399 - DNA, 25 bp, Homo sapien
cccagtgtggcagttcggtttgtga

SEQ ID NO: 836400 - DNA, 25 bp, Homo sapien
gccttgcaggtgcacttccccattt

SEQ ID NO: 836401 - DNA, 25 bp, Homo sapien
gggagggctgcaccgagagccttgc

SEQ ID NO: 836402 - DNA, 25 bp, Homo sapien
tgctccatggcctcaggccttggct

SEQ ID NO: 836403 - DNA, 25 bp, Homo sapien
tctcttcagatacctgccggtattt

SEQ ID NO: 836404 - DNA, 25 bp, Homo sapien
aaaagcacgaagaaattggtatcaa

SEQ ID NO: 836405 - DNA, 25 bp, Homo sapien
gcttgaggaaaagcacgaagaaatt

SEQ ID NO: 836406 - DNA, 25 bp, Homo sapien
ttgaggaaaagcacgaagaaattgg

SEQ ID NO: 836407 - DNA, 25 bp, Homo sapien
agcacgaagaaattggtatcaaagt

SEQ ID NO: 836408 - DNA, 25 bp, Homo sapien
tgctggcgaatggtgagaaggtaga

SEQ ID NO: 836409 - DNA, 25 bp, Homo sapien
cacccactgctggcgaatggtgaga

SEQ ID NO: 836410 - DNA, 25 bp, Homo sapien
ccactgctggcgaatggtgagaagg

SEQ ID NO: 836411 - DNA, 25 bp, Homo sapien
acatctttgtggaaagatgatggct

SEQ ID NO: 836412 - DNA, 25 bp, Homo sapien
gctgtttcccaagacgggctaagcg

SEQ ID NO: 836413 - DNA, 25 bp, Homo sapien
aagctggcagcttttgttacagaag

SEQ ID NO: 836414 - DNA, 25 bp, Homo sapien
ttctgctgggtaacaaggtttggca

SEQ ID NO: 836415 - DNA, 25 bp, Homo sapien
tctctgggcttaagtcaaggccaca

SEQ ID NO: 836416 - DNA, 25 bp, Homo sapien
ttgaaacaggacacgacacaactgc

SEQ ID NO: 836417 - DNA, 25 bp, Homo sapien
taaataccctgcaggttagtcatgg

SEQ ID NO: 836418 - DNA, 25 bp, Homo sapien
tgtgtataacaccaagcgtaggccc

SEQ ID NO: 836419 - DNA, 25 bp, Homo sapien
cacttggcccaaaacaagagagggt

SEQ ID NO: 836420 - DNA, 25 bp, Homo sapien
cacggcatacatgtagcagcacaaa

SEQ ID NO: 836421 - DNA, 25 bp, Homo sapien
acaaaatgtggaagcggcacctcct

SEQ ID NO: 836422 - DNA, 25 bp, Homo sapien
ttccaaggcagaatccccctgtgac

SEQ ID NO: 836423 - DNA, 25 bp, Homo sapien
cctgtgacccatgtagagcacggca

SEQ ID NO: 836424 - DNA, 25 bp, Homo sapien
aggaaggggcccataaagtgcctgt

SEQ ID NO: 836425 - DNA, 25 bp, Homo sapien
gggcccataaagtgcctgtctccct

SEQ ID NO: 836426 - DNA, 25 bp, Homo sapien
tgtctccctctgtaacagttcccac

SEQ ID NO: 836427 - DNA, 25 bp, Homo sapien
gaaggggcccataaagtgcctgtct

SEQ ID NO: 836428 - DNA, 25 bp, Homo sapien
gcttaggtccatcactgtcttggcg

SEQ ID NO: 836429 - DNA, 25 bp, Homo sapien
tgtcttggcgtaaactgccctatca

SEQ ID NO: 836430 - DNA, 25 bp, Homo sapien
taagccagaggaattcgaagcctcc

SEQ ID NO: 836431 - DNA, 25 bp, Homo sapien
tctgtaccagatgccttccttgcta

SEQ ID NO: 836432 - DNA, 25 bp, Homo sapien
cagttgccagtaagcattcacttgt

SEQ ID NO: 836433 - DNA, 25 bp, Homo sapien
catagcattgtgactttaccccttt

SEQ ID NO: 836434 - DNA, 25 bp, Homo sapien
aaattggccttcacctacttattga

SEQ ID NO: 836435 - DNA, 25 bp, Homo sapien
ttttgtggacaaccgcattcaccag

SEQ ID NO: 836436 - DNA, 25 bp, Homo sapien
tctaattacaatagccgggagggca

SEQ ID NO: 836437 - DNA, 25 bp, Homo sapien
ttcacacccacttggtgagccatgg

SEQ ID NO: 836438 - DNA, 25 bp, Homo sapien
taatcggctgtaatgtaaggcacca

SEQ ID NO: 836439 - DNA, 25 bp, Homo sapien
ggagggcacatccatagcaggcttg

SEQ ID NO: 836440 - DNA, 25 bp, Homo sapien
gaagcttgaaggtcgtctggcctac

SEQ ID NO: 836441 - DNA, 25 bp, Homo sapien
agatcttagcttagccctctggagc

SEQ ID NO: 836442 - DNA, 25 bp, Homo sapien
gcagagctcattgcttgtcaaagcg

SEQ ID NO: 836443 - DNA, 25 bp, Homo sapien
tacagtgtctggattgattgcctcc

SEQ ID NO: 836444 - DNA, 25 bp, Homo sapien
cagagctttatgagtaaggtcccca

SEQ ID NO: 836445 - DNA, 25 bp, Homo sapien
cattcctcagtagaagcatgcacct

SEQ ID NO: 836446 - DNA, 25 bp, Homo sapien
gcatgcacctctctgacggtttaaa

SEQ ID NO: 836447 - DNA, 25 bp, Homo sapien
gaagtcctctaggagttctgagcct

SEQ ID NO: 836448 - DNA, 25 bp, Homo sapien
tggggctagacattggcttccaagg

SEQ ID NO: 836449 - DNA, 25 bp, Homo sapien
cagtaaactcctttatggggagcat

SEQ ID NO: 836450 - DNA, 25 bp, Homo sapien
atggggctagacattggcttccaag

SEQ ID NO: 836451 - DNA, 25 bp, Homo sapien
cagcagagatcctgccgggaaatat

SEQ ID NO: 836452 - DNA, 25 bp, Homo sapien
tattcctccagcaacatagattctg

SEQ ID NO: 836453 - DNA, 25 bp, Homo sapien
gtcttgaaatactccaccccagcag

SEQ ID NO: 836454 - DNA, 25 bp, Homo sapien
gttggagaacatgccctccttgcag

SEQ ID NO: 836455 - DNA, 25 bp, Homo sapien
agaaggctctgccatgaacactggg

SEQ ID NO: 836456 - DNA, 25 bp, Homo sapien
aggctctgccatgaacactgggggc

SEQ ID NO: 836457 - DNA, 25 bp, Homo sapien
cagaaggctctgccatgaacactgg

SEQ ID NO: 836458 - DNA, 25 bp, Homo sapien
ctctgccatgaacactgggggcctc

SEQ ID NO: 836459 - DNA, 25 bp, Homo sapien
tgaaaaagaggatcttgtccacatc

SEQ ID NO: 836460 - DNA, 25 bp, Homo sapien
gaaaaagaggatcttgtccacatca

SEQ ID NO: 836461 - DNA, 25 bp, Homo sapien
gattgaaaaagaggatcttgtccac

SEQ ID NO: 836462 - DNA, 25 bp, Homo sapien
ttgaaaaagaggatcttgtccacat

SEQ ID NO: 836463 - DNA, 25 bp, Homo sapien
gactgagaggactatcaacgagccg

SEQ ID NO: 836464 - DNA, 25 bp, Homo sapien
tcacaggcttagcaggcgtagcagg

SEQ ID NO: 836465 - DNA, 25 bp, Homo sapien
aatccacctcgcagggactgagagg

SEQ ID NO: 836466 - DNA, 25 bp, Homo sapien
tagcaggggattctggattagaatc

SEQ ID NO: 836467 - DNA, 25 bp, Homo sapien
tgccaccagcttacagggttgtcct

SEQ ID NO: 836468 - DNA, 25 bp, Homo sapien
gggcaatgccaccagcttacagggt

SEQ ID NO: 836469 - DNA, 25 bp, Homo sapien
aatgccaccagcttacagggttgtc

SEQ ID NO: 836470 - DNA, 25 bp, Homo sapien
gcaatgccaccagcttacagggttg

SEQ ID NO: 836471 - DNA, 25 bp, Homo sapien
aagaaacagtgttacaagttgtccg

SEQ ID NO: 836472 - DNA, 25 bp, Homo sapien
agaaaacagacctggcacctcgtta

SEQ ID NO: 836473 - DNA, 25 bp, Homo sapien
agtcacccggcttcgtgcgccggag

SEQ ID NO: 836474 - DNA, 25 bp, Homo sapien
ttgtccgaaggcgacagaaaaggga

SEQ ID NO: 836475 - DNA, 25 bp, Homo sapien
aacacattgcagatactcaccagac

SEQ ID NO: 836476 - DNA, 25 bp, Homo sapien
aattttacgcgtggccaaggagagc

SEQ ID NO: 836477 - DNA, 25 bp, Homo sapien
cctgagatctcaggctttactttag

SEQ ID NO: 836478 - DNA, 25 bp, Homo sapien
attgcagatactcaccagacacttg

SEQ ID NO: 836479 - DNA, 25 bp, Homo sapien
tcatggggattgctgttttcttcag

SEQ ID NO: 836480 - DNA, 25 bp, Homo sapien
gtcatggggattgctgttttcttca

SEQ ID NO: 836481 - DNA, 25 bp, Homo sapien
gccagggtggctcggtggcgggcct

SEQ ID NO: 836482 - DNA, 25 bp, Homo sapien
ggttgttgaagagcgctgccagggt

SEQ ID NO: 836483 - DNA, 25 bp, Homo sapien
tcagactgagagtacactgtcttcc

SEQ ID NO: 836484 - DNA, 25 bp, Homo sapien
gtctccgggccacccgatgctcaag

SEQ ID NO: 836485 - DNA, 25 bp, Homo sapien
gaatatgactctttgccttattcag

SEQ ID NO: 836486 - DNA, 25 bp, Homo sapien
gcaaattatccagggtttgctccag

SEQ ID NO: 836487 - DNA, 25 bp, Homo sapien
ttatccagggtttgctccagttctg

SEQ ID NO: 836488 - DNA, 25 bp, Homo sapien
agttctggaatatgactctttgcct

SEQ ID NO: 836489 - DNA, 25 bp, Homo sapien
tctaagctgcttgcatgcccatctt

SEQ ID NO: 836490 - DNA, 25 bp, Homo sapien
ttcttgacctcctctaagctgcttg

SEQ ID NO: 836491 - DNA, 25 bp, Homo sapien
tgacctcctctaagctgcttgcatg

SEQ ID NO: 836492 - DNA, 25 bp, Homo sapien
tcctctaagctgcttgcatgcccat

SEQ ID NO: 836493 - DNA, 25 bp, Homo sapien
caaggggaggaaccattctgaggaa

SEQ ID NO: 836494 - DNA, 25 bp, Homo sapien
tgaggtcaggcgacaaagttcctgg

SEQ ID NO: 836495 - DNA, 25 bp, Homo sapien
gggagtataagatcacttttttctc

SEQ ID NO: 836496 - DNA, 25 bp, Homo sapien
aagttcctggggagtataagatcac

SEQ ID NO: 836497 - DNA, 25 bp, Homo sapien
ttccatgaggtcaggcgacaaagtt

SEQ ID NO: 836498 - DNA, 25 bp, Homo sapien
gagagagcctcctgctattgagcca

SEQ ID NO: 836499 - DNA, 25 bp, Homo sapien
aactcctctggaagccaacatggct

SEQ ID NO: 836500 - DNA, 25 bp, Homo sapien
tgcagcccgaaagtcaggctcggct

SEQ ID NO: 836501 - DNA, 25 bp, Homo sapien
tctgagccagccattcgccatcttt

SEQ ID NO: 836502 - DNA, 25 bp, Homo sapien
taatgatcccgctgccagtcagaag

SEQ ID NO: 836503 - DNA, 25 bp, Homo sapien
ctccgagaggttctgccacaggtgg

SEQ ID NO: 836504 - DNA, 25 bp, Homo sapien
agatggccgcggagacgatgggcag

SEQ ID NO: 836505 - DNA, 25 bp, Homo sapien
agaaggtccatcgtctgtttgtaaa

SEQ ID NO: 836506 - DNA, 25 bp, Homo sapien
ggtggttcccgtgccccatccacgc

SEQ ID NO: 836507 - DNA, 25 bp, Homo sapien
caacctgctaaatgcaaagccctgg

SEQ ID NO: 836508 - DNA, 25 bp, Homo sapien
agccagaaggcaaactgcacctcca

SEQ ID NO: 836509 - DNA, 25 bp, Homo sapien
gggagccagaaggcaaactgcacct

SEQ ID NO: 836510 - DNA, 25 bp, Homo sapien
agagctttcgtaggaaatctttgtc

SEQ ID NO: 836511 - DNA, 25 bp, Homo sapien
gcaggctggcaatttggccagttcc

SEQ ID NO: 836512 - DNA, 25 bp, Homo sapien
tgattccctctatggccagtcattg

SEQ ID NO: 836513 - DNA, 25 bp, Homo sapien
aactcttaagaaagagctttcgtag

SEQ ID NO: 836514 - DNA, 25 bp, Homo sapien
cagagcgatcccagtgctctttggg

SEQ ID NO: 836515 - DNA, 25 bp, Homo sapien
agttgtggtaacctccccttcacag

SEQ ID NO: 836516 - DNA, 25 bp, Homo sapien
ctgagaaatgcatttacggtagcag

SEQ ID NO: 836517 - DNA, 25 bp, Homo sapien
catttacggtagcagttgtggtaac

SEQ ID NO: 836518 - DNA, 25 bp, Homo sapien
cacggccattctgactagcgttctg

SEQ ID NO: 836519 - DNA, 25 bp, Homo sapien
gactatggccacggccattctgact

SEQ ID NO: 836520 - DNA, 25 bp, Homo sapien
tggccacggccattctgactagcgt

SEQ ID NO: 836521 - DNA, 25 bp, Homo sapien
gccattctgactagcgttctgaaag

SEQ ID NO: 836522 - DNA, 25 bp, Homo sapien
ttatctccgtgcagggcgacctcaa

SEQ ID NO: 836523 - DNA, 25 bp, Homo sapien
acttttatctccgtgcagggcgacc

SEQ ID NO: 836524 - DNA, 25 bp, Homo sapien
cgtgcagggcgacctcaaatgctac

SEQ ID NO: 836525 - DNA, 25 bp, Homo sapien
tccgtgcagggcgacctcaaatgct

SEQ ID NO: 836526 - DNA, 25 bp, Homo sapien
tgcagtggtgtcactgctcagcagg

SEQ ID NO: 836527 - DNA, 25 bp, Homo sapien
tctgaactgaaatggagcattccag

SEQ ID NO: 836528 - DNA, 25 bp, Homo sapien
tgctcagcaggagtaactgtggctt

SEQ ID NO: 836529 - DNA, 25 bp, Homo sapien
gctgctggcctctaacacaacagtt

SEQ ID NO: 836530 - DNA, 25 bp, Homo sapien
ctcttagttttccggacattttctg

SEQ ID NO: 836531 - DNA, 25 bp, Homo sapien
gttgtccttctacttgatatctctg

SEQ ID NO: 836532 - DNA, 25 bp, Homo sapien
caagaggattggtgtctgccctttc

SEQ ID NO: 836533 - DNA, 25 bp, Homo sapien
ctggaactgaatcccttgggactct

SEQ ID NO: 836534 - DNA, 25 bp, Homo sapien
tctttacacataccccagagggcat

SEQ ID NO: 836535 - DNA, 25 bp, Homo sapien
ccagagggcatgcatgtcagagctg

SEQ ID NO: 836536 - DNA, 25 bp, Homo sapien
gatgagtggaaaggctctctcttta

SEQ ID NO: 836537 - DNA, 25 bp, Homo sapien
tgacaatttcatgcttgccctgggc

SEQ ID NO: 836538 - DNA, 25 bp, Homo sapien
catcaaaggcatcctcaaaaaggat

SEQ ID NO: 836539 - DNA, 25 bp, Homo sapien
ttgtccaggaagcttgccacatcaa

SEQ ID NO: 836540 - DNA, 25 bp, Homo sapien
gcttgccacatcaaaggcatcctca

SEQ ID NO: 836541 - DNA, 25 bp, Homo sapien
ggaagcttgccacatcaaaggcatc

SEQ ID NO: 836542 - DNA, 25 bp, Homo sapien
ggagctagatgtactcggaacctca

SEQ ID NO: 836543 - DNA, 25 bp, Homo sapien
gagctagatgtactcggaacctcac

SEQ ID NO: 836544 - DNA, 25 bp, Homo sapien
ctgtaaggtcgatttggagaggaca

SEQ ID NO: 836545 - DNA, 25 bp, Homo sapien
agctgagaagcacttgagtcactct

SEQ ID NO: 836546 - DNA, 25 bp, Homo sapien
cacttctccccaagtccatctaggc

SEQ ID NO: 836547 - DNA, 25 bp, Homo sapien
acaaagccctcctctgacaatccca

SEQ ID NO: 836548 - DNA, 25 bp, Homo sapien
taaaaaagttgatgatctgcatata

SEQ ID NO: 836549 - DNA, 25 bp, Homo sapien
ctgctttacttgagtgtttgcacag

SEQ ID NO: 836550 - DNA, 25 bp, Homo sapien
tgtttgcacagctaaggcctttaaa

SEQ ID NO: 836551 - DNA, 25 bp, Homo sapien
aaagttgatgatctgcatatagagc

SEQ ID NO: 836552 - DNA, 25 bp, Homo sapien
tctaatgaatgtgggacctggtccc

SEQ ID NO: 836553 - DNA, 25 bp, Homo sapien
gacgacctccacaaactgagccttt

SEQ ID NO: 836554 - DNA, 25 bp, Homo sapien
acaaactgagcctttcctgccctgg

SEQ ID NO: 836555 - DNA, 25 bp, Homo sapien
cccagtcaaccatctaatgaatgtg

SEQ ID NO: 836556 - DNA, 25 bp, Homo sapien
catctcttcatcaacgggaaaggat

SEQ ID NO: 836557 - DNA, 25 bp, Homo sapien
ttcatcgtcaaaggtctctgtgcac

SEQ ID NO: 836558 - DNA, 25 bp, Homo sapien
cttcatcaacgggaaaggatgcttc

SEQ ID NO: 836559 - DNA, 25 bp, Homo sapien
tctgtgcactgcaacatgatcatct

SEQ ID NO: 836560 - DNA, 25 bp, Homo sapien
caggtgcaaccttagctgccagcat

SEQ ID NO: 836561 - DNA, 25 bp, Homo sapien
gaacaacccactccaaagagtcctg

SEQ ID NO: 836562 - DNA, 25 bp, Homo sapien
catcaaaatgcttctggaacaaccc

SEQ ID NO: 836563 - DNA, 25 bp, Homo sapien
ccagcattcaaccttgggaactgcc

SEQ ID NO: 836564 - DNA, 25 bp, Homo sapien
ataagtatattgtaactgggtcctc

SEQ ID NO: 836565 - DNA, 25 bp, Homo sapien
agtatattgtaactgggtcctctcc

SEQ ID NO: 836566 - DNA, 25 bp, Homo sapien
cttaataagtatattgtaactgggt

SEQ ID NO: 836567 - DNA, 25 bp, Homo sapien
taataagtatattgtaactgggtcc

SEQ ID NO: 836568 - DNA, 25 bp, Homo sapien
cgtgtgggagctccgctgtgggcct

SEQ ID NO: 836569 - DNA, 25 bp, Homo sapien
tgcacgtgtgggagctccgctgtgg

SEQ ID NO: 836570 - DNA, 25 bp, Homo sapien
acgtgtgggagctccgctgtgggcc

SEQ ID NO: 836571 - DNA, 25 bp, Homo sapien
agattttaagctgtgtagctcttga

SEQ ID NO: 836572 - DNA, 25 bp, Homo sapien
tagctcttgatagtggggtaatcga

SEQ ID NO: 836573 - DNA, 25 bp, Homo sapien
tagtggggtaatcgattgctgggca

SEQ ID NO: 836574 - DNA, 25 bp, Homo sapien
ctgacaatccagattttaagctgtg

SEQ ID NO: 836575 - DNA, 25 bp, Homo sapien
tcctgcgataagaaggagcctgaag

SEQ ID NO: 836576 - DNA, 25 bp, Homo sapien
tgggaacatgccctgacgaaggaca

SEQ ID NO: 836577 - DNA, 25 bp, Homo sapien
agaggccaaagtgagaagcccagca

SEQ ID NO: 836578 - DNA, 25 bp, Homo sapien
actgctagatgttctcacagaggcc

SEQ ID NO: 836579 - DNA, 25 bp, Homo sapien
agatgccacggtccctctgtcccac

SEQ ID NO: 836580 - DNA, 25 bp, Homo sapien
gcagtcaagatgccacggtccctct

SEQ ID NO: 836581 - DNA, 25 bp, Homo sapien
aattctaatgtccaaagctggcagg

SEQ ID NO: 836582 - DNA, 25 bp, Homo sapien
aggctcgggaagccttgagagcctc

SEQ ID NO: 836583 - DNA, 25 bp, Homo sapien
tcatgccacatgatttcctgccacg

SEQ ID NO: 836584 - DNA, 25 bp, Homo sapien
ttcttgcattcaaggagatgagagt

SEQ ID NO: 836585 - DNA, 25 bp, Homo sapien
acatgatttcctgccacgcgtggac

SEQ ID NO: 836586 - DNA, 25 bp, Homo sapien
tgggactcccccatagttcttgcat

SEQ ID NO: 836587 - DNA, 25 bp, Homo sapien
caggggcccagcccaatacctcatc

SEQ ID NO: 836588 - DNA, 25 bp, Homo sapien
acaggggcccagcccaatacctcat

SEQ ID NO: 836589 - DNA, 25 bp, Homo sapien
aggggcccagcccaatacctcatct

SEQ ID NO: 836590 - DNA, 25 bp, Homo sapien
actgaataatcaggactgaaaaggc

SEQ ID NO: 836591 - DNA, 25 bp, Homo sapien
tttcaactgaataatcaggactgaa

SEQ ID NO: 836592 - DNA, 25 bp, Homo sapien
cctgtggggctagccttcttgtaag

SEQ ID NO: 836593 - DNA, 25 bp, Homo sapien
ctatttcaactgaataatcaggact

SEQ ID NO: 836594 - DNA, 25 bp, Homo sapien
gaatccatcggtcaatcactccatc

SEQ ID NO: 836595 - DNA, 25 bp, Homo sapien
gacttgcctgttcagaatccatcgg

SEQ ID NO: 836596 - DNA, 25 bp, Homo sapien
cacgtgcatcccgtgttccaagcag

SEQ ID NO: 836597 - DNA, 25 bp, Homo sapien
gctcggctttgaccactttaggaaa

SEQ ID NO: 836598 - DNA, 25 bp, Homo sapien
gagggggagacaggctgggagaggc

SEQ ID NO: 836599 - DNA, 25 bp, Homo sapien
tagagggggagacaggctgggagag

SEQ ID NO: 836600 - DNA, 25 bp, Homo sapien
ctagagggggagacaggctgggaga

SEQ ID NO: 836601 - DNA, 25 bp, Homo sapien
ggggagacaggctgggagaggcgac

SEQ ID NO: 836602 - DNA, 25 bp, Homo sapien
tcatgtggaccctcaggtaggatcc

SEQ ID NO: 836603 - DNA, 25 bp, Homo sapien
gaaggcaaggtgtctcccggttcta

SEQ ID NO: 836604 - DNA, 25 bp, Homo sapien
cactctcttcacacgggaaggacca

SEQ ID NO: 836605 - DNA, 25 bp, Homo sapien
agtggtttccacgaccttccgatgg

SEQ ID NO: 836606 - DNA, 25 bp, Homo sapien
tgccactagctctcgggagccaaaa

SEQ ID NO: 836607 - DNA, 25 bp, Homo sapien
cagcaacgacacaaaaacttgggaa

SEQ ID NO: 836608 - DNA, 25 bp, Homo sapien
gaactcacgtcactcagcggaggtg

SEQ ID NO: 836609 - DNA, 25 bp, Homo sapien
agttctgtagccctaatcaggccca

SEQ ID NO: 836610 - DNA, 25 bp, Homo sapien
tgagcactccacttactcggtaagg

SEQ ID NO: 836611 - DNA, 25 bp, Homo sapien
cctagcctcatgctttagatcaggg

SEQ ID NO: 836612 - DNA, 25 bp, Homo sapien
gtttgcgacaccctaatgcacaggg

SEQ ID NO: 836613 - DNA, 25 bp, Homo sapien
tcagatgatgagacccatgcagcac

SEQ ID NO: 836614 - DNA, 25 bp, Homo sapien
tgcacttcgtgaaccttgggagcca

SEQ ID NO: 836615 - DNA, 25 bp, Homo sapien
taacagcgaaactacaccttcctgg

SEQ ID NO: 836616 - DNA, 25 bp, Homo sapien
ccatgaggagctggtatttgcttgc

SEQ ID NO: 836617 - DNA, 25 bp, Homo sapien
cgggctttcaagtgttctgtgcaga

SEQ ID NO: 836618 - DNA, 25 bp, Homo sapien
ccacacttgttgaacctcaatcaga

SEQ ID NO: 836619 - DNA, 25 bp, Homo sapien
aatgacggtggaggatccacacttt

SEQ ID NO: 836620 - DNA, 25 bp, Homo sapien
gttgaacctcaatcagaacctctct

SEQ ID NO: 836621 - DNA, 25 bp, Homo sapien
cgtggggccctaagaatgacggtgg

SEQ ID NO: 836622 - DNA, 25 bp, Homo sapien
tttggatgtggtcagtaaggccaga

SEQ ID NO: 836623 - DNA, 25 bp, Homo sapien
tgcagcagttgggacagacgttgct

SEQ ID NO: 836624 - DNA, 25 bp, Homo sapien
ttggatgtggtcagtaaggccagag

SEQ ID NO: 836625 - DNA, 25 bp, Homo sapien
tgtgcagcagttgggacagacgttg

SEQ ID NO: 836626 - DNA, 25 bp, Homo sapien
cctgcttgtccagtaaaagaccttg

SEQ ID NO: 836627 - DNA, 25 bp, Homo sapien
ccctgcttgtccagtaaaagacctt

SEQ ID NO: 836628 - DNA, 25 bp, Homo sapien
agcttagggcagtagttacattttg

SEQ ID NO: 836629 - DNA, 25 bp, Homo sapien
gggaaacccaagcagagtatacagg

SEQ ID NO: 836630 - DNA, 25 bp, Homo sapien
ctgagccttggtgaaccagcatggg

SEQ ID NO: 836631 - DNA, 25 bp, Homo sapien
tgtccgacttatgggagcccgacct

SEQ ID NO: 836632 - DNA, 25 bp, Homo sapien
aggcacactactggacaccttcagg

SEQ ID NO: 836633 - DNA, 25 bp, Homo sapien
gagcaattgcgcctggctgcgtttg

SEQ ID NO: 836634 - DNA, 25 bp, Homo sapien
gtgacatgccaatcaaaagaagaag

SEQ ID NO: 836635 - DNA, 25 bp, Homo sapien
gatggatggatgagaaagcctcact

SEQ ID NO: 836636 - DNA, 25 bp, Homo sapien
tctacccagcaaagacatcagatgg

SEQ ID NO: 836637 - DNA, 25 bp, Homo sapien
gcacagttcccgacattcggttcga

SEQ ID NO: 836638 - DNA, 25 bp, Homo sapien
gagatcagtcatgaactttaaggca

SEQ ID NO: 836639 - DNA, 25 bp, Homo sapien
aaggcactggttttaatccagcgga

SEQ ID NO: 836640 - DNA, 25 bp, Homo sapien
tccagcggaggtactggaagccaat

SEQ ID NO: 836641 - DNA, 25 bp, Homo sapien
taccataaattcacctgacgagggc

SEQ ID NO: 836642 - DNA, 25 bp, Homo sapien
tgacgagggcactctgagatagcac

SEQ ID NO: 836643 - DNA, 25 bp, Homo sapien
tagtaactggccgattgctaaagag

SEQ ID NO: 836644 - DNA, 25 bp, Homo sapien
ggccatctgatcaccatcgggagca

SEQ ID NO: 836645 - DNA, 25 bp, Homo sapien
ggtgtcctgggatgtacatgcctaa

SEQ ID NO: 836646 - DNA, 25 bp, Homo sapien
cgttcggtattgaccaccagtggag

SEQ ID NO: 836647 - DNA, 25 bp, Homo sapien
gattgactacacagtacctctgaga

SEQ ID NO: 836648 - DNA, 25 bp, Homo sapien
tacacagggctagttcctggcagta

SEQ ID NO: 836649 - DNA, 25 bp, Homo sapien
ggtgacctctaggaaaaaattgctg

SEQ ID NO: 836650 - DNA, 25 bp, Homo sapien
tcaagtcctcgatataagacagtgt

SEQ ID NO: 836651 - DNA, 25 bp, Homo sapien
tagagactgacgaaaactgcatgct

SEQ ID NO: 836652 - DNA, 25 bp, Homo sapien
ctgcacatatatgggaggccgtata

SEQ ID NO: 836653 - DNA, 25 bp, Homo sapien
gaatgtggtcagtggtagagaacta

SEQ ID NO: 836654 - DNA, 25 bp, Homo sapien
gatagggcagtaaggagatccagct

SEQ ID NO: 836655 - DNA, 25 bp, Homo sapien
gatccagctgaggtattcagggact

SEQ ID NO: 836656 - DNA, 25 bp, Homo sapien
taggtactcccacggaggcattgcc

SEQ ID NO: 836657 - DNA, 25 bp, Homo sapien
ccgacagtggcaacaaagggtattg

SEQ ID NO: 836658 - DNA, 25 bp, Homo sapien
ctctcagtaactgctccgacagtgg

SEQ ID NO: 836659 - DNA, 25 bp, Homo sapien
catcctgggaattaagtacagcctt

SEQ ID NO: 836660 - DNA, 25 bp, Homo sapien
tgtctcttactcttagcatcctggg

SEQ ID NO: 836661 - DNA, 25 bp, Homo sapien
tgactagcttttcccttaacatagg

SEQ ID NO: 836662 - DNA, 25 bp, Homo sapien
gaaggatttggtgatccccttctcc

SEQ ID NO: 836663 - DNA, 25 bp, Homo sapien
gcccagatttttgagagtacacaca

SEQ ID NO: 836664 - DNA, 25 bp, Homo sapien
gggaatagagtcctgtactgaatga

SEQ ID NO: 836665 - DNA, 25 bp, Homo sapien
tctccaccacctgaggaactgggat

SEQ ID NO: 836666 - DNA, 25 bp, Homo sapien
tccaccacctgaggaactgggatta

SEQ ID NO: 836667 - DNA, 25 bp, Homo sapien
ctgtctccaccacctgaggaactgg

SEQ ID NO: 836668 - DNA, 25 bp, Homo sapien
tgtctccaccacctgaggaactggg

SEQ ID NO: 836669 - DNA, 25 bp, Homo sapien
gcccaacctagaatctactttcacg

SEQ ID NO: 836670 - DNA, 25 bp, Homo sapien
acctagaatctactttcacgtttct

SEQ ID NO: 836671 - DNA, 25 bp, Homo sapien
gcgcccaacctagaatctactttca

SEQ ID NO: 836672 - DNA, 25 bp, Homo sapien
actgcgcccaacctagaatctactt

SEQ ID NO: 836673 - DNA, 25 bp, Homo sapien
gctgctgtacccagctatatctaga

SEQ ID NO: 836674 - DNA, 25 bp, Homo sapien
ttagtatgtgacagggcaaattccc

SEQ ID NO: 836675 - DNA, 25 bp, Homo sapien
tattcaaatggatagcccagtgtcc

SEQ ID NO: 836676 - DNA, 25 bp, Homo sapien
ttgttatagacatgagggctttgct

SEQ ID NO: 836677 - DNA, 25 bp, Homo sapien
aaaaccttcttgctagtccagtgga

SEQ ID NO: 836678 - DNA, 25 bp, Homo sapien
gaaaaccttcttgctagtccagtgg

SEQ ID NO: 836679 - DNA, 25 bp, Homo sapien
aaaccttcttgctagtccagtggag

SEQ ID NO: 836680 - DNA, 25 bp, Homo sapien
ttacatcagttcttcaaagtatgaa

SEQ ID NO: 836681 - DNA, 25 bp, Homo sapien
gaggcaaagaggcttacatcagttc

SEQ ID NO: 836682 - DNA, 25 bp, Homo sapien
ggcttacatcagttcttcaaagtat

SEQ ID NO: 836683 - DNA, 25 bp, Homo sapien
acaagcagaggcaaagaggcttaca

SEQ ID NO: 836684 - DNA, 25 bp, Homo sapien
gaaggtttactatgtaatttagcat

SEQ ID NO: 836685 - DNA, 25 bp, Homo sapien
agcataactgttctgagtataccag

SEQ ID NO: 836686 - DNA, 25 bp, Homo sapien
tgcaaggtatgttctaaaagactac

SEQ ID NO: 836687 - DNA, 25 bp, Homo sapien
ctctgtttccatactgtctcccagt

SEQ ID NO: 836688 - DNA, 25 bp, Homo sapien
tgttttatagttttcgtatactcca

SEQ ID NO: 836689 - DNA, 25 bp, Homo sapien
tttcgtatactccataacatacttc

SEQ ID NO: 836690 - DNA, 25 bp, Homo sapien
ttatagttttcgtatactccataac

SEQ ID NO: 836691 - DNA, 25 bp, Homo sapien
tagttttcgtatactccataacata

SEQ ID NO: 836692 - DNA, 25 bp, Homo sapien
atttaatcccttggagtatgggatg

SEQ ID NO: 836693 - DNA, 25 bp, Homo sapien
agtatgggatgactttatgagtgtc

SEQ ID NO: 836694 - DNA, 25 bp, Homo sapien
tggagtatgggatgactttatgagt

SEQ ID NO: 836695 - DNA, 25 bp, Homo sapien
tatgggatgactttatgagtgtcat

SEQ ID NO: 836696 - DNA, 25 bp, Homo sapien
taccactctggagttagcctttgcc

SEQ ID NO: 836697 - DNA, 25 bp, Homo sapien
gcaatcagcccacagtgtatctgcc

SEQ ID NO: 836698 - DNA, 25 bp, Homo sapien
attgcccactcgtcctgctgcttgt

SEQ ID NO: 836699 - DNA, 25 bp, Homo sapien
ccactctgatccgtgttggctgctg

SEQ ID NO: 836700 - DNA, 25 bp, Homo sapien
gccgaggcggcttttggtctccagc

SEQ ID NO: 836701 - DNA, 25 bp, Homo sapien
gactctccttcgagaatttctttaa

SEQ ID NO: 836702 - DNA, 25 bp, Homo sapien
gcggcaagcagcgactctccttcga

SEQ ID NO: 836703 - DNA, 25 bp, Homo sapien
ggagcgggtcagaaggcagcgcggc

SEQ ID NO: 836704 - DNA, 25 bp, Homo sapien
cttcaccctcctcctccttggtctt

SEQ ID NO: 836705 - DNA, 25 bp, Homo sapien
ccaccccccgcctcatcttcaccct

SEQ ID NO: 836706 - DNA, 25 bp, Homo sapien
tcaccctcctcctccttggtcttct

SEQ ID NO: 836707 - DNA, 25 bp, Homo sapien
tctccccaccccccgcctcatcttc

SEQ ID NO: 836708 - DNA, 25 bp, Homo sapien
aggcttcgctgggactgtacaggcc

SEQ ID NO: 836709 - DNA, 25 bp, Homo sapien
cggctacgagagagcggaggcttcg

SEQ ID NO: 836710 - DNA, 25 bp, Homo sapien
gcggaggcttcgctgggactgtaca

SEQ ID NO: 836711 - DNA, 25 bp, Homo sapien
ggctacgagagagcggaggcttcgc

SEQ ID NO: 836712 - DNA, 25 bp, Homo sapien
ggtttcttgtgaggacgcggcagcc

SEQ ID NO: 836713 - DNA, 25 bp, Homo sapien
caatcaggcccggttctgaagagtt

SEQ ID NO: 836714 - DNA, 25 bp, Homo sapien
ccgacgctcgttcggtggtttcttg

SEQ ID NO: 836715 - DNA, 25 bp, Homo sapien
taaaggtcggactcgctgaagcaat

SEQ ID NO: 836716 - DNA, 25 bp, Homo sapien
cctaatgtaagatggtggcccgtct

SEQ ID NO: 836717 - DNA, 25 bp, Homo sapien
aacccaccgaaagctgagagtctct

SEQ ID NO: 836718 - DNA, 25 bp, Homo sapien
ctgtggaacccaccgaaagctgaga

SEQ ID NO: 836719 - DNA, 25 bp, Homo sapien
aatgtaagatggtggcccgtctggc

SEQ ID NO: 836720 - DNA, 25 bp, Homo sapien
cctttttgggaatcactgggcatct

SEQ ID NO: 836721 - DNA, 25 bp, Homo sapien
gaggtccctcatcagttctgggaaa

SEQ ID NO: 836722 - DNA, 25 bp, Homo sapien
tatgccgactatagtaagcactgct

SEQ ID NO: 836723 - DNA, 25 bp, Homo sapien
taagttagactcaatatatgccgac

SEQ ID NO: 836724 - DNA, 25 bp, Homo sapien
cttgaagggacatccgtgtagcaaa

SEQ ID NO: 836725 - DNA, 25 bp, Homo sapien
tgtgtttagggaacaactcctccca

SEQ ID NO: 836726 - DNA, 25 bp, Homo sapien
tgactgtcactgtccacctcttaca

SEQ ID NO: 836727 - DNA, 25 bp, Homo sapien
tagcaaaacttcatgactgtcactg

SEQ ID NO: 836728 - DNA, 25 bp, Homo sapien
tttcaaggtgccaaatttcttctga

SEQ ID NO: 836729 - DNA, 25 bp, Homo sapien
catggtggatatgatgaacttttca

SEQ ID NO: 836730 - DNA, 25 bp, Homo sapien
catcatcatggtggatatgatgaac

SEQ ID NO: 836731 - DNA, 25 bp, Homo sapien
cacactgtcacttggtcccggttgc

SEQ ID NO: 836732 - DNA, 25 bp, Homo sapien
caggtacacagatttttcgagtgta

SEQ ID NO: 836733 - DNA, 25 bp, Homo sapien
agtacaggtacacagatttttcgag

SEQ ID NO: 836734 - DNA, 25 bp, Homo sapien
ttagtacaggtacacagatttttcg

SEQ ID NO: 836735 - DNA, 25 bp, Homo sapien
tacacagatttttcgagtgtaaaaa

SEQ ID NO: 836736 - DNA, 25 bp, Homo sapien
gtggaggacccaaacacgactggtc

SEQ ID NO: 836737 - DNA, 25 bp, Homo sapien
taattttccatatgggcccagtgga

SEQ ID NO: 836738 - DNA, 25 bp, Homo sapien
cactgaccttgtgataccggcagta

SEQ ID NO: 836739 - DNA, 25 bp, Homo sapien
gccagctgtaggctgtagttgcaga

SEQ ID NO: 836740 - DNA, 25 bp, Homo sapien
cagaatctgctctgggtcacaaaca

SEQ ID NO: 836741 - DNA, 25 bp, Homo sapien
gtcccaggcgtacaaaaggctccag

SEQ ID NO: 836742 - DNA, 25 bp, Homo sapien
acgctgggccgtcccaggcgtacaa

SEQ ID NO: 836743 - DNA, 25 bp, Homo sapien
aatctgctctgggtcacaaacatca

SEQ ID NO: 836744 - DNA, 25 bp, Homo sapien
cttagaggcgcactaacagagccct

SEQ ID NO: 836745 - DNA, 25 bp, Homo sapien
gaggcgcactaacagagcccttctg

SEQ ID NO: 836746 - DNA, 25 bp, Homo sapien
aacagagcccttctgccgcatggag

SEQ ID NO: 836747 - DNA, 25 bp, Homo sapien
actaacagagcccttctgccgcatg

SEQ ID NO: 836748 - DNA, 25 bp, Homo sapien
aatttaccgccaaaggcgtcgccat

SEQ ID NO: 836749 - DNA, 25 bp, Homo sapien
gaatttaccgccaaaggcgtcgcca

SEQ ID NO: 836750 - DNA, 25 bp, Homo sapien
aaaatatctcgggtcctctggcttc

SEQ ID NO: 836751 - DNA, 25 bp, Homo sapien
ttccagcgaaatcgggaccacagac

SEQ ID NO: 836752 - DNA, 25 bp, Homo sapien
gtggaagacctgatgcgtattccag

SEQ ID NO: 836753 - DNA, 25 bp, Homo sapien
catggctggaaaatatctcgggtcc

SEQ ID NO: 836754 - DNA, 25 bp, Homo sapien
tcaaaatcttatcaagaaggtgaac

SEQ ID NO: 836755 - DNA, 25 bp, Homo sapien
ttgtaaggaccccatagactagcag

SEQ ID NO: 836756 - DNA, 25 bp, Homo sapien
ctttatgccaaatgtctttgtaagg

SEQ ID NO: 836757 - DNA, 25 bp, Homo sapien
gcttcaggttgtcttctccaaagag

SEQ ID NO: 836758 - DNA, 25 bp, Homo sapien
tgttgaccctgaatggcgactccct

SEQ ID NO: 836759 - DNA, 25 bp, Homo sapien
gaagaagtcgagttccctgttgacc

SEQ ID NO: 836760 - DNA, 25 bp, Homo sapien
taatgagctgttcaggaagaagtcg

SEQ ID NO: 836761 - DNA, 25 bp, Homo sapien
tggctttctgaaccttctcatgctg

SEQ ID NO: 836762 - DNA, 25 bp, Homo sapien
cattttgcaacatctaccttaaact

SEQ ID NO: 836763 - DNA, 25 bp, Homo sapien
tcaaggtccatctaataccatctct

SEQ ID NO: 836764 - DNA, 25 bp, Homo sapien
ctctggaccatctctaaatcttgca

SEQ ID NO: 836765 - DNA, 25 bp, Homo sapien
ttcatgatgttgttaagagttctct

SEQ ID NO: 836766 - DNA, 25 bp, Homo sapien
caaggctttcaaggaattcgcaatg

SEQ ID NO: 836767 - DNA, 25 bp, Homo sapien
gggtccatgtctttccccgtctaga

SEQ ID NO: 836768 - DNA, 25 bp, Homo sapien
gcatcgctttccatcccagtacaga

SEQ ID NO: 836769 - DNA, 25 bp, Homo sapien
agctactaatcctctggtaaggcca

SEQ ID NO: 836770 - DNA, 25 bp, Homo sapien
ctgtaaagcgtgttgtcatggaagc

SEQ ID NO: 836771 - DNA, 25 bp, Homo sapien
taaagcgtgttgtcatggaagccag

SEQ ID NO: 836772 - DNA, 25 bp, Homo sapien
tgtaaagcgtgttgtcatggaagcc

SEQ ID NO: 836773 - DNA, 25 bp, Homo sapien
aagcgtgttgtcatggaagccagct

SEQ ID NO: 836774 - DNA, 25 bp, Homo sapien
gaactttataagtcaatccttgctc

SEQ ID NO: 836775 - DNA, 25 bp, Homo sapien
gacaccagcgtaagaactttataag

SEQ ID NO: 836776 - DNA, 25 bp, Homo sapien
tattcacatcaatctgtgacaccag

SEQ ID NO: 836777 - DNA, 25 bp, Homo sapien
tctctctcgctgtagtttctcaaac

SEQ ID NO: 836778 - DNA, 25 bp, Homo sapien
ctttgcgatgtttttcactgcccaa

SEQ ID NO: 836779 - DNA, 25 bp, Homo sapien
tctttgcgatgtttttcactgccca

SEQ ID NO: 836780 - DNA, 25 bp, Homo sapien
ctctttgcgatgtttttcactgccc

SEQ ID NO: 836781 - DNA, 25 bp, Homo sapien
tcttctttgcctaaaggtgactggc

SEQ ID NO: 836782 - DNA, 25 bp, Homo sapien
tgcatccagtgagccattagcctca

SEQ ID NO: 836783 - DNA, 25 bp, Homo sapien
tatagaagcgccataagaagagcca

SEQ ID NO: 836784 - DNA, 25 bp, Homo sapien
gagactgcctgcactccttaatgag

SEQ ID NO: 836785 - DNA, 25 bp, Homo sapien
aaagctgtgagtcctgaagacgaga

SEQ ID NO: 836786 - DNA, 25 bp, Homo sapien
gaagacgagagtgaattgttgcaat

SEQ ID NO: 836787 - DNA, 25 bp, Homo sapien
tgggatattcccctcaatgccagcg

SEQ ID NO: 836788 - DNA, 25 bp, Homo sapien
cagcgcccaggcaagtctaacagtg

SEQ ID NO: 836789 - DNA, 25 bp, Homo sapien
tcagcaattgcgagttctgccattg

SEQ ID NO: 836790 - DNA, 25 bp, Homo sapien
tccatgaggaacaggaaaacgttgt

SEQ ID NO: 836791 - DNA, 25 bp, Homo sapien
tctgtgatgagattatggactctgc

SEQ ID NO: 836792 - DNA, 25 bp, Homo sapien
ttcctgataaaagtattctgatacc

SEQ ID NO: 836793 - DNA, 25 bp, Homo sapien
atctgcccgattcctcagctgtttc

SEQ ID NO: 836794 - DNA, 25 bp, Homo sapien
ttcatctgcccgattcctcagctgt

SEQ ID NO: 836795 - DNA, 25 bp, Homo sapien
ggttcattacccatctgcatactca

SEQ ID NO: 836796 - DNA, 25 bp, Homo sapien
tgtgaatcattcgagcatcttcatc

SEQ ID NO: 836797 - DNA, 25 bp, Homo sapien
gctgatgagccacccctagataaga

SEQ ID NO: 836798 - DNA, 25 bp, Homo sapien
tagataagagcccatgatagtcgga

SEQ ID NO: 836799 - DNA, 25 bp, Homo sapien
tctgtgggacaccaatattctagag

SEQ ID NO: 836800 - DNA, 25 bp, Homo sapien
ctagagcaagctccagatgaaaagg

SEQ ID NO: 836801 - DNA, 25 bp, Homo sapien
tgttaacagcaataaaatcaggaag

SEQ ID NO: 836802 - DNA, 25 bp, Homo sapien
ttaacagcaataaaatcaggaagta

SEQ ID NO: 836803 - DNA, 25 bp, Homo sapien
aacagcaataaaatcaggaagtaat

SEQ ID NO: 836804 - DNA, 25 bp, Homo sapien
catttgtgttaacagcaataaaatc

SEQ ID NO: 836805 - DNA, 25 bp, Homo sapien
atgactactaccattgactttgagc

SEQ ID NO: 836806 - DNA, 25 bp, Homo sapien
caggctgaaacagtagtgggcacac

SEQ ID NO: 836807 - DNA, 25 bp, Homo sapien
tagttggaggcaacaggtcacccat

SEQ ID NO: 836808 - DNA, 25 bp, Homo sapien
gcccattggccaatccctggagcat

SEQ ID NO: 836809 - DNA, 25 bp, Homo sapien
caagtaatgatggtagacgtgagct

SEQ ID NO: 836810 - DNA, 25 bp, Homo sapien
gatccttccgaaggtgttcgtggta

SEQ ID NO: 836811 - DNA, 25 bp, Homo sapien
tcgtggtaaagcatcaaggagtgaa

SEQ ID NO: 836812 - DNA, 25 bp, Homo sapien
gacggtactggacactatctgcact

SEQ ID NO: 836813 - DNA, 25 bp, Homo sapien
tccactgagggtgttcacagagtgc

SEQ ID NO: 836814 - DNA, 25 bp, Homo sapien
gagtgtattccaatgactgccagag

SEQ ID NO: 836815 - DNA, 25 bp, Homo sapien
gattttccaaaagctgcgagtgtct

SEQ ID NO: 836816 - DNA, 25 bp, Homo sapien
tactgcattggaggagtcccagaat

SEQ ID NO: 836817 - DNA, 25 bp, Homo sapien
tccatccttgccaacacagcgagac

SEQ ID NO: 836818 - DNA, 25 bp, Homo sapien
ccatccttgccaacacagcgagacc

SEQ ID NO: 836819 - DNA, 25 bp, Homo sapien
atccttgccaacacagcgagaccct

SEQ ID NO: 836820 - DNA, 25 bp, Homo sapien
ccttgccaacacagcgagaccctat

SEQ ID NO: 836821 - DNA, 25 bp, Homo sapien
gcttggaatcctcacggtctgcagt

SEQ ID NO: 836822 - DNA, 25 bp, Homo sapien
cctttggcttggaatcctcacggtc

SEQ ID NO: 836823 - DNA, 25 bp, Homo sapien
caataccaatagcttgcctttggct

SEQ ID NO: 836824 - DNA, 25 bp, Homo sapien
ctcaataccaatagcttgcctttgg

SEQ ID NO: 836825 - DNA, 25 bp, Homo sapien
tagtgctaactcacaccaaaagata

SEQ ID NO: 836826 - DNA, 25 bp, Homo sapien
tccaaattcccacttactgtcccca

SEQ ID NO: 836827 - DNA, 25 bp, Homo sapien
taatagtgctaactcacaccaaaag

SEQ ID NO: 836828 - DNA, 25 bp, Homo sapien
aaactattagctatgaagtgaagag

SEQ ID NO: 836829 - DNA, 25 bp, Homo sapien
gcaaaaggcccgagtcaatgggtat

SEQ ID NO: 836830 - DNA, 25 bp, Homo sapien
aggaactgcaaataagggtcaaagc

SEQ ID NO: 836831 - DNA, 25 bp, Homo sapien
gggtattcttcacaccgggattcta

SEQ ID NO: 836832 - DNA, 25 bp, Homo sapien
cggtaagctcttgtacggaatcgta

SEQ ID NO: 836833 - DNA, 25 bp, Homo sapien
ttcaaaagctaacatgaatttagca

SEQ ID NO: 836834 - DNA, 25 bp, Homo sapien
gcaccatatacttttgataaaagaa

SEQ ID NO: 836835 - DNA, 25 bp, Homo sapien
agcaccatatacttttgataaaaga

SEQ ID NO: 836836 - DNA, 25 bp, Homo sapien
tagcaccatatacttttgataaaag

SEQ ID NO: 836837 - DNA, 25 bp, Homo sapien
aaaatccccatgatgctaagtgaca

SEQ ID NO: 836838 - DNA, 25 bp, Homo sapien
caagctatatccaatgacagggcag

SEQ ID NO: 836839 - DNA, 25 bp, Homo sapien
ggctatgagcttggatctggaatca

SEQ ID NO: 836840 - DNA, 25 bp, Homo sapien
gagtcttgatctgcgccaactacca

SEQ ID NO: 836841 - DNA, 25 bp, Homo sapien
ctggtctacaaaatcttcaagctga

SEQ ID NO: 836842 - DNA, 25 bp, Homo sapien
tgagcaatttataaaacacctccaa

SEQ ID NO: 836843 - DNA, 25 bp, Homo sapien
ttgtagttccacaaactggtctaca

SEQ ID NO: 836844 - DNA, 25 bp, Homo sapien
cacaaactggtctacaaaatcttca

SEQ ID NO: 836845 - DNA, 25 bp, Homo sapien
gatgatacatcagactaaatccagg

SEQ ID NO: 836846 - DNA, 25 bp, Homo sapien
caggtggcttataggctatgatttc

SEQ ID NO: 836847 - DNA, 25 bp, Homo sapien
gggcataggtgtcaagctgcttaac

SEQ ID NO: 836848 - DNA, 25 bp, Homo sapien
tgagagcaagctccaacattggtga

SEQ ID NO: 836849 - DNA, 25 bp, Homo sapien
taaaagagccaaatacatagtaagc

SEQ ID NO: 836850 - DNA, 25 bp, Homo sapien
tgtatcaagcactatagtaagtcct

SEQ ID NO: 836851 - DNA, 25 bp, Homo sapien
tgaaaacaccacttcagatacagag

SEQ ID NO: 836852 - DNA, 25 bp, Homo sapien
gaccctgcagtgaaacacagtgaca

SEQ ID NO: 836853 - DNA, 25 bp, Homo sapien
aaggcaatgctgtactgctttctcc

SEQ ID NO: 836854 - DNA, 25 bp, Homo sapien
tctgggattaattccctgcaaaagc

SEQ ID NO: 836855 - DNA, 25 bp, Homo sapien
tctctcttagaaggtccataaaaag

SEQ ID NO: 836856 - DNA, 25 bp, Homo sapien
gactattagagccagttgactctct

SEQ ID NO: 836857 - DNA, 25 bp, Homo sapien
gattagtattgccatgatataggta

SEQ ID NO: 836858 - DNA, 25 bp, Homo sapien
tgtgaaatctccaaccaactttatc

SEQ ID NO: 836859 - DNA, 25 bp, Homo sapien
actttatctgaatattagagttgca

SEQ ID NO: 836860 - DNA, 25 bp, Homo sapien
aagccaattctggattagtattgcc

SEQ ID NO: 836861 - DNA, 25 bp, Homo sapien
ctcttccagacgtacaaattcttct

SEQ ID NO: 836862 - DNA, 25 bp, Homo sapien
cttccagacgtacaaattcttctgc

SEQ ID NO: 836863 - DNA, 25 bp, Homo sapien
cagccattagtttctgacttatact

SEQ ID NO: 836864 - DNA, 25 bp, Homo sapien
acaaatccagccattagtttctgac

SEQ ID NO: 836865 - DNA, 25 bp, Homo sapien
gattgggtggattgcattccagaga

SEQ ID NO: 836866 - DNA, 25 bp, Homo sapien
gagaagattcaagatgtggattctt

SEQ ID NO: 836867 - DNA, 25 bp, Homo sapien
aacaggtagagagcaagattgggtg

SEQ ID NO: 836868 - DNA, 25 bp, Homo sapien
tcttgtttcatgacgaattgcaact

SEQ ID NO: 836869 - DNA, 25 bp, Homo sapien
catgtccgagggcaacctaacactc

SEQ ID NO: 836870 - DNA, 25 bp, Homo sapien
tctccaagatgtttagaatggcgtg

SEQ ID NO: 836871 - DNA, 25 bp, Homo sapien
agctgaggagattctcgcaccgcca

SEQ ID NO: 836872 - DNA, 25 bp, Homo sapien
tggtaacatagctcagccagctgag

SEQ ID NO: 836873 - DNA, 25 bp, Homo sapien
ccatgcgtggctaatatgaacattt

SEQ ID NO: 836874 - DNA, 25 bp, Homo sapien
tattctgagcactattaatacctag

SEQ ID NO: 836875 - DNA, 25 bp, Homo sapien
aagccaaaactcttgatagtctttg

SEQ ID NO: 836876 - DNA, 25 bp, Homo sapien
tgtaccaggcactttaagacatgtt

SEQ ID NO: 836877 - DNA, 25 bp, Homo sapien
tagaaaatggtagatactgcaactg

SEQ ID NO: 836878 - DNA, 25 bp, Homo sapien
gaccagatgtatcagagcatgcaca

SEQ ID NO: 836879 - DNA, 25 bp, Homo sapien
tctcaagtacctcatagtaggacca

SEQ ID NO: 836880 - DNA, 25 bp, Homo sapien
aaataagaaatcctggctggttctc

SEQ ID NO: 836881 - DNA, 25 bp, Homo sapien
tcatccagtaagaggtgtaggagcc

SEQ ID NO: 836882 - DNA, 25 bp, Homo sapien
ctgacgattcagagaggttaccctt

SEQ ID NO: 836883 - DNA, 25 bp, Homo sapien
ggttacccttagctctattgaggca

SEQ ID NO: 836884 - DNA, 25 bp, Homo sapien
cctctgggtatgtgaccgctgacga

SEQ ID NO: 836885 - DNA, 25 bp, Homo sapien
cagtgtcaaagtgaaggaacccaga

SEQ ID NO: 836886 - DNA, 25 bp, Homo sapien
agtgtcaaagtgaaggaacccagaa

SEQ ID NO: 836887 - DNA, 25 bp, Homo sapien
aacttgttcaatctgggcccgatca

SEQ ID NO: 836888 - DNA, 25 bp, Homo sapien
gacattgcagactgtctgtccccgt

SEQ ID NO: 836889 - DNA, 25 bp, Homo sapien
cagggatctcctgactgaagtcaat

SEQ ID NO: 836890 - DNA, 25 bp, Homo sapien
aattcttgtgttcacagttagcaat

SEQ ID NO: 836891 - DNA, 25 bp, Homo sapien
taccctgaagggcatttacttcagc

SEQ ID NO: 836892 - DNA, 25 bp, Homo sapien
gcatttacttcagctacaagaaccc

SEQ ID NO: 836893 - DNA, 25 bp, Homo sapien
tatggctgccataccctgaagggca

SEQ ID NO: 836894 - DNA, 25 bp, Homo sapien
gaggtctctgtcctatggctgccat

SEQ ID NO: 836895 - DNA, 25 bp, Homo sapien
agacactgcagcaatttatttcttc

SEQ ID NO: 836896 - DNA, 25 bp, Homo sapien
aataatcagttgtcgatcctctgcc

SEQ ID NO: 836897 - DNA, 25 bp, Homo sapien
cagagcatgacgttttgcatgaaga

SEQ ID NO: 836898 - DNA, 25 bp, Homo sapien
taatttctactagttgcctccacga

SEQ ID NO: 836899 - DNA, 25 bp, Homo sapien
tgctggtcccaagactgatgtttcc

SEQ ID NO: 836900 - DNA, 25 bp, Homo sapien
cactaatgggttctcttcaggagga

SEQ ID NO: 836901 - DNA, 25 bp, Homo sapien
cataaaagcgtaatgggcctctgct

SEQ ID NO: 836902 - DNA, 25 bp, Homo sapien
ccggcgaccacaggcattaactctt

SEQ ID NO: 836903 - DNA, 25 bp, Homo sapien
gagagccatacaagtgagtcctcac

SEQ ID NO: 836904 - DNA, 25 bp, Homo sapien
tacaagtgagtcctcactcgttgga

SEQ ID NO: 836905 - DNA, 25 bp, Homo sapien
agagagccatacaagtgagtcctca

SEQ ID NO: 836906 - DNA, 25 bp, Homo sapien
gagtcctcactcgttggaatccacc

SEQ ID NO: 836907 - DNA, 25 bp, Homo sapien
cttctaaggtgtctggttcatcagg

SEQ ID NO: 836908 - DNA, 25 bp, Homo sapien
ttctaaggtgtctggttcatcaggt

SEQ ID NO: 836909 - DNA, 25 bp, Homo sapien
tgcttctaaggtgtctggttcatca

SEQ ID NO: 836910 - DNA, 25 bp, Homo sapien
gcttctaaggtgtctggttcatcag

SEQ ID NO: 836911 - DNA, 25 bp, Homo sapien
gggcggcgccataactttcaataat

SEQ ID NO: 836912 - DNA, 25 bp, Homo sapien
ataatggctatgttttctcgctgta

SEQ ID NO: 836913 - DNA, 25 bp, Homo sapien
tctcgacagaccacttccatgaggg

SEQ ID NO: 836914 - DNA, 25 bp, Homo sapien
tgaccatcacaagcatctcgacaga

SEQ ID NO: 836915 - DNA, 25 bp, Homo sapien
taccaagctgtctacgaggaccttc

SEQ ID NO: 836916 - DNA, 25 bp, Homo sapien
gctgctgtttatccacggagacaat

SEQ ID NO: 836917 - DNA, 25 bp, Homo sapien
aattctatcaagtagagccagggcc

SEQ ID NO: 836918 - DNA, 25 bp, Homo sapien
tgagtaagctctgcaaagtacggtc

SEQ ID NO: 836919 - DNA, 25 bp, Homo sapien
tgctgtatctttgccactcttgtga

SEQ ID NO: 836920 - DNA, 25 bp, Homo sapien
gatcttagcagctctaatgcaccct

SEQ ID NO: 836921 - DNA, 25 bp, Homo sapien
gagctagtctcacaatcacccctga

SEQ ID NO: 836922 - DNA, 25 bp, Homo sapien
tctgggcgcatgtcatagacttggc

SEQ ID NO: 836923 - DNA, 25 bp, Homo sapien
agattttcagattagagaagctcaa

SEQ ID NO: 836924 - DNA, 25 bp, Homo sapien
cagattttcagattagagaagctca

SEQ ID NO: 836925 - DNA, 25 bp, Homo sapien
tcagattttcagattagagaagctc

SEQ ID NO: 836926 - DNA, 25 bp, Homo sapien
ttccaagaattaaggtatactctcg

SEQ ID NO: 836927 - DNA, 25 bp, Homo sapien
aattaaggtatactctcggcaattc

SEQ ID NO: 836928 - DNA, 25 bp, Homo sapien
caagaattaaggtatactctcggca

SEQ ID NO: 836929 - DNA, 25 bp, Homo sapien
acattccaagaattaaggtatactc

SEQ ID NO: 836930 - DNA, 25 bp, Homo sapien
tagggatgaacattggagggtctct

SEQ ID NO: 836931 - DNA, 25 bp, Homo sapien
ttggagggtctctcatgccaaacat

SEQ ID NO: 836932 - DNA, 25 bp, Homo sapien
gagaatctggcggtagcgatccact

SEQ ID NO: 836933 - DNA, 25 bp, Homo sapien
catactagatgtgaggatgacctgg

SEQ ID NO: 836934 - DNA, 25 bp, Homo sapien
gcttgtatggtatcagaatgtgaaa

SEQ ID NO: 836935 - DNA, 25 bp, Homo sapien
caaagacccagcactaacatcctga

SEQ ID NO: 836936 - DNA, 25 bp, Homo sapien
aacatcctgacagcgcagaattgct

SEQ ID NO: 836937 - DNA, 25 bp, Homo sapien
taattcctgtcagcagagccaattc

SEQ ID NO: 836938 - DNA, 25 bp, Homo sapien
taacagcaccggtacatgcgcattc

SEQ ID NO: 836939 - DNA, 25 bp, Homo sapien
tattaataacagcaccggtacatgc

SEQ ID NO: 836940 - DNA, 25 bp, Homo sapien
gaactatgattttacaaagactgta

SEQ ID NO: 836941 - DNA, 25 bp, Homo sapien
actaggaagagaggttctaatattt

SEQ ID NO: 836942 - DNA, 25 bp, Homo sapien
catttacatcaacgtcaagttcact

SEQ ID NO: 836943 - DNA, 25 bp, Homo sapien
cctgtagctccattagagacccttc

SEQ ID NO: 836944 - DNA, 25 bp, Homo sapien
tggaatcttccaatatgtccctgta

SEQ ID NO: 836945 - DNA, 25 bp, Homo sapien
gctccattagagacccttcatttac

SEQ ID NO: 836946 - DNA, 25 bp, Homo sapien
cagagccaccaaagcgacttagtag

SEQ ID NO: 836947 - DNA, 25 bp, Homo sapien
gacttagtagtcctaagcactggcg

SEQ ID NO: 836948 - DNA, 25 bp, Homo sapien
tcttgaaatttaaactgacgcagtc

SEQ ID NO: 836949 - DNA, 25 bp, Homo sapien
tgctgcatagccagttcaatctcat

SEQ ID NO: 836950 - DNA, 25 bp, Homo sapien
gcaccaggtccacatctgttatttt

SEQ ID NO: 836951 - DNA, 25 bp, Homo sapien
ccaccgcaccaggtccacatctgtt

SEQ ID NO: 836952 - DNA, 25 bp, Homo sapien
taaaaaccttagagaagtcacatgg

SEQ ID NO: 836953 - DNA, 25 bp, Homo sapien
cttagagaagtcacatggttcttac

SEQ ID NO: 836954 - DNA, 25 bp, Homo sapien
tctgtaacatgagtgactggcaata

SEQ ID NO: 836955 - DNA, 25 bp, Homo sapien
gggaactctgtaacatgagtgactg

SEQ ID NO: 836956 - DNA, 25 bp, Homo sapien
acatgagtgactggcaatattccat

SEQ ID NO: 836957 - DNA, 25 bp, Homo sapien
tggaaggtaggggaactctgtaaca

SEQ ID NO: 836958 - DNA, 25 bp, Homo sapien
ttgccgcggtccatctctattaact

SEQ ID NO: 836959 - DNA, 25 bp, Homo sapien
tttctgaaaggctaggagtgaagag

SEQ ID NO: 836960 - DNA, 25 bp, Homo sapien
cttgccgcggtccatctctattaac

SEQ ID NO: 836961 - DNA, 25 bp, Homo sapien
gaaaggctaggagtgaagagacaca

SEQ ID NO: 836962 - DNA, 25 bp, Homo sapien
cacccggccactaatatacttttca

SEQ ID NO: 836963 - DNA, 25 bp, Homo sapien
tatccccaccaagatactaatgggc

SEQ ID NO: 836964 - DNA, 25 bp, Homo sapien
ctgagtgttccataggataacagct

SEQ ID NO: 836965 - DNA, 25 bp, Homo sapien
caaagacttcctgaaatcaccaaca

SEQ ID NO: 836966 - DNA, 25 bp, Homo sapien
agtatggaaccactggagcttgggt

SEQ ID NO: 836967 - DNA, 25 bp, Homo sapien
caggcgccagtatggaaccactgga

SEQ ID NO: 836968 - DNA, 25 bp, Homo sapien
ccaggcaggcgccagtatggaacca

SEQ ID NO: 836969 - DNA, 25 bp, Homo sapien
ctaaaccaggcaggcgccagtatgg

SEQ ID NO: 836970 - DNA, 25 bp, Homo sapien
tgctgacactctgtcgatgactgtc

SEQ ID NO: 836971 - DNA, 25 bp, Homo sapien
gaagctgctctacattttgtagctt

SEQ ID NO: 836972 - DNA, 25 bp, Homo sapien
cgatgactgtcataatagctgaaga

SEQ ID NO: 836973 - DNA, 25 bp, Homo sapien
gtagcttgctgacactctgtcgatg

SEQ ID NO: 836974 - DNA, 25 bp, Homo sapien
aaggccacgcgcttcatgatgatga

SEQ ID NO: 836975 - DNA, 25 bp, Homo sapien
cacagaaggcgtactgaagtgaggc

SEQ ID NO: 836976 - DNA, 25 bp, Homo sapien
cacagttgttccagctaatgttctg

SEQ ID NO: 836977 - DNA, 25 bp, Homo sapien
tgatgcaattcctcttacaagtaca

SEQ ID NO: 836978 - DNA, 25 bp, Homo sapien
ccaagcgccgtcttgctagaacata

SEQ ID NO: 836979 - DNA, 25 bp, Homo sapien
aagcgccgtcttgctagaacatatt

SEQ ID NO: 836980 - DNA, 25 bp, Homo sapien
cgccgtcttgctagaacatatttct

SEQ ID NO: 836981 - DNA, 25 bp, Homo sapien
tcaccaagcgccgtcttgctagaac

SEQ ID NO: 836982 - DNA, 25 bp, Homo sapien
gaaagcagtttagctcgattgttga

SEQ ID NO: 836983 - DNA, 25 bp, Homo sapien
ggaaagcagtttagctcgattgttg

SEQ ID NO: 836984 - DNA, 25 bp, Homo sapien
aagcagtttagctcgattgttgatc

SEQ ID NO: 836985 - DNA, 25 bp, Homo sapien
gcagtttagctcgattgttgatcac

SEQ ID NO: 836986 - DNA, 25 bp, Homo sapien
caaggtcatcattcaagtgcatgat

SEQ ID NO: 836987 - DNA, 25 bp, Homo sapien
tccacctggttttggtgcccaaata

SEQ ID NO: 836988 - DNA, 25 bp, Homo sapien
tccttccacctggttttggtgccca

SEQ ID NO: 836989 - DNA, 25 bp, Homo sapien
ggttttggtgcccaaataatatgag

SEQ ID NO: 836990 - DNA, 25 bp, Homo sapien
gaatcttgagaatccgtgggcatgc

SEQ ID NO: 836991 - DNA, 25 bp, Homo sapien
ccaaagaataaataggcaggtctct

SEQ ID NO: 836992 - DNA, 25 bp, Homo sapien
caaggttctcgaggcaaataaggaa

SEQ ID NO: 836993 - DNA, 25 bp, Homo sapien
caagtagtactccagatggcgccaa

SEQ ID NO: 836994 - DNA, 25 bp, Homo sapien
tacgtctagtgactaaacagctctt

SEQ ID NO: 836995 - DNA, 25 bp, Homo sapien
ttatgctcagcacaatgtcccgtga

SEQ ID NO: 836996 - DNA, 25 bp, Homo sapien
aatgcaagaaatagctacgtctagt

SEQ ID NO: 836997 - DNA, 25 bp, Homo sapien
ggtactagcttttcaaggcacaaat

SEQ ID NO: 836998 - DNA, 25 bp, Homo sapien
aatatatggccatcagtcacagagg

SEQ ID NO: 836999 - DNA, 25 bp, Homo sapien
cagcataatagcagacctcctccat

SEQ ID NO: 837000 - DNA, 25 bp, Homo sapien
tctatttccttccacctaagggatc

SEQ ID NO: 837001 - DNA, 25 bp, Homo sapien
ggcccactccagcaataagaatcag

SEQ ID NO: 837002 - DNA, 25 bp, Homo sapien
agagtcataccggctgtgcaagtac

SEQ ID NO: 837003 - DNA, 25 bp, Homo sapien
atagcaccatgaaaaacacggctca

SEQ ID NO: 837004 - DNA, 25 bp, Homo sapien
cctatctaccacacagtggaggaac

SEQ ID NO: 837005 - DNA, 25 bp, Homo sapien
tagcaccatgaaaaacacggctcaa

SEQ ID NO: 837006 - DNA, 25 bp, Homo sapien
tatagccagcccacttctaaaatct

SEQ ID NO: 837007 - DNA, 25 bp, Homo sapien
ttactaaattaactaaacattcaca

SEQ ID NO: 837008 - DNA, 25 bp, Homo sapien
tatcgagatcgaacttttgaatata

SEQ ID NO: 837009 - DNA, 25 bp, Homo sapien
aaactatatcgagatcgaacttttg

SEQ ID NO: 837010 - DNA, 25 bp, Homo sapien
ctccaaaagcgttgattgcatcagc

SEQ ID NO: 837011 - DNA, 25 bp, Homo sapien
gagatcgaacttttgaatataatcc

SEQ ID NO: 837012 - DNA, 25 bp, Homo sapien
cttgatatcctcaagaggccacgga

SEQ ID NO: 837013 - DNA, 25 bp, Homo sapien
gatatcctcaagaggccacggatac

SEQ ID NO: 837014 - DNA, 25 bp, Homo sapien
ccttgatatcctcaagaggccacgg

SEQ ID NO: 837015 - DNA, 25 bp, Homo sapien
ttgatatcctcaagaggccacggat

SEQ ID NO: 837016 - DNA, 25 bp, Homo sapien
catagaagagcataagcacgggctc

SEQ ID NO: 837017 - DNA, 25 bp, Homo sapien
aattctccccaattcatctctctca

SEQ ID NO: 837018 - DNA, 25 bp, Homo sapien
tcatagaagagcataagcacgggct

SEQ ID NO: 837019 - DNA, 25 bp, Homo sapien
atggagacaattctccccaattcat

SEQ ID NO: 837020 - DNA, 25 bp, Homo sapien
atttattttttactagtgaggatgg

SEQ ID NO: 837021 - DNA, 25 bp, Homo sapien
tattttttactagtgaggatggaac

SEQ ID NO: 837022 - DNA, 25 bp, Homo sapien
ttattttttactagtgaggatggaa

SEQ ID NO: 837023 - DNA, 25 bp, Homo sapien
ttttttactagtgaggatggaacta

SEQ ID NO: 837024 - DNA, 25 bp, Homo sapien
tatgatgggcccattcgtcagccgc

SEQ ID NO: 837025 - DNA, 25 bp, Homo sapien
gtcccacaaactggaggctgccttt

SEQ ID NO: 837026 - DNA, 25 bp, Homo sapien
tcatcaatatctcagtggcgtgtgg

SEQ ID NO: 837027 - DNA, 25 bp, Homo sapien
tggtttttcccttcgcatatgctgg

SEQ ID NO: 837028 - DNA, 25 bp, Homo sapien
cggtgcacggacttcctccttcaga

SEQ ID NO: 837029 - DNA, 25 bp, Homo sapien
cttcggtgcacggacttcctccttc

SEQ ID NO: 837030 - DNA, 25 bp, Homo sapien
ctccccttcggtgcacggacttcct

SEQ ID NO: 837031 - DNA, 25 bp, Homo sapien
cccttcggtgcacggacttcctcct

SEQ ID NO: 837032 - DNA, 25 bp, Homo sapien
tgaggagggatagttggcctgtggc

SEQ ID NO: 837033 - DNA, 25 bp, Homo sapien
ctgaggagggatagttggcctgtgg

SEQ ID NO: 837034 - DNA, 25 bp, Homo sapien
gaggagggatagttggcctgtggct

SEQ ID NO: 837035 - DNA, 25 bp, Homo sapien
cttggcattggtgtagaggatgctg

SEQ ID NO: 837036 - DNA, 25 bp, Homo sapien
ccttggcattggtgtagaggatgct

SEQ ID NO: 837037 - DNA, 25 bp, Homo sapien
ttggcattggtgtagaggatgctgt

SEQ ID NO: 837038 - DNA, 25 bp, Homo sapien
tcggagcccccatcaaaggcagagg

SEQ ID NO: 837039 - DNA, 25 bp, Homo sapien
ctggcctgccctgagtaactcagct

SEQ ID NO: 837040 - DNA, 25 bp, Homo sapien
tgccctgagtaactcagctggcctc

SEQ ID NO: 837041 - DNA, 25 bp, Homo sapien
tgagtaactcagctggcctccatct

SEQ ID NO: 837042 - DNA, 25 bp, Homo sapien
ttattgctggcctgccctgagtaac

SEQ ID NO: 837043 - DNA, 25 bp, Homo sapien
cgtggacagcagatagctggcagta

SEQ ID NO: 837044 - DNA, 25 bp, Homo sapien
gcagggagccccgtggacagcagat

SEQ ID NO: 837045 - DNA, 25 bp, Homo sapien
ccccgtggacagcagatagctggca

SEQ ID NO: 837046 - DNA, 25 bp, Homo sapien
cagctggcgtgctttatcaggccag

SEQ ID NO: 837047 - DNA, 25 bp, Homo sapien
tgggcatttttgaccaccatggtga

SEQ ID NO: 837048 - DNA, 25 bp, Homo sapien
ttaggaattgggcatttttgaccac

SEQ ID NO: 837049 - DNA, 25 bp, Homo sapien
aattgggcatttttgaccaccatgg

SEQ ID NO: 837050 - DNA, 25 bp, Homo sapien
taggaattgggcatttttgaccacc

SEQ ID NO: 837051 - DNA, 25 bp, Homo sapien
cttcgagcaaacttcagctggttaa

SEQ ID NO: 837052 - DNA, 25 bp, Homo sapien
cgagcaaacttcagctggttaacac

SEQ ID NO: 837053 - DNA, 25 bp, Homo sapien
tcgagcaaacttcagctggttaaca

SEQ ID NO: 837054 - DNA, 25 bp, Homo sapien
ttcgagcaaacttcagctggttaac

SEQ ID NO: 837055 - DNA, 25 bp, Homo sapien
ggatttcttctgataacttcataga

SEQ ID NO: 837056 - DNA, 25 bp, Homo sapien
ttgtgtccaactcgctcctctgcaa

SEQ ID NO: 837057 - DNA, 25 bp, Homo sapien
tctgataacttcatagaatggatca

SEQ ID NO: 837058 - DNA, 25 bp, Homo sapien
cccagcaagaaccatcaatagtgtg

SEQ ID NO: 837059 - DNA, 25 bp, Homo sapien
agcgagcgcgcgacaggacttgcga

SEQ ID NO: 837060 - DNA, 25 bp, Homo sapien
gcgacaggacttgcgaagagcaagt

SEQ ID NO: 837061 - DNA, 25 bp, Homo sapien
ggacttgcgaagagcaagtcccgag

SEQ ID NO: 837062 - DNA, 25 bp, Homo sapien
cgcgcgacaggacttgcgaagagca

SEQ ID NO: 837063 - DNA, 25 bp, Homo sapien
agggcgcgaaggactgcagcagctc

SEQ ID NO: 837064 - DNA, 25 bp, Homo sapien
agctccgcgggccggtccgagccta

SEQ ID NO: 837065 - DNA, 25 bp, Homo sapien
cgaggagggcgcgaaggactgcagc

SEQ ID NO: 837066 - DNA, 25 bp, Homo sapien
ccgagcctacctccccatgcgcggg

SEQ ID NO: 837067 - DNA, 25 bp, Homo sapien
caagctttaatacaaagattgcaca

SEQ ID NO: 837068 - DNA, 25 bp, Homo sapien
ggcgcggcacacaataagaagctct

SEQ ID NO: 837069 - DNA, 25 bp, Homo sapien
tctggaaacgcacactctctgacac

SEQ ID NO: 837070 - DNA, 25 bp, Homo sapien
ttttagggacttggatggctgcaga

SEQ ID NO: 837071 - DNA, 25 bp, Homo sapien
tacattccaaccacgttgcccagtg

SEQ ID NO: 837072 - DNA, 25 bp, Homo sapien
ccacgttgcccagtgtaaatccaag

SEQ ID NO: 837073 - DNA, 25 bp, Homo sapien
gatacattccaaccacgttgcccag

SEQ ID NO: 837074 - DNA, 25 bp, Homo sapien
cattccaaccacgttgcccagtgta

SEQ ID NO: 837075 - DNA, 25 bp, Homo sapien
aatattcaggagttttgcctcagcc

SEQ ID NO: 837076 - DNA, 25 bp, Homo sapien
taatattactctcggctaacaagcc

SEQ ID NO: 837077 - DNA, 25 bp, Homo sapien
gaggatgatcatgagcccagctaaa

SEQ ID NO: 837078 - DNA, 25 bp, Homo sapien
ccctcttgtggtgatatggaggaca

SEQ ID NO: 837079 - DNA, 25 bp, Homo sapien
tcatgcactagggggtttcttcttg

SEQ ID NO: 837080 - DNA, 25 bp, Homo sapien
cactagggggtttcttcttggcatc

SEQ ID NO: 837081 - DNA, 25 bp, Homo sapien
tggcatccaagtcctttttaatttc

SEQ ID NO: 837082 - DNA, 25 bp, Homo sapien
tcttggcatccaagtcctttttaat

SEQ ID NO: 837083 - DNA, 25 bp, Homo sapien
gaagacactactcattaaaagtcat

SEQ ID NO: 837084 - DNA, 25 bp, Homo sapien
tgcagcaacataatttagtaccaaa

SEQ ID NO: 837085 - DNA, 25 bp, Homo sapien
tagtaaaaatcgcaaacgataaaga

SEQ ID NO: 837086 - DNA, 25 bp, Homo sapien
taacaagtacccattataattacta

SEQ ID NO: 837087 - DNA, 25 bp, Homo sapien
tgctgattttactatacatttgggc

SEQ ID NO: 837088 - DNA, 25 bp, Homo sapien
ttaaattagcaactacagagctgcc

SEQ ID NO: 837089 - DNA, 25 bp, Homo sapien
tatgaactctactgggacaaagacc

SEQ ID NO: 837090 - DNA, 25 bp, Homo sapien
cagagctgcctaacaacagtacaaa

SEQ ID NO: 837091 - DNA, 25 bp, Homo sapien
gaggttccttgctacttacatgctg

SEQ ID NO: 837092 - DNA, 25 bp, Homo sapien
gtgaagctgctcaacaagtcctctg

SEQ ID NO: 837093 - DNA, 25 bp, Homo sapien
taacttgtcaaacaggagccaggag

SEQ ID NO: 837094 - DNA, 25 bp, Homo sapien
aaaaggcgagggctagacctccatg

SEQ ID NO: 837095 - DNA, 25 bp, Homo sapien
ataagctacaaacccgtgacatgca

SEQ ID NO: 837096 - DNA, 25 bp, Homo sapien
taaaacttacttccatgtaggagag

SEQ ID NO: 837097 - DNA, 25 bp, Homo sapien
gagatgcaagttgtcaaagagaagc

SEQ ID NO: 837098 - DNA, 25 bp, Homo sapien
tcacgctgctaggaaaagtcaaacc

SEQ ID NO: 837099 - DNA, 25 bp, Homo sapien
taaatacactgcaaccagatttggg

SEQ ID NO: 837100 - DNA, 25 bp, Homo sapien
caactgtgtaagatgatgcaactgc

SEQ ID NO: 837101 - DNA, 25 bp, Homo sapien
gattcaagccaagcaaggttaccca

SEQ ID NO: 837102 - DNA, 25 bp, Homo sapien
cattagaacgcaaagggaaccgaga

SEQ ID NO: 837103 - DNA, 25 bp, Homo sapien
tgtgcaccctacaaggcaatgctag

SEQ ID NO: 837104 - DNA, 25 bp, Homo sapien
gcaactgggaactaatctgggccac

SEQ ID NO: 837105 - DNA, 25 bp, Homo sapien
gaaatctagtgagagtgctgtaagc

SEQ ID NO: 837106 - DNA, 25 bp, Homo sapien
gagtgggtgttccaagtaactaaca

SEQ ID NO: 837107 - DNA, 25 bp, Homo sapien
tgtgcacatattagagatagtacag

SEQ ID NO: 837108 - DNA, 25 bp, Homo sapien
acagttatttctgtaaagcctactg

SEQ ID NO: 837109 - DNA, 25 bp, Homo sapien
tagcatatatgtgattcctacagag

SEQ ID NO: 837110 - DNA, 25 bp, Homo sapien
aagcctactgcctctactaatttta

SEQ ID NO: 837111 - DNA, 25 bp, Homo sapien
aggaggttgaagtgagaggatcgct

SEQ ID NO: 837112 - DNA, 25 bp, Homo sapien
cctgggagacagagggagaccctat

SEQ ID NO: 837113 - DNA, 25 bp, Homo sapien
gaggatcgcttgagcccaggagttc

SEQ ID NO: 837114 - DNA, 25 bp, Homo sapien
tcaggaggttgaagtgagaggatcg

SEQ ID NO: 837115 - DNA, 25 bp, Homo sapien
caaaaacaaaagttagcccagtgtg

SEQ ID NO: 837116 - DNA, 25 bp, Homo sapien
agatcctatctctacaaaaacaaaa

SEQ ID NO: 837117 - DNA, 25 bp, Homo sapien
tatctctacaaaaacaaaagttagc

SEQ ID NO: 837118 - DNA, 25 bp, Homo sapien
atcctatctctacaaaaacaaaagt

SEQ ID NO: 837119 - DNA, 25 bp, Homo sapien
gagagagagcgtccaagaaatcact

SEQ ID NO: 837120 - DNA, 25 bp, Homo sapien
taagacatctactctagccaggccc

SEQ ID NO: 837121 - DNA, 25 bp, Homo sapien
gtgcggttatcactcccagggagat

SEQ ID NO: 837122 - DNA, 25 bp, Homo sapien
gaaaggctaccgtactgatgccaca

SEQ ID NO: 837123 - DNA, 25 bp, Homo sapien
cagagaagaggatccaagaagaata

SEQ ID NO: 837124 - DNA, 25 bp, Homo sapien
tgttcctgacaatccctgacactgg

SEQ ID NO: 837125 - DNA, 25 bp, Homo sapien
ctgaatcaggcctttagaagatgct

SEQ ID NO: 837126 - DNA, 25 bp, Homo sapien
tgaaaaactgggagacattaggtaa

SEQ ID NO: 837127 - DNA, 25 bp, Homo sapien
gatggatatccccagtaggctaggg

SEQ ID NO: 837128 - DNA, 25 bp, Homo sapien
gacaagtaggtagaaatgaccccac

SEQ ID NO: 837129 - DNA, 25 bp, Homo sapien
tctttaagggcaaacacgtcctgag

SEQ ID NO: 837130 - DNA, 25 bp, Homo sapien
taaccacagaggatgcccaaggaga

SEQ ID NO: 837131 - DNA, 25 bp, Homo sapien
cacgaggtcaggatccctagaccag

SEQ ID NO: 837132 - DNA, 25 bp, Homo sapien
cgcatcacgaggtcaggatccctag

SEQ ID NO: 837133 - DNA, 25 bp, Homo sapien
atcacgaggtcaggatccctagacc

SEQ ID NO: 837134 - DNA, 25 bp, Homo sapien
cgaggtcaggatccctagaccagcc

SEQ ID NO: 837135 - DNA, 25 bp, Homo sapien
tcatgaagaatcagtgaaggtggcc

SEQ ID NO: 837136 - DNA, 25 bp, Homo sapien
gacttgctgacaattgcaccaggac

SEQ ID NO: 837137 - DNA, 25 bp, Homo sapien
tctggagggtcagccatacttcggc

SEQ ID NO: 837138 - DNA, 25 bp, Homo sapien
gaaaggccgtcatctggaccaagca

SEQ ID NO: 837139 - DNA, 25 bp, Homo sapien
gaaacgctgtgaactgcttcccaag

SEQ ID NO: 837140 - DNA, 25 bp, Homo sapien
tgagatggcctttgtcccaacagaa

SEQ ID NO: 837141 - DNA, 25 bp, Homo sapien
caacagaacctgaatggtgtgccct

SEQ ID NO: 837142 - DNA, 25 bp, Homo sapien
gagccccagtgtcttcaacgataaa

SEQ ID NO: 837143 - DNA, 25 bp, Homo sapien
tgatgatatcccaggcaaatcccgt

SEQ ID NO: 837144 - DNA, 25 bp, Homo sapien
gatttcttgatgacatcacccttga

SEQ ID NO: 837145 - DNA, 25 bp, Homo sapien
catgttcagacatttgggagactag

SEQ ID NO: 837146 - DNA, 25 bp, Homo sapien
gggagactagtccaaattcaaatca

SEQ ID NO: 837147 - DNA, 25 bp, Homo sapien
tggcggcggagtacttcaagaacac

SEQ ID NO: 837148 - DNA, 25 bp, Homo sapien
gagaagtggaacctgcataagcgca

SEQ ID NO: 837149 - DNA, 25 bp, Homo sapien
gccaagccgggcatgtaagtcttat

SEQ ID NO: 837150 - DNA, 25 bp, Homo sapien
ggtcactgcgggatgtccacttcag

SEQ ID NO: 837151 - DNA, 25 bp, Homo sapien
ctgggatgtacaatgtctatgtcta

SEQ ID NO: 837152 - DNA, 25 bp, Homo sapien
tctgggatgtacaatgtctatgtct

SEQ ID NO: 837153 - DNA, 25 bp, Homo sapien
ctctgggatgtacaatgtctatgtc

SEQ ID NO: 837154 - DNA, 25 bp, Homo sapien
gtctatgtctatggcctgtctgtag

SEQ ID NO: 837155 - DNA, 25 bp, Homo sapien
acttttcatagacatgtgctctccc

SEQ ID NO: 837156 - DNA, 25 bp, Homo sapien
cttttcatagacatgtgctctcccc

SEQ ID NO: 837157 - DNA, 25 bp, Homo sapien
ttttcatagacatgtgctctcccca

SEQ ID NO: 837158 - DNA, 25 bp, Homo sapien
ggagggactgtgtgtcactattgct

SEQ ID NO: 837159 - DNA, 25 bp, Homo sapien
cagggagggactgtgtgtcactatt

SEQ ID NO: 837160 - DNA, 25 bp, Homo sapien
gggagggactgtgtgtcactattgc

SEQ ID NO: 837161 - DNA, 25 bp, Homo sapien
gagggactgtgtgtcactattgcta

SEQ ID NO: 837162 - DNA, 25 bp, Homo sapien
caaacccgtaaggagagtctgcaga

SEQ ID NO: 837163 - DNA, 25 bp, Homo sapien
ctccaagggcacagtagagatgttg

SEQ ID NO: 837164 - DNA, 25 bp, Homo sapien
caggcaacagttatccgagggacgc

SEQ ID NO: 837165 - DNA, 25 bp, Homo sapien
gagggacgcccctttgtccagagag

SEQ ID NO: 837166 - DNA, 25 bp, Homo sapien
tctgtgaattcaagacaacatgggt

SEQ ID NO: 837167 - DNA, 25 bp, Homo sapien
aactgcagctaagaccttgtccctg

SEQ ID NO: 837168 - DNA, 25 bp, Homo sapien
tccacatgtccgttctgagaaaaga

SEQ ID NO: 837169 - DNA, 25 bp, Homo sapien
tatagttgcagatcttcgaacgcca

SEQ ID NO: 837170 - DNA, 25 bp, Homo sapien
agaactactggtcttattgtacact

SEQ ID NO: 837171 - DNA, 25 bp, Homo sapien
tgtacacttgctgtacctattttta

SEQ ID NO: 837172 - DNA, 25 bp, Homo sapien
tctgaaaaatgggtagagttctgaa

SEQ ID NO: 837173 - DNA, 25 bp, Homo sapien
aatgggtagagttctgaaggagaac

SEQ ID NO: 837174 - DNA, 25 bp, Homo sapien
tttattttagttggtatctctgctg

SEQ ID NO: 837175 - DNA, 25 bp, Homo sapien
tattctctctgacatggtcactctg

SEQ ID NO: 837176 - DNA, 25 bp, Homo sapien
cactggaagaaggtattcatcatca

SEQ ID NO: 837177 - DNA, 25 bp, Homo sapien
tctgctgctgtatatttgggcccaa

SEQ ID NO: 837178 - DNA, 25 bp, Homo sapien
cgtcctttccatcgagttgcttcaa

SEQ ID NO: 837179 - DNA, 25 bp, Homo sapien
catcgagttgcttcaactgattcat

SEQ ID NO: 837180 - DNA, 25 bp, Homo sapien
tgccacaaatgctatgcacagttct

SEQ ID NO: 837181 - DNA, 25 bp, Homo sapien
atggtctgcagcttgaatcctttcc

SEQ ID NO: 837182 - DNA, 25 bp, Homo sapien
gtccatttaagggttgtgtgtgtcc

SEQ ID NO: 837183 - DNA, 25 bp, Homo sapien
agtagtttaatagagcagcccttcc

SEQ ID NO: 837184 - DNA, 25 bp, Homo sapien
agtaagtactcactgactgccgggc

SEQ ID NO: 837185 - DNA, 25 bp, Homo sapien
tggtggaccttatgtcattttcagg

SEQ ID NO: 837186 - DNA, 25 bp, Homo sapien
ctcaaagccagccaaaccgaggtca

SEQ ID NO: 837187 - DNA, 25 bp, Homo sapien
gaatctacagcaacattctgggagc

SEQ ID NO: 837188 - DNA, 25 bp, Homo sapien
cagtgagttcacaatccactgactc

SEQ ID NO: 837189 - DNA, 25 bp, Homo sapien
tccgggccatgtccttccgcattgg

SEQ ID NO: 837190 - DNA, 25 bp, Homo sapien
ctcactacaggctgcacgaagtcct

SEQ ID NO: 837191 - DNA, 25 bp, Homo sapien
cactccctcactacaggctgcacga

SEQ ID NO: 837192 - DNA, 25 bp, Homo sapien
actccctcactacaggctgcacgaa

SEQ ID NO: 837193 - DNA, 25 bp, Homo sapien
tccctcactacaggctgcacgaagt

SEQ ID NO: 837194 - DNA, 25 bp, Homo sapien
ggtgttattgggctctctgtcttgg

SEQ ID NO: 837195 - DNA, 25 bp, Homo sapien
ggcagtgacactgagtttggtgtta

SEQ ID NO: 837196 - DNA, 25 bp, Homo sapien
tgctacaccagtgccaccttaggta

SEQ ID NO: 837197 - DNA, 25 bp, Homo sapien
gatggcaactggagtatcttcgtgt

SEQ ID NO: 837198 - DNA, 25 bp, Homo sapien
tcttgaggcttaacattccaaagtg

SEQ ID NO: 837199 - DNA, 25 bp, Homo sapien
tatgatcaatattctcccatggctc

SEQ ID NO: 837200 - DNA, 25 bp, Homo sapien
tttacttgtgacttttcccaatgcc

SEQ ID NO: 837201 - DNA, 25 bp, Homo sapien
ggctctcatggctgctaatggctat

SEQ ID NO: 837202 - DNA, 25 bp, Homo sapien
gacagctctgacattgtgggggcag

SEQ ID NO: 837203 - DNA, 25 bp, Homo sapien
ccagtggggtagagggaccctctct

SEQ ID NO: 837204 - DNA, 25 bp, Homo sapien
tgcagccaggtttaaatacatccag

SEQ ID NO: 837205 - DNA, 25 bp, Homo sapien
gagaattcaaaggaactcaggtcac

SEQ ID NO: 837206 - DNA, 25 bp, Homo sapien
cagaatctcttggagactttcctaa

SEQ ID NO: 837207 - DNA, 25 bp, Homo sapien
aagtgggccctacctggtgactggc

SEQ ID NO: 837208 - DNA, 25 bp, Homo sapien
tgagcagctgctgatgaccagattc

SEQ ID NO: 837209 - DNA, 25 bp, Homo sapien
gaccagattctacctgtggctgaga

SEQ ID NO: 837210 - DNA, 25 bp, Homo sapien
tctagggagccaacgacatagagag

SEQ ID NO: 837211 - DNA, 25 bp, Homo sapien
ggtcagtgagattggctctgtctcc

SEQ ID NO: 837212 - DNA, 25 bp, Homo sapien
ggtcagcatgttgaatcccaacttc

SEQ ID NO: 837213 - DNA, 25 bp, Homo sapien
gatcatgactgggtcagcatgttga

SEQ ID NO: 837214 - DNA, 25 bp, Homo sapien
ttacagcttctttactcttgctgga

SEQ ID NO: 837215 - DNA, 25 bp, Homo sapien
atttacagcttctttactcttgctg

SEQ ID NO: 837216 - DNA, 25 bp, Homo sapien
agcacatcagcgaggctctgaccca

SEQ ID NO: 837217 - DNA, 25 bp, Homo sapien
cccaagcacatcagcgaggctctga

SEQ ID NO: 837218 - DNA, 25 bp, Homo sapien
tccccaagcacatcagcgaggctct

SEQ ID NO: 837219 - DNA, 25 bp, Homo sapien
aagcacatcagcgaggctctgaccc

SEQ ID NO: 837220 - DNA, 25 bp, Homo sapien
gagtctctgtagccctgcgtgactg

SEQ ID NO: 837221 - DNA, 25 bp, Homo sapien
ctctgtagccctgcgtgactgctca

SEQ ID NO: 837222 - DNA, 25 bp, Homo sapien
tgtagccctgcgtgactgctcaggc

SEQ ID NO: 837223 - DNA, 25 bp, Homo sapien
tagccctgcgtgactgctcaggctc

SEQ ID NO: 837224 - DNA, 25 bp, Homo sapien
cagcagcaatgtgccccgaaagcat

SEQ ID NO: 837225 - DNA, 25 bp, Homo sapien
gcaatgtgccccgaaagcatggcac

SEQ ID NO: 837226 - DNA, 25 bp, Homo sapien
aatgtgccccgaaagcatggcacaa

SEQ ID NO: 837227 - DNA, 25 bp, Homo sapien
aagcagcagcaatgtgccccgaaag

SEQ ID NO: 837228 - DNA, 25 bp, Homo sapien
ctctgcatggagcggcatttccttc

SEQ ID NO: 837229 - DNA, 25 bp, Homo sapien
gcatggagcggcatttccttcttgc

SEQ ID NO: 837230 - DNA, 25 bp, Homo sapien
tgcatggagcggcatttccttcttg

SEQ ID NO: 837231 - DNA, 25 bp, Homo sapien
cagagacagtgcctgtctgctcctc

SEQ ID NO: 837232 - DNA, 25 bp, Homo sapien
gagaagccaggctcgcgagagccca

SEQ ID NO: 837233 - DNA, 25 bp, Homo sapien
tttcaaagaaataagcctcccagtc

SEQ ID NO: 837234 - DNA, 25 bp, Homo sapien
aaataagcctcccagtcaaacacgc

SEQ ID NO: 837235 - DNA, 25 bp, Homo sapien
aaggagaagccaggctcgcgagagc

SEQ ID NO: 837236 - DNA, 25 bp, Homo sapien
tgactccggacactaagcctcactg

SEQ ID NO: 837237 - DNA, 25 bp, Homo sapien
gactccggacactaagcctcactgg

SEQ ID NO: 837238 - DNA, 25 bp, Homo sapien
actccggacactaagcctcactggg

SEQ ID NO: 837239 - DNA, 25 bp, Homo sapien
tgaccgcgtcccaagtggtgttctg

SEQ ID NO: 837240 - DNA, 25 bp, Homo sapien
tgttgtaacggcagcgtggaccagc

SEQ ID NO: 837241 - DNA, 25 bp, Homo sapien
gatgcctggcaaagacggaaatgag

SEQ ID NO: 837242 - DNA, 25 bp, Homo sapien
atgaggagacacacgatgaccgcgt

SEQ ID NO: 837243 - DNA, 25 bp, Homo sapien
gggtgtgctgtgctccttgggaaca

SEQ ID NO: 837244 - DNA, 25 bp, Homo sapien
agaccacagcccgtgctgcactcca

SEQ ID NO: 837245 - DNA, 25 bp, Homo sapien
ggtcacaccacggaagcctccaatg

SEQ ID NO: 837246 - DNA, 25 bp, Homo sapien
caatgccacggacatggcctgctgg

SEQ ID NO: 837247 - DNA, 25 bp, Homo sapien
tgggcttcggcaccctcttggaccc

SEQ ID NO: 837248 - DNA, 25 bp, Homo sapien
ttagtgcatcctccacaggcatgca

SEQ ID NO: 837249 - DNA, 25 bp, Homo sapien
cttggacccctgaggctttagtgca

SEQ ID NO: 837250 - DNA, 25 bp, Homo sapien
tgaggctttagtgcatcctccacag

SEQ ID NO: 837251 - DNA, 25 bp, Homo sapien
aaggtctctgcactctcagccacac

SEQ ID NO: 837252 - DNA, 25 bp, Homo sapien
caaggtctctgcactctcagccaca

SEQ ID NO: 837253 - DNA, 25 bp, Homo sapien
tcaaggtctctgcactctcagccac

SEQ ID NO: 837254 - DNA, 25 bp, Homo sapien
ttcctctcttcttaacagtcaagag

SEQ ID NO: 837255 - DNA, 25 bp, Homo sapien
cttcttaacagtcaagagcatcttg

SEQ ID NO: 837256 - DNA, 25 bp, Homo sapien
cgagggctcaaaaaagcagccccaa

SEQ ID NO: 837257 - DNA, 25 bp, Homo sapien
caaggagcaccgccagaattcctct

SEQ ID NO: 837258 - DNA, 25 bp, Homo sapien
gcccaagttcatggaggctgatttc

SEQ ID NO: 837259 - DNA, 25 bp, Homo sapien
tgaggaatcaggtggtgtggcctgg

SEQ ID NO: 837260 - DNA, 25 bp, Homo sapien
cctgccatggtggacagcgctggat

SEQ ID NO: 837261 - DNA, 25 bp, Homo sapien
aatcaactgccagacttcaggtgcc

SEQ ID NO: 837262 - DNA, 25 bp, Homo sapien
agggccacaagctgggcaaagggga

SEQ ID NO: 837263 - DNA, 25 bp, Homo sapien
gcagggccacaagctgggcaaaggg

SEQ ID NO: 837264 - DNA, 25 bp, Homo sapien
caggcagggccacaagctgggcaaa

SEQ ID NO: 837265 - DNA, 25 bp, Homo sapien
gcaggcagggccacaagctgggcaa

SEQ ID NO: 837266 - DNA, 25 bp, Homo sapien
gtccgcctgaggctacatccccagg

SEQ ID NO: 837267 - DNA, 25 bp, Homo sapien
ccaatgaccggatctggggcccaag

SEQ ID NO: 837268 - DNA, 25 bp, Homo sapien
cctcattgaggtgaccgctgagcct

SEQ ID NO: 837269 - DNA, 25 bp, Homo sapien
agaggctctgcatgggtccgcctga

SEQ ID NO: 837270 - DNA, 25 bp, Homo sapien
ctggccagtgacatggccaccacac

SEQ ID NO: 837271 - DNA, 25 bp, Homo sapien
cctccacctgcaaggggaatctggc

SEQ ID NO: 837272 - DNA, 25 bp, Homo sapien
ctccacctgcaaggggaatctggct

SEQ ID NO: 837273 - DNA, 25 bp, Homo sapien
ggaatctggctcatatgtgctggcc

SEQ ID NO: 837274 - DNA, 25 bp, Homo sapien
tgaagattccattaaccagcaggag

SEQ ID NO: 837275 - DNA, 25 bp, Homo sapien
taattcctcgtgatcccctgagctg

SEQ ID NO: 837276 - DNA, 25 bp, Homo sapien
tcttagaggactgtggccacttcac

SEQ ID NO: 837277 - DNA, 25 bp, Homo sapien
cccatttgtctgaaacagaagtcgt

SEQ ID NO: 837278 - DNA, 25 bp, Homo sapien
ctggatcctttcagcctgtgacccc

SEQ ID NO: 837279 - DNA, 25 bp, Homo sapien
ttatatgccagctcccttttgctct

SEQ ID NO: 837280 - DNA, 25 bp, Homo sapien
ctcccttttgctctaatcctgtcct

SEQ ID NO: 837281 - DNA, 25 bp, Homo sapien
tatatgccagctcccttttgctcta

SEQ ID NO: 837282 - DNA, 25 bp, Homo sapien
ccttttgctctaatcctgtcctcac

SEQ ID NO: 837283 - DNA, 25 bp, Homo sapien
gaaagctgctatggcctaggaccag

SEQ ID NO: 837284 - DNA, 25 bp, Homo sapien
tatttgccgaccttggagcacagag

SEQ ID NO: 837285 - DNA, 25 bp, Homo sapien
gcatgtgctcaagctgtccaaagtt

SEQ ID NO: 837286 - DNA, 25 bp, Homo sapien
tcattgcaaggataagagactttcc

SEQ ID NO: 837287 - DNA, 25 bp, Homo sapien
taatattttctgtaggttctagcta

SEQ ID NO: 837288 - DNA, 25 bp, Homo sapien
tcaatagccttttggtagatacaca

SEQ ID NO: 837289 - DNA, 25 bp, Homo sapien
tttgcagatgttaagattatccaca

SEQ ID NO: 837290 - DNA, 25 bp, Homo sapien
gatgttggatgcaagagcaacacag

SEQ ID NO: 837291 - DNA, 25 bp, Homo sapien
catctccaagtttacgtccatcatc

SEQ ID NO: 837292 - DNA, 25 bp, Homo sapien
ttacgtccatcatcccagtatgcca

SEQ ID NO: 837293 - DNA, 25 bp, Homo sapien
caagtttacgtccatcatcccagta

SEQ ID NO: 837294 - DNA, 25 bp, Homo sapien
tcccagtatgccaccccacagtgtg

SEQ ID NO: 837295 - DNA, 25 bp, Homo sapien
agctcctcggcttggaaactctgca

SEQ ID NO: 837296 - DNA, 25 bp, Homo sapien
ttccaccagctcctcggcttggaaa

SEQ ID NO: 837297 - DNA, 25 bp, Homo sapien
ccagctcctcggcttggaaactctg

SEQ ID NO: 837298 - DNA, 25 bp, Homo sapien
caccagctcctcggcttggaaactc

SEQ ID NO: 837299 - DNA, 25 bp, Homo sapien
ctccaggggaagattcctacatcca

SEQ ID NO: 837300 - DNA, 25 bp, Homo sapien
ccacctccaggggaagattcctaca

SEQ ID NO: 837301 - DNA, 25 bp, Homo sapien
ccacatctttcttgcaaactcccca

SEQ ID NO: 837302 - DNA, 25 bp, Homo sapien
ggaagattcctacatccacatcttt

SEQ ID NO: 837303 - DNA, 25 bp, Homo sapien
gctgtgggctcattatgtcaaagga

SEQ ID NO: 837304 - DNA, 25 bp, Homo sapien
tgaagttgtctgcttgtgaacgaga

SEQ ID NO: 837305 - DNA, 25 bp, Homo sapien
tgtatgctttcataaggctgtgggc

SEQ ID NO: 837306 - DNA, 25 bp, Homo sapien
gccacgtagtgaatgaacttgacaa

SEQ ID NO: 837307 - DNA, 25 bp, Homo sapien
cagcacatcccagatcgtcaggatc

SEQ ID NO: 837308 - DNA, 25 bp, Homo sapien
tcccagatcgtcaggatcttcaggg

SEQ ID NO: 837309 - DNA, 25 bp, Homo sapien
cagtaacgctcctggttgacgggga

SEQ ID NO: 837310 - DNA, 25 bp, Homo sapien
ggagcagggtgtagccagcacatcc

SEQ ID NO: 837311 - DNA, 25 bp, Homo sapien
tttgtgtcagtctcctgacattgtt

SEQ ID NO: 837312 - DNA, 25 bp, Homo sapien
gtcagtctcctgacattgttttact

SEQ ID NO: 837313 - DNA, 25 bp, Homo sapien
tgcttttgtgtcagtctcctgacat

SEQ ID NO: 837314 - DNA, 25 bp, Homo sapien
ttgaaaggatttgcttttgtgtcag

SEQ ID NO: 837315 - DNA, 25 bp, Homo sapien
gagagtgccctcctacataaataag

SEQ ID NO: 837316 - DNA, 25 bp, Homo sapien
gacgcagttgggtttctcataagta

SEQ ID NO: 837317 - DNA, 25 bp, Homo sapien
catatctttctaagcggtaatggag

SEQ ID NO: 837318 - DNA, 25 bp, Homo sapien
tgtggaagctgcaaacaagtaggcc

SEQ ID NO: 837319 - DNA, 25 bp, Homo sapien
tagtgtactaacaaagtctcccttg

SEQ ID NO: 837320 - DNA, 25 bp, Homo sapien
gtaatgcagtagaggctatttcgcc

SEQ ID NO: 837321 - DNA, 25 bp, Homo sapien
tagaatagactgaccaagatggttc

SEQ ID NO: 837322 - DNA, 25 bp, Homo sapien
tggtactacatgcattagcgaaagg

SEQ ID NO: 837323 - DNA, 25 bp, Homo sapien
tgctgtcttaatgcagcctattaag

SEQ ID NO: 837324 - DNA, 25 bp, Homo sapien
gcagcctattaagagttgggttaaa

SEQ ID NO: 837325 - DNA, 25 bp, Homo sapien
aattttgctgtcttaatgcagccta

SEQ ID NO: 837326 - DNA, 25 bp, Homo sapien
cttaatgcagcctattaagagttgg

SEQ ID NO: 837327 - DNA, 25 bp, Homo sapien
aatctattatcaagaacagtcaccc

SEQ ID NO: 837328 - DNA, 25 bp, Homo sapien
atagcattctacagcagggttaatc

SEQ ID NO: 837329 - DNA, 25 bp, Homo sapien
tcacttacaactagcctaaccctgt

SEQ ID NO: 837330 - DNA, 25 bp, Homo sapien
caagttttactgatcagttgctggt

SEQ ID NO: 837331 - DNA, 25 bp, Homo sapien
gaaaagatgactggcctagttgcag

SEQ ID NO: 837332 - DNA, 25 bp, Homo sapien
gctttttcatcgaggtggtgcccca

SEQ ID NO: 837333 - DNA, 25 bp, Homo sapien
caacaggaaaagctgggcaccaggt

SEQ ID NO: 837334 - DNA, 25 bp, Homo sapien
caccaggttgagaagagattgagct

SEQ ID NO: 837335 - DNA, 25 bp, Homo sapien
gcctatgtatgtagcaggaagtcga

SEQ ID NO: 837336 - DNA, 25 bp, Homo sapien
caaggaagggatagggccaaatata

SEQ ID NO: 837337 - DNA, 25 bp, Homo sapien
taaagttatagctcaaatatcagca

SEQ ID NO: 837338 - DNA, 25 bp, Homo sapien
tagtggtgagctaaaggcctatgta

SEQ ID NO: 837339 - DNA, 25 bp, Homo sapien
tcttgcagagaggccgtactaatct

SEQ ID NO: 837340 - DNA, 25 bp, Homo sapien
agagaggccgtactaatcttctgta

SEQ ID NO: 837341 - DNA, 25 bp, Homo sapien
agaggccgtactaatcttctgtata

SEQ ID NO: 837342 - DNA, 25 bp, Homo sapien
gcagagaggccgtactaatcttctg

SEQ ID NO: 837343 - DNA, 25 bp, Homo sapien
tgcagtcaatcaggctggtcacagg

SEQ ID NO: 837344 - DNA, 25 bp, Homo sapien
cagtcaatcaggctggtcacaggcc

SEQ ID NO: 837345 - DNA, 25 bp, Homo sapien
ctgcagtcaatcaggctggtcacag

SEQ ID NO: 837346 - DNA, 25 bp, Homo sapien
tcaatcaggctggtcacaggccaag

SEQ ID NO: 837347 - DNA, 25 bp, Homo sapien
agtgtacctttctatttatttctat

SEQ ID NO: 837348 - DNA, 25 bp, Homo sapien
acccgccattctcctgcttcagcct

SEQ ID NO: 837349 - DNA, 25 bp, Homo sapien
cacccgccattctcctgcttcagcc

SEQ ID NO: 837350 - DNA, 25 bp, Homo sapien
tctcttcctgccctacagatggctg

SEQ ID NO: 837351 - DNA, 25 bp, Homo sapien
gcatggtcaagttctggtgagggct

SEQ ID NO: 837352 - DNA, 25 bp, Homo sapien
ggctctcttcctgccctacagatgg

SEQ ID NO: 837353 - DNA, 25 bp, Homo sapien
agggctctcttcctgccctacagat

SEQ ID NO: 837354 - DNA, 25 bp, Homo sapien
catgtgatatctcacagctgacccc

SEQ ID NO: 837355 - DNA, 25 bp, Homo sapien
ctttaacaggatggcagtcagtctg

SEQ ID NO: 837356 - DNA, 25 bp, Homo sapien
cagtctgatcatgtgatatctcaca

SEQ ID NO: 837357 - DNA, 25 bp, Homo sapien
tcagtctggtcaggcagtcagtctg

SEQ ID NO: 837358 - DNA, 25 bp, Homo sapien
ggcatgccataaatctgcgagatga

SEQ ID NO: 837359 - DNA, 25 bp, Homo sapien
catcataaggtactttttctgtagg

SEQ ID NO: 837360 - DNA, 25 bp, Homo sapien
cataaatctgcgagatgaactgtga

SEQ ID NO: 837361 - DNA, 25 bp, Homo sapien
tgtaggcatgccataaatctgcgag

SEQ ID NO: 837362 - DNA, 25 bp, Homo sapien
aattatcctgaactttcctgtcacc

SEQ ID NO: 837363 - DNA, 25 bp, Homo sapien
cttgttgcactgtcgtgttccccaa

SEQ ID NO: 837364 - DNA, 25 bp, Homo sapien
cccaaattatcctgaactttcctgt

SEQ ID NO: 837365 - DNA, 25 bp, Homo sapien
cactgtcgtgttccccaaattatcc

SEQ ID NO: 837366 - DNA, 25 bp, Homo sapien
gacagcgttcatccgtgtcttccag

SEQ ID NO: 837367 - DNA, 25 bp, Homo sapien
taattattccatcgcctgcccggag

SEQ ID NO: 837368 - DNA, 25 bp, Homo sapien
caggcacataaatagcgccattaat

SEQ ID NO: 837369 - DNA, 25 bp, Homo sapien
ctttggaatgatctgacagcgttca

SEQ ID NO: 837370 - DNA, 25 bp, Homo sapien
tgcctattagcagatcccacaccat

SEQ ID NO: 837371 - DNA, 25 bp, Homo sapien
taataacccttccaacagctgtcga

SEQ ID NO: 837372 - DNA, 25 bp, Homo sapien
tctgtcggagaagcacataggcacg

SEQ ID NO: 837373 - DNA, 25 bp, Homo sapien
ctttgtgaagcctgactctgtcgga

SEQ ID NO: 837374 - DNA, 25 bp, Homo sapien
caatctgaaataggcaatagaagtg

SEQ ID NO: 837375 - DNA, 25 bp, Homo sapien
atctgaaataggcaatagaagtgga

SEQ ID NO: 837376 - DNA, 25 bp, Homo sapien
tcaaattgatggcaaatagaagtac

SEQ ID NO: 837377 - DNA, 25 bp, Homo sapien
tggcaaatagaagtacaagttaatt

SEQ ID NO: 837378 - DNA, 25 bp, Homo sapien
tgaattcagcgtccataacaatggc

SEQ ID NO: 837379 - DNA, 25 bp, Homo sapien
gccactgaattcagcgtccataaca

SEQ ID NO: 837380 - DNA, 25 bp, Homo sapien
gcgtccataacaatggctttcatga

SEQ ID NO: 837381 - DNA, 25 bp, Homo sapien
tccacatgtgccactgaattcagcg

SEQ ID NO: 837382 - DNA, 25 bp, Homo sapien
gggaaggtctcacgatcacggcaga

SEQ ID NO: 837383 - DNA, 25 bp, Homo sapien
aggtctcacgatcacggcagagggt

SEQ ID NO: 837384 - DNA, 25 bp, Homo sapien
gagggtgaaagagaattcttacatg

SEQ ID NO: 837385 - DNA, 25 bp, Homo sapien
gagggtgagagacaattcttacatt

SEQ ID NO: 837386 - DNA, 25 bp, Homo sapien
aagaataagccctaaaagagcgcct

SEQ ID NO: 837387 - DNA, 25 bp, Homo sapien
gaataagccctaaaagagcgcctga

SEQ ID NO: 837388 - DNA, 25 bp, Homo sapien
agaataagccctaaaagagcgcctg

SEQ ID NO: 837389 - DNA, 25 bp, Homo sapien
ataagccctaaaagagcgcctgaaa

SEQ ID NO: 837390 - DNA, 25 bp, Homo sapien
ggtgtacccctacatgaacatcctc

SEQ ID NO: 837391 - DNA, 25 bp, Homo sapien
tcctcactcggcttggactccattg

SEQ ID NO: 837392 - DNA, 25 bp, Homo sapien
atgaacatcctcctcactcggcttg

SEQ ID NO: 837393 - DNA, 25 bp, Homo sapien
tgcaccaggtgtacccctacatgaa

SEQ ID NO: 837394 - DNA, 25 bp, Homo sapien
cttgattgacccctcttagcttctg

SEQ ID NO: 837395 - DNA, 25 bp, Homo sapien
gtcacccattgtgtggatgcttgat

SEQ ID NO: 837396 - DNA, 25 bp, Homo sapien
tgtggatgcttgattgacccctctt

SEQ ID NO: 837397 - DNA, 25 bp, Homo sapien
ctcttagcttctgacaccctgtgct

SEQ ID NO: 837398 - DNA, 25 bp, Homo sapien
gaatttggcctccaaatttggactc

SEQ ID NO: 837399 - DNA, 25 bp, Homo sapien
tgcagctacaatgttgccaacgaac

SEQ ID NO: 837400 - DNA, 25 bp, Homo sapien
ttacacccgataacccatttgagga

SEQ ID NO: 837401 - DNA, 25 bp, Homo sapien
ctctgaagggttacaggtattggct

SEQ ID NO: 837402 - DNA, 25 bp, Homo sapien
cttgagcctaggaggtcaaggctgc

SEQ ID NO: 837403 - DNA, 25 bp, Homo sapien
tcctggctacttaggaagctgaggt

SEQ ID NO: 837404 - DNA, 25 bp, Homo sapien
ggtgagccatgatcacaccactgca

SEQ ID NO: 837405 - DNA, 25 bp, Homo sapien
ttaggaagctgaggtgaaaggatcg

SEQ ID NO: 837406 - DNA, 25 bp, Homo sapien
ttatcagatccttgtttttcagtgt

SEQ ID NO: 837407 - DNA, 25 bp, Homo sapien
ttttcagtgtctggagactctccaa

SEQ ID NO: 837408 - DNA, 25 bp, Homo sapien
agtgtctggagactctccaaaatac

SEQ ID NO: 837409 - DNA, 25 bp, Homo sapien
ctttatcagatccttgtttttcagt

SEQ ID NO: 837410 - DNA, 25 bp, Homo sapien
ccactagggagtttattgttacatc

SEQ ID NO: 837411 - DNA, 25 bp, Homo sapien
gagtcagagtgaggcttcctttcat

SEQ ID NO: 837412 - DNA, 25 bp, Homo sapien
gagtgaggcttcctttcatcccacc

SEQ ID NO: 837413 - DNA, 25 bp, Homo sapien
cctttgctgaagccaaccgcaaagc

SEQ ID NO: 837414 - DNA, 25 bp, Homo sapien
tctcctctaaatccgaagggttgcc

SEQ ID NO: 837415 - DNA, 25 bp, Homo sapien
gatcacccctggatatatctctgct

SEQ ID NO: 837416 - DNA, 25 bp, Homo sapien
tctgctcctccatgagctgtctgct

SEQ ID NO: 837417 - DNA, 25 bp, Homo sapien
agggttgccccccttccactctgat

SEQ ID NO: 837418 - DNA, 25 bp, Homo sapien
attcatcacctcaaccagatgcttc

SEQ ID NO: 837419 - DNA, 25 bp, Homo sapien
tcaaaatctgccatcgagaagcttc

SEQ ID NO: 837420 - DNA, 25 bp, Homo sapien
tatgtcaagtaccaaagctctatac

SEQ ID NO: 837421 - DNA, 25 bp, Homo sapien
gctctatacatacttagctttgaat

SEQ ID NO: 837422 - DNA, 25 bp, Homo sapien
taactctctacagcaactagacctg

SEQ ID NO: 837423 - DNA, 25 bp, Homo sapien
ctataactctctacagcaactagac

SEQ ID NO: 837424 - DNA, 25 bp, Homo sapien
tctctacagcaactagacctgcatc

SEQ ID NO: 837425 - DNA, 25 bp, Homo sapien
tctacagcaactagacctgcatcca

SEQ ID NO: 837426 - DNA, 25 bp, Homo sapien
tctttactggaactgctcgtggtga

SEQ ID NO: 837427 - DNA, 25 bp, Homo sapien
tacaaatgaccctttgcacttgaat

SEQ ID NO: 837428 - DNA, 25 bp, Homo sapien
gcacttgaatttgcacagttccttt

SEQ ID NO: 837429 - DNA, 25 bp, Homo sapien
caaagctttcagacaagataatttg

SEQ ID NO: 837430 - DNA, 25 bp, Homo sapien
tcaggttgctgaggataagagtcac

SEQ ID NO: 837431 - DNA, 25 bp, Homo sapien
gagtcacagccatgcgactcacacc

SEQ ID NO: 837432 - DNA, 25 bp, Homo sapien
gccatgcgactcacacctttaatca

SEQ ID NO: 837433 - DNA, 25 bp, Homo sapien
caggttgctgaggataagagtcaca

SEQ ID NO: 837434 - DNA, 25 bp, Homo sapien
tagcaaccgtccaaggaacattgtc

SEQ ID NO: 837435 - DNA, 25 bp, Homo sapien
tgacctctagcaaccgtccaaggaa

SEQ ID NO: 837436 - DNA, 25 bp, Homo sapien
cctctagcaaccgtccaaggaacat

SEQ ID NO: 837437 - DNA, 25 bp, Homo sapien
caatgacctctagcaaccgtccaag

SEQ ID NO: 837438 - DNA, 25 bp, Homo sapien
gcctgtaacgctaagctgtccattc

SEQ ID NO: 837439 - DNA, 25 bp, Homo sapien
actgttattgcctgtaacgctaagc

SEQ ID NO: 837440 - DNA, 25 bp, Homo sapien
gctgccttgttcactctccttggtc

SEQ ID NO: 837441 - DNA, 25 bp, Homo sapien
ccttggtcagatgtagtaatgccac

SEQ ID NO: 837442 - DNA, 25 bp, Homo sapien
tatcttagagatgacagatttccca

SEQ ID NO: 837443 - DNA, 25 bp, Homo sapien
taccctgctgtgacatagtaaatca

SEQ ID NO: 837444 - DNA, 25 bp, Homo sapien
tggcattgtgtccaatataccctgc

SEQ ID NO: 837445 - DNA, 25 bp, Homo sapien
tccataatgcagttaagggatgtca

SEQ ID NO: 837446 - DNA, 25 bp, Homo sapien
agggaggataactttgatacacaaa

SEQ ID NO: 837447 - DNA, 25 bp, Homo sapien
cttagggaggataactttgatacac

SEQ ID NO: 837448 - DNA, 25 bp, Homo sapien
ctgggggtggattataaactatatt

SEQ ID NO: 837449 - DNA, 25 bp, Homo sapien
ggggtggattataaactatatttgc

SEQ ID NO: 837450 - DNA, 25 bp, Homo sapien
tctgactctattggatggctgcaag

SEQ ID NO: 837451 - DNA, 25 bp, Homo sapien
ttcttgttggatctaagatgcttca

SEQ ID NO: 837452 - DNA, 25 bp, Homo sapien
gctgcaaggacttcccatcctttta

SEQ ID NO: 837453 - DNA, 25 bp, Homo sapien
caattttgagattactcttccaaga

SEQ ID NO: 837454 - DNA, 25 bp, Homo sapien
tttctaacagctctggagtgggtca

SEQ ID NO: 837455 - DNA, 25 bp, Homo sapien
ttctaacagctctggagtgggtcat

SEQ ID NO: 837456 - DNA, 25 bp, Homo sapien
tggaagtttgtgtttctaacagctc

SEQ ID NO: 837457 - DNA, 25 bp, Homo sapien
ctcttggaagtttgtgtttctaaca

SEQ ID NO: 837458 - DNA, 25 bp, Homo sapien
ctgcggccaataggcatgggcaatt

SEQ ID NO: 837459 - DNA, 25 bp, Homo sapien
gtaagagagaagtaaaacgcatagt

SEQ ID NO: 837460 - DNA, 25 bp, Homo sapien
cggccaataggcatgggcaattgaa

SEQ ID NO: 837461 - DNA, 25 bp, Homo sapien
gccaataggcatgggcaattgaagc

SEQ ID NO: 837462 - DNA, 25 bp, Homo sapien
tgttctcataagtacgggcagtgat

SEQ ID NO: 837463 - DNA, 25 bp, Homo sapien
ggagccctgacgtttctggacgata

SEQ ID NO: 837464 - DNA, 25 bp, Homo sapien
tggacgatatgcacagcacagatac

SEQ ID NO: 837465 - DNA, 25 bp, Homo sapien
caatgttctcataagtacgggcagt

SEQ ID NO: 837466 - DNA, 25 bp, Homo sapien
catccttggatcctgtggtatatat

SEQ ID NO: 837467 - DNA, 25 bp, Homo sapien
cccttcttgatttcacattcatcct

SEQ ID NO: 837468 - DNA, 25 bp, Homo sapien
cattcatccttggatcctgtggtat

SEQ ID NO: 837469 - DNA, 25 bp, Homo sapien
tcacattcatccttggatcctgtgg

SEQ ID NO: 837470 - DNA, 25 bp, Homo sapien
tggattatactacccaagaagaaga

SEQ ID NO: 837471 - DNA, 25 bp, Homo sapien
tgaagaccaaatgatgccaaagcat

SEQ ID NO: 837472 - DNA, 25 bp, Homo sapien
aaatgggagataaatcctgctcatc

SEQ ID NO: 837473 - DNA, 25 bp, Homo sapien
gctcatcattgataattgtagccca

SEQ ID NO: 837474 - DNA, 25 bp, Homo sapien
cccactgggaagtgcggagcgcctc

SEQ ID NO: 837475 - DNA, 25 bp, Homo sapien
ccactgggaagtgcggagcgcctct

SEQ ID NO: 837476 - DNA, 25 bp, Homo sapien
gacaaaagcgaggatgagtgcctgc

SEQ ID NO: 837477 - DNA, 25 bp, Homo sapien
tccatctgtatctgctgaaggtctc

SEQ ID NO: 837478 - DNA, 25 bp, Homo sapien
caggagcgcaaaaggacaaatggcc

SEQ ID NO: 837479 - DNA, 25 bp, Homo sapien
taggaggtcctaaatgtgcacttcc

SEQ ID NO: 837480 - DNA, 25 bp, Homo sapien
actgagtttgaagatctaaggccat

SEQ ID NO: 837481 - DNA, 25 bp, Homo sapien
actactcctcaagagccacagttct

SEQ ID NO: 837482 - DNA, 25 bp, Homo sapien
tcctcaagagccacagttctattct

SEQ ID NO: 837483 - DNA, 25 bp, Homo sapien
agagccacagttctattctagcttc

SEQ ID NO: 837484 - DNA, 25 bp, Homo sapien
tctattctagcttcatacacatatc

SEQ ID NO: 837485 - DNA, 25 bp, Homo sapien
gagagatggtgaggtgctgacggag

SEQ ID NO: 837486 - DNA, 25 bp, Homo sapien
cagtggccgcgactgtgaagaccgt

SEQ ID NO: 837487 - DNA, 25 bp, Homo sapien
ttggtgtttggtaagacagccctgg

SEQ ID NO: 837488 - DNA, 25 bp, Homo sapien
agacagccctggtcgtgatgaagag

SEQ ID NO: 837489 - DNA, 25 bp, Homo sapien
caccacgttggaaaatcttgatctg

SEQ ID NO: 837490 - DNA, 25 bp, Homo sapien
aagccgctggactggatggtctgca

SEQ ID NO: 837491 - DNA, 25 bp, Homo sapien
tctgcaaggactttcctagttctca

SEQ ID NO: 837492 - DNA, 25 bp, Homo sapien
tctcaaaaaagtcagcaccacgttg

SEQ ID NO: 837493 - DNA, 25 bp, Homo sapien
gagttgagttctagcccttactcca

SEQ ID NO: 837494 - DNA, 25 bp, Homo sapien
ggtaagagtccttatcctcactgct

SEQ ID NO: 837495 - DNA, 25 bp, Homo sapien
tcactgctctacgtctcagaggcca

SEQ ID NO: 837496 - DNA, 25 bp, Homo sapien
tactccactctgtaaccgggtaaga

SEQ ID NO: 837497 - DNA, 25 bp, Homo sapien
cattccatcatttgagcattgagaa

SEQ ID NO: 837498 - DNA, 25 bp, Homo sapien
taaacacgtaaatcattccccaagc

SEQ ID NO: 837499 - DNA, 25 bp, Homo sapien
tctggcagtaatctaaaaatctagc

SEQ ID NO: 837500 - DNA, 25 bp, Homo sapien
gattgagcagaacaaaaaaccatca

SEQ ID NO: 837501 - DNA, 25 bp, Homo sapien
tcttggccacttttctgacacttgt

SEQ ID NO: 837502 - DNA, 25 bp, Homo sapien
tcatcctggtccagtgcaaacagcg

SEQ ID NO: 837503 - DNA, 25 bp, Homo sapien
tgctgtccggacactgggtctggtt

SEQ ID NO: 837504 - DNA, 25 bp, Homo sapien
cagcgtatcatagtcaggctcacaa

SEQ ID NO: 837505 - DNA, 25 bp, Homo sapien
tagaggcagctgaagacactacagg

SEQ ID NO: 837506 - DNA, 25 bp, Homo sapien
taatgctgcagactgagagaagctc

SEQ ID NO: 837507 - DNA, 25 bp, Homo sapien
tcaataacccgccttctgtgcagta

SEQ ID NO: 837508 - DNA, 25 bp, Homo sapien
cactacagggaatcatgggtctttt

SEQ ID NO: 837509 - DNA, 25 bp, Homo sapien
cgcctcctctctttactcttaattt

SEQ ID NO: 837510 - DNA, 25 bp, Homo sapien
gatctgcccgcctcctctctttact

SEQ ID NO: 837511 - DNA, 25 bp, Homo sapien
tctgcccgcctcctctctttactct

SEQ ID NO: 837512 - DNA, 25 bp, Homo sapien
gcccgcctcctctctttactcttaa

SEQ ID NO: 837513 - DNA, 25 bp, Homo sapien
taatgaccgatatcccttaactcag

SEQ ID NO: 837514 - DNA, 25 bp, Homo sapien
gccttatgttcagttgcaaaattgc

SEQ ID NO: 837515 - DNA, 25 bp, Homo sapien
ctagtaatgaccgatatcccttaac

SEQ ID NO: 837516 - DNA, 25 bp, Homo sapien
tcagagccccttagagccttatgtt

SEQ ID NO: 837517 - DNA, 25 bp, Homo sapien
aaagcgtggtgctcgtggaacagct

SEQ ID NO: 837518 - DNA, 25 bp, Homo sapien
ccaatgggctccgtagaaggtatta

SEQ ID NO: 837519 - DNA, 25 bp, Homo sapien
gatctgtctgaacgtgggagccaat

SEQ ID NO: 837520 - DNA, 25 bp, Homo sapien
catgccggagagatgagcgtgcaca

SEQ ID NO: 837521 - DNA, 25 bp, Homo sapien
cactcctctcttattacccagatct

SEQ ID NO: 837522 - DNA, 25 bp, Homo sapien
caggcccactcctctcttattaccc

SEQ ID NO: 837523 - DNA, 25 bp, Homo sapien
ggcccactcctctcttattacccag

SEQ ID NO: 837524 - DNA, 25 bp, Homo sapien
tcctctcttattacccagatcttct

SEQ ID NO: 837525 - DNA, 25 bp, Homo sapien
gaaccaggttcacataagcagtcct

SEQ ID NO: 837526 - DNA, 25 bp, Homo sapien
ccaggttcacataagcagtccttac

SEQ ID NO: 837527 - DNA, 25 bp, Homo sapien
tagaaccaggttcacataagcagtc

SEQ ID NO: 837528 - DNA, 25 bp, Homo sapien
ctagaaccaggttcacataagcagt

SEQ ID NO: 837529 - DNA, 25 bp, Homo sapien
taacagcagcctccatacgtaaata

SEQ ID NO: 837530 - DNA, 25 bp, Homo sapien
taaggataggcctgtgatatgttcc

SEQ ID NO: 837531 - DNA, 25 bp, Homo sapien
tgtaacagcagcctccatacgtaaa

SEQ ID NO: 837532 - DNA, 25 bp, Homo sapien
tacgtaaatataaggataggcctgt

SEQ ID NO: 837533 - DNA, 25 bp, Homo sapien
ttttcactaattggatttgcctcac

SEQ ID NO: 837534 - DNA, 25 bp, Homo sapien
aaattggatacaagtttctctgata

SEQ ID NO: 837535 - DNA, 25 bp, Homo sapien
gcctcactctctccattggaggagg

SEQ ID NO: 837536 - DNA, 25 bp, Homo sapien
aaggccaagcagcatccaagtactc

SEQ ID NO: 837537 - DNA, 25 bp, Homo sapien
ctagctgacactgtagctggtaata

SEQ ID NO: 837538 - DNA, 25 bp, Homo sapien
tttgactgaggtcttaaggctctga

SEQ ID NO: 837539 - DNA, 25 bp, Homo sapien
taaggctctgaatcttgactagctg

SEQ ID NO: 837540 - DNA, 25 bp, Homo sapien
cggatgttgattacagctgatagaa

SEQ ID NO: 837541 - DNA, 25 bp, Homo sapien
gctggtcactttgatgaaggagcaa

SEQ ID NO: 837542 - DNA, 25 bp, Homo sapien
agaaatgaggtgctggtcactttga

SEQ ID NO: 837543 - DNA, 25 bp, Homo sapien
caaattcgagttggctgtgctggga

SEQ ID NO: 837544 - DNA, 25 bp, Homo sapien
gctgggattggtcagcattttcaat

SEQ ID NO: 837545 - DNA, 25 bp, Homo sapien
tgctctctctttagtgtaaccctct

SEQ ID NO: 837546 - DNA, 25 bp, Homo sapien
tctctctttagtgtaaccctctcca

SEQ ID NO: 837547 - DNA, 25 bp, Homo sapien
catgctctctctttagtgtaaccct

SEQ ID NO: 837548 - DNA, 25 bp, Homo sapien
ttcatgctctctctttagtgtaacc

SEQ ID NO: 837549 - DNA, 25 bp, Homo sapien
cattcctttttacagtgacacggca

SEQ ID NO: 837550 - DNA, 25 bp, Homo sapien
tatgcccattggtttgaagcctatt

SEQ ID NO: 837551 - DNA, 25 bp, Homo sapien
gctctgacatatagtaatcctgata

SEQ ID NO: 837552 - DNA, 25 bp, Homo sapien
tcctggaagttactccatatcagct

SEQ ID NO: 837553 - DNA, 25 bp, Homo sapien
ctgaagagttaataagagatctgca

SEQ ID NO: 837554 - DNA, 25 bp, Homo sapien
gttaataagagatctgcaaagttcc

SEQ ID NO: 837555 - DNA, 25 bp, Homo sapien
ttaataagagatctgcaaagttcct

SEQ ID NO: 837556 - DNA, 25 bp, Homo sapien
agagttaataagagatctgcaaagt

SEQ ID NO: 837557 - DNA, 25 bp, Homo sapien
cgttggtgatggtaatccagttttc

SEQ ID NO: 837558 - DNA, 25 bp, Homo sapien
cacagttcctagacgttggtgatgg

SEQ ID NO: 837559 - DNA, 25 bp, Homo sapien
tagaattcttgagatcactggtagt

SEQ ID NO: 837560 - DNA, 25 bp, Homo sapien
gatcactggtagtgcaaatgcacat

SEQ ID NO: 837561 - DNA, 25 bp, Homo sapien
gccaggatgttagatatcaatagcc

SEQ ID NO: 837562 - DNA, 25 bp, Homo sapien
tttacccctttaaatgaagctggca

SEQ ID NO: 837563 - DNA, 25 bp, Homo sapien
cagttcctcccatcgaaggtgaata

SEQ ID NO: 837564 - DNA, 25 bp, Homo sapien
gtcccacgtcttctaggcattccag

SEQ ID NO: 837565 - DNA, 25 bp, Homo sapien
gtacaatattcaaaccccaagctgg

SEQ ID NO: 837566 - DNA, 25 bp, Homo sapien
ttggccaatggtaacctcttcaggg

SEQ ID NO: 837567 - DNA, 25 bp, Homo sapien
tacttctatgaagaggcgtgtctgt

SEQ ID NO: 837568 - DNA, 25 bp, Homo sapien
tggtgtcattcaacatgctcctgta

SEQ ID NO: 837569 - DNA, 25 bp, Homo sapien
tgccattgggtaaagggaaaagcaa

SEQ ID NO: 837570 - DNA, 25 bp, Homo sapien
gcatgcaggtgcaccacttgccatt

SEQ ID NO: 837571 - DNA, 25 bp, Homo sapien
ggtgcaccacttgccattgggtaaa

SEQ ID NO: 837572 - DNA, 25 bp, Homo sapien
acctggcatgcaggtgcaccacttg

SEQ ID NO: 837573 - DNA, 25 bp, Homo sapien
tgcttttctgtggaataaattaact

SEQ ID NO: 837574 - DNA, 25 bp, Homo sapien
catctgataccaggtgcagaaacaa

SEQ ID NO: 837575 - DNA, 25 bp, Homo sapien
tgtggattcatctgataccaggtgc

SEQ ID NO: 837576 - DNA, 25 bp, Homo sapien
ctctgatgagagttgtggattcatc

SEQ ID NO: 837577 - DNA, 25 bp, Homo sapien
attttctgattttgtaaattcccat

SEQ ID NO: 837578 - DNA, 25 bp, Homo sapien
ctttctatcaaacattttctgattt

SEQ ID NO: 837579 - DNA, 25 bp, Homo sapien
tcaaacattttctgattttgtaaat

SEQ ID NO: 837580 - DNA, 25 bp, Homo sapien
tgattttgtaaattcccatttttca

SEQ ID NO: 837581 - DNA, 25 bp, Homo sapien
agagtccgtaatgagagatctccct

SEQ ID NO: 837582 - DNA, 25 bp, Homo sapien
agtcctcctgggtactggtgggtca

SEQ ID NO: 837583 - DNA, 25 bp, Homo sapien
gcttctgcatggtgaaagtcctcct

SEQ ID NO: 837584 - DNA, 25 bp, Homo sapien
cctttgctacaagggagagtccgta

SEQ ID NO: 837585 - DNA, 25 bp, Homo sapien
atctcgcctgcttcctacacctaac

SEQ ID NO: 837586 - DNA, 25 bp, Homo sapien
ttggatgtggcctttatagccatcc

SEQ ID NO: 837587 - DNA, 25 bp, Homo sapien
cctcaaaccacttggcagcttttgt

SEQ ID NO: 837588 - DNA, 25 bp, Homo sapien
tgcttcctacacctaacttcatagc

SEQ ID NO: 837589 - DNA, 25 bp, Homo sapien
gaatctaaatagttgtattggcagc

SEQ ID NO: 837590 - DNA, 25 bp, Homo sapien
tgaatagttaccaccttcttgcctt

SEQ ID NO: 837591 - DNA, 25 bp, Homo sapien
taactctctctgaatagttaccacc

SEQ ID NO: 837592 - DNA, 25 bp, Homo sapien
aaatagttgtattggcagccagctg

SEQ ID NO: 837593 - DNA, 25 bp, Homo sapien
tcaggatcctaaagctgttggcagg

SEQ ID NO: 837594 - DNA, 25 bp, Homo sapien
caggcaatgtgttgtagtatagaat

SEQ ID NO: 837595 - DNA, 25 bp, Homo sapien
gcaggcagattagttctcaggatcc

SEQ ID NO: 837596 - DNA, 25 bp, Homo sapien
ctggaataagaacatttcattggaa

SEQ ID NO: 837597 - DNA, 25 bp, Homo sapien
cacattgcttctcctaaaggaggca

SEQ ID NO: 837598 - DNA, 25 bp, Homo sapien
aaagtttggtggcatggcagggcag

SEQ ID NO: 837599 - DNA, 25 bp, Homo sapien
taataataaaccagctgaggatggt

SEQ ID NO: 837600 - DNA, 25 bp, Homo sapien
gaactaatttggtaggttggccagc

SEQ ID NO: 837601 - DNA, 25 bp, Homo sapien
tcaggctcatggtgaactccagtct

SEQ ID NO: 837602 - DNA, 25 bp, Homo sapien
atcaggctcatggtgaactccagtc

SEQ ID NO: 837603 - DNA, 25 bp, Homo sapien
catcaggctcatggtgaactccagt

SEQ ID NO: 837604 - DNA, 25 bp, Homo sapien
ttccatttggccaccaatattgctg

SEQ ID NO: 837605 - DNA, 25 bp, Homo sapien
aatcagtgatgaagagtggtccaac

SEQ ID NO: 837606 - DNA, 25 bp, Homo sapien
tatatcttgggacaaagctagttcc

SEQ ID NO: 837607 - DNA, 25 bp, Homo sapien
tcagtgatgaagagtggtccaacta

SEQ ID NO: 837608 - DNA, 25 bp, Homo sapien
tggcagatggagatgttacttggaa

SEQ ID NO: 837609 - DNA, 25 bp, Homo sapien
aacacttaagacgtcatggctaggg

SEQ ID NO: 837610 - DNA, 25 bp, Homo sapien
tgttttgacagacagttccgggcat

SEQ ID NO: 837611 - DNA, 25 bp, Homo sapien
ggaaaaagttcgtcagatgattctg

SEQ ID NO: 837612 - DNA, 25 bp, Homo sapien
tttctaactttacccattgtatctc

SEQ ID NO: 837613 - DNA, 25 bp, Homo sapien
ctaactttacccattgtatctccct

SEQ ID NO: 837614 - DNA, 25 bp, Homo sapien
taactttacccattgtatctccctc

SEQ ID NO: 837615 - DNA, 25 bp, Homo sapien
tctaactttacccattgtatctccc

SEQ ID NO: 837616 - DNA, 25 bp, Homo sapien
ggatacgggctggatggctttgctt

SEQ ID NO: 837617 - DNA, 25 bp, Homo sapien
agggatacgggctggatggctttgc

SEQ ID NO: 837618 - DNA, 25 bp, Homo sapien
ctgtaagggatacgggctggatggc

SEQ ID NO: 837619 - DNA, 25 bp, Homo sapien
atacgggctggatggctttgcttag

SEQ ID NO: 837620 - DNA, 25 bp, Homo sapien
tctgaggatgttgataggcaatggt

SEQ ID NO: 837621 - DNA, 25 bp, Homo sapien
ttctgaggatgttgataggcaatgg

SEQ ID NO: 837622 - DNA, 25 bp, Homo sapien
ctgaggatgttgataggcaatggtg

SEQ ID NO: 837623 - DNA, 25 bp, Homo sapien
gaggatgttgataggcaatggtgaa

SEQ ID NO: 837624 - DNA, 25 bp, Homo sapien
tactggtggcaatttctagcatgga

SEQ ID NO: 837625 - DNA, 25 bp, Homo sapien
gcctaagttcgtacactgagcactg

SEQ ID NO: 837626 - DNA, 25 bp, Homo sapien
gagcactgtatatctgatactgaaa

SEQ ID NO: 837627 - DNA, 25 bp, Homo sapien
ggacaaacagtatcatagatactgg

SEQ ID NO: 837628 - DNA, 25 bp, Homo sapien
catggccgccttttgtttatgtcca

SEQ ID NO: 837629 - DNA, 25 bp, Homo sapien
ttttgttgtgcctaacaacactgac

SEQ ID NO: 837630 - DNA, 25 bp, Homo sapien
gagtgctccagtgttcatctaacaa

SEQ ID NO: 837631 - DNA, 25 bp, Homo sapien
gtttccaaaccttctagattgagga

SEQ ID NO: 837632 - DNA, 25 bp, Homo sapien
cctattgccattgcaccagacttcc

SEQ ID NO: 837633 - DNA, 25 bp, Homo sapien
ctcctattgccattgcaccagactt

SEQ ID NO: 837634 - DNA, 25 bp, Homo sapien
tcctattgccattgcaccagacttc

SEQ ID NO: 837635 - DNA, 25 bp, Homo sapien
cctcctattgccattgcaccagact

SEQ ID NO: 837636 - DNA, 25 bp, Homo sapien
tgagcttcccttaactttatgtgaa

SEQ ID NO: 837637 - DNA, 25 bp, Homo sapien
gggcaagtagtggtattggctttaa

SEQ ID NO: 837638 - DNA, 25 bp, Homo sapien
ttaatagaatctcaaacaatttgct

SEQ ID NO: 837639 - DNA, 25 bp, Homo sapien
accagctatacttgccatattttcc

SEQ ID NO: 837640 - DNA, 25 bp, Homo sapien
catggttccacgtgaacaaatgttg

SEQ ID NO: 837641 - DNA, 25 bp, Homo sapien
atggttccacgtgaacaaatgttga

SEQ ID NO: 837642 - DNA, 25 bp, Homo sapien
tcatggttccacgtgaacaaatgtt

SEQ ID NO: 837643 - DNA, 25 bp, Homo sapien
tgtctatccattacacacttgtttt

SEQ ID NO: 837644 - DNA, 25 bp, Homo sapien
tcttgagagttgagcttattttcct

SEQ ID NO: 837645 - DNA, 25 bp, Homo sapien
ctggaaggtgctaatttgtctatcc

SEQ ID NO: 837646 - DNA, 25 bp, Homo sapien
ttcttgagagttgagcttattttcc

SEQ ID NO: 837647 - DNA, 25 bp, Homo sapien
tgaataagtcaagtgctccattagt

SEQ ID NO: 837648 - DNA, 25 bp, Homo sapien
atgaataagtcaagtgctccattag

SEQ ID NO: 837649 - DNA, 25 bp, Homo sapien
gaataagtcaagtgctccattagtt

SEQ ID NO: 837650 - DNA, 25 bp, Homo sapien
attttataatgtctcccaacctgtt

SEQ ID NO: 837651 - DNA, 25 bp, Homo sapien
cccaacctgtttccaatttctacat

SEQ ID NO: 837652 - DNA, 25 bp, Homo sapien
tgtctgcacttaaccaaaaccactg

SEQ ID NO: 837653 - DNA, 25 bp, Homo sapien
ggagcacattccttcccatatgaca

SEQ ID NO: 837654 - DNA, 25 bp, Homo sapien
aatatctctacaggagtcccacagg

SEQ ID NO: 837655 - DNA, 25 bp, Homo sapien
tgtgccttctcgtgccagtccttct

SEQ ID NO: 837656 - DNA, 25 bp, Homo sapien
cctccacagccagacttccgagtgc

SEQ ID NO: 837657 - DNA, 25 bp, Homo sapien
ctccacagccagacttccgagtgcc

SEQ ID NO: 837658 - DNA, 25 bp, Homo sapien
cacagcctgtgccagcatttcccac

SEQ ID NO: 837659 - DNA, 25 bp, Homo sapien
aacacagcctgtgccagcatttccc

SEQ ID NO: 837660 - DNA, 25 bp, Homo sapien
cagcctgtgccagcatttcccacct

SEQ ID NO: 837661 - DNA, 25 bp, Homo sapien
caacacagcctgtgccagcatttcc

SEQ ID NO: 837662 - DNA, 25 bp, Homo sapien
catatctccctaaatctgttctgca

SEQ ID NO: 837663 - DNA, 25 bp, Homo sapien
ccccatatctccctaaatctgttct

SEQ ID NO: 837664 - DNA, 25 bp, Homo sapien
tctccccatatctccctaaatctgt

SEQ ID NO: 837665 - DNA, 25 bp, Homo sapien
ttctccccatatctccctaaatctg

SEQ ID NO: 837666 - DNA, 25 bp, Homo sapien
tactggatgtaactttctttatgca

SEQ ID NO: 837667 - DNA, 25 bp, Homo sapien
actttctttatgcataagtgtagga

SEQ ID NO: 837668 - DNA, 25 bp, Homo sapien
tatgcataagtgtaggaagctgttt

SEQ ID NO: 837669 - DNA, 25 bp, Homo sapien
aagtactggatgtaactttctttat

SEQ ID NO: 837670 - DNA, 25 bp, Homo sapien
ccaagagatcataatcatgaaagat

SEQ ID NO: 837671 - DNA, 25 bp, Homo sapien
tagaagataaaatcaccaagagatc

SEQ ID NO: 837672 - DNA, 25 bp, Homo sapien
tcaccaagagatcataatcatgaaa

SEQ ID NO: 837673 - DNA, 25 bp, Homo sapien
catgaaagattaaggtaaatggagc

SEQ ID NO: 837674 - DNA, 25 bp, Homo sapien
tagctctatagtttgtgagttcaga

SEQ ID NO: 837675 - DNA, 25 bp, Homo sapien
gtttagctctatagtttgtgagttc

SEQ ID NO: 837676 - DNA, 25 bp, Homo sapien
tttgtttagctctatagtttgtgag

SEQ ID NO: 837677 - DNA, 25 bp, Homo sapien
ctctatagtttgtgagttcagatgg

SEQ ID NO: 837678 - DNA, 25 bp, Homo sapien
aagtgccaatcccaaccacttccat

SEQ ID NO: 837679 - DNA, 25 bp, Homo sapien
cctagcatcagcacctatgctttga

SEQ ID NO: 837680 - DNA, 25 bp, Homo sapien
ctgcaacctagcatcagcacctatg

SEQ ID NO: 837681 - DNA, 25 bp, Homo sapien
tcagcacctatgctttgaggaggag

SEQ ID NO: 837682 - DNA, 25 bp, Homo sapien
tgaactccggagtgaatagcagctg

SEQ ID NO: 837683 - DNA, 25 bp, Homo sapien
taatgtgagacacatgccctgaact

SEQ ID NO: 837684 - DNA, 25 bp, Homo sapien
tcctccggaatgagcaaatagtctg

SEQ ID NO: 837685 - DNA, 25 bp, Homo sapien
gagcccctatcctgccagcaagtat

SEQ ID NO: 837686 - DNA, 25 bp, Homo sapien
tataatgtgtactgctctctttcac

SEQ ID NO: 837687 - DNA, 25 bp, Homo sapien
actctggcatagattgaagaatgaa

SEQ ID NO: 837688 - DNA, 25 bp, Homo sapien
agcacatgtataatgtgtactgctc

SEQ ID NO: 837689 - DNA, 25 bp, Homo sapien
tggcatagattgaagaatgaagcac

SEQ ID NO: 837690 - DNA, 25 bp, Homo sapien
ggcagcatatgatccctctgttttc

SEQ ID NO: 837691 - DNA, 25 bp, Homo sapien
cagcatatgatccctctgttttctt

SEQ ID NO: 837692 - DNA, 25 bp, Homo sapien
tggcagcatatgatccctctgtttt

SEQ ID NO: 837693 - DNA, 25 bp, Homo sapien
gcagcatatgatccctctgttttct

SEQ ID NO: 837694 - DNA, 25 bp, Homo sapien
cttctagtggttccatttgtttctg

SEQ ID NO: 837695 - DNA, 25 bp, Homo sapien
tgagcaggactaagcagccaggttc

SEQ ID NO: 837696 - DNA, 25 bp, Homo sapien
gaatgctgacatagcgttctgagcc

SEQ ID NO: 837697 - DNA, 25 bp, Homo sapien
gacacagtggcatgactgtcattga

SEQ ID NO: 837698 - DNA, 25 bp, Homo sapien
cggcataggtctcctggggggcctt

SEQ ID NO: 837699 - DNA, 25 bp, Homo sapien
tggaccatagtgaatgaccccctta

SEQ ID NO: 837700 - DNA, 25 bp, Homo sapien
tgagtgagaggaagctccacagatt

SEQ ID NO: 837701 - DNA, 25 bp, Homo sapien
cttagggggctttatacccatctct

SEQ ID NO: 837702 - DNA, 25 bp, Homo sapien
cttcataatattcaggatgagtgag

SEQ ID NO: 837703 - DNA, 25 bp, Homo sapien
tggtttgctactgctttggctaaca

SEQ ID NO: 837704 - DNA, 25 bp, Homo sapien
tactgctttggctaacaaggtttta

SEQ ID NO: 837705 - DNA, 25 bp, Homo sapien
tggctgaggtttggtttgctactgc

SEQ ID NO: 837706 - DNA, 25 bp, Homo sapien
aaccactctcaagaaagtggctgag

SEQ ID NO: 837707 - DNA, 25 bp, Homo sapien
caaaacaattcccatacaagtttgg

SEQ ID NO: 837708 - DNA, 25 bp, Homo sapien
cagcaaatcaaaacaattcccatac

SEQ ID NO: 837709 - DNA, 25 bp, Homo sapien
aatcaaaacaattcccatacaagtt

SEQ ID NO: 837710 - DNA, 25 bp, Homo sapien
caaatcaaaacaattcccatacaag

SEQ ID NO: 837711 - DNA, 25 bp, Homo sapien
ctctagtcacgatcaagtcgtccag

SEQ ID NO: 837712 - DNA, 25 bp, Homo sapien
ccagagaggtcatctctagtcacga

SEQ ID NO: 837713 - DNA, 25 bp, Homo sapien
aacagttccaatgctgatcgctgaa

SEQ ID NO: 837714 - DNA, 25 bp, Homo sapien
cattttttacttgcattctacattc

SEQ ID NO: 837715 - DNA, 25 bp, Homo sapien
gttattcgcaatatgtataccttac

SEQ ID NO: 837716 - DNA, 25 bp, Homo sapien
taaagattgttattcgcaatatgta

SEQ ID NO: 837717 - DNA, 25 bp, Homo sapien
cttccattgcattgtgattaaagat

SEQ ID NO: 837718 - DNA, 25 bp, Homo sapien
cacttccattgcattgtgattaaag

SEQ ID NO: 837719 - DNA, 25 bp, Homo sapien
gaaggttgactcttctcttagattg

SEQ ID NO: 837720 - DNA, 25 bp, Homo sapien
tccttttggcatacactgattgcag

SEQ ID NO: 837721 - DNA, 25 bp, Homo sapien
tttcatgcatgccacttgaaggttg

SEQ ID NO: 837722 - DNA, 25 bp, Homo sapien
ttgcagtaaataccatcttgcactt

SEQ ID NO: 837723 - DNA, 25 bp, Homo sapien
cagatttggtgcattggaagacagc

SEQ ID NO: 837724 - DNA, 25 bp, Homo sapien
acttggtcagccagaaagcttgtgc

SEQ ID NO: 837725 - DNA, 25 bp, Homo sapien
gatttcattccaggacacttggtca

SEQ ID NO: 837726 - DNA, 25 bp, Homo sapien
aaattagtttgaaggtgggatgaag

SEQ ID NO: 837727 - DNA, 25 bp, Homo sapien
ggataaacgatagaacatccattca

SEQ ID NO: 837728 - DNA, 25 bp, Homo sapien
catctcctgatgaaagttgccaagc

SEQ ID NO: 837729 - DNA, 25 bp, Homo sapien
caagataaacgataaacatgcattc

SEQ ID NO: 837730 - DNA, 25 bp, Homo sapien
ttccatgcccaactgtggaggatcc

SEQ ID NO: 837731 - DNA, 25 bp, Homo sapien
taatagaggcgaagatgaccttcat

SEQ ID NO: 837732 - DNA, 25 bp, Homo sapien
ccttggttgaggtctaaagtaatag

SEQ ID NO: 837733 - DNA, 25 bp, Homo sapien
cactatggattgacccttggttgag

SEQ ID NO: 837734 - DNA, 25 bp, Homo sapien
tgaggtctaaagtaatagaggcgaa

SEQ ID NO: 837735 - DNA, 25 bp, Homo sapien
tgaaatgaagcctattctgacagtg

SEQ ID NO: 837736 - DNA, 25 bp, Homo sapien
tgaagcctattctgacagtgtggga

SEQ ID NO: 837737 - DNA, 25 bp, Homo sapien
atttttgaaatgaagcctattctga

SEQ ID NO: 837738 - DNA, 25 bp, Homo sapien
aatgaagcctattctgacagtgtgg

SEQ ID NO: 837739 - DNA, 25 bp, Homo sapien
tacttttagagtcctcatctacaat

SEQ ID NO: 837740 - DNA, 25 bp, Homo sapien
gagtcctcatctacaatgttatttt

SEQ ID NO: 837741 - DNA, 25 bp, Homo sapien
aaaatggctctagtattgtcactcg

SEQ ID NO: 837742 - DNA, 25 bp, Homo sapien
tattgtcactcgtataaatataaac

SEQ ID NO: 837743 - DNA, 25 bp, Homo sapien
tacaacattgaataccaagcaccta

SEQ ID NO: 837744 - DNA, 25 bp, Homo sapien
ccttcatctggaaagtgaagactgt

SEQ ID NO: 837745 - DNA, 25 bp, Homo sapien
tggtaaacagcaggtttcgaagcat

SEQ ID NO: 837746 - DNA, 25 bp, Homo sapien
gcacctaacttcttggtaaacagca

SEQ ID NO: 837747 - DNA, 25 bp, Homo sapien
cttttcactatgtagttcctgcttc

SEQ ID NO: 837748 - DNA, 25 bp, Homo sapien
tatgtagttcctgcttcactttcat

SEQ ID NO: 837749 - DNA, 25 bp, Homo sapien
tttctccttttcactatgtagttcc

SEQ ID NO: 837750 - DNA, 25 bp, Homo sapien
tcactatgtagttcctgcttcactt

SEQ ID NO: 837751 - DNA, 25 bp, Homo sapien
agcaggtacagtgtgaagagaaggc

SEQ ID NO: 837752 - DNA, 25 bp, Homo sapien
acatgtgggatttgtagagccagag

SEQ ID NO: 837753 - DNA, 25 bp, Homo sapien
actgacatgtgggatttgtagagcc

SEQ ID NO: 837754 - DNA, 25 bp, Homo sapien
tgaagtggggatcattttgttgtcc

SEQ ID NO: 837755 - DNA, 25 bp, Homo sapien
tacagatgaagcattgaacttatgt

SEQ ID NO: 837756 - DNA, 25 bp, Homo sapien
gaacttatgttttggttaatgacca

SEQ ID NO: 837757 - DNA, 25 bp, Homo sapien
gatgtattgaattaatcattgcctg

SEQ ID NO: 837758 - DNA, 25 bp, Homo sapien
cattgcctgttccaggaagtcctct

SEQ ID NO: 837759 - DNA, 25 bp, Homo sapien
gcagcatccaatattgtctttagtg

SEQ ID NO: 837760 - DNA, 25 bp, Homo sapien
tcttgcagcatccaatattgtcttt

SEQ ID NO: 837761 - DNA, 25 bp, Homo sapien
taatttcttgcagcatccaatattg

SEQ ID NO: 837762 - DNA, 25 bp, Homo sapien
agcatccaatattgtctttagtgag

SEQ ID NO: 837763 - DNA, 25 bp, Homo sapien
tctgtttacacttgtgacaccaccg

SEQ ID NO: 837764 - DNA, 25 bp, Homo sapien
cctccttaatctatcccaatcttta

SEQ ID NO: 837765 - DNA, 25 bp, Homo sapien
ctacattgtacagtcaaagtataca

SEQ ID NO: 837766 - DNA, 25 bp, Homo sapien
gacaccaccgtcacaatcaaaataa

SEQ ID NO: 837767 - DNA, 25 bp, Homo sapien
tctctcaagaaaggacttcgtatca

SEQ ID NO: 837768 - DNA, 25 bp, Homo sapien
gaccagacgaagcttgcatctctct

SEQ ID NO: 837769 - DNA, 25 bp, Homo sapien
gcatctctctcaagaaaggacttcg

SEQ ID NO: 837770 - DNA, 25 bp, Homo sapien
tgtatccttcttatgaccagacgaa

SEQ ID NO: 837771 - DNA, 25 bp, Homo sapien
ttagcaatgtgtgtctctggcacat

SEQ ID NO: 837772 - DNA, 25 bp, Homo sapien
caggctctttttcgcttctctccat

SEQ ID NO: 837773 - DNA, 25 bp, Homo sapien
gattagttgctgttgaaggcgctcc

SEQ ID NO: 837774 - DNA, 25 bp, Homo sapien
gcggttcttctgagcaaatatgaca

SEQ ID NO: 837775 - DNA, 25 bp, Homo sapien
ggcgctcctccaatgaaatcttctg

SEQ ID NO: 837776 - DNA, 25 bp, Homo sapien
gcgccctggcgcctttagtacagca

SEQ ID NO: 837777 - DNA, 25 bp, Homo sapien
tgggaggcaacacctattcgggtac

SEQ ID NO: 837778 - DNA, 25 bp, Homo sapien
aatggagacctggatgcctcggcga

SEQ ID NO: 837779 - DNA, 25 bp, Homo sapien
ggtacctcggcgatttcctggtgaa

SEQ ID NO: 837780 - DNA, 25 bp, Homo sapien
tctggcgagagctgcggggctggcg

SEQ ID NO: 837781 - DNA, 25 bp, Homo sapien
cgcgcgcgcaggcagagtcacgcac

SEQ ID NO: 837782 - DNA, 25 bp, Homo sapien
gcgcgcgcgcaggcagagtcacgca

SEQ ID NO: 837783 - DNA, 25 bp, Homo sapien
cccaaggctctggcgagagctgcgg

SEQ ID NO: 837784 - DNA, 25 bp, Homo sapien
tgtcgctggtttcgctccagttgcc

SEQ ID NO: 837785 - DNA, 25 bp, Homo sapien
ttgtgggttcagggccgatccgctc

SEQ ID NO: 837786 - DNA, 25 bp, Homo sapien
gctggagctgcgcaccgcttagagt

SEQ ID NO: 837787 - DNA, 25 bp, Homo sapien
ccggctgcgaggtggtggaggcttg

SEQ ID NO: 837788 - DNA, 25 bp, Homo sapien
tgggtaagcggagagctgcacagcg

SEQ ID NO: 837789 - DNA, 25 bp, Homo sapien
ttccgtttgagaatctgcacgtggg

SEQ ID NO: 837790 - DNA, 25 bp, Homo sapien
tatgaagggagagaccccctggtgc

SEQ ID NO: 837791 - DNA, 25 bp, Homo sapien
gcacgtggggaggacctccctccaa

SEQ ID NO: 837792 - DNA, 25 bp, Homo sapien
gcctcgcgctgtgcctcgtttgccc

SEQ ID NO: 837793 - DNA, 25 bp, Homo sapien
cgcctcgcgctgtgcctcgtttgcc

SEQ ID NO: 837794 - DNA, 25 bp, Homo sapien
tcgcctcgcgctgtgcctcgtttgc

SEQ ID NO: 837795 - DNA, 25 bp, Homo sapien
ctcgcctcgcgctgtgcctcgtttg

SEQ ID NO: 837796 - DNA, 25 bp, Homo sapien
atgggaaacctctccagcgcccaag

SEQ ID NO: 837797 - DNA, 25 bp, Homo sapien
ctggagaccgcaatgggaaacctct

SEQ ID NO: 837798 - DNA, 25 bp, Homo sapien
atcccacacgcacagaagacgcggt

SEQ ID NO: 837799 - DNA, 25 bp, Homo sapien
agaagacgcggtcagaccccagcag

SEQ ID NO: 837800 - DNA, 25 bp, Homo sapien
cattgtgagttaggtggcgaagccc

SEQ ID NO: 837801 - DNA, 25 bp, Homo sapien
tcaggtgcggactccaagggacatt

SEQ ID NO: 837802 - DNA, 25 bp, Homo sapien
caggcactgtctggtacctcatgag

SEQ ID NO: 837803 - DNA, 25 bp, Homo sapien
caagttagcggcgattgcctgggac

SEQ ID NO: 837804 - DNA, 25 bp, Homo sapien
gtctaccggcaccaggcatggaccg

SEQ ID NO: 837805 - DNA, 25 bp, Homo sapien
gaccgcacctgtccgtgtccgagag

SEQ ID NO: 837806 - DNA, 25 bp, Homo sapien
agcgcgcacaggtggaatttctgcg

SEQ ID NO: 837807 - DNA, 25 bp, Homo sapien
gaatttctgcgcgtctaccggcacc

SEQ ID NO: 837808 - DNA, 25 bp, Homo sapien
tggaggcggacggaggcaaagggtg

SEQ ID NO: 837809 - DNA, 25 bp, Homo sapien
ggaattttcacctctcccagatgag

SEQ ID NO: 837810 - DNA, 25 bp, Homo sapien
gacggaggcaaagggtgtgccgccg

SEQ ID NO: 837811 - DNA, 25 bp, Homo sapien
cgccgtgtgtgtcaataattctggg

SEQ ID NO: 837812 - DNA, 25 bp, Homo sapien
ctgggacaattctgtatctcagggc

SEQ ID NO: 837813 - DNA, 25 bp, Homo sapien
gggacaattctgtatctcagggcag

SEQ ID NO: 837814 - DNA, 25 bp, Homo sapien
cagcctcgaggacggcaatgggcag

SEQ ID NO: 837815 - DNA, 25 bp, Homo sapien
agggcagcctcgaggacggcaatgg

SEQ ID NO: 837816 - DNA, 25 bp, Homo sapien
ctggtatttccgtacatgcaagagc

SEQ ID NO: 837817 - DNA, 25 bp, Homo sapien
gccagggactggcgggtcggtggac

SEQ ID NO: 837818 - DNA, 25 bp, Homo sapien
agggactggcgggtcggtggactca

SEQ ID NO: 837819 - DNA, 25 bp, Homo sapien
ggtatttccgtacatgcaagagcct

SEQ ID NO: 837820 - DNA, 25 bp, Homo sapien
tccagcctctctgcccctggcgaac

SEQ ID NO: 837821 - DNA, 25 bp, Homo sapien
ccaattctctgttctcctccagcct

SEQ ID NO: 837822 - DNA, 25 bp, Homo sapien
tcctccagcctctctgcccctggcg

SEQ ID NO: 837823 - DNA, 25 bp, Homo sapien
ctccaattctctgttctcctccagc

SEQ ID NO: 837824 - DNA, 25 bp, Homo sapien
cgtgctgtggcggtgaactgactta

SEQ ID NO: 837825 - DNA, 25 bp, Homo sapien
gtggccgcagtcacagacgtgctgt

SEQ ID NO: 837826 - DNA, 25 bp, Homo sapien
cagttctgctggctttacgcgttta

SEQ ID NO: 837827 - DNA, 25 bp, Homo sapien
gatgggcaaatcacacggctgccgc

SEQ ID NO: 837828 - DNA, 25 bp, Homo sapien
actggtcgctgtgtgcttgtgtcgc

SEQ ID NO: 837829 - DNA, 25 bp, Homo sapien
ccatggccatgaccctggcggtggc

SEQ ID NO: 837830 - DNA, 25 bp, Homo sapien
cgcgccggaccgctggagggtgtgt

SEQ ID NO: 837831 - DNA, 25 bp, Homo sapien
gtggctgcaggcgtcccgggctgtg

SEQ ID NO: 837832 - DNA, 25 bp, Homo sapien
ggttgccccagggtttctctctgga

SEQ ID NO: 837833 - DNA, 25 bp, Homo sapien
cgggttgccccagggtttctctctg

SEQ ID NO: 837834 - DNA, 25 bp, Homo sapien
tctcattgggagacgccaggattgc

SEQ ID NO: 837835 - DNA, 25 bp, Homo sapien
ggattgccagaagcgaacagaagcg

SEQ ID NO: 837836 - DNA, 25 bp, Homo sapien
tgctcacaaagtgcaatgcgcggcc

SEQ ID NO: 837837 - DNA, 25 bp, Homo sapien
caaagctgggacattgttggcacaa

SEQ ID NO: 837838 - DNA, 25 bp, Homo sapien
tggaaaattgtccagtaaagacaca

SEQ ID NO: 837839 - DNA, 25 bp, Homo sapien
ccagcagtctgggactgttttcttt

SEQ ID NO: 837840 - DNA, 25 bp, Homo sapien
ttggaattggaaaattgtccagtaa

SEQ ID NO: 837841 - DNA, 25 bp, Homo sapien
gacacatctggatgcttgactatct

SEQ ID NO: 837842 - DNA, 25 bp, Homo sapien
tagtgtcaacaagccaaggtttcaa

SEQ ID NO: 837843 - DNA, 25 bp, Homo sapien
taaatttaccacatcgggtgggcat

SEQ ID NO: 837844 - DNA, 25 bp, Homo sapien
tattgtcacagaagagtatctcacc

SEQ ID NO: 837845 - DNA, 25 bp, Homo sapien
cccctgataaggatataactagcca

SEQ ID NO: 837846 - DNA, 25 bp, Homo sapien
ttaattagggccctgttacagctcc

SEQ ID NO: 837847 - DNA, 25 bp, Homo sapien
ttcccaatagacagtcatgatttcc

SEQ ID NO: 837848 - DNA, 25 bp, Homo sapien
gatagaagccaaggtatctccttat

SEQ ID NO: 837849 - DNA, 25 bp, Homo sapien
taactaacaaactgcgagggagagg

SEQ ID NO: 837850 - DNA, 25 bp, Homo sapien
gattttgccactgagtagcccctaa

SEQ ID NO: 837851 - DNA, 25 bp, Homo sapien
tgtggctatacagatgatacccctg

SEQ ID NO: 837852 - DNA, 25 bp, Homo sapien
aatagctttgcaagtgccttcccaa

SEQ ID NO: 837853 - DNA, 25 bp, Homo sapien
ggtaccaactagtagcatcagctca

SEQ ID NO: 837854 - DNA, 25 bp, Homo sapien
cataccagatgatgtccaggcactg

SEQ ID NO: 837855 - DNA, 25 bp, Homo sapien
tatcactcggtgttttcatggaccc

SEQ ID NO: 837856 - DNA, 25 bp, Homo sapien
gaatgagcctactgtttacccaaag

SEQ ID NO: 837857 - DNA, 25 bp, Homo sapien
tacactagtggcaagaatctgagtc

SEQ ID NO: 837858 - DNA, 25 bp, Homo sapien
tgaaaccccaactgagacacctaat

SEQ ID NO: 837859 - DNA, 25 bp, Homo sapien
catctcacagagttatgcagtctca

SEQ ID NO: 837860 - DNA, 25 bp, Homo sapien
tatcctttggcctacatcttacaga

SEQ ID NO: 837861 - DNA, 25 bp, Homo sapien
tgcagtctcactgcccctatggcaa

SEQ ID NO: 837862 - DNA, 25 bp, Homo sapien
tactggtttgcactatctatctaga

SEQ ID NO: 837863 - DNA, 25 bp, Homo sapien
gagaccgccaagtatgataacccag

SEQ ID NO: 837864 - DNA, 25 bp, Homo sapien
gagaaggtaacttgggaccaatgca

SEQ ID NO: 837865 - DNA, 25 bp, Homo sapien
tctatctagatgttcagagaccgcc

SEQ ID NO: 837866 - DNA, 25 bp, Homo sapien
tctacagtataaggcaaatgattta

SEQ ID NO: 837867 - DNA, 25 bp, Homo sapien
gttagcaaagtaataattctacagt

SEQ ID NO: 837868 - DNA, 25 bp, Homo sapien
tattaaataattgttcaagaaactg

SEQ ID NO: 837869 - DNA, 25 bp, Homo sapien
ctagtattaaataattgttcaagaa

SEQ ID NO: 837870 - DNA, 25 bp, Homo sapien
taaactaagcctatttgagtggaag

SEQ ID NO: 837871 - DNA, 25 bp, Homo sapien
catatcattgctgaaacccaactct

SEQ ID NO: 837872 - DNA, 25 bp, Homo sapien
taggatcattatacagtaaggctgt

SEQ ID NO: 837873 - DNA, 25 bp, Homo sapien
atttggaatgacaactgagtgacta

SEQ ID NO: 837874 - DNA, 25 bp, Homo sapien
taataagctgccttaagccttgtcg

SEQ ID NO: 837875 - DNA, 25 bp, Homo sapien
caagaaaattcgacatgtaaacagg

SEQ ID NO: 837876 - DNA, 25 bp, Homo sapien
ccaacccagtatgtacgtgaagata

SEQ ID NO: 837877 - DNA, 25 bp, Homo sapien
tgagttctctcgtcaccaagtgcag

SEQ ID NO: 837878 - DNA, 25 bp, Homo sapien
gtcctgacgacttgttcccaccaaa

SEQ ID NO: 837879 - DNA, 25 bp, Homo sapien
caaatagagtgacggtactgttaag

SEQ ID NO: 837880 - DNA, 25 bp, Homo sapien
tcccaccaaatagagtgacggtact

SEQ ID NO: 837881 - DNA, 25 bp, Homo sapien
ttacatgtcctgacgacttgttccc

SEQ ID NO: 837882 - DNA, 25 bp, Homo sapien
ggacatggtggtcctttctgttttc

SEQ ID NO: 837883 - DNA, 25 bp, Homo sapien
gaagacaaggcgttatattccacat

SEQ ID NO: 837884 - DNA, 25 bp, Homo sapien
tattccacatggacatggtggtcct

SEQ ID NO: 837885 - DNA, 25 bp, Homo sapien
tttaaagtgaacagcaccgagtttc

SEQ ID NO: 837886 - DNA, 25 bp, Homo sapien
aatggtcacgttcggtgtcaaaagc

SEQ ID NO: 837887 - DNA, 25 bp, Homo sapien
taacaccagtagatgtgacaagcag

SEQ ID NO: 837888 - DNA, 25 bp, Homo sapien
gccagtgtggttgcgcttgctatca

SEQ ID NO: 837889 - DNA, 25 bp, Homo sapien
tgtcaaaagcgtggaaatctcaaga

SEQ ID NO: 837890 - DNA, 25 bp, Homo sapien
ttaggcggcagctgaagcactcttc

SEQ ID NO: 837891 - DNA, 25 bp, Homo sapien
acatccaggccgtgcgcatccaggg

SEQ ID NO: 837892 - DNA, 25 bp, Homo sapien
cagacgacgactcggagcaacatgg

SEQ ID NO: 837893 - DNA, 25 bp, Homo sapien
gcagcagcagacgacgactcggagc

SEQ ID NO: 837894 - DNA, 25 bp, Homo sapien
tgcagtcacggtcaatcaaccagag

SEQ ID NO: 837895 - DNA, 25 bp, Homo sapien
gcagtcacggtcaatcaaccagagc

SEQ ID NO: 837896 - DNA, 25 bp, Homo sapien
tcctgcacgagtgggccctgtgccc

SEQ ID NO: 837897 - DNA, 25 bp, Homo sapien
cgctcctgcacgagtgggccctgtg

SEQ ID NO: 837898 - DNA, 25 bp, Homo sapien
gctcctgcacgagtgggccctgtgc

SEQ ID NO: 837899 - DNA, 25 bp, Homo sapien
ctcctgcacgagtgggccctgtgcc

SEQ ID NO: 837900 - DNA, 25 bp, Homo sapien
gtaaactcccctgcgggtgggctga

SEQ ID NO: 837901 - DNA, 25 bp, Homo sapien
aaaaagcaactttgtagctggaggc

SEQ ID NO: 837902 - DNA, 25 bp, Homo sapien
ctcccctgcgggtgggctgagggct

SEQ ID NO: 837903 - DNA, 25 bp, Homo sapien
ccagtgctacactgcatggcggcct

SEQ ID NO: 837904 - DNA, 25 bp, Homo sapien
gacttatctccagttgtacccaaga

SEQ ID NO: 837905 - DNA, 25 bp, Homo sapien
tgaacagaagcattgtagatactcc

SEQ ID NO: 837906 - DNA, 25 bp, Homo sapien
gacagaaaggcctagttacccatcc

SEQ ID NO: 837907 - DNA, 25 bp, Homo sapien
cagttaactgttgcctactgctgca

SEQ ID NO: 837908 - DNA, 25 bp, Homo sapien
atgtattcccagtgcttttggagac

SEQ ID NO: 837909 - DNA, 25 bp, Homo sapien
ctatgtattcccagtgcttttggag

SEQ ID NO: 837910 - DNA, 25 bp, Homo sapien
gtattcccagtgcttttggagactg

SEQ ID NO: 837911 - DNA, 25 bp, Homo sapien
attcccagtgcttttggagactgag

SEQ ID NO: 837912 - DNA, 25 bp, Homo sapien
gttccatgccatgtggtaagccagt

SEQ ID NO: 837913 - DNA, 25 bp, Homo sapien
caattattgtccactcctatgagct

SEQ ID NO: 837914 - DNA, 25 bp, Homo sapien
tctaagacacttgggaaaattgctg

SEQ ID NO: 837915 - DNA, 25 bp, Homo sapien
tgtcagttgactccagaacacaaac

SEQ ID NO: 837916 - DNA, 25 bp, Homo sapien
aacatccgttgatgtgctgtattca

SEQ ID NO: 837917 - DNA, 25 bp, Homo sapien
aaagagtcaacatccgttgatgtgc

SEQ ID NO: 837918 - DNA, 25 bp, Homo sapien
gagtcaacatccgttgatgtgctgt

SEQ ID NO: 837919 - DNA, 25 bp, Homo sapien
gataaagagtcaacatccgttgatg

SEQ ID NO: 837920 - DNA, 25 bp, Homo sapien
ttgtatctgcaactgtgaggaccat

SEQ ID NO: 837921 - DNA, 25 bp, Homo sapien
ttgagcgtctttgagggtttgtatc

SEQ ID NO: 837922 - DNA, 25 bp, Homo sapien
ggtttgtatctgcaactgtgaggac

SEQ ID NO: 837923 - DNA, 25 bp, Homo sapien
gagcgtctttgagggtttgtatctg

SEQ ID NO: 837924 - DNA, 25 bp, Homo sapien
ggaaatagtccctggtagctccgac

SEQ ID NO: 837925 - DNA, 25 bp, Homo sapien
tggtagctccgactgacgcatcctt

SEQ ID NO: 837926 - DNA, 25 bp, Homo sapien
tttgccctaccctgatccattggca

SEQ ID NO: 837927 - DNA, 25 bp, Homo sapien
cttgcctccgtatagttcacccatt

SEQ ID NO: 837928 - DNA, 25 bp, Homo sapien
gtaagatccagaccctgtactcatg

SEQ ID NO: 837929 - DNA, 25 bp, Homo sapien
ggtgctgagaatacactcttgaatg

SEQ ID NO: 837930 - DNA, 25 bp, Homo sapien
gaccctgtactcatgtcgctaacaa

SEQ ID NO: 837931 - DNA, 25 bp, Homo sapien
tacactcttgaatgggtaagatcca

SEQ ID NO: 837932 - DNA, 25 bp, Homo sapien
gcttccttctgtgacccttcatcca

SEQ ID NO: 837933 - DNA, 25 bp, Homo sapien
cttccttctgtgacccttcatccat

SEQ ID NO: 837934 - DNA, 25 bp, Homo sapien
ggattatgcaaggacttattacagt

SEQ ID NO: 837935 - DNA, 25 bp, Homo sapien
ggacttattacagtgtaaacatgct

SEQ ID NO: 837936 - DNA, 25 bp, Homo sapien
cgtaatactattcttagtgatgctg

SEQ ID NO: 837937 - DNA, 25 bp, Homo sapien
cattttggctgcctgtcaaacgtaa

SEQ ID NO: 837938 - DNA, 25 bp, Homo sapien
tattctcaagattctgcgttatatc

SEQ ID NO: 837939 - DNA, 25 bp, Homo sapien
ctattctcaagattctgcgttatat

SEQ ID NO: 837940 - DNA, 25 bp, Homo sapien
tactattctcaagattctgcgttat

SEQ ID NO: 837941 - DNA, 25 bp, Homo sapien
actattctcaagattctgcgttata

SEQ ID NO: 837942 - DNA, 25 bp, Homo sapien
tctgtatctctctttccctttctct

SEQ ID NO: 837943 - DNA, 25 bp, Homo sapien
tgtatctctctttccctttctcttt

SEQ ID NO: 837944 - DNA, 25 bp, Homo sapien
ctgtatctctctttccctttctctt

SEQ ID NO: 837945 - DNA, 25 bp, Homo sapien
atctgtatctctctttccctttctc

SEQ ID NO: 837946 - DNA, 25 bp, Homo sapien
ctggacgttcaatgatgattaaaac

SEQ ID NO: 837947 - DNA, 25 bp, Homo sapien
taggtgttctggacgttcaatgatg

SEQ ID NO: 837948 - DNA, 25 bp, Homo sapien
gcttctcttaattaggtgttctgga

SEQ ID NO: 837949 - DNA, 25 bp, Homo sapien
atatctattgagcagcttctcttaa

SEQ ID NO: 837950 - DNA, 25 bp, Homo sapien
taatcagtagccaagtagcaaataa

SEQ ID NO: 837951 - DNA, 25 bp, Homo sapien
ctaatcagtagccaagtagcaaata

SEQ ID NO: 837952 - DNA, 25 bp, Homo sapien
taatggtcaccaaactgagggatcc

SEQ ID NO: 837953 - DNA, 25 bp, Homo sapien
agttttcagtcacaggatccctggg

SEQ ID NO: 837954 - DNA, 25 bp, Homo sapien
gctgcaatagccgtaccaaaggtga

SEQ ID NO: 837955 - DNA, 25 bp, Homo sapien
tataaggacttgtaagagccaggct

SEQ ID NO: 837956 - DNA, 25 bp, Homo sapien
tttcagaaactcgaggagcccactg

SEQ ID NO: 837957 - DNA, 25 bp, Homo sapien
gattctgtaagctcgtttggcctct

SEQ ID NO: 837958 - DNA, 25 bp, Homo sapien
tagaccttgatatccccaacgaatg

SEQ ID NO: 837959 - DNA, 25 bp, Homo sapien
gcccactggcttgacgttatttccg

SEQ ID NO: 837960 - DNA, 25 bp, Homo sapien
tctatcattttcagtattccttcca

SEQ ID NO: 837961 - DNA, 25 bp, Homo sapien
tctgtttgacgtagtttccatggtg

SEQ ID NO: 837962 - DNA, 25 bp, Homo sapien
tccatggtgtcagcctatcttcaat

SEQ ID NO: 837963 - DNA, 25 bp, Homo sapien
ggtgtcagcctatcttcaatttctt

SEQ ID NO: 837964 - DNA, 25 bp, Homo sapien
gctacagcgtgcaccctttaagaga

SEQ ID NO: 837965 - DNA, 25 bp, Homo sapien
actatttgcaacaccggtactatgg

SEQ ID NO: 837966 - DNA, 25 bp, Homo sapien
cctaatacttgggagctggcgttaa

SEQ ID NO: 837967 - DNA, 25 bp, Homo sapien
tattttgatggccaactactgcaac

SEQ ID NO: 837968 - DNA, 25 bp, Homo sapien
atttgcatacagaaatatgtatttc

SEQ ID NO: 837969 - DNA, 25 bp, Homo sapien
taagagtttgtgtataatatattta

SEQ ID NO: 837970 - DNA, 25 bp, Homo sapien
ttatttgcatacagaaatatgtatt

SEQ ID NO: 837971 - DNA, 25 bp, Homo sapien
tatttatttgcatacagaaatatgt

SEQ ID NO: 837972 - DNA, 25 bp, Homo sapien
gaagcaacatataccatattgcgta

SEQ ID NO: 837973 - DNA, 25 bp, Homo sapien
gaaaattgggcatataaaatcaact

SEQ ID NO: 837974 - DNA, 25 bp, Homo sapien
taatcttaatatgggattttggctg

SEQ ID NO: 837975 - DNA, 25 bp, Homo sapien
gaaatctgccctgttcttaaagatc

SEQ ID NO: 837976 - DNA, 25 bp, Homo sapien
cctgtagtttatcagtcggccagaa

SEQ ID NO: 837977 - DNA, 25 bp, Homo sapien
ggctccatggtatctactgcgtgta

SEQ ID NO: 837978 - DNA, 25 bp, Homo sapien
tgtaagattccctagactctcagtt

SEQ ID NO: 837979 - DNA, 25 bp, Homo sapien
tcggccagaaacgtgtagtgtgtgc

SEQ ID NO: 837980 - DNA, 25 bp, Homo sapien
gatgaaagcagtgtcagtttaagtc

SEQ ID NO: 837981 - DNA, 25 bp, Homo sapien
gtagatgagatgaaagcagtgtcag

SEQ ID NO: 837982 - DNA, 25 bp, Homo sapien
cttttttcttagctagcaataaggg

SEQ ID NO: 837983 - DNA, 25 bp, Homo sapien
gtgtcagtttaagtccatcaggcat

SEQ ID NO: 837984 - DNA, 25 bp, Homo sapien
tgacccaaaaaacttgcgaaagtca

SEQ ID NO: 837985 - DNA, 25 bp, Homo sapien
ctcatgctttagttgatttgtaaac

SEQ ID NO: 837986 - DNA, 25 bp, Homo sapien
tcaaaagtagttgtaacctcatgct

SEQ ID NO: 837987 - DNA, 25 bp, Homo sapien
aacttgcgaaagtcaaaagtagttg

SEQ ID NO: 837988 - DNA, 25 bp, Homo sapien
taaaggtggccccagggtatgtaca

SEQ ID NO: 837989 - DNA, 25 bp, Homo sapien
tggcataaaggtggccccagggtat

SEQ ID NO: 837990 - DNA, 25 bp, Homo sapien
gccccagggtatgtacacagtactt

SEQ ID NO: 837991 - DNA, 25 bp, Homo sapien
ggtttagatggcataaaggtggccc

SEQ ID NO: 837992 - DNA, 25 bp, Homo sapien
ccaggcttgtgacattgtaatccct

SEQ ID NO: 837993 - DNA, 25 bp, Homo sapien
tataatccttagcttcatacttcca

SEQ ID NO: 837994 - DNA, 25 bp, Homo sapien
ttccaattaagatcctgccccaggc

SEQ ID NO: 837995 - DNA, 25 bp, Homo sapien
tgtaatccctggcaagaacgaaaag

SEQ ID NO: 837996 - DNA, 25 bp, Homo sapien
cttgagaggaacttataagatcggc

SEQ ID NO: 837997 - DNA, 25 bp, Homo sapien
gcaggcctgttagggtgtgaatacc

SEQ ID NO: 837998 - DNA, 25 bp, Homo sapien
tcctgggccttgcacatctcatcta

SEQ ID NO: 837999 - DNA, 25 bp, Homo sapien
cggtgagagtccagactcctgggcc

SEQ ID NO: 838000 - DNA, 25 bp, Homo sapien
ccttctagctgaataagatgccttt

SEQ ID NO: 838001 - DNA, 25 bp, Homo sapien
ggcattgatttttgatattccgatc

SEQ ID NO: 838002 - DNA, 25 bp, Homo sapien
ttttgatattccgatcattccagga

SEQ ID NO: 838003 - DNA, 25 bp, Homo sapien
tggcttgagtccaaggtccttgatt

SEQ ID NO: 838004 - DNA, 25 bp, Homo sapien
ggctagtttcacaggttgagatacc

SEQ ID NO: 838005 - DNA, 25 bp, Homo sapien
accttgagggcagttaatgttgaaa

SEQ ID NO: 838006 - DNA, 25 bp, Homo sapien
aacagggctagtttcacaggttgag

SEQ ID NO: 838007 - DNA, 25 bp, Homo sapien
ggttgagataccttgagggcagtta

SEQ ID NO: 838008 - DNA, 25 bp, Homo sapien
ttagggctcttgttagatgcagggc

SEQ ID NO: 838009 - DNA, 25 bp, Homo sapien
tactgttagcgtcccactcgtatct

SEQ ID NO: 838010 - DNA, 25 bp, Homo sapien
caatctttcttggagtactgttagc

SEQ ID NO: 838011 - DNA, 25 bp, Homo sapien
gatttccactctacatcttagggct

SEQ ID NO: 838012 - DNA, 25 bp, Homo sapien
tttcaaatttatggtaccttgccat

SEQ ID NO: 838013 - DNA, 25 bp, Homo sapien
tggctaccttaaatggctctgtgct

SEQ ID NO: 838014 - DNA, 25 bp, Homo sapien
ttggctaccttaaatggctctgtgc

SEQ ID NO: 838015 - DNA, 25 bp, Homo sapien
tcttggctaccttaaatggctctgt

SEQ ID NO: 838016 - DNA, 25 bp, Homo sapien
attatctgatttaccagatatctgc

SEQ ID NO: 838017 - DNA, 25 bp, Homo sapien
gtcacaaatgttcggtgctccacag

SEQ ID NO: 838018 - DNA, 25 bp, Homo sapien
tgtcacaaatgttcggtgctccaca

SEQ ID NO: 838019 - DNA, 25 bp, Homo sapien
ctgtcacaaatgttcggtgctccac

SEQ ID NO: 838020 - DNA, 25 bp, Homo sapien
cttgcgctgaacctatcagtccttg

SEQ ID NO: 838021 - DNA, 25 bp, Homo sapien
cctcaggtagaccaatatcctggct

SEQ ID NO: 838022 - DNA, 25 bp, Homo sapien
acagcctcaggtagaccaatatcct

SEQ ID NO: 838023 - DNA, 25 bp, Homo sapien
tagaccaatatcctggcttttgggc

SEQ ID NO: 838024 - DNA, 25 bp, Homo sapien
gtcaggaagctttatgttctggatc

SEQ ID NO: 838025 - DNA, 25 bp, Homo sapien
ggagttgttccgtctgaccagaaac

SEQ ID NO: 838026 - DNA, 25 bp, Homo sapien
tcccggtcaggaagctttatgttct

SEQ ID NO: 838027 - DNA, 25 bp, Homo sapien
ttgaatgtggagttgttccgtctga

SEQ ID NO: 838028 - DNA, 25 bp, Homo sapien
ccgaggatgccgctgcgggcctggc

SEQ ID NO: 838029 - DNA, 25 bp, Homo sapien
aggacggtgccacagcctttcgggg

SEQ ID NO: 838030 - DNA, 25 bp, Homo sapien
cagcccttgcgaggaccagagagca

SEQ ID NO: 838031 - DNA, 25 bp, Homo sapien
agcaggacggtgccacagcctttcg

SEQ ID NO: 838032 - DNA, 25 bp, Homo sapien
ctggccagtcggcctctggtgcgct

SEQ ID NO: 838033 - DNA, 25 bp, Homo sapien
gctggccagtcggcctctggtgcgc

SEQ ID NO: 838034 - DNA, 25 bp, Homo sapien
tggccagtcggcctctggtgcgctc

SEQ ID NO: 838035 - DNA, 25 bp, Homo sapien
gccagtcggcctctggtgcgctcga

SEQ ID NO: 838036 - DNA, 25 bp, Homo sapien
tacaaagtggatactgctcagagag

SEQ ID NO: 838037 - DNA, 25 bp, Homo sapien
cgatttcgagagctgacaagttgtc

SEQ ID NO: 838038 - DNA, 25 bp, Homo sapien
ccgaggagatctgacttaataacac

SEQ ID NO: 838039 - DNA, 25 bp, Homo sapien
tagaagactcagtcacagtgtaagc

SEQ ID NO: 838040 - DNA, 25 bp, Homo sapien
gggccatgatttcttatgtgtccat

SEQ ID NO: 838041 - DNA, 25 bp, Homo sapien
gcatctgtagttcttgaaacctgga

SEQ ID NO: 838042 - DNA, 25 bp, Homo sapien
tgcatctgtagttcttgaaacctgg

SEQ ID NO: 838043 - DNA, 25 bp, Homo sapien
ggagacagcagactgggccatgatt

SEQ ID NO: 838044 - DNA, 25 bp, Homo sapien
gagagttcaaactgaggtgagatca

SEQ ID NO: 838045 - DNA, 25 bp, Homo sapien
gttcaaactgaggtgagatcatcat

SEQ ID NO: 838046 - DNA, 25 bp, Homo sapien
agtgagagagttcaaactgaggtga

SEQ ID NO: 838047 - DNA, 25 bp, Homo sapien
tcaaactgaggtgagatcatcatgt

SEQ ID NO: 838048 - DNA, 25 bp, Homo sapien
gcactgatagttccataaaagtcct

SEQ ID NO: 838049 - DNA, 25 bp, Homo sapien
cataaaagtccttgtgatatttggt

SEQ ID NO: 838050 - DNA, 25 bp, Homo sapien
ccagagagtggagagtagacgaggg

SEQ ID NO: 838051 - DNA, 25 bp, Homo sapien
gatatttggtataagttggtaataa

SEQ ID NO: 838052 - DNA, 25 bp, Homo sapien
tcttttcaggcaataaagctttctt

SEQ ID NO: 838053 - DNA, 25 bp, Homo sapien
tttttagttctcttttcaggcaata

SEQ ID NO: 838054 - DNA, 25 bp, Homo sapien
tagttctcttttcaggcaataaagc

SEQ ID NO: 838055 - DNA, 25 bp, Homo sapien
tctcttttcaggcaataaagctttc

SEQ ID NO: 838056 - DNA, 25 bp, Homo sapien
ggctagtctgatttgcgtcactttc

SEQ ID NO: 838057 - DNA, 25 bp, Homo sapien
ccaagtcggttgaacgtgaggacat

SEQ ID NO: 838058 - DNA, 25 bp, Homo sapien
tgtcagcttctgtgttgttaccaag

SEQ ID NO: 838059 - DNA, 25 bp, Homo sapien
aactgagaggatgtactctgtgtgt

SEQ ID NO: 838060 - DNA, 25 bp, Homo sapien
caatttgctaatttgactgtcagcc

SEQ ID NO: 838061 - DNA, 25 bp, Homo sapien
cttatattcttgaaatctgacagtc

SEQ ID NO: 838062 - DNA, 25 bp, Homo sapien
actgtcagcctctttatctttttcc

SEQ ID NO: 838063 - DNA, 25 bp, Homo sapien
tatctttttccaatggtaatacatc

SEQ ID NO: 838064 - DNA, 25 bp, Homo sapien
agacgtgaagactggatcaggagca

SEQ ID NO: 838065 - DNA, 25 bp, Homo sapien
gactggatcaggagcatctcgtcct

SEQ ID NO: 838066 - DNA, 25 bp, Homo sapien
ggatcaggagcatctcgtccttggt

SEQ ID NO: 838067 - DNA, 25 bp, Homo sapien
tgaagactggatcaggagcatctcg

SEQ ID NO: 838068 - DNA, 25 bp, Homo sapien
tgatcttattcgtctttgccatatg

SEQ ID NO: 838069 - DNA, 25 bp, Homo sapien
cttccatcaattgctggtacctcat

SEQ ID NO: 838070 - DNA, 25 bp, Homo sapien
tcattggtgatcttattcgtctttg

SEQ ID NO: 838071 - DNA, 25 bp, Homo sapien
ttggtgatcttattcgtctttgcca

SEQ ID NO: 838072 - DNA, 25 bp, Homo sapien
cctcatagtcatcattactttcgta

SEQ ID NO: 838073 - DNA, 25 bp, Homo sapien
cattactttcgtaatggtcaaggac

SEQ ID NO: 838074 - DNA, 25 bp, Homo sapien
catcattactttcgtaatggtcaag

SEQ ID NO: 838075 - DNA, 25 bp, Homo sapien
actttcgtaatggtcaaggacagca

SEQ ID NO: 838076 - DNA, 25 bp, Homo sapien
ttttcgtgtaagtgttctgggacat

SEQ ID NO: 838077 - DNA, 25 bp, Homo sapien
ttggacttgagcttgcacttttttt

SEQ ID NO: 838078 - DNA, 25 bp, Homo sapien
gacattcaggagaatccatcccaca

SEQ ID NO: 838079 - DNA, 25 bp, Homo sapien
tttttcgtgtaagtgttctgggaca

SEQ ID NO: 838080 - DNA, 25 bp, Homo sapien
ctgcttatgctcttgctgaattgcc

SEQ ID NO: 838081 - DNA, 25 bp, Homo sapien
tggcagcccagtctgcaacccaatg

SEQ ID NO: 838082 - DNA, 25 bp, Homo sapien
cggcagccggctaatttgctggaaa

SEQ ID NO: 838083 - DNA, 25 bp, Homo sapien
gagggctttcctctcctgcttatgc

SEQ ID NO: 838084 - DNA, 25 bp, Homo sapien
tcaatgatttcagccagtaattagc

SEQ ID NO: 838085 - DNA, 25 bp, Homo sapien
tatcattcggataatgcctgtagtc

SEQ ID NO: 838086 - DNA, 25 bp, Homo sapien
tctcacttgaggcactactattcca

SEQ ID NO: 838087 - DNA, 25 bp, Homo sapien
catggtgaatgaaggccgacaccca

SEQ ID NO: 838088 - DNA, 25 bp, Homo sapien
tatataattcagtaccacctgcagc

SEQ ID NO: 838089 - DNA, 25 bp, Homo sapien
tccattagcctggatgctctgaacg

SEQ ID NO: 838090 - DNA, 25 bp, Homo sapien
ggtatagtgccttcccgtaagccag

SEQ ID NO: 838091 - DNA, 25 bp, Homo sapien
caagggagccctaatagctgttggg

SEQ ID NO: 838092 - DNA, 25 bp, Homo sapien
caaccctagggtgacagtgaaagcc

SEQ ID NO: 838093 - DNA, 25 bp, Homo sapien
tgcagccagtggaaaaggtagttac

SEQ ID NO: 838094 - DNA, 25 bp, Homo sapien
gccctgctgggatgtgaagacactc

SEQ ID NO: 838095 - DNA, 25 bp, Homo sapien
tatcttccaaaggaggccaattggc

SEQ ID NO: 838096 - DNA, 25 bp, Homo sapien
tatgcaatgcacacaatgagctggg

SEQ ID NO: 838097 - DNA, 25 bp, Homo sapien
tgtggacaccctcaatgcctgggag

SEQ ID NO: 838098 - DNA, 25 bp, Homo sapien
tctttctggacatgccgtgaggtaa

SEQ ID NO: 838099 - DNA, 25 bp, Homo sapien
catgaactacgtgcaggcttctgag

SEQ ID NO: 838100 - DNA, 25 bp, Homo sapien
taccacttcctgaatatgcattgag

SEQ ID NO: 838101 - DNA, 25 bp, Homo sapien
tcactggctatgtttcttgttgctg

SEQ ID NO: 838102 - DNA, 25 bp, Homo sapien
tacgattgtgtctaggtctttcact

SEQ ID NO: 838103 - DNA, 25 bp, Homo sapien
gctgaacctcattgttcctacgatt

SEQ ID NO: 838104 - DNA, 25 bp, Homo sapien
tttagctctaagtgggaaatgatga

SEQ ID NO: 838105 - DNA, 25 bp, Homo sapien
tggtcacgacgcaacatctgtaagc

SEQ ID NO: 838106 - DNA, 25 bp, Homo sapien
ctcataggttggtggtaaatgtcaa

SEQ ID NO: 838107 - DNA, 25 bp, Homo sapien
cacacagagattgcctaagttgctt

SEQ ID NO: 838108 - DNA, 25 bp, Homo sapien
tattgtacgtatgttggatgcctaa

SEQ ID NO: 838109 - DNA, 25 bp, Homo sapien
caacatcaatgtagaggcgcagctg

SEQ ID NO: 838110 - DNA, 25 bp, Homo sapien
cctgcctaagggtcaggcaacattt

SEQ ID NO: 838111 - DNA, 25 bp, Homo sapien
gatgcctaatactacattgtgctgg

SEQ ID NO: 838112 - DNA, 25 bp, Homo sapien
ctttgtcagacatgtattatgagaa

SEQ ID NO: 838113 - DNA, 25 bp, Homo sapien
tacatgctagctaagaaatctttgc

SEQ ID NO: 838114 - DNA, 25 bp, Homo sapien
gatctcagagtttatgtctttccat

SEQ ID NO: 838115 - DNA, 25 bp, Homo sapien
tctctggattgccttattatgatta

SEQ ID NO: 838116 - DNA, 25 bp, Homo sapien
ggtggctgcgaaactcattgtatcc

SEQ ID NO: 838117 - DNA, 25 bp, Homo sapien
tcaaagggtgttggtgccccgacat

SEQ ID NO: 838118 - DNA, 25 bp, Homo sapien
aatgttagtgagaaagttggaactc

SEQ ID NO: 838119 - DNA, 25 bp, Homo sapien
tatccaattctggttggcttggggc

SEQ ID NO: 838120 - DNA, 25 bp, Homo sapien
tacagcttgagttcctagatttcag

SEQ ID NO: 838121 - DNA, 25 bp, Homo sapien
gacttaaccccatatcagtagacta

SEQ ID NO: 838122 - DNA, 25 bp, Homo sapien
gagtcttgcagaaaagacctgcttc

SEQ ID NO: 838123 - DNA, 25 bp, Homo sapien
tgtgtcatgaaacaagacttaaccc

SEQ ID NO: 838124 - DNA, 25 bp, Homo sapien
actgttttcaagcaattgcaggcta

SEQ ID NO: 838125 - DNA, 25 bp, Homo sapien
ttgtgtagtgcctaacaggagctgc

SEQ ID NO: 838126 - DNA, 25 bp, Homo sapien
tcaagcaattgcaggctaaagaaaa

SEQ ID NO: 838127 - DNA, 25 bp, Homo sapien
gttatagatggtacacagacaaaaa

SEQ ID NO: 838128 - DNA, 25 bp, Homo sapien
gcagcttggcttttcctaaagggtc

SEQ ID NO: 838129 - DNA, 25 bp, Homo sapien
tggctctccgggtatgtctccgttg

SEQ ID NO: 838130 - DNA, 25 bp, Homo sapien
tcactaggataaagctggcagcttg

SEQ ID NO: 838131 - DNA, 25 bp, Homo sapien
aagtgggctggcaactatattgcag

SEQ ID NO: 838132 - DNA, 25 bp, Homo sapien
ttctcaaacaacgtatcccacactt

SEQ ID NO: 838133 - DNA, 25 bp, Homo sapien
tttatttctcaaacaacgtatccca

SEQ ID NO: 838134 - DNA, 25 bp, Homo sapien
tatttctcaaacaacgtatcccaca

SEQ ID NO: 838135 - DNA, 25 bp, Homo sapien
tatcttcagccttaatgacaggaat

SEQ ID NO: 838136 - DNA, 25 bp, Homo sapien
ttatctgaaggctccttaccctgcc

SEQ ID NO: 838137 - DNA, 25 bp, Homo sapien
tctcagacatgatgtagatcctagt

SEQ ID NO: 838138 - DNA, 25 bp, Homo sapien
tgactggtctcattaaagccctttt

SEQ ID NO: 838139 - DNA, 25 bp, Homo sapien
agtattactcccgactgcaaggagc

SEQ ID NO: 838140 - DNA, 25 bp, Homo sapien
cgcagaggtttccaaaaaaatggcg

SEQ ID NO: 838141 - DNA, 25 bp, Homo sapien
tccaaaaaaatggcgctaaggccga

SEQ ID NO: 838142 - DNA, 25 bp, Homo sapien
gcgcagaggtttccaaaaaaatggc

SEQ ID NO: 838143 - DNA, 25 bp, Homo sapien
aaaaaaatggcgctaaggccgagag

SEQ ID NO: 838144 - DNA, 25 bp, Homo sapien
tgcgcttcagcctgcgcattcgctt

SEQ ID NO: 838145 - DNA, 25 bp, Homo sapien
ttgcgcttcagcctgcgcattcgct

SEQ ID NO: 838146 - DNA, 25 bp, Homo sapien
tcttcttttgcgcttcagcctgcgc

SEQ ID NO: 838147 - DNA, 25 bp, Homo sapien
tcttttgcgcttcagcctgcgcatt

SEQ ID NO: 838148 - DNA, 25 bp, Homo sapien
tatatggttgttacactcggccaca

SEQ ID NO: 838149 - DNA, 25 bp, Homo sapien
ttatatggttgttacactcggccac

SEQ ID NO: 838150 - DNA, 25 bp, Homo sapien
tattatatggttgttacactcggcc

SEQ ID NO: 838151 - DNA, 25 bp, Homo sapien
attatatggttgttacactcggcca

SEQ ID NO: 838152 - DNA, 25 bp, Homo sapien
tttcagccatagtacgtcccacctt

SEQ ID NO: 838153 - DNA, 25 bp, Homo sapien
tagtacgtcccacctttctgtgggc

SEQ ID NO: 838154 - DNA, 25 bp, Homo sapien
cttctttcagccatagtacgtccca

SEQ ID NO: 838155 - DNA, 25 bp, Homo sapien
gccatagtacgtcccacctttctgt

SEQ ID NO: 838156 - DNA, 25 bp, Homo sapien
tatcacgagaactcctgacaacctt

SEQ ID NO: 838157 - DNA, 25 bp, Homo sapien
tgtccttttctgcatagaccaaggg

SEQ ID NO: 838158 - DNA, 25 bp, Homo sapien
ggaatcgtagctcagtatcacgaga

SEQ ID NO: 838159 - DNA, 25 bp, Homo sapien
aattgattgatgagaggcgaagcac

SEQ ID NO: 838160 - DNA, 25 bp, Homo sapien
cgcagacacactagttaggaaaatc

SEQ ID NO: 838161 - DNA, 25 bp, Homo sapien
gagaaatcacttgcacccttccaaa

SEQ ID NO: 838162 - DNA, 25 bp, Homo sapien
taacatcttgcggtattacagtaca

SEQ ID NO: 838163 - DNA, 25 bp, Homo sapien
gggaatttggaagtccgcagacaca

SEQ ID NO: 838164 - DNA, 25 bp, Homo sapien
ggtacacaagcaaatgacccctttg

SEQ ID NO: 838165 - DNA, 25 bp, Homo sapien
tgtcatggtgttcaggtcccaggta

SEQ ID NO: 838166 - DNA, 25 bp, Homo sapien
tgttgggcctgctggtacttgtgaa

SEQ ID NO: 838167 - DNA, 25 bp, Homo sapien
tgtgaacccagatgacctgcacggg

SEQ ID NO: 838168 - DNA, 25 bp, Homo sapien
tgtaaccagtattttgttctccagt

SEQ ID NO: 838169 - DNA, 25 bp, Homo sapien
ggcctccattgtaaccagtattttg

SEQ ID NO: 838170 - DNA, 25 bp, Homo sapien
tgttctccagttcaaccctgtggct

SEQ ID NO: 838171 - DNA, 25 bp, Homo sapien
ctccagggcataggcctccattgta

SEQ ID NO: 838172 - DNA, 25 bp, Homo sapien
tcgtgtggccacttgccactaggaa

SEQ ID NO: 838173 - DNA, 25 bp, Homo sapien
gagtaactgcaatctcgtgtggcca

SEQ ID NO: 838174 - DNA, 25 bp, Homo sapien
gcagagtgtttgactattaagacag

SEQ ID NO: 838175 - DNA, 25 bp, Homo sapien
caaggtcctctactgtgttcacaaa

SEQ ID NO: 838176 - DNA, 25 bp, Homo sapien
ttgtacatacaaccaccaccagctg

SEQ ID NO: 838177 - DNA, 25 bp, Homo sapien
gacccagaattgtccatccaggtgg

SEQ ID NO: 838178 - DNA, 25 bp, Homo sapien
gaattgccgtcactttcttgaaagc

SEQ ID NO: 838179 - DNA, 25 bp, Homo sapien
ccaggtggatatttacgattgtaca

SEQ ID NO: 838180 - DNA, 25 bp, Homo sapien
aagaggtagagggtccagtgccttc

SEQ ID NO: 838181 - DNA, 25 bp, Homo sapien
ttatcggttgagtaggcagatgcta

SEQ ID NO: 838182 - DNA, 25 bp, Homo sapien
ttgagtaggcagatgctaaaggtgt

SEQ ID NO: 838183 - DNA, 25 bp, Homo sapien
catcctcagtagaatttttgcactg

SEQ ID NO: 838184 - DNA, 25 bp, Homo sapien
gattgaactgaatagttaccctgtg

SEQ ID NO: 838185 - DNA, 25 bp, Homo sapien
ttttacagcacacaccacttactag

SEQ ID NO: 838186 - DNA, 25 bp, Homo sapien
cacactgaggataagtgattgaact

SEQ ID NO: 838187 - DNA, 25 bp, Homo sapien
tccaacactacagcataagctccat

SEQ ID NO: 838188 - DNA, 25 bp, Homo sapien
agtgaatgaattgagttagagaggc

SEQ ID NO: 838189 - DNA, 25 bp, Homo sapien
gaaagtgaatgaattgagttagaga

SEQ ID NO: 838190 - DNA, 25 bp, Homo sapien
gaatgaattgagttagagaggccat

SEQ ID NO: 838191 - DNA, 25 bp, Homo sapien
ctgagaaagtgaatgaattgagtta

SEQ ID NO: 838192 - DNA, 25 bp, Homo sapien
atgttgcttgcaatttgccaaatac

SEQ ID NO: 838193 - DNA, 25 bp, Homo sapien
tcttctaatgttgcttgcaatttgc

SEQ ID NO: 838194 - DNA, 25 bp, Homo sapien
tttagtcttttcctcgtagataatg

SEQ ID NO: 838195 - DNA, 25 bp, Homo sapien
taatgtttggtgaaaatggcttaac

SEQ ID NO: 838196 - DNA, 25 bp, Homo sapien
gaccagctaataggtactgctttgc

SEQ ID NO: 838197 - DNA, 25 bp, Homo sapien
tgtgagcatgccaccctctttttgt

SEQ ID NO: 838198 - DNA, 25 bp, Homo sapien
cctaggactcatactcatcatctct

SEQ ID NO: 838199 - DNA, 25 bp, Homo sapien
caaccttttggggtggtcatatcgg

SEQ ID NO: 838200 - DNA, 25 bp, Homo sapien
gtcatatcgggctgttcacttctac

SEQ ID NO: 838201 - DNA, 25 bp, Homo sapien
tttcctaggactcatactcatcatc

SEQ ID NO: 838202 - DNA, 25 bp, Homo sapien
gggcacattggttttaaacccagca

SEQ ID NO: 838203 - DNA, 25 bp, Homo sapien
tggcaaactttcttcggtcccaaga

SEQ ID NO: 838204 - DNA, 25 bp, Homo sapien
cctcattggcaaactttcttcggtc

SEQ ID NO: 838205 - DNA, 25 bp, Homo sapien
tgtttttgcccattacactgcctaa

SEQ ID NO: 838206 - DNA, 25 bp, Homo sapien
ttgggacttgaggagagaacctttc

SEQ ID NO: 838207 - DNA, 25 bp, Homo sapien
cttgatcttggggaattcggacaga

SEQ ID NO: 838208 - DNA, 25 bp, Homo sapien
aaggtattttgcacagaaggtggga

SEQ ID NO: 838209 - DNA, 25 bp, Homo sapien
aacctttcttggtcagtgatgacat

SEQ ID NO: 838210 - DNA, 25 bp, Homo sapien
gtagaataggatgagttccataaga

SEQ ID NO: 838211 - DNA, 25 bp, Homo sapien
aagcaagtttaccatatagtacaag

SEQ ID NO: 838212 - DNA, 25 bp, Homo sapien
taccatatagtacaagtagaatagg

SEQ ID NO: 838213 - DNA, 25 bp, Homo sapien
tatgtgctggtcacttcgtggccca

SEQ ID NO: 838214 - DNA, 25 bp, Homo sapien
ttggcttcaggtttcttctctttag

SEQ ID NO: 838215 - DNA, 25 bp, Homo sapien
accctttttcaccttgccaccagca

SEQ ID NO: 838216 - DNA, 25 bp, Homo sapien
tctggcttctcaactttttcacccg

SEQ ID NO: 838217 - DNA, 25 bp, Homo sapien
ttctcaactttttcacccgccatct

SEQ ID NO: 838218 - DNA, 25 bp, Homo sapien
actgaagggttttttgctgtggctc

SEQ ID NO: 838219 - DNA, 25 bp, Homo sapien
tctgacaatgacagggttgcggctg

SEQ ID NO: 838220 - DNA, 25 bp, Homo sapien
cacccgggtactgccgttcttgtca

SEQ ID NO: 838221 - DNA, 25 bp, Homo sapien
atgacagggttgcggctgcaatggg

SEQ ID NO: 838222 - DNA, 25 bp, Homo sapien
ctgatatcgattttggttgaggtgg

SEQ ID NO: 838223 - DNA, 25 bp, Homo sapien
tcgattttggttgaggtggcaatga

SEQ ID NO: 838224 - DNA, 25 bp, Homo sapien
tatcgattttggttgaggtggcaat

SEQ ID NO: 838225 - DNA, 25 bp, Homo sapien
gatatcgattttggttgaggtggca

SEQ ID NO: 838226 - DNA, 25 bp, Homo sapien
tcttgcactgctccgtaatctcata

SEQ ID NO: 838227 - DNA, 25 bp, Homo sapien
ttctgctcaatcttgcactgctccg

SEQ ID NO: 838228 - DNA, 25 bp, Homo sapien
gctcaatcttgcactgctccgtaat

SEQ ID NO: 838229 - DNA, 25 bp, Homo sapien
aatcttgcactgctccgtaatctca

SEQ ID NO: 838230 - DNA, 25 bp, Homo sapien
cattcgtcagggcaaccacagatca

SEQ ID NO: 838231 - DNA, 25 bp, Homo sapien
gtcagggcaaccacagatcacaggt

SEQ ID NO: 838232 - DNA, 25 bp, Homo sapien
ttcgtcagggcaaccacagatcaca

SEQ ID NO: 838233 - DNA, 25 bp, Homo sapien
taattaagttcttaagacatttaga

SEQ ID NO: 838234 - DNA, 25 bp, Homo sapien
cctcaatgcatccagctttccttca

SEQ ID NO: 838235 - DNA, 25 bp, Homo sapien
tgcatccagctttccttcatctttt

SEQ ID NO: 838236 - DNA, 25 bp, Homo sapien
ctcaatgcatccagctttccttcat

SEQ ID NO: 838237 - DNA, 25 bp, Homo sapien
caatgcatccagctttccttcatct

SEQ ID NO: 838238 - DNA, 25 bp, Homo sapien
ggtagtagagtccacaaaagcatgc

SEQ ID NO: 838239 - DNA, 25 bp, Homo sapien
caaaagcatgcaatgtcactgacat

SEQ ID NO: 838240 - DNA, 25 bp, Homo sapien
tgttcagggtagtagagtccacaaa

SEQ ID NO: 838241 - DNA, 25 bp, Homo sapien
ccacaaaagcatgcaatgtcactga

SEQ ID NO: 838242 - DNA, 25 bp, Homo sapien
cacccctggctatgtctggaatcag

SEQ ID NO: 838243 - DNA, 25 bp, Homo sapien
tatcctggatcccacccataggctt

SEQ ID NO: 838244 - DNA, 25 bp, Homo sapien
cccataggcttatccacaccaggga

SEQ ID NO: 838245 - DNA, 25 bp, Homo sapien
accccactgagcaggtctagctcca

SEQ ID NO: 838246 - DNA, 25 bp, Homo sapien
taagagacttaagagcattcaggtc

SEQ ID NO: 838247 - DNA, 25 bp, Homo sapien
tatcctccaggctgtatctgaagtg

SEQ ID NO: 838248 - DNA, 25 bp, Homo sapien
gatgaggactgtggtttatttggca

SEQ ID NO: 838249 - DNA, 25 bp, Homo sapien
tatatagtcagtttctgcgatcctg

SEQ ID NO: 838250 - DNA, 25 bp, Homo sapien
gtgcagctgagggtatatttccatt

SEQ ID NO: 838251 - DNA, 25 bp, Homo sapien
gaacctgtgaggtcacgcttggctg

SEQ ID NO: 838252 - DNA, 25 bp, Homo sapien
ttggagcctgataacaaggaacctg

SEQ ID NO: 838253 - DNA, 25 bp, Homo sapien
gagagagatctcctatctgcttggt

SEQ ID NO: 838254 - DNA, 25 bp, Homo sapien
ccaaatctctttccttccaaataag

SEQ ID NO: 838255 - DNA, 25 bp, Homo sapien
ttccaaatctctttccttccaaata

SEQ ID NO: 838256 - DNA, 25 bp, Homo sapien
aatctctttccttccaaataagcat

SEQ ID NO: 838257 - DNA, 25 bp, Homo sapien
caaatctctttccttccaaataagc

SEQ ID NO: 838258 - DNA, 25 bp, Homo sapien
cttctccgttttgattgaggaggag

SEQ ID NO: 838259 - DNA, 25 bp, Homo sapien
ttgaggaggaggtagtaaagtggat

SEQ ID NO: 838260 - DNA, 25 bp, Homo sapien
ctccgttttgattgaggaggaggta

SEQ ID NO: 838261 - DNA, 25 bp, Homo sapien
ggaggaggtagtaaagtggattcat

SEQ ID NO: 838262 - DNA, 25 bp, Homo sapien
gggctcatagaaccccactggttcc

SEQ ID NO: 838263 - DNA, 25 bp, Homo sapien
tggttccataagtgtgggtgtttca

SEQ ID NO: 838264 - DNA, 25 bp, Homo sapien
tagaaccccactggttccataagtg

SEQ ID NO: 838265 - DNA, 25 bp, Homo sapien
taagtgtgggtgtttcagatatcat

SEQ ID NO: 838266 - DNA, 25 bp, Homo sapien
tgttcctttgtgagtaagcccaaag

SEQ ID NO: 838267 - DNA, 25 bp, Homo sapien
ttttaacatctgtgaatatagttgt

SEQ ID NO: 838268 - DNA, 25 bp, Homo sapien
taacatctgtgaatatagttgttcc

SEQ ID NO: 838269 - DNA, 25 bp, Homo sapien
tatagttgttcctttgtgagtaagc

SEQ ID NO: 838270 - DNA, 25 bp, Homo sapien
tttcctcttaggatcgtaagtcctg

SEQ ID NO: 838271 - DNA, 25 bp, Homo sapien
taggatcgtaagtcctgaacaatct

SEQ ID NO: 838272 - DNA, 25 bp, Homo sapien
cctcttaggatcgtaagtcctgaac

SEQ ID NO: 838273 - DNA, 25 bp, Homo sapien
tcttaggatcgtaagtcctgaacaa

SEQ ID NO: 838274 - DNA, 25 bp, Homo sapien
attctgtttgagctttcctggtgta

SEQ ID NO: 838275 - DNA, 25 bp, Homo sapien
cacttttcattctgtttgagctttc

SEQ ID NO: 838276 - DNA, 25 bp, Homo sapien
ctgtttgagctttcctggtgtatac

SEQ ID NO: 838277 - DNA, 25 bp, Homo sapien
tcacttttcattctgtttgagcttt

SEQ ID NO: 838278 - DNA, 25 bp, Homo sapien
tcagtcgttaatgaggtcacacttt

SEQ ID NO: 838279 - DNA, 25 bp, Homo sapien
cagtcgttaatgaggtcacactttc

SEQ ID NO: 838280 - DNA, 25 bp, Homo sapien
ttgttcagtcgttaatgaggtcaca

SEQ ID NO: 838281 - DNA, 25 bp, Homo sapien
gttcagtcgttaatgaggtcacact

SEQ ID NO: 838282 - DNA, 25 bp, Homo sapien
tcagaaatggttagcagccactcat

SEQ ID NO: 838283 - DNA, 25 bp, Homo sapien
cctgtgacgtcacagaaatcttgac

SEQ ID NO: 838284 - DNA, 25 bp, Homo sapien
cactcataacagtcctgtgacgtca

SEQ ID NO: 838285 - DNA, 25 bp, Homo sapien
gaaatcttgactcctgcttgtcttt

SEQ ID NO: 838286 - DNA, 25 bp, Homo sapien
gactgaatagccacatgatggttgc

SEQ ID NO: 838287 - DNA, 25 bp, Homo sapien
taagggaaggtgaacggactgaata

SEQ ID NO: 838288 - DNA, 25 bp, Homo sapien
tgtgattgccaatcgcctagtattc

SEQ ID NO: 838289 - DNA, 25 bp, Homo sapien
cgcctagtattcttgttgaggaaat

SEQ ID NO: 838290 - DNA, 25 bp, Homo sapien
ttacatggatatagaattggctgca

SEQ ID NO: 838291 - DNA, 25 bp, Homo sapien
tacatggatatagaattggctgcat

SEQ ID NO: 838292 - DNA, 25 bp, Homo sapien
ttagaattgagctttcttccctcct

SEQ ID NO: 838293 - DNA, 25 bp, Homo sapien
tccctcctccaacaggggcctgccc

SEQ ID NO: 838294 - DNA, 25 bp, Homo sapien
cttccctcctccaacaggggcctgc

SEQ ID NO: 838295 - DNA, 25 bp, Homo sapien
tcctccaacaggggcctgccccagc

SEQ ID NO: 838296 - DNA, 25 bp, Homo sapien
tccacagctagaacctctaatgttg

SEQ ID NO: 838297 - DNA, 25 bp, Homo sapien
cacgtccacagctagaacctctaat

SEQ ID NO: 838298 - DNA, 25 bp, Homo sapien
ttagccatccccacgtccacagcta

SEQ ID NO: 838299 - DNA, 25 bp, Homo sapien
acagctagaacctctaatgttgcca

SEQ ID NO: 838300 - DNA, 25 bp, Homo sapien
gggtctctgccagagctgtggcaga

SEQ ID NO: 838301 - DNA, 25 bp, Homo sapien
aagggtctctgccagagctgtggca

SEQ ID NO: 838302 - DNA, 25 bp, Homo sapien
atctgcaagggtctctgccagagct

SEQ ID NO: 838303 - DNA, 25 bp, Homo sapien
ctgcaagggtctctgccagagctgt

SEQ ID NO: 838304 - DNA, 25 bp, Homo sapien
ctgagtgctcccaccagctgcgctt

SEQ ID NO: 838305 - DNA, 25 bp, Homo sapien
ctcccaccagctgcgcttctctgct

SEQ ID NO: 838306 - DNA, 25 bp, Homo sapien
gtgctcccaccagctgcgcttctct

SEQ ID NO: 838307 - DNA, 25 bp, Homo sapien
ccaccagctgcgcttctctgcttct

SEQ ID NO: 838308 - DNA, 25 bp, Homo sapien
cccagagacactgtccttgggattg

SEQ ID NO: 838309 - DNA, 25 bp, Homo sapien
agagacactgtccttgggattggtg

SEQ ID NO: 838310 - DNA, 25 bp, Homo sapien
cagagacactgtccttgggattggt

SEQ ID NO: 838311 - DNA, 25 bp, Homo sapien
agacactgtccttgggattggtgtt

SEQ ID NO: 838312 - DNA, 25 bp, Homo sapien
agacacggggttttcccagacattg

SEQ ID NO: 838313 - DNA, 25 bp, Homo sapien
ctgccagctggctaatttcttggct

SEQ ID NO: 838314 - DNA, 25 bp, Homo sapien
ccttttctggctggctttacttgca

SEQ ID NO: 838315 - DNA, 25 bp, Homo sapien
aggagaggccatgatcagacacggg

SEQ ID NO: 838316 - DNA, 25 bp, Homo sapien
ggaggcccttgcgtcttgctgagag

SEQ ID NO: 838317 - DNA, 25 bp, Homo sapien
gcccttgcgtcttgctgagaggctg

SEQ ID NO: 838318 - DNA, 25 bp, Homo sapien
gggggaggcccttgcgtcttgctga

SEQ ID NO: 838319 - DNA, 25 bp, Homo sapien
aggcccttgcgtcttgctgagaggc

SEQ ID NO: 838320 - DNA, 25 bp, Homo sapien
gcaccaacgaggtgctcagtctggg

SEQ ID NO: 838321 - DNA, 25 bp, Homo sapien
gaggtgcaaattggcagcagctggg

SEQ ID NO: 838322 - DNA, 25 bp, Homo sapien
agaggctgttgctaatgaggtgcaa

SEQ ID NO: 838323 - DNA, 25 bp, Homo sapien
tcatttagcaccaacgaggtgctca

SEQ ID NO: 838324 - DNA, 25 bp, Homo sapien
gagagctgggctaaaagtatgtgtc

SEQ ID NO: 838325 - DNA, 25 bp, Homo sapien
ccatagtgacctggaagttgcttat

SEQ ID NO: 838326 - DNA, 25 bp, Homo sapien
caatgttgttcttagttcctcttac

SEQ ID NO: 838327 - DNA, 25 bp, Homo sapien
tctgcagcaattaagttgcattcat

SEQ ID NO: 838328 - DNA, 25 bp, Homo sapien
acaaagccagagtttgcaagggaaa

SEQ ID NO: 838329 - DNA, 25 bp, Homo sapien
aaagccagagtttgcaagggaaatc

SEQ ID NO: 838330 - DNA, 25 bp, Homo sapien
tcagcttgcctcttgtcaggggtca

SEQ ID NO: 838331 - DNA, 25 bp, Homo sapien
aagacaaagccagagtttgcaaggg

SEQ ID NO: 838332 - DNA, 25 bp, Homo sapien
ctccatgcctgcgtgctccttgcct

SEQ ID NO: 838333 - DNA, 25 bp, Homo sapien
gaagagtgggtttatgtctgtagat

SEQ ID NO: 838334 - DNA, 25 bp, Homo sapien
gtttatgtctgtagatgcgccactg

SEQ ID NO: 838335 - DNA, 25 bp, Homo sapien
tggggagcccgctggcaagctaggg

SEQ ID NO: 838336 - DNA, 25 bp, Homo sapien
taagagaagtcgtcaaagttgcccc

SEQ ID NO: 838337 - DNA, 25 bp, Homo sapien
ggttgcagactcagtgatgcttagt

SEQ ID NO: 838338 - DNA, 25 bp, Homo sapien
cgcggagttgggcacctctctgttt

SEQ ID NO: 838339 - DNA, 25 bp, Homo sapien
gctggagggcagcaacgcctgcttt

SEQ ID NO: 838340 - DNA, 25 bp, Homo sapien
ttccccggacgctctccttcctgat

SEQ ID NO: 838341 - DNA, 25 bp, Homo sapien
gccactcgagttccccggacgctct

SEQ ID NO: 838342 - DNA, 25 bp, Homo sapien
agcccgtcgcctccgggcagagttc

SEQ ID NO: 838343 - DNA, 25 bp, Homo sapien
tcgagttccccggacgctctccttc

SEQ ID NO: 838344 - DNA, 25 bp, Homo sapien
gccggtcctggtccccccagcctca

SEQ ID NO: 838345 - DNA, 25 bp, Homo sapien
ctgggctcaggaccaaggtgggcgc

SEQ ID NO: 838346 - DNA, 25 bp, Homo sapien
ggctcaggaccaaggtgggcgcccg

SEQ ID NO: 838347 - DNA, 25 bp, Homo sapien
caggaccaaggtgggcgcccgccgg

SEQ ID NO: 838348 - DNA, 25 bp, Homo sapien
agctctgctcactggagggcggcgg

SEQ ID NO: 838349 - DNA, 25 bp, Homo sapien
cagctctgctcactggagggcggcg

SEQ ID NO: 838350 - DNA, 25 bp, Homo sapien
ccagctctgctcactggagggcggc

SEQ ID NO: 838351 - DNA, 25 bp, Homo sapien
aaggttcccactggcggagctcctg

SEQ ID NO: 838352 - DNA, 25 bp, Homo sapien
ctaaggaaggcaccgggcgacgagc

SEQ ID NO: 838353 - DNA, 25 bp, Homo sapien
gaggtcggcgcttcgacttggcacc

SEQ ID NO: 838354 - DNA, 25 bp, Homo sapien
ccgccgacgaattcactccaaggtt

SEQ ID NO: 838355 - DNA, 25 bp, Homo sapien
agggccctgtgatccgattccatcg

SEQ ID NO: 838356 - DNA, 25 bp, Homo sapien
gcctttctgcttcaccgagggccct

SEQ ID NO: 838357 - DNA, 25 bp, Homo sapien
gattccatcgaattaaccgctgttt

SEQ ID NO: 838358 - DNA, 25 bp, Homo sapien
gctgtttaccgagggtctgctgcgc

SEQ ID NO: 838359 - DNA, 25 bp, Homo sapien
ttcttatacgaacaacgcagcggcg

SEQ ID NO: 838360 - DNA, 25 bp, Homo sapien
tctgcagacaccacaagcttggatt

SEQ ID NO: 838361 - DNA, 25 bp, Homo sapien
gaggcggacagttaaattctgcaga

SEQ ID NO: 838362 - DNA, 25 bp, Homo sapien
cagtcggtcctaagtggtttgaagc

SEQ ID NO: 838363 - DNA, 25 bp, Homo sapien
ctcaaaccgcacagttttcgataat

SEQ ID NO: 838364 - DNA, 25 bp, Homo sapien
tcaaaccgcacagttttcgataatc

SEQ ID NO: 838365 - DNA, 25 bp, Homo sapien
actcaaaccgcacagttttcgataa

SEQ ID NO: 838366 - DNA, 25 bp, Homo sapien
ttttaaacactttgtagcacatcac

SEQ ID NO: 838367 - DNA, 25 bp, Homo sapien
gcagcgatttcttgtgtggaaaccc

SEQ ID NO: 838368 - DNA, 25 bp, Homo sapien
ccttgtcttaaccatagatagttcc

SEQ ID NO: 838369 - DNA, 25 bp, Homo sapien
cacctcgtatatgtaggtttatagt

SEQ ID NO: 838370 - DNA, 25 bp, Homo sapien
tgtgtttgccgacagcagcgatttc

SEQ ID NO: 838371 - DNA, 25 bp, Homo sapien
tattacttttcctcgctgcacatgg

SEQ ID NO: 838372 - DNA, 25 bp, Homo sapien
tacgaggagagttacagaacatggg

SEQ ID NO: 838373 - DNA, 25 bp, Homo sapien
caattctttgttcacgggcacacca

SEQ ID NO: 838374 - DNA, 25 bp, Homo sapien
gcacataccgtataaaaagagggct

SEQ ID NO: 838375 - DNA, 25 bp, Homo sapien
tgaagcacctaatacacgatgtccc

SEQ ID NO: 838376 - DNA, 25 bp, Homo sapien
ttcgtggatcttgtgttgaagcacc

SEQ ID NO: 838377 - DNA, 25 bp, Homo sapien
gatgtcccttctgaagacgggtgca

SEQ ID NO: 838378 - DNA, 25 bp, Homo sapien
atttgcacgtgtccaagcccttgag

SEQ ID NO: 838379 - DNA, 25 bp, Homo sapien
gaggtacgtccatcacagtctagaa

SEQ ID NO: 838380 - DNA, 25 bp, Homo sapien
catgtaaactaaaatccgatggagg

SEQ ID NO: 838381 - DNA, 25 bp, Homo sapien
aatgtagccctcaaaatcagctgag

SEQ ID NO: 838382 - DNA, 25 bp, Homo sapien
tagaaagggatcatcaacggaggct

SEQ ID NO: 838383 - DNA, 25 bp, Homo sapien
ggctgttgtactgttctctgagaag

SEQ ID NO: 838384 - DNA, 25 bp, Homo sapien
tgaggaataccataaaagctgccag

SEQ ID NO: 838385 - DNA, 25 bp, Homo sapien
gaggaataccataaaagctgccaga

SEQ ID NO: 838386 - DNA, 25 bp, Homo sapien
tgccagagaggctgttgtactgttc

SEQ ID NO: 838387 - DNA, 25 bp, Homo sapien
tctcctcctccctctatgctgttgt

SEQ ID NO: 838388 - DNA, 25 bp, Homo sapien
ttttagatggagggacaaaaatatc

SEQ ID NO: 838389 - DNA, 25 bp, Homo sapien
cctcctccctctatgctgttgtttt

SEQ ID NO: 838390 - DNA, 25 bp, Homo sapien
tagatggagggacaaaaatatccat

SEQ ID NO: 838391 - DNA, 25 bp, Homo sapien
tgagagtctgattccatgtgatccc

SEQ ID NO: 838392 - DNA, 25 bp, Homo sapien
tgtaaccccggatttgagatgcacc

SEQ ID NO: 838393 - DNA, 25 bp, Homo sapien
gagatgcacccgaaggcgtctgtct

SEQ ID NO: 838394 - DNA, 25 bp, Homo sapien
tcatcatttgacagggctgagcagg

SEQ ID NO: 838395 - DNA, 25 bp, Homo sapien
catccatgaccttcccatggagttt

SEQ ID NO: 838396 - DNA, 25 bp, Homo sapien
atccatgaccttcccatggagtttc

SEQ ID NO: 838397 - DNA, 25 bp, Homo sapien
gggagggcagttagtttcaccctca

SEQ ID NO: 838398 - DNA, 25 bp, Homo sapien
agcttggctatgagctgtggcgtaa

SEQ ID NO: 838399 - DNA, 25 bp, Homo sapien
cagttagtttcaccctcagaggcct

SEQ ID NO: 838400 - DNA, 25 bp, Homo sapien
taatctgcacattggagacctctct

SEQ ID NO: 838401 - DNA, 25 bp, Homo sapien
tagatacggaaaacaagggtgactc

SEQ ID NO: 838402 - DNA, 25 bp, Homo sapien
taacaggttacgtagaccagcagtg

SEQ ID NO: 838403 - DNA, 25 bp, Homo sapien
ggccctgagctataatcaacggtga

SEQ ID NO: 838404 - DNA, 25 bp, Homo sapien
gaactttttgcaccatgtacccatg

SEQ ID NO: 838405 - DNA, 25 bp, Homo sapien
tagacacatgctaggataggccccg

SEQ ID NO: 838406 - DNA, 25 bp, Homo sapien
caaccttgccaacacggagagggca

SEQ ID NO: 838407 - DNA, 25 bp, Homo sapien
tcagcttgtgaatcttacgtgcccg

SEQ ID NO: 838408 - DNA, 25 bp, Homo sapien
tcagacccagcaaaagcgtagaggc

SEQ ID NO: 838409 - DNA, 25 bp, Homo sapien
tgctatgctggagacggttccagcc

SEQ ID NO: 838410 - DNA, 25 bp, Homo sapien
cctcccattagccagggcggagact

SEQ ID NO: 838411 - DNA, 25 bp, Homo sapien
tccagcctggaaagcggccaagttc

SEQ ID NO: 838412 - DNA, 25 bp, Homo sapien
tctcactgtgagtggaagctggatc

SEQ ID NO: 838413 - DNA, 25 bp, Homo sapien
tgggcatccagggtcaagatgttcc

SEQ ID NO: 838414 - DNA, 25 bp, Homo sapien
tactgtctcttttgggcatgcgtgc

SEQ ID NO: 838415 - DNA, 25 bp, Homo sapien
tatcagtcctggtaagagtgtagct

SEQ ID NO: 838416 - DNA, 25 bp, Homo sapien
tgatgggcattgagaacactaggga

SEQ ID NO: 838417 - DNA, 25 bp, Homo sapien
tcaagacagagccaattacagacga

SEQ ID NO: 838418 - DNA, 25 bp, Homo sapien
ggactcgttccgtctgtcactctga

SEQ ID NO: 838419 - DNA, 25 bp, Homo sapien
agagccaattacagacgaaccaccc

SEQ ID NO: 838420 - DNA, 25 bp, Homo sapien
tgtctacagacttcccttcaacatc

SEQ ID NO: 838421 - DNA, 25 bp, Homo sapien
atgcctgatgccctgaacaagttca

SEQ ID NO: 838422 - DNA, 25 bp, Homo sapien
tagtggtcgcttgttttgcttatgc

SEQ ID NO: 838423 - DNA, 25 bp, Homo sapien
ggagaaagactagtggtcgcttgtt

SEQ ID NO: 838424 - DNA, 25 bp, Homo sapien
tgcctgatgccctgaacaagttcac

SEQ ID NO: 838425 - DNA, 25 bp, Homo sapien
agtctctttgatgatttgcctatct

SEQ ID NO: 838426 - DNA, 25 bp, Homo sapien
ctttgatgatttgcctatcttgatg

SEQ ID NO: 838427 - DNA, 25 bp, Homo sapien
gatgatttgcctatcttgatgattt

SEQ ID NO: 838428 - DNA, 25 bp, Homo sapien
ttgataacttggcatctagccccat

SEQ ID NO: 838429 - DNA, 25 bp, Homo sapien
aggaaaagtggctgaatggaaaaga

SEQ ID NO: 838430 - DNA, 25 bp, Homo sapien
cggtaatccatatgttgcaagagag

SEQ ID NO: 838431 - DNA, 25 bp, Homo sapien
tgactttgaggacttgagtatttaa

SEQ ID NO: 838432 - DNA, 25 bp, Homo sapien
tcaacacttttcataagataagatg

SEQ ID NO: 838433 - DNA, 25 bp, Homo sapien
tactccctgtgcgaggagcctcggg

SEQ ID NO: 838434 - DNA, 25 bp, Homo sapien
gcttcaatgacggtaaactcagagg

SEQ ID NO: 838435 - DNA, 25 bp, Homo sapien
gaggaagacctggaccttagcgcct

SEQ ID NO: 838436 - DNA, 25 bp, Homo sapien
cacattaccagtgacagcttcaatg

SEQ ID NO: 838437 - DNA, 25 bp, Homo sapien
tttttggccttcaggaccataaggc

SEQ ID NO: 838438 - DNA, 25 bp, Homo sapien
acctgtctgctgagtcttggagccc

SEQ ID NO: 838439 - DNA, 25 bp, Homo sapien
gatcctggcaccagcaatgggatgt

SEQ ID NO: 838440 - DNA, 25 bp, Homo sapien
taaagatgggcccactctggcccga

SEQ ID NO: 838441 - DNA, 25 bp, Homo sapien
ttcgctaaagcgtttgcagtatcca

SEQ ID NO: 838442 - DNA, 25 bp, Homo sapien
cgctaaagcgtttgcagtatccaga

SEQ ID NO: 838443 - DNA, 25 bp, Homo sapien
tcgctaaagcgtttgcagtatccag

SEQ ID NO: 838444 - DNA, 25 bp, Homo sapien
cacgctcccactgtatttgttgagt

SEQ ID NO: 838445 - DNA, 25 bp, Homo sapien
tgcccacgctcccactgtatttgtt

SEQ ID NO: 838446 - DNA, 25 bp, Homo sapien
tgagtgggcgaacctcagtggagag

SEQ ID NO: 838447 - DNA, 25 bp, Homo sapien
gtatttgttgagtgggcgaacctca

SEQ ID NO: 838448 - DNA, 25 bp, Homo sapien
tctgaatcctattacctgccgtggc

SEQ ID NO: 838449 - DNA, 25 bp, Homo sapien
tattacctgccgtggccacctgctt

SEQ ID NO: 838450 - DNA, 25 bp, Homo sapien
gagactggctgcaaagcatccctgt

SEQ ID NO: 838451 - DNA, 25 bp, Homo sapien
cggagaactatcttttcagccagag

SEQ ID NO: 838452 - DNA, 25 bp, Homo sapien
tgtgcagggtacttgtgtgagagcc

SEQ ID NO: 838453 - DNA, 25 bp, Homo sapien
gttgtgtgcagggtacttgtgtgag

SEQ ID NO: 838454 - DNA, 25 bp, Homo sapien
tgtgtgagagccactcaggtctaag

SEQ ID NO: 838455 - DNA, 25 bp, Homo sapien
ctcaggtctaaggtgcactggtttt

SEQ ID NO: 838456 - DNA, 25 bp, Homo sapien
ctgatacgggtatttctggaacagc

SEQ ID NO: 838457 - DNA, 25 bp, Homo sapien
ggagattgcccttctctcaggccca

SEQ ID NO: 838458 - DNA, 25 bp, Homo sapien
ttggggaacaattagaaatctgagc

SEQ ID NO: 838459 - DNA, 25 bp, Homo sapien
tccttcattgacatgaggagattgc

SEQ ID NO: 838460 - DNA, 25 bp, Homo sapien
tcactgaaagatatgagggaatgtc

SEQ ID NO: 838461 - DNA, 25 bp, Homo sapien
ccttcactgaaagatatgagggaat

SEQ ID NO: 838462 - DNA, 25 bp, Homo sapien
cttgtgccttcactgaaagatatga

SEQ ID NO: 838463 - DNA, 25 bp, Homo sapien
tgccttcactgaaagatatgaggga

SEQ ID NO: 838464 - DNA, 25 bp, Homo sapien
taggatgcaagagtgtaggaatagt

SEQ ID NO: 838465 - DNA, 25 bp, Homo sapien
gcaagagtgtaggaatagtaaatac

SEQ ID NO: 838466 - DNA, 25 bp, Homo sapien
ttcttttagggtaggatgcaagagt

SEQ ID NO: 838467 - DNA, 25 bp, Homo sapien
ttttagggtaggatgcaagagtgta

SEQ ID NO: 838468 - DNA, 25 bp, Homo sapien
gattagacttgtatcgatgaattca

SEQ ID NO: 838469 - DNA, 25 bp, Homo sapien
ttagacttgtatcgatgaattcatt

SEQ ID NO: 838470 - DNA, 25 bp, Homo sapien
ctggattagacttgtatcgatgaat

SEQ ID NO: 838471 - DNA, 25 bp, Homo sapien
tgtatcgatgaattcatttttatct

SEQ ID NO: 838472 - DNA, 25 bp, Homo sapien
tagcctgcacatggttttcttagcc

SEQ ID NO: 838473 - DNA, 25 bp, Homo sapien
taactgcggttgctaactggctggc

SEQ ID NO: 838474 - DNA, 25 bp, Homo sapien
actctgtggatgtctgggaagtcac

SEQ ID NO: 838475 - DNA, 25 bp, Homo sapien
ggctactgcgctcccaataactgcg

SEQ ID NO: 838476 - DNA, 25 bp, Homo sapien
gatctgggagcccaggtatgaagtc

SEQ ID NO: 838477 - DNA, 25 bp, Homo sapien
ggagcccaggtatgaagtcacaggc

SEQ ID NO: 838478 - DNA, 25 bp, Homo sapien
gcccaggtatgaagtcacaggcgcc

SEQ ID NO: 838479 - DNA, 25 bp, Homo sapien
ccaggtatgaagtcacaggcgccat

SEQ ID NO: 838480 - DNA, 25 bp, Homo sapien
gacttggtggggtagctgcagagtg

SEQ ID NO: 838481 - DNA, 25 bp, Homo sapien
acttggtggggtagctgcagagtgg

SEQ ID NO: 838482 - DNA, 25 bp, Homo sapien
ggacttggtggggtagctgcagagt

SEQ ID NO: 838483 - DNA, 25 bp, Homo sapien
tggattgcccatcacgggtccgtat

SEQ ID NO: 838484 - DNA, 25 bp, Homo sapien
ggaagttagcaagtgaatcccaact

SEQ ID NO: 838485 - DNA, 25 bp, Homo sapien
ttccgtttgcactttgatagctggc

SEQ ID NO: 838486 - DNA, 25 bp, Homo sapien
agcagtttgaatgccgaactccagg

SEQ ID NO: 838487 - DNA, 25 bp, Homo sapien
gaaaatcagtgagtcatcttgacag

SEQ ID NO: 838488 - DNA, 25 bp, Homo sapien
tgtttcccagcaactcggcctggag

SEQ ID NO: 838489 - DNA, 25 bp, Homo sapien
ggcctggagttgatcactctcaata

SEQ ID NO: 838490 - DNA, 25 bp, Homo sapien
tatcaaataaccagtgcggattggg

SEQ ID NO: 838491 - DNA, 25 bp, Homo sapien
gtggagccttcgtaatacctcctca

SEQ ID NO: 838492 - DNA, 25 bp, Homo sapien
tttgtggagccttcgtaatacctcc

SEQ ID NO: 838493 - DNA, 25 bp, Homo sapien
ggtgtttgtggagccttcgtaatac

SEQ ID NO: 838494 - DNA, 25 bp, Homo sapien
ggagccttcgtaatacctcctcact

SEQ ID NO: 838495 - DNA, 25 bp, Homo sapien
tcaccaggcctctagatggttttaa

SEQ ID NO: 838496 - DNA, 25 bp, Homo sapien
tacctttttgtagggctgctgaaca

SEQ ID NO: 838497 - DNA, 25 bp, Homo sapien
tcaggtccatactaggaagatcttt

SEQ ID NO: 838498 - DNA, 25 bp, Homo sapien
caaagtcagatgataaatcaggtcc

SEQ ID NO: 838499 - DNA, 25 bp, Homo sapien
cccttctgcagatctttgtttgacc

SEQ ID NO: 838500 - DNA, 25 bp, Homo sapien
tgtttgaccgtctgttttaagtgcc

SEQ ID NO: 838501 - DNA, 25 bp, Homo sapien
tgggctgtgtgaaaaacccatgatg

SEQ ID NO: 838502 - DNA, 25 bp, Homo sapien
aacccatgatgatgcctttcccttc

SEQ ID NO: 838503 - DNA, 25 bp, Homo sapien
ctctctcatggccagacaataccat

SEQ ID NO: 838504 - DNA, 25 bp, Homo sapien
ctttaggctgctgttacagataaac

SEQ ID NO: 838505 - DNA, 25 bp, Homo sapien
gctgctgttacagataaactttaca

SEQ ID NO: 838506 - DNA, 25 bp, Homo sapien
tctctcatggccagacaataccatg

SEQ ID NO: 838507 - DNA, 25 bp, Homo sapien
gttggatggattcttactgtactca

SEQ ID NO: 838508 - DNA, 25 bp, Homo sapien
aaaccaggatgcgaccagcttcaat

SEQ ID NO: 838509 - DNA, 25 bp, Homo sapien
gctttttctatacctgttggatgga

SEQ ID NO: 838510 - DNA, 25 bp, Homo sapien
tactcattgaagatggaaatgggca

SEQ ID NO: 838511 - DNA, 25 bp, Homo sapien
tggctgtccgtgtgaaggattgcca

SEQ ID NO: 838512 - DNA, 25 bp, Homo sapien
gctgctggcttctcgagaaatattc

SEQ ID NO: 838513 - DNA, 25 bp, Homo sapien
tcgagaaatattcggcatggctgtc

SEQ ID NO: 838514 - DNA, 25 bp, Homo sapien
ctgtccgtgtgaaggattgccagga

SEQ ID NO: 838515 - DNA, 25 bp, Homo sapien
tacaggtgcgttctttgaagaaaac

SEQ ID NO: 838516 - DNA, 25 bp, Homo sapien
tttcttacaggtgcgttctttgaag

SEQ ID NO: 838517 - DNA, 25 bp, Homo sapien
tctttcttacaggtgcgttctttga

SEQ ID NO: 838518 - DNA, 25 bp, Homo sapien
cttacaggtgcgttctttgaagaaa

SEQ ID NO: 838519 - DNA, 25 bp, Homo sapien
gagaaagatagaggactgtctggca

SEQ ID NO: 838520 - DNA, 25 bp, Homo sapien
ggcctagaggttggatccacagaag

SEQ ID NO: 838521 - DNA, 25 bp, Homo sapien
gaagacgcattctgtctgtatcctg

SEQ ID NO: 838522 - DNA, 25 bp, Homo sapien
tagaggactgtctggcatagaaatg

SEQ ID NO: 838523 - DNA, 25 bp, Homo sapien
gaaacttgtgagtcagtttccagcg

SEQ ID NO: 838524 - DNA, 25 bp, Homo sapien
ggagggaaacttgtgagtcagtttc

SEQ ID NO: 838525 - DNA, 25 bp, Homo sapien
tcagtttccagcgatcgggagcagg

SEQ ID NO: 838526 - DNA, 25 bp, Homo sapien
cttgtgagtcagtttccagcgatcg

SEQ ID NO: 838527 - DNA, 25 bp, Homo sapien
cttcagttccttgacctgagctttt

SEQ ID NO: 838528 - DNA, 25 bp, Homo sapien
tgccagtcatcaaggcagttactgt

SEQ ID NO: 838529 - DNA, 25 bp, Homo sapien
ctgccagtcatcaaggcagttactg

SEQ ID NO: 838530 - DNA, 25 bp, Homo sapien
acactgccagtcatcaaggcagtta

SEQ ID NO: 838531 - DNA, 25 bp, Homo sapien
aatggggacttctatgattaaggtc

SEQ ID NO: 838532 - DNA, 25 bp, Homo sapien
aacaagttggaatggggacttctat

SEQ ID NO: 838533 - DNA, 25 bp, Homo sapien
gacccaagtcttccgtacaaggcaa

SEQ ID NO: 838534 - DNA, 25 bp, Homo sapien
tcttccgtacaaggcaaacaagttg

SEQ ID NO: 838535 - DNA, 25 bp, Homo sapien
tcaaggcttgatgctgaaatgtcat

SEQ ID NO: 838536 - DNA, 25 bp, Homo sapien
ggacttttggagctttgatatggat

SEQ ID NO: 838537 - DNA, 25 bp, Homo sapien
tgatatggattaaactcctcctgag

SEQ ID NO: 838538 - DNA, 25 bp, Homo sapien
tgtacaactgatggccttgttgagt

SEQ ID NO: 838539 - DNA, 25 bp, Homo sapien
gggagctgcagccaactgattgcag

SEQ ID NO: 838540 - DNA, 25 bp, Homo sapien
cagaggcccaaatatgggactcatt

SEQ ID NO: 838541 - DNA, 25 bp, Homo sapien
tgcagtgtgtgtcagcccgcctggg

SEQ ID NO: 838542 - DNA, 25 bp, Homo sapien
ctgcagccaactgattgcagaggcc

SEQ ID NO: 838543 - DNA, 25 bp, Homo sapien
tccccgaagtgtgcagaatgaagtc

SEQ ID NO: 838544 - DNA, 25 bp, Homo sapien
tggtcctccccgaagtgtgcagaat

SEQ ID NO: 838545 - DNA, 25 bp, Homo sapien
ggtcctggtcctccccgaagtgtgc

SEQ ID NO: 838546 - DNA, 25 bp, Homo sapien
gtgtgcagaatgaagtccctttcta

SEQ ID NO: 838547 - DNA, 25 bp, Homo sapien
gagagcatctaggagaagtatgccg

SEQ ID NO: 838548 - DNA, 25 bp, Homo sapien
gaagacgcagagagcatctaggaga

SEQ ID NO: 838549 - DNA, 25 bp, Homo sapien
atgccgtgtgctacttgtgttttac

SEQ ID NO: 838550 - DNA, 25 bp, Homo sapien
ctaggagaagtatgccgtgtgctac

SEQ ID NO: 838551 - DNA, 25 bp, Homo sapien
ggttttggactgtctggactagaaa

SEQ ID NO: 838552 - DNA, 25 bp, Homo sapien
ctgccacctcggcactttggttttg

SEQ ID NO: 838553 - DNA, 25 bp, Homo sapien
ctaggcagggtttattgctaatccc

SEQ ID NO: 838554 - DNA, 25 bp, Homo sapien
catgcagacttccactgtggttggg

SEQ ID NO: 838555 - DNA, 25 bp, Homo sapien
tgcataaccatttcacttgtgtgct

SEQ ID NO: 838556 - DNA, 25 bp, Homo sapien
tgtgctttgggtctcttagaggaca

SEQ ID NO: 838557 - DNA, 25 bp, Homo sapien
ttgtaagtattaactgtccccacag

SEQ ID NO: 838558 - DNA, 25 bp, Homo sapien
ttttataatcgttgtgttgttgcat

SEQ ID NO: 838559 - DNA, 25 bp, Homo sapien
cttccatagatgtttcctgagccgc

SEQ ID NO: 838560 - DNA, 25 bp, Homo sapien
cttgaggttttcatccacggctctc

SEQ ID NO: 838561 - DNA, 25 bp, Homo sapien
gagccgcactctgtgcccagtgctg

SEQ ID NO: 838562 - DNA, 25 bp, Homo sapien
ttcgcctcatcccaccatgcatggg

SEQ ID NO: 838563 - DNA, 25 bp, Homo sapien
gctttggagcctgtatggagaaatc

SEQ ID NO: 838564 - DNA, 25 bp, Homo sapien
tttttacaggtgtctgcaatgcttg

SEQ ID NO: 838565 - DNA, 25 bp, Homo sapien
gcctatagctctagcagctttggag

SEQ ID NO: 838566 - DNA, 25 bp, Homo sapien
tcatgtattttaggagcctgggcca

SEQ ID NO: 838567 - DNA, 25 bp, Homo sapien
ccgcccctgagtgcagaacctggaa

SEQ ID NO: 838568 - DNA, 25 bp, Homo sapien
gcccgattgtgctttctcaggaaaa

SEQ ID NO: 838569 - DNA, 25 bp, Homo sapien
acaataatgactgggccgcccctga

SEQ ID NO: 838570 - DNA, 25 bp, Homo sapien
aaagcagccggccaacaataatgac

SEQ ID NO: 838571 - DNA, 25 bp, Homo sapien
taaatagccttaagccttagctggg

SEQ ID NO: 838572 - DNA, 25 bp, Homo sapien
tgaggcctatggttgcagggcatct

SEQ ID NO: 838573 - DNA, 25 bp, Homo sapien
tgtctgcagctaaaactgccggcct

SEQ ID NO: 838574 - DNA, 25 bp, Homo sapien
tcttatgagtgagggagtgctgccc

SEQ ID NO: 838575 - DNA, 25 bp, Homo sapien
gtttgggatcgacagcaggtggcaa

SEQ ID NO: 838576 - DNA, 25 bp, Homo sapien
tgtttgggatcgacagcaggtggca

SEQ ID NO: 838577 - DNA, 25 bp, Homo sapien
ttctgtttgggatcgacagcaggtg

SEQ ID NO: 838578 - DNA, 25 bp, Homo sapien
ttgttctgtttgggatcgacagcag

SEQ ID NO: 838579 - DNA, 25 bp, Homo sapien
gctagctgagcctgtaatcatgctt

SEQ ID NO: 838580 - DNA, 25 bp, Homo sapien
aggtagctagctgagcctgtaatca

SEQ ID NO: 838581 - DNA, 25 bp, Homo sapien
ctggaggtagctagctgagcctgta

SEQ ID NO: 838582 - DNA, 25 bp, Homo sapien
tagctgagcctgtaatcatgcttac

SEQ ID NO: 838583 - DNA, 25 bp, Homo sapien
tcagctgtaggcgacagcagacagc

SEQ ID NO: 838584 - DNA, 25 bp, Homo sapien
tttcagacgcccctttcacattagt

SEQ ID NO: 838585 - DNA, 25 bp, Homo sapien
cggacccaagccctctattggtcag

SEQ ID NO: 838586 - DNA, 25 bp, Homo sapien
cattagtcaagcctccagtccatca

SEQ ID NO: 838587 - DNA, 25 bp, Homo sapien
gacatatccttgctacattggcctt

SEQ ID NO: 838588 - DNA, 25 bp, Homo sapien
ggacatatccttgctacattggcct

SEQ ID NO: 838589 - DNA, 25 bp, Homo sapien
catatccttgctacattggcctttt

SEQ ID NO: 838590 - DNA, 25 bp, Homo sapien
ttttcacattgcagttcatggcatg

SEQ ID NO: 838591 - DNA, 25 bp, Homo sapien
tgtggacttatgaaggctcgcctgg

SEQ ID NO: 838592 - DNA, 25 bp, Homo sapien
tcaggaagttgaacgtggcttagct

SEQ ID NO: 838593 - DNA, 25 bp, Homo sapien
tacctgacaggtcaggaagttgaac

SEQ ID NO: 838594 - DNA, 25 bp, Homo sapien
ctgtggacttatgaaggctcgcctg

SEQ ID NO: 838595 - DNA, 25 bp, Homo sapien
ctcttcctgttgtcctggggccttt

SEQ ID NO: 838596 - DNA, 25 bp, Homo sapien
ctgtagctcttcctgttgtcctggg

SEQ ID NO: 838597 - DNA, 25 bp, Homo sapien
gtagctcttcctgttgtcctggggc

SEQ ID NO: 838598 - DNA, 25 bp, Homo sapien
agctcttcctgttgtcctggggcct

SEQ ID NO: 838599 - DNA, 25 bp, Homo sapien
ggctgagagattggtacattaattt

SEQ ID NO: 838600 - DNA, 25 bp, Homo sapien
gagattggtacattaattttagcag

SEQ ID NO: 838601 - DNA, 25 bp, Homo sapien
gattggtacattaattttagcagat

SEQ ID NO: 838602 - DNA, 25 bp, Homo sapien
tgagagattggtacattaattttag

SEQ ID NO: 838603 - DNA, 25 bp, Homo sapien
gctcctggacgatagaaggtggtaa

SEQ ID NO: 838604 - DNA, 25 bp, Homo sapien
aattcataaacgagctgtaaatggg

SEQ ID NO: 838605 - DNA, 25 bp, Homo sapien
tctgtgatcctattccaatgatggg

SEQ ID NO: 838606 - DNA, 25 bp, Homo sapien
ggccaagttgcttctaacattggtt

SEQ ID NO: 838607 - DNA, 25 bp, Homo sapien
ttctttgctgtattaggttggaaat

SEQ ID NO: 838608 - DNA, 25 bp, Homo sapien
acttctgatcaatatatttctttgc

SEQ ID NO: 838609 - DNA, 25 bp, Homo sapien
tatttctttgctgtattaggttgga

SEQ ID NO: 838610 - DNA, 25 bp, Homo sapien
tatatttctttgctgtattaggttg

SEQ ID NO: 838611 - DNA, 25 bp, Homo sapien
aaacttccctgaggatcttcactgt

SEQ ID NO: 838612 - DNA, 25 bp, Homo sapien
tcttcactgtcaaagcactctaaaa

SEQ ID NO: 838613 - DNA, 25 bp, Homo sapien
ttcactgtcaaagcactctaaaagc

SEQ ID NO: 838614 - DNA, 25 bp, Homo sapien
actgtcaaagcactctaaaagctgc

SEQ ID NO: 838615 - DNA, 25 bp, Homo sapien
tagctgccagaagagaggttccatg

SEQ ID NO: 838616 - DNA, 25 bp, Homo sapien
cattgatgcagtgagggtgctatcc

SEQ ID NO: 838617 - DNA, 25 bp, Homo sapien
cttcagtgtgttggatatcaagcca

SEQ ID NO: 838618 - DNA, 25 bp, Homo sapien
tattccggtaatagagcgcttgctc

SEQ ID NO: 838619 - DNA, 25 bp, Homo sapien
ctggtgattggctttggttagattt

SEQ ID NO: 838620 - DNA, 25 bp, Homo sapien
gattggctttggttagattttctat

SEQ ID NO: 838621 - DNA, 25 bp, Homo sapien
ttctattttaaccaatgcttcttcc

SEQ ID NO: 838622 - DNA, 25 bp, Homo sapien
ttttaaccaatgcttcttcctgttc

SEQ ID NO: 838623 - DNA, 25 bp, Homo sapien
gttacagccagcttttgctaccagg

SEQ ID NO: 838624 - DNA, 25 bp, Homo sapien
cagcagtaaactccacaacagaggg

SEQ ID NO: 838625 - DNA, 25 bp, Homo sapien
gaaatcagggcgaatgttacagcca

SEQ ID NO: 838626 - DNA, 25 bp, Homo sapien
cattcccatatggagggtgcagcag

SEQ ID NO: 838627 - DNA, 25 bp, Homo sapien
gaatcgtgggagacagatgaacagc

SEQ ID NO: 838628 - DNA, 25 bp, Homo sapien
gcaatgcctggttaaaagttcctct

SEQ ID NO: 838629 - DNA, 25 bp, Homo sapien
cctctaggcttggaaagttgtcaca

SEQ ID NO: 838630 - DNA, 25 bp, Homo sapien
tatatgtatccaattgcaatgcctg

SEQ ID NO: 838631 - DNA, 25 bp, Homo sapien
ctcagggtaatccagtagagcaacc

SEQ ID NO: 838632 - DNA, 25 bp, Homo sapien
acaccaccctcagggtaatccagta

SEQ ID NO: 838633 - DNA, 25 bp, Homo sapien
catctggaatcatgtgtcaccagta

SEQ ID NO: 838634 - DNA, 25 bp, Homo sapien
aagttttactttatctggcctctgt

SEQ ID NO: 838635 - DNA, 25 bp, Homo sapien
ggaaagtccagctgtaaattaactg

SEQ ID NO: 838636 - DNA, 25 bp, Homo sapien
gtccagctgtaaattaactgcattg

SEQ ID NO: 838637 - DNA, 25 bp, Homo sapien
gagacaaagagtttacaggtggaaa

SEQ ID NO: 838638 - DNA, 25 bp, Homo sapien
gagtttacaggtggaaagtccagct

SEQ ID NO: 838639 - DNA, 25 bp, Homo sapien
cttgtctgagtgtcaaaatgtcatc

SEQ ID NO: 838640 - DNA, 25 bp, Homo sapien
ctttaaccagcatatcataaaactg

SEQ ID NO: 838641 - DNA, 25 bp, Homo sapien
accctttaaccagcatatcataaaa

SEQ ID NO: 838642 - DNA, 25 bp, Homo sapien
gcccttatcttgtctgagtgtcaaa

SEQ ID NO: 838643 - DNA, 25 bp, Homo sapien
ctgaacaccacagggagtcttttta

SEQ ID NO: 838644 - DNA, 25 bp, Homo sapien
cacagggagtctttttagaaaggtg

SEQ ID NO: 838645 - DNA, 25 bp, Homo sapien
caccacagggagtctttttagaaag

SEQ ID NO: 838646 - DNA, 25 bp, Homo sapien
gaacaccacagggagtctttttaga

SEQ ID NO: 838647 - DNA, 25 bp, Homo sapien
gtggagaacctgactgtaggagtga

SEQ ID NO: 838648 - DNA, 25 bp, Homo sapien
tgtggagaacctgactgtaggagtg

SEQ ID NO: 838649 - DNA, 25 bp, Homo sapien
tggagaacctgactgtaggagtgat

SEQ ID NO: 838650 - DNA, 25 bp, Homo sapien
tccgatgatgggaatgctgtttcca

SEQ ID NO: 838651 - DNA, 25 bp, Homo sapien
gtttccatcacttagaggtatgcgg

SEQ ID NO: 838652 - DNA, 25 bp, Homo sapien
tctgagtaggtaccaagtccgatga

SEQ ID NO: 838653 - DNA, 25 bp, Homo sapien
cacttagaggtatgcggtgacttgc

SEQ ID NO: 838654 - DNA, 25 bp, Homo sapien
tgaagtgacaaagaggttgggtttg

SEQ ID NO: 838655 - DNA, 25 bp, Homo sapien
ctgaagtgacaaagaggttgggttt

SEQ ID NO: 838656 - DNA, 25 bp, Homo sapien
cttcaccgatgttgcacaggctccc

SEQ ID NO: 838657 - DNA, 25 bp, Homo sapien
tcaccgatgttgcacaggctccctt

SEQ ID NO: 838658 - DNA, 25 bp, Homo sapien
accgatgttgcacaggctcccttag

SEQ ID NO: 838659 - DNA, 25 bp, Homo sapien
cgatgttgcacaggctcccttaggg

SEQ ID NO: 838660 - DNA, 25 bp, Homo sapien
gatgtaggccccatcaatatgtcgg

SEQ ID NO: 838661 - DNA, 25 bp, Homo sapien
ccaacttcgtgttcattttggtaga

SEQ ID NO: 838662 - DNA, 25 bp, Homo sapien
atgtcggtaccctgtgtcaatagca

SEQ ID NO: 838663 - DNA, 25 bp, Homo sapien
tagaagatatcttccctccgcacct

SEQ ID NO: 838664 - DNA, 25 bp, Homo sapien
gtgcagcttcaagaggtacaattgc

SEQ ID NO: 838665 - DNA, 25 bp, Homo sapien
agaggtacaattgcctagacagcca

SEQ ID NO: 838666 - DNA, 25 bp, Homo sapien
cttccactgagagtgcagcttcaag

SEQ ID NO: 838667 - DNA, 25 bp, Homo sapien
gctactcacatacacttgacctaaa

SEQ ID NO: 838668 - DNA, 25 bp, Homo sapien
ctgggacatgatttgtagcccatag

SEQ ID NO: 838669 - DNA, 25 bp, Homo sapien
tctgggacatgatttgtagcccata

SEQ ID NO: 838670 - DNA, 25 bp, Homo sapien
ttaaaggccatgggtacttcaatga

SEQ ID NO: 838671 - DNA, 25 bp, Homo sapien
aaaggccatgggtacttcaatgatg

SEQ ID NO: 838672 - DNA, 25 bp, Homo sapien
cttaaaggccatgggtacttcaatg

SEQ ID NO: 838673 - DNA, 25 bp, Homo sapien
taaaggccatgggtacttcaatgat

SEQ ID NO: 838674 - DNA, 25 bp, Homo sapien
gtcttgtgtgcactgtcctctcact

SEQ ID NO: 838675 - DNA, 25 bp, Homo sapien
actgtcctctcactctgtacagctg

SEQ ID NO: 838676 - DNA, 25 bp, Homo sapien
ctgtcttgtgtgcactgtcctctca

SEQ ID NO: 838677 - DNA, 25 bp, Homo sapien
tgtcttgtgtgcactgtcctctcac

SEQ ID NO: 838678 - DNA, 25 bp, Homo sapien
aagtggcacacagatttgacttgtg

SEQ ID NO: 838679 - DNA, 25 bp, Homo sapien
ttgacttgtgatataaccatttgcc

SEQ ID NO: 838680 - DNA, 25 bp, Homo sapien
ctcccaagtggcacacagatttgac

SEQ ID NO: 838681 - DNA, 25 bp, Homo sapien
cacagatttgacttgtgatataacc

SEQ ID NO: 838682 - DNA, 25 bp, Homo sapien
aaagtaaagggtgcatctctctcca

SEQ ID NO: 838683 - DNA, 25 bp, Homo sapien
tgtaggcatcatattaacaacttga

SEQ ID NO: 838684 - DNA, 25 bp, Homo sapien
tatggttaggaatgcctgttctgac

SEQ ID NO: 838685 - DNA, 25 bp, Homo sapien
tacctgtacttatggttaggaatgc

SEQ ID NO: 838686 - DNA, 25 bp, Homo sapien
ccaagccagcgtctttgcaagcttc

SEQ ID NO: 838687 - DNA, 25 bp, Homo sapien
tgcctgcggttaaaattggacactc

SEQ ID NO: 838688 - DNA, 25 bp, Homo sapien
tggacactcccagggatttcaccaa

SEQ ID NO: 838689 - DNA, 25 bp, Homo sapien
gggatttcaccaagccagcgtcttt

SEQ ID NO: 838690 - DNA, 25 bp, Homo sapien
ggctgggtgaaatacggatggcact

SEQ ID NO: 838691 - DNA, 25 bp, Homo sapien
agttttggctgggtgaaatacggat

SEQ ID NO: 838692 - DNA, 25 bp, Homo sapien
gggtgaaatacggatggcactcaac

SEQ ID NO: 838693 - DNA, 25 bp, Homo sapien
agagttttggctgggtgaaatacgg

SEQ ID NO: 838694 - DNA, 25 bp, Homo sapien
tgcaggtcacctgtaaccagtttct

SEQ ID NO: 838695 - DNA, 25 bp, Homo sapien
tactcgtagtatgggaagatcaagc

SEQ ID NO: 838696 - DNA, 25 bp, Homo sapien
cactgaatggagagttactcgtagt

SEQ ID NO: 838697 - DNA, 25 bp, Homo sapien
caaggcaagtttatggagctgcctc

SEQ ID NO: 838698 - DNA, 25 bp, Homo sapien
acaaaggtggagaagaaacattcac

SEQ ID NO: 838699 - DNA, 25 bp, Homo sapien
caaaggtggagaagaaacattcacc

SEQ ID NO: 838700 - DNA, 25 bp, Homo sapien
taacaaaggtggagaagaaacattc

SEQ ID NO: 838701 - DNA, 25 bp, Homo sapien
aacaaaggtggagaagaaacattca

SEQ ID NO: 838702 - DNA, 25 bp, Homo sapien
atttgagctgctgtcttattgtacc

SEQ ID NO: 838703 - DNA, 25 bp, Homo sapien
caaaacaatttgagctgctgtctta

SEQ ID NO: 838704 - DNA, 25 bp, Homo sapien
tgagctgctgtcttattgtaccttt

SEQ ID NO: 838705 - DNA, 25 bp, Homo sapien
gaaacgcaaaacaatttgagctgct

SEQ ID NO: 838706 - DNA, 25 bp, Homo sapien
tattgtggctatcttcctatgtcag

SEQ ID NO: 838707 - DNA, 25 bp, Homo sapien
catctatagggtaagactgctgagt

SEQ ID NO: 838708 - DNA, 25 bp, Homo sapien
tggtaagagcacataagatgcactc

SEQ ID NO: 838709 - DNA, 25 bp, Homo sapien
ctgctgagtcaatggataagtgtat

SEQ ID NO: 838710 - DNA, 25 bp, Homo sapien
tctctggtacaaaattgcgatttgc

SEQ ID NO: 838711 - DNA, 25 bp, Homo sapien
ccctaaagagtgagaattggctgtg

SEQ ID NO: 838712 - DNA, 25 bp, Homo sapien
aattcatggttattgggtgagtcta

SEQ ID NO: 838713 - DNA, 25 bp, Homo sapien
tgttgctccttgctttcatacccag

SEQ ID NO: 838714 - DNA, 25 bp, Homo sapien
gcaattctacaaagcggacattttt

SEQ ID NO: 838715 - DNA, 25 bp, Homo sapien
caattctacaaagcggacattttta

SEQ ID NO: 838716 - DNA, 25 bp, Homo sapien
atgagcaattctacaaagcggacat

SEQ ID NO: 838717 - DNA, 25 bp, Homo sapien
gagcaattctacaaagcggacattt

SEQ ID NO: 838718 - DNA, 25 bp, Homo sapien
gccttcaccgaagtcacaaaatgtc
